United States Patent Application Publication US 2018/0305689 A1 - sequence listing, part 125

SEQ ID NO: 1828481 - RNA, 19 nt, Artificial Sequence
  Description of Artificial Sequence: Synthetic oligonucleotide
  Sense strand starting at position 3548 of SEQ ID NO: 1563742
ggccguuuguggcucugaa

SEQ ID NO: 1828482 - RNA, 19 nt, Artificial Sequence
  Description of Artificial Sequence: Synthetic oligonucleotide
  Antisense strand to SEQ ID NO: 1828481
uucagagccacaaacggcc

SEQ ID NO: 1828483 - RNA, 19 nt, Artificial Sequence
  Description of Artificial Sequence: Synthetic oligonucleotide
  Sense strand starting at position 3549 of SEQ ID NO: 1563742
gccguuuguggcucugaau

SEQ ID NO: 1828484 - RNA, 19 nt, Artificial Sequence
  Description of Artificial Sequence: Synthetic oligonucleotide
  Antisense strand to SEQ ID NO: 1828483
auucagagccacaaacggc

SEQ ID NO: 1828485 - RNA, 19 nt, Artificial Sequence
  Description of Artificial Sequence: Synthetic oligonucleotide
  Sense strand starting at position 3552 of SEQ ID NO: 1563742
guuuguggcucugaauuga

SEQ ID NO: 1828486 - RNA, 19 nt, Artificial Sequence
  Description of Artificial Sequence: Synthetic oligonucleotide
  Antisense strand to SEQ ID NO: 1828485
ucaauucagagccacaaac

SEQ ID NO: 1828487 - RNA, 19 nt, Artificial Sequence
  Description of Artificial Sequence: Synthetic oligonucleotide
  Sense strand starting at position 3591 of SEQ ID NO: 1563742
cuccgugucauagguccaa

SEQ ID NO: 1828488 - RNA, 19 nt, Artificial Sequence
  Description of Artificial Sequence: Synthetic oligonucleotide
  Antisense strand to SEQ ID NO: 1828487
uuggaccuaugacacggag

SEQ ID NO: 1828489 - RNA, 19 nt, Artificial Sequence
  Description of Artificial Sequence: Synthetic oligonucleotide
  Sense strand starting at position 3595 of SEQ ID NO: 1563742
gugucauagguccaagugu

SEQ ID NO: 1828490 - RNA, 19 nt, Artificial Sequence
  Description of Artificial Sequence: Synthetic oligonucleotide
  Antisense strand to SEQ ID NO: 1828489
acacuuggaccuaugacac

SEQ ID NO: 1828491 - RNA, 19 nt, Artificial Sequence
  Description of Artificial Sequence: Synthetic oligonucleotide
  Sense strand starting at position 3604 of SEQ ID NO: 1563742
guccaaguguuggcaugua

SEQ ID NO: 1828492 - RNA, 19 nt, Artificial Sequence
  Description of Artificial Sequence: Synthetic oligonucleotide
  Antisense strand to SEQ ID NO: 1828491
uacaugccaacacuuggac

SEQ ID NO: 1828493 - RNA, 19 nt, Artificial Sequence
  Description of Artificial Sequence: Synthetic oligonucleotide
  Sense strand starting at position 3616 of SEQ ID NO: 1563742
gcauguauuguccagugaa

SEQ ID NO: 1828494 - RNA, 19 nt, Artificial Sequence
  Description of Artificial Sequence: Synthetic oligonucleotide
  Antisense strand to SEQ ID NO: 1828493
uucacuggacaauacaugc

SEQ ID NO: 1828495 - RNA, 19 nt, Artificial Sequence
  Description of Artificial Sequence: Synthetic oligonucleotide
  Sense strand starting at position 3619 of SEQ ID NO: 1563742
uguauuguccagugaaucc

SEQ ID NO: 1828496 - RNA, 19 nt, Artificial Sequence
  Description of Artificial Sequence: Synthetic oligonucleotide
  Antisense strand to SEQ ID NO: 1828495
ggauucacuggacaauaca

SEQ ID NO: 1828497 - RNA, 19 nt, Artificial Sequence
  Description of Artificial Sequence: Synthetic oligonucleotide
  Sense strand starting at position 3738 of SEQ ID NO: 1563742
uugcauuugugaccgagca

SEQ ID NO: 1828498 - RNA, 19 nt, Artificial Sequence
  Description of Artificial Sequence: Synthetic oligonucleotide
  Antisense strand to SEQ ID NO: 1828497
ugcucggucacaaaugcaa

SEQ ID NO: 1828499 - RNA, 19 nt, Artificial Sequence
  Description of Artificial Sequence: Synthetic oligonucleotide
  Sense strand starting at position 3740 of SEQ ID NO: 1563742
gcauuugugaccgagcacu

SEQ ID NO: 1828500 - RNA, 19 nt, Artificial Sequence
  Description of Artificial Sequence: Synthetic oligonucleotide
  Antisense strand to SEQ ID NO: 1828499
agugcucggucacaaaugc

SEQ ID NO: 1828501 - RNA, 19 nt, Artificial Sequence
  Description of Artificial Sequence: Synthetic oligonucleotide
  Sense strand starting at position 3758 of SEQ ID NO: 1563742
uuggaucugucucgcauau

SEQ ID NO: 1828502 - RNA, 19 nt, Artificial Sequence
  Description of Artificial Sequence: Synthetic oligonucleotide
  Antisense strand to SEQ ID NO: 1828501
auaugcgagacagauccaa

SEQ ID NO: 1828503 - RNA, 19 nt, Artificial Sequence
  Description of Artificial Sequence: Synthetic oligonucleotide
  Sense strand starting at position 87 of SEQ ID NO: 1563743
gucuccugccagugaggaa

SEQ ID NO: 1828504 - RNA, 19 nt, Artificial Sequence
  Description of Artificial Sequence: Synthetic oligonucleotide
  Antisense strand to SEQ ID NO: 1828503
uuccucacuggcaggagac

SEQ ID NO: 1828505 - RNA, 19 nt, Artificial Sequence
  Description of Artificial Sequence: Synthetic oligonucleotide
  Sense strand starting at position 186 of SEQ ID NO: 1563743
gccaucucuuagguaacca

SEQ ID NO: 1828506 - RNA, 19 nt, Artificial Sequence
  Description of Artificial Sequence: Synthetic oligonucleotide
  Antisense strand to SEQ ID NO: 1828505
ugguuaccuaagagauggc

SEQ ID NO: 1828507 - RNA, 19 nt, Artificial Sequence
  Description of Artificial Sequence: Synthetic oligonucleotide
  Sense strand starting at position 246 of SEQ ID NO: 1563743
cugagucaugcagagcuca

SEQ ID NO: 1828508 - RNA, 19 nt, Artificial Sequence
  Description of Artificial Sequence: Synthetic oligonucleotide
  Antisense strand to SEQ ID NO: 1828507
ugagcucugcaugacucag

SEQ ID NO: 1828509 - RNA, 19 nt, Artificial Sequence
  Description of Artificial Sequence: Synthetic oligonucleotide
  Sense strand starting at position 281 of SEQ ID NO: 1563743
uugggugucaccuaggcaa

SEQ ID NO: 1828510 - RNA, 19 nt, Artificial Sequence
  Description of Artificial Sequence: Synthetic oligonucleotide
  Antisense strand to SEQ ID NO: 1828509
uugccuaggugacacccaa

SEQ ID NO: 1828511 - RNA, 19 nt, Artificial Sequence
  Description of Artificial Sequence: Synthetic oligonucleotide
  Sense strand starting at position 283 of SEQ ID NO: 1563743
gggugucaccuaggcaaca

SEQ ID NO: 1828512 - RNA, 19 nt, Artificial Sequence
  Description of Artificial Sequence: Synthetic oligonucleotide
  Antisense strand to SEQ ID NO: 1828511
uguugccuaggugacaccc

SEQ ID NO: 1828513 - RNA, 19 nt, Artificial Sequence
  Description of Artificial Sequence: Synthetic oligonucleotide
  Sense strand starting at position 302 of SEQ ID NO: 1563743
gacugcuuccgggagagaa

SEQ ID NO: 1828514 - RNA, 19 nt, Artificial Sequence
  Description of Artificial Sequence: Synthetic oligonucleotide
  Antisense strand to SEQ ID NO: 1828513
uucucucccggaagcaguc

SEQ ID NO: 1828515 - RNA, 19 nt, Artificial Sequence
  Description of Artificial Sequence: Synthetic oligonucleotide
  Sense strand starting at position 622 of SEQ ID NO: 1563743
aggucaagcuuucccauga

SEQ ID NO: 1828516 - RNA, 19 nt, Artificial Sequence
  Description of Artificial Sequence: Synthetic oligonucleotide
  Antisense strand to SEQ ID NO: 1828515
ucaugggaaagcuugaccu

SEQ ID NO: 1828517 - RNA, 19 nt, Artificial Sequence
  Description of Artificial Sequence: Synthetic oligonucleotide
  Sense strand starting at position 694 of SEQ ID NO: 1563743
caagaugucccgcacaauc

SEQ ID NO: 1828518 - RNA, 19 nt, Artificial Sequence
  Description of Artificial Sequence: Synthetic oligonucleotide
  Antisense strand to SEQ ID NO: 1828517
gauugugcgggacaucuug

SEQ ID NO: 1828519 - RNA, 19 nt, Artificial Sequence
  Description of Artificial Sequence: Synthetic oligonucleotide
  Sense strand starting at position 834 of SEQ ID NO: 1563743
ugggaugccaguuggucaa

SEQ ID NO: 1828520 - RNA, 19 nt, Artificial Sequence
  Description of Artificial Sequence: Synthetic oligonucleotide
  Antisense strand to SEQ ID NO: 1828519
uugaccaacuggcauccca

SEQ ID NO: 1828521 - RNA, 19 nt, Artificial Sequence
  Description of Artificial Sequence: Synthetic oligonucleotide
  Sense strand starting at position 836 of SEQ ID NO: 1563743
ggaugccaguuggucaaua

SEQ ID NO: 1828522 - RNA, 19 nt, Artificial Sequence
  Description of Artificial Sequence: Synthetic oligonucleotide
  Antisense strand to SEQ ID NO: 1828521
uauugaccaacuggcaucc

SEQ ID NO: 1828523 - RNA, 19 nt, Artificial Sequence
  Description of Artificial Sequence: Synthetic oligonucleotide
  Sense strand starting at position 837 of SEQ ID NO: 1563743
gaugccaguuggucaauau

SEQ ID NO: 1828524 - RNA, 19 nt, Artificial Sequence
  Description of Artificial Sequence: Synthetic oligonucleotide
  Antisense strand to SEQ ID NO: 1828523
auauugaccaacuggcauc

SEQ ID NO: 1828525 - RNA, 19 nt, Artificial Sequence
  Description of Artificial Sequence: Synthetic oligonucleotide
  Sense strand starting at position 838 of SEQ ID NO: 1563743
augccaguuggucaauauu

SEQ ID NO: 1828526 - RNA, 19 nt, Artificial Sequence
  Description of Artificial Sequence: Synthetic oligonucleotide
  Antisense strand to SEQ ID NO: 1828525
aauauugaccaacuggcau

SEQ ID NO: 1828527 - RNA, 19 nt, Artificial Sequence
  Description of Artificial Sequence: Synthetic oligonucleotide
  Sense strand starting at position 901 of SEQ ID NO: 1563743
gcaggucauccacgaugau

SEQ ID NO: 1828528 - RNA, 19 nt, Artificial Sequence
  Description of Artificial Sequence: Synthetic oligonucleotide
  Antisense strand to SEQ ID NO: 1828527
aucaucguggaugaccugc

SEQ ID NO: 1828529 - RNA, 19 nt, Artificial Sequence
  Description of Artificial Sequence: Synthetic oligonucleotide
  Sense strand starting at position 913 of SEQ ID NO: 1563743
cgaugaugagaagaacguu

SEQ ID NO: 1828530 - RNA, 19 nt, Artificial Sequence
  Description of Artificial Sequence: Synthetic oligonucleotide
  Antisense strand to SEQ ID NO: 1828529
aacguucuucucaucaucg

SEQ ID NO: 1828531 - RNA, 19 nt, Artificial Sequence
  Description of Artificial Sequence: Synthetic oligonucleotide
  Sense strand starting at position 1127 of SEQ ID NO: 1563743
aggguuaggcuuuggucau

SEQ ID NO: 1828532 - RNA, 19 nt, Artificial Sequence
  Description of Artificial Sequence: Synthetic oligonucleotide
  Antisense strand to SEQ ID NO: 1828531
augaccaaagccuaacccu

SEQ ID NO: 1828533 - RNA, 19 nt, Artificial Sequence
  Description of Artificial Sequence: Synthetic oligonucleotide
  Sense strand starting at position 1166 of SEQ ID NO: 1563743
aagcgagauagugagugaa

SEQ ID NO: 1828534 - RNA, 19 nt, Artificial Sequence
  Description of Artificial Sequence: Synthetic oligonucleotide
  Antisense strand to SEQ ID NO: 1828533
uucacucacuaucucgcuu

SEQ ID NO: 1828535 - RNA, 19 nt, Artificial Sequence
  Description of Artificial Sequence: Synthetic oligonucleotide
  Sense strand starting at position 1168 of SEQ ID NO: 1563743
gcgagauagugagugaaag

SEQ ID NO: 1828536 - RNA, 19 nt, Artificial Sequence
  Description of Artificial Sequence: Synthetic oligonucleotide
  Antisense strand to SEQ ID NO: 1828535
cuuucacucacuaucucgc

SEQ ID NO: 1828537 - RNA, 19 nt, Artificial Sequence
  Description of Artificial Sequence: Synthetic oligonucleotide
  Sense strand starting at position 1169 of SEQ ID NO: 1563743
cgagauagugagugaaaga

SEQ ID NO: 1828538 - RNA, 19 nt, Artificial Sequence
  Description of Artificial Sequence: Synthetic oligonucleotide
  Antisense strand to SEQ ID NO: 1828537
ucuuucacucacuaucucg

SEQ ID NO: 1828539 - RNA, 19 nt, Artificial Sequence
  Description of Artificial Sequence: Synthetic oligonucleotide
  Sense strand starting at position 1221 of SEQ ID NO: 1563743
gagaaugauguaugcagga

SEQ ID NO: 1828540 - RNA, 19 nt, Artificial Sequence
  Description of Artificial Sequence: Synthetic oligonucleotide
  Antisense strand to SEQ ID NO: 1828539
uccugcauacaucauucuc

SEQ ID NO: 1828541 - RNA, 19 nt, Artificial Sequence
  Description of Artificial Sequence: Synthetic oligonucleotide
  Sense strand starting at position 2007 of SEQ ID NO: 1563743
gcgcgucauccugcagcaa

SEQ ID NO: 1828542 - RNA, 19 nt, Artificial Sequence
  Description of Artificial Sequence: Synthetic oligonucleotide
  Antisense strand to SEQ ID NO: 1828541
uugcugcaggaugacgcgc

SEQ ID NO: 1828543 - RNA, 19 nt, Artificial Sequence
  Description of Artificial Sequence: Synthetic oligonucleotide
  Sense strand starting at position 2542 of SEQ ID NO: 1563743
ucacuagugaaguggcauu

SEQ ID NO: 1828544 - RNA, 19 nt, Artificial Sequence
  Description of Artificial Sequence: Synthetic oligonucleotide
  Antisense strand to SEQ ID NO: 1828543
aaugccacuucacuaguga

SEQ ID NO: 1828545 - RNA, 19 nt, Artificial Sequence
  Description of Artificial Sequence: Synthetic oligonucleotide
  Sense strand starting at position 2593 of SEQ ID NO: 1563743
gccgcauugaggucugcaa

SEQ ID NO: 1828546 - RNA, 19 nt, Artificial Sequence
  Description of Artificial Sequence: Synthetic oligonucleotide
  Antisense strand to SEQ ID NO: 1828545
uugcagaccucaaugcggc

SEQ ID NO: 1828547 - RNA, 19 nt, Artificial Sequence
  Description of Artificial Sequence: Synthetic oligonucleotide
  Sense strand starting at position 2901 of SEQ ID NO: 1563743
guuagcccucaucagaaau

SEQ ID NO: 1828548 - RNA, 19 nt, Artificial Sequence
  Description of Artificial Sequence: Synthetic oligonucleotide
  Antisense strand to SEQ ID NO: 1828547
auuucugaugagggcuaac

SEQ ID NO: 1828549 - RNA, 19 nt, Artificial Sequence
  Description of Artificial Sequence: Synthetic oligonucleotide
  Sense strand starting at position 3102 of SEQ ID NO: 1563743
acuuucucugucuguugaa

SEQ ID NO: 1828550 - RNA, 19 nt, Artificial Sequence
  Description of Artificial Sequence: Synthetic oligonucleotide
  Antisense strand to SEQ ID NO: 1828549
uucaacagacagagaaagu

SEQ ID NO: 1828551 - RNA, 19 nt, Artificial Sequence
  Description of Artificial Sequence: Synthetic oligonucleotide
  Sense strand starting at position 3199 of SEQ ID NO: 1563743
ucuacaucuuagucagcuu

SEQ ID NO: 1828552 - RNA, 19 nt, Artificial Sequence
  Description of Artificial Sequence: Synthetic oligonucleotide
  Antisense strand to SEQ ID NO: 1828551
aagcugacuaagauguaga

SEQ ID NO: 1828553 - RNA, 19 nt, Artificial Sequence
  Description of Artificial Sequence: Synthetic oligonucleotide
  Sense strand starting at position 3208 of SEQ ID NO: 1563743
uagucagcuuccuugggaa

SEQ ID NO: 1828554 - RNA, 19 nt, Artificial Sequence
  Description of Artificial Sequence: Synthetic oligonucleotide
  Antisense strand to SEQ ID NO: 1828553
uucccaaggaagcugacua

SEQ ID NO: 1828555 - RNA, 19 nt, Artificial Sequence
  Description of Artificial Sequence: Synthetic oligonucleotide
  Sense strand starting at position 3277 of SEQ ID NO: 1563743
gcaggaaauguaggcacau

SEQ ID NO: 1828556 - RNA, 19 nt, Artificial Sequence
  Description of Artificial Sequence: Synthetic oligonucleotide
  Antisense strand to SEQ ID NO: 1828555
augugccuacauuuccugc

SEQ ID NO: 1828557 - RNA, 19 nt, Artificial Sequence
  Description of Artificial Sequence: Synthetic oligonucleotide
  Sense strand starting at position 3278 of SEQ ID NO: 1563743
caggaaauguaggcacauu

SEQ ID NO: 1828558 - RNA, 19 nt, Artificial Sequence
  Description of Artificial Sequence: Synthetic oligonucleotide
  Antisense strand to SEQ ID NO: 1828557
aaugugccuacauuuccug

SEQ ID NO: 1828559 - RNA, 19 nt, Artificial Sequence
  Description of Artificial Sequence: Synthetic oligonucleotide
  Sense strand starting at position 3538 of SEQ ID NO: 1563743
guugauaaccaaugaaguu

SEQ ID NO: 1828560 - RNA, 19 nt, Artificial Sequence
  Description of Artificial Sequence: Synthetic oligonucleotide
  Antisense strand to SEQ ID NO: 1828559
aacuucauugguuaucaac

SEQ ID NO: 1828561 - RNA, 19 nt, Artificial Sequence
  Description of Artificial Sequence: Synthetic oligonucleotide
  Sense strand starting at position 3593 of SEQ ID NO: 1563743
uguaaucuuguauagguuu

SEQ ID NO: 1828562 - RNA, 19 nt, Artificial Sequence
  Description of Artificial Sequence: Synthetic oligonucleotide
  Antisense strand to SEQ ID NO: 1828561
aaaccuauacaagauuaca

SEQ ID NO: 1828563 - RNA, 19 nt, Artificial Sequence
  Description of Artificial Sequence: Synthetic oligonucleotide
  Sense strand starting at position 3596 of SEQ ID NO: 1563743
aaucuuguauagguuugau

SEQ ID NO: 1828564 - RNA, 19 nt, Artificial Sequence
  Description of Artificial Sequence: Synthetic oligonucleotide
  Antisense strand to SEQ ID NO: 1828563
aucaaaccuauacaagauu

SEQ ID NO: 1828565 - RNA, 19 nt, Artificial Sequence
  Description of Artificial Sequence: Synthetic oligonucleotide
  Sense strand starting at position 3599 of SEQ ID NO: 1563743
cuuguauagguuugaucaa

SEQ ID NO: 1828566 - RNA, 19 nt, Artificial Sequence
  Description of Artificial Sequence: Synthetic oligonucleotide
  Antisense strand to SEQ ID NO: 1828565
uugaucaaaccuauacaag

SEQ ID NO: 1828567 - RNA, 19 nt, Artificial Sequence
  Description of Artificial Sequence: Synthetic oligonucleotide
  Sense strand starting at position 3660 of SEQ ID NO: 1563743
auggauaagugaucucauc

SEQ ID NO: 1828568 - RNA, 19 nt, Artificial Sequence
  Description of Artificial Sequence: Synthetic oligonucleotide
  Antisense strand to SEQ ID NO: 1828567
gaugagaucacuuauccau

SEQ ID NO: 1828569 - RNA, 19 nt, Artificial Sequence
  Description of Artificial Sequence: Synthetic oligonucleotide
  Sense strand starting at position 3686 of SEQ ID NO: 1563743
ggaagaagucagcaauguc

SEQ ID NO: 1828570 - RNA, 19 nt, Artificial Sequence
  Description of Artificial Sequence: Synthetic oligonucleotide
  Antisense strand to SEQ ID NO: 1828569
gacauugcugacuucuucc

SEQ ID NO: 1828571 - RNA, 19 nt, Artificial Sequence
  Description of Artificial Sequence: Synthetic oligonucleotide
  Sense strand starting at position 3693 of SEQ ID NO: 1563743
gucagcaaugucuaaaguu

SEQ ID NO: 1828572 - RNA, 19 nt, Artificial Sequence
  Description of Artificial Sequence: Synthetic oligonucleotide
  Antisense strand to SEQ ID NO: 1828571
aacuuuagacauugcugac

SEQ ID NO: 1828573 - RNA, 19 nt, Artificial Sequence
  Description of Artificial Sequence: Synthetic oligonucleotide
  Sense strand starting at position 3735 of SEQ ID NO: 1563743
gaaauagcauaguauuuag

SEQ ID NO: 1828574 - RNA, 19 nt, Artificial Sequence
  Description of Artificial Sequence: Synthetic oligonucleotide
  Antisense strand to SEQ ID NO: 1828573
cuaaauacuaugcuauuuc

SEQ ID NO: 1828575 - RNA, 19 nt, Artificial Sequence
  Description of Artificial Sequence: Synthetic oligonucleotide
  Sense strand starting at position 3761 of SEQ ID NO: 1563743
gggacaaucuacuagaaga

SEQ ID NO: 1828576 - RNA, 19 nt, Artificial Sequence
  Description of Artificial Sequence: Synthetic oligonucleotide
  Antisense strand to SEQ ID NO: 1828575
ucuucuaguagauuguccc

SEQ ID NO: 1828577 - RNA, 19 nt, Artificial Sequence
  Description of Artificial Sequence: Synthetic oligonucleotide
  Sense strand starting at position 3960 of SEQ ID NO: 1563743
gggucuuuaacaggguaau

SEQ ID NO: 1828578 - RNA, 19 nt, Artificial Sequence
  Description of Artificial Sequence: Synthetic oligonucleotide
  Antisense strand to SEQ ID NO: 1828577
auuacccuguuaaagaccc

SEQ ID NO: 1828579 - RNA, 19 nt, Artificial Sequence
  Description of Artificial Sequence: Synthetic oligonucleotide
  Sense strand starting at position 3961 of SEQ ID NO: 1563743
ggucuuuaacaggguaauc

SEQ ID NO: 1828580 - RNA, 19 nt, Artificial Sequence
  Description of Artificial Sequence: Synthetic oligonucleotide
  Antisense strand to SEQ ID NO: 1828579
gauuacccuguuaaagacc

SEQ ID NO: 1828581 - RNA, 19 nt, Artificial Sequence
  Description of Artificial Sequence: Synthetic oligonucleotide
  Sense strand starting at position 3966 of SEQ ID NO: 1563743
uuaacaggguaaucaaguu

SEQ ID NO: 1828582 - RNA, 19 nt, Artificial Sequence
  Description of Artificial Sequence: Synthetic oligonucleotide
  Antisense strand to SEQ ID NO: 1828581
aacuugauuacccuguuaa

SEQ ID NO: 1828583 - RNA, 19 nt, Artificial Sequence
  Description of Artificial Sequence: Synthetic oligonucleotide
  Sense strand starting at position 118 of SEQ ID NO: 1563744
cuagcauaguuccuagaca

SEQ ID NO: 1828584 - RNA, 19 nt, Artificial Sequence
  Description of Artificial Sequence: Synthetic oligonucleotide
  Antisense strand to SEQ ID NO: 1828583
ugucuaggaacuaugcuag

SEQ ID NO: 1828585 - RNA, 19 nt, Artificial Sequence
  Description of Artificial Sequence: Synthetic oligonucleotide
  Sense strand starting at position 228 of SEQ ID NO: 1563744
gaagcugugccaggacuaa

SEQ ID NO: 1828586 - RNA, 19 nt, Artificial Sequence
  Description of Artificial Sequence: Synthetic oligonucleotide
  Antisense strand to SEQ ID NO: 1828585
uuaguccuggcacagcuuc

SEQ ID NO: 1828587 - RNA, 19 nt, Artificial Sequence
  Description of Artificial Sequence: Synthetic oligonucleotide
  Sense strand starting at position 359 of SEQ ID NO: 1563744
auaugaacauugcuaugau

SEQ ID NO: 1828588 - RNA, 19 nt, Artificial Sequence
  Description of Artificial Sequence: Synthetic oligonucleotide
  Antisense strand to SEQ ID NO: 1828587
aucauagcaauguucauau

SEQ ID NO: 1828589 - RNA, 19 nt, Artificial Sequence
  Description of Artificial Sequence: Synthetic oligonucleotide
  Sense strand starting at position 362 of SEQ ID NO: 1563744
ugaacauugcuaugaugug

SEQ ID NO: 1828590 - RNA, 19 nt, Artificial Sequence
  Description of Artificial Sequence: Synthetic oligonucleotide
  Antisense strand to SEQ ID NO: 1828589
cacaucauagcaauguuca

SEQ ID NO: 1828591 - RNA, 19 nt, Artificial Sequence
  Description of Artificial Sequence: Synthetic oligonucleotide
  Sense strand starting at position 395 of SEQ ID NO: 1563744
gggagacacucugcuaaac

SEQ ID NO: 1828592 - RNA, 19 nt, Artificial Sequence
  Description of Artificial Sequence: Synthetic oligonucleotide
  Antisense strand to SEQ ID NO: 1828591
guuuagcagagugucuccc

SEQ ID NO: 1828593 - RNA, 19 nt, Artificial Sequence
  Description of Artificial Sequence: Synthetic oligonucleotide
  Sense strand starting at position 441 of SEQ ID NO: 1563744
guaguaagggucugauaag

SEQ ID NO: 1828594 - RNA, 19 nt, Artificial Sequence
  Description of Artificial Sequence: Synthetic oligonucleotide
  Antisense strand to SEQ ID NO: 1828593
cuuaucagacccuuacuac

SEQ ID NO: 1828595 - RNA, 19 nt, Artificial Sequence
  Description of Artificial Sequence: Synthetic oligonucleotide
  Sense strand starting at position 447 of SEQ ID NO: 1563744
agggucugauaaguaggua

SEQ ID NO: 1828596 - RNA, 19 nt, Artificial Sequence
  Description of Artificial Sequence: Synthetic oligonucleotide
  Antisense strand to SEQ ID NO: 1828595
uaccuacuuaucagacccu

SEQ ID NO: 1828597 - RNA, 19 nt, Artificial Sequence
  Description of Artificial Sequence: Synthetic oligonucleotide
  Sense strand starting at position 448 of SEQ ID NO: 1563744
gggucugauaaguagguau

SEQ ID NO: 1828598 - RNA, 19 nt, Artificial Sequence
  Description of Artificial Sequence: Synthetic oligonucleotide
  Antisense strand to SEQ ID NO: 1828597
auaccuacuuaucagaccc

SEQ ID NO: 1828599 - RNA, 19 nt, Artificial Sequence
  Description of Artificial Sequence: Synthetic oligonucleotide
  Sense strand starting at position 450 of SEQ ID NO: 1563744
gucugauaaguagguauaa

SEQ ID NO: 1828600 - RNA, 19 nt, Artificial Sequence
  Description of Artificial Sequence: Synthetic oligonucleotide
  Antisense strand to SEQ ID NO: 1828599
uuauaccuacuuaucagac

SEQ ID NO: 1828601 - RNA, 19 nt, Artificial Sequence
  Description of Artificial Sequence: Synthetic oligonucleotide
  Sense strand starting at position 451 of SEQ ID NO: 1563744
ucugauaaguagguauaau

SEQ ID NO: 1828602 - RNA, 19 nt, Artificial Sequence
  Description of Artificial Sequence: Synthetic oligonucleotide
  Antisense strand to SEQ ID NO: 1828601
auuauaccuacuuaucaga

SEQ ID NO: 1828603 - RNA, 19 nt, Artificial Sequence
  Description of Artificial Sequence: Synthetic oligonucleotide
  Sense strand starting at position 482 of SEQ ID NO: 1563744
agcagaggcuucuuggaaa

SEQ ID NO: 1828604 - RNA, 19 nt, Artificial Sequence
  Description of Artificial Sequence: Synthetic oligonucleotide
  Antisense strand to SEQ ID NO: 1828603
uuuccaagaagccucugcu

SEQ ID NO: 1828605 - RNA, 19 nt, Artificial Sequence
  Description of Artificial Sequence: Synthetic oligonucleotide
  Sense strand starting at position 528 of SEQ ID NO: 1563744
gccuaugcucaauaagaac

SEQ ID NO: 1828606 - RNA, 19 nt, Artificial Sequence
  Description of Artificial Sequence: Synthetic oligonucleotide
  Antisense strand to SEQ ID NO: 1828605
guucuuauugagcauaggc

SEQ ID NO: 1828607 - RNA, 19 nt, Artificial Sequence
  Description of Artificial Sequence: Synthetic oligonucleotide
  Sense strand starting at position 619 of SEQ ID NO: 1563744
uugggcaggccucauauua

SEQ ID NO: 1828608 - RNA, 19 nt, Artificial Sequence
  Description of Artificial Sequence: Synthetic oligonucleotide
  Antisense strand to SEQ ID NO: 1828607
uaauaugaggccugcccaa

SEQ ID NO: 1828609 - RNA, 19 nt, Artificial Sequence
  Description of Artificial Sequence: Synthetic oligonucleotide
  Sense strand starting at position 1145 of SEQ ID NO: 1563744
agagucguaagauaucaac

SEQ ID NO: 1828610 - RNA, 19 nt, Artificial Sequence
  Description of Artificial Sequence: Synthetic oligonucleotide
  Antisense strand to SEQ ID NO: 1828609
guugauaucuuacgacucu

SEQ ID NO: 1828611 - RNA, 19 nt, Artificial Sequence
  Description of Artificial Sequence: Synthetic oligonucleotide
  Sense strand starting at position 1201 of SEQ ID NO: 1563744
acaagaucgcagugguaag

SEQ ID NO: 1828612 - RNA, 19 nt, Artificial Sequence
  Description of Artificial Sequence: Synthetic oligonucleotide
  Antisense strand to SEQ ID NO: 1828611
cuuaccacugcgaucuugu

SEQ ID NO: 1828613 - RNA, 19 nt, Artificial Sequence
  Description of Artificial Sequence: Synthetic oligonucleotide
  Sense strand starting at position 1231 of SEQ ID NO: 1563744
cguucucaccacuaaaggu

SEQ ID NO: 1828614 - RNA, 19 nt, Artificial Sequence
  Description of Artificial Sequence: Synthetic oligonucleotide
  Antisense strand to SEQ ID NO: 1828613
accuuuaguggugagaacg

SEQ ID NO: 1828615 - RNA, 19 nt, Artificial Sequence
  Description of Artificial Sequence: Synthetic oligonucleotide
  Sense strand starting at position 1858 of SEQ ID NO: 1563744
ggcugaauucggagcgcga

SEQ ID NO: 1828616 - RNA, 19 nt, Artificial Sequence
  Description of Artificial Sequence: Synthetic oligonucleotide
  Antisense strand to SEQ ID NO: 1828615
ucgcgcuccgaauucagcc

SEQ ID NO: 1828617 - RNA, 19 nt, Artificial Sequence
  Description of Artificial Sequence: Synthetic oligonucleotide
  Sense strand starting at position 2236 of SEQ ID NO: 1563744
auguuauuucugugcaacc

SEQ ID NO: 1828618 - RNA, 19 nt, Artificial Sequence
  Description of Artificial Sequence: Synthetic oligonucleotide
  Antisense strand to SEQ ID NO: 1828617
gguugcacagaaauaacau

SEQ ID NO: 1828619 - RNA, 19 nt, Artificial Sequence
  Description of Artificial Sequence: Synthetic oligonucleotide
  Sense strand starting at position 2237 of SEQ ID NO: 1563744
uguuauuucugugcaaccu

SEQ ID NO: 1828620 - RNA, 19 nt, Artificial Sequence
  Description of Artificial Sequence: Synthetic oligonucleotide
  Antisense strand to SEQ ID NO: 1828619
agguugcacagaaauaaca

SEQ ID NO: 1828621 - RNA, 19 nt, Artificial Sequence
  Description of Artificial Sequence: Synthetic oligonucleotide
  Sense strand starting at position 2238 of SEQ ID NO: 1563744
guuauuucugugcaaccuu

SEQ ID NO: 1828622 - RNA, 19 nt, Artificial Sequence
  Description of Artificial Sequence: Synthetic oligonucleotide
  Antisense strand to SEQ ID NO: 1828621
aagguugcacagaaauaac

SEQ ID NO: 1828623 - RNA, 19 nt, Artificial Sequence
  Description of Artificial Sequence: Synthetic oligonucleotide
  Sense strand starting at position 2421 of SEQ ID NO: 1563744
cugaguacucaguaucagu

SEQ ID NO: 1828624 - RNA, 19 nt, Artificial Sequence
  Description of Artificial Sequence: Synthetic oligonucleotide
  Antisense strand to SEQ ID NO: 1828623
acugauacugaguacucag

SEQ ID NO: 1828625 - RNA, 19 nt, Artificial Sequence
  Description of Artificial Sequence: Synthetic oligonucleotide
  Sense strand starting at position 2742 of SEQ ID NO: 1563744
augugccugccagauaauu

SEQ ID NO: 1828626 - RNA, 19 nt, Artificial Sequence
  Description of Artificial Sequence: Synthetic oligonucleotide
  Antisense strand to SEQ ID NO: 1828625
aauuaucuggcaggcacau

SEQ ID NO: 1828627 - RNA, 19 nt, Artificial Sequence
  Description of Artificial Sequence: Synthetic oligonucleotide
  Sense strand starting at position 2900 of SEQ ID NO: 1563744
ugaauuguccuaggagauu

SEQ ID NO: 1828628 - RNA, 19 nt, Artificial Sequence
  Description of Artificial Sequence: Synthetic oligonucleotide
  Antisense strand to SEQ ID NO: 1828627
aaucuccuaggacaauuca

SEQ ID NO: 1828629 - RNA, 19 nt, Artificial Sequence
  Description of Artificial Sequence: Synthetic oligonucleotide
  Sense strand starting at position 2974 of SEQ ID NO: 1563744
aacuacauaucguugagaa

SEQ ID NO: 1828630 - RNA, 19 nt, Artificial Sequence
  Description of Artificial Sequence: Synthetic oligonucleotide
  Antisense strand to SEQ ID NO: 1828629
uucucaacgauauguaguu

SEQ ID NO: 1828631 - RNA, 19 nt, Artificial Sequence
  Description of Artificial Sequence: Synthetic oligonucleotide
  Sense strand starting at position 2975 of SEQ ID NO: 1563744
acuacauaucguugagaag

SEQ ID NO: 1828632 - RNA, 19 nt, Artificial Sequence
  Description of Artificial Sequence: Synthetic oligonucleotide
  Antisense strand to SEQ ID NO: 1828631
cuucucaacgauauguagu

SEQ ID NO: 1828633 - RNA, 19 nt, Artificial Sequence
  Description of Artificial Sequence: Synthetic oligonucleotide
  Sense strand starting at position 3118 of SEQ ID NO: 1563744
ucagaaggcuucuuagaca

SEQ ID NO: 1828634 - RNA, 19 nt, Artificial Sequence
  Description of Artificial Sequence: Synthetic oligonucleotide
  Antisense strand to SEQ ID NO: 1828633
ugucuaagaagccuucuga

SEQ ID NO: 1828635 - RNA, 19 nt, Artificial Sequence
  Description of Artificial Sequence: Synthetic oligonucleotide
  Sense strand starting at position 3142 of SEQ ID NO: 1563744
ugcggucacauagaagaau

SEQ ID NO: 1828636 - RNA, 19 nt, Artificial Sequence
  Description of Artificial Sequence: Synthetic oligonucleotide
  Antisense strand to SEQ ID NO: 1828635
auucuucuaugugaccgca

SEQ ID NO: 1828637 - RNA, 19 nt, Artificial Sequence
  Description of Artificial Sequence: Synthetic oligonucleotide
  Sense strand starting at position 3240 of SEQ ID NO: 1563744
gugacaaagucagugacuu

SEQ ID NO: 1828638 - RNA, 19 nt, Artificial Sequence
  Description of Artificial Sequence: Synthetic oligonucleotide
  Antisense strand to SEQ ID NO: 1828637
aagucacugacuuugucac

SEQ ID NO: 1828639 - RNA, 19 nt, Artificial Sequence
  Description of Artificial Sequence: Synthetic oligonucleotide
  Sense strand starting at position 3241 of SEQ ID NO: 1563744
ugacaaagucagugacuuc

SEQ ID NO: 1828640 - RNA, 19 nt, Artificial Sequence
  Description of Artificial Sequence: Synthetic oligonucleotide
  Antisense strand to SEQ ID NO: 1828639
gaagucacugacuuuguca

SEQ ID NO: 1828641 - RNA, 19 nt, Artificial Sequence
  Description of Artificial Sequence: Synthetic oligonucleotide
  Sense strand starting at position 3287 of SEQ ID NO: 1563744
ccuucaguuggguaggauu

SEQ ID NO: 1828642 - RNA, 19 nt, Artificial Sequence
  Description of Artificial Sequence: Synthetic oligonucleotide
  Antisense strand to SEQ ID NO: 1828641
aauccuacccaacugaagg

SEQ ID NO: 1828643 - RNA, 19 nt, Artificial Sequence
  Description of Artificial Sequence: Synthetic oligonucleotide
  Sense strand starting at position 3319 of SEQ ID NO: 1563744
accuuuaaugugggacaga

SEQ ID NO: 1828644 - RNA, 19 nt, Artificial Sequence
  Description of Artificial Sequence: Synthetic oligonucleotide
  Antisense strand to SEQ ID NO: 1828643
ucugucccacauuaaaggu

SEQ ID NO: 1828645 - RNA, 19 nt, Artificial Sequence
  Description of Artificial Sequence: Synthetic oligonucleotide
  Sense strand starting at position 3351 of SEQ ID NO: 1563744
cuagaacagugcuuccuaa

SEQ ID NO: 1828646 - RNA, 19 nt, Artificial Sequence
  Description of Artificial Sequence: Synthetic oligonucleotide
  Antisense strand to SEQ ID NO: 1828645
uuaggaagcacuguucuag

SEQ ID NO: 1828647 - RNA, 19 nt, Artificial Sequence
  Description of Artificial Sequence: Synthetic oligonucleotide
  Sense strand starting at position 3388 of SEQ ID NO: 1563744
gcacacauguagguugaaa

SEQ ID NO: 1828648 - RNA, 19 nt, Artificial Sequence
  Description of Artificial Sequence: Synthetic oligonucleotide
  Antisense strand to SEQ ID NO: 1828647
uuucaaccuacaugugugc

SEQ ID NO: 1828649 - RNA, 19 nt, Artificial Sequence
  Description of Artificial Sequence: Synthetic oligonucleotide
  Sense strand starting at position 3535 of SEQ ID NO: 1563744
ucaggcuuggcagggaaua

SEQ ID NO: 1828650 - RNA, 19 nt, Artificial Sequence
  Description of Artificial Sequence: Synthetic oligonucleotide
  Antisense strand to SEQ ID NO: 1828649
uauucccugccaagccuga

SEQ ID NO: 1828651 - RNA, 19 nt, Artificial Sequence
  Description of Artificial Sequence: Synthetic oligonucleotide
  Sense strand starting at position 3536 of SEQ ID NO: 1563744
caggcuuggcagggaauau

SEQ ID NO: 1828652 - RNA, 19 nt, Artificial Sequence
  Description of Artificial Sequence: Synthetic oligonucleotide
  Antisense strand to SEQ ID NO: 1828651
auauucccugccaagccug

SEQ ID NO: 1828653 - RNA, 19 nt, Artificial Sequence
  Description of Artificial Sequence: Synthetic oligonucleotide
  Sense strand starting at position 3537 of SEQ ID NO: 1563744
aggcuuggcagggaauaua

SEQ ID NO: 1828654 - RNA, 19 nt, Artificial Sequence
  Description of Artificial Sequence: Synthetic oligonucleotide
  Antisense strand to SEQ ID NO: 1828653
uauauucccugccaagccu

SEQ ID NO: 1828655 - RNA, 19 nt, Artificial Sequence
  Description of Artificial Sequence: Synthetic oligonucleotide
  Sense strand starting at position 3567 of SEQ ID NO: 1563744
aguacuuguggaggagacu

SEQ ID NO: 1828656 - RNA, 19 nt, Artificial Sequence
  Description of Artificial Sequence: Synthetic oligonucleotide
  Antisense strand to SEQ ID NO: 1828655
agucuccuccacaaguacu

SEQ ID NO: 1828657 - RNA, 19 nt, Artificial Sequence
  Description of Artificial Sequence: Synthetic oligonucleotide
  Sense strand starting at position 3626 of SEQ ID NO: 1563744
ucugcauuugcuuggauua

SEQ ID NO: 1828658 - RNA, 19 nt, Artificial Sequence
  Description of Artificial Sequence: Synthetic oligonucleotide
  Antisense strand to SEQ ID NO: 1828657
uaauccaagcaaaugcaga

SEQ ID NO: 1828659 - RNA, 19 nt, Artificial Sequence
  Description of Artificial Sequence: Synthetic oligonucleotide
  Sense strand starting at position 3627 of SEQ ID NO: 1563744
cugcauuugcuuggauuaa

SEQ ID NO: 1828660 - RNA, 19 nt, Artificial Sequence
  Description of Artificial Sequence: Synthetic oligonucleotide
  Antisense strand to SEQ ID NO: 1828659
uuaauccaagcaaaugcag

SEQ ID NO: 1828661 - RNA, 19 nt, Artificial Sequence
  Description of Artificial Sequence: Synthetic oligonucleotide
  Sense strand starting at position 3804 of SEQ ID NO: 1563744
augcauuggcacgaucuua

SEQ ID NO: 1828662 - RNA, 19 nt, Artificial Sequence
  Description of Artificial Sequence: Synthetic oligonucleotide
  Antisense strand to SEQ ID NO: 1828661
uaagaucgugccaaugcau

SEQ ID NO: 1828663 - RNA, 19 nt, Artificial Sequence
  Description of Artificial Sequence: Synthetic oligonucleotide
  Sense strand starting at position 1 of SEQ ID NO: 1563745
acuugaucccuuggauauc

SEQ ID NO: 1828664 - RNA, 19 nt, Artificial Sequence
  Description of Artificial Sequence: Synthetic oligonucleotide
  Antisense strand to SEQ ID NO: 1828663
gauauccaagggaucaagu

SEQ ID NO: 1828665 - RNA, 19 nt, Artificial Sequence
  Description of Artificial Sequence: Synthetic oligonucleotide
  Sense strand starting at position 27 of SEQ ID NO: 1563745
uccauagaaugcuuuagau

SEQ ID NO: 1828666 - RNA, 19 nt, Artificial Sequence
  Description of Artificial Sequence: Synthetic oligonucleotide
  Antisense strand to SEQ ID NO: 1828665
aucuaaagcauucuaugga

SEQ ID NO: 1828667 - RNA, 19 nt, Artificial Sequence
  Description of Artificial Sequence: Synthetic oligonucleotide
  Sense strand starting at position 147 of SEQ ID NO: 1563745
ucuaaaugauucuuucguu

SEQ ID NO: 1828668 - RNA, 19 nt, Artificial Sequence
  Description of Artificial Sequence: Synthetic oligonucleotide
  Antisense strand to SEQ ID NO: 1828667
aacgaaagaaucauuuaga

SEQ ID NO: 1828669 - RNA, 19 nt, Artificial Sequence
  Description of Artificial Sequence: Synthetic oligonucleotide
  Sense strand starting at position 189 of SEQ ID NO: 1563745
guugauugccucuaaggga

SEQ ID NO: 1828670 - RNA, 19 nt, Artificial Sequence
  Description of Artificial Sequence: Synthetic oligonucleotide
  Antisense strand to SEQ ID NO: 1828669
ucccuuagaggcaaucaac

SEQ ID NO: 1828671 - RNA, 19 nt, Artificial Sequence
  Description of Artificial Sequence: Synthetic oligonucleotide
  Sense strand starting at position 554 of SEQ ID NO: 1563745
ggaccucagccucaaacuu

SEQ ID NO: 1828672 - RNA, 19 nt, Artificial Sequence
  Description of Artificial Sequence: Synthetic oligonucleotide
  Antisense strand to SEQ ID NO: 1828671
aaguuugaggcugaggucc

SEQ ID NO: 1828673 - RNA, 19 nt, Artificial Sequence
  Description of Artificial Sequence: Synthetic oligonucleotide
  Sense strand starting at position 678 of SEQ ID NO: 1563745
gaagcauagguccauugua

SEQ ID NO: 1828674 - RNA, 19 nt, Artificial Sequence
  Description of Artificial Sequence: Synthetic oligonucleotide
  Antisense strand to SEQ ID NO: 1828673
uacaauggaccuaugcuuc

SEQ ID NO: 1828675 - RNA, 19 nt, Artificial Sequence
  Description of Artificial Sequence: Synthetic oligonucleotide
  Sense strand starting at position 753 of SEQ ID NO: 1563745
cuguaaaguggaggaguaa

SEQ ID NO: 1828676 - RNA, 19 nt, Artificial Sequence
  Description of Artificial Sequence: Synthetic oligonucleotide
  Antisense strand to SEQ ID NO: 1828675
uuacuccuccacuuuacag

SEQ ID NO: 1828677 - RNA, 19 nt, Artificial Sequence
  Description of Artificial Sequence: Synthetic oligonucleotide
  Sense strand starting at position 828 of SEQ ID NO: 1563745
gcacauagugaacauuaca

SEQ ID NO: 1828678 - RNA, 19 nt, Artificial Sequence
  Description of Artificial Sequence: Synthetic oligonucleotide
  Antisense strand to SEQ ID NO: 1828677
uguaauguucacuaugugc

SEQ ID NO: 1828679 - RNA, 19 nt, Artificial Sequence
  Description of Artificial Sequence: Synthetic oligonucleotide
  Sense strand starting at position 896 of SEQ ID NO: 1563745
gguguagggcccuaaagau

SEQ ID NO: 1828680 - RNA, 19 nt, Artificial Sequence
  Description of Artificial Sequence: Synthetic oligonucleotide
  Antisense strand to SEQ ID NO: 1828679
aucuuuagggcccuacacc

SEQ ID NO: 1828681 - RNA, 19 nt, Artificial Sequence
  Description of Artificial Sequence: Synthetic oligonucleotide
  Sense strand starting at position 1084 of SEQ ID NO: 1563745
ggaaaugccaucugagguu

SEQ ID NO: 1828682 - RNA, 19 nt, Artificial Sequence
  Description of Artificial Sequence: Synthetic oligonucleotide
  Antisense strand to SEQ ID NO: 1828681
aaccucagauggcauuucc

SEQ ID NO: 1828683 - RNA, 19 nt, Artificial Sequence
  Description of Artificial Sequence: Synthetic oligonucleotide
  Sense strand starting at position 1211 of SEQ ID NO: 1563745
aggaaauuguaccauuuau

SEQ ID NO: 1828684 - RNA, 19 nt, Artificial Sequence
  Description of Artificial Sequence: Synthetic oligonucleotide
  Antisense strand to SEQ ID NO: 1828683
auaaaugguacaauuuccu

SEQ ID NO: 1828685 - RNA, 19 nt, Artificial Sequence
  Description of Artificial Sequence: Synthetic oligonucleotide
  Sense strand starting at position 1467 of SEQ ID NO: 1563745
cuuugagggcuccaggaau

SEQ ID NO: 1828686 - RNA, 19 nt, Artificial Sequence
  Description of Artificial Sequence: Synthetic oligonucleotide
  Antisense strand to SEQ ID NO: 1828685
auuccuggagcccucaaag

SEQ ID NO: 1828687 - RNA, 19 nt, Artificial Sequence
  Description of Artificial Sequence: Synthetic oligonucleotide
  Sense strand starting at position 1581 of SEQ ID NO: 1563745
agagauucucaccgaggca

SEQ ID NO: 1828688 - RNA, 19 nt, Artificial Sequence
  Description of Artificial Sequence: Synthetic oligonucleotide
  Antisense strand to SEQ ID NO: 1828687
ugccucggugagaaucucu

SEQ ID NO: 1828689 - RNA, 19 nt, Artificial Sequence
  Description of Artificial Sequence: Synthetic oligonucleotide
  Sense strand starting at position 1725 of SEQ ID NO: 1563745
uccgguggccaguauuuaa

SEQ ID NO: 1828690 - RNA, 19 nt, Artificial Sequence
  Description of Artificial Sequence: Synthetic oligonucleotide
  Antisense strand to SEQ ID NO: 1828689
uuaaauacuggccaccgga

SEQ ID NO: 1828691 - RNA, 19 nt, Artificial Sequence
  Description of Artificial Sequence: Synthetic oligonucleotide
  Sense strand starting at position 1756 of SEQ ID NO: 1563745
gaacuaugcgcucauuugu

SEQ ID NO: 1828692 - RNA, 19 nt, Artificial Sequence
  Description of Artificial Sequence: Synthetic oligonucleotide
  Antisense strand to SEQ ID NO: 1828691
acaaaugagcgcauaguuc

SEQ ID NO: 1828693 - RNA, 19 nt, Artificial Sequence
  Description of Artificial Sequence: Synthetic oligonucleotide
  Sense strand starting at position 1765 of SEQ ID NO: 1563745
gcucauuuguagguacuua

SEQ ID NO: 1828694 - RNA, 19 nt, Artificial Sequence
  Description of Artificial Sequence: Synthetic oligonucleotide
  Antisense strand to SEQ ID NO: 1828693
uaaguaccuacaaaugagc

SEQ ID NO: 1828695 - RNA, 19 nt, Artificial Sequence
  Description of Artificial Sequence: Synthetic oligonucleotide
  Sense strand starting at position 1812 of SEQ ID NO: 1563745
gagauucuccagugagcuc

SEQ ID NO: 1828696 - RNA, 19 nt, Artificial Sequence
  Description of Artificial Sequence: Synthetic oligonucleotide
  Antisense strand to SEQ ID NO: 1828695
gagcucacuggagaaucuc

SEQ ID NO: 1828697 - RNA, 19 nt, Artificial Sequence
  Description of Artificial Sequence: Synthetic oligonucleotide
  Sense strand starting at position 2154 of SEQ ID NO: 1563745
gccagcucucaagaagauu

SEQ ID NO: 1828698 - RNA, 19 nt, Artificial Sequence
  Description of Artificial Sequence: Synthetic oligonucleotide
  Antisense strand to SEQ ID NO: 1828697
aaucuucuugagagcuggc

SEQ ID NO: 1828699 - RNA, 19 nt, Artificial Sequence
  Description of Artificial Sequence: Synthetic oligonucleotide
  Sense strand starting at position 2196 of SEQ ID NO: 1563745
ccaauaccuuuaucgggau

SEQ ID NO: 1828700 - RNA, 19 nt, Artificial Sequence
  Description of Artificial Sequence: Synthetic oligonucleotide
  Antisense strand to SEQ ID NO: 1828699
aucccgauaaagguauugg

SEQ ID NO: 1828701 - RNA, 19 nt, Artificial Sequence
  Description of Artificial Sequence: Synthetic oligonucleotide
  Sense strand starting at position 2200 of SEQ ID NO: 1563745
uaccuuuaucgggaucuca

SEQ ID NO: 1828702 - RNA, 19 nt, Artificial Sequence
  Description of Artificial Sequence: Synthetic oligonucleotide
  Antisense strand to SEQ ID NO: 1828701
ugagaucccgauaaaggua

SEQ ID NO: 1828703 - RNA, 19 nt, Artificial Sequence
  Description of Artificial Sequence: Synthetic oligonucleotide
  Sense strand starting at position 2296 of SEQ ID NO: 1563745
ggcccugggauccauuauu

SEQ ID NO: 1828704 - RNA, 19 nt, Artificial Sequence
  Description of Artificial Sequence: Synthetic oligonucleotide
  Antisense strand to SEQ ID NO: 1828703
aauaauggaucccagggcc

SEQ ID NO: 1828705 - RNA, 19 nt, Artificial Sequence
  Description of Artificial Sequence: Synthetic oligonucleotide
  Sense strand starting at position 2491 of SEQ ID NO: 1563745
auaguugugugaccucaag

SEQ ID NO: 1828706 - RNA, 19 nt, Artificial Sequence
  Description of Artificial Sequence: Synthetic oligonucleotide
  Antisense strand to SEQ ID NO: 1828705
cuugaggucacacaacuau

SEQ ID NO: 1828707 - RNA, 19 nt, Artificial Sequence
  Description of Artificial Sequence: Synthetic oligonucleotide
  Sense strand starting at position 2514 of SEQ ID NO: 1563745
ugaguaaacucucugaguc

SEQ ID NO: 1828708 - RNA, 19 nt, Artificial Sequence
  Description of Artificial Sequence: Synthetic oligonucleotide
  Antisense strand to SEQ ID NO: 1828707
gacucagagaguuuacuca

SEQ ID NO: 1828709 - RNA, 19 nt, Artificial Sequence
  Description of Artificial Sequence: Synthetic oligonucleotide
  Sense strand starting at position 2601 of SEQ ID NO: 1563745
gccucaaugggaugaugua

SEQ ID NO: 1828710 - RNA, 19 nt, Artificial Sequence
  Description of Artificial Sequence: Synthetic oligonucleotide
  Antisense strand to SEQ ID NO: 1828709
uacaucaucccauugaggc

SEQ ID NO: 1828711 - RNA, 19 nt, Artificial Sequence
  Description of Artificial Sequence: Synthetic oligonucleotide
  Sense strand starting at position 2916 of SEQ ID NO: 1563745
augauagacuaauuggcua

SEQ ID NO: 1828712 - RNA, 19 nt, Artificial Sequence
  Description of Artificial Sequence: Synthetic oligonucleotide
  Antisense strand to SEQ ID NO: 1828711
uagccaauuagucuaucau

SEQ ID NO: 1828713 - RNA, 19 nt, Artificial Sequence
  Description of Artificial Sequence: Synthetic oligonucleotide
  Sense strand starting at position 3360 of SEQ ID NO: 1563745
caugcaucaggugauauca

SEQ ID NO: 1828714 - RNA, 19 nt, Artificial Sequence
  Description of Artificial Sequence: Synthetic oligonucleotide
  Antisense strand to SEQ ID NO: 1828713
ugauaucaccugaugcaug

SEQ ID NO: 1828715 - RNA, 19 nt, Artificial Sequence
  Description of Artificial Sequence: Synthetic oligonucleotide
  Sense strand starting at position 3381 of SEQ ID NO: 1563745
uguggcuuccauuauaaac

SEQ ID NO: 1828716 - RNA, 19 nt, Artificial Sequence
  Description of Artificial Sequence: Synthetic oligonucleotide
  Antisense strand to SEQ ID NO: 1828715
guuuauaauggaagccaca

SEQ ID NO: 1828717 - RNA, 19 nt, Artificial Sequence
  Description of Artificial Sequence: Synthetic oligonucleotide
  Sense strand starting at position 3551 of SEQ ID NO: 1563745
auggaaaccuuccuguaag

SEQ ID NO: 1828718 - RNA, 19 nt, Artificial Sequence
  Description of Artificial Sequence: Synthetic oligonucleotide
  Antisense strand to SEQ ID NO: 1828717
cuuacaggaagguuuccau

SEQ ID NO: 1828719 - RNA, 19 nt, Artificial Sequence
  Description of Artificial Sequence: Synthetic oligonucleotide
  Sense strand starting at position 3633 of SEQ ID NO: 1563745
cuuugugucagggauuguu

SEQ ID NO: 1828720 - RNA, 19 nt, Artificial Sequence
  Description of Artificial Sequence: Synthetic oligonucleotide
  Antisense strand to SEQ ID NO: 1828719
aacaaucccugacacaaag

SEQ ID NO: 1828721 - RNA, 19 nt, Artificial Sequence
  Description of Artificial Sequence: Synthetic oligonucleotide
  Sense strand starting at position 3643 of SEQ ID NO: 1563745
gggauuguucuagaugcug

SEQ ID NO: 1828722 - RNA, 19 nt, Artificial Sequence
  Description of Artificial Sequence: Synthetic oligonucleotide
  Antisense strand to SEQ ID NO: 1828721
cagcaucuagaacaauccc

SEQ ID NO: 1828723 - RNA, 19 nt, Artificial Sequence
  Description of Artificial Sequence: Synthetic oligonucleotide
  Sense strand starting at position 3649 of SEQ ID NO: 1563745
guucuagaugcugacaguu

SEQ ID NO: 1828724 - RNA, 19 nt, Artificial Sequence
  Description of Artificial Sequence: Synthetic oligonucleotide
  Antisense strand to SEQ ID NO: 1828723
aacugucagcaucuagaac

SEQ ID NO: 1828725 - RNA, 19 nt, Artificial Sequence
  Description of Artificial Sequence: Synthetic oligonucleotide
  Sense strand starting at position 3676 of SEQ ID NO: 1563745
augacaguuucucuucuua

SEQ ID NO: 1828726 - RNA, 19 nt, Artificial Sequence
  Description of Artificial Sequence: Synthetic oligonucleotide
  Antisense strand to SEQ ID NO: 1828725
uaagaagagaaacugucau

SEQ ID NO: 1828727 - RNA, 19 nt, Artificial Sequence
  Description of Artificial Sequence: Synthetic oligonucleotide
  Sense strand starting at position 3695 of SEQ ID NO: 1563745
aggaguuuguagucuaagg

SEQ ID NO: 1828728 - RNA, 19 nt, Artificial Sequence
  Description of Artificial Sequence: Synthetic oligonucleotide
  Antisense strand to SEQ ID NO: 1828727
ccuuagacuacaaacuccu

SEQ ID NO: 1828729 - RNA, 19 nt, Artificial Sequence
  Description of Artificial Sequence: Synthetic oligonucleotide
  Sense strand starting at position 3799 of SEQ ID NO: 1563745
caaguaagucaugauagua

SEQ ID NO: 1828730 - RNA, 19 nt, Artificial Sequence
  Description of Artificial Sequence: Synthetic oligonucleotide
  Antisense strand to SEQ ID NO: 1828729
uacuaucaugacuuacuug

SEQ ID NO: 1828731 - RNA, 19 nt, Artificial Sequence
  Description of Artificial Sequence: Synthetic oligonucleotide
  Sense strand starting at position 3809 of SEQ ID NO: 1563745
augauaguauguguuugga

SEQ ID NO: 1828732 - RNA, 19 nt, Artificial Sequence
  Description of Artificial Sequence: Synthetic oligonucleotide
  Antisense strand to SEQ ID NO: 1828731
uccaaacacauacuaucau

SEQ ID NO: 1828733 - RNA, 19 nt, Artificial Sequence
  Description of Artificial Sequence: Synthetic oligonucleotide
  Sense strand starting at position 3811 of SEQ ID NO: 1563745
gauaguauguguuuggaua

SEQ ID NO: 1828734 - RNA, 19 nt, Artificial Sequence
  Description of Artificial Sequence: Synthetic oligonucleotide
  Antisense strand to SEQ ID NO: 1828733
uauccaaacacauacuauc

SEQ ID NO: 1828735 - RNA, 19 nt, Artificial Sequence
  Description of Artificial Sequence: Synthetic oligonucleotide
  Sense strand starting at position 3812 of SEQ ID NO: 1563745
auaguauguguuuggauaa

SEQ ID NO: 1828736 - RNA, 19 nt, Artificial Sequence
  Description of Artificial Sequence: Synthetic oligonucleotide
  Antisense strand to SEQ ID NO: 1828735
uuauccaaacacauacuau

SEQ ID NO: 1828737 - RNA, 19 nt, Artificial Sequence
  Description of Artificial Sequence: Synthetic oligonucleotide
  Sense strand starting at position 3930 of SEQ ID NO: 1563745
gacaaacuugaugguuguu

SEQ ID NO: 1828738 - RNA, 19 nt, Artificial Sequence
  Description of Artificial Sequence: Synthetic oligonucleotide
  Antisense strand to SEQ ID NO: 1828737
aacaaccaucaaguuuguc

SEQ ID NO: 1828739 - RNA, 19 nt, Artificial Sequence
  Description of Artificial Sequence: Synthetic oligonucleotide
  Sense strand starting at position 3935 of SEQ ID NO: 1563745
acuugaugguuguuuggaa

SEQ ID NO: 1828740 - RNA, 19 nt, Artificial Sequence
  Description of Artificial Sequence: Synthetic oligonucleotide
  Antisense strand to SEQ ID NO: 1828739
uuccaaacaaccaucaagu

SEQ ID NO: 1828741 - RNA, 19 nt, Artificial Sequence
  Description of Artificial Sequence: Synthetic oligonucleotide
  Sense strand starting at position 3970 of SEQ ID NO: 1563745
auuaucugucagggugaaa

SEQ ID NO: 1828742 - RNA, 19 nt, Artificial Sequence
  Description of Artificial Sequence: Synthetic oligonucleotide
  Antisense strand to SEQ ID NO: 1828741
uuucacccugacagauaau

SEQ ID NO: 1828743 - RNA, 19 nt, Artificial Sequence
  Description of Artificial Sequence: Synthetic oligonucleotide
  Sense strand starting at position 313 of SEQ ID NO: 1563746
gauuuaaacucccagaggu

SEQ ID NO: 1828744 - RNA, 19 nt, Artificial Sequence
  Description of Artificial Sequence: Synthetic oligonucleotide
  Antisense strand to SEQ ID NO: 1828743
accucugggaguuuaaauc

SEQ ID NO: 1828745 - RNA, 19 nt, Artificial Sequence
  Description of Artificial Sequence: Synthetic oligonucleotide
  Sense strand starting at position 366 of SEQ ID NO: 1563746
cucacuugaucccuuggau

SEQ ID NO: 1828746 - RNA, 19 nt, Artificial Sequence
  Description of Artificial Sequence: Synthetic oligonucleotide
  Antisense strand to SEQ ID NO: 1828745
auccaagggaucaagugag

SEQ ID NO: 1828747 - RNA, 19 nt, Artificial Sequence
  Description of Artificial Sequence: Synthetic oligonucleotide
  Sense strand starting at position 369 of SEQ ID NO: 1563746
acuugaucccuuggauauc

SEQ ID NO: 1828748 - RNA, 19 nt, Artificial Sequence
  Description of Artificial Sequence: Synthetic oligonucleotide
  Antisense strand to SEQ ID NO: 1828747
gauauccaagggaucaagu

SEQ ID NO: 1828749 - RNA, 19 nt, Artificial Sequence
  Description of Artificial Sequence: Synthetic oligonucleotide
  Sense strand starting at position 395 of SEQ ID NO: 1563746
uccauagaaugcuuuagau

SEQ ID NO: 1828750 - RNA, 19 nt, Artificial Sequence
  Description of Artificial Sequence: Synthetic oligonucleotide
  Antisense strand to SEQ ID NO: 1828749
aucuaaagcauucuaugga

SEQ ID NO: 1828751 - RNA, 19 nt, Artificial Sequence
  Description of Artificial Sequence: Synthetic oligonucleotide
  Sense strand starting at position 464 of SEQ ID NO: 1563746
gugucaagcauguguuaga

SEQ ID NO: 1828752 - RNA, 19 nt, Artificial Sequence
  Description of Artificial Sequence: Synthetic oligonucleotide
  Antisense strand to SEQ ID NO: 1828751
ucuaacacaugcuugacac

SEQ ID NO: 1828753 - RNA, 19 nt, Artificial Sequence
  Description of Artificial Sequence: Synthetic oligonucleotide
  Sense strand starting at position 465 of SEQ ID NO: 1563746
ugucaagcauguguuagaa

SEQ ID NO: 1828754 - RNA, 19 nt, Artificial Sequence
  Description of Artificial Sequence: Synthetic oligonucleotide
  Antisense strand to SEQ ID NO: 1828753
uucuaacacaugcuugaca

SEQ ID NO: 1828755 - RNA, 19 nt, Artificial Sequence
  Description of Artificial Sequence: Synthetic oligonucleotide
  Sense strand starting at position 483 of SEQ ID NO: 1563746
aaaucaagcugcuugaguu

SEQ ID NO: 1828756 - RNA, 19 nt, Artificial Sequence
  Description of Artificial Sequence: Synthetic oligonucleotide
  Antisense strand to SEQ ID NO: 1828755
aacucaagcagcuugauuu

SEQ ID NO: 1828757 - RNA, 19 nt, Artificial Sequence
  Description of Artificial Sequence: Synthetic oligonucleotide
  Sense strand starting at position 484 of SEQ ID NO: 1563746
aaucaagcugcuugaguua

SEQ ID NO: 1828758 - RNA, 19 nt, Artificial Sequence
  Description of Artificial Sequence: Synthetic oligonucleotide
  Antisense strand to SEQ ID NO: 1828757
uaacucaagcagcuugauu

SEQ ID NO: 1828759 - RNA, 19 nt, Artificial Sequence
  Description of Artificial Sequence: Synthetic oligonucleotide
  Sense strand starting at position 487 of SEQ ID NO: 1563746
caagcugcuugaguuaauu

SEQ ID NO: 1828760 - RNA, 19 nt, Artificial Sequence
  Description of Artificial Sequence: Synthetic oligonucleotide
  Antisense strand to SEQ ID NO: 1828759
aauuaacucaagcagcuug

SEQ ID NO: 1828761 - RNA, 19 nt, Artificial Sequence
  Description of Artificial Sequence: Synthetic oligonucleotide
  Sense strand starting at position 515 of SEQ ID NO: 1563746
ucuaaaugauucuuucguu

SEQ ID NO: 1828762 - RNA, 19 nt, Artificial Sequence
  Description of Artificial Sequence: Synthetic oligonucleotide
  Antisense strand to SEQ ID NO: 1828761
aacgaaagaaucauuuaga

SEQ ID NO: 1828763 - RNA, 19 nt, Artificial Sequence
  Description of Artificial Sequence: Synthetic oligonucleotide
  Sense strand starting at position 557 of SEQ ID NO: 1563746
guugauugccucuaaggga

SEQ ID NO: 1828764 - RNA, 19 nt, Artificial Sequence
  Description of Artificial Sequence: Synthetic oligonucleotide
  Antisense strand to SEQ ID NO: 1828763
ucccuuagaggcaaucaac

SEQ ID NO: 1828765 - RNA, 19 nt, Artificial Sequence
  Description of Artificial Sequence: Synthetic oligonucleotide
  Sense strand starting at position 922 of SEQ ID NO: 1563746
ggaccucagccucaaacuu

SEQ ID NO: 1828766 - RNA, 19 nt, Artificial Sequence
  Description of Artificial Sequence: Synthetic oligonucleotide
  Antisense strand to SEQ ID NO: 1828765
aaguuugaggcugaggucc

SEQ ID NO: 1828767 - RNA, 19 nt, Artificial Sequence
  Description of Artificial Sequence: Synthetic oligonucleotide
  Sense strand starting at position 1046 of SEQ ID NO: 1563746
gaagcauagguccauugua

SEQ ID NO: 1828768 - RNA, 19 nt, Artificial Sequence
  Description of Artificial Sequence: Synthetic oligonucleotide
  Antisense strand to SEQ ID NO: 1828767
uacaauggaccuaugcuuc

SEQ ID NO: 1828769 - RNA, 19 nt, Artificial Sequence
  Description of Artificial Sequence: Synthetic oligonucleotide
  Sense strand starting at position 1121 of SEQ ID NO: 1563746
cuguaaaguggaggaguaa

SEQ ID NO: 1828770 - RNA, 19 nt, Artificial Sequence
  Description of Artificial Sequence: Synthetic oligonucleotide
  Antisense strand to SEQ ID NO: 1828769
uuacuccuccacuuuacag

SEQ ID NO: 1828771 - RNA, 19 nt, Artificial Sequence
  Description of Artificial Sequence: Synthetic oligonucleotide
  Sense strand starting at position 1147 of SEQ ID NO: 1563746
cuaacauuauuguuguguu

SEQ ID NO: 1828772 - RNA, 19 nt, Artificial Sequence
  Description of Artificial Sequence: Synthetic oligonucleotide
  Antisense strand to SEQ ID NO: 1828771
aacacaacaauaauguuag

SEQ ID NO: 1828773 - RNA, 19 nt, Artificial Sequence
  Description of Artificial Sequence: Synthetic oligonucleotide
  Sense strand starting at position 1196 of SEQ ID NO: 1563746
gcacauagugaacauuaca

SEQ ID NO: 1828774 - RNA, 19 nt, Artificial Sequence
  Description of Artificial Sequence: Synthetic oligonucleotide
  Antisense strand to SEQ ID NO: 1828773
uguaauguucacuaugugc

SEQ ID NO: 1828775 - RNA, 19 nt, Artificial Sequence
  Description of Artificial Sequence: Synthetic oligonucleotide
  Sense strand starting at position 1264 of SEQ ID NO: 1563746
gguguagggcccuaaagau

SEQ ID NO: 1828776 - RNA, 19 nt, Artificial Sequence
  Description of Artificial Sequence: Synthetic oligonucleotide
  Antisense strand to SEQ ID NO: 1828775
aucuuuagggcccuacacc

SEQ ID NO: 1828777 - RNA, 19 nt, Artificial Sequence
  Description of Artificial Sequence: Synthetic oligonucleotide
  Sense strand starting at position 1377 of SEQ ID NO: 1563746
ggcuuugggccaggaguuu

SEQ ID NO: 1828778 - RNA, 19 nt, Artificial Sequence
  Description of Artificial Sequence: Synthetic oligonucleotide
  Antisense strand to SEQ ID NO: 1828777
aaacuccuggcccaaagcc

SEQ ID NO: 1828779 - RNA, 19 nt, Artificial Sequence
  Description of Artificial Sequence: Synthetic oligonucleotide
  Sense strand starting at position 1452 of SEQ ID NO: 1563746
ggaaaugccaucugagguu

SEQ ID NO: 1828780 - RNA, 19 nt, Artificial Sequence
  Description of Artificial Sequence: Synthetic oligonucleotide
  Antisense strand to SEQ ID NO: 1828779
aaccucagauggcauuucc

SEQ ID NO: 1828781 - RNA, 19 nt, Artificial Sequence
  Description of Artificial Sequence: Synthetic oligonucleotide
  Sense strand starting at position 1579 of SEQ ID NO: 1563746
aggaaauuguaccauuuau

SEQ ID NO: 1828782 - RNA, 19 nt, Artificial Sequence
  Description of Artificial Sequence: Synthetic oligonucleotide
  Antisense strand to SEQ ID NO: 1828781
auaaaugguacaauuuccu

SEQ ID NO: 1828783 - RNA, 19 nt, Artificial Sequence
  Description of Artificial Sequence: Synthetic oligonucleotide
  Sense strand starting at position 1835 of SEQ ID NO: 1563746
cuuugagggcuccaggaau

SEQ ID NO: 1828784 - RNA, 19 nt, Artificial Sequence
  Description of Artificial Sequence: Synthetic oligonucleotide
  Antisense strand to SEQ ID NO: 1828783
auuccuggagcccucaaag

SEQ ID NO: 1828785 - RNA, 19 nt, Artificial Sequence
  Description of Artificial Sequence: Synthetic oligonucleotide
  Sense strand starting at position 1949 of SEQ ID NO: 1563746
agagauucucaccgaggca

SEQ ID NO: 1828786 - RNA, 19 nt, Artificial Sequence
  Description of Artificial Sequence: Synthetic oligonucleotide
  Antisense strand to SEQ ID NO: 1828785
ugccucggugagaaucucu

SEQ ID NO: 1828787 - RNA, 19 nt, Artificial Sequence
  Description of Artificial Sequence: Synthetic oligonucleotide
  Sense strand starting at position 2093 of SEQ ID NO: 1563746
uccgguggccaguauuuaa

SEQ ID NO: 1828788 - RNA, 19 nt, Artificial Sequence
  Description of Artificial Sequence: Synthetic oligonucleotide
  Antisense strand to SEQ ID NO: 1828787
uuaaauacuggccaccgga

SEQ ID NO: 1828789 - RNA, 19 nt, Artificial Sequence
  Description of Artificial Sequence: Synthetic oligonucleotide
  Sense strand starting at position 2121 of SEQ ID NO: 1563746
acugaacuaugcgcucauu

SEQ ID NO: 1828790 - RNA, 19 nt, Artificial Sequence
  Description of Artificial Sequence: Synthetic oligonucleotide
  Antisense strand to SEQ ID NO: 1828789
aaugagcgcauaguucagu

SEQ ID NO: 1828791 - RNA, 19 nt, Artificial Sequence
  Description of Artificial Sequence: Synthetic oligonucleotide
  Sense strand starting at position 2124 of SEQ ID NO: 1563746
gaacuaugcgcucauuugu

SEQ ID NO: 1828792 - RNA, 19 nt, Artificial Sequence
  Description of Artificial Sequence: Synthetic oligonucleotide
  Antisense strand to SEQ ID NO: 1828791
acaaaugagcgcauaguuc

SEQ ID NO: 1828793 - RNA, 19 nt, Artificial Sequence
  Description of Artificial Sequence: Synthetic oligonucleotide
  Sense strand starting at position 2133 of SEQ ID NO: 1563746
gcucauuuguagguacuua

SEQ ID NO: 1828794 - RNA, 19 nt, Artificial Sequence
  Description of Artificial Sequence: Synthetic oligonucleotide
  Antisense strand to SEQ ID NO: 1828793
uaaguaccuacaaaugagc

SEQ ID NO: 1828795 - RNA, 19 nt, Artificial Sequence
  Description of Artificial Sequence: Synthetic oligonucleotide
  Sense strand starting at position 2180 of SEQ ID NO: 1563746
gagauucuccagugagcuc

SEQ ID NO: 1828796 - RNA, 19 nt, Artificial Sequence
  Description of Artificial Sequence: Synthetic oligonucleotide
  Antisense strand to SEQ ID NO: 1828795
gagcucacuggagaaucuc

SEQ ID NO: 1828797 - RNA, 19 nt, Artificial Sequence
  Description of Artificial Sequence: Synthetic oligonucleotide
  Sense strand starting at position 2522 of SEQ ID NO: 1563746
gccagcucucaagaagauu

SEQ ID NO: 1828798 - RNA, 19 nt, Artificial Sequence
  Description of Artificial Sequence: Synthetic oligonucleotide
  Antisense strand to SEQ ID NO: 1828797
aaucuucuugagagcuggc

SEQ ID NO: 1828799 - RNA, 19 nt, Artificial Sequence
  Description of Artificial Sequence: Synthetic oligonucleotide
  Sense strand starting at position 2564 of SEQ ID NO: 1563746
ccaauaccuuuaucgggau

SEQ ID NO: 1828800 - RNA, 19 nt, Artificial Sequence
  Description of Artificial Sequence: Synthetic oligonucleotide
  Antisense strand to SEQ ID NO: 1828799
aucccgauaaagguauugg

SEQ ID NO: 1828801 - RNA, 19 nt, Artificial Sequence
  Description of Artificial Sequence: Synthetic oligonucleotide
  Sense strand starting at position 2568 of SEQ ID NO: 1563746
uaccuuuaucgggaucuca

SEQ ID NO: 1828802 - RNA, 19 nt, Artificial Sequence
  Description of Artificial Sequence: Synthetic oligonucleotide
  Antisense strand to SEQ ID NO: 1828801
ugagaucccgauaaaggua

SEQ ID NO: 1828803 - RNA, 19 nt, Artificial Sequence
  Description of Artificial Sequence: Synthetic oligonucleotide
  Sense strand starting at position 2664 of SEQ ID NO: 1563746
ggcccugggauccauuauu

SEQ ID NO: 1828804 - RNA, 19 nt, Artificial Sequence
  Description of Artificial Sequence: Synthetic oligonucleotide
  Antisense strand to SEQ ID NO: 1828803
aauaauggaucccagggcc

SEQ ID NO: 1828805 - RNA, 19 nt, Artificial Sequence
  Description of Artificial Sequence: Synthetic oligonucleotide
  Sense strand starting at position 2859 of SEQ ID NO: 1563746
auaguugugugaccucaag

SEQ ID NO: 1828806 - RNA, 19 nt, Artificial Sequence
  Description of Artificial Sequence: Synthetic oligonucleotide
  Antisense strand to SEQ ID NO: 1828805
cuugaggucacacaacuau

SEQ ID NO: 1828807 - RNA, 19 nt, Artificial Sequence
  Description of Artificial Sequence: Synthetic oligonucleotide
  Sense strand starting at position 2882 of SEQ ID NO: 1563746
ugaguaaacucucugaguc

SEQ ID NO: 1828808 - RNA, 19 nt, Artificial Sequence
  Description of Artificial Sequence: Synthetic oligonucleotide
  Antisense strand to SEQ ID NO: 1828807
gacucagagaguuuacuca

SEQ ID NO: 1828809 - RNA, 19 nt, Artificial Sequence
  Description of Artificial Sequence: Synthetic oligonucleotide
  Sense strand starting at position 2969 of SEQ ID NO: 1563746
gccucaaugggaugaugua

SEQ ID NO: 1828810 - RNA, 19 nt, Artificial Sequence
  Description of Artificial Sequence: Synthetic oligonucleotide
  Antisense strand to SEQ ID NO: 1828809
uacaucaucccauugaggc

SEQ ID NO: 1828811 - RNA, 19 nt, Artificial Sequence
  Description of Artificial Sequence: Synthetic oligonucleotide
  Sense strand starting at position 3284 of SEQ ID NO: 1563746
augauagacuaauuggcua

SEQ ID NO: 1828812 - RNA, 19 nt, Artificial Sequence
  Description of Artificial Sequence: Synthetic oligonucleotide
  Antisense strand to SEQ ID NO: 1828811
uagccaauuagucuaucau

SEQ ID NO: 1828813 - RNA, 19 nt, Artificial Sequence
  Description of Artificial Sequence: Synthetic oligonucleotide
  Sense strand starting at position 3728 of SEQ ID NO: 1563746
caugcaucaggugauauca

SEQ ID NO: 1828814 - RNA, 19 nt, Artificial Sequence
  Description of Artificial Sequence: Synthetic oligonucleotide
  Antisense strand to SEQ ID NO: 1828813
ugauaucaccugaugcaug

SEQ ID NO: 1828815 - RNA, 19 nt, Artificial Sequence
  Description of Artificial Sequence: Synthetic oligonucleotide
  Sense strand starting at position 3737 of SEQ ID NO: 1563746
ggugauaucaauuguggcu

SEQ ID NO: 1828816 - RNA, 19 nt, Artificial Sequence
  Description of Artificial Sequence: Synthetic oligonucleotide
  Antisense strand to SEQ ID NO: 1828815
agccacaauugauaucacc

SEQ ID NO: 1828817 - RNA, 19 nt, Artificial Sequence
  Description of Artificial Sequence: Synthetic oligonucleotide
  Sense strand starting at position 3749 of SEQ ID NO: 1563746
uguggcuuccauuauaaac

SEQ ID NO: 1828818 - RNA, 19 nt, Artificial Sequence
  Description of Artificial Sequence: Synthetic oligonucleotide
  Antisense strand to SEQ ID NO: 1828817
guuuauaauggaagccaca

SEQ ID NO: 1828819 - RNA, 19 nt, Artificial Sequence
  Description of Artificial Sequence: Synthetic oligonucleotide
  Sense strand starting at position 3813 of SEQ ID NO: 1563746
auguguuucugggcaaguu

SEQ ID NO: 1828820 - RNA, 19 nt, Artificial Sequence
  Description of Artificial Sequence: Synthetic oligonucleotide
  Antisense strand to SEQ ID NO: 1828819
aacuugcccagaaacacau

SEQ ID NO: 1828821 - RNA, 19 nt, Artificial Sequence
  Description of Artificial Sequence: Synthetic oligonucleotide
  Sense strand starting at position 3919 of SEQ ID NO: 1563746
auggaaaccuuccuguaag

SEQ ID NO: 1828822 - RNA, 19 nt, Artificial Sequence
  Description of Artificial Sequence: Synthetic oligonucleotide
  Antisense strand to SEQ ID NO: 1828821
cuuacaggaagguuuccau

SEQ ID NO: 1828823 - RNA, 19 nt, Artificial Sequence
  Description of Artificial Sequence: Synthetic oligonucleotide
  Sense strand starting at position 591 of SEQ ID NO: 1563747
ccaggacucugaccguuaa

SEQ ID NO: 1828824 - RNA, 19 nt, Artificial Sequence
  Description of Artificial Sequence: Synthetic oligonucleotide
  Antisense strand to SEQ ID NO: 1828823
uuaacggucagaguccugg

SEQ ID NO: 1828825 - RNA, 19 nt, Artificial Sequence
  Description of Artificial Sequence: Synthetic oligonucleotide
  Sense strand starting at position 592 of SEQ ID NO: 1563747
caggacucugaccguuaaa

SEQ ID NO: 1828826 - RNA, 19 nt, Artificial Sequence
  Description of Artificial Sequence: Synthetic oligonucleotide
  Antisense strand to SEQ ID NO: 1828825
uuuaacggucagaguccug

SEQ ID NO: 1828827 - RNA, 19 nt, Artificial Sequence
  Description of Artificial Sequence: Synthetic oligonucleotide
  Sense strand starting at position 603 of SEQ ID NO: 1563747
ccguuaaacccuuagucca

SEQ ID NO: 1828828 - RNA, 19 nt, Artificial Sequence
  Description of Artificial Sequence: Synthetic oligonucleotide
  Antisense strand to SEQ ID NO: 1828827
uggacuaaggguuuaacgg

SEQ ID NO: 1828829 - RNA, 19 nt, Artificial Sequence
  Description of Artificial Sequence: Synthetic oligonucleotide
  Sense strand starting at position 636 of SEQ ID NO: 1563747
ggagaagguaacugagguu

SEQ ID NO: 1828830 - RNA, 19 nt, Artificial Sequence
  Description of Artificial Sequence: Synthetic oligonucleotide
  Antisense strand to SEQ ID NO: 1828829
aaccucaguuaccuucucc

SEQ ID NO: 1828831 - RNA, 19 nt, Artificial Sequence
  Description of Artificial Sequence: Synthetic oligonucleotide
  Sense strand starting at position 711 of SEQ ID NO: 1563747
ccacaaugauagcuuauga

SEQ ID NO: 1828832 - RNA, 19 nt, Artificial Sequence
  Description of Artificial Sequence: Synthetic oligonucleotide
  Antisense strand to SEQ ID NO: 1828831
ucauaagcuaucauugugg

SEQ ID NO: 1828833 - RNA, 19 nt, Artificial Sequence
  Description of Artificial Sequence: Synthetic oligonucleotide
  Sense strand starting at position 757 of SEQ ID NO: 1563747
ccucauugagagcauccaa

SEQ ID NO: 1828834 - RNA, 19 nt, Artificial Sequence
  Description of Artificial Sequence: Synthetic oligonucleotide
  Antisense strand to SEQ ID NO: 1828833
uuggaugcucucaaugagg

SEQ ID NO: 1828835 - RNA, 19 nt, Artificial Sequence
  Description of Artificial Sequence: Synthetic oligonucleotide
  Sense strand starting at position 776 of SEQ ID NO: 1563747
gcuugcugugugaguugga

SEQ ID NO: 1828836 - RNA, 19 nt, Artificial Sequence
  Description of Artificial Sequence: Synthetic oligonucleotide
  Antisense strand to SEQ ID NO: 1828835
uccaacucacacagcaagc

SEQ ID NO: 1828837 - RNA, 19 nt, Artificial Sequence
  Description of Artificial Sequence: Synthetic oligonucleotide
  Sense strand starting at position 821 of SEQ ID NO: 1563747
cagcauuucguguagcaaa

SEQ ID NO: 1828838 - RNA, 19 nt, Artificial Sequence
  Description of Artificial Sequence: Synthetic oligonucleotide
  Antisense strand to SEQ ID NO: 1828837
uuugcuacacgaaaugcug

SEQ ID NO: 1828839 - RNA, 19 nt, Artificial Sequence
  Description of Artificial Sequence: Synthetic oligonucleotide
  Sense strand starting at position 946 of SEQ ID NO: 1563747
uguugaaaucaguaggguu

SEQ ID NO: 1828840 - RNA, 19 nt, Artificial Sequence
  Description of Artificial Sequence: Synthetic oligonucleotide
  Antisense strand to SEQ ID NO: 1828839
aacccuacugauuucaaca

SEQ ID NO: 1828841 - RNA, 19 nt, Artificial Sequence
  Description of Artificial Sequence: Synthetic oligonucleotide
  Sense strand starting at position 972 of SEQ ID NO: 1563747
gcucuccucuguucugaga

SEQ ID NO: 1828842 - RNA, 19 nt, Artificial Sequence
  Description of Artificial Sequence: Synthetic oligonucleotide
  Antisense strand to SEQ ID NO: 1828841
ucucagaacagaggagagc

SEQ ID NO: 1828843 - RNA, 19 nt, Artificial Sequence
  Description of Artificial Sequence: Synthetic oligonucleotide
  Sense strand starting at position 989 of SEQ ID NO: 1563747
gagugacaaccugaggcuu

SEQ ID NO: 1828844 - RNA, 19 nt, Artificial Sequence
  Description of Artificial Sequence: Synthetic oligonucleotide
  Antisense strand to SEQ ID NO: 1828843
aagccucagguugucacuc

SEQ ID NO: 1828845 - RNA, 19 nt, Artificial Sequence
  Description of Artificial Sequence: Synthetic oligonucleotide
  Sense strand starting at position 1334 of SEQ ID NO: 1563747
augggaccuaugugcuauu

SEQ ID NO: 1828846 - RNA, 19 nt, Artificial Sequence
  Description of Artificial Sequence: Synthetic oligonucleotide
  Antisense strand to SEQ ID NO: 1828845
aauagcacauaggucccau

SEQ ID NO: 1828847 - RNA, 19 nt, Artificial Sequence
  Description of Artificial Sequence: Synthetic oligonucleotide
  Sense strand starting at position 1345 of SEQ ID NO: 1563747
gugcuauugcggccaggga

SEQ ID NO: 1828848 - RNA, 19 nt, Artificial Sequence
  Description of Artificial Sequence: Synthetic oligonucleotide
  Antisense strand to SEQ ID NO: 1828847
ucccuggccgcaauagcac

SEQ ID NO: 1828849 - RNA, 19 nt, Artificial Sequence
  Description of Artificial Sequence: Synthetic oligonucleotide
  Sense strand starting at position 1398 of SEQ ID NO: 1563747
gcugacguguguuucagaa

SEQ ID NO: 1828850 - RNA, 19 nt, Artificial Sequence
  Description of Artificial Sequence: Synthetic oligonucleotide
  Antisense strand to SEQ ID NO: 1828849
uucugaaacacacgucagc

SEQ ID NO: 1828851 - RNA, 19 nt, Artificial Sequence
  Description of Artificial Sequence: Synthetic oligonucleotide
  Sense strand starting at position 2010 of SEQ ID NO: 1563747
caaugaugggccuguggga

SEQ ID NO: 1828852 - RNA, 19 nt, Artificial Sequence
  Description of Artificial Sequence: Synthetic oligonucleotide
  Antisense strand to SEQ ID NO: 1828851
ucccacaggcccaucauug

SEQ ID NO: 1828853 - RNA, 19 nt, Artificial Sequence
  Description of Artificial Sequence: Synthetic oligonucleotide
  Sense strand starting at position 2095 of SEQ ID NO: 1563747
cugauaagauucuugcugu

SEQ ID NO: 1828854 - RNA, 19 nt, Artificial Sequence
  Description of Artificial Sequence: Synthetic oligonucleotide
  Antisense strand to SEQ ID NO: 1828853
acagcaagaaucuuaucag

SEQ ID NO: 1828855 - RNA, 19 nt, Artificial Sequence
  Description of Artificial Sequence: Synthetic oligonucleotide
  Sense strand starting at position 2098 of SEQ ID NO: 1563747
auaagauucuugcuguguc

SEQ ID NO: 1828856 - RNA, 19 nt, Artificial Sequence
  Description of Artificial Sequence: Synthetic oligonucleotide
  Antisense strand to SEQ ID NO: 1828855
gacacagcaagaaucuuau

SEQ ID NO: 1828857 - RNA, 19 nt, Artificial Sequence
  Description of Artificial Sequence: Synthetic oligonucleotide
  Sense strand starting at position 2101 of SEQ ID NO: 1563747
agauucuugcugugucaug

SEQ ID NO: 1828858 - RNA, 19 nt, Artificial Sequence
  Description of Artificial Sequence: Synthetic oligonucleotide
  Antisense strand to SEQ ID NO: 1828857
caugacacagcaagaaucu

SEQ ID NO: 1828859 - RNA, 19 nt, Artificial Sequence
  Description of Artificial Sequence: Synthetic oligonucleotide
  Sense strand starting at position 2102 of SEQ ID NO: 1563747
gauucuugcugugucauga

SEQ ID NO: 1828860 - RNA, 19 nt, Artificial Sequence
  Description of Artificial Sequence: Synthetic oligonucleotide
  Antisense strand to SEQ ID NO: 1828859
ucaugacacagcaagaauc

SEQ ID NO: 1828861 - RNA, 19 nt, Artificial Sequence
  Description of Artificial Sequence: Synthetic oligonucleotide
  Sense strand starting at position 2465 of SEQ ID NO: 1563747
ccagauguugguggcuaga

SEQ ID NO: 1828862 - RNA, 19 nt, Artificial Sequence
  Description of Artificial Sequence: Synthetic oligonucleotide
  Antisense strand to SEQ ID NO: 1828861
ucuagccaccaacaucugg

SEQ ID NO: 1828863 - RNA, 19 nt, Artificial Sequence
  Description of Artificial Sequence: Synthetic oligonucleotide
  Sense strand starting at position 2467 of SEQ ID NO: 1563747
agauguugguggcuagaga

SEQ ID NO: 1828864 - RNA, 19 nt, Artificial Sequence
  Description of Artificial Sequence: Synthetic oligonucleotide
  Antisense strand to SEQ ID NO: 1828863
ucucuagccaccaacaucu

SEQ ID NO: 1828865 - RNA, 19 nt, Artificial Sequence
  Description of Artificial Sequence: Synthetic oligonucleotide
  Sense strand starting at position 2468 of SEQ ID NO: 1563747
gauguugguggcuagagau

SEQ ID NO: 1828866 - RNA, 19 nt, Artificial Sequence
  Description of Artificial Sequence: Synthetic oligonucleotide
  Antisense strand to SEQ ID NO: 1828865
aucucuagccaccaacauc

SEQ ID NO: 1828867 - RNA, 19 nt, Artificial Sequence
  Description of Artificial Sequence: Synthetic oligonucleotide
  Sense strand starting at position 2516 of SEQ ID NO: 1563747
ccuuguguccuugggcaga

SEQ ID NO: 1828868 - RNA, 19 nt, Artificial Sequence
  Description of Artificial Sequence: Synthetic oligonucleotide
  Antisense strand to SEQ ID NO: 1828867
ucugcccaaggacacaagg

SEQ ID NO: 1828869 - RNA, 19 nt, Artificial Sequence
  Description of Artificial Sequence: Synthetic oligonucleotide
  Sense strand starting at position 2544 of SEQ ID NO: 1563747
ugcugugguccucaggaaa

SEQ ID NO: 1828870 - RNA, 19 nt, Artificial Sequence
  Description of Artificial Sequence: Synthetic oligonucleotide
  Antisense strand to SEQ ID NO: 1828869
uuuccugaggaccacagca

SEQ ID NO: 1828871 - RNA, 19 nt, Artificial Sequence
  Description of Artificial Sequence: Synthetic oligonucleotide
  Sense strand starting at position 2666 of SEQ ID NO: 1563747
cagguuucccgaugucuuc

SEQ ID NO: 1828872 - RNA, 19 nt, Artificial Sequence
  Description of Artificial Sequence: Synthetic oligonucleotide
  Antisense strand to SEQ ID NO: 1828871
gaagacaucgggaaaccug

SEQ ID NO: 1828873 - RNA, 19 nt, Artificial Sequence
  Description of Artificial Sequence: Synthetic oligonucleotide
  Sense strand starting at position 2676 of SEQ ID NO: 1563747
gaugucuucccauguuugu

SEQ ID NO: 1828874 - RNA, 19 nt, Artificial Sequence
  Description of Artificial Sequence: Synthetic oligonucleotide
  Antisense strand to SEQ ID NO: 1828873
acaaacaugggaagacauc

SEQ ID NO: 1828875 - RNA, 19 nt, Artificial Sequence
  Description of Artificial Sequence: Synthetic oligonucleotide
  Sense strand starting at position 2685 of SEQ ID NO: 1563747
ccauguuuguuccuccaga

SEQ ID NO: 1828876 - RNA, 19 nt, Artificial Sequence
  Description of Artificial Sequence: Synthetic oligonucleotide
  Antisense strand to SEQ ID NO: 1828875
ucuggaggaacaaacaugg

SEQ ID NO: 1828877 - RNA, 19 nt, Artificial Sequence
  Description of Artificial Sequence: Synthetic oligonucleotide
  Sense strand starting at position 2690 of SEQ ID NO: 1563747
uuuguuccuccagaaaguc

SEQ ID NO: 1828878 - RNA, 19 nt, Artificial Sequence
  Description of Artificial Sequence: Synthetic oligonucleotide
  Antisense strand to SEQ ID NO: 1828877
gacuuucuggaggaacaaa

SEQ ID NO: 1828879 - RNA, 19 nt, Artificial Sequence
  Description of Artificial Sequence: Synthetic oligonucleotide
  Sense strand starting at position 2698 of SEQ ID NO: 1563747
uccagaaagucccacuaga

SEQ ID NO: 1828880 - RNA, 19 nt, Artificial Sequence
  Description of Artificial Sequence: Synthetic oligonucleotide
  Antisense strand to SEQ ID NO: 1828879
ucuagugggacuuucugga

SEQ ID NO: 1828881 - RNA, 19 nt, Artificial Sequence
  Description of Artificial Sequence: Synthetic oligonucleotide
  Sense strand starting at position 2992 of SEQ ID NO: 1563747
guugcugugacucagcaga

SEQ ID NO: 1828882 - RNA, 19 nt, Artificial Sequence
  Description of Artificial Sequence: Synthetic oligonucleotide
  Antisense strand to SEQ ID NO: 1828881
ucugcugagucacagcaac

SEQ ID NO: 1828883 - RNA, 19 nt, Artificial Sequence
  Description of Artificial Sequence: Synthetic oligonucleotide
  Sense strand starting at position 3068 of SEQ ID NO: 1563747
ggaauuuggucaugagcaa

SEQ ID NO: 1828884 - RNA, 19 nt, Artificial Sequence
  Description of Artificial Sequence: Synthetic oligonucleotide
  Antisense strand to SEQ ID NO: 1828883
uugcucaugaccaaauucc

SEQ ID NO: 1828885 - RNA, 19 nt, Artificial Sequence
  Description of Artificial Sequence: Synthetic oligonucleotide
  Sense strand starting at position 3072 of SEQ ID NO: 1563747
uuuggucaugagcaaacau

SEQ ID NO: 1828886 - RNA, 19 nt, Artificial Sequence
  Description of Artificial Sequence: Synthetic oligonucleotide
  Antisense strand to SEQ ID NO: 1828885
auguuugcucaugaccaaa

SEQ ID NO: 1828887 - RNA, 19 nt, Artificial Sequence
  Description of Artificial Sequence: Synthetic oligonucleotide
  Sense strand starting at position 3154 of SEQ ID NO: 1563747
uccaguuaguucccaguaa

SEQ ID NO: 1828888 - RNA, 19 nt, Artificial Sequence
  Description of Artificial Sequence: Synthetic oligonucleotide
  Antisense strand to SEQ ID NO: 1828887
uuacugggaacuaacugga

SEQ ID NO: 1828889 - RNA, 19 nt, Artificial Sequence
  Description of Artificial Sequence: Synthetic oligonucleotide
  Sense strand starting at position 3158 of SEQ ID NO: 1563747
guuaguucccaguaagcug

SEQ ID NO: 1828890 - RNA, 19 nt, Artificial Sequence
  Description of Artificial Sequence: Synthetic oligonucleotide
  Antisense strand to SEQ ID NO: 1828889
cagcuuacugggaacuaac

SEQ ID NO: 1828891 - RNA, 19 nt, Artificial Sequence
  Description of Artificial Sequence: Synthetic oligonucleotide
  Sense strand starting at position 3191 of SEQ ID NO: 1563747
gggccagccgugaguugau

SEQ ID NO: 1828892 - RNA, 19 nt, Artificial Sequence
  Description of Artificial Sequence: Synthetic oligonucleotide
  Antisense strand to SEQ ID NO: 1828891
aucaacucacggcuggccc

SEQ ID NO: 1828893 - RNA, 19 nt, Artificial Sequence
  Description of Artificial Sequence: Synthetic oligonucleotide
  Sense strand starting at position 3204 of SEQ ID NO: 1563747
guugaugugacaugggcaa

SEQ ID NO: 1828894 - RNA, 19 nt, Artificial Sequence
  Description of Artificial Sequence: Synthetic oligonucleotide
  Antisense strand to SEQ ID NO: 1828893
uugcccaugucacaucaac

SEQ ID NO: 1828895 - RNA, 19 nt, Artificial Sequence
  Description of Artificial Sequence: Synthetic oligonucleotide
  Sense strand starting at position 3522 of SEQ ID NO: 1563747
ucuguaaugguuuguagaa

SEQ ID NO: 1828896 - RNA, 19 nt, Artificial Sequence
  Description of Artificial Sequence: Synthetic oligonucleotide
  Antisense strand to SEQ ID NO: 1828895
uucuacaaaccauuacaga

SEQ ID NO: 1828897 - RNA, 19 nt, Artificial Sequence
  Description of Artificial Sequence: Synthetic oligonucleotide
  Sense strand starting at position 3523 of SEQ ID NO: 1563747
cuguaaugguuuguagaaa

SEQ ID NO: 1828898 - RNA, 19 nt, Artificial Sequence
  Description of Artificial Sequence: Synthetic oligonucleotide
  Antisense strand to SEQ ID NO: 1828897
uuucuacaaaccauuacag

SEQ ID NO: 1828899 - RNA, 19 nt, Artificial Sequence
  Description of Artificial Sequence: Synthetic oligonucleotide
  Sense strand starting at position 3564 of SEQ ID NO: 1563747
gccugauugcuucgaagag

SEQ ID NO: 1828900 - RNA, 19 nt, Artificial Sequence
  Description of Artificial Sequence: Synthetic oligonucleotide
  Antisense strand to SEQ ID NO: 1828899
cucuucgaagcaaucaggc

SEQ ID NO: 1828901 - RNA, 19 nt, Artificial Sequence
  Description of Artificial Sequence: Synthetic oligonucleotide
  Sense strand starting at position 3573 of SEQ ID NO: 1563747
cuucgaagagcauguguuu

SEQ ID NO: 1828902 - RNA, 19 nt, Artificial Sequence
  Description of Artificial Sequence: Synthetic oligonucleotide
  Antisense strand to SEQ ID NO: 1828901
aaacacaugcucuucgaag

SEQ ID NO: 1828903 - RNA, 19 nt, Artificial Sequence
  Description of Artificial Sequence: Synthetic oligonucleotide
  Sense strand starting at position 391 of SEQ ID NO: 1563748
agaggauugcgagggauau

SEQ ID NO: 1828904 - RNA, 19 nt, Artificial Sequence
  Description of Artificial Sequence: Synthetic oligonucleotide
  Antisense strand to SEQ ID NO: 1828903
auaucccucgcaauccucu

SEQ ID NO: 1828905 - RNA, 19 nt, Artificial Sequence
  Description of Artificial Sequence: Synthetic oligonucleotide
  Sense strand starting at position 392 of SEQ ID NO: 1563748
gaggauugcgagggauaua

SEQ ID NO: 1828906 - RNA, 19 nt, Artificial Sequence
  Description of Artificial Sequence: Synthetic oligonucleotide
  Antisense strand to SEQ ID NO: 1828905
uauaucccucgcaauccuc

SEQ ID NO: 1828907 - RNA, 19 nt, Artificial Sequence
  Description of Artificial Sequence: Synthetic oligonucleotide
  Sense strand starting at position 446 of SEQ ID NO: 1563748
ugaaguugguagcugugaa

SEQ ID NO: 1828908 - RNA, 19 nt, Artificial Sequence
  Description of Artificial Sequence: Synthetic oligonucleotide
  Antisense strand to SEQ ID NO: 1828907
uucacagcuaccaacuuca

SEQ ID NO: 1828909 - RNA, 19 nt, Artificial Sequence
  Description of Artificial Sequence: Synthetic oligonucleotide
  Sense strand starting at position 447 of SEQ ID NO: 1563748
gaaguugguagcugugaau

SEQ ID NO: 1828910 - RNA, 19 nt, Artificial Sequence
  Description of Artificial Sequence: Synthetic oligonucleotide
  Antisense strand to SEQ ID NO: 1828909
auucacagcuaccaacuuc

SEQ ID NO: 1828911 - RNA, 19 nt, Artificial Sequence
  Description of Artificial Sequence: Synthetic oligonucleotide
  Sense strand starting at position 453 of SEQ ID NO: 1563748
gguagcugugaauguaaga

SEQ ID NO: 1828912 - RNA, 19 nt, Artificial Sequence
  Description of Artificial Sequence: Synthetic oligonucleotide
  Antisense strand to SEQ ID NO: 1828911
ucuuacauucacagcuacc

SEQ ID NO: 1828913 - RNA, 19 nt, Artificial Sequence
  Description of Artificial Sequence: Synthetic oligonucleotide
  Sense strand starting at position 458 of SEQ ID NO: 1563748
cugugaauguaagauuuac

SEQ ID NO: 1828914 - RNA, 19 nt, Artificial Sequence
  Description of Artificial Sequence: Synthetic oligonucleotide
  Antisense strand to SEQ ID NO: 1828913
guaaaucuuacauucacag

SEQ ID NO: 1828915 - RNA, 19 nt, Artificial Sequence
  Description of Artificial Sequence: Synthetic oligonucleotide
  Sense strand starting at position 806 of SEQ ID NO: 1563748
uuucuacuuucguacauuu

SEQ ID NO: 1828916 - RNA, 19 nt, Artificial Sequence
  Description of Artificial Sequence: Synthetic oligonucleotide
  Antisense strand to SEQ ID NO: 1828915
aaauguacgaaaguagaaa

SEQ ID NO: 1828917 - RNA, 19 nt, Artificial Sequence
  Description of Artificial Sequence: Synthetic oligonucleotide
  Sense strand starting at position 857 of SEQ ID NO: 1563748
cugucucugagcuggauua

SEQ ID NO: 1828918 - RNA, 19 nt, Artificial Sequence
  Description of Artificial Sequence: Synthetic oligonucleotide
  Antisense strand to SEQ ID NO: 1828917
uaauccagcucagagacag

SEQ ID NO: 1828919 - RNA, 19 nt, Artificial Sequence
  Description of Artificial Sequence: Synthetic oligonucleotide
  Sense strand starting at position 859 of SEQ ID NO: 1563748
gucucugagcuggauuacu

SEQ ID NO: 1828920 - RNA, 19 nt, Artificial Sequence
  Description of Artificial Sequence: Synthetic oligonucleotide
  Antisense strand to SEQ ID NO: 1828919
aguaauccagcucagagac

SEQ ID NO: 1828921 - RNA, 19 nt, Artificial Sequence
  Description of Artificial Sequence: Synthetic oligonucleotide
  Sense strand starting at position 867 of SEQ ID NO: 1563748
gcuggauuacugcaauuac

SEQ ID NO: 1828922 - RNA, 19 nt, Artificial Sequence
  Description of Artificial Sequence: Synthetic oligonucleotide
  Antisense strand to SEQ ID NO: 1828921
guaauugcaguaauccagc

SEQ ID NO: 1828923 - RNA, 19 nt, Artificial Sequence
  Description of Artificial Sequence: Synthetic oligonucleotide
  Sense strand starting at position 946 of SEQ ID NO: 1563748
cuagaacgaucaguguaag

SEQ ID NO: 1828924 - RNA, 19 nt, Artificial Sequence
  Description of Artificial Sequence: Synthetic oligonucleotide
  Antisense strand to SEQ ID NO: 1828923
cuuacacugaucguucuag

SEQ ID NO: 1828925 - RNA, 19 nt, Artificial Sequence
  Description of Artificial Sequence: Synthetic oligonucleotide
  Sense strand starting at position 947 of SEQ ID NO: 1563748
uagaacgaucaguguaaga

SEQ ID NO: 1828926 - RNA, 19 nt, Artificial Sequence
  Description of Artificial Sequence: Synthetic oligonucleotide
  Antisense strand to SEQ ID NO: 1828925
ucuuacacugaucguucua

SEQ ID NO: 1828927 - RNA, 19 nt, Artificial Sequence
  Description of Artificial Sequence: Synthetic oligonucleotide
  Sense strand starting at position 954 of SEQ ID NO: 1563748
aucaguguaagacguaauu

SEQ ID NO: 1828928 - RNA, 19 nt, Artificial Sequence
  Description of Artificial Sequence: Synthetic oligonucleotide
  Antisense strand to SEQ ID NO: 1828927
aauuacgucuuacacugau

SEQ ID NO: 1828929 - RNA, 19 nt, Artificial Sequence
  Description of Artificial Sequence: Synthetic oligonucleotide
  Sense strand starting at position 966 of SEQ ID NO: 1563748
cguaauuccgaucacauuc

SEQ ID NO: 1828930 - RNA, 19 nt, Artificial Sequence
  Description of Artificial Sequence: Synthetic oligonucleotide
  Antisense strand to SEQ ID NO: 1828929
gaaugugaucggaauuacg

SEQ ID NO: 1828931 - RNA, 19 nt, Artificial Sequence
  Description of Artificial Sequence: Synthetic oligonucleotide
  Sense strand starting at position 994 of SEQ ID NO: 1563748
ugagaacccuaccauggau

SEQ ID NO: 1828932 - RNA, 19 nt, Artificial Sequence
  Description of Artificial Sequence: Synthetic oligonucleotide
  Antisense strand to SEQ ID NO: 1828931
auccaugguaggguucuca

SEQ ID NO: 1828933 - RNA, 19 nt, Artificial Sequence
  Description of Artificial Sequence: Synthetic oligonucleotide
  Sense strand starting at position 1130 of SEQ ID NO: 1563748
uauagugaccuccgugcua

SEQ ID NO: 1828934 - RNA, 19 nt, Artificial Sequence
  Description of Artificial Sequence: Synthetic oligonucleotide
  Antisense strand to SEQ ID NO: 1828933
uagcacggaggucacuaua

SEQ ID NO: 1828935 - RNA, 19 nt, Artificial Sequence
  Description of Artificial Sequence: Synthetic oligonucleotide
  Sense strand starting at position 1132 of SEQ ID NO: 1563748
uagugaccuccgugcuauu

SEQ ID NO: 1828936 - RNA, 19 nt, Artificial Sequence
  Description of Artificial Sequence: Synthetic oligonucleotide
  Antisense strand to SEQ ID NO: 1828935
aauagcacggaggucacua

SEQ ID NO: 1828937 - RNA, 19 nt, Artificial Sequence
  Description of Artificial Sequence: Synthetic oligonucleotide
  Sense strand starting at position 1141 of SEQ ID NO: 1563748
ccgugcuauuccucuaaug

SEQ ID NO: 1828938 - RNA, 19 nt, Artificial Sequence
  Description of Artificial Sequence: Synthetic oligonucleotide
  Antisense strand to SEQ ID NO: 1828937
cauuagaggaauagcacgg

SEQ ID NO: 1828939 - RNA, 19 nt, Artificial Sequence
  Description of Artificial Sequence: Synthetic oligonucleotide
  Sense strand starting at position 1143 of SEQ ID NO: 1563748
gugcuauuccucuaaugug

SEQ ID NO: 1828940 - RNA, 19 nt, Artificial Sequence
  Description of Artificial Sequence: Synthetic oligonucleotide
  Antisense strand to SEQ ID NO: 1828939
cacauuagaggaauagcac

SEQ ID NO: 1828941 - RNA, 19 nt, Artificial Sequence
  Description of Artificial Sequence: Synthetic oligonucleotide
  Sense strand starting at position 1151 of SEQ ID NO: 1563748
ccucuaaugugccaggaga

SEQ ID NO: 1828942 - RNA, 19 nt, Artificial Sequence
  Description of Artificial Sequence: Synthetic oligonucleotide
  Antisense strand to SEQ ID NO: 1828941
ucuccuggcacauuagagg

SEQ ID NO: 1828943 - RNA, 19 nt, Artificial Sequence
  Description of Artificial Sequence: Synthetic oligonucleotide
  Sense strand starting at position 1190 of SEQ ID NO: 1563748
cagaaacaguaugacgaua

SEQ ID NO: 1828944 - RNA, 19 nt, Artificial Sequence
  Description of Artificial Sequence: Synthetic oligonucleotide
  Antisense strand to SEQ ID NO: 1828943
uaucgucauacuguuucug

SEQ ID NO: 1828945 - RNA, 19 nt, Artificial Sequence
  Description of Artificial Sequence: Synthetic oligonucleotide
  Sense strand starting at position 1209 of SEQ ID NO: 1563748
ggcagauguugucuugcaa

SEQ ID NO: 1828946 - RNA, 19 nt, Artificial Sequence
  Description of Artificial Sequence: Synthetic oligonucleotide
  Antisense strand to SEQ ID NO: 1828945
uugcaagacaacaucugcc

SEQ ID NO: 1828947 - RNA, 19 nt, Artificial Sequence
  Description of Artificial Sequence: Synthetic oligonucleotide
  Sense strand starting at position 2639 of SEQ ID NO: 1563748
guuuguugugcuugagaac

SEQ ID NO: 1828948 - RNA, 19 nt, Artificial Sequence
  Description of Artificial Sequence: Synthetic oligonucleotide
  Antisense strand to SEQ ID NO: 1828947
guucucaagcacaacaaac

SEQ ID NO: 1828949 - RNA, 19 nt, Artificial Sequence
  Description of Artificial Sequence: Synthetic oligonucleotide
  Sense strand starting at position 2661 of SEQ ID NO: 1563748
gcagaaucgagagggucuu

SEQ ID NO: 1828950 - RNA, 19 nt, Artificial Sequence
  Description of Artificial Sequence: Synthetic oligonucleotide
  Antisense strand to SEQ ID NO: 1828949
aagacccucucgauucugc

SEQ ID NO: 1828951 - RNA, 19 nt, Artificial Sequence
  Description of Artificial Sequence: Synthetic oligonucleotide
  Sense strand starting at position 2667 of SEQ ID NO: 1563748
ucgagagggucuuaaccaa

SEQ ID NO: 1828952 - RNA, 19 nt, Artificial Sequence
  Description of Artificial Sequence: Synthetic oligonucleotide
  Antisense strand to SEQ ID NO: 1828951
uugguuaagacccucucga

SEQ ID NO: 1828953 - RNA, 19 nt, Artificial Sequence
  Description of Artificial Sequence: Synthetic oligonucleotide
  Sense strand starting at position 2897 of SEQ ID NO: 1563748
uuuacucgguuguccagaa

SEQ ID NO: 1828954 - RNA, 19 nt, Artificial Sequence
  Description of Artificial Sequence: Synthetic oligonucleotide
  Antisense strand to SEQ ID NO: 1828953
uucuggacaaccgaguaaa

SEQ ID NO: 1828955 - RNA, 19 nt, Artificial Sequence
  Description of Artificial Sequence: Synthetic oligonucleotide
  Sense strand starting at position 2898 of SEQ ID NO: 1563748
uuacucgguuguccagaau

SEQ ID NO: 1828956 - RNA, 19 nt, Artificial Sequence
  Description of Artificial Sequence: Synthetic oligonucleotide
  Antisense strand to SEQ ID NO: 1828955
auucuggacaaccgaguaa

SEQ ID NO: 1828957 - RNA, 19 nt, Artificial Sequence
  Description of Artificial Sequence: Synthetic oligonucleotide
  Sense strand starting at position 2901 of SEQ ID NO: 1563748
cucgguuguccagaauuga

SEQ ID NO: 1828958 - RNA, 19 nt, Artificial Sequence
  Description of Artificial Sequence: Synthetic oligonucleotide
  Antisense strand to SEQ ID NO: 1828957
ucaauucuggacaaccgag

SEQ ID NO: 1828959 - RNA, 19 nt, Artificial Sequence
  Description of Artificial Sequence: Synthetic oligonucleotide
  Sense strand starting at position 2917 of SEQ ID NO: 1563748
ugaugcuguagucggaaua

SEQ ID NO: 1828960 - RNA, 19 nt, Artificial Sequence
  Description of Artificial Sequence: Synthetic oligonucleotide
  Antisense strand to SEQ ID NO: 1828959
uauuccgacuacagcauca

SEQ ID NO: 1828961 - RNA, 19 nt, Artificial Sequence
  Description of Artificial Sequence: Synthetic oligonucleotide
  Sense strand starting at position 2935 of SEQ ID NO: 1563748
acaccaaugcuuugaguaa

SEQ ID NO: 1828962 - RNA, 19 nt, Artificial Sequence
  Description of Artificial Sequence: Synthetic oligonucleotide
  Antisense strand to SEQ ID NO: 1828961
uuacucaaagcauuggugu

SEQ ID NO: 1828963 - RNA, 19 nt, Artificial Sequence
  Description of Artificial Sequence: Synthetic oligonucleotide
  Sense strand starting at position 3061 of SEQ ID NO: 1563748
aggagugauuugggcaauc

SEQ ID NO: 1828964 - RNA, 19 nt, Artificial Sequence
  Description of Artificial Sequence: Synthetic oligonucleotide
  Antisense strand to SEQ ID NO: 1828963
gauugcccaaaucacuccu

SEQ ID NO: 1828965 - RNA, 19 nt, Artificial Sequence
  Description of Artificial Sequence: Synthetic oligonucleotide
  Sense strand starting at position 3080 of SEQ ID NO: 1563748
aggugucacccugguguga

SEQ ID NO: 1828966 - RNA, 19 nt, Artificial Sequence
  Description of Artificial Sequence: Synthetic oligonucleotide
  Antisense strand to SEQ ID NO: 1828965
ucacaccagggugacaccu

SEQ ID NO: 1828967 - RNA, 19 nt, Artificial Sequence
  Description of Artificial Sequence: Synthetic oligonucleotide
  Sense strand starting at position 3146 of SEQ ID NO: 1563748
cuguucuucugccuuguua

SEQ ID NO: 1828968 - RNA, 19 nt, Artificial Sequence
  Description of Artificial Sequence: Synthetic oligonucleotide
  Antisense strand to SEQ ID NO: 1828967
uaacaaggcagaagaacag

SEQ ID NO: 1828969 - RNA, 19 nt, Artificial Sequence
  Description of Artificial Sequence: Synthetic oligonucleotide
  Sense strand starting at position 3148 of SEQ ID NO: 1563748
guucuucugccuuguuaac

SEQ ID NO: 1828970 - RNA, 19 nt, Artificial Sequence
  Description of Artificial Sequence: Synthetic oligonucleotide
  Antisense strand to SEQ ID NO: 1828969
guuaacaaggcagaagaac

SEQ ID NO: 1828971 - RNA, 19 nt, Artificial Sequence
  Description of Artificial Sequence: Synthetic oligonucleotide
  Sense strand starting at position 3150 of SEQ ID NO: 1563748
ucuucugccuuguuaacga

SEQ ID NO: 1828972 - RNA, 19 nt, Artificial Sequence
  Description of Artificial Sequence: Synthetic oligonucleotide
  Antisense strand to SEQ ID NO: 1828971
ucguuaacaaggcagaaga

SEQ ID NO: 1828973 - RNA, 19 nt, Artificial Sequence
  Description of Artificial Sequence: Synthetic oligonucleotide
  Sense strand starting at position 3267 of SEQ ID NO: 1563748
cuuccaucagucggauaca

SEQ ID NO: 1828974 - RNA, 19 nt, Artificial Sequence
  Description of Artificial Sequence: Synthetic oligonucleotide
  Antisense strand to SEQ ID NO: 1828973
uguauccgacugauggaag

SEQ ID NO: 1828975 - RNA, 19 nt, Artificial Sequence
  Description of Artificial Sequence: Synthetic oligonucleotide
  Sense strand starting at position 3302 of SEQ ID NO: 1563748
ugggugcaucggugaguau

SEQ ID NO: 1828976 - RNA, 19 nt, Artificial Sequence
  Description of Artificial Sequence: Synthetic oligonucleotide
  Antisense strand to SEQ ID NO: 1828975
auacucaccgaugcaccca

SEQ ID NO: 1828977 - RNA, 19 nt, Artificial Sequence
  Description of Artificial Sequence: Synthetic oligonucleotide
  Sense strand starting at position 3304 of SEQ ID NO: 1563748
ggugcaucggugaguaucu

SEQ ID NO: 1828978 - RNA, 19 nt, Artificial Sequence
  Description of Artificial Sequence: Synthetic oligonucleotide
  Antisense strand to SEQ ID NO: 1828977
agauacucaccgaugcacc

SEQ ID NO: 1828979 - RNA, 19 nt, Artificial Sequence
  Description of Artificial Sequence: Synthetic oligonucleotide
  Sense strand starting at position 3825 of SEQ ID NO: 1563748
cgcugaauguagcccuuaa

SEQ ID NO: 1828980 - RNA, 19 nt, Artificial Sequence
  Description of Artificial Sequence: Synthetic oligonucleotide
  Antisense strand to SEQ ID NO: 1828979
uuaagggcuacauucagcg

SEQ ID NO: 1828981 - RNA, 19 nt, Artificial Sequence
  Description of Artificial Sequence: Synthetic oligonucleotide
  Sense strand starting at position 3836 of SEQ ID NO: 1563748
gcccuuaauccuggaguug

SEQ ID NO: 1828982 - RNA, 19 nt, Artificial Sequence
  Description of Artificial Sequence: Synthetic oligonucleotide
  Antisense strand to SEQ ID NO: 1828981
caacuccaggauuaagggc

SEQ ID NO: 1828983 - RNA, 19 nt, Artificial Sequence
  Description of Artificial Sequence: Synthetic oligonucleotide
  Sense strand starting at position 161 of SEQ ID NO: 1563749
auguccugugaauauacau

SEQ ID NO: 1828984 - RNA, 19 nt, Artificial Sequence
  Description of Artificial Sequence: Synthetic oligonucleotide
  Antisense strand to SEQ ID NO: 1828983
auguauauucacaggacau

SEQ ID NO: 1828985 - RNA, 19 nt, Artificial Sequence
  Description of Artificial Sequence: Synthetic oligonucleotide
  Sense strand starting at position 209 of SEQ ID NO: 1563749
auggaugaacugugugaca

SEQ ID NO: 1828986 - RNA, 19 nt, Artificial Sequence
  Description of Artificial Sequence: Synthetic oligonucleotide
  Antisense strand to SEQ ID NO: 1828985
ugucacacaguucauccau

SEQ ID NO: 1828987 - RNA, 19 nt, Artificial Sequence
  Description of Artificial Sequence: Synthetic oligonucleotide
  Sense strand starting at position 211 of SEQ ID NO: 1563749
ggaugaacugugugacaug

SEQ ID NO: 1828988 - RNA, 19 nt, Artificial Sequence
  Description of Artificial Sequence: Synthetic oligonucleotide
  Antisense strand to SEQ ID NO: 1828987
caugucacacaguucaucc

SEQ ID NO: 1828989 - RNA, 19 nt, Artificial Sequence
  Description of Artificial Sequence: Synthetic oligonucleotide
  Sense strand starting at position 891 of SEQ ID NO: 1563749
agaggauugcgagggauau

SEQ ID NO: 1828990 - RNA, 19 nt, Artificial Sequence
  Description of Artificial Sequence: Synthetic oligonucleotide
  Antisense strand to SEQ ID NO: 1828989
auaucccucgcaauccucu

SEQ ID NO: 1828991 - RNA, 19 nt, Artificial Sequence
  Description of Artificial Sequence: Synthetic oligonucleotide
  Sense strand starting at position 892 of SEQ ID NO: 1563749
gaggauugcgagggauaua

SEQ ID NO: 1828992 - RNA, 19 nt, Artificial Sequence
  Description of Artificial Sequence: Synthetic oligonucleotide
  Antisense strand to SEQ ID NO: 1828991
uauaucccucgcaauccuc

SEQ ID NO: 1828993 - RNA, 19 nt, Artificial Sequence
  Description of Artificial Sequence: Synthetic oligonucleotide
  Sense strand starting at position 946 of SEQ ID NO: 1563749
ugaaguugguagcugugaa

SEQ ID NO: 1828994 - RNA, 19 nt, Artificial Sequence
  Description of Artificial Sequence: Synthetic oligonucleotide
  Antisense strand to SEQ ID NO: 1828993
uucacagcuaccaacuuca

SEQ ID NO: 1828995 - RNA, 19 nt, Artificial Sequence
  Description of Artificial Sequence: Synthetic oligonucleotide
  Sense strand starting at position 947 of SEQ ID NO: 1563749
gaaguugguagcugugaau

SEQ ID NO: 1828996 - RNA, 19 nt, Artificial Sequence
  Description of Artificial Sequence: Synthetic oligonucleotide
  Antisense strand to SEQ ID NO: 1828995
auucacagcuaccaacuuc

SEQ ID NO: 1828997 - RNA, 19 nt, Artificial Sequence
  Description of Artificial Sequence: Synthetic oligonucleotide
  Sense strand starting at position 953 of SEQ ID NO: 1563749
gguagcugugaauguaaga

SEQ ID NO: 1828998 - RNA, 19 nt, Artificial Sequence
  Description of Artificial Sequence: Synthetic oligonucleotide
  Antisense strand to SEQ ID NO: 1828997
ucuuacauucacagcuacc

SEQ ID NO: 1828999 - RNA, 19 nt, Artificial Sequence
  Description of Artificial Sequence: Synthetic oligonucleotide
  Sense strand starting at position 958 of SEQ ID NO: 1563749
cugugaauguaagauuuac

SEQ ID NO: 1829000 - RNA, 19 nt, Artificial Sequence
  Description of Artificial Sequence: Synthetic oligonucleotide
  Antisense strand to SEQ ID NO: 1828999
guaaaucuuacauucacag

SEQ ID NO: 1829001 - RNA, 19 nt, Artificial Sequence
  Description of Artificial Sequence: Synthetic oligonucleotide
  Sense strand starting at position 1306 of SEQ ID NO: 1563749
uuucuacuuucguacauuu

SEQ ID NO: 1829002 - RNA, 19 nt, Artificial Sequence
  Description of Artificial Sequence: Synthetic oligonucleotide
  Antisense strand to SEQ ID NO: 1829001
aaauguacgaaaguagaaa

SEQ ID NO: 1829003 - RNA, 19 nt, Artificial Sequence
  Description of Artificial Sequence: Synthetic oligonucleotide
  Sense strand starting at position 1357 of SEQ ID NO: 1563749
cugucucugagcuggauua

SEQ ID NO: 1829004 - RNA, 19 nt, Artificial Sequence
  Description of Artificial Sequence: Synthetic oligonucleotide
  Antisense strand to SEQ ID NO: 1829003
uaauccagcucagagacag

SEQ ID NO: 1829005 - RNA, 19 nt, Artificial Sequence
  Description of Artificial Sequence: Synthetic oligonucleotide
  Sense strand starting at position 1359 of SEQ ID NO: 1563749
gucucugagcuggauuacu

SEQ ID NO: 1829006 - RNA, 19 nt, Artificial Sequence
  Description of Artificial Sequence: Synthetic oligonucleotide
  Antisense strand to SEQ ID NO: 1829005
aguaauccagcucagagac

SEQ ID NO: 1829007 - RNA, 19 nt, Artificial Sequence
  Description of Artificial Sequence: Synthetic oligonucleotide
  Sense strand starting at position 1367 of SEQ ID NO: 1563749
gcuggauuacugcaauuac

SEQ ID NO: 1829008 - RNA, 19 nt, Artificial Sequence
  Description of Artificial Sequence: Synthetic oligonucleotide
  Antisense strand to SEQ ID NO: 1829007
guaauugcaguaauccagc

SEQ ID NO: 1829009 - RNA, 19 nt, Artificial Sequence
  Description of Artificial Sequence: Synthetic oligonucleotide
  Sense strand starting at position 1446 of SEQ ID NO: 1563749
cuagaacgaucaguguaag

SEQ ID NO: 1829010 - RNA, 19 nt, Artificial Sequence
  Description of Artificial Sequence: Synthetic oligonucleotide
  Antisense strand to SEQ ID NO: 1829009
cuuacacugaucguucuag

SEQ ID NO: 1829011 - RNA, 19 nt, Artificial Sequence
  Description of Artificial Sequence: Synthetic oligonucleotide
  Sense strand starting at position 1447 of SEQ ID NO: 1563749
uagaacgaucaguguaaga

SEQ ID NO: 1829012 - RNA, 19 nt, Artificial Sequence
  Description of Artificial Sequence: Synthetic oligonucleotide
  Antisense strand to SEQ ID NO: 1829011
ucuuacacugaucguucua

SEQ ID NO: 1829013 - RNA, 19 nt, Artificial Sequence
  Description of Artificial Sequence: Synthetic oligonucleotide
  Sense strand starting at position 1454 of SEQ ID NO: 1563749
aucaguguaagacguaauu

SEQ ID NO: 1829014 - RNA, 19 nt, Artificial Sequence
  Description of Artificial Sequence: Synthetic oligonucleotide
  Antisense strand to SEQ ID NO: 1829013
aauuacgucuuacacugau

SEQ ID NO: 1829015 - RNA, 19 nt, Artificial Sequence
  Description of Artificial Sequence: Synthetic oligonucleotide
  Sense strand starting at position 1466 of SEQ ID NO: 1563749
cguaauuccgaucacauuc

SEQ ID NO: 1829016 - RNA, 19 nt, Artificial Sequence
  Description of Artificial Sequence: Synthetic oligonucleotide
  Antisense strand to SEQ ID NO: 1829015
gaaugugaucggaauuacg

SEQ ID NO: 1829017 - RNA, 19 nt, Artificial Sequence
  Description of Artificial Sequence: Synthetic oligonucleotide
  Sense strand starting at position 1494 of SEQ ID NO: 1563749
ugagaacccuaccauggau

SEQ ID NO: 1829018 - RNA, 19 nt, Artificial Sequence
  Description of Artificial Sequence: Synthetic oligonucleotide
  Antisense strand to SEQ ID NO: 1829017
auccaugguaggguucuca

SEQ ID NO: 1829019 - RNA, 19 nt, Artificial Sequence
  Description of Artificial Sequence: Synthetic oligonucleotide
  Sense strand starting at position 1630 of SEQ ID NO: 1563749
uauagugaccuccgugcua

SEQ ID NO: 1829020 - RNA, 19 nt, Artificial Sequence
  Description of Artificial Sequence: Synthetic oligonucleotide
  Antisense strand to SEQ ID NO: 1829019
uagcacggaggucacuaua

SEQ ID NO: 1829021 - RNA, 19 nt, Artificial Sequence
  Description of Artificial Sequence: Synthetic oligonucleotide
  Sense strand starting at position 1632 of SEQ ID NO: 1563749
uagugaccuccgugcuauu

SEQ ID NO: 1829022 - RNA, 19 nt, Artificial Sequence
  Description of Artificial Sequence: Synthetic oligonucleotide
  Antisense strand to SEQ ID NO: 1829021
aauagcacggaggucacua

SEQ ID NO: 1829023 - RNA, 19 nt, Artificial Sequence
  Description of Artificial Sequence: Synthetic oligonucleotide
  Sense strand starting at position 1641 of SEQ ID NO: 1563749
ccgugcuauuccucuaaug

SEQ ID NO: 1829024 - RNA, 19 nt, Artificial Sequence
  Description of Artificial Sequence: Synthetic oligonucleotide
  Antisense strand to SEQ ID NO: 1829023
cauuagaggaauagcacgg

SEQ ID NO: 1829025 - RNA, 19 nt, Artificial Sequence
  Description of Artificial Sequence: Synthetic oligonucleotide
  Sense strand starting at position 1643 of SEQ ID NO: 1563749
gugcuauuccucuaaugug

SEQ ID NO: 1829026 - RNA, 19 nt, Artificial Sequence
  Description of Artificial Sequence: Synthetic oligonucleotide
  Antisense strand to SEQ ID NO: 1829025
cacauuagaggaauagcac

SEQ ID NO: 1829027 - RNA, 19 nt, Artificial Sequence
  Description of Artificial Sequence: Synthetic oligonucleotide
  Sense strand starting at position 1690 of SEQ ID NO: 1563749
cagaaacaguaugacgaua

SEQ ID NO: 1829028 - RNA, 19 nt, Artificial Sequence
  Description of Artificial Sequence: Synthetic oligonucleotide
  Antisense strand to SEQ ID NO: 1829027
uaucgucauacuguuucug

SEQ ID NO: 1829029 - RNA, 19 nt, Artificial Sequence
  Description of Artificial Sequence: Synthetic oligonucleotide
  Sense strand starting at position 1709 of SEQ ID NO: 1563749
ggcagauguugucuugcaa

SEQ ID NO: 1829030 - RNA, 19 nt, Artificial Sequence
  Description of Artificial Sequence: Synthetic oligonucleotide
  Antisense strand to SEQ ID NO: 1829029
uugcaagacaacaucugcc

SEQ ID NO: 1829031 - RNA, 19 nt, Artificial Sequence
  Description of Artificial Sequence: Synthetic oligonucleotide
  Sense strand starting at position 3139 of SEQ ID NO: 1563749
guuuguugugcuugagaac

SEQ ID NO: 1829032 - RNA, 19 nt, Artificial Sequence
  Description of Artificial Sequence: Synthetic oligonucleotide
  Antisense strand to SEQ ID NO: 1829031
guucucaagcacaacaaac

SEQ ID NO: 1829033 - RNA, 19 nt, Artificial Sequence
  Description of Artificial Sequence: Synthetic oligonucleotide
  Sense strand starting at position 3161 of SEQ ID NO: 1563749
gcagaaucgagagggucuu

SEQ ID NO: 1829034 - RNA, 19 nt, Artificial Sequence
  Description of Artificial Sequence: Synthetic oligonucleotide
  Antisense strand to SEQ ID NO: 1829033
aagacccucucgauucugc

SEQ ID NO: 1829035 - RNA, 19 nt, Artificial Sequence
  Description of Artificial Sequence: Synthetic oligonucleotide
  Sense strand starting at position 3167 of SEQ ID NO: 1563749
ucgagagggucuuaaccaa

SEQ ID NO: 1829036 - RNA, 19 nt, Artificial Sequence
  Description of Artificial Sequence: Synthetic oligonucleotide
  Antisense strand to SEQ ID NO: 1829035
uugguuaagacccucucga

SEQ ID NO: 1829037 - RNA, 19 nt, Artificial Sequence
  Description of Artificial Sequence: Synthetic oligonucleotide
  Sense strand starting at position 3397 of SEQ ID NO: 1563749
uuuacucgguuguccagaa

SEQ ID NO: 1829038 - RNA, 19 nt, Artificial Sequence
  Description of Artificial Sequence: Synthetic oligonucleotide
  Antisense strand to SEQ ID NO: 1829037
uucuggacaaccgaguaaa

SEQ ID NO: 1829039 - RNA, 19 nt, Artificial Sequence
  Description of Artificial Sequence: Synthetic oligonucleotide
  Sense strand starting at position 3398 of SEQ ID NO: 1563749
uuacucgguuguccagaau

SEQ ID NO: 1829040 - RNA, 19 nt, Artificial Sequence
  Description of Artificial Sequence: Synthetic oligonucleotide
  Antisense strand to SEQ ID NO: 1829039
auucuggacaaccgaguaa

SEQ ID NO: 1829041 - RNA, 19 nt, Artificial Sequence
  Description of Artificial Sequence: Synthetic oligonucleotide
  Sense strand starting at position 3401 of SEQ ID NO: 1563749
cucgguuguccagaauuga

SEQ ID NO: 1829042 - RNA, 19 nt, Artificial Sequence
  Description of Artificial Sequence: Synthetic oligonucleotide
  Antisense strand to SEQ ID NO: 1829041
ucaauucuggacaaccgag

SEQ ID NO: 1829043 - RNA, 19 nt, Artificial Sequence
  Description of Artificial Sequence: Synthetic oligonucleotide
  Sense strand starting at position 3417 of SEQ ID NO: 1563749
ugaugcuguagucggaaua

SEQ ID NO: 1829044 - RNA, 19 nt, Artificial Sequence
  Description of Artificial Sequence: Synthetic oligonucleotide
  Antisense strand to SEQ ID NO: 1829043
uauuccgacuacagcauca

SEQ ID NO: 1829045 - RNA, 19 nt, Artificial Sequence
  Description of Artificial Sequence: Synthetic oligonucleotide
  Sense strand starting at position 3435 of SEQ ID NO: 1563749
acaccaaugcuuugaguaa

SEQ ID NO: 1829046 - RNA, 19 nt, Artificial Sequence
  Description of Artificial Sequence: Synthetic oligonucleotide
  Antisense strand to SEQ ID NO: 1829045
uuacucaaagcauuggugu

SEQ ID NO: 1829047 - RNA, 19 nt, Artificial Sequence
  Description of Artificial Sequence: Synthetic oligonucleotide
  Sense strand starting at position 3561 of SEQ ID NO: 1563749
aggagugauuugggcaauc

SEQ ID NO: 1829048 - RNA, 19 nt, Artificial Sequence
  Description of Artificial Sequence: Synthetic oligonucleotide
  Antisense strand to SEQ ID NO: 1829047
gauugcccaaaucacuccu

SEQ ID NO: 1829049 - RNA, 19 nt, Artificial Sequence
  Description of Artificial Sequence: Synthetic oligonucleotide
  Sense strand starting at position 3580 of SEQ ID NO: 1563749
aggugucacccugguguga

SEQ ID NO: 1829050 - RNA, 19 nt, Artificial Sequence
  Description of Artificial Sequence: Synthetic oligonucleotide
  Antisense strand to SEQ ID NO: 1829049
ucacaccagggugacaccu

SEQ ID NO: 1829051 - RNA, 19 nt, Artificial Sequence
  Description of Artificial Sequence: Synthetic oligonucleotide
  Sense strand starting at position 3646 of SEQ ID NO: 1563749
cuguucuucugccuuguua

SEQ ID NO: 1829052 - RNA, 19 nt, Artificial Sequence
  Description of Artificial Sequence: Synthetic oligonucleotide
  Antisense strand to SEQ ID NO: 1829051
uaacaaggcagaagaacag

SEQ ID NO: 1829053 - RNA, 19 nt, Artificial Sequence
  Description of Artificial Sequence: Synthetic oligonucleotide
  Sense strand starting at position 3648 of SEQ ID NO: 1563749
guucuucugccuuguuaac

SEQ ID NO: 1829054 - RNA, 19 nt, Artificial Sequence
  Description of Artificial Sequence: Synthetic oligonucleotide
  Antisense strand to SEQ ID NO: 1829053
guuaacaaggcagaagaac

SEQ ID NO: 1829055 - RNA, 19 nt, Artificial Sequence
  Description of Artificial Sequence: Synthetic oligonucleotide
  Sense strand starting at position 3650 of SEQ ID NO: 1563749
ucuucugccuuguuaacga

SEQ ID NO: 1829056 - RNA, 19 nt, Artificial Sequence
  Description of Artificial Sequence: Synthetic oligonucleotide
  Antisense strand to SEQ ID NO: 1829055
ucguuaacaaggcagaaga

SEQ ID NO: 1829057 - RNA, 19 nt, Artificial Sequence
  Description of Artificial Sequence: Synthetic oligonucleotide
  Sense strand starting at position 3767 of SEQ ID NO: 1563749
cuuccaucagucggauaca

SEQ ID NO: 1829058 - RNA, 19 nt, Artificial Sequence
  Description of Artificial Sequence: Synthetic oligonucleotide
  Antisense strand to SEQ ID NO: 1829057
uguauccgacugauggaag

SEQ ID NO: 1829059 - RNA, 19 nt, Artificial Sequence
  Description of Artificial Sequence: Synthetic oligonucleotide
  Sense strand starting at position 3802 of SEQ ID NO: 1563749
ugggugcaucggugaguau

SEQ ID NO: 1829060 - RNA, 19 nt, Artificial Sequence
  Description of Artificial Sequence: Synthetic oligonucleotide
  Antisense strand to SEQ ID NO: 1829059
auacucaccgaugcaccca

SEQ ID NO: 1829061 - RNA, 19 nt, Artificial Sequence
  Description of Artificial Sequence: Synthetic oligonucleotide
  Sense strand starting at position 3804 of SEQ ID NO: 1563749
ggugcaucggugaguaucu

SEQ ID NO: 1829062 - RNA, 19 nt, Artificial Sequence
  Description of Artificial Sequence: Synthetic oligonucleotide
  Antisense strand to SEQ ID NO: 1829061
agauacucaccgaugcacc

SEQ ID NO: 1829063 - RNA, 19 nt, Artificial Sequence
  Description of Artificial Sequence: Synthetic oligonucleotide
  Sense strand starting at position 174 of SEQ ID NO: 1563750
acucaagucucacuggaaa

SEQ ID NO: 1829064 - RNA, 19 nt, Artificial Sequence
  Description of Artificial Sequence: Synthetic oligonucleotide
  Antisense strand to SEQ ID NO: 1829063
uuuccagugagacuugagu

SEQ ID NO: 1829065 - RNA, 19 nt, Artificial Sequence
  Description of Artificial Sequence: Synthetic oligonucleotide
  Sense strand starting at position 280 of SEQ ID NO: 1563750
acgacaaaccauugugaca

SEQ ID NO: 1829066 - RNA, 19 nt, Artificial Sequence
  Description of Artificial Sequence: Synthetic oligonucleotide
  Antisense strand to SEQ ID NO: 1829065
ugucacaaugguuugucgu

SEQ ID NO: 1829067 - RNA, 19 nt, Artificial Sequence
  Description of Artificial Sequence: Synthetic oligonucleotide
  Sense strand starting at position 300 of SEQ ID NO: 1563750
gacugaugaaguugggagu

SEQ ID NO: 1829068 - RNA, 19 nt, Artificial Sequence
  Description of Artificial Sequence: Synthetic oligonucleotide
  Antisense strand to SEQ ID NO: 1829067
acucccaacuucaucaguc

SEQ ID NO: 1829069 - RNA, 19 nt, Artificial Sequence
  Description of Artificial Sequence: Synthetic oligonucleotide
  Sense strand starting at position 313 of SEQ ID NO: 1563750
gggaguugccaguauucuc

SEQ ID NO: 1829070 - RNA, 19 nt, Artificial Sequence
  Description of Artificial Sequence: Synthetic oligonucleotide
  Antisense strand to SEQ ID NO: 1829069
gagaauacuggcaacuccc

SEQ ID NO: 1829071 - RNA, 19 nt, Artificial Sequence
  Description of Artificial Sequence: Synthetic oligonucleotide
  Sense strand starting at position 318 of SEQ ID NO: 1563750
uugccaguauucucuagau

SEQ ID NO: 1829072 - RNA, 19 nt, Artificial Sequence
  Description of Artificial Sequence: Synthetic oligonucleotide
  Antisense strand to SEQ ID NO: 1829071
aucuagagaauacuggcaa

SEQ ID NO: 1829073 - RNA, 19 nt, Artificial Sequence
  Description of Artificial Sequence: Synthetic oligonucleotide
  Sense strand starting at position 320 of SEQ ID NO: 1563750
gccaguauucucuagaugg

SEQ ID NO: 1829074 - RNA, 19 nt, Artificial Sequence
  Description of Artificial Sequence: Synthetic oligonucleotide
  Antisense strand to SEQ ID NO: 1829073
ccaucuagagaauacuggc

SEQ ID NO: 1829075 - RNA, 19 nt, Artificial Sequence
  Description of Artificial Sequence: Synthetic oligonucleotide
  Sense strand starting at position 417 of SEQ ID NO: 1563750
acuaaugagacggguaacu

SEQ ID NO: 1829076 - RNA, 19 nt, Artificial Sequence
  Description of Artificial Sequence: Synthetic oligonucleotide
  Antisense strand to SEQ ID NO: 1829075
aguuacccgucucauuagu

SEQ ID NO: 1829077 - RNA, 19 nt, Artificial Sequence
  Description of Artificial Sequence: Synthetic oligonucleotide
  Sense strand starting at position 571 of SEQ ID NO: 1563750
gggccugacucaguacuaa

SEQ ID NO: 1829078 - RNA, 19 nt, Artificial Sequence
  Description of Artificial Sequence: Synthetic oligonucleotide
  Antisense strand to SEQ ID NO: 1829077
uuaguacugagucaggccc

SEQ ID NO: 1829079 - RNA, 19 nt, Artificial Sequence
  Description of Artificial Sequence: Synthetic oligonucleotide
  Sense strand starting at position 889 of SEQ ID NO: 1563750
gcauuaagguuuccuaauc

SEQ ID NO: 1829080 - RNA, 19 nt, Artificial Sequence
  Description of Artificial Sequence: Synthetic oligonucleotide
  Antisense strand to SEQ ID NO: 1829079
gauuaggaaaccuuaaugc

SEQ ID NO: 1829081 - RNA, 19 nt, Artificial Sequence
  Description of Artificial Sequence: Synthetic oligonucleotide
  Sense strand starting at position 953 of SEQ ID NO: 1563750
agcauauauaaguguuugu

SEQ ID NO: 1829082 - RNA, 19 nt, Artificial Sequence
  Description of Artificial Sequence: Synthetic oligonucleotide
  Antisense strand to SEQ ID NO: 1829081
acaaacacuuauauaugcu

SEQ ID NO: 1829083 - RNA, 19 nt, Artificial Sequence
  Description of Artificial Sequence: Synthetic oligonucleotide
  Sense strand starting at position 957 of SEQ ID NO: 1563750
uauauaaguguuuguguca

SEQ ID NO: 1829084 - RNA, 19 nt, Artificial Sequence
  Description of Artificial Sequence: Synthetic oligonucleotide
  Antisense strand to SEQ ID NO: 1829083
ugacacaaacacuuauaua

SEQ ID NO: 1829085 - RNA, 19 nt, Artificial Sequence
  Description of Artificial Sequence: Synthetic oligonucleotide
  Sense strand starting at position 958 of SEQ ID NO: 1563750
auauaaguguuugugucaa

SEQ ID NO: 1829086 - RNA, 19 nt, Artificial Sequence
  Description of Artificial Sequence: Synthetic oligonucleotide
  Antisense strand to SEQ ID NO: 1829085
uugacacaaacacuuauau

SEQ ID NO: 1829087 - RNA, 19 nt, Artificial Sequence
  Description of Artificial Sequence: Synthetic oligonucleotide
  Sense strand starting at position 960 of SEQ ID NO: 1563750
auaaguguuugugucaaug

SEQ ID NO: 1829088 - RNA, 19 nt, Artificial Sequence
  Description of Artificial Sequence: Synthetic oligonucleotide
  Antisense strand to SEQ ID NO: 1829087
cauugacacaaacacuuau

SEQ ID NO: 1829089 - RNA, 19 nt, Artificial Sequence
  Description of Artificial Sequence: Synthetic oligonucleotide
  Sense strand starting at position 1062 of SEQ ID NO: 1563750
ggaagucauuaacucccaa

SEQ ID NO: 1829090 - RNA, 19 nt, Artificial Sequence
  Description of Artificial Sequence: Synthetic oligonucleotide
  Antisense strand to SEQ ID NO: 1829089
uugggaguuaaugacuucc

SEQ ID NO: 1829091 - RNA, 19 nt, Artificial Sequence
  Description of Artificial Sequence: Synthetic oligonucleotide
  Sense strand starting at position 1085 of SEQ ID NO: 1563750
ucacaacugccagguugau

SEQ ID NO: 1829092 - RNA, 19 nt, Artificial Sequence
  Description of Artificial Sequence: Synthetic oligonucleotide
  Antisense strand to SEQ ID NO: 1829091
aucaaccuggcaguuguga

SEQ ID NO: 1829093 - RNA, 19 nt, Artificial Sequence
  Description of Artificial Sequence: Synthetic oligonucleotide
  Sense strand starting at position 1091 of SEQ ID NO: 1563750
cugccagguugauuaacua

SEQ ID NO: 1829094 - RNA, 19 nt, Artificial Sequence
  Description of Artificial Sequence: Synthetic oligonucleotide
  Antisense strand to SEQ ID NO: 1829093
uaguuaaucaaccuggcag

SEQ ID NO: 1829095 - RNA, 19 nt, Artificial Sequence
  Description of Artificial Sequence: Synthetic oligonucleotide
  Sense strand starting at position 1146 of SEQ ID NO: 1563750
ucugaaguaucuuugcaac

SEQ ID NO: 1829096 - RNA, 19 nt, Artificial Sequence
  Description of Artificial Sequence: Synthetic oligonucleotide
  Antisense strand to SEQ ID NO: 1829095
guugcaaagauacuucaga

SEQ ID NO: 1829097 - RNA, 19 nt, Artificial Sequence
  Description of Artificial Sequence: Synthetic oligonucleotide
  Sense strand starting at position 1148 of SEQ ID NO: 1563750
ugaaguaucuuugcaacuu

SEQ ID NO: 1829098 - RNA, 19 nt, Artificial Sequence
  Description of Artificial Sequence: Synthetic oligonucleotide
  Antisense strand to SEQ ID NO: 1829097
aaguugcaaagauacuuca

SEQ ID NO: 1829099 - RNA, 19 nt, Artificial Sequence
  Description of Artificial Sequence: Synthetic oligonucleotide
  Sense strand starting at position 1235 of SEQ ID NO: 1563750
ccgggaugcuauucuggau

SEQ ID NO: 1829100 - RNA, 19 nt, Artificial Sequence
  Description of Artificial Sequence: Synthetic oligonucleotide
  Antisense strand to SEQ ID NO: 1829099
auccagaauagcaucccgg

SEQ ID NO: 1829101 - RNA, 19 nt, Artificial Sequence
  Description of Artificial Sequence: Synthetic oligonucleotide
  Sense strand starting at position 1262 of SEQ ID NO: 1563750
ggauuucuucgacgccaga

SEQ ID NO: 1829102 - RNA, 19 nt, Artificial Sequence
  Description of Artificial Sequence: Synthetic oligonucleotide
  Antisense strand to SEQ ID NO: 1829101
ucuggcgucgaagaaaucc

SEQ ID NO: 1829103 - RNA, 19 nt, Artificial Sequence
  Description of Artificial Sequence: Synthetic oligonucleotide
  Sense strand starting at position 1361 of SEQ ID NO: 1563750
acccuuagacagugaggau

SEQ ID NO: 1829104 - RNA, 19 nt, Artificial Sequence
  Description of Artificial Sequence: Synthetic oligonucleotide
  Antisense strand to SEQ ID NO: 1829103
auccucacugucuaagggu

SEQ ID NO: 1829105 - RNA, 19 nt, Artificial Sequence
  Description of Artificial Sequence: Synthetic oligonucleotide
  Sense strand starting at position 1573 of SEQ ID NO: 1563750
ggcucuucccacuacaagu

SEQ ID NO: 1829106 - RNA, 19 nt, Artificial Sequence
  Description of Artificial Sequence: Synthetic oligonucleotide
  Antisense strand to SEQ ID NO: 1829105
acuuguagugggaagagcc

SEQ ID NO: 1829107 - RNA, 19 nt, Artificial Sequence
  Description of Artificial Sequence: Synthetic oligonucleotide
  Sense strand starting at position 2224 of SEQ ID NO: 1563750
cggucucugaccgaacaaa

SEQ ID NO: 1829108 - RNA, 19 nt, Artificial Sequence
  Description of Artificial Sequence: Synthetic oligonucleotide
  Antisense strand to SEQ ID NO: 1829107
uuuguucggucagagaccg

SEQ ID NO: 1829109 - RNA, 19 nt, Artificial Sequence
  Description of Artificial Sequence: Synthetic oligonucleotide
  Sense strand starting at position 2380 of SEQ ID NO: 1563750
gacagagucaucugcggaa

SEQ ID NO: 1829110 - RNA, 19 nt, Artificial Sequence
  Description of Artificial Sequence: Synthetic oligonucleotide
  Antisense strand to SEQ ID NO: 1829109
uuccgcagaugacucuguc

SEQ ID NO: 1829111 - RNA, 19 nt, Artificial Sequence
  Description of Artificial Sequence: Synthetic oligonucleotide
  Sense strand starting at position 2454 of SEQ ID NO: 1563750
ccuuguuugcuagcgcuga

SEQ ID NO: 1829112 - RNA, 19 nt, Artificial Sequence
  Description of Artificial Sequence: Synthetic oligonucleotide
  Antisense strand to SEQ ID NO: 1829111
ucagcgcuagcaaacaagg

SEQ ID NO: 1829113 - RNA, 19 nt, Artificial Sequence
  Description of Artificial Sequence: Synthetic oligonucleotide
  Sense strand starting at position 2470 of SEQ ID NO: 1563750
ugacuccaggguuaguaau

SEQ ID NO: 1829114 - RNA, 19 nt, Artificial Sequence
  Description of Artificial Sequence: Synthetic oligonucleotide
  Antisense strand to SEQ ID NO: 1829113
auuacuaacccuggaguca

SEQ ID NO: 1829115 - RNA, 19 nt, Artificial Sequence
  Description of Artificial Sequence: Synthetic oligonucleotide
  Sense strand starting at position 2850 of SEQ ID NO: 1563750
aagugacacugagcuuaaa

SEQ ID NO: 1829116 - RNA, 19 nt, Artificial Sequence
  Description of Artificial Sequence: Synthetic oligonucleotide
  Antisense strand to SEQ ID NO: 1829115
uuuaagcucagugucacuu

SEQ ID NO: 1829117 - RNA, 19 nt, Artificial Sequence
  Description of Artificial Sequence: Synthetic oligonucleotide
  Sense strand starting at position 2910 of SEQ ID NO: 1563750
gggagaaucugugucuuug

SEQ ID NO: 1829118 - RNA, 19 nt, Artificial Sequence
  Description of Artificial Sequence: Synthetic oligonucleotide
  Antisense strand to SEQ ID NO: 1829117
caaagacacagauucuccc

SEQ ID NO: 1829119 - RNA, 19 nt, Artificial Sequence
  Description of Artificial Sequence: Synthetic oligonucleotide
  Sense strand starting at position 2912 of SEQ ID NO: 1563750
gagaaucugugucuuugac

SEQ ID NO: 1829120 - RNA, 19 nt, Artificial Sequence
  Description of Artificial Sequence: Synthetic oligonucleotide
  Antisense strand to SEQ ID NO: 1829119
gucaaagacacagauucuc

SEQ ID NO: 1829121 - RNA, 19 nt, Artificial Sequence
  Description of Artificial Sequence: Synthetic oligonucleotide
  Sense strand starting at position 2914 of SEQ ID NO: 1563750
gaaucugugucuuugacuu

SEQ ID NO: 1829122 - RNA, 19 nt, Artificial Sequence
  Description of Artificial Sequence: Synthetic oligonucleotide
  Antisense strand to SEQ ID NO: 1829121
aagucaaagacacagauuc

SEQ ID NO: 1829123 - RNA, 19 nt, Artificial Sequence
  Description of Artificial Sequence: Synthetic oligonucleotide
  Sense strand starting at position 3046 of SEQ ID NO: 1563750
auacccuugugauuagauu

SEQ ID NO: 1829124 - RNA, 19 nt, Artificial Sequence
  Description of Artificial Sequence: Synthetic oligonucleotide
  Antisense strand to SEQ ID NO: 1829123
aaucuaaucacaaggguau

SEQ ID NO: 1829125 - RNA, 19 nt, Artificial Sequence
  Description of Artificial Sequence: Synthetic oligonucleotide
  Sense strand starting at position 3137 of SEQ ID NO: 1563750
uuugcuauguaaguuaaca

SEQ ID NO: 1829126 - RNA, 19 nt, Artificial Sequence
  Description of Artificial Sequence: Synthetic oligonucleotide
  Antisense strand to SEQ ID NO: 1829125
uguuaacuuacauagcaaa

SEQ ID NO: 1829127 - RNA, 19 nt, Artificial Sequence
  Description of Artificial Sequence: Synthetic oligonucleotide
  Sense strand starting at position 3230 of SEQ ID NO: 1563750
gaaucaugucuagguggau

SEQ ID NO: 1829128 - RNA, 19 nt, Artificial Sequence
  Description of Artificial Sequence: Synthetic oligonucleotide
  Antisense strand to SEQ ID NO: 1829127
auccaccuagacaugauuc

SEQ ID NO: 1829129 - RNA, 19 nt, Artificial Sequence
  Description of Artificial Sequence: Synthetic oligonucleotide
  Sense strand starting at position 3403 of SEQ ID NO: 1563750
gguuccacucuuggaauua

SEQ ID NO: 1829130 - RNA, 19 nt, Artificial Sequence
  Description of Artificial Sequence: Synthetic oligonucleotide
  Antisense strand to SEQ ID NO: 1829129
uaauuccaagaguggaacc

SEQ ID NO: 1829131 - RNA, 19 nt, Artificial Sequence
  Description of Artificial Sequence: Synthetic oligonucleotide
  Sense strand starting at position 3445 of SEQ ID NO: 1563750
uuaugaaauuguuccagga

SEQ ID NO: 1829132 - RNA, 19 nt, Artificial Sequence
  Description of Artificial Sequence: Synthetic oligonucleotide
  Antisense strand to SEQ ID NO: 1829131
uccuggaacaauuucauaa

SEQ ID NO: 1829133 - RNA, 19 nt, Artificial Sequence
  Description of Artificial Sequence: Synthetic oligonucleotide
  Sense strand starting at position 3546 of SEQ ID NO: 1563750
aaggaauuaugggauacaa

SEQ ID NO: 1829134 - RNA, 19 nt, Artificial Sequence
  Description of Artificial Sequence: Synthetic oligonucleotide
  Antisense strand to SEQ ID NO: 1829133
uuguaucccauaauuccuu

SEQ ID NO: 1829135 - RNA, 19 nt, Artificial Sequence
  Description of Artificial Sequence: Synthetic oligonucleotide
  Sense strand starting at position 3627 of SEQ ID NO: 1563750
ugaaucucaggauguugau

SEQ ID NO: 1829136 - RNA, 19 nt, Artificial Sequence
  Description of Artificial Sequence: Synthetic oligonucleotide
  Antisense strand to SEQ ID NO: 1829135
aucaacauccugagauuca

SEQ ID NO: 1829137 - RNA, 19 nt, Artificial Sequence
  Description of Artificial Sequence: Synthetic oligonucleotide
  Sense strand starting at position 3827 of SEQ ID NO: 1563750
gcauguguuaucgaacaaa

SEQ ID NO: 1829138 - RNA, 19 nt, Artificial Sequence
  Description of Artificial Sequence: Synthetic oligonucleotide
  Antisense strand to SEQ ID NO: 1829137
uuuguucgauaacacaugc

SEQ ID NO: 1829139 - RNA, 19 nt, Artificial Sequence
  Description of Artificial Sequence: Synthetic oligonucleotide
  Sense strand starting at position 3872 of SEQ ID NO: 1563750
aguaucaaggccuguagaa

SEQ ID NO: 1829140 - RNA, 19 nt, Artificial Sequence
  Description of Artificial Sequence: Synthetic oligonucleotide
  Antisense strand to SEQ ID NO: 1829139
uucuacaggccuugauacu

SEQ ID NO: 1829141 - RNA, 19 nt, Artificial Sequence
  Description of Artificial Sequence: Synthetic oligonucleotide
  Sense strand starting at position 3874 of SEQ ID NO: 1563750
uaucaaggccuguagaacu

SEQ ID NO: 1829142 - RNA, 19 nt, Artificial Sequence
  Description of Artificial Sequence: Synthetic oligonucleotide
  Antisense strand to SEQ ID NO: 1829141
aguucuacaggccuugaua

SEQ ID NO: 1829143 - RNA, 19 nt, Artificial Sequence
  Description of Artificial Sequence: Synthetic oligonucleotide
  Sense strand starting at position 230 of SEQ ID NO: 1563751
uugcuaaaucuagauggcu

SEQ ID NO: 1829144 - RNA, 19 nt, Artificial Sequence
  Description of Artificial Sequence: Synthetic oligonucleotide
  Antisense strand to SEQ ID NO: 1829143
agccaucuagauuuagcaa

SEQ ID NO: 1829145 - RNA, 19 nt, Artificial Sequence
  Description of Artificial Sequence: Synthetic oligonucleotide
  Sense strand starting at position 250 of SEQ ID NO: 1563751
ccaaaugugcaccaauuga

SEQ ID NO: 1829146 - RNA, 19 nt, Artificial Sequence
  Description of Artificial Sequence: Synthetic oligonucleotide
  Antisense strand to SEQ ID NO: 1829145
ucaauuggugcacauuugg

SEQ ID NO: 1829147 - RNA, 19 nt, Artificial Sequence
  Description of Artificial Sequence: Synthetic oligonucleotide
  Sense strand starting at position 550 of SEQ ID NO: 1563751
gggugaugcaacuauucug

SEQ ID NO: 1829148 - RNA, 19 nt, Artificial Sequence
  Description of Artificial Sequence: Synthetic oligonucleotide
  Antisense strand to SEQ ID NO: 1829147
cagaauaguugcaucaccc

SEQ ID NO: 1829149 - RNA, 19 nt, Artificial Sequence
  Description of Artificial Sequence: Synthetic oligonucleotide
  Sense strand starting at position 562 of SEQ ID NO: 1563751
uauucuggacuuugauagu

SEQ ID NO: 1829150 - RNA, 19 nt, Artificial Sequence
  Description of Artificial Sequence: Synthetic oligonucleotide
  Antisense strand to SEQ ID NO: 1829149
acuaucaaaguccagaaua

SEQ ID NO: 1829151 - RNA, 19 nt, Artificial Sequence
  Description of Artificial Sequence: Synthetic oligonucleotide
  Sense strand starting at position 569 of SEQ ID NO: 1563751
gacuuugauaguggugauu

SEQ ID NO: 1829152 - RNA, 19 nt, Artificial Sequence
  Description of Artificial Sequence: Synthetic oligonucleotide
  Antisense strand to SEQ ID NO: 1829151
aaucaccacuaucaaaguc

SEQ ID NO: 1829153 - RNA, 19 nt, Artificial Sequence
  Description of Artificial Sequence: Synthetic oligonucleotide
  Sense strand starting at position 729 of SEQ ID NO: 1563751
agauuacugcuauauaguu

SEQ ID NO: 1829154 - RNA, 19 nt, Artificial Sequence
  Description of Artificial Sequence: Synthetic oligonucleotide
  Antisense strand to SEQ ID NO: 1829153
aacuauauagcaguaaucu

SEQ ID NO: 1829155 - RNA, 19 nt, Artificial Sequence
  Description of Artificial Sequence: Synthetic oligonucleotide
  Sense strand starting at position 746 of SEQ ID NO: 1563751
uuguuccuucuuugagaaa

SEQ ID NO: 1829156 - RNA, 19 nt, Artificial Sequence
  Description of Artificial Sequence: Synthetic oligonucleotide
  Antisense strand to SEQ ID NO: 1829155
uuucucaaagaaggaacaa

SEQ ID NO: 1829157 - RNA, 19 nt, Artificial Sequence
  Description of Artificial Sequence: Synthetic oligonucleotide
  Sense strand starting at position 786 of SEQ ID NO: 1563751
uugccucacuagguauuaa

SEQ ID NO: 1829158 - RNA, 19 nt, Artificial Sequence
  Description of Artificial Sequence: Synthetic oligonucleotide
  Antisense strand to SEQ ID NO: 1829157
uuaauaccuagugaggcaa

SEQ ID NO: 1829159 - RNA, 19 nt, Artificial Sequence
  Description of Artificial Sequence: Synthetic oligonucleotide
  Sense strand starting at position 1127 of SEQ ID NO: 1563751
cguuaaauuucuguaccuu

SEQ ID NO: 1829160 - RNA, 19 nt, Artificial Sequence
  Description of Artificial Sequence: Synthetic oligonucleotide
  Antisense strand to SEQ ID NO: 1829159
aagguacagaaauuuaacg

SEQ ID NO: 1829161 - RNA, 19 nt, Artificial Sequence
  Description of Artificial Sequence: Synthetic oligonucleotide
  Sense strand starting at position 1180 of SEQ ID NO: 1563751
aguagcuaaggauaguaau

SEQ ID NO: 1829162 - RNA, 19 nt, Artificial Sequence
  Description of Artificial Sequence: Synthetic oligonucleotide
  Antisense strand to SEQ ID NO: 1829161
auuacuauccuuagcuacu

SEQ ID NO: 1829163 - RNA, 19 nt, Artificial Sequence
  Description of Artificial Sequence: Synthetic oligonucleotide
  Sense strand starting at position 1434 of SEQ ID NO: 1563751
uuccauaaggcaggucaaa

SEQ ID NO: 1829164 - RNA, 19 nt, Artificial Sequence
  Description of Artificial Sequence: Synthetic oligonucleotide
  Antisense strand to SEQ ID NO: 1829163
uuugaccugccuuauggaa

SEQ ID NO: 1829165 - RNA, 19 nt, Artificial Sequence
  Description of Artificial Sequence: Synthetic oligonucleotide
  Sense strand starting at position 1542 of SEQ ID NO: 1563751
ggugucugaagaugaagua

SEQ ID NO: 1829166 - RNA, 19 nt, Artificial Sequence
  Description of Artificial Sequence: Synthetic oligonucleotide
  Antisense strand to SEQ ID NO: 1829165
uacuucaucuucagacacc

SEQ ID NO: 1829167 - RNA, 19 nt, Artificial Sequence
  Description of Artificial Sequence: Synthetic oligonucleotide
  Sense strand starting at position 1566 of SEQ ID NO: 1563751
aaauguugugcuuaucaga

SEQ ID NO: 1829168 - RNA, 19 nt, Artificial Sequence
  Description of Artificial Sequence: Synthetic oligonucleotide
  Antisense strand to SEQ ID NO: 1829167
ucugauaagcacaacauuu

SEQ ID NO: 1829169 - RNA, 19 nt, Artificial Sequence
  Description of Artificial Sequence: Synthetic oligonucleotide
  Sense strand starting at position 1592 of SEQ ID NO: 1563751
auaagcauccgauagccaa

SEQ ID NO: 1829170 - RNA, 19 nt, Artificial Sequence
  Description of Artificial Sequence: Synthetic oligonucleotide
  Antisense strand to SEQ ID NO: 1829169
uuggcuaucggaugcuuau

SEQ ID NO: 1829171 - RNA, 19 nt, Artificial Sequence
  Description of Artificial Sequence: Synthetic oligonucleotide
  Sense strand starting at position 1620 of SEQ ID NO: 1563751
agccauuucuccgagauuu

SEQ ID NO: 1829172 - RNA, 19 nt, Artificial Sequence
  Description of Artificial Sequence: Synthetic oligonucleotide
  Antisense strand to SEQ ID NO: 1829171
aaaucucggagaaauggcu

SEQ ID NO: 1829173 - RNA, 19 nt, Artificial Sequence
  Description of Artificial Sequence: Synthetic oligonucleotide
  Sense strand starting at position 1821 of SEQ ID NO: 1563751
ccaauauaauuggaaagaa

SEQ ID NO: 1829174 - RNA, 19 nt, Artificial Sequence
  Description of Artificial Sequence: Synthetic oligonucleotide
  Antisense strand to SEQ ID NO: 1829173
uucuuuccaauuauauugg

SEQ ID NO: 1829175 - RNA, 19 nt, Artificial Sequence
  Description of Artificial Sequence: Synthetic oligonucleotide
  Sense strand starting at position 1935 of SEQ ID NO: 1563751
ccagguuauggcgacuuca

SEQ ID NO: 1829176 - RNA, 19 nt, Artificial Sequence
  Description of Artificial Sequence: Synthetic oligonucleotide
  Antisense strand to SEQ ID NO: 1829175
ugaagucgccauaaccugg

SEQ ID NO: 1829177 - RNA, 19 nt, Artificial Sequence
  Description of Artificial Sequence: Synthetic oligonucleotide
  Sense strand starting at position 1972 of SEQ ID NO: 1563751
gaccguuagacucacgaga

SEQ ID NO: 1829178 - RNA, 19 nt, Artificial Sequence
  Description of Artificial Sequence: Synthetic oligonucleotide
  Antisense strand to SEQ ID NO: 1829177
ucucgugagucuaacgguc

SEQ ID NO: 1829179 - RNA, 19 nt, Artificial Sequence
  Description of Artificial Sequence: Synthetic oligonucleotide
  Sense strand starting at position 2591 of SEQ ID NO: 1563751
acgauugacuuucuucuuu

SEQ ID NO: 1829180 - RNA, 19 nt, Artificial Sequence
  Description of Artificial Sequence: Synthetic oligonucleotide
  Antisense strand to SEQ ID NO: 1829179
aaagaagaaagucaaucgu

SEQ ID NO: 1829181 - RNA, 19 nt, Artificial Sequence
  Description of Artificial Sequence: Synthetic oligonucleotide
  Sense strand starting at position 2747 of SEQ ID NO: 1563751
cugggagucuuccucaacu

SEQ ID NO: 1829182 - RNA, 19 nt, Artificial Sequence
  Description of Artificial Sequence: Synthetic oligonucleotide
  Antisense strand to SEQ ID NO: 1829181
aguugaggaagacucccag

SEQ ID NO: 1829183 - RNA, 19 nt, Artificial Sequence
  Description of Artificial Sequence: Synthetic oligonucleotide
  Sense strand starting at position 2971 of SEQ ID NO: 1563751
aucuuucuguucuuggaua

SEQ ID NO: 1829184 - RNA, 19 nt, Artificial Sequence
  Description of Artificial Sequence: Synthetic oligonucleotide
  Antisense strand to SEQ ID NO: 1829183
uauccaagaacagaaagau

SEQ ID NO: 1829185 - RNA, 19 nt, Artificial Sequence
  Description of Artificial Sequence: Synthetic oligonucleotide
  Sense strand starting at position 2982 of SEQ ID NO: 1563751
cuuggauauugguucuuga

SEQ ID NO: 1829186 - RNA, 19 nt, Artificial Sequence
  Description of Artificial Sequence: Synthetic oligonucleotide
  Antisense strand to SEQ ID NO: 1829185
ucaagaaccaauauccaag

SEQ ID NO: 1829187 - RNA, 19 nt, Artificial Sequence
  Description of Artificial Sequence: Synthetic oligonucleotide
  Sense strand starting at position 2990 of SEQ ID NO: 1563751
uugguucuugacggauaug

SEQ ID NO: 1829188 - RNA, 19 nt, Artificial Sequence
  Description of Artificial Sequence: Synthetic oligonucleotide
  Antisense strand to SEQ ID NO: 1829187
cauauccgucaagaaccaa

SEQ ID NO: 1829189 - RNA, 19 nt, Artificial Sequence
  Description of Artificial Sequence: Synthetic oligonucleotide
  Sense strand starting at position 2991 of SEQ ID NO: 1563751
ugguucuugacggauauga

SEQ ID NO: 1829190 - RNA, 19 nt, Artificial Sequence
  Description of Artificial Sequence: Synthetic oligonucleotide
  Antisense strand to SEQ ID NO: 1829189
ucauauccgucaagaacca

SEQ ID NO: 1829191 - RNA, 19 nt, Artificial Sequence
  Description of Artificial Sequence: Synthetic oligonucleotide
  Sense strand starting at position 2993 of SEQ ID NO: 1563751
guucuugacggauaugauc

SEQ ID NO: 1829192 - RNA, 19 nt, Artificial Sequence
  Description of Artificial Sequence: Synthetic oligonucleotide
  Antisense strand to SEQ ID NO: 1829191
gaucauauccgucaagaac

SEQ ID NO: 1829193 - RNA, 19 nt, Artificial Sequence
  Description of Artificial Sequence: Synthetic oligonucleotide
  Sense strand starting at position 2995 of SEQ ID NO: 1563751
ucuugacggauaugaucaa

SEQ ID NO: 1829194 - RNA, 19 nt, Artificial Sequence
  Description of Artificial Sequence: Synthetic oligonucleotide
  Antisense strand to SEQ ID NO: 1829193
uugaucauauccgucaaga

SEQ ID NO: 1829195 - RNA, 19 nt, Artificial Sequence
  Description of Artificial Sequence: Synthetic oligonucleotide
  Sense strand starting at position 3107 of SEQ ID NO: 1563751
ucgaaucuauauucuggaa

SEQ ID NO: 1829196 - RNA, 19 nt, Artificial Sequence
  Description of Artificial Sequence: Synthetic oligonucleotide
  Antisense strand to SEQ ID NO: 1829195
uuccagaauauagauucga

SEQ ID NO: 1829197 - RNA, 19 nt, Artificial Sequence
  Description of Artificial Sequence: Synthetic oligonucleotide
  Sense strand starting at position 3327 of SEQ ID NO: 1563751
uuagaaccaguauguauau

SEQ ID NO: 1829198 - RNA, 19 nt, Artificial Sequence
  Description of Artificial Sequence: Synthetic oligonucleotide
  Antisense strand to SEQ ID NO: 1829197
auauacauacugguucuaa

SEQ ID NO: 1829199 - RNA, 19 nt, Artificial Sequence
  Description of Artificial Sequence: Synthetic oligonucleotide
  Sense strand starting at position 3349 of SEQ ID NO: 1563751
agacaaggcuagucaaauu

SEQ ID NO: 1829200 - RNA, 19 nt, Artificial Sequence
  Description of Artificial Sequence: Synthetic oligonucleotide
  Antisense strand to SEQ ID NO: 1829199
aauuugacuagccuugucu

SEQ ID NO: 1829201 - RNA, 19 nt, Artificial Sequence
  Description of Artificial Sequence: Synthetic oligonucleotide
  Sense strand starting at position 3372 of SEQ ID NO: 1563751
uuuauaaauugggcaguaa

SEQ ID NO: 1829202 - RNA, 19 nt, Artificial Sequence
  Description of Artificial Sequence: Synthetic oligonucleotide
  Antisense strand to SEQ ID NO: 1829201
uuacugcccaauuuauaaa

SEQ ID NO: 1829203 - RNA, 19 nt, Artificial Sequence
  Description of Artificial Sequence: Synthetic oligonucleotide
  Sense strand starting at position 3631 of SEQ ID NO: 1563751
aggagagaaugucauuucu

SEQ ID NO: 1829204 - RNA, 19 nt, Artificial Sequence
  Description of Artificial Sequence: Synthetic oligonucleotide
  Antisense strand to SEQ ID NO: 1829203
agaaaugacauucucuccu

SEQ ID NO: 1829205 - RNA, 19 nt, Artificial Sequence
  Description of Artificial Sequence: Synthetic oligonucleotide
  Sense strand starting at position 3721 of SEQ ID NO: 1563751
acuaaugcaucuguaagua

SEQ ID NO: 1829206 - RNA, 19 nt, Artificial Sequence
  Description of Artificial Sequence: Synthetic oligonucleotide
  Antisense strand to SEQ ID NO: 1829205
uacuuacagaugcauuagu

SEQ ID NO: 1829207 - RNA, 19 nt, Artificial Sequence
  Description of Artificial Sequence: Synthetic oligonucleotide
  Sense strand starting at position 3731 of SEQ ID NO: 1563751
cuguaaguacuagguagau

SEQ ID NO: 1829208 - RNA, 19 nt, Artificial Sequence
  Description of Artificial Sequence: Synthetic oligonucleotide
  Antisense strand to SEQ ID NO: 1829207
aucuaccuaguacuuacag

SEQ ID NO: 1829209 - RNA, 19 nt, Artificial Sequence
  Description of Artificial Sequence: Synthetic oligonucleotide
  Sense strand starting at position 3811 of SEQ ID NO: 1563751
cugguuacuacugggauca

SEQ ID NO: 1829210 - RNA, 19 nt, Artificial Sequence
  Description of Artificial Sequence: Synthetic oligonucleotide
  Antisense strand to SEQ ID NO: 1829209
ugaucccaguaguaaccag

SEQ ID NO: 1829211 - RNA, 19 nt, Artificial Sequence
  Description of Artificial Sequence: Synthetic oligonucleotide
  Sense strand starting at position 3830 of SEQ ID NO: 1563751
gggcaauaggucugacaaa

SEQ ID NO: 1829212 - RNA, 19 nt, Artificial Sequence
  Description of Artificial Sequence: Synthetic oligonucleotide
  Antisense strand to SEQ ID NO: 1829211
uuugucagaccuauugccc

SEQ ID NO: 1829213 - RNA, 19 nt, Artificial Sequence
  Description of Artificial Sequence: Synthetic oligonucleotide
  Sense strand starting at position 3943 of SEQ ID NO: 1563751
aucgaucuguccuuuaaga

SEQ ID NO: 1829214 - RNA, 19 nt, Artificial Sequence
  Description of Artificial Sequence: Synthetic oligonucleotide
  Antisense strand to SEQ ID NO: 1829213
ucuuaaaggacagaucgau

SEQ ID NO: 1829215 - RNA, 19 nt, Artificial Sequence
  Description of Artificial Sequence: Synthetic oligonucleotide
  Sense strand starting at position 3945 of SEQ ID NO: 1563751
cgaucuguccuuuaagauu

SEQ ID NO: 1829216 - RNA, 19 nt, Artificial Sequence
  Description of Artificial Sequence: Synthetic oligonucleotide
  Antisense strand to SEQ ID NO: 1829215
aaucuuaaaggacagaucg

SEQ ID NO: 1829217 - RNA, 19 nt, Artificial Sequence
  Description of Artificial Sequence: Synthetic oligonucleotide
  Sense strand starting at position 3954 of SEQ ID NO: 1563751
cuuuaagauuucguagcau

SEQ ID NO: 1829218 - RNA, 19 nt, Artificial Sequence
  Description of Artificial Sequence: Synthetic oligonucleotide
  Antisense strand to SEQ ID NO: 1829217
augcuacgaaaucuuaaag

SEQ ID NO: 1829219 - RNA, 19 nt, Artificial Sequence
  Description of Artificial Sequence: Synthetic oligonucleotide
  Sense strand starting at position 3972 of SEQ ID NO: 1563751
uuaugucauguacagcaua

SEQ ID NO: 1829220 - RNA, 19 nt, Artificial Sequence
  Description of Artificial Sequence: Synthetic oligonucleotide
  Antisense strand to SEQ ID NO: 1829219
uaugcuguacaugacauaa

SEQ ID NO: 1829221 - RNA, 19 nt, Artificial Sequence
  Description of Artificial Sequence: Synthetic oligonucleotide
  Sense strand starting at position 3975 of SEQ ID NO: 1563751
ugucauguacagcauaaau

SEQ ID NO: 1829222 - RNA, 19 nt, Artificial Sequence
  Description of Artificial Sequence: Synthetic oligonucleotide
  Antisense strand to SEQ ID NO: 1829221
auuuaugcuguacaugaca

SEQ ID NO: 1829223 - RNA, 19 nt, Artificial Sequence
  Description of Artificial Sequence: Synthetic oligonucleotide
  Sense strand starting at position 20 of SEQ ID NO: 1563752
ugaaacaucgcagacucau

SEQ ID NO: 1829224 - RNA, 19 nt, Artificial Sequence
  Description of Artificial Sequence: Synthetic oligonucleotide
  Antisense strand to SEQ ID NO: 1829223
augagucugcgauguuuca

SEQ ID NO: 1829225 - RNA, 19 nt, Artificial Sequence
  Description of Artificial Sequence: Synthetic oligonucleotide
  Sense strand starting at position 78 of SEQ ID NO: 1563752
agcccuaaagcuuauauga

SEQ ID NO: 1829226 - RNA, 19 nt, Artificial Sequence
  Description of Artificial Sequence: Synthetic oligonucleotide
  Antisense strand to SEQ ID NO: 1829225
ucauauaagcuuuagggcu

SEQ ID NO: 1829227 - RNA, 19 nt, Artificial Sequence
  Description of Artificial Sequence: Synthetic oligonucleotide
  Sense strand starting at position 143 of SEQ ID NO: 1563752
ugccauagagaucaagguu

SEQ ID NO: 1829228 - RNA, 19 nt, Artificial Sequence
  Description of Artificial Sequence: Synthetic oligonucleotide
  Antisense strand to SEQ ID NO: 1829227
aaccuugaucucuauggca

SEQ ID NO: 1829229 - RNA, 19 nt, Artificial Sequence
  Description of Artificial Sequence: Synthetic oligonucleotide
  Sense strand starting at position 146 of SEQ ID NO: 1563752
cauagagaucaagguuuac

SEQ ID NO: 1829230 - RNA, 19 nt, Artificial Sequence
  Description of Artificial Sequence: Synthetic oligonucleotide
  Antisense strand to SEQ ID NO: 1829229
guaaaccuugaucucuaug

SEQ ID NO: 1829231 - RNA, 19 nt, Artificial Sequence
  Description of Artificial Sequence: Synthetic oligonucleotide
  Sense strand starting at position 270 of SEQ ID NO: 1563752
cucacuaucguugacugaa

SEQ ID NO: 1829232 - RNA, 19 nt, Artificial Sequence
  Description of Artificial Sequence: Synthetic oligonucleotide
  Antisense strand to SEQ ID NO: 1829231
uucagucaacgauagugag

SEQ ID NO: 1829233 - RNA, 19 nt, Artificial Sequence
  Description of Artificial Sequence: Synthetic oligonucleotide
  Sense strand starting at position 284 of SEQ ID NO: 1563752
cugaaacucgcugauguaa

SEQ ID NO: 1829234 - RNA, 19 nt, Artificial Sequence
  Description of Artificial Sequence: Synthetic oligonucleotide
  Antisense strand to SEQ ID NO: 1829233
uuacaucagcgaguuucag

SEQ ID NO: 1829235 - RNA, 19 nt, Artificial Sequence
  Description of Artificial Sequence: Synthetic oligonucleotide
  Sense strand starting at position 304 of SEQ ID NO: 1563752
gaaguuacauaaucaccga

SEQ ID NO: 1829236 - RNA, 19 nt, Artificial Sequence
  Description of Artificial Sequence: Synthetic oligonucleotide
  Antisense strand to SEQ ID NO: 1829235
ucggugauuauguaacuuc

SEQ ID NO: 1829237 - RNA, 19 nt, Artificial Sequence
  Description of Artificial Sequence: Synthetic oligonucleotide
  Sense strand starting at position 307 of SEQ ID NO: 1563752
guuacauaaucaccgauua

SEQ ID NO: 1829238 - RNA, 19 nt, Artificial Sequence
  Description of Artificial Sequence: Synthetic oligonucleotide
  Antisense strand to SEQ ID NO: 1829237
uaaucggugauuauguaac

SEQ ID NO: 1829239 - RNA, 19 nt, Artificial Sequence
  Description of Artificial Sequence: Synthetic oligonucleotide
  Sense strand starting at position 383 of SEQ ID NO: 1563752
aucaaucuaccaggugaga

SEQ ID NO: 1829240 - RNA, 19 nt, Artificial Sequence
  Description of Artificial Sequence: Synthetic oligonucleotide
  Antisense strand to SEQ ID NO: 1829239
ucucaccugguagauugau

SEQ ID NO: 1829241 - RNA, 19 nt, Artificial Sequence
  Description of Artificial Sequence: Synthetic oligonucleotide
  Sense strand starting at position 394 of SEQ ID NO: 1563752
aggugagauuuauaacaua

SEQ ID NO: 1829242 - RNA, 19 nt, Artificial Sequence
  Description of Artificial Sequence: Synthetic oligonucleotide
  Antisense strand to SEQ ID NO: 1829241
uauguuauaaaucucaccu

SEQ ID NO: 1829243 - RNA, 19 nt, Artificial Sequence
  Description of Artificial Sequence: Synthetic oligonucleotide
  Sense strand starting at position 477 of SEQ ID NO: 1563752
acugaaccacgucaucaau

SEQ ID NO: 1829244 - RNA, 19 nt, Artificial Sequence
  Description of Artificial Sequence: Synthetic oligonucleotide
  Antisense strand to SEQ ID NO: 1829243
auugaugacgugguucagu

SEQ ID NO: 1829245 - RNA, 19 nt, Artificial Sequence
  Description of Artificial Sequence: Synthetic oligonucleotide
  Sense strand starting at position 479 of SEQ ID NO: 1563752
ugaaccacgucaucaauau

SEQ ID NO: 1829246 - RNA, 19 nt, Artificial Sequence
  Description of Artificial Sequence: Synthetic oligonucleotide
  Antisense strand to SEQ ID NO: 1829245
auauugaugacgugguuca

SEQ ID NO: 1829247 - RNA, 19 nt, Artificial Sequence
  Description of Artificial Sequence: Synthetic oligonucleotide
  Sense strand starting at position 483 of SEQ ID NO: 1563752
ccacgucaucaauauugau

SEQ ID NO: 1829248 - RNA, 19 nt, Artificial Sequence
  Description of Artificial Sequence: Synthetic oligonucleotide
  Antisense strand to SEQ ID NO: 1829247
aucaauauugaugacgugg

SEQ ID NO: 1829249 - RNA, 19 nt, Artificial Sequence
  Description of Artificial Sequence: Synthetic oligonucleotide
  Sense strand starting at position 521 of SEQ ID NO: 1563752
ggcagaauaugcuuaaaca

SEQ ID NO: 1829250 - RNA, 19 nt, Artificial Sequence
  Description of Artificial Sequence: Synthetic oligonucleotide
  Antisense strand to SEQ ID NO: 1829249
uguuuaagcauauucugcc

SEQ ID NO: 1829251 - RNA, 19 nt, Artificial Sequence
  Description of Artificial Sequence: Synthetic oligonucleotide
  Sense strand starting at position 522 of SEQ ID NO: 1563752
gcagaauaugcuuaaacau

SEQ ID NO: 1829252 - RNA, 19 nt, Artificial Sequence
  Description of Artificial Sequence: Synthetic oligonucleotide
  Antisense strand to SEQ ID NO: 1829251
auguuuaagcauauucugc

SEQ ID NO: 1829253 - RNA, 19 nt, Artificial Sequence
  Description of Artificial Sequence: Synthetic oligonucleotide
  Sense strand starting at position 532 of SEQ ID NO: 1563752
cuuaaacauccuuaguguu

SEQ ID NO: 1829254 - RNA, 19 nt, Artificial Sequence
  Description of Artificial Sequence: Synthetic oligonucleotide
  Antisense strand to SEQ ID NO: 1829253
aacacuaaggauguuuaag

SEQ ID NO: 1829255 - RNA, 19 nt, Artificial Sequence
  Description of Artificial Sequence: Synthetic oligonucleotide
  Sense strand starting at position 624 of SEQ ID NO: 1563752
ggaaguauguaauuaauug

SEQ ID NO: 1829256 - RNA, 19 nt, Artificial Sequence
  Description of Artificial Sequence: Synthetic oligonucleotide
  Antisense strand to SEQ ID NO: 1829255
caauuaauuacauacuucc

SEQ ID NO: 1829257 - RNA, 19 nt, Artificial Sequence
  Description of Artificial Sequence: Synthetic oligonucleotide
  Sense strand starting at position 798 of SEQ ID NO: 1563752
ggugauauuuaagauaaug

SEQ ID NO: 1829258 - RNA, 19 nt, Artificial Sequence
  Description of Artificial Sequence: Synthetic oligonucleotide
  Antisense strand to SEQ ID NO: 1829257
cauuaucuuaaauaucacc

SEQ ID NO: 1829259 - RNA, 19 nt, Artificial Sequence
  Description of Artificial Sequence: Synthetic oligonucleotide
  Sense strand starting at position 962 of SEQ ID NO: 1563752
cgaugauuaucaccuuaaa

SEQ ID NO: 1829260 - RNA, 19 nt, Artificial Sequence
  Description of Artificial Sequence: Synthetic oligonucleotide
  Antisense strand to SEQ ID NO: 1829259
uuuaaggugauaaucaucg

SEQ ID NO: 1829261 - RNA, 19 nt, Artificial Sequence
  Description of Artificial Sequence: Synthetic oligonucleotide
  Sense strand starting at position 1012 of SEQ ID NO: 1563752
gucccauugcggcugugaa

SEQ ID NO: 1829262 - RNA, 19 nt, Artificial Sequence
  Description of Artificial Sequence: Synthetic oligonucleotide
  Antisense strand to SEQ ID NO: 1829261
uucacagccgcaaugggac

SEQ ID NO: 1829263 - RNA, 19 nt, Artificial Sequence
  Description of Artificial Sequence: Synthetic oligonucleotide
  Sense strand starting at position 1184 of SEQ ID NO: 1563752
aagagugucuacccagaau

SEQ ID NO: 1829264 - RNA, 19 nt, Artificial Sequence
  Description of Artificial Sequence: Synthetic oligonucleotide
  Antisense strand to SEQ ID NO: 1829263
auucuggguagacacucuu

SEQ ID NO: 1829265 - RNA, 19 nt, Artificial Sequence
  Description of Artificial Sequence: Synthetic oligonucleotide
  Sense strand starting at position 1187 of SEQ ID NO: 1563752
agugucuacccagaauuaa

SEQ ID NO: 1829266 - RNA, 19 nt, Artificial Sequence
  Description of Artificial Sequence: Synthetic oligonucleotide
  Antisense strand to SEQ ID NO: 1829265
uuaauucuggguagacacu

SEQ ID NO: 1829267 - RNA, 19 nt, Artificial Sequence
  Description of Artificial Sequence: Synthetic oligonucleotide
  Sense strand starting at position 2034 of SEQ ID NO: 1563752
ccgggaugcagccauaaga

SEQ ID NO: 1829268 - RNA, 19 nt, Artificial Sequence
  Description of Artificial Sequence: Synthetic oligonucleotide
  Antisense strand to SEQ ID NO: 1829267
ucuuauggcugcaucccgg

SEQ ID NO: 1829269 - RNA, 19 nt, Artificial Sequence
  Description of Artificial Sequence: Synthetic oligonucleotide
  Sense strand starting at position 2073 of SEQ ID NO: 1563752
acaaguaucccgcaauaac

SEQ ID NO: 1829270 - RNA, 19 nt, Artificial Sequence
  Description of Artificial Sequence: Synthetic oligonucleotide
  Antisense strand to SEQ ID NO: 1829269
guuauugcgggauacuugu

SEQ ID NO: 1829271 - RNA, 19 nt, Artificial Sequence
  Description of Artificial Sequence: Synthetic oligonucleotide
  Sense strand starting at position 2259 of SEQ ID NO: 1563752
gaaugaugcuaauccugag

SEQ ID NO: 1829272 - RNA, 19 nt, Artificial Sequence
  Description of Artificial Sequence: Synthetic oligonucleotide
  Antisense strand to SEQ ID NO: 1829271
cucaggauuagcaucauuc

SEQ ID NO: 1829273 - RNA, 19 nt, Artificial Sequence
  Description of Artificial Sequence: Synthetic oligonucleotide
  Sense strand starting at position 2263 of SEQ ID NO: 1563752
gaugcuaauccugagcgaa

SEQ ID NO: 1829274 - RNA, 19 nt, Artificial Sequence
  Description of Artificial Sequence: Synthetic oligonucleotide
  Antisense strand to SEQ ID NO: 1829273
uucgcucaggauuagcauc

SEQ ID NO: 1829275 - RNA, 19 nt, Artificial Sequence
  Description of Artificial Sequence: Synthetic oligonucleotide
  Sense strand starting at position 2304 of SEQ ID NO: 1563752
gcacgagaucuugauuaau

SEQ ID NO: 1829276 - RNA, 19 nt, Artificial Sequence
  Description of Artificial Sequence: Synthetic oligonucleotide
  Antisense strand to SEQ ID NO: 1829275
auuaaucaagaucucgugc

SEQ ID NO: 1829277 - RNA, 19 nt, Artificial Sequence
  Description of Artificial Sequence: Synthetic oligonucleotide
  Sense strand starting at position 2306 of SEQ ID NO: 1563752
acgagaucuugauuaauag

SEQ ID NO: 1829278 - RNA, 19 nt, Artificial Sequence
  Description of Artificial Sequence: Synthetic oligonucleotide
  Antisense strand to SEQ ID NO: 1829277
cuauuaaucaagaucucgu

SEQ ID NO: 1829279 - RNA, 19 nt, Artificial Sequence
  Description of Artificial Sequence: Synthetic oligonucleotide
  Sense strand starting at position 2307 of SEQ ID NO: 1563752
cgagaucuugauuaauagc

SEQ ID NO: 1829280 - RNA, 19 nt, Artificial Sequence
  Description of Artificial Sequence: Synthetic oligonucleotide
  Antisense strand to SEQ ID NO: 1829279
gcuauuaaucaagaucucg

SEQ ID NO: 1829281 - RNA, 19 nt, Artificial Sequence
  Description of Artificial Sequence: Synthetic oligonucleotide
  Sense strand starting at position 2533 of SEQ ID NO: 1563752
gaguuugaguucucagaag

SEQ ID NO: 1829282 - RNA, 19 nt, Artificial Sequence
  Description of Artificial Sequence: Synthetic oligonucleotide
  Antisense strand to SEQ ID NO: 1829281
cuucugagaacucaaacuc

SEQ ID NO: 1829283 - RNA, 19 nt, Artificial Sequence
  Description of Artificial Sequence: Synthetic oligonucleotide
  Sense strand starting at position 2565 of SEQ ID NO: 1563752
gaagguagccugggaaucu

SEQ ID NO: 1829284 - RNA, 19 nt, Artificial Sequence
  Description of Artificial Sequence: Synthetic oligonucleotide
  Antisense strand to SEQ ID NO: 1829283
agauucccaggcuaccuuc

SEQ ID NO: 1829285 - RNA, 19 nt, Artificial Sequence
  Description of Artificial Sequence: Synthetic oligonucleotide
  Sense strand starting at position 2850 of SEQ ID NO: 1563752
uccguaucacuuuaagaug

SEQ ID NO: 1829286 - RNA, 19 nt, Artificial Sequence
  Description of Artificial Sequence: Synthetic oligonucleotide
  Antisense strand to SEQ ID NO: 1829285
caucuuaaagugauacgga

SEQ ID NO: 1829287 - RNA, 19 nt, Artificial Sequence
  Description of Artificial Sequence: Synthetic oligonucleotide
  Sense strand starting at position 2925 of SEQ ID NO: 1563752
ugauaauuguuucuaaagg

SEQ ID NO: 1829288 - RNA, 19 nt, Artificial Sequence
  Description of Artificial Sequence: Synthetic oligonucleotide
  Antisense strand to SEQ ID NO: 1829287
ccuuuagaaacaauuauca

SEQ ID NO: 1829289 - RNA, 19 nt, Artificial Sequence
  Description of Artificial Sequence: Synthetic oligonucleotide
  Sense strand starting at position 3200 of SEQ ID NO: 1563752
aagaguucgcugcugguuu

SEQ ID NO: 1829290 - RNA, 19 nt, Artificial Sequence
  Description of Artificial Sequence: Synthetic oligonucleotide
  Antisense strand to SEQ ID NO: 1829289
aaaccagcagcgaacucuu

SEQ ID NO: 1829291 - RNA, 19 nt, Artificial Sequence
  Description of Artificial Sequence: Synthetic oligonucleotide
  Sense strand starting at position 3222 of SEQ ID NO: 1563752
agaugaauuugugaugaag

SEQ ID NO: 1829292 - RNA, 19 nt, Artificial Sequence
  Description of Artificial Sequence: Synthetic oligonucleotide
  Antisense strand to SEQ ID NO: 1829291
cuucaucacaaauucaucu

SEQ ID NO: 1829293 - RNA, 19 nt, Artificial Sequence
  Description of Artificial Sequence: Synthetic oligonucleotide
  Sense strand starting at position 3273 of SEQ ID NO: 1563752
uuagguuauuugcucaauu

SEQ ID NO: 1829294 - RNA, 19 nt, Artificial Sequence
  Description of Artificial Sequence: Synthetic oligonucleotide
  Antisense strand to SEQ ID NO: 1829293
aauugagcaaauaaccuaa

SEQ ID NO: 1829295 - RNA, 19 nt, Artificial Sequence
  Description of Artificial Sequence: Synthetic oligonucleotide
  Sense strand starting at position 3564 of SEQ ID NO: 1563752
cugaguaggcuggaugauu

SEQ ID NO: 1829296 - RNA, 19 nt, Artificial Sequence
  Description of Artificial Sequence: Synthetic oligonucleotide
  Antisense strand to SEQ ID NO: 1829295
aaucauccagccuacucag

SEQ ID NO: 1829297 - RNA, 19 nt, Artificial Sequence
  Description of Artificial Sequence: Synthetic oligonucleotide
  Sense strand starting at position 3719 of SEQ ID NO: 1563752
caggcuuaaccggauaaac

SEQ ID NO: 1829298 - RNA, 19 nt, Artificial Sequence
  Description of Artificial Sequence: Synthetic oligonucleotide
  Antisense strand to SEQ ID NO: 1829297
guuuauccgguuaagccug

SEQ ID NO: 1829299 - RNA, 19 nt, Artificial Sequence
  Description of Artificial Sequence: Synthetic oligonucleotide
  Sense strand starting at position 3721 of SEQ ID NO: 1563752
ggcuuaaccggauaaacca

SEQ ID NO: 1829300 - RNA, 19 nt, Artificial Sequence
  Description of Artificial Sequence: Synthetic oligonucleotide
  Antisense strand to SEQ ID NO: 1829299
ugguuuauccgguuaagcc

SEQ ID NO: 1829301 - RNA, 19 nt, Artificial Sequence
  Description of Artificial Sequence: Synthetic oligonucleotide
  Sense strand starting at position 3938 of SEQ ID NO: 1563752
ggagcaguacacugaaauu

SEQ ID NO: 1829302 - RNA, 19 nt, Artificial Sequence
  Description of Artificial Sequence: Synthetic oligonucleotide
  Antisense strand to SEQ ID NO: 1829301
aauuucaguguacugcucc

SEQ ID NO: 1829303 - RNA, 19 nt, Artificial Sequence
  Description of Artificial Sequence: Synthetic oligonucleotide
  Sense strand starting at position 4 of SEQ ID NO: 1563753
agagaaguguccuuuccuc

SEQ ID NO: 1829304 - RNA, 19 nt, Artificial Sequence
  Description of Artificial Sequence: Synthetic oligonucleotide
  Antisense strand to SEQ ID NO: 1829303
gaggaaaggacacuucucu

SEQ ID NO: 1829305 - RNA, 19 nt, Artificial Sequence
  Description of Artificial Sequence: Synthetic oligonucleotide
  Sense strand starting at position 54 of SEQ ID NO: 1563753
ccagcuaugccgcauguuu

SEQ ID NO: 1829306 - RNA, 19 nt, Artificial Sequence
  Description of Artificial Sequence: Synthetic oligonucleotide
  Antisense strand to SEQ ID NO: 1829305
aaacaugcggcauagcugg

SEQ ID NO: 1829307 - RNA, 19 nt, Artificial Sequence
  Description of Artificial Sequence: Synthetic oligonucleotide
  Sense strand starting at position 59 of SEQ ID NO: 1563753
uaugccgcauguuuaauaa

SEQ ID NO: 1829308 - RNA, 19 nt, Artificial Sequence
  Description of Artificial Sequence: Synthetic oligonucleotide
  Antisense strand to SEQ ID NO: 1829307
uuauuaaacaugcggcaua

SEQ ID NO: 1829309 - RNA, 19 nt, Artificial Sequence
  Description of Artificial Sequence: Synthetic oligonucleotide
  Sense strand starting at position 113 of SEQ ID NO: 1563753
gaggauuccuucuuggagg

SEQ ID NO: 1829310 - RNA, 19 nt, Artificial Sequence
  Description of Artificial Sequence: Synthetic oligonucleotide
  Antisense strand to SEQ ID NO: 1829309
ccuccaagaaggaauccuc

SEQ ID NO: 1829311 - RNA, 19 nt, Artificial Sequence
  Description of Artificial Sequence: Synthetic oligonucleotide
  Sense strand starting at position 130 of SEQ ID NO: 1563753
ggucuacacauucgauuga

SEQ ID NO: 1829312 - RNA, 19 nt, Artificial Sequence
  Description of Artificial Sequence: Synthetic oligonucleotide
  Antisense strand to SEQ ID NO: 1829311
ucaaucgaauguguagacc

SEQ ID NO: 1829313 - RNA, 19 nt, Artificial Sequence
  Description of Artificial Sequence: Synthetic oligonucleotide
  Sense strand starting at position 134 of SEQ ID NO: 1563753
uacacauucgauugaaggu

SEQ ID NO: 1829314 - RNA, 19 nt, Artificial Sequence
  Description of Artificial Sequence: Synthetic oligonucleotide
  Antisense strand to SEQ ID NO: 1829313
accuucaaucgaaugugua

SEQ ID NO: 1829315 - RNA, 19 nt, Artificial Sequence
  Description of Artificial Sequence: Synthetic oligonucleotide
  Sense strand starting at position 229 of SEQ ID NO: 1563753
ugugauaggcucuagagua

SEQ ID NO: 1829316 - RNA, 19 nt, Artificial Sequence
  Description of Artificial Sequence: Synthetic oligonucleotide
  Antisense strand to SEQ ID NO: 1829315
uacucuagagccuaucaca

SEQ ID NO: 1829317 - RNA, 19 nt, Artificial Sequence
  Description of Artificial Sequence: Synthetic oligonucleotide
  Sense strand starting at position 332 of SEQ ID NO: 1563753
uuacuaaugucucuaaguc

SEQ ID NO: 1829318 - RNA, 19 nt, Artificial Sequence
  Description of Artificial Sequence: Synthetic oligonucleotide
  Antisense strand to SEQ ID NO: 1829317
gacuuagagacauuaguaa

SEQ ID NO: 1829319 - RNA, 19 nt, Artificial Sequence
  Description of Artificial Sequence: Synthetic oligonucleotide
  Sense strand starting at position 407 of SEQ ID NO: 1563753
gcagacauuuguuauaaua

SEQ ID NO: 1829320 - RNA, 19 nt, Artificial Sequence
  Description of Artificial Sequence: Synthetic oligonucleotide
  Antisense strand to SEQ ID NO: 1829319
uauuauaacaaaugucugc

SEQ ID NO: 1829321 - RNA, 19 nt, Artificial Sequence
  Description of Artificial Sequence: Synthetic oligonucleotide
  Sense strand starting at position 464 of SEQ ID NO: 1563753
uucuuaaacgucugauggu

SEQ ID NO: 1829322 - RNA, 19 nt, Artificial Sequence
  Description of Artificial Sequence: Synthetic oligonucleotide
  Antisense strand to SEQ ID NO: 1829321
accaucagacguuuaagaa

SEQ ID NO: 1829323 - RNA, 19 nt, Artificial Sequence
  Description of Artificial Sequence: Synthetic oligonucleotide
  Sense strand starting at position 471 of SEQ ID NO: 1563753
acgucugauggugacagau

SEQ ID NO: 1829324 - RNA, 19 nt, Artificial Sequence
  Description of Artificial Sequence: Synthetic oligonucleotide
  Antisense strand to SEQ ID NO: 1829323
aucugucaccaucagacgu

SEQ ID NO: 1829325 - RNA, 19 nt, Artificial Sequence
  Description of Artificial Sequence: Synthetic oligonucleotide
  Sense strand starting at position 473 of SEQ ID NO: 1563753
gucugauggugacagauca

SEQ ID NO: 1829326 - RNA, 19 nt, Artificial Sequence
  Description of Artificial Sequence: Synthetic oligonucleotide
  Antisense strand to SEQ ID NO: 1829325
ugaucugucaccaucagac

SEQ ID NO: 1829327 - RNA, 19 nt, Artificial Sequence
  Description of Artificial Sequence: Synthetic oligonucleotide
  Sense strand starting at position 489 of SEQ ID NO: 1563753
ucaagcuguuugcuccaau

SEQ ID NO: 1829328 - RNA, 19 nt, Artificial Sequence
  Description of Artificial Sequence: Synthetic oligonucleotide
  Antisense strand to SEQ ID NO: 1829327
auuggagcaaacagcuuga

SEQ ID NO: 1829329 - RNA, 19 nt, Artificial Sequence
  Description of Artificial Sequence: Synthetic oligonucleotide
  Sense strand starting at position 490 of SEQ ID NO: 1563753
caagcuguuugcuccaaug

SEQ ID NO: 1829330 - RNA, 19 nt, Artificial Sequence
  Description of Artificial Sequence: Synthetic oligonucleotide
  Antisense strand to SEQ ID NO: 1829329
cauuggagcaaacagcuug

SEQ ID NO: 1829331 - RNA, 19 nt, Artificial Sequence
  Description of Artificial Sequence: Synthetic oligonucleotide
  Sense strand starting at position 582 of SEQ ID NO: 1563753
aggagucugaagcgcaauu

SEQ ID NO: 1829332 - RNA, 19 nt, Artificial Sequence
  Description of Artificial Sequence: Synthetic oligonucleotide
  Antisense strand to SEQ ID NO: 1829331
aauugcgcuucagacuccu

SEQ ID NO: 1829333 - RNA, 19 nt, Artificial Sequence
  Description of Artificial Sequence: Synthetic oligonucleotide
  Sense strand starting at position 667 of SEQ ID NO: 1563753
gggauucuugcgggaagag

SEQ ID NO: 1829334 - RNA, 19 nt, Artificial Sequence
  Description of Artificial Sequence: Synthetic oligonucleotide
  Antisense strand to SEQ ID NO: 1829333
cucuucccgcaagaauccc

SEQ ID NO: 1829335 - RNA, 19 nt, Artificial Sequence
  Description of Artificial Sequence: Synthetic oligonucleotide
  Sense strand starting at position 756 of SEQ ID NO: 1563753
ccagauauccagcgaucuc

SEQ ID NO: 1829336 - RNA, 19 nt, Artificial Sequence
  Description of Artificial Sequence: Synthetic oligonucleotide
  Antisense strand to SEQ ID NO: 1829335
gagaucgcuggauaucugg

SEQ ID NO: 1829337 - RNA, 19 nt, Artificial Sequence
  Description of Artificial Sequence: Synthetic oligonucleotide
  Sense strand starting at position 895 of SEQ ID NO: 1563753
gcagaaaugugggcaguca

SEQ ID NO: 1829338 - RNA, 19 nt, Artificial Sequence
  Description of Artificial Sequence: Synthetic oligonucleotide
  Antisense strand to SEQ ID NO: 1829337
ugacugcccacauuucugc

SEQ ID NO: 1829339 - RNA, 19 nt, Artificial Sequence
  Description of Artificial Sequence: Synthetic oligonucleotide
  Sense strand starting at position 1067 of SEQ ID NO: 1563753
ggagcucuauucccuaaac

SEQ ID NO: 1829340 - RNA, 19 nt, Artificial Sequence
  Description of Artificial Sequence: Synthetic oligonucleotide
  Antisense strand to SEQ ID NO: 1829339
guuuagggaauagagcucc

SEQ ID NO: 1829341 - RNA, 19 nt, Artificial Sequence
  Description of Artificial Sequence: Synthetic oligonucleotide
  Sense strand starting at position 1077 of SEQ ID NO: 1563753
ucccuaaacuuucugggaa

SEQ ID NO: 1829342 - RNA, 19 nt, Artificial Sequence
  Description of Artificial Sequence: Synthetic oligonucleotide
  Antisense strand to SEQ ID NO: 1829341
uucccagaaaguuuaggga

SEQ ID NO: 1829343 - RNA, 19 nt, Artificial Sequence
  Description of Artificial Sequence: Synthetic oligonucleotide
  Sense strand starting at position 1078 of SEQ ID NO: 1563753
cccuaaacuuucugggaag

SEQ ID NO: 1829344 - RNA, 19 nt, Artificial Sequence
  Description of Artificial Sequence: Synthetic oligonucleotide
  Antisense strand to SEQ ID NO: 1829343
cuucccagaaaguuuaggg

SEQ ID NO: 1829345 - RNA, 19 nt, Artificial Sequence
  Description of Artificial Sequence: Synthetic oligonucleotide
  Sense strand starting at position 1254 of SEQ ID NO: 1563753
guggacauuaccugagucu

SEQ ID NO: 1829346 - RNA, 19 nt, Artificial Sequence
  Description of Artificial Sequence: Synthetic oligonucleotide
  Antisense strand to SEQ ID NO: 1829345
agacucagguaauguccac

SEQ ID NO: 1829347 - RNA, 19 nt, Artificial Sequence
  Description of Artificial Sequence: Synthetic oligonucleotide
  Sense strand starting at position 1255 of SEQ ID NO: 1563753
uggacauuaccugagucuu

SEQ ID NO: 1829348 - RNA, 19 nt, Artificial Sequence
  Description of Artificial Sequence: Synthetic oligonucleotide
  Antisense strand to SEQ ID NO: 1829347
aagacucagguaaugucca

SEQ ID NO: 1829349 - RNA, 19 nt, Artificial Sequence
  Description of Artificial Sequence: Synthetic oligonucleotide
  Sense strand starting at position 2307 of SEQ ID NO: 1563753
cuuaccuuucuccggagaa

SEQ ID NO: 1829350 - RNA, 19 nt, Artificial Sequence
  Description of Artificial Sequence: Synthetic oligonucleotide
  Antisense strand to SEQ ID NO: 1829349
uucuccggagaaagguaag

SEQ ID NO: 1829351 - RNA, 19 nt, Artificial Sequence
  Description of Artificial Sequence: Synthetic oligonucleotide
  Sense strand starting at position 2452 of SEQ ID NO: 1563753
uccaguucuagccgcugaa

SEQ ID NO: 1829352 - RNA, 19 nt, Artificial Sequence
  Description of Artificial Sequence: Synthetic oligonucleotide
  Antisense strand to SEQ ID NO: 1829351
uucagcggcuagaacugga

SEQ ID NO: 1829353 - RNA, 19 nt, Artificial Sequence
  Description of Artificial Sequence: Synthetic oligonucleotide
  Sense strand starting at position 2705 of SEQ ID NO: 1563753
ggacccuggccucaaucau

SEQ ID NO: 1829354 - RNA, 19 nt, Artificial Sequence
  Description of Artificial Sequence: Synthetic oligonucleotide
  Antisense strand to SEQ ID NO: 1829353
augauugaggccagggucc

SEQ ID NO: 1829355 - RNA, 19 nt, Artificial Sequence
  Description of Artificial Sequence: Synthetic oligonucleotide
  Sense strand starting at position 2851 of SEQ ID NO: 1563753
ucuagaucgcagcguugaa

SEQ ID NO: 1829356 - RNA, 19 nt, Artificial Sequence
  Description of Artificial Sequence: Synthetic oligonucleotide
  Antisense strand to SEQ ID NO: 1829355
uucaacgcugcgaucuaga

SEQ ID NO: 1829357 - RNA, 19 nt, Artificial Sequence
  Description of Artificial Sequence: Synthetic oligonucleotide
  Sense strand starting at position 2855 of SEQ ID NO: 1563753
gaucgcagcguugaagagu

SEQ ID NO: 1829358 - RNA, 19 nt, Artificial Sequence
  Description of Artificial Sequence: Synthetic oligonucleotide
  Antisense strand to SEQ ID NO: 1829357
acucuucaacgcugcgauc

SEQ ID NO: 1829359 - RNA, 19 nt, Artificial Sequence
  Description of Artificial Sequence: Synthetic oligonucleotide
  Sense strand starting at position 2886 of SEQ ID NO: 1563753
ccagguaucuucccagagu

SEQ ID NO: 1829360 - RNA, 19 nt, Artificial Sequence
  Description of Artificial Sequence: Synthetic oligonucleotide
  Antisense strand to SEQ ID NO: 1829359
acucugggaagauaccugg

SEQ ID NO: 1829361 - RNA, 19 nt, Artificial Sequence
  Description of Artificial Sequence: Synthetic oligonucleotide
  Sense strand starting at position 2889 of SEQ ID NO: 1563753
gguaucuucccagaguguu

SEQ ID NO: 1829362 - RNA, 19 nt, Artificial Sequence
  Description of Artificial Sequence: Synthetic oligonucleotide
  Antisense strand to SEQ ID NO: 1829361
aacacucugggaagauacc

SEQ ID NO: 1829363 - RNA, 19 nt, Artificial Sequence
  Description of Artificial Sequence: Synthetic oligonucleotide
  Sense strand starting at position 2978 of SEQ ID NO: 1563753
agcgcuguucuccagcauu

SEQ ID NO: 1829364 - RNA, 19 nt, Artificial Sequence
  Description of Artificial Sequence: Synthetic oligonucleotide
  Antisense strand to SEQ ID NO: 1829363
aaugcuggagaacagcgcu

SEQ ID NO: 1829365 - RNA, 19 nt, Artificial Sequence
  Description of Artificial Sequence: Synthetic oligonucleotide
  Sense strand starting at position 3033 of SEQ ID NO: 1563753
cugagcuuucuccagcuau

SEQ ID NO: 1829366 - RNA, 19 nt, Artificial Sequence
  Description of Artificial Sequence: Synthetic oligonucleotide
  Antisense strand to SEQ ID NO: 1829365
auagcuggagaaagcucag

SEQ ID NO: 1829367 - RNA, 19 nt, Artificial Sequence
  Description of Artificial Sequence: Synthetic oligonucleotide
  Sense strand starting at position 3231 of SEQ ID NO: 1563753
ggagccugugcaugauuaa

SEQ ID NO: 1829368 - RNA, 19 nt, Artificial Sequence
  Description of Artificial Sequence: Synthetic oligonucleotide
  Antisense strand to SEQ ID NO: 1829367
uuaaucaugcacaggcucc

SEQ ID NO: 1829369 - RNA, 19 nt, Artificial Sequence
  Description of Artificial Sequence: Synthetic oligonucleotide
  Sense strand starting at position 3234 of SEQ ID NO: 1563753
gccugugcaugauuaaggu

SEQ ID NO: 1829370 - RNA, 19 nt, Artificial Sequence
  Description of Artificial Sequence: Synthetic oligonucleotide
  Antisense strand to SEQ ID NO: 1829369
accuuaaucaugcacaggc

SEQ ID NO: 1829371 - RNA, 19 nt, Artificial Sequence
  Description of Artificial Sequence: Synthetic oligonucleotide
  Sense strand starting at position 3300 of SEQ ID NO: 1563753
uggaccaucucuuucgaca

SEQ ID NO: 1829372 - RNA, 19 nt, Artificial Sequence
  Description of Artificial Sequence: Synthetic oligonucleotide
  Antisense strand to SEQ ID NO: 1829371
ugucgaaagagauggucca

SEQ ID NO: 1829373 - RNA, 19 nt, Artificial Sequence
  Description of Artificial Sequence: Synthetic oligonucleotide
  Sense strand starting at position 3385 of SEQ ID NO: 1563753
agagaggucgggugugaaa

SEQ ID NO: 1829374 - RNA, 19 nt, Artificial Sequence
  Description of Artificial Sequence: Synthetic oligonucleotide
  Antisense strand to SEQ ID NO: 1829373
uuucacacccgaccucucu

SEQ ID NO: 1829375 - RNA, 19 nt, Artificial Sequence
  Description of Artificial Sequence: Synthetic oligonucleotide
  Sense strand starting at position 3624 of SEQ ID NO: 1563753
ugcaaacuucccuacgcua

SEQ ID NO: 1829376 - RNA, 19 nt, Artificial Sequence
  Description of Artificial Sequence: Synthetic oligonucleotide
  Antisense strand to SEQ ID NO: 1829375
uagcguagggaaguuugca

SEQ ID NO: 1829377 - RNA, 19 nt, Artificial Sequence
  Description of Artificial Sequence: Synthetic oligonucleotide
  Sense strand starting at position 3703 of SEQ ID NO: 1563753
uacuguuagugguccucaa

SEQ ID NO: 1829378 - RNA, 19 nt, Artificial Sequence
  Description of Artificial Sequence: Synthetic oligonucleotide
  Antisense strand to SEQ ID NO: 1829377
uugaggaccacuaacagua

SEQ ID NO: 1829379 - RNA, 19 nt, Artificial Sequence
  Description of Artificial Sequence: Synthetic oligonucleotide
  Sense strand starting at position 3848 of SEQ ID NO: 1563753
ggccuuuagcauggcacua

SEQ ID NO: 1829380 - RNA, 19 nt, Artificial Sequence
  Description of Artificial Sequence: Synthetic oligonucleotide
  Antisense strand to SEQ ID NO: 1829379
uagugccaugcuaaaggcc

SEQ ID NO: 1829381 - RNA, 19 nt, Artificial Sequence
  Description of Artificial Sequence: Synthetic oligonucleotide
  Sense strand starting at position 3897 of SEQ ID NO: 1563753
cagggcuguccauggauga

SEQ ID NO: 1829382 - RNA, 19 nt, Artificial Sequence
  Description of Artificial Sequence: Synthetic oligonucleotide
  Antisense strand to SEQ ID NO: 1829381
ucauccauggacagcccug

SEQ ID NO: 1829383 - RNA, 19 nt, Artificial Sequence
  Description of Artificial Sequence: Synthetic oligonucleotide
  Sense strand starting at position 424 of SEQ ID NO: 1563754
agaacaggagcuugauauu

SEQ ID NO: 1829384 - RNA, 19 nt, Artificial Sequence
  Description of Artificial Sequence: Synthetic oligonucleotide
  Antisense strand to SEQ ID NO: 1829383
aauaucaagcuccuguucu

SEQ ID NO: 1829385 - RNA, 19 nt, Artificial Sequence
  Description of Artificial Sequence: Synthetic oligonucleotide
  Sense strand starting at position 461 of SEQ ID NO: 1563754
gguugaauccuuuagcccu

SEQ ID NO: 1829386 - RNA, 19 nt, Artificial Sequence
  Description of Artificial Sequence: Synthetic oligonucleotide
  Antisense strand to SEQ ID NO: 1829385
agggcuaaaggauucaacc

SEQ ID NO: 1829387 - RNA, 19 nt, Artificial Sequence
  Description of Artificial Sequence: Synthetic oligonucleotide
  Sense strand starting at position 583 of SEQ ID NO: 1563754
aagaaucuguuguuccagu

SEQ ID NO: 1829388 - RNA, 19 nt, Artificial Sequence
  Description of Artificial Sequence: Synthetic oligonucleotide
  Antisense strand to SEQ ID NO: 1829387
acuggaacaacagauucuu

SEQ ID NO: 1829389 - RNA, 19 nt, Artificial Sequence
  Description of Artificial Sequence: Synthetic oligonucleotide
  Sense strand starting at position 664 of SEQ ID NO: 1563754
acuggagauaugugugcau

SEQ ID NO: 1829390 - RNA, 19 nt, Artificial Sequence
  Description of Artificial Sequence: Synthetic oligonucleotide
  Antisense strand to SEQ ID NO: 1829389
augcacacauaucuccagu

SEQ ID NO: 1829391 - RNA, 19 nt, Artificial Sequence
  Description of Artificial Sequence: Synthetic oligonucleotide
  Sense strand starting at position 666 of SEQ ID NO: 1563754
uggagauaugugugcauau

SEQ ID NO: 1829392 - RNA, 19 nt, Artificial Sequence
  Description of Artificial Sequence: Synthetic oligonucleotide
  Antisense strand to SEQ ID NO: 1829391
auaugcacacauaucucca

SEQ ID NO: 1829393 - RNA, 19 nt, Artificial Sequence
  Description of Artificial Sequence: Synthetic oligonucleotide
  Sense strand starting at position 667 of SEQ ID NO: 1563754
ggagauaugugugcauaug

SEQ ID NO: 1829394 - RNA, 19 nt, Artificial Sequence
  Description of Artificial Sequence: Synthetic oligonucleotide
  Antisense strand to SEQ ID NO: 1829393
cauaugcacacauaucucc

SEQ ID NO: 1829395 - RNA, 19 nt, Artificial Sequence
  Description of Artificial Sequence: Synthetic oligonucleotide
  Sense strand starting at position 938 of SEQ ID NO: 1563754
acaacaaauguuugguaga

SEQ ID NO: 1829396 - RNA, 19 nt, Artificial Sequence
  Description of Artificial Sequence: Synthetic oligonucleotide
  Antisense strand to SEQ ID NO: 1829395
ucuaccaaacauuuguugu

SEQ ID NO: 1829397 - RNA, 19 nt, Artificial Sequence
  Description of Artificial Sequence: Synthetic oligonucleotide
  Sense strand starting at position 1018 of SEQ ID NO: 1563754
gcugcacuucuggacuuua

SEQ ID NO: 1829398 - RNA, 19 nt, Artificial Sequence
  Description of Artificial Sequence: Synthetic oligonucleotide
  Antisense strand to SEQ ID NO: 1829397
uaaaguccagaagugcagc

SEQ ID NO: 1829399 - RNA, 19 nt, Artificial Sequence
  Description of Artificial Sequence: Synthetic oligonucleotide
  Sense strand starting at position 1029 of SEQ ID NO: 1563754
ggacuuuaucauuauccga

SEQ ID NO: 1829400 - RNA, 19 nt, Artificial Sequence
  Description of Artificial Sequence: Synthetic oligonucleotide
  Antisense strand to SEQ ID NO: 1829399
ucggauaaugauaaagucc

SEQ ID NO: 1829401 - RNA, 19 nt, Artificial Sequence
  Description of Artificial Sequence: Synthetic oligonucleotide
  Sense strand starting at position 1031 of SEQ ID NO: 1563754
acuuuaucauuauccgagu

SEQ ID NO: 1829402 - RNA, 19 nt, Artificial Sequence
  Description of Artificial Sequence: Synthetic oligonucleotide
  Antisense strand to SEQ ID NO: 1829401
acucggauaaugauaaagu

SEQ ID NO: 1829403 - RNA, 19 nt, Artificial Sequence
  Description of Artificial Sequence: Synthetic oligonucleotide
  Sense strand starting at position 1047 of SEQ ID NO: 1563754
aguucuuguaccuagagga

SEQ ID NO: 1829404 - RNA, 19 nt, Artificial Sequence
  Description of Artificial Sequence: Synthetic oligonucleotide
  Antisense strand to SEQ ID NO: 1829403
uccucuagguacaagaacu

SEQ ID NO: 1829405 - RNA, 19 nt, Artificial Sequence
  Description of Artificial Sequence: Synthetic oligonucleotide
  Sense strand starting at position 1063 of SEQ ID NO: 1563754
ggagaaagguuggaaggaa

SEQ ID NO: 1829406 - RNA, 19 nt, Artificial Sequence
  Description of Artificial Sequence: Synthetic oligonucleotide
  Antisense strand to SEQ ID NO: 1829405
uuccuuccaaccuuucucc

SEQ ID NO: 1829407 - RNA, 19 nt, Artificial Sequence
  Description of Artificial Sequence: Synthetic oligonucleotide
  Sense strand starting at position 1324 of SEQ ID NO: 1563754
ucauguacucgacauugaa

SEQ ID NO: 1829408 - RNA, 19 nt, Artificial Sequence
  Description of Artificial Sequence: Synthetic oligonucleotide
  Antisense strand to SEQ ID NO: 1829407
uucaaugucgaguacauga

SEQ ID NO: 1829409 - RNA, 19 nt, Artificial Sequence
  Description of Artificial Sequence: Synthetic oligonucleotide
  Sense strand starting at position 1385 of SEQ ID NO: 1563754
gagggagucagugggcaua

SEQ ID NO: 1829410 - RNA, 19 nt, Artificial Sequence
  Description of Artificial Sequence: Synthetic oligonucleotide
  Antisense strand to SEQ ID NO: 1829409
uaugcccacugacucccuc

SEQ ID NO: 1829411 - RNA, 19 nt, Artificial Sequence
  Description of Artificial Sequence: Synthetic oligonucleotide
  Sense strand starting at position 1396 of SEQ ID NO: 1563754
ugggcauaguggucaggaa

SEQ ID NO: 1829412 - RNA, 19 nt, Artificial Sequence
  Description of Artificial Sequence: Synthetic oligonucleotide
  Antisense strand to SEQ ID NO: 1829411
uuccugaccacuaugccca

SEQ ID NO: 1829413 - RNA, 19 nt, Artificial Sequence
  Description of Artificial Sequence: Synthetic oligonucleotide
  Sense strand starting at position 1504 of SEQ ID NO: 1563754
uaauccuggugcuuugaaa

SEQ ID NO: 1829414 - RNA, 19 nt, Artificial Sequence
  Description of Artificial Sequence: Synthetic oligonucleotide
  Antisense strand to SEQ ID NO: 1829413
uuucaaagcaccaggauua

SEQ ID NO: 1829415 - RNA, 19 nt, Artificial Sequence
  Description of Artificial Sequence: Synthetic oligonucleotide
  Sense strand starting at position 1690 of SEQ ID NO: 1563754
cugcccacaugauuguaau

SEQ ID NO: 1829416 - RNA, 19 nt, Artificial Sequence
  Description of Artificial Sequence: Synthetic oligonucleotide
  Antisense strand to SEQ ID NO: 1829415
auuacaaucaugugggcag

SEQ ID NO: 1829417 - RNA, 19 nt, Artificial Sequence
  Description of Artificial Sequence: Synthetic oligonucleotide
  Sense strand starting at position 1813 of SEQ ID NO: 1563754
cccauugggcgucagaauu

SEQ ID NO: 1829418 - RNA, 19 nt, Artificial Sequence
  Description of Artificial Sequence: Synthetic oligonucleotide
  Antisense strand to SEQ ID NO: 1829417
aauucugacgcccaauggg

SEQ ID NO: 1829419 - RNA, 19 nt, Artificial Sequence
  Description of Artificial Sequence: Synthetic oligonucleotide
  Sense strand starting at position 1876 of SEQ ID NO: 1563754
gagggaugugaaugguaau

SEQ ID NO: 1829420 - RNA, 19 nt, Artificial Sequence
  Description of Artificial Sequence: Synthetic oligonucleotide
  Antisense strand to SEQ ID NO: 1829419
auuaccauucacaucccuc

SEQ ID NO: 1829421 - RNA, 19 nt, Artificial Sequence
  Description of Artificial Sequence: Synthetic oligonucleotide
  Sense strand starting at position 1877 of SEQ ID NO: 1563754
agggaugugaaugguaaug

SEQ ID NO: 1829422 - RNA, 19 nt, Artificial Sequence
  Description of Artificial Sequence: Synthetic oligonucleotide
  Antisense strand to SEQ ID NO: 1829421
cauuaccauucacaucccu

SEQ ID NO: 1829423 - RNA, 19 nt, Artificial Sequence
  Description of Artificial Sequence: Synthetic oligonucleotide
  Sense strand starting at position 1930 of SEQ ID NO: 1563754
ggguguagucugucugugu

SEQ ID NO: 1829424 - RNA, 19 nt, Artificial Sequence
  Description of Artificial Sequence: Synthetic oligonucleotide
  Antisense strand to SEQ ID NO: 1829423
acacagacagacuacaccc

SEQ ID NO: 1829425 - RNA, 19 nt, Artificial Sequence
  Description of Artificial Sequence: Synthetic oligonucleotide
  Sense strand starting at position 2004 of SEQ ID NO: 1563754
auagcuuccgguggaaaga

SEQ ID NO: 1829426 - RNA, 19 nt, Artificial Sequence
  Description of Artificial Sequence: Synthetic oligonucleotide
  Antisense strand to SEQ ID NO: 1829425
ucuuuccaccggaagcuau

SEQ ID NO: 1829427 - RNA, 19 nt, Artificial Sequence
  Description of Artificial Sequence: Synthetic oligonucleotide
  Sense strand starting at position 2025 of SEQ ID NO: 1563754
cuuauaaaccagggcuuua

SEQ ID NO: 1829428 - RNA, 19 nt, Artificial Sequence
  Description of Artificial Sequence: Synthetic oligonucleotide
  Antisense strand to SEQ ID NO: 1829427
uaaagcccugguuuauaag

SEQ ID NO: 1829429 - RNA, 19 nt, Artificial Sequence
  Description of Artificial Sequence: Synthetic oligonucleotide
  Sense strand starting at position 2078 of SEQ ID NO: 1563754
ggcuaaguccucuaggaga

SEQ ID NO: 1829430 - RNA, 19 nt, Artificial Sequence
  Description of Artificial Sequence: Synthetic oligonucleotide
  Antisense strand to SEQ ID NO: 1829429
ucuccuagaggacuuagcc

SEQ ID NO: 1829431 - RNA, 19 nt, Artificial Sequence
  Description of Artificial Sequence: Synthetic oligonucleotide
  Sense strand starting at position 2080 of SEQ ID NO: 1563754
cuaaguccucuaggagauu

SEQ ID NO: 1829432 - RNA, 19 nt, Artificial Sequence
  Description of Artificial Sequence: Synthetic oligonucleotide
  Antisense strand to SEQ ID NO: 1829431
aaucuccuagaggacuuag

SEQ ID NO: 1829433 - RNA, 19 nt, Artificial Sequence
  Description of Artificial Sequence: Synthetic oligonucleotide
  Sense strand starting at position 2186 of SEQ ID NO: 1563754
ugggaaggaucuguucacu

SEQ ID NO: 1829434 - RNA, 19 nt, Artificial Sequence
  Description of Artificial Sequence: Synthetic oligonucleotide
  Antisense strand to SEQ ID NO: 1829433
agugaacagauccuuccca

SEQ ID NO: 1829435 - RNA, 19 nt, Artificial Sequence
  Description of Artificial Sequence: Synthetic oligonucleotide
  Sense strand starting at position 2312 of SEQ ID NO: 1563754
uugacuuggucacccuuaa

SEQ ID NO: 1829436 - RNA, 19 nt, Artificial Sequence
  Description of Artificial Sequence: Synthetic oligonucleotide
  Antisense strand to SEQ ID NO: 1829435
uuaagggugaccaagucaa

SEQ ID NO: 1829437 - RNA, 19 nt, Artificial Sequence
  Description of Artificial Sequence: Synthetic oligonucleotide
  Sense strand starting at position 2481 of SEQ ID NO: 1563754
gaggaagugugacuuauaa

SEQ ID NO: 1829438 - RNA, 19 nt, Artificial Sequence
  Description of Artificial Sequence: Synthetic oligonucleotide
  Antisense strand to SEQ ID NO: 1829437
uuauaagucacacuuccuc

SEQ ID NO: 1829439 - RNA, 19 nt, Artificial Sequence
  Description of Artificial Sequence: Synthetic oligonucleotide
  Sense strand starting at position 2767 of SEQ ID NO: 1563754
agcucuagucaugauucua

SEQ ID NO: 1829440 - RNA, 19 nt, Artificial Sequence
  Description of Artificial Sequence: Synthetic oligonucleotide
  Antisense strand to SEQ ID NO: 1829439
uagaaucaugacuagagcu

SEQ ID NO: 1829441 - RNA, 19 nt, Artificial Sequence
  Description of Artificial Sequence: Synthetic oligonucleotide
  Sense strand starting at position 2961 of SEQ ID NO: 1563754
gcuuauguucuggaaauag

SEQ ID NO: 1829442 - RNA, 19 nt, Artificial Sequence
  Description of Artificial Sequence: Synthetic oligonucleotide
  Antisense strand to SEQ ID NO: 1829441
cuauuuccagaacauaagc

SEQ ID NO: 1829443 - RNA, 19 nt, Artificial Sequence
  Description of Artificial Sequence: Synthetic oligonucleotide
  Sense strand starting at position 3061 of SEQ ID NO: 1563754
aguccuauagcauaaaugu

SEQ ID NO: 1829444 - RNA, 19 nt, Artificial Sequence
  Description of Artificial Sequence: Synthetic oligonucleotide
  Antisense strand to SEQ ID NO: 1829443
acauuuaugcuauaggacu

SEQ ID NO: 1829445 - RNA, 19 nt, Artificial Sequence
  Description of Artificial Sequence: Synthetic oligonucleotide
  Sense strand starting at position 3090 of SEQ ID NO: 1563754
caaaguaugugagcacaga

SEQ ID NO: 1829446 - RNA, 19 nt, Artificial Sequence
  Description of Artificial Sequence: Synthetic oligonucleotide
  Antisense strand to SEQ ID NO: 1829445
ucugugcucacauacuuug

SEQ ID NO: 1829447 - RNA, 19 nt, Artificial Sequence
  Description of Artificial Sequence: Synthetic oligonucleotide
  Sense strand starting at position 3173 of SEQ ID NO: 1563754
ggugcuauuucaguggcau

SEQ ID NO: 1829448 - RNA, 19 nt, Artificial Sequence
  Description of Artificial Sequence: Synthetic oligonucleotide
  Antisense strand to SEQ ID NO: 1829447
augccacugaaauagcacc

SEQ ID NO: 1829449 - RNA, 19 nt, Artificial Sequence
  Description of Artificial Sequence: Synthetic oligonucleotide
  Sense strand starting at position 3189 of SEQ ID NO: 1563754
caucuuaaagaaugagugu

SEQ ID NO: 1829450 - RNA, 19 nt, Artificial Sequence
  Description of Artificial Sequence: Synthetic oligonucleotide
  Antisense strand to SEQ ID NO: 1829449
acacucauucuuuaagaug

SEQ ID NO: 1829451 - RNA, 19 nt, Artificial Sequence
  Description of Artificial Sequence: Synthetic oligonucleotide
  Sense strand starting at position 3192 of SEQ ID NO: 1563754
cuuaaagaaugaguguaau

SEQ ID NO: 1829452 - RNA, 19 nt, Artificial Sequence
  Description of Artificial Sequence: Synthetic oligonucleotide
  Antisense strand to SEQ ID NO: 1829451
auuacacucauucuuuaag

SEQ ID NO: 1829453 - RNA, 19 nt, Artificial Sequence
  Description of Artificial Sequence: Synthetic oligonucleotide
  Sense strand starting at position 3222 of SEQ ID NO: 1563754
gaaagugguguaggauauu

SEQ ID NO: 1829454 - RNA, 19 nt, Artificial Sequence
  Description of Artificial Sequence: Synthetic oligonucleotide
  Antisense strand to SEQ ID NO: 1829453
aauauccuacaccacuuuc

SEQ ID NO: 1829455 - RNA, 19 nt, Artificial Sequence
  Description of Artificial Sequence: Synthetic oligonucleotide
  Sense strand starting at position 3225 of SEQ ID NO: 1563754
agugguguaggauauuaag

SEQ ID NO: 1829456 - RNA, 19 nt, Artificial Sequence
  Description of Artificial Sequence: Synthetic oligonucleotide
  Antisense strand to SEQ ID NO: 1829455
cuuaauauccuacaccacu

SEQ ID NO: 1829457 - RNA, 19 nt, Artificial Sequence
  Description of Artificial Sequence: Synthetic oligonucleotide
  Sense strand starting at position 3231 of SEQ ID NO: 1563754
guaggauauuaagcaaaga

SEQ ID NO: 1829458 - RNA, 19 nt, Artificial Sequence
  Description of Artificial Sequence: Synthetic oligonucleotide
  Antisense strand to SEQ ID NO: 1829457
ucuuugcuuaauauccuac

SEQ ID NO: 1829459 - RNA, 19 nt, Artificial Sequence
  Description of Artificial Sequence: Synthetic oligonucleotide
  Sense strand starting at position 3285 of SEQ ID NO: 1563754
gacuauauggcccagcuua

SEQ ID NO: 1829460 - RNA, 19 nt, Artificial Sequence
  Description of Artificial Sequence: Synthetic oligonucleotide
  Antisense strand to SEQ ID NO: 1829459
uaagcugggccauauaguc

SEQ ID NO: 1829461 - RNA, 19 nt, Artificial Sequence
  Description of Artificial Sequence: Synthetic oligonucleotide
  Sense strand starting at position 3296 of SEQ ID NO: 1563754
ccagcuuaguauuuaguau

SEQ ID NO: 1829462 - RNA, 19 nt, Artificial Sequence
  Description of Artificial Sequence: Synthetic oligonucleotide
  Antisense strand to SEQ ID NO: 1829461
auacuaaauacuaagcugg

SEQ ID NO: 1829463 - RNA, 19 nt, Artificial Sequence
  Description of Artificial Sequence: Synthetic oligonucleotide
  Sense strand starting at position 38 of SEQ ID NO: 1563757
ggcagaccuugccauuuaa

SEQ ID NO: 1829464 - RNA, 19 nt, Artificial Sequence
  Description of Artificial Sequence: Synthetic oligonucleotide
  Antisense strand to SEQ ID NO: 1829463
uuaaauggcaaggucugcc

SEQ ID NO: 1829465 - RNA, 19 nt, Artificial Sequence
  Description of Artificial Sequence: Synthetic oligonucleotide
  Sense strand starting at position 162 of SEQ ID NO: 1563757
agcucaguguuccuucgaa

SEQ ID NO: 1829466 - RNA, 19 nt, Artificial Sequence
  Description of Artificial Sequence: Synthetic oligonucleotide
  Antisense strand to SEQ ID NO: 1829465
uucgaaggaacacugagcu

SEQ ID NO: 1829467 - RNA, 19 nt, Artificial Sequence
  Description of Artificial Sequence: Synthetic oligonucleotide
  Sense strand starting at position 335 of SEQ ID NO: 1563757
gugccaaggugucccaaau

SEQ ID NO: 1829468 - RNA, 19 nt, Artificial Sequence
  Description of Artificial Sequence: Synthetic oligonucleotide
  Antisense strand to SEQ ID NO: 1829467
auuugggacaccuuggcac

SEQ ID NO: 1829469 - RNA, 19 nt, Artificial Sequence
  Description of Artificial Sequence: Synthetic oligonucleotide
  Sense strand starting at position 430 of SEQ ID NO: 1563757
ucuuuaaauggguguuguu

SEQ ID NO: 1829470 - RNA, 19 nt, Artificial Sequence
  Description of Artificial Sequence: Synthetic oligonucleotide
  Antisense strand to SEQ ID NO: 1829469
aacaacacccauuuaaaga

SEQ ID NO: 1829471 - RNA, 19 nt, Artificial Sequence
  Description of Artificial Sequence: Synthetic oligonucleotide
  Sense strand starting at position 470 of SEQ ID NO: 1563757
gguggacuuugaggaacua

SEQ ID NO: 1829472 - RNA, 19 nt, Artificial Sequence
  Description of Artificial Sequence: Synthetic oligonucleotide
  Antisense strand to SEQ ID NO: 1829471
uaguuccucaaaguccacc

SEQ ID NO: 1829473 - RNA, 19 nt, Artificial Sequence
  Description of Artificial Sequence: Synthetic oligonucleotide
  Sense strand starting at position 599 of SEQ ID NO: 1563757
ccaccugccucuuugguaa

SEQ ID NO: 1829474 - RNA, 19 nt, Artificial Sequence
  Description of Artificial Sequence: Synthetic oligonucleotide
  Antisense strand to SEQ ID NO: 1829473
uuaccaaagaggcaggugg

SEQ ID NO: 1829475 - RNA, 19 nt, Artificial Sequence
  Description of Artificial Sequence: Synthetic oligonucleotide
  Sense strand starting at position 603 of SEQ ID NO: 1563757
cugccucuuugguaaggga

SEQ ID NO: 1829476 - RNA, 19 nt, Artificial Sequence
  Description of Artificial Sequence: Synthetic oligonucleotide
  Antisense strand to SEQ ID NO: 1829475
ucccuuaccaaagaggcag

SEQ ID NO: 1829477 - RNA, 19 nt, Artificial Sequence
  Description of Artificial Sequence: Synthetic oligonucleotide
  Sense strand starting at position 786 of SEQ ID NO: 1563757
ccuaucuucuggcaaggau

SEQ ID NO: 1829478 - RNA, 19 nt, Artificial Sequence
  Description of Artificial Sequence: Synthetic oligonucleotide
  Antisense strand to SEQ ID NO: 1829477
auccuugccagaagauagg

SEQ ID NO: 1829479 - RNA, 19 nt, Artificial Sequence
  Description of Artificial Sequence: Synthetic oligonucleotide
  Sense strand starting at position 840 of SEQ ID NO: 1563757
cggcgaugacugcucuagu

SEQ ID NO: 1829480 - RNA, 19 nt, Artificial Sequence
  Description of Artificial Sequence: Synthetic oligonucleotide
  Antisense strand to SEQ ID NO: 1829479
acuagagcagucaucgccg

SEQ ID NO: 1829481 - RNA, 19 nt, Artificial Sequence
  Description of Artificial Sequence: Synthetic oligonucleotide
  Sense strand starting at position 841 of SEQ ID NO: 1563757
ggcgaugacugcucuaguc

SEQ ID NO: 1829482 - RNA, 19 nt, Artificial Sequence
  Description of Artificial Sequence: Synthetic oligonucleotide
  Antisense strand to SEQ ID NO: 1829481
gacuagagcagucaucgcc

SEQ ID NO: 1829483 - RNA, 19 nt, Artificial Sequence
  Description of Artificial Sequence: Synthetic oligonucleotide
  Sense strand starting at position 1700 of SEQ ID NO: 1563757
gcuggcucucgaugauguu

SEQ ID NO: 1829484 - RNA, 19 nt, Artificial Sequence
  Description of Artificial Sequence: Synthetic oligonucleotide
  Antisense strand to SEQ ID NO: 1829483
aacaucaucgagagccagc

SEQ ID NO: 1829485 - RNA, 19 nt, Artificial Sequence
  Description of Artificial Sequence: Synthetic oligonucleotide
  Sense strand starting at position 2529 of SEQ ID NO: 1563757
ggcagucgucccugagucu

SEQ ID NO: 1829486 - RNA, 19 nt, Artificial Sequence
  Description of Artificial Sequence: Synthetic oligonucleotide
  Antisense strand to SEQ ID NO: 1829485
agacucagggacgacugcc

SEQ ID NO: 1829487 - RNA, 19 nt, Artificial Sequence
  Description of Artificial Sequence: Synthetic oligonucleotide
  Sense strand starting at position 2814 of SEQ ID NO: 1563757
cagccagucuugggaucaa

SEQ ID NO: 1829488 - RNA, 19 nt, Artificial Sequence
  Description of Artificial Sequence: Synthetic oligonucleotide
  Antisense strand to SEQ ID NO: 1829487
uugaucccaagacuggcug

SEQ ID NO: 1829489 - RNA, 19 nt, Artificial Sequence
  Description of Artificial Sequence: Synthetic oligonucleotide
  Sense strand starting at position 3046 of SEQ ID NO: 1563757
ucccuaucuuguggaauuu

SEQ ID NO: 1829490 - RNA, 19 nt, Artificial Sequence
  Description of Artificial Sequence: Synthetic oligonucleotide
  Antisense strand to SEQ ID NO: 1829489
aaauuccacaagauaggga

SEQ ID NO: 1829491 - RNA, 19 nt, Artificial Sequence
  Description of Artificial Sequence: Synthetic oligonucleotide
  Sense strand starting at position 3055 of SEQ ID NO: 1563757
uguggaauuuguggaacaa

SEQ ID NO: 1829492 - RNA, 19 nt, Artificial Sequence
  Description of Artificial Sequence: Synthetic oligonucleotide
  Antisense strand to SEQ ID NO: 1829491
uuguuccacaaauuccaca

SEQ ID NO: 1829493 - RNA, 19 nt, Artificial Sequence
  Description of Artificial Sequence: Synthetic oligonucleotide
  Sense strand starting at position 3090 of SEQ ID NO: 1563757
agcacauucgucuguguuc

SEQ ID NO: 1829494 - RNA, 19 nt, Artificial Sequence
  Description of Artificial Sequence: Synthetic oligonucleotide
  Antisense strand to SEQ ID NO: 1829493
gaacacagacgaaugugcu

SEQ ID NO: 1829495 - RNA, 19 nt, Artificial Sequence
  Description of Artificial Sequence: Synthetic oligonucleotide
  Sense strand starting at position 3091 of SEQ ID NO: 1563757
gcacauucgucuguguucu

SEQ ID NO: 1829496 - RNA, 19 nt, Artificial Sequence
  Description of Artificial Sequence: Synthetic oligonucleotide
  Antisense strand to SEQ ID NO: 1829495
agaacacagacgaaugugc

SEQ ID NO: 1829497 - RNA, 19 nt, Artificial Sequence
  Description of Artificial Sequence: Synthetic oligonucleotide
  Sense strand starting at position 3092 of SEQ ID NO: 1563757
cacauucgucuguguucuu

SEQ ID NO: 1829498 - RNA, 19 nt, Artificial Sequence
  Description of Artificial Sequence: Synthetic oligonucleotide
  Antisense strand to SEQ ID NO: 1829497
aagaacacagacgaaugug

SEQ ID NO: 1829499 - RNA, 19 nt, Artificial Sequence
  Description of Artificial Sequence: Synthetic oligonucleotide
  Sense strand starting at position 3129 of SEQ ID NO: 1563757
gacggagcuccuuaaagac

SEQ ID NO: 1829500 - RNA, 19 nt, Artificial Sequence
  Description of Artificial Sequence: Synthetic oligonucleotide
  Antisense strand to SEQ ID NO: 1829499
gucuuuaaggagcuccguc

SEQ ID NO: 1829501 - RNA, 19 nt, Artificial Sequence
  Description of Artificial Sequence: Synthetic oligonucleotide
  Sense strand starting at position 3146 of SEQ ID NO: 1563757
acagaaacgugucuuaauu

SEQ ID NO: 1829502 - RNA, 19 nt, Artificial Sequence
  Description of Artificial Sequence: Synthetic oligonucleotide
  Antisense strand to SEQ ID NO: 1829501
aauuaagacacguuucugu

SEQ ID NO: 1829503 - RNA, 19 nt, Artificial Sequence
  Description of Artificial Sequence: Synthetic oligonucleotide
  Sense strand starting at position 3148 of SEQ ID NO: 1563757
agaaacgugucuuaauuua

SEQ ID NO: 1829504 - RNA, 19 nt, Artificial Sequence
  Description of Artificial Sequence: Synthetic oligonucleotide
  Antisense strand to SEQ ID NO: 1829503
uaaauuaagacacguuucu

SEQ ID NO: 1829505 - RNA, 19 nt, Artificial Sequence
  Description of Artificial Sequence: Synthetic oligonucleotide
  Sense strand starting at position 3159 of SEQ ID NO: 1563757
uuaauuuaucuuugugagc

SEQ ID NO: 1829506 - RNA, 19 nt, Artificial Sequence
  Description of Artificial Sequence: Synthetic oligonucleotide
  Antisense strand to SEQ ID NO: 1829505
gcucacaaagauaaauuaa

SEQ ID NO: 1829507 - RNA, 19 nt, Artificial Sequence
  Description of Artificial Sequence: Synthetic oligonucleotide
  Sense strand starting at position 3161 of SEQ ID NO: 1563757
aauuuaucuuugugagcag

SEQ ID NO: 1829508 - RNA, 19 nt, Artificial Sequence
  Description of Artificial Sequence: Synthetic oligonucleotide
  Antisense strand to SEQ ID NO: 1829507
cugcucacaaagauaaauu

SEQ ID NO: 1829509 - RNA, 19 nt, Artificial Sequence
  Description of Artificial Sequence: Synthetic oligonucleotide
  Sense strand starting at position 3164 of SEQ ID NO: 1563757
uuaucuuugugagcagguu

SEQ ID NO: 1829510 - RNA, 19 nt, Artificial Sequence
  Description of Artificial Sequence: Synthetic oligonucleotide
  Antisense strand to SEQ ID NO: 1829509
aaccugcucacaaagauaa

SEQ ID NO: 1829511 - RNA, 19 nt, Artificial Sequence
  Description of Artificial Sequence: Synthetic oligonucleotide
  Sense strand starting at position 3284 of SEQ ID NO: 1563757
caggguggucuuggauaaa

SEQ ID NO: 1829512 - RNA, 19 nt, Artificial Sequence
  Description of Artificial Sequence: Synthetic oligonucleotide
  Antisense strand to SEQ ID NO: 1829511
uuuauccaagaccacccug

SEQ ID NO: 1829513 - RNA, 19 nt, Artificial Sequence
  Description of Artificial Sequence: Synthetic oligonucleotide
  Sense strand starting at position 3375 of SEQ ID NO: 1563757
ugauaagggacuuguacgu

SEQ ID NO: 1829514 - RNA, 19 nt, Artificial Sequence
  Description of Artificial Sequence: Synthetic oligonucleotide
  Antisense strand to SEQ ID NO: 1829513
acguacaagucccuuauca

SEQ ID NO: 1829515 - RNA, 19 nt, Artificial Sequence
  Description of Artificial Sequence: Synthetic oligonucleotide
  Sense strand starting at position 3379 of SEQ ID NO: 1563757
aagggacuuguacguagaa

SEQ ID NO: 1829516 - RNA, 19 nt, Artificial Sequence
  Description of Artificial Sequence: Synthetic oligonucleotide
  Antisense strand to SEQ ID NO: 1829515
uucuacguacaagucccuu

SEQ ID NO: 1829517 - RNA, 19 nt, Artificial Sequence
  Description of Artificial Sequence: Synthetic oligonucleotide
  Sense strand starting at position 3380 of SEQ ID NO: 1563757
agggacuuguacguagaau

SEQ ID NO: 1829518 - RNA, 19 nt, Artificial Sequence
  Description of Artificial Sequence: Synthetic oligonucleotide
  Antisense strand to SEQ ID NO: 1829517
auucuacguacaagucccu

SEQ ID NO: 1829519 - RNA, 19 nt, Artificial Sequence
  Description of Artificial Sequence: Synthetic oligonucleotide
  Sense strand starting at position 3381 of SEQ ID NO: 1563757
gggacuuguacguagaaua

SEQ ID NO: 1829520 - RNA, 19 nt, Artificial Sequence
  Description of Artificial Sequence: Synthetic oligonucleotide
  Antisense strand to SEQ ID NO: 1829519
uauucuacguacaaguccc

SEQ ID NO: 1829521 - RNA, 19 nt, Artificial Sequence
  Description of Artificial Sequence: Synthetic oligonucleotide
  Sense strand starting at position 3640 of SEQ ID NO: 1563757
cuuaauguccugcagauga

SEQ ID NO: 1829522 - RNA, 19 nt, Artificial Sequence
  Description of Artificial Sequence: Synthetic oligonucleotide
  Antisense strand to SEQ ID NO: 1829521
ucaucugcaggacauuaag

SEQ ID NO: 1829523 - RNA, 19 nt, Artificial Sequence
  Description of Artificial Sequence: Synthetic oligonucleotide
  Sense strand starting at position 3789 of SEQ ID NO: 1563757
ggaagaagauucugccauu

SEQ ID NO: 1829524 - RNA, 19 nt, Artificial Sequence
  Description of Artificial Sequence: Synthetic oligonucleotide
  Antisense strand to SEQ ID NO: 1829523
aauggcagaaucuucuucc

SEQ ID NO: 1829525 - RNA, 19 nt, Artificial Sequence
  Description of Artificial Sequence: Synthetic oligonucleotide
  Sense strand starting at position 3790 of SEQ ID NO: 1563757
gaagaagauucugccauug

SEQ ID NO: 1829526 - RNA, 19 nt, Artificial Sequence
  Description of Artificial Sequence: Synthetic oligonucleotide
  Antisense strand to SEQ ID NO: 1829525
caauggcagaaucuucuuc

SEQ ID NO: 1829527 - RNA, 19 nt, Artificial Sequence
  Description of Artificial Sequence: Synthetic oligonucleotide
  Sense strand starting at position 3792 of SEQ ID NO: 1563757
agaagauucugccauuguu

SEQ ID NO: 1829528 - RNA, 19 nt, Artificial Sequence
  Description of Artificial Sequence: Synthetic oligonucleotide
  Antisense strand to SEQ ID NO: 1829527
aacaauggcagaaucuucu

SEQ ID NO: 1829529 - RNA, 19 nt, Artificial Sequence
  Description of Artificial Sequence: Synthetic oligonucleotide
  Sense strand starting at position 3800 of SEQ ID NO: 1563757
cugccauuguugccauuga

SEQ ID NO: 1829530 - RNA, 19 nt, Artificial Sequence
  Description of Artificial Sequence: Synthetic oligonucleotide
  Antisense strand to SEQ ID NO: 1829529
ucaauggcaacaauggcag

SEQ ID NO: 1829531 - RNA, 19 nt, Artificial Sequence
  Description of Artificial Sequence: Synthetic oligonucleotide
  Sense strand starting at position 3822 of SEQ ID NO: 1563757
ccagacugaugcuaguauu

SEQ ID NO: 1829532 - RNA, 19 nt, Artificial Sequence
  Description of Artificial Sequence: Synthetic oligonucleotide
  Antisense strand to SEQ ID NO: 1829531
aauacuagcaucagucugg

SEQ ID NO: 1829533 - RNA, 19 nt, Artificial Sequence
  Description of Artificial Sequence: Synthetic oligonucleotide
  Sense strand starting at position 3825 of SEQ ID NO: 1563757
gacugaugcuaguauuaua

SEQ ID NO: 1829534 - RNA, 19 nt, Artificial Sequence
  Description of Artificial Sequence: Synthetic oligonucleotide
  Antisense strand to SEQ ID NO: 1829533
uauaauacuagcaucaguc

SEQ ID NO: 1829535 - RNA, 19 nt, Artificial Sequence
  Description of Artificial Sequence: Synthetic oligonucleotide
  Sense strand starting at position 3828 of SEQ ID NO: 1563757
ugaugcuaguauuauaucu

SEQ ID NO: 1829536 - RNA, 19 nt, Artificial Sequence
  Description of Artificial Sequence: Synthetic oligonucleotide
  Antisense strand to SEQ ID NO: 1829535
agauauaauacuagcauca

SEQ ID NO: 1829537 - RNA, 19 nt, Artificial Sequence
  Description of Artificial Sequence: Synthetic oligonucleotide
  Sense strand starting at position 3835 of SEQ ID NO: 1563757
aguauuauaucuuccagga

SEQ ID NO: 1829538 - RNA, 19 nt, Artificial Sequence
  Description of Artificial Sequence: Synthetic oligonucleotide
  Antisense strand to SEQ ID NO: 1829537
uccuggaagauauaauacu

SEQ ID NO: 1829539 - RNA, 19 nt, Artificial Sequence
  Description of Artificial Sequence: Synthetic oligonucleotide
  Sense strand starting at position 3860 of SEQ ID NO: 1563757
gccagugggcugugcuaaa

SEQ ID NO: 1829540 - RNA, 19 nt, Artificial Sequence
  Description of Artificial Sequence: Synthetic oligonucleotide
  Antisense strand to SEQ ID NO: 1829539
uuuagcacagcccacuggc

SEQ ID NO: 1829541 - RNA, 19 nt, Artificial Sequence
  Description of Artificial Sequence: Synthetic oligonucleotide
  Sense strand starting at position 3871 of SEQ ID NO: 1563757
gugcuaaaguuugcuguuu

SEQ ID NO: 1829542 - RNA, 19 nt, Artificial Sequence
  Description of Artificial Sequence: Synthetic oligonucleotide
  Antisense strand to SEQ ID NO: 1829541
aaacagcaaacuuuagcac

SEQ ID NO: 1829543 - RNA, 19 nt, Artificial Sequence
  Description of Artificial Sequence: Synthetic oligonucleotide
  Sense strand starting at position 12 of SEQ ID NO: 1563758
gcaauacugguguagagua

SEQ ID NO: 1829544 - RNA, 19 nt, Artificial Sequence
  Description of Artificial Sequence: Synthetic oligonucleotide
  Antisense strand to SEQ ID NO: 1829543
uacucuacaccaguauugc

SEQ ID NO: 1829545 - RNA, 19 nt, Artificial Sequence
  Description of Artificial Sequence: Synthetic oligonucleotide
  Sense strand starting at position 17 of SEQ ID NO: 1563758
acugguguagaguaugaga

SEQ ID NO: 1829546 - RNA, 19 nt, Artificial Sequence
  Description of Artificial Sequence: Synthetic oligonucleotide
  Antisense strand to SEQ ID NO: 1829545
ucucauacucuacaccagu

SEQ ID NO: 1829547 - RNA, 19 nt, Artificial Sequence
  Description of Artificial Sequence: Synthetic oligonucleotide
  Sense strand starting at position 895 of SEQ ID NO: 1563758
cucaguggucuuggugaca

SEQ ID NO: 1829548 - RNA, 19 nt, Artificial Sequence
  Description of Artificial Sequence: Synthetic oligonucleotide
  Antisense strand to SEQ ID NO: 1829547
ugucaccaagaccacugag

SEQ ID NO: 1829549 - RNA, 19 nt, Artificial Sequence
  Description of Artificial Sequence: Synthetic oligonucleotide
  Sense strand starting at position 953 of SEQ ID NO: 1563758
ggugguuccagguaggagu

SEQ ID NO: 1829550 - RNA, 19 nt, Artificial Sequence
  Description of Artificial Sequence: Synthetic oligonucleotide
  Antisense strand to SEQ ID NO: 1829549
acuccuaccuggaaccacc

SEQ ID NO: 1829551 - RNA, 19 nt, Artificial Sequence
  Description of Artificial Sequence: Synthetic oligonucleotide
  Sense strand starting at position 1095 of SEQ ID NO: 1563758
gcgauuaaaguccggagaa

SEQ ID NO: 1829552 - RNA, 19 nt, Artificial Sequence
  Description of Artificial Sequence: Synthetic oligonucleotide
  Antisense strand to SEQ ID NO: 1829551
uucuccggacuuuaaucgc

SEQ ID NO: 1829553 - RNA, 19 nt, Artificial Sequence
  Description of Artificial Sequence: Synthetic oligonucleotide
  Sense strand starting at position 1415 of SEQ ID NO: 1563758
cugagacucuucuuaucga

SEQ ID NO: 1829554 - RNA, 19 nt, Artificial Sequence
  Description of Artificial Sequence: Synthetic oligonucleotide
  Antisense strand to SEQ ID NO: 1829553
ucgauaagaagagucucag

SEQ ID NO: 1829555 - RNA, 19 nt, Artificial Sequence
  Description of Artificial Sequence: Synthetic oligonucleotide
  Sense strand starting at position 1428 of SEQ ID NO: 1563758
uaucgaaggcucuggauua

SEQ ID NO: 1829556 - RNA, 19 nt, Artificial Sequence
  Description of Artificial Sequence: Synthetic oligonucleotide
  Antisense strand to SEQ ID NO: 1829555
uaauccagagccuucgaua

SEQ ID NO: 1829557 - RNA, 19 nt, Artificial Sequence
  Description of Artificial Sequence: Synthetic oligonucleotide
  Sense strand starting at position 1486 of SEQ ID NO: 1563758
agcccaaguccuugacuca

SEQ ID NO: 1829558 - RNA, 19 nt, Artificial Sequence
  Description of Artificial Sequence: Synthetic oligonucleotide
  Antisense strand to SEQ ID NO: 1829557
ugagucaaggacuugggcu

SEQ ID NO: 1829559 - RNA, 19 nt, Artificial Sequence
  Description of Artificial Sequence: Synthetic oligonucleotide
  Sense strand starting at position 1487 of SEQ ID NO: 1563758
gcccaaguccuugacucau

SEQ ID NO: 1829560 - RNA, 19 nt, Artificial Sequence
  Description of Artificial Sequence: Synthetic oligonucleotide
  Antisense strand to SEQ ID NO: 1829559
augagucaaggacuugggc

SEQ ID NO: 1829561 - RNA, 19 nt, Artificial Sequence
  Description of Artificial Sequence: Synthetic oligonucleotide
  Sense strand starting at position 1493 of SEQ ID NO: 1563758
guccuugacucauuaucuc

SEQ ID NO: 1829562 - RNA, 19 nt, Artificial Sequence
  Description of Artificial Sequence: Synthetic oligonucleotide
  Antisense strand to SEQ ID NO: 1829561
gagauaaugagucaaggac

SEQ ID NO: 1829563 - RNA, 19 nt, Artificial Sequence
  Description of Artificial Sequence: Synthetic oligonucleotide
  Sense strand starting at position 2093 of SEQ ID NO: 1563758
gaacuccuccuccgaggaa

SEQ ID NO: 1829564 - RNA, 19 nt, Artificial Sequence
  Description of Artificial Sequence: Synthetic oligonucleotide
  Antisense strand to SEQ ID NO: 1829563
uuccucggaggaggaguuc

SEQ ID NO: 1829565 - RNA, 19 nt, Artificial Sequence
  Description of Artificial Sequence: Synthetic oligonucleotide
  Sense strand starting at position 2168 of SEQ ID NO: 1563758
cagugcaccucugcuagaa

SEQ ID NO: 1829566 - RNA, 19 nt, Artificial Sequence
  Description of Artificial Sequence: Synthetic oligonucleotide
  Antisense strand to SEQ ID NO: 1829565
uucuagcagaggugcacug

SEQ ID NO: 1829567 - RNA, 19 nt, Artificial Sequence
  Description of Artificial Sequence: Synthetic oligonucleotide
  Sense strand starting at position 2209 of SEQ ID NO: 1563758
uuuguaucgcuggcucuau

SEQ ID NO: 1829568 - RNA, 19 nt, Artificial Sequence
  Description of Artificial Sequence: Synthetic oligonucleotide
  Antisense strand to SEQ ID NO: 1829567
auagagccagcgauacaaa

SEQ ID NO: 1829569 - RNA, 19 nt, Artificial Sequence
  Description of Artificial Sequence: Synthetic oligonucleotide
  Sense strand starting at position 2344 of SEQ ID NO: 1563758
ccauauugcuaccuuguga

SEQ ID NO: 1829570 - RNA, 19 nt, Artificial Sequence
  Description of Artificial Sequence: Synthetic oligonucleotide
  Antisense strand to SEQ ID NO: 1829569
ucacaagguagcaauaugg

SEQ ID NO: 1829571 - RNA, 19 nt, Artificial Sequence
  Description of Artificial Sequence: Synthetic oligonucleotide
  Sense strand starting at position 2351 of SEQ ID NO: 1563758
gcuaccuugugaguacaga

SEQ ID NO: 1829572 - RNA, 19 nt, Artificial Sequence
  Description of Artificial Sequence: Synthetic oligonucleotide
  Antisense strand to SEQ ID NO: 1829571
ucuguacucacaagguagc

SEQ ID NO: 1829573 - RNA, 19 nt, Artificial Sequence
  Description of Artificial Sequence: Synthetic oligonucleotide
  Sense strand starting at position 2352 of SEQ ID NO: 1563758
cuaccuugugaguacagaa

SEQ ID NO: 1829574 - RNA, 19 nt, Artificial Sequence
  Description of Artificial Sequence: Synthetic oligonucleotide
  Antisense strand to SEQ ID NO: 1829573
uucuguacucacaagguag

SEQ ID NO: 1829575 - RNA, 19 nt, Artificial Sequence
  Description of Artificial Sequence: Synthetic oligonucleotide
  Sense strand starting at position 2435 of SEQ ID NO: 1563758
ggaguuguucugggacucu

SEQ ID NO: 1829576 - RNA, 19 nt, Artificial Sequence
  Description of Artificial Sequence: Synthetic oligonucleotide
  Antisense strand to SEQ ID NO: 1829575
agagucccagaacaacucc

SEQ ID NO: 1829577 - RNA, 19 nt, Artificial Sequence
  Description of Artificial Sequence: Synthetic oligonucleotide
  Sense strand starting at position 2451 of SEQ ID NO: 1563758
ucugcauauuaagugcaau

SEQ ID NO: 1829578 - RNA, 19 nt, Artificial Sequence
  Description of Artificial Sequence: Synthetic oligonucleotide
  Antisense strand to SEQ ID NO: 1829577
auugcacuuaauaugcaga

SEQ ID NO: 1829579 - RNA, 19 nt, Artificial Sequence
  Description of Artificial Sequence: Synthetic oligonucleotide
  Sense strand starting at position 2506 of SEQ ID NO: 1563758
cggccaauauucuuucuca

SEQ ID NO: 1829580 - RNA, 19 nt, Artificial Sequence
  Description of Artificial Sequence: Synthetic oligonucleotide
  Antisense strand to SEQ ID NO: 1829579
ugagaaagaauauuggccg

SEQ ID NO: 1829581 - RNA, 19 nt, Artificial Sequence
  Description of Artificial Sequence: Synthetic oligonucleotide
  Sense strand starting at position 2571 of SEQ ID NO: 1563758
gagaaaugcuuccugaaga

SEQ ID NO: 1829582 - RNA, 19 nt, Artificial Sequence
  Description of Artificial Sequence: Synthetic oligonucleotide
  Antisense strand to SEQ ID NO: 1829581
ucuucaggaagcauuucuc

SEQ ID NO: 1829583 - RNA, 19 nt, Artificial Sequence
  Description of Artificial Sequence: Synthetic oligonucleotide
  Sense strand starting at position 2617 of SEQ ID NO: 1563758
agaggcuguucuuccaagu

SEQ ID NO: 1829584 - RNA, 19 nt, Artificial Sequence
  Description of Artificial Sequence: Synthetic oligonucleotide
  Antisense strand to SEQ ID NO: 1829583
acuuggaagaacagccucu

SEQ ID NO: 1829585 - RNA, 19 nt, Artificial Sequence
  Description of Artificial Sequence: Synthetic oligonucleotide
  Sense strand starting at position 2649 of SEQ ID NO: 1563758
ugacuuuauggaugggcaa

SEQ ID NO: 1829586 - RNA, 19 nt, Artificial Sequence
  Description of Artificial Sequence: Synthetic oligonucleotide
  Antisense strand to SEQ ID NO: 1829585
uugcccauccauaaaguca

SEQ ID NO: 1829587 - RNA, 19 nt, Artificial Sequence
  Description of Artificial Sequence: Synthetic oligonucleotide
  Sense strand starting at position 2651 of SEQ ID NO: 1563758
acuuuauggaugggcaaau

SEQ ID NO: 1829588 - RNA, 19 nt, Artificial Sequence
  Description of Artificial Sequence: Synthetic oligonucleotide
  Antisense strand to SEQ ID NO: 1829587
auuugcccauccauaaagu

SEQ ID NO: 1829589 - RNA, 19 nt, Artificial Sequence
  Description of Artificial Sequence: Synthetic oligonucleotide
  Sense strand starting at position 2652 of SEQ ID NO: 1563758
cuuuauggaugggcaaauu

SEQ ID NO: 1829590 - RNA, 19 nt, Artificial Sequence
  Description of Artificial Sequence: Synthetic oligonucleotide
  Antisense strand to SEQ ID NO: 1829589
aauuugcccauccauaaag

SEQ ID NO: 1829591 - RNA, 19 nt, Artificial Sequence
  Description of Artificial Sequence: Synthetic oligonucleotide
  Sense strand starting at position 2811 of SEQ ID NO: 1563758
uuuggcuuugaaggaugua

SEQ ID NO: 1829592 - RNA, 19 nt, Artificial Sequence
  Description of Artificial Sequence: Synthetic oligonucleotide
  Antisense strand to SEQ ID NO: 1829591
uacauccuucaaagccaaa

SEQ ID NO: 1829593 - RNA, 19 nt, Artificial Sequence
  Description of Artificial Sequence: Synthetic oligonucleotide
  Sense strand starting at position 3079 of SEQ ID NO: 1563758
aucuguggguccuuaguga

SEQ ID NO: 1829594 - RNA, 19 nt, Artificial Sequence
  Description of Artificial Sequence: Synthetic oligonucleotide
  Antisense strand to SEQ ID NO: 1829593
ucacuaaggacccacagau

SEQ ID NO: 1829595 - RNA, 19 nt, Artificial Sequence
  Description of Artificial Sequence: Synthetic oligonucleotide
  Sense strand starting at position 3173 of SEQ ID NO: 1563758
uuuaacucuccuugaggaa

SEQ ID NO: 1829596 - RNA, 19 nt, Artificial Sequence
  Description of Artificial Sequence: Synthetic oligonucleotide
  Antisense strand to SEQ ID NO: 1829595
uuccucaaggagaguuaaa

SEQ ID NO: 1829597 - RNA, 19 nt, Artificial Sequence
  Description of Artificial Sequence: Synthetic oligonucleotide
  Sense strand starting at position 3231 of SEQ ID NO: 1563758
uguaguuauugcccuaaga

SEQ ID NO: 1829598 - RNA, 19 nt, Artificial Sequence
  Description of Artificial Sequence: Synthetic oligonucleotide
  Antisense strand to SEQ ID NO: 1829597
ucuuagggcaauaacuaca

SEQ ID NO: 1829599 - RNA, 19 nt, Artificial Sequence
  Description of Artificial Sequence: Synthetic oligonucleotide
  Sense strand starting at position 3233 of SEQ ID NO: 1563758
uaguuauugcccuaagagc

SEQ ID NO: 1829600 - RNA, 19 nt, Artificial Sequence
  Description of Artificial Sequence: Synthetic oligonucleotide
  Antisense strand to SEQ ID NO: 1829599
gcucuuagggcaauaacua

SEQ ID NO: 1829601 - RNA, 19 nt, Artificial Sequence
  Description of Artificial Sequence: Synthetic oligonucleotide
  Sense strand starting at position 3278 of SEQ ID NO: 1563758
gagagacauuaaguguagu

SEQ ID NO: 1829602 - RNA, 19 nt, Artificial Sequence
  Description of Artificial Sequence: Synthetic oligonucleotide
  Antisense strand to SEQ ID NO: 1829601
acuacacuuaaugucucuc

SEQ ID NO: 1829603 - RNA, 19 nt, Artificial Sequence
  Description of Artificial Sequence: Synthetic oligonucleotide
  Sense strand starting at position 3584 of SEQ ID NO: 1563758
agagcaagacccuguacaa

SEQ ID NO: 1829604 - RNA, 19 nt, Artificial Sequence
  Description of Artificial Sequence: Synthetic oligonucleotide
  Antisense strand to SEQ ID NO: 1829603
uuguacagggucuugcucu

SEQ ID NO: 1829605 - RNA, 19 nt, Artificial Sequence
  Description of Artificial Sequence: Synthetic oligonucleotide
  Sense strand starting at position 3630 of SEQ ID NO: 1563758
gguagcuuuaagggaugau

SEQ ID NO: 1829606 - RNA, 19 nt, Artificial Sequence
  Description of Artificial Sequence: Synthetic oligonucleotide
  Antisense strand to SEQ ID NO: 1829605
aucaucccuuaaagcuacc

SEQ ID NO: 1829607 - RNA, 19 nt, Artificial Sequence
  Description of Artificial Sequence: Synthetic oligonucleotide
  Sense strand starting at position 3631 of SEQ ID NO: 1563758
guagcuuuaagggaugaug

SEQ ID NO: 1829608 - RNA, 19 nt, Artificial Sequence
  Description of Artificial Sequence: Synthetic oligonucleotide
  Antisense strand to SEQ ID NO: 1829607
caucaucccuuaaagcuac

SEQ ID NO: 1829609 - RNA, 19 nt, Artificial Sequence
  Description of Artificial Sequence: Synthetic oligonucleotide
  Sense strand starting at position 3642 of SEQ ID NO: 1563758
ggaugaugcugugugacuu

SEQ ID NO: 1829610 - RNA, 19 nt, Artificial Sequence
  Description of Artificial Sequence: Synthetic oligonucleotide
  Antisense strand to SEQ ID NO: 1829609
aagucacacagcaucaucc

SEQ ID NO: 1829611 - RNA, 19 nt, Artificial Sequence
  Description of Artificial Sequence: Synthetic oligonucleotide
  Sense strand starting at position 3701 of SEQ ID NO: 1563758
acacuuuggugccugguaa

SEQ ID NO: 1829612 - RNA, 19 nt, Artificial Sequence
  Description of Artificial Sequence: Synthetic oligonucleotide
  Antisense strand to SEQ ID NO: 1829611
uuaccaggcaccaaagugu

SEQ ID NO: 1829613 - RNA, 19 nt, Artificial Sequence
  Description of Artificial Sequence: Synthetic oligonucleotide
  Sense strand starting at position 3702 of SEQ ID NO: 1563758
cacuuuggugccugguaaa

SEQ ID NO: 1829614 - RNA, 19 nt, Artificial Sequence
  Description of Artificial Sequence: Synthetic oligonucleotide
  Antisense strand to SEQ ID NO: 1829613
uuuaccaggcaccaaagug

SEQ ID NO: 1829615 - RNA, 19 nt, Artificial Sequence
  Description of Artificial Sequence: Synthetic oligonucleotide
  Sense strand starting at position 3713 of SEQ ID NO: 1563758
cugguaaagcuggguacaa

SEQ ID NO: 1829616 - RNA, 19 nt, Artificial Sequence
  Description of Artificial Sequence: Synthetic oligonucleotide
  Antisense strand to SEQ ID NO: 1829615
uuguacccagcuuuaccag

SEQ ID NO: 1829617 - RNA, 19 nt, Artificial Sequence
  Description of Artificial Sequence: Synthetic oligonucleotide
  Sense strand starting at position 3715 of SEQ ID NO: 1563758
gguaaagcuggguacaagu

SEQ ID NO: 1829618 - RNA, 19 nt, Artificial Sequence
  Description of Artificial Sequence: Synthetic oligonucleotide
  Antisense strand to SEQ ID NO: 1829617
acuuguacccagcuuuacc

SEQ ID NO: 1829619 - RNA, 19 nt, Artificial Sequence
  Description of Artificial Sequence: Synthetic oligonucleotide
  Sense strand starting at position 3757 of SEQ ID NO: 1563758
ggguaagcccucugaagcu

SEQ ID NO: 1829620 - RNA, 19 nt, Artificial Sequence
  Description of Artificial Sequence: Synthetic oligonucleotide
  Antisense strand to SEQ ID NO: 1829619
agcuucagagggcuuaccc

SEQ ID NO: 1829621 - RNA, 19 nt, Artificial Sequence
  Description of Artificial Sequence: Synthetic oligonucleotide
  Sense strand starting at position 3849 of SEQ ID NO: 1563758
aagugugcacaugguaaau

SEQ ID NO: 1829622 - RNA, 19 nt, Artificial Sequence
  Description of Artificial Sequence: Synthetic oligonucleotide
  Antisense strand to SEQ ID NO: 1829621
auuuaccaugugcacacuu

SEQ ID NO: 1829623 - RNA, 19 nt, Artificial Sequence
  Description of Artificial Sequence: Synthetic oligonucleotide
  Sense strand starting at position 177 of SEQ ID NO: 1563759
agccguucugagcacagua

SEQ ID NO: 1829624 - RNA, 19 nt, Artificial Sequence
  Description of Artificial Sequence: Synthetic oligonucleotide
  Antisense strand to SEQ ID NO: 1829623
uacugugcucagaacggcu

SEQ ID NO: 1829625 - RNA, 19 nt, Artificial Sequence
  Description of Artificial Sequence: Synthetic oligonucleotide
  Sense strand starting at position 205 of SEQ ID NO: 1563759
guccacaauguuuggguga

SEQ ID NO: 1829626 - RNA, 19 nt, Artificial Sequence
  Description of Artificial Sequence: Synthetic oligonucleotide
  Antisense strand to SEQ ID NO: 1829625
ucacccaaacauuguggac

SEQ ID NO: 1829627 - RNA, 19 nt, Artificial Sequence
  Description of Artificial Sequence: Synthetic oligonucleotide
  Sense strand starting at position 210 of SEQ ID NO: 1563759
caauguuugggugacgaaa

SEQ ID NO: 1829628 - RNA, 19 nt, Artificial Sequence
  Description of Artificial Sequence: Synthetic oligonucleotide
  Antisense strand to SEQ ID NO: 1829627
uuucgucacccaaacauug

SEQ ID NO: 1829629 - RNA, 19 nt, Artificial Sequence
  Description of Artificial Sequence: Synthetic oligonucleotide
  Sense strand starting at position 219 of SEQ ID NO: 1563759
ggugacgaaaccuguuuga

SEQ ID NO: 1829630 - RNA, 19 nt, Artificial Sequence
  Description of Artificial Sequence: Synthetic oligonucleotide
  Antisense strand to SEQ ID NO: 1829629
ucaaacagguuucgucacc

SEQ ID NO: 1829631 - RNA, 19 nt, Artificial Sequence
  Description of Artificial Sequence: Synthetic oligonucleotide
  Sense strand starting at position 342 of SEQ ID NO: 1563759
cuguggugugcggucugaa

SEQ ID NO: 1829632 - RNA, 19 nt, Artificial Sequence
  Description of Artificial Sequence: Synthetic oligonucleotide
  Antisense strand to SEQ ID NO: 1829631
uucagaccgcacaccacag

SEQ ID NO: 1829633 - RNA, 19 nt, Artificial Sequence
  Description of Artificial Sequence: Synthetic oligonucleotide
  Sense strand starting at position 343 of SEQ ID NO: 1563759
uguggugugcggucugaag

SEQ ID NO: 1829634 - RNA, 19 nt, Artificial Sequence
  Description of Artificial Sequence: Synthetic oligonucleotide
  Antisense strand to SEQ ID NO: 1829633
cuucagaccgcacaccaca

SEQ ID NO: 1829635 - RNA, 19 nt, Artificial Sequence
  Description of Artificial Sequence: Synthetic oligonucleotide
  Sense strand starting at position 652 of SEQ ID NO: 1563759
aguggugaggguuaucuga

SEQ ID NO: 1829636 - RNA, 19 nt, Artificial Sequence
  Description of Artificial Sequence: Synthetic oligonucleotide
  Antisense strand to SEQ ID NO: 1829635
ucagauaacccucaccacu

SEQ ID NO: 1829637 - RNA, 19 nt, Artificial Sequence
  Description of Artificial Sequence: Synthetic oligonucleotide
  Sense strand starting at position 654 of SEQ ID NO: 1563759
uggugaggguuaucugaug

SEQ ID NO: 1829638 - RNA, 19 nt, Artificial Sequence
  Description of Artificial Sequence: Synthetic oligonucleotide
  Antisense strand to SEQ ID NO: 1829637
caucagauaacccucacca

SEQ ID NO: 1829639 - RNA, 19 nt, Artificial Sequence
  Description of Artificial Sequence: Synthetic oligonucleotide
  Sense strand starting at position 1009 of SEQ ID NO: 1563759
ggcucugcgcuacaucaaa

SEQ ID NO: 1829640 - RNA, 19 nt, Artificial Sequence
  Description of Artificial Sequence: Synthetic oligonucleotide
  Antisense strand to SEQ ID NO: 1829639
uuugauguagcgcagagcc

SEQ ID NO: 1829641 - RNA, 19 nt, Artificial Sequence
  Description of Artificial Sequence: Synthetic oligonucleotide
  Sense strand starting at position 1041 of SEQ ID NO: 1563759
ccuccuugucucgaaucuu

SEQ ID NO: 1829642 - RNA, 19 nt, Artificial Sequence
  Description of Artificial Sequence: Synthetic oligonucleotide
  Antisense strand to SEQ ID NO: 1829641
aagauucgagacaaggagg

SEQ ID NO: 1829643 - RNA, 19 nt, Artificial Sequence
  Description of Artificial Sequence: Synthetic oligonucleotide
  Sense strand starting at position 1075 of SEQ ID NO: 1563759
gacaccuaccuugguagaa

SEQ ID NO: 1829644 - RNA, 19 nt, Artificial Sequence
  Description of Artificial Sequence: Synthetic oligonucleotide
  Antisense strand to SEQ ID NO: 1829643
uucuaccaagguagguguc

SEQ ID NO: 1829645 - RNA, 19 nt, Artificial Sequence
  Description of Artificial Sequence: Synthetic oligonucleotide
  Sense strand starting at position 1077 of SEQ ID NO: 1563759
caccuaccuugguagaaga

SEQ ID NO: 1829646 - RNA, 19 nt, Artificial Sequence
  Description of Artificial Sequence: Synthetic oligonucleotide
  Antisense strand to SEQ ID NO: 1829645
ucuucuaccaagguaggug

SEQ ID NO: 1829647 - RNA, 19 nt, Artificial Sequence
  Description of Artificial Sequence: Synthetic oligonucleotide
  Sense strand starting at position 1534 of SEQ ID NO: 1563759
gcucacaggcugugaugau

SEQ ID NO: 1829648 - RNA, 19 nt, Artificial Sequence
  Description of Artificial Sequence: Synthetic oligonucleotide
  Antisense strand to SEQ ID NO: 1829647
aucaucacagccugugagc

SEQ ID NO: 1829649 - RNA, 19 nt, Artificial Sequence
  Description of Artificial Sequence: Synthetic oligonucleotide
  Sense strand starting at position 1813 of SEQ ID NO: 1563759
gggcguccaucacuuugua

SEQ ID NO: 1829650 - RNA, 19 nt, Artificial Sequence
  Description of Artificial Sequence: Synthetic oligonucleotide
  Antisense strand to SEQ ID NO: 1829649
uacaaagugauggacgccc

SEQ ID NO: 1829651 - RNA, 19 nt, Artificial Sequence
  Description of Artificial Sequence: Synthetic oligonucleotide
  Sense strand starting at position 1816 of SEQ ID NO: 1563759
cguccaucacuuuguagaa

SEQ ID NO: 1829652 - RNA, 19 nt, Artificial Sequence
  Description of Artificial Sequence: Synthetic oligonucleotide
  Antisense strand to SEQ ID NO: 1829651
uucuacaaagugauggacg

SEQ ID NO: 1829653 - RNA, 19 nt, Artificial Sequence
  Description of Artificial Sequence: Synthetic oligonucleotide
  Sense strand starting at position 1817 of SEQ ID NO: 1563759
guccaucacuuuguagaag

SEQ ID NO: 1829654 - RNA, 19 nt, Artificial Sequence
  Description of Artificial Sequence: Synthetic oligonucleotide
  Antisense strand to SEQ ID NO: 1829653
cuucuacaaagugauggac

SEQ ID NO: 1829655 - RNA, 19 nt, Artificial Sequence
  Description of Artificial Sequence: Synthetic oligonucleotide
  Sense strand starting at position 2418 of SEQ ID NO: 1563759
cuccuuagguguccugaaa

SEQ ID NO: 1829656 - RNA, 19 nt, Artificial Sequence
  Description of Artificial Sequence: Synthetic oligonucleotide
  Antisense strand to SEQ ID NO: 1829655
uuucaggacaccuaaggag

SEQ ID NO: 1829657 - RNA, 19 nt, Artificial Sequence
  Description of Artificial Sequence: Synthetic oligonucleotide
  Sense strand starting at position 2433 of SEQ ID NO: 1563759
gaaauaugccgagaacgcu

SEQ ID NO: 1829658 - RNA, 19 nt, Artificial Sequence
  Description of Artificial Sequence: Synthetic oligonucleotide
  Antisense strand to SEQ ID NO: 1829657
agcguucucggcauauuuc

SEQ ID NO: 1829659 - RNA, 19 nt, Artificial Sequence
  Description of Artificial Sequence: Synthetic oligonucleotide
  Sense strand starting at position 2585 of SEQ ID NO: 1563759
ugggcaucguccuugauua

SEQ ID NO: 1829660 - RNA, 19 nt, Artificial Sequence
  Description of Artificial Sequence: Synthetic oligonucleotide
  Antisense strand to SEQ ID NO: 1829659
uaaucaaggacgaugccca

SEQ ID NO: 1829661 - RNA, 19 nt, Artificial Sequence
  Description of Artificial Sequence: Synthetic oligonucleotide
  Sense strand starting at position 2586 of SEQ ID NO: 1563759
gggcaucguccuugauuac

SEQ ID NO: 1829662 - RNA, 19 nt, Artificial Sequence
  Description of Artificial Sequence: Synthetic oligonucleotide
  Antisense strand to SEQ ID NO: 1829661
guaaucaaggacgaugccc

SEQ ID NO: 1829663 - RNA, 19 nt, Artificial Sequence
  Description of Artificial Sequence: Synthetic oligonucleotide
  Sense strand starting at position 2587 of SEQ ID NO: 1563759
ggcaucguccuugauuacu

SEQ ID NO: 1829664 - RNA, 19 nt, Artificial Sequence
  Description of Artificial Sequence: Synthetic oligonucleotide
  Antisense strand to SEQ ID NO: 1829663
aguaaucaaggacgaugcc

SEQ ID NO: 1829665 - RNA, 19 nt, Artificial Sequence
  Description of Artificial Sequence: Synthetic oligonucleotide
  Sense strand starting at position 2596 of SEQ ID NO: 1563759
cuugauuacuugucuggac

SEQ ID NO: 1829666 - RNA, 19 nt, Artificial Sequence
  Description of Artificial Sequence: Synthetic oligonucleotide
  Antisense strand to SEQ ID NO: 1829665
guccagacaaguaaucaag

SEQ ID NO: 1829667 - RNA, 19 nt, Artificial Sequence
  Description of Artificial Sequence: Synthetic oligonucleotide
  Sense strand starting at position 2827 of SEQ ID NO: 1563759
uggagucucuuuccugaag

SEQ ID NO: 1829668 - RNA, 19 nt, Artificial Sequence
  Description of Artificial Sequence: Synthetic oligonucleotide
  Antisense strand to SEQ ID NO: 1829667
cuucaggaaagagacucca

SEQ ID NO: 1829669 - RNA, 19 nt, Artificial Sequence
  Description of Artificial Sequence: Synthetic oligonucleotide
  Sense strand starting at position 2830 of SEQ ID NO: 1563759
agucucuuuccugaagcca

SEQ ID NO: 1829670 - RNA, 19 nt, Artificial Sequence
  Description of Artificial Sequence: Synthetic oligonucleotide
  Antisense strand to SEQ ID NO: 1829669
uggcuucaggaaagagacu

SEQ ID NO: 1829671 - RNA, 19 nt, Artificial Sequence
  Description of Artificial Sequence: Synthetic oligonucleotide
  Sense strand starting at position 2913 of SEQ ID NO: 1563759
gacagacuuuacugagaug

SEQ ID NO: 1829672 - RNA, 19 nt, Artificial Sequence
  Description of Artificial Sequence: Synthetic oligonucleotide
  Antisense strand to SEQ ID NO: 1829671
caucucaguaaagucuguc

SEQ ID NO: 1829673 - RNA, 19 nt, Artificial Sequence
  Description of Artificial Sequence: Synthetic oligonucleotide
  Sense strand starting at position 2916 of SEQ ID NO: 1563759
agacuuuacugagauguac

SEQ ID NO: 1829674 - RNA, 19 nt, Artificial Sequence
  Description of Artificial Sequence: Synthetic oligonucleotide
  Antisense strand to SEQ ID NO: 1829673
guacaucucaguaaagucu

SEQ ID NO: 1829675 - RNA, 19 nt, Artificial Sequence
  Description of Artificial Sequence: Synthetic oligonucleotide
  Sense strand starting at position 2937 of SEQ ID NO: 1563759
acucaaguaucugaaauga

SEQ ID NO: 1829676 - RNA, 19 nt, Artificial Sequence
  Description of Artificial Sequence: Synthetic oligonucleotide
  Antisense strand to SEQ ID NO: 1829675
ucauuucagauacuugagu

SEQ ID NO: 1829677 - RNA, 19 nt, Artificial Sequence
  Description of Artificial Sequence: Synthetic oligonucleotide
  Sense strand starting at position 3038 of SEQ ID NO: 1563759
auacgagaugcucaaugca

SEQ ID NO: 1829678 - RNA, 19 nt, Artificial Sequence
  Description of Artificial Sequence: Synthetic oligonucleotide
  Antisense strand to SEQ ID NO: 1829677
ugcauugagcaucucguau

SEQ ID NO: 1829679 - RNA, 19 nt, Artificial Sequence
  Description of Artificial Sequence: Synthetic oligonucleotide
  Sense strand starting at position 3041 of SEQ ID NO: 1563759
cgagaugcucaaugcauac

SEQ ID NO: 1829680 - RNA, 19 nt, Artificial Sequence
  Description of Artificial Sequence: Synthetic oligonucleotide
  Antisense strand to SEQ ID NO: 1829679
guaugcauugagcaucucg

SEQ ID NO: 1829681 - RNA, 19 nt, Artificial Sequence
  Description of Artificial Sequence: Synthetic oligonucleotide
  Sense strand starting at position 3119 of SEQ ID NO: 1563759
cuagcaugugcaugugaag

SEQ ID NO: 1829682 - RNA, 19 nt, Artificial Sequence
  Description of Artificial Sequence: Synthetic oligonucleotide
  Antisense strand to SEQ ID NO: 1829681
cuucacaugcacaugcuag

SEQ ID NO: 1829683 - RNA, 19 nt, Artificial Sequence
  Description of Artificial Sequence: Synthetic oligonucleotide
  Sense strand starting at position 3137 of SEQ ID NO: 1563759
gcuggacuccuuugagcag

SEQ ID NO: 1829684 - RNA, 19 nt, Artificial Sequence
  Description of Artificial Sequence: Synthetic oligonucleotide
  Antisense strand to SEQ ID NO: 1829683
cugcucaaaggaguccagc

SEQ ID NO: 1829685 - RNA, 19 nt, Artificial Sequence
  Description of Artificial Sequence: Synthetic oligonucleotide
  Sense strand starting at position 3253 of SEQ ID NO: 1563759
gcccuugccuggucagaga

SEQ ID NO: 1829686 - RNA, 19 nt, Artificial Sequence
  Description of Artificial Sequence: Synthetic oligonucleotide
  Antisense strand to SEQ ID NO: 1829685
ucucugaccaggcaagggc

SEQ ID NO: 1829687 - RNA, 19 nt, Artificial Sequence
  Description of Artificial Sequence: Synthetic oligonucleotide
  Sense strand starting at position 3487 of SEQ ID NO: 1563759
gagcacuggcuuggaagaa

SEQ ID NO: 1829688 - RNA, 19 nt, Artificial Sequence
  Description of Artificial Sequence: Synthetic oligonucleotide
  Antisense strand to SEQ ID NO: 1829687
uucuuccaagccagugcuc

SEQ ID NO: 1829689 - RNA, 19 nt, Artificial Sequence
  Description of Artificial Sequence: Synthetic oligonucleotide
  Sense strand starting at position 3646 of SEQ ID NO: 1563759
ggacuucugucuuauaaug

SEQ ID NO: 1829690 - RNA, 19 nt, Artificial Sequence
  Description of Artificial Sequence: Synthetic oligonucleotide
  Antisense strand to SEQ ID NO: 1829689
cauuauaagacagaagucc

SEQ ID NO: 1829691 - RNA, 19 nt, Artificial Sequence
  Description of Artificial Sequence: Synthetic oligonucleotide
  Sense strand starting at position 3704 of SEQ ID NO: 1563759
cgagaaugcuaacagcaca

SEQ ID NO: 1829692 - RNA, 19 nt, Artificial Sequence
  Description of Artificial Sequence: Synthetic oligonucleotide
  Antisense strand to SEQ ID NO: 1829691
ugugcuguuagcauucucg

SEQ ID NO: 1829693 - RNA, 19 nt, Artificial Sequence
  Description of Artificial Sequence: Synthetic oligonucleotide
  Sense strand starting at position 3746 of SEQ ID NO: 1563759
ggugcaaacgcgucacuua

SEQ ID NO: 1829694 - RNA, 19 nt, Artificial Sequence
  Description of Artificial Sequence: Synthetic oligonucleotide
  Antisense strand to SEQ ID NO: 1829693
uaagugacgcguuugcacc

SEQ ID NO: 1829695 - RNA, 19 nt, Artificial Sequence
  Description of Artificial Sequence: Synthetic oligonucleotide
  Sense strand starting at position 3749 of SEQ ID NO: 1563759
gcaaacgcgucacuuagaa

SEQ ID NO: 1829696 - RNA, 19 nt, Artificial Sequence
  Description of Artificial Sequence: Synthetic oligonucleotide
  Antisense strand to SEQ ID NO: 1829695
uucuaagugacgcguuugc

SEQ ID NO: 1829697 - RNA, 19 nt, Artificial Sequence
  Description of Artificial Sequence: Synthetic oligonucleotide
  Sense strand starting at position 3768 of SEQ ID NO: 1563759
aggcaugcugaguauucuu

SEQ ID NO: 1829698 - RNA, 19 nt, Artificial Sequence
  Description of Artificial Sequence: Synthetic oligonucleotide
  Antisense strand to SEQ ID NO: 1829697
aagaauacucagcaugccu

SEQ ID NO: 1829699 - RNA, 19 nt, Artificial Sequence
  Description of Artificial Sequence: Synthetic oligonucleotide
  Sense strand starting at position 3773 of SEQ ID NO: 1563759
ugcugaguauucuuugcuu

SEQ ID NO: 1829700 - RNA, 19 nt, Artificial Sequence
  Description of Artificial Sequence: Synthetic oligonucleotide
  Antisense strand to SEQ ID NO: 1829699
aagcaaagaauacucagca

SEQ ID NO: 1829701 - RNA, 19 nt, Artificial Sequence
  Description of Artificial Sequence: Synthetic oligonucleotide
  Sense strand starting at position 3775 of SEQ ID NO: 1563759
cugaguauucuuugcuuuc

SEQ ID NO: 1829702 - RNA, 19 nt, Artificial Sequence
  Description of Artificial Sequence: Synthetic oligonucleotide
  Antisense strand to SEQ ID NO: 1829701
gaaagcaaagaauacucag

SEQ ID NO: 1829703 - RNA, 19 nt, Artificial Sequence
  Description of Artificial Sequence: Synthetic oligonucleotide
  Sense strand starting at position 94 of SEQ ID NO: 1563760
uguugcuugcuuugaguua

SEQ ID NO: 1829704 - RNA, 19 nt, Artificial Sequence
  Description of Artificial Sequence: Synthetic oligonucleotide
  Antisense strand to SEQ ID NO: 1829703
uaacucaaagcaagcaaca

SEQ ID NO: 1829705 - RNA, 19 nt, Artificial Sequence
  Description of Artificial Sequence: Synthetic oligonucleotide
  Sense strand starting at position 406 of SEQ ID NO: 1563760
ugguuuccucccgagcuau

SEQ ID NO: 1829706 - RNA, 19 nt, Artificial Sequence
  Description of Artificial Sequence: Synthetic oligonucleotide
  Antisense strand to SEQ ID NO: 1829705
auagcucgggaggaaacca

SEQ ID NO: 1829707 - RNA, 19 nt, Artificial Sequence
  Description of Artificial Sequence: Synthetic oligonucleotide
  Sense strand starting at position 957 of SEQ ID NO: 1563760
ucuguauucgucugcacac

SEQ ID NO: 1829708 - RNA, 19 nt, Artificial Sequence
  Description of Artificial Sequence: Synthetic oligonucleotide
  Antisense strand to SEQ ID NO: 1829707
gugugcagacgaauacaga

SEQ ID NO: 1829709 - RNA, 19 nt, Artificial Sequence
  Description of Artificial Sequence: Synthetic oligonucleotide
  Sense strand starting at position 958 of SEQ ID NO: 1563760
cuguauucgucugcacaca

SEQ ID NO: 1829710 - RNA, 19 nt, Artificial Sequence
  Description of Artificial Sequence: Synthetic oligonucleotide
  Antisense strand to SEQ ID NO: 1829709
ugugugcagacgaauacag

SEQ ID NO: 1829711 - RNA, 19 nt, Artificial Sequence
  Description of Artificial Sequence: Synthetic oligonucleotide
  Sense strand starting at position 959 of SEQ ID NO: 1563760
uguauucgucugcacacaa

SEQ ID NO: 1829712 - RNA, 19 nt, Artificial Sequence
  Description of Artificial Sequence: Synthetic oligonucleotide
  Antisense strand to SEQ ID NO: 1829711
uugugugcagacgaauaca

SEQ ID NO: 1829713 - RNA, 19 nt, Artificial Sequence
  Description of Artificial Sequence: Synthetic oligonucleotide
  Sense strand starting at position 1090 of SEQ ID NO: 1563760
aagaaauacugcuccgagu

SEQ ID NO: 1829714 - RNA, 19 nt, Artificial Sequence
  Description of Artificial Sequence: Synthetic oligonucleotide
  Antisense strand to SEQ ID NO: 1829713
acucggagcaguauuucuu

SEQ ID NO: 1829715 - RNA, 19 nt, Artificial Sequence
  Description of Artificial Sequence: Synthetic oligonucleotide
  Sense strand starting at position 1092 of SEQ ID NO: 1563760
gaaauacugcuccgagugu

SEQ ID NO: 1829716 - RNA, 19 nt, Artificial Sequence
  Description of Artificial Sequence: Synthetic oligonucleotide
  Antisense strand to SEQ ID NO: 1829715
acacucggagcaguauuuc

SEQ ID NO: 1829717 - RNA, 19 nt, Artificial Sequence
  Description of Artificial Sequence: Synthetic oligonucleotide
  Sense strand starting at position 1439 of SEQ ID NO: 1563760
aguauucgucuugggugaa

SEQ ID NO: 1829718 - RNA, 19 nt, Artificial Sequence
  Description of Artificial Sequence: Synthetic oligonucleotide
  Antisense strand to SEQ ID NO: 1829717
uucacccaagacgaauacu

SEQ ID NO: 1829719 - RNA, 19 nt, Artificial Sequence
  Description of Artificial Sequence: Synthetic oligonucleotide
  Sense strand starting at position 1611 of SEQ ID NO: 1563760
ccggaacuuccuggcauuu

SEQ ID NO: 1829720 - RNA, 19 nt, Artificial Sequence
  Description of Artificial Sequence: Synthetic oligonucleotide
  Antisense strand to SEQ ID NO: 1829719
aaaugccaggaaguuccgg

SEQ ID NO: 1829721 - RNA, 19 nt, Artificial Sequence
  Description of Artificial Sequence: Synthetic oligonucleotide
  Sense strand starting at position 1632 of SEQ ID NO: 1563760
guaguauuccagccgagcu

SEQ ID NO: 1829722 - RNA, 19 nt, Artificial Sequence
  Description of Artificial Sequence: Synthetic oligonucleotide
  Antisense strand to SEQ ID NO: 1829721
agcucggcuggaauacuac

SEQ ID NO: 1829723 - RNA, 19 nt, Artificial Sequence
  Description of Artificial Sequence: Synthetic oligonucleotide
  Sense strand starting at position 1654 of SEQ ID NO: 1563760
gcgucagcagucucgaguu

SEQ ID NO: 1829724 - RNA, 19 nt, Artificial Sequence
  Description of Artificial Sequence: Synthetic oligonucleotide
  Antisense strand to SEQ ID NO: 1829723
aacucgagacugcugacgc

SEQ ID NO: 1829725 - RNA, 19 nt, Artificial Sequence
  Description of Artificial Sequence: Synthetic oligonucleotide
  Sense strand starting at position 1664 of SEQ ID NO: 1563760
ucucgaguuugagcacgaa

SEQ ID NO: 1829726 - RNA, 19 nt, Artificial Sequence
  Description of Artificial Sequence: Synthetic oligonucleotide
  Antisense strand to SEQ ID NO: 1829725
uucgugcucaaacucgaga

SEQ ID NO: 1829727 - RNA, 19 nt, Artificial Sequence
  Description of Artificial Sequence: Synthetic oligonucleotide
  Sense strand starting at position 1667 of SEQ ID NO: 1563760
cgaguuugagcacgaagua

SEQ ID NO: 1829728 - RNA, 19 nt, Artificial Sequence
  Description of Artificial Sequence: Synthetic oligonucleotide
  Antisense strand to SEQ ID NO: 1829727
uacuucgugcucaaacucg

SEQ ID NO: 1829729 - RNA, 19 nt, Artificial Sequence
  Description of Artificial Sequence: Synthetic oligonucleotide
  Sense strand starting at position 1700 of SEQ ID NO: 1563760
gcuucuguuuccgcaggua

SEQ ID NO: 1829730 - RNA, 19 nt, Artificial Sequence
  Description of Artificial Sequence: Synthetic oligonucleotide
  Antisense strand to SEQ ID NO: 1829729
uaccugcggaaacagaagc

SEQ ID NO: 1829731 - RNA, 19 nt, Artificial Sequence
  Description of Artificial Sequence: Synthetic oligonucleotide
  Sense strand starting at position 1934 of SEQ ID NO: 1563760
ucgcuuggucgcgagugaa

SEQ ID NO: 1829732 - RNA, 19 nt, Artificial Sequence
  Description of Artificial Sequence: Synthetic oligonucleotide
  Antisense strand to SEQ ID NO: 1829731
uucacucgcgaccaagcga

SEQ ID NO: 1829733 - RNA, 19 nt, Artificial Sequence
  Description of Artificial Sequence: Synthetic oligonucleotide
  Sense strand starting at position 2268 of SEQ ID NO: 1563760
ccaaauccucccggucaau

SEQ ID NO: 1829734 - RNA, 19 nt, Artificial Sequence
  Description of Artificial Sequence: Synthetic oligonucleotide
  Antisense strand to SEQ ID NO: 1829733
auugaccgggaggauuugg

SEQ ID NO: 1829735 - RNA, 19 nt, Artificial Sequence
  Description of Artificial Sequence: Synthetic oligonucleotide
  Sense strand starting at position 2538 of SEQ ID NO: 1563760
gggacaguuuguuuguuua

SEQ ID NO: 1829736 - RNA, 19 nt, Artificial Sequence
  Description of Artificial Sequence: Synthetic oligonucleotide
  Antisense strand to SEQ ID NO: 1829735
uaaacaaacaaacuguccc

SEQ ID NO: 1829737 - RNA, 19 nt, Artificial Sequence
  Description of Artificial Sequence: Synthetic oligonucleotide
  Sense strand starting at position 2591 of SEQ ID NO: 1563760
ggcucugauugguugggau

SEQ ID NO: 1829738 - RNA, 19 nt, Artificial Sequence
  Description of Artificial Sequence: Synthetic oligonucleotide
  Antisense strand to SEQ ID NO: 1829737
aucccaaccaaucagagcc

SEQ ID NO: 1829739 - RNA, 19 nt, Artificial Sequence
  Description of Artificial Sequence: Synthetic oligonucleotide
  Sense strand starting at position 2593 of SEQ ID NO: 1563760
cucugauugguugggauag

SEQ ID NO: 1829740 - RNA, 19 nt, Artificial Sequence
  Description of Artificial Sequence: Synthetic oligonucleotide
  Antisense strand to SEQ ID NO: 1829739
cuaucccaaccaaucagag

SEQ ID NO: 1829741 - RNA, 19 nt, Artificial Sequence
  Description of Artificial Sequence: Synthetic oligonucleotide
  Sense strand starting at position 2595 of SEQ ID NO: 1563760
cugauugguugggauagga

SEQ ID NO: 1829742 - RNA, 19 nt, Artificial Sequence
  Description of Artificial Sequence: Synthetic oligonucleotide
  Antisense strand to SEQ ID NO: 1829741
uccuaucccaaccaaucag

SEQ ID NO: 1829743 - RNA, 19 nt, Artificial Sequence
  Description of Artificial Sequence: Synthetic oligonucleotide
  Sense strand starting at position 2739 of SEQ ID NO: 1563760
ggcgcucucaggcgguaaa

SEQ ID NO: 1829744 - RNA, 19 nt, Artificial Sequence
  Description of Artificial Sequence: Synthetic oligonucleotide
  Antisense strand to SEQ ID NO: 1829743
uuuaccgccugagagcgcc

SEQ ID NO: 1829745 - RNA, 19 nt, Artificial Sequence
  Description of Artificial Sequence: Synthetic oligonucleotide
  Sense strand starting at position 2742 of SEQ ID NO: 1563760
gcucucaggcgguaaacaa

SEQ ID NO: 1829746 - RNA, 19 nt, Artificial Sequence
  Description of Artificial Sequence: Synthetic oligonucleotide
  Antisense strand to SEQ ID NO: 1829745
uuguuuaccgccugagagc

SEQ ID NO: 1829747 - RNA, 19 nt, Artificial Sequence
  Description of Artificial Sequence: Synthetic oligonucleotide
  Sense strand starting at position 2767 of SEQ ID NO: 1563760
gcaaauagcuguuaauggu

SEQ ID NO: 1829748 - RNA, 19 nt, Artificial Sequence
  Description of Artificial Sequence: Synthetic oligonucleotide
  Antisense strand to SEQ ID NO: 1829747
accauuaacagcuauuugc

SEQ ID NO: 1829749 - RNA, 19 nt, Artificial Sequence
  Description of Artificial Sequence: Synthetic oligonucleotide
  Sense strand starting at position 2774 of SEQ ID NO: 1563760
gcuguuaauggugguggua

SEQ ID NO: 1829750 - RNA, 19 nt, Artificial Sequence
  Description of Artificial Sequence: Synthetic oligonucleotide
  Antisense strand to SEQ ID NO: 1829749
uaccaccaccauuaacagc

SEQ ID NO: 1829751 - RNA, 19 nt, Artificial Sequence
  Description of Artificial Sequence: Synthetic oligonucleotide
  Sense strand starting at position 2776 of SEQ ID NO: 1563760
uguuaaugguggugguaaa

SEQ ID NO: 1829752 - RNA, 19 nt, Artificial Sequence
  Description of Artificial Sequence: Synthetic oligonucleotide
  Antisense strand to SEQ ID NO: 1829751
uuuaccaccaccauuaaca

SEQ ID NO: 1829753 - RNA, 19 nt, Artificial Sequence
  Description of Artificial Sequence: Synthetic oligonucleotide
  Sense strand starting at position 2842 of SEQ ID NO: 1563760
ccugguacucccugucaau

SEQ ID NO: 1829754 - RNA, 19 nt, Artificial Sequence
  Description of Artificial Sequence: Synthetic oligonucleotide
  Antisense strand to SEQ ID NO: 1829753
auugacagggaguaccagg

SEQ ID NO: 1829755 - RNA, 19 nt, Artificial Sequence
  Description of Artificial Sequence: Synthetic oligonucleotide
  Sense strand starting at position 2868 of SEQ ID NO: 1563760
auucucuguuccugucaca

SEQ ID NO: 1829756 - RNA, 19 nt, Artificial Sequence
  Description of Artificial Sequence: Synthetic oligonucleotide
  Antisense strand to SEQ ID NO: 1829755
ugugacaggaacagagaau

SEQ ID NO: 1829757 - RNA, 19 nt, Artificial Sequence
  Description of Artificial Sequence: Synthetic oligonucleotide
  Sense strand starting at position 3630 of SEQ ID NO: 1563760
cccaguuauuacuugacua

SEQ ID NO: 1829758 - RNA, 19 nt, Artificial Sequence
  Description of Artificial Sequence: Synthetic oligonucleotide
  Antisense strand to SEQ ID NO: 1829757
uagucaaguaauaacuggg

SEQ ID NO: 1829759 - RNA, 19 nt, Artificial Sequence
  Description of Artificial Sequence: Synthetic oligonucleotide
  Sense strand starting at position 3634 of SEQ ID NO: 1563760
guuauuacuugacuaggau

SEQ ID NO: 1829760 - RNA, 19 nt, Artificial Sequence
  Description of Artificial Sequence: Synthetic oligonucleotide
  Antisense strand to SEQ ID NO: 1829759
auccuagucaaguaauaac

SEQ ID NO: 1829761 - RNA, 19 nt, Artificial Sequence
  Description of Artificial Sequence: Synthetic oligonucleotide
  Sense strand starting at position 3657 of SEQ ID NO: 1563760
gacucuuaaugguggagau

SEQ ID NO: 1829762 - RNA, 19 nt, Artificial Sequence
  Description of Artificial Sequence: Synthetic oligonucleotide
  Antisense strand to SEQ ID NO: 1829761
aucuccaccauuaagaguc

SEQ ID NO: 1829763 - RNA, 19 nt, Artificial Sequence
  Description of Artificial Sequence: Synthetic oligonucleotide
  Sense strand starting at position 3658 of SEQ ID NO: 1563760
acucuuaaugguggagaug

SEQ ID NO: 1829764 - RNA, 19 nt, Artificial Sequence
  Description of Artificial Sequence: Synthetic oligonucleotide
  Antisense strand to SEQ ID NO: 1829763
caucuccaccauuaagagu

SEQ ID NO: 1829765 - RNA, 19 nt, Artificial Sequence
  Description of Artificial Sequence: Synthetic oligonucleotide
  Sense strand starting at position 3668 of SEQ ID NO: 1563760
guggagaugggucgugaau

SEQ ID NO: 1829766 - RNA, 19 nt, Artificial Sequence
  Description of Artificial Sequence: Synthetic oligonucleotide
  Antisense strand to SEQ ID NO: 1829765
auucacgacccaucuccac

SEQ ID NO: 1829767 - RNA, 19 nt, Artificial Sequence
  Description of Artificial Sequence: Synthetic oligonucleotide
  Sense strand starting at position 3670 of SEQ ID NO: 1563760
ggagaugggucgugaauua

SEQ ID NO: 1829768 - RNA, 19 nt, Artificial Sequence
  Description of Artificial Sequence: Synthetic oligonucleotide
  Antisense strand to SEQ ID NO: 1829767
uaauucacgacccaucucc

SEQ ID NO: 1829769 - RNA, 19 nt, Artificial Sequence
  Description of Artificial Sequence: Synthetic oligonucleotide
  Sense strand starting at position 3675 of SEQ ID NO: 1563760
ugggucgugaauuaucaaa

SEQ ID NO: 1829770 - RNA, 19 nt, Artificial Sequence
  Description of Artificial Sequence: Synthetic oligonucleotide
  Antisense strand to SEQ ID NO: 1829769
uuugauaauucacgaccca

SEQ ID NO: 1829771 - RNA, 19 nt, Artificial Sequence
  Description of Artificial Sequence: Synthetic oligonucleotide
  Sense strand starting at position 3677 of SEQ ID NO: 1563760
ggucgugaauuaucaaagg

SEQ ID NO: 1829772 - RNA, 19 nt, Artificial Sequence
  Description of Artificial Sequence: Synthetic oligonucleotide
  Antisense strand to SEQ ID NO: 1829771
ccuuugauaauucacgacc

SEQ ID NO: 1829773 - RNA, 19 nt, Artificial Sequence
  Description of Artificial Sequence: Synthetic oligonucleotide
  Sense strand starting at position 3746 of SEQ ID NO: 1563760
gcauuucucucugaaagaa

SEQ ID NO: 1829774 - RNA, 19 nt, Artificial Sequence
  Description of Artificial Sequence: Synthetic oligonucleotide
  Antisense strand to SEQ ID NO: 1829773
uucuuucagagagaaaugc

SEQ ID NO: 1829775 - RNA, 19 nt, Artificial Sequence
  Description of Artificial Sequence: Synthetic oligonucleotide
  Sense strand starting at position 3801 of SEQ ID NO: 1563760
ggcaaaggguacuauuuau

SEQ ID NO: 1829776 - RNA, 19 nt, Artificial Sequence
  Description of Artificial Sequence: Synthetic oligonucleotide
  Antisense strand to SEQ ID NO: 1829775
auaaauaguacccuuugcc

SEQ ID NO: 1829777 - RNA, 19 nt, Artificial Sequence
  Description of Artificial Sequence: Synthetic oligonucleotide
  Sense strand starting at position 3828 of SEQ ID NO: 1563760
acaguaaacuaggcaauau

SEQ ID NO: 1829778 - RNA, 19 nt, Artificial Sequence
  Description of Artificial Sequence: Synthetic oligonucleotide
  Antisense strand to SEQ ID NO: 1829777
auauugccuaguuuacugu

SEQ ID NO: 1829779 - RNA, 19 nt, Artificial Sequence
  Description of Artificial Sequence: Synthetic oligonucleotide
  Sense strand starting at position 3838 of SEQ ID NO: 1563760
aggcaauauguauaucaua

SEQ ID NO: 1829780 - RNA, 19 nt, Artificial Sequence
  Description of Artificial Sequence: Synthetic oligonucleotide
  Antisense strand to SEQ ID NO: 1829779
uaugauauacauauugccu

SEQ ID NO: 1829781 - RNA, 19 nt, Artificial Sequence
  Description of Artificial Sequence: Synthetic oligonucleotide
  Sense strand starting at position 3908 of SEQ ID NO: 1563760
acacacguauuugaauaaa

SEQ ID NO: 1829782 - RNA, 19 nt, Artificial Sequence
  Description of Artificial Sequence: Synthetic oligonucleotide
  Antisense strand to SEQ ID NO: 1829781
uuuauucaaauacgugugu

SEQ ID NO: 1829783 - RNA, 19 nt, Artificial Sequence
  Description of Artificial Sequence: Synthetic oligonucleotide
  Sense strand starting at position 22 of SEQ ID NO: 1563761
accaaauauuaggagaaac

SEQ ID NO: 1829784 - RNA, 19 nt, Artificial Sequence
  Description of Artificial Sequence: Synthetic oligonucleotide
  Antisense strand to SEQ ID NO: 1829783
guuucuccuaauauuuggu

SEQ ID NO: 1829785 - RNA, 19 nt, Artificial Sequence
  Description of Artificial Sequence: Synthetic oligonucleotide
  Sense strand starting at position 33 of SEQ ID NO: 1563761
ggagaaaccugucucauag

SEQ ID NO: 1829786 - RNA, 19 nt, Artificial Sequence
  Description of Artificial Sequence: Synthetic oligonucleotide
  Antisense strand to SEQ ID NO: 1829785
cuaugagacagguuucucc

SEQ ID NO: 1829787 - RNA, 19 nt, Artificial Sequence
  Description of Artificial Sequence: Synthetic oligonucleotide
  Sense strand starting at position 164 of SEQ ID NO: 1563761
aaaguagaaccaggucauu

SEQ ID NO: 1829788 - RNA, 19 nt, Artificial Sequence
  Description of Artificial Sequence: Synthetic oligonucleotide
  Antisense strand to SEQ ID NO: 1829787
aaugaccugguucuacuuu

SEQ ID NO: 1829789 - RNA, 19 nt, Artificial Sequence
  Description of Artificial Sequence: Synthetic oligonucleotide
  Sense strand starting at position 167 of SEQ ID NO: 1563761
guagaaccaggucauucua

SEQ ID NO: 1829790 - RNA, 19 nt, Artificial Sequence
  Description of Artificial Sequence: Synthetic oligonucleotide
  Antisense strand to SEQ ID NO: 1829789
uagaaugaccugguucuac

SEQ ID NO: 1829791 - RNA, 19 nt, Artificial Sequence
  Description of Artificial Sequence: Synthetic oligonucleotide
  Sense strand starting at position 214 of SEQ ID NO: 1563761
ccagucaucccucagccau

SEQ ID NO: 1829792 - RNA, 19 nt, Artificial Sequence
  Description of Artificial Sequence: Synthetic oligonucleotide
  Antisense strand to SEQ ID NO: 1829791
auggcugagggaugacugg

SEQ ID NO: 1829793 - RNA, 19 nt, Artificial Sequence
  Description of Artificial Sequence: Synthetic oligonucleotide
  Sense strand starting at position 216 of SEQ ID NO: 1563761
agucaucccucagccauau

SEQ ID NO: 1829794 - RNA, 19 nt, Artificial Sequence
  Description of Artificial Sequence: Synthetic oligonucleotide
  Antisense strand to SEQ ID NO: 1829793
auauggcugagggaugacu

SEQ ID NO: 1829795 - RNA, 19 nt, Artificial Sequence
  Description of Artificial Sequence: Synthetic oligonucleotide
  Sense strand starting at position 388 of SEQ ID NO: 1563761
gucuaugaaguugauccua

SEQ ID NO: 1829796 - RNA, 19 nt, Artificial Sequence
  Description of Artificial Sequence: Synthetic oligonucleotide
  Antisense strand to SEQ ID NO: 1829795
uaggaucaacuucauagac

SEQ ID NO: 1829797 - RNA, 19 nt, Artificial Sequence
  Description of Artificial Sequence: Synthetic oligonucleotide
  Sense strand starting at position 390 of SEQ ID NO: 1563761
cuaugaaguugauccuacu

SEQ ID NO: 1829798 - RNA, 19 nt, Artificial Sequence
  Description of Artificial Sequence: Synthetic oligonucleotide
  Antisense strand to SEQ ID NO: 1829797
aguaggaucaacuucauag

SEQ ID NO: 1829799 - RNA, 19 nt, Artificial Sequence
  Description of Artificial Sequence: Synthetic oligonucleotide
  Sense strand starting at position 583 of SEQ ID NO: 1563761
accgaugguaauggaauua

SEQ ID NO: 1829800 - RNA, 19 nt, Artificial Sequence
  Description of Artificial Sequence: Synthetic oligonucleotide
  Antisense strand to SEQ ID NO: 1829799
uaauuccauuaccaucggu

SEQ ID NO: 1829801 - RNA, 19 nt, Artificial Sequence
  Description of Artificial Sequence: Synthetic oligonucleotide
  Sense strand starting at position 598 of SEQ ID NO: 1563761
auuaaagaagccuggugaa

SEQ ID NO: 1829802 - RNA, 19 nt, Artificial Sequence
  Description of Artificial Sequence: Synthetic oligonucleotide
  Antisense strand to SEQ ID NO: 1829801
uucaccaggcuucuuuaau

SEQ ID NO: 1829803 - RNA, 19 nt, Artificial Sequence
  Description of Artificial Sequence: Synthetic oligonucleotide
  Sense strand starting at position 612 of SEQ ID NO: 1563761
gugaaagugaggcagaguu

SEQ ID NO: 1829804 - RNA, 19 nt, Artificial Sequence
  Description of Artificial Sequence: Synthetic oligonucleotide
  Antisense strand to SEQ ID NO: 1829803
aacucugccucacuuucac

SEQ ID NO: 1829805 - RNA, 19 nt, Artificial Sequence
  Description of Artificial Sequence: Synthetic oligonucleotide
  Sense strand starting at position 770 of SEQ ID NO: 1563761
ugagucauauccucuuccu

SEQ ID NO: 1829806 - RNA, 19 nt, Artificial Sequence
  Description of Artificial Sequence: Synthetic oligonucleotide
  Antisense strand to SEQ ID NO: 1829805
aggaagaggauaugacuca

SEQ ID NO: 1829807 - RNA, 19 nt, Artificial Sequence
  Description of Artificial Sequence: Synthetic oligonucleotide
  Sense strand starting at position 787 of SEQ ID NO: 1563761
cucuuuaucuaaucgugga

SEQ ID NO: 1829808 - RNA, 19 nt, Artificial Sequence
  Description of Artificial Sequence: Synthetic oligonucleotide
  Antisense strand to SEQ ID NO: 1829807
uccacgauuagauaaagag

SEQ ID NO: 1829809 - RNA, 19 nt, Artificial Sequence
  Description of Artificial Sequence: Synthetic oligonucleotide
  Sense strand starting at position 791 of SEQ ID NO: 1563761
uuaucuaaucguggaccua

SEQ ID NO: 1829810 - RNA, 19 nt, Artificial Sequence
  Description of Artificial Sequence: Synthetic oligonucleotide
  Antisense strand to SEQ ID NO: 1829809
uagguccacgauuagauaa

SEQ ID NO: 1829811 - RNA, 19 nt, Artificial Sequence
  Description of Artificial Sequence: Synthetic oligonucleotide
  Sense strand starting at position 792 of SEQ ID NO: 1563761
uaucuaaucguggaccuaa

SEQ ID NO: 1829812 - RNA, 19 nt, Artificial Sequence
  Description of Artificial Sequence: Synthetic oligonucleotide
  Antisense strand to SEQ ID NO: 1829811
uuagguccacgauuagaua

SEQ ID NO: 1829813 - RNA, 19 nt, Artificial Sequence
  Description of Artificial Sequence: Synthetic oligonucleotide
  Sense strand starting at position 861 of SEQ ID NO: 1563761
ccuggcugccaauaauaca

SEQ ID NO: 1829814 - RNA, 19 nt, Artificial Sequence
  Description of Artificial Sequence: Synthetic oligonucleotide
  Antisense strand to SEQ ID NO: 1829813
uguauuauuggcagccagg

SEQ ID NO: 1829815 - RNA, 19 nt, Artificial Sequence
  Description of Artificial Sequence: Synthetic oligonucleotide
  Sense strand starting at position 956 of SEQ ID NO: 1563761
uguguuauacacuaaggau

SEQ ID NO: 1829816 - RNA, 19 nt, Artificial Sequence
  Description of Artificial Sequence: Synthetic oligonucleotide
  Antisense strand to SEQ ID NO: 1829815
auccuuaguguauaacaca

SEQ ID NO: 1829817 - RNA, 19 nt, Artificial Sequence
  Description of Artificial Sequence: Synthetic oligonucleotide
  Sense strand starting at position 1006 of SEQ ID NO: 1563761
ucagguaucuaucccauca

SEQ ID NO: 1829818 - RNA, 19 nt, Artificial Sequence
  Description of Artificial Sequence: Synthetic oligonucleotide
  Antisense strand to SEQ ID NO: 1829817
ugaugggauagauaccuga

SEQ ID NO: 1829819 - RNA, 19 nt, Artificial Sequence
  Description of Artificial Sequence: Synthetic oligonucleotide
  Sense strand starting at position 1358 of SEQ ID NO: 1563761
auaguacagcccuaguaua

SEQ ID NO: 1829820 - RNA, 19 nt, Artificial Sequence
  Description of Artificial Sequence: Synthetic oligonucleotide
  Antisense strand to SEQ ID NO: 1829819
uauacuagggcuguacuau

SEQ ID NO: 1829821 - RNA, 19 nt, Artificial Sequence
  Description of Artificial Sequence: Synthetic oligonucleotide
  Sense strand starting at position 1395 of SEQ ID NO: 1563761
gggauagaauccuucuauu

SEQ ID NO: 1829822 - RNA, 19 nt, Artificial Sequence
  Description of Artificial Sequence: Synthetic oligonucleotide
  Antisense strand to SEQ ID NO: 1829821
aauagaaggauucuauccc

SEQ ID NO: 1829823 - RNA, 19 nt, Artificial Sequence
  Description of Artificial Sequence: Synthetic oligonucleotide
  Sense strand starting at position 1442 of SEQ ID NO: 1563761
uuaccuugauguuuaagaa

SEQ ID NO: 1829824 - RNA, 19 nt, Artificial Sequence
  Description of Artificial Sequence: Synthetic oligonucleotide
  Antisense strand to SEQ ID NO: 1829823
uucuuaaacaucaagguaa

SEQ ID NO: 1829825 - RNA, 19 nt, Artificial Sequence
  Description of Artificial Sequence: Synthetic oligonucleotide
  Sense strand starting at position 1539 of SEQ ID NO: 1563761
gguauuaucucuucuggga

SEQ ID NO: 1829826 - RNA, 19 nt, Artificial Sequence
  Description of Artificial Sequence: Synthetic oligonucleotide
  Antisense strand to SEQ ID NO: 1829825
ucccagaagagauaauacc

SEQ ID NO: 1829827 - RNA, 19 nt, Artificial Sequence
  Description of Artificial Sequence: Synthetic oligonucleotide
  Sense strand starting at position 1543 of SEQ ID NO: 1563761
uuaucucuucugggaaaug

SEQ ID NO: 1829828 - RNA, 19 nt, Artificial Sequence
  Description of Artificial Sequence: Synthetic oligonucleotide
  Antisense strand to SEQ ID NO: 1829827
cauuucccagaagagauaa

SEQ ID NO: 1829829 - RNA, 19 nt, Artificial Sequence
  Description of Artificial Sequence: Synthetic oligonucleotide
  Sense strand starting at position 1638 of SEQ ID NO: 1563761
ggaaucuguggacaucagu

SEQ ID NO: 1829830 - RNA, 19 nt, Artificial Sequence
  Description of Artificial Sequence: Synthetic oligonucleotide
  Antisense strand to SEQ ID NO: 1829829
acugauguccacagauucc

SEQ ID NO: 1829831 - RNA, 19 nt, Artificial Sequence
  Description of Artificial Sequence: Synthetic oligonucleotide
  Sense strand starting at position 1644 of SEQ ID NO: 1563761
uguggacaucaguagaagu

SEQ ID NO: 1829832 - RNA, 19 nt, Artificial Sequence
  Description of Artificial Sequence: Synthetic oligonucleotide
  Antisense strand to SEQ ID NO: 1829831
acuucuacugauguccaca

SEQ ID NO: 1829833 - RNA, 19 nt, Artificial Sequence
  Description of Artificial Sequence: Synthetic oligonucleotide
  Sense strand starting at position 1713 of SEQ ID NO: 1563761
ccggguuucuauuuauggu

SEQ ID NO: 1829834 - RNA, 19 nt, Artificial Sequence
  Description of Artificial Sequence: Synthetic oligonucleotide
  Antisense strand to SEQ ID NO: 1829833
accauaaauagaaacccgg

SEQ ID NO: 1829835 - RNA, 19 nt, Artificial Sequence
  Description of Artificial Sequence: Synthetic oligonucleotide
  Sense strand starting at position 1729 of SEQ ID NO: 1563761
gguuucuucccauauaaug

SEQ ID NO: 1829836 - RNA, 19 nt, Artificial Sequence
  Description of Artificial Sequence: Synthetic oligonucleotide
  Antisense strand to SEQ ID NO: 1829835
cauuauaugggaagaaacc

SEQ ID NO: 1829837 - RNA, 19 nt, Artificial Sequence
  Description of Artificial Sequence: Synthetic oligonucleotide
  Sense strand starting at position 1767 of SEQ ID NO: 1563761
cagcaaaggcuguaagauc

SEQ ID NO: 1829838 - RNA, 19 nt, Artificial Sequence
  Description of Artificial Sequence: Synthetic oligonucleotide
  Antisense strand to SEQ ID NO: 1829837
gaucuuacagccuuugcug

SEQ ID NO: 1829839 - RNA, 19 nt, Artificial Sequence
  Description of Artificial Sequence: Synthetic oligonucleotide
  Sense strand starting at position 1775 of SEQ ID NO: 1563761
gcuguaagaucacucagac

SEQ ID NO: 1829840 - RNA, 19 nt, Artificial Sequence
  Description of Artificial Sequence: Synthetic oligonucleotide
  Antisense strand to SEQ ID NO: 1829839
gucugagugaucuuacagc

SEQ ID NO: 1829841 - RNA, 19 nt, Artificial Sequence
  Description of Artificial Sequence: Synthetic oligonucleotide
  Sense strand starting at position 1989 of SEQ ID NO: 1563761
ugauuacugaaaggguauu

SEQ ID NO: 1829842 - RNA, 19 nt, Artificial Sequence
  Description of Artificial Sequence: Synthetic oligonucleotide
  Antisense strand to SEQ ID NO: 1829841
aauacccuuucaguaauca

SEQ ID NO: 1829843 - RNA, 19 nt, Artificial Sequence
  Description of Artificial Sequence: Synthetic oligonucleotide
  Sense strand starting at position 2178 of SEQ ID NO: 1563761
agcucugaggcucaggaaa

SEQ ID NO: 1829844 - RNA, 19 nt, Artificial Sequence
  Description of Artificial Sequence: Synthetic oligonucleotide
  Antisense strand to SEQ ID NO: 1829843
uuuccugagccucagagcu

SEQ ID NO: 1829845 - RNA, 19 nt, Artificial Sequence
  Description of Artificial Sequence: Synthetic oligonucleotide
  Sense strand starting at position 2209 of SEQ ID NO: 1563761
agaguagggcuuugaacuu

SEQ ID NO: 1829846 - RNA, 19 nt, Artificial Sequence
  Description of Artificial Sequence: Synthetic oligonucleotide
  Antisense strand to SEQ ID NO: 1829845
aaguucaaagcccuacucu

SEQ ID NO: 1829847 - RNA, 19 nt, Artificial Sequence
  Description of Artificial Sequence: Synthetic oligonucleotide
  Sense strand starting at position 2215 of SEQ ID NO: 1563761
gggcuuugaacuuggguga

SEQ ID NO: 1829848 - RNA, 19 nt, Artificial Sequence
  Description of Artificial Sequence: Synthetic oligonucleotide
  Antisense strand to SEQ ID NO: 1829847
ucacccaaguucaaagccc

SEQ ID NO: 1829849 - RNA, 19 nt, Artificial Sequence
  Description of Artificial Sequence: Synthetic oligonucleotide
  Sense strand starting at position 2406 of SEQ ID NO: 1563761
ucauuacuuccauguagua

SEQ ID NO: 1829850 - RNA, 19 nt, Artificial Sequence
  Description of Artificial Sequence: Synthetic oligonucleotide
  Antisense strand to SEQ ID NO: 1829849
uacuacauggaaguaauga

SEQ ID NO: 1829851 - RNA, 19 nt, Artificial Sequence
  Description of Artificial Sequence: Synthetic oligonucleotide
  Sense strand starting at position 2492 of SEQ ID NO: 1563761
guuugucuagaucaauacu

SEQ ID NO: 1829852 - RNA, 19 nt, Artificial Sequence
  Description of Artificial Sequence: Synthetic oligonucleotide
  Antisense strand to SEQ ID NO: 1829851
aguauugaucuagacaaac

SEQ ID NO: 1829853 - RNA, 19 nt, Artificial Sequence
  Description of Artificial Sequence: Synthetic oligonucleotide
  Sense strand starting at position 2495 of SEQ ID NO: 1563761
ugucuagaucaauacugua

SEQ ID NO: 1829854 - RNA, 19 nt, Artificial Sequence
  Description of Artificial Sequence: Synthetic oligonucleotide
  Antisense strand to SEQ ID NO: 1829853
uacaguauugaucuagaca

SEQ ID NO: 1829855 - RNA, 19 nt, Artificial Sequence
  Description of Artificial Sequence: Synthetic oligonucleotide
  Sense strand starting at position 3955 of SEQ ID NO: 1563761
gguaggagugggugacuaa

SEQ ID NO: 1829856 - RNA, 19 nt, Artificial Sequence
  Description of Artificial Sequence: Synthetic oligonucleotide
  Antisense strand to SEQ ID NO: 1829855
uuagucacccacuccuacc

SEQ ID NO: 1829857 - RNA, 19 nt, Artificial Sequence
  Description of Artificial Sequence: Synthetic oligonucleotide
  Sense strand starting at position 3966 of SEQ ID NO: 1563761
gugacuaagucuguuuaga

SEQ ID NO: 1829858 - RNA, 19 nt, Artificial Sequence
  Description of Artificial Sequence: Synthetic oligonucleotide
  Antisense strand to SEQ ID NO: 1829857
ucuaaacagacuuagucac

SEQ ID NO: 1829859 - RNA, 19 nt, Artificial Sequence
  Description of Artificial Sequence: Synthetic oligonucleotide
  Sense strand starting at position 3968 of SEQ ID NO: 1563761
gacuaagucuguuuagaac

SEQ ID NO: 1829860 - RNA, 19 nt, Artificial Sequence
  Description of Artificial Sequence: Synthetic oligonucleotide
  Antisense strand to SEQ ID NO: 1829859
guucuaaacagacuuaguc

SEQ ID NO: 1829861 - RNA, 19 nt, Artificial Sequence
  Description of Artificial Sequence: Synthetic oligonucleotide
  Sense strand starting at position 3977 of SEQ ID NO: 1563761
uguuuagaacucuagugga

SEQ ID NO: 1829862 - RNA, 19 nt, Artificial Sequence
  Description of Artificial Sequence: Synthetic oligonucleotide
  Antisense strand to SEQ ID NO: 1829861
uccacuagaguucuaaaca

SEQ ID NO: 1829863 - RNA, 19 nt, Artificial Sequence
  Description of Artificial Sequence: Synthetic oligonucleotide
  Sense strand starting at position 40 of SEQ ID NO: 1563762
ccaggaaauguuuguuuaa

SEQ ID NO: 1829864 - RNA, 19 nt, Artificial Sequence
  Description of Artificial Sequence: Synthetic oligonucleotide
  Antisense strand to SEQ ID NO: 1829863
uuaaacaaacauuuccugg

SEQ ID NO: 1829865 - RNA, 19 nt, Artificial Sequence
  Description of Artificial Sequence: Synthetic oligonucleotide
  Sense strand starting at position 41 of SEQ ID NO: 1563762
caggaaauguuuguuuaaa

SEQ ID NO: 1829866 - RNA, 19 nt, Artificial Sequence
  Description of Artificial Sequence: Synthetic oligonucleotide
  Antisense strand to SEQ ID NO: 1829865
uuuaaacaaacauuuccug

SEQ ID NO: 1829867 - RNA, 19 nt, Artificial Sequence
  Description of Artificial Sequence: Synthetic oligonucleotide
  Sense strand starting at position 582 of SEQ ID NO: 1563762
caagaagucugaucucaga

SEQ ID NO: 1829868 - RNA, 19 nt, Artificial Sequence
  Description of Artificial Sequence: Synthetic oligonucleotide
  Antisense strand to SEQ ID NO: 1829867
ucugagaucagacuucuug

SEQ ID NO: 1829869 - RNA, 19 nt, Artificial Sequence
  Description of Artificial Sequence: Synthetic oligonucleotide
  Sense strand starting at position 618 of SEQ ID NO: 1563762
cuaugcucugcugacagaa

SEQ ID NO: 1829870 - RNA, 19 nt, Artificial Sequence
  Description of Artificial Sequence: Synthetic oligonucleotide
  Antisense strand to SEQ ID NO: 1829869
uucugucagcagagcauag

SEQ ID NO: 1829871 - RNA, 19 nt, Artificial Sequence
  Description of Artificial Sequence: Synthetic oligonucleotide
  Sense strand starting at position 742 of SEQ ID NO: 1563762
ggucaaagauggcuucaug

SEQ ID NO: 1829872 - RNA, 19 nt, Artificial Sequence
  Description of Artificial Sequence: Synthetic oligonucleotide
  Antisense strand to SEQ ID NO: 1829871
caugaagccaucuuugacc

SEQ ID NO: 1829873 - RNA, 19 nt, Artificial Sequence
  Description of Artificial Sequence: Synthetic oligonucleotide
  Sense strand starting at position 890 of SEQ ID NO: 1563762
agacuauguccucagccua

SEQ ID NO: 1829874 - RNA, 19 nt, Artificial Sequence
  Description of Artificial Sequence: Synthetic oligonucleotide
  Antisense strand to SEQ ID NO: 1829873
uaggcugaggacauagucu

SEQ ID NO: 1829875 - RNA, 19 nt, Artificial Sequence
  Description of Artificial Sequence: Synthetic oligonucleotide
  Sense strand starting at position 910 of SEQ ID NO: 1563762
augggcuagucuuugggaa

SEQ ID NO: 1829876 - RNA, 19 nt, Artificial Sequence
  Description of Artificial Sequence: Synthetic oligonucleotide
  Antisense strand to SEQ ID NO: 1829875
uucccaaagacuagcccau

SEQ ID NO: 1829877 - RNA, 19 nt, Artificial Sequence
  Description of Artificial Sequence: Synthetic oligonucleotide
  Sense strand starting at position 911 of SEQ ID NO: 1563762
ugggcuagucuuugggaac

SEQ ID NO: 1829878 - RNA, 19 nt, Artificial Sequence
  Description of Artificial Sequence: Synthetic oligonucleotide
  Antisense strand to SEQ ID NO: 1829877
guucccaaagacuagccca

SEQ ID NO: 1829879 - RNA, 19 nt, Artificial Sequence
  Description of Artificial Sequence: Synthetic oligonucleotide
  Sense strand starting at position 1012 of SEQ ID NO: 1563762
gguggaucugccugauuac

SEQ ID NO: 1829880 - RNA, 19 nt, Artificial Sequence
  Description of Artificial Sequence: Synthetic oligonucleotide
  Antisense strand to SEQ ID NO: 1829879
guaaucaggcagauccacc

SEQ ID NO: 1829881 - RNA, 19 nt, Artificial Sequence
  Description of Artificial Sequence: Synthetic oligonucleotide
  Sense strand starting at position 1013 of SEQ ID NO: 1563762
guggaucugccugauuacu

SEQ ID NO: 1829882 - RNA, 19 nt, Artificial Sequence
  Description of Artificial Sequence: Synthetic oligonucleotide
  Antisense strand to SEQ ID NO: 1829881
aguaaucaggcagauccac

SEQ ID NO: 1829883 - RNA, 19 nt, Artificial Sequence
  Description of Artificial Sequence: Synthetic oligonucleotide
  Sense strand starting at position 1015 of SEQ ID NO: 1563762
ggaucugccugauuacuuc

SEQ ID NO: 1829884 - RNA, 19 nt, Artificial Sequence
  Description of Artificial Sequence: Synthetic oligonucleotide
  Antisense strand to SEQ ID NO: 1829883
gaaguaaucaggcagaucc

SEQ ID NO: 1829885 - RNA, 19 nt, Artificial Sequence
  Description of Artificial Sequence: Synthetic oligonucleotide
  Sense strand starting at position 1057 of SEQ ID NO: 1563762
acccaagacucacagaaga

SEQ ID NO: 1829886 - RNA, 19 nt, Artificial Sequence
  Description of Artificial Sequence: Synthetic oligonucleotide
  Antisense strand to SEQ ID NO: 1829885
ucuucugugagucuugggu

SEQ ID NO: 1829887 - RNA, 19 nt, Artificial Sequence
  Description of Artificial Sequence: Synthetic oligonucleotide
  Sense strand starting at position 1125 of SEQ ID NO: 1563762
gcacaugaaucuccuggaa

SEQ ID NO: 1829888 - RNA, 19 nt, Artificial Sequence
  Description of Artificial Sequence: Synthetic oligonucleotide
  Antisense strand to SEQ ID NO: 1829887
uuccaggagauucaugugc

SEQ ID NO: 1829889 - RNA, 19 nt, Artificial Sequence
  Description of Artificial Sequence: Synthetic oligonucleotide
  Sense strand starting at position 1179 of SEQ ID NO: 1563762
uagggugaaggcugagauu

SEQ ID NO: 1829890 - RNA, 19 nt, Artificial Sequence
  Description of Artificial Sequence: Synthetic oligonucleotide
  Antisense strand to SEQ ID NO: 1829889
aaucucagccuucacccua

SEQ ID NO: 1829891 - RNA, 19 nt, Artificial Sequence
  Description of Artificial Sequence: Synthetic oligonucleotide
  Sense strand starting at position 1259 of SEQ ID NO: 1563762
guagcaaggcuuuagaaua

SEQ ID NO: 1829892 - RNA, 19 nt, Artificial Sequence
  Description of Artificial Sequence: Synthetic oligonucleotide
  Antisense strand to SEQ ID NO: 1829891
uauucuaaagccuugcuac

SEQ ID NO: 1829893 - RNA, 19 nt, Artificial Sequence
  Description of Artificial Sequence: Synthetic oligonucleotide
  Sense strand starting at position 1266 of SEQ ID NO: 1563762
ggcuuuagaauauagcaga

SEQ ID NO: 1829894 - RNA, 19 nt, Artificial Sequence
  Description of Artificial Sequence: Synthetic oligonucleotide
  Antisense strand to SEQ ID NO: 1829893
ucugcuauauucuaaagcc

SEQ ID NO: 1829895 - RNA, 19 nt, Artificial Sequence
  Description of Artificial Sequence: Synthetic oligonucleotide
  Sense strand starting at position 1352 of SEQ ID NO: 1563762
uaggaucucagguguaaag

SEQ ID NO: 1829896 - RNA, 19 nt, Artificial Sequence
  Description of Artificial Sequence: Synthetic oligonucleotide
  Antisense strand to SEQ ID NO: 1829895
cuuuacaccugagauccua

SEQ ID NO: 1829897 - RNA, 19 nt, Artificial Sequence
  Description of Artificial Sequence: Synthetic oligonucleotide
  Sense strand starting at position 1550 of SEQ ID NO: 1563762
ugaggaugauuugagauca

SEQ ID NO: 1829898 - RNA, 19 nt, Artificial Sequence
  Description of Artificial Sequence: Synthetic oligonucleotide
  Antisense strand to SEQ ID NO: 1829897
ugaucucaaaucauccuca

SEQ ID NO: 1829899 - RNA, 19 nt, Artificial Sequence
  Description of Artificial Sequence: Synthetic oligonucleotide
  Sense strand starting at position 1714 of SEQ ID NO: 1563762
cugacaugugcucagcaaa

SEQ ID NO: 1829900 - RNA, 19 nt, Artificial Sequence
  Description of Artificial Sequence: Synthetic oligonucleotide
  Antisense strand to SEQ ID NO: 1829899
uuugcugagcacaugucag

SEQ ID NO: 1829901 - RNA, 19 nt, Artificial Sequence
  Description of Artificial Sequence: Synthetic oligonucleotide
  Sense strand starting at position 1753 of SEQ ID NO: 1563762
ucuaguuucucagucauag

SEQ ID NO: 1829902 - RNA, 19 nt, Artificial Sequence
  Description of Artificial Sequence: Synthetic oligonucleotide
  Antisense strand to SEQ ID NO: 1829901
cuaugacugagaaacuaga

SEQ ID NO: 1829903 - RNA, 19 nt, Artificial Sequence
  Description of Artificial Sequence: Synthetic oligonucleotide
  Sense strand starting at position 1866 of SEQ ID NO: 1563762
gaccuuugugcuugaugaa

SEQ ID NO: 1829904 - RNA, 19 nt, Artificial Sequence
  Description of Artificial Sequence: Synthetic oligonucleotide
  Antisense strand to SEQ ID NO: 1829903
uucaucaagcacaaagguc

SEQ ID NO: 1829905 - RNA, 19 nt, Artificial Sequence
  Description of Artificial Sequence: Synthetic oligonucleotide
  Sense strand starting at position 1867 of SEQ ID NO: 1563762
accuuugugcuugaugaag

SEQ ID NO: 1829906 - RNA, 19 nt, Artificial Sequence
  Description of Artificial Sequence: Synthetic oligonucleotide
  Antisense strand to SEQ ID NO: 1829905
cuucaucaagcacaaaggu

SEQ ID NO: 1829907 - RNA, 19 nt, Artificial Sequence
  Description of Artificial Sequence: Synthetic oligonucleotide
  Sense strand starting at position 1916 of SEQ ID NO: 1563762
caagaagaauggucagcaa

SEQ ID NO: 1829908 - RNA, 19 nt, Artificial Sequence
  Description of Artificial Sequence: Synthetic oligonucleotide
  Antisense strand to SEQ ID NO: 1829907
uugcugaccauucuucuug

SEQ ID NO: 1829909 - RNA, 19 nt, Artificial Sequence
  Description of Artificial Sequence: Synthetic oligonucleotide
  Sense strand starting at position 2113 of SEQ ID NO: 1563762
ggcauugaggcucacacaa

SEQ ID NO: 1829910 - RNA, 19 nt, Artificial Sequence
  Description of Artificial Sequence: Synthetic oligonucleotide
  Antisense strand to SEQ ID NO: 1829909
uugugugagccucaaugcc

SEQ ID NO: 1829911 - RNA, 19 nt, Artificial Sequence
  Description of Artificial Sequence: Synthetic oligonucleotide
  Sense strand starting at position 2157 of SEQ ID NO: 1563762
uggcaucuugccuggagaa

SEQ ID NO: 1829912 - RNA, 19 nt, Artificial Sequence
  Description of Artificial Sequence: Synthetic oligonucleotide
  Antisense strand to SEQ ID NO: 1829911
uucuccaggcaagaugcca

SEQ ID NO: 1829913 - RNA, 19 nt, Artificial Sequence
  Description of Artificial Sequence: Synthetic oligonucleotide
  Sense strand starting at position 2158 of SEQ ID NO: 1563762
ggcaucuugccuggagaag

SEQ ID NO: 1829914 - RNA, 19 nt, Artificial Sequence
  Description of Artificial Sequence: Synthetic oligonucleotide
  Antisense strand to SEQ ID NO: 1829913
cuucuccaggcaagaugcc

SEQ ID NO: 1829915 - RNA, 19 nt, Artificial Sequence
  Description of Artificial Sequence: Synthetic oligonucleotide
  Sense strand starting at position 2331 of SEQ ID NO: 1563762
agagaaaggucacuuagca

SEQ ID NO: 1829916 - RNA, 19 nt, Artificial Sequence
  Description of Artificial Sequence: Synthetic oligonucleotide
  Antisense strand to SEQ ID NO: 1829915
ugcuaagugaccuuucucu

SEQ ID NO: 1829917 - RNA, 19 nt, Artificial Sequence
  Description of Artificial Sequence: Synthetic oligonucleotide
  Sense strand starting at position 2339 of SEQ ID NO: 1563762
gucacuuagcacugaucau

SEQ ID NO: 1829918 - RNA, 19 nt, Artificial Sequence
  Description of Artificial Sequence: Synthetic oligonucleotide
  Antisense strand to SEQ ID NO: 1829917
augaucagugcuaagugac

SEQ ID NO: 1829919 - RNA, 19 nt, Artificial Sequence
  Description of Artificial Sequence: Synthetic oligonucleotide
  Sense strand starting at position 2363 of SEQ ID NO: 1563762
aaagguaguggcgaugaga

SEQ ID NO: 1829920 - RNA, 19 nt, Artificial Sequence
  Description of Artificial Sequence: Synthetic oligonucleotide
  Antisense strand to SEQ ID NO: 1829919
ucucaucgccacuaccuuu

SEQ ID NO: 1829921 - RNA, 19 nt, Artificial Sequence
  Description of Artificial Sequence: Synthetic oligonucleotide
  Sense strand starting at position 2365 of SEQ ID NO: 1563762
agguaguggcgaugagaga

SEQ ID NO: 1829922 - RNA, 19 nt, Artificial Sequence
  Description of Artificial Sequence: Synthetic oligonucleotide
  Antisense strand to SEQ ID NO: 1829921
ucucucaucgccacuaccu

SEQ ID NO: 1829923 - RNA, 19 nt, Artificial Sequence
  Description of Artificial Sequence: Synthetic oligonucleotide
  Sense strand starting at position 2628 of SEQ ID NO: 1563762
gccacuuacugacuguaua

SEQ ID NO: 1829924 - RNA, 19 nt, Artificial Sequence
  Description of Artificial Sequence: Synthetic oligonucleotide
  Antisense strand to SEQ ID NO: 1829923
uauacagucaguaaguggc

SEQ ID NO: 1829925 - RNA, 19 nt, Artificial Sequence
  Description of Artificial Sequence: Synthetic oligonucleotide
  Sense strand starting at position 2740 of SEQ ID NO: 1563762
aagauuaagugaguuugua

SEQ ID NO: 1829926 - RNA, 19 nt, Artificial Sequence
  Description of Artificial Sequence: Synthetic oligonucleotide
  Antisense strand to SEQ ID NO: 1829925
uacaaacucacuuaaucuu

SEQ ID NO: 1829927 - RNA, 19 nt, Artificial Sequence
  Description of Artificial Sequence: Synthetic oligonucleotide
  Sense strand starting at position 2762 of SEQ ID NO: 1563762
uuagaaugcuuggcacaug

SEQ ID NO: 1829928 - RNA, 19 nt, Artificial Sequence
  Description of Artificial Sequence: Synthetic oligonucleotide
  Antisense strand to SEQ ID NO: 1829927
caugugccaagcauucuaa

SEQ ID NO: 1829929 - RNA, 19 nt, Artificial Sequence
  Description of Artificial Sequence: Synthetic oligonucleotide
  Sense strand starting at position 2765 of SEQ ID NO: 1563762
gaaugcuuggcacauggua

SEQ ID NO: 1829930 - RNA, 19 nt, Artificial Sequence
  Description of Artificial Sequence: Synthetic oligonucleotide
  Antisense strand to SEQ ID NO: 1829929
uaccaugugccaagcauuc

SEQ ID NO: 1829931 - RNA, 19 nt, Artificial Sequence
  Description of Artificial Sequence: Synthetic oligonucleotide
  Sense strand starting at position 2777 of SEQ ID NO: 1563762
caugguaagugaucaguaa

SEQ ID NO: 1829932 - RNA, 19 nt, Artificial Sequence
  Description of Artificial Sequence: Synthetic oligonucleotide
  Antisense strand to SEQ ID NO: 1829931
uuacugaucacuuaccaug

SEQ ID NO: 1829933 - RNA, 19 nt, Artificial Sequence
  Description of Artificial Sequence: Synthetic oligonucleotide
  Sense strand starting at position 2992 of SEQ ID NO: 1563762
cuaucagccucagucagaa

SEQ ID NO: 1829934 - RNA, 19 nt, Artificial Sequence
  Description of Artificial Sequence: Synthetic oligonucleotide
  Antisense strand to SEQ ID NO: 1829933
uucugacugaggcugauag

SEQ ID NO: 1829935 - RNA, 19 nt, Artificial Sequence
  Description of Artificial Sequence: Synthetic oligonucleotide
  Sense strand starting at position 3120 of SEQ ID NO: 1563762
caggaacacucagauuugu

SEQ ID NO: 1829936 - RNA, 19 nt, Artificial Sequence
  Description of Artificial Sequence: Synthetic oligonucleotide
  Antisense strand to SEQ ID NO: 1829935
acaaaucugaguguuccug

SEQ ID NO: 1829937 - RNA, 19 nt, Artificial Sequence
  Description of Artificial Sequence: Synthetic oligonucleotide
  Sense strand starting at position 3273 of SEQ ID NO: 1563762
agagaacagcucugcuuau

SEQ ID NO: 1829938 - RNA, 19 nt, Artificial Sequence
  Description of Artificial Sequence: Synthetic oligonucleotide
  Antisense strand to SEQ ID NO: 1829937
auaagcagagcuguucucu

SEQ ID NO: 1829939 - RNA, 19 nt, Artificial Sequence
  Description of Artificial Sequence: Synthetic oligonucleotide
  Sense strand starting at position 3284 of SEQ ID NO: 1563762
cugcuuauacagcaacaga

SEQ ID NO: 1829940 - RNA, 19 nt, Artificial Sequence
  Description of Artificial Sequence: Synthetic oligonucleotide
  Antisense strand to SEQ ID NO: 1829939
ucuguugcuguauaagcag

SEQ ID NO: 1829941 - RNA, 19 nt, Artificial Sequence
  Description of Artificial Sequence: Synthetic oligonucleotide
  Sense strand starting at position 3785 of SEQ ID NO: 1563762
aacauauuaggccagaugu

SEQ ID NO: 1829942 - RNA, 19 nt, Artificial Sequence
  Description of Artificial Sequence: Synthetic oligonucleotide
  Antisense strand to SEQ ID NO: 1829941
acaucuggccuaauauguu

SEQ ID NO: 1829943 - RNA, 19 nt, Artificial Sequence
  Description of Artificial Sequence: Synthetic oligonucleotide
  Sense strand starting at position 41 of SEQ ID NO: 1563763
acaauccuggcagaaguau

SEQ ID NO: 1829944 - RNA, 19 nt, Artificial Sequence
  Description of Artificial Sequence: Synthetic oligonucleotide
  Antisense strand to SEQ ID NO: 1829943
auacuucugccaggauugu

SEQ ID NO: 1829945 - RNA, 19 nt, Artificial Sequence
  Description of Artificial Sequence: Synthetic oligonucleotide
  Sense strand starting at position 98 of SEQ ID NO: 1563763
augcuuggcggugaagaaa

SEQ ID NO: 1829946 - RNA, 19 nt, Artificial Sequence
  Description of Artificial Sequence: Synthetic oligonucleotide
  Antisense strand to SEQ ID NO: 1829945
uuucuucaccgccaagcau

SEQ ID NO: 1829947 - RNA, 19 nt, Artificial Sequence
  Description of Artificial Sequence: Synthetic oligonucleotide
  Sense strand starting at position 124 of SEQ ID NO: 1563763
aaaggauuacuguguggcu

SEQ ID NO: 1829948 - RNA, 19 nt, Artificial Sequence
  Description of Artificial Sequence: Synthetic oligonucleotide
  Antisense strand to SEQ ID NO: 1829947
agccacacaguaauccuuu

SEQ ID NO: 1829949 - RNA, 19 nt, Artificial Sequence
  Description of Artificial Sequence: Synthetic oligonucleotide
  Sense strand starting at position 125 of SEQ ID NO: 1563763
aaggauuacuguguggcua

SEQ ID NO: 1829950 - RNA, 19 nt, Artificial Sequence
  Description of Artificial Sequence: Synthetic oligonucleotide
  Antisense strand to SEQ ID NO: 1829949
uagccacacaguaauccuu

SEQ ID NO: 1829951 - RNA, 19 nt, Artificial Sequence
  Description of Artificial Sequence: Synthetic oligonucleotide
  Sense strand starting at position 212 of SEQ ID NO: 1563763
ggagaacaauuacauauuu

SEQ ID NO: 1829952 - RNA, 19 nt, Artificial Sequence
  Description of Artificial Sequence: Synthetic oligonucleotide
  Antisense strand to SEQ ID NO: 1829951
aaauauguaauuguucucc

SEQ ID NO: 1829953 - RNA, 19 nt, Artificial Sequence
  Description of Artificial Sequence: Synthetic oligonucleotide
  Sense strand starting at position 378 of SEQ ID NO: 1563763
ucaaauuguguguacaauc

SEQ ID NO: 1829954 - RNA, 19 nt, Artificial Sequence
  Description of Artificial Sequence: Synthetic oligonucleotide
  Antisense strand to SEQ ID NO: 1829953
gauuguacacacaauuuga

SEQ ID NO: 1829955 - RNA, 19 nt, Artificial Sequence
  Description of Artificial Sequence: Synthetic oligonucleotide
  Sense strand starting at position 577 of SEQ ID NO: 1563763
ugaggaguaguauacgaac

SEQ ID NO: 1829956 - RNA, 19 nt, Artificial Sequence
  Description of Artificial Sequence: Synthetic oligonucleotide
  Antisense strand to SEQ ID NO: 1829955
guucguauacuacuccuca

SEQ ID NO: 1829957 - RNA, 19 nt, Artificial Sequence
  Description of Artificial Sequence: Synthetic oligonucleotide
  Sense strand starting at position 974 of SEQ ID NO: 1563763
aaauauucgcgcgcucaag

SEQ ID NO: 1829958 - RNA, 19 nt, Artificial Sequence
  Description of Artificial Sequence: Synthetic oligonucleotide
  Antisense strand to SEQ ID NO: 1829957
cuugagcgcgcgaauauuu

SEQ ID NO: 1829959 - RNA, 19 nt, Artificial Sequence
  Description of Artificial Sequence: Synthetic oligonucleotide
  Sense strand starting at position 1786 of SEQ ID NO: 1563763
agccgaggucugggauacu

SEQ ID NO: 1829960 - RNA, 19 nt, Artificial Sequence
  Description of Artificial Sequence: Synthetic oligonucleotide
  Antisense strand to SEQ ID NO: 1829959
aguaucccagaccucggcu

SEQ ID NO: 1829961 - RNA, 19 nt, Artificial Sequence
  Description of Artificial Sequence: Synthetic oligonucleotide
  Sense strand starting at position 1789 of SEQ ID NO: 1563763
cgaggucugggauacuuau

SEQ ID NO: 1829962 - RNA, 19 nt, Artificial Sequence
  Description of Artificial Sequence: Synthetic oligonucleotide
  Antisense strand to SEQ ID NO: 1829961
auaaguaucccagaccucg

SEQ ID NO: 1829963 - RNA, 19 nt, Artificial Sequence
  Description of Artificial Sequence: Synthetic oligonucleotide
  Sense strand starting at position 2229 of SEQ ID NO: 1563763
aagguucuguuccuugaua

SEQ ID NO: 1829964 - RNA, 19 nt, Artificial Sequence
  Description of Artificial Sequence: Synthetic oligonucleotide
  Antisense strand to SEQ ID NO: 1829963
uaucaaggaacagaaccuu

SEQ ID NO: 1829965 - RNA, 19 nt, Artificial Sequence
  Description of Artificial Sequence: Synthetic oligonucleotide
  Sense strand starting at position 2230 of SEQ ID NO: 1563763
agguucuguuccuugauaa

SEQ ID NO: 1829966 - RNA, 19 nt, Artificial Sequence
  Description of Artificial Sequence: Synthetic oligonucleotide
  Antisense strand to SEQ ID NO: 1829965
uuaucaaggaacagaaccu

SEQ ID NO: 1829967 - RNA, 19 nt, Artificial Sequence
  Description of Artificial Sequence: Synthetic oligonucleotide
  Sense strand starting at position 2273 of SEQ ID NO: 1563763
cuagaauccuguuuauagu

SEQ ID NO: 1829968 - RNA, 19 nt, Artificial Sequence
  Description of Artificial Sequence: Synthetic oligonucleotide
  Antisense strand to SEQ ID NO: 1829967
acuauaaacaggauucuag

SEQ ID NO: 1829969 - RNA, 19 nt, Artificial Sequence
  Description of Artificial Sequence: Synthetic oligonucleotide
  Sense strand starting at position 2533 of SEQ ID NO: 1563763
cccagagacuguuucuguu

SEQ ID NO: 1829970 - RNA, 19 nt, Artificial Sequence
  Description of Artificial Sequence: Synthetic oligonucleotide
  Antisense strand to SEQ ID NO: 1829969
aacagaaacagucucuggg

SEQ ID NO: 1829971 - RNA, 19 nt, Artificial Sequence
  Description of Artificial Sequence: Synthetic oligonucleotide
  Sense strand starting at position 2623 of SEQ ID NO: 1563763
uguauaaguacuuaugugu

SEQ ID NO: 1829972 - RNA, 19 nt, Artificial Sequence
  Description of Artificial Sequence: Synthetic oligonucleotide
  Antisense strand to SEQ ID NO: 1829971
acacauaaguacuuauaca

SEQ ID NO: 1829973 - RNA, 19 nt, Artificial Sequence
  Description of Artificial Sequence: Synthetic oligonucleotide
  Sense strand starting at position 2634 of SEQ ID NO: 1563763
uuauguguucaggaaggug

SEQ ID NO: 1829974 - RNA, 19 nt, Artificial Sequence
  Description of Artificial Sequence: Synthetic oligonucleotide
  Antisense strand to SEQ ID NO: 1829973
caccuuccugaacacauaa

SEQ ID NO: 1829975 - RNA, 19 nt, Artificial Sequence
  Description of Artificial Sequence: Synthetic oligonucleotide
  Sense strand starting at position 2737 of SEQ ID NO: 1563763
guuagaaauuauucuugga

SEQ ID NO: 1829976 - RNA, 19 nt, Artificial Sequence
  Description of Artificial Sequence: Synthetic oligonucleotide
  Antisense strand to SEQ ID NO: 1829975
uccaagaauaauuucuaac

SEQ ID NO: 1829977 - RNA, 19 nt, Artificial Sequence
  Description of Artificial Sequence: Synthetic oligonucleotide
  Sense strand starting at position 2883 of SEQ ID NO: 1563763
ugguacacaguuuauaaau

SEQ ID NO: 1829978 - RNA, 19 nt, Artificial Sequence
  Description of Artificial Sequence: Synthetic oligonucleotide
  Antisense strand to SEQ ID NO: 1829977
auuuauaaacuguguacca

SEQ ID NO: 1829979 - RNA, 19 nt, Artificial Sequence
  Description of Artificial Sequence: Synthetic oligonucleotide
  Sense strand starting at position 2926 of SEQ ID NO: 1563763
aaggucuguugugugaaga

SEQ ID NO: 1829980 - RNA, 19 nt, Artificial Sequence
  Description of Artificial Sequence: Synthetic oligonucleotide
  Antisense strand to SEQ ID NO: 1829979
ucuucacacaacagaccuu

SEQ ID NO: 1829981 - RNA, 19 nt, Artificial Sequence
  Description of Artificial Sequence: Synthetic oligonucleotide
  Sense strand starting at position 3040 of SEQ ID NO: 1563763
ggacuuaaauauguugagu

SEQ ID NO: 1829982 - RNA, 19 nt, Artificial Sequence
  Description of Artificial Sequence: Synthetic oligonucleotide
  Antisense strand to SEQ ID NO: 1829981
acucaacauauuuaagucc

SEQ ID NO: 1829983 - RNA, 19 nt, Artificial Sequence
  Description of Artificial Sequence: Synthetic oligonucleotide
  Sense strand starting at position 3102 of SEQ ID NO: 1563763
acugauguuuccuugacuc

SEQ ID NO: 1829984 - RNA, 19 nt, Artificial Sequence
  Description of Artificial Sequence: Synthetic oligonucleotide
  Antisense strand to SEQ ID NO: 1829983
gagucaaggaaacaucagu

SEQ ID NO: 1829985 - RNA, 19 nt, Artificial Sequence
  Description of Artificial Sequence: Synthetic oligonucleotide
  Sense strand starting at position 3104 of SEQ ID NO: 1563763
ugauguuuccuugacucag

SEQ ID NO: 1829986 - RNA, 19 nt, Artificial Sequence
  Description of Artificial Sequence: Synthetic oligonucleotide
  Antisense strand to SEQ ID NO: 1829985
cugagucaaggaaacauca

SEQ ID NO: 1829987 - RNA, 19 nt, Artificial Sequence
  Description of Artificial Sequence: Synthetic oligonucleotide
  Sense strand starting at position 3106 of SEQ ID NO: 1563763
auguuuccuugacucagaa

SEQ ID NO: 1829988 - RNA, 19 nt, Artificial Sequence
  Description of Artificial Sequence: Synthetic oligonucleotide
  Antisense strand to SEQ ID NO: 1829987
uucugagucaaggaaacau

SEQ ID NO: 1829989 - RNA, 19 nt, Artificial Sequence
  Description of Artificial Sequence: Synthetic oligonucleotide
  Sense strand starting at position 3310 of SEQ ID NO: 1563763
auuauugcucaagauugac

SEQ ID NO: 1829990 - RNA, 19 nt, Artificial Sequence
  Description of Artificial Sequence: Synthetic oligonucleotide
  Antisense strand to SEQ ID NO: 1829989
gucaaucuugagcaauaau

SEQ ID NO: 1829991 - RNA, 19 nt, Artificial Sequence
  Description of Artificial Sequence: Synthetic oligonucleotide
  Sense strand starting at position 3316 of SEQ ID NO: 1563763
gcucaagauugaccauuau

SEQ ID NO: 1829992 - RNA, 19 nt, Artificial Sequence
  Description of Artificial Sequence: Synthetic oligonucleotide
  Antisense strand to SEQ ID NO: 1829991
auaauggucaaucuugagc

SEQ ID NO: 1829993 - RNA, 19 nt, Artificial Sequence
  Description of Artificial Sequence: Synthetic oligonucleotide
  Sense strand starting at position 3348 of SEQ ID NO: 1563763
ucaggcaaccuuuagugua

SEQ ID NO: 1829994 - RNA, 19 nt, Artificial Sequence
  Description of Artificial Sequence: Synthetic oligonucleotide
  Antisense strand to SEQ ID NO: 1829993
uacacuaaagguugccuga

SEQ ID NO: 1829995 - RNA, 19 nt, Artificial Sequence
  Description of Artificial Sequence: Synthetic oligonucleotide
  Sense strand starting at position 3358 of SEQ ID NO: 1563763
uuuaguguaagcugaggaa

SEQ ID NO: 1829996 - RNA, 19 nt, Artificial Sequence
  Description of Artificial Sequence: Synthetic oligonucleotide
  Antisense strand to SEQ ID NO: 1829995
uuccucagcuuacacuaaa

SEQ ID NO: 1829997 - RNA, 19 nt, Artificial Sequence
  Description of Artificial Sequence: Synthetic oligonucleotide
  Sense strand starting at position 3408 of SEQ ID NO: 1563763
guugccuuccgcuugcaau

SEQ ID NO: 1829998 - RNA, 19 nt, Artificial Sequence
  Description of Artificial Sequence: Synthetic oligonucleotide
  Antisense strand to SEQ ID NO: 1829997
auugcaagcggaaggcaac

SEQ ID NO: 1829999 - RNA, 19 nt, Artificial Sequence
  Description of Artificial Sequence: Synthetic oligonucleotide
  Sense strand starting at position 3421 of SEQ ID NO: 1563763
ugcaaucaccuuugugaca

SEQ ID NO: 1830000 - RNA, 19 nt, Artificial Sequence
  Description of Artificial Sequence: Synthetic oligonucleotide
  Antisense strand to SEQ ID NO: 1829999
ugucacaaaggugauugca

SEQ ID NO: 1830001 - RNA, 19 nt, Artificial Sequence
  Description of Artificial Sequence: Synthetic oligonucleotide
  Sense strand starting at position 3422 of SEQ ID NO: 1563763
gcaaucaccuuugugacau

SEQ ID NO: 1830002 - RNA, 19 nt, Artificial Sequence
  Description of Artificial Sequence: Synthetic oligonucleotide
  Antisense strand to SEQ ID NO: 1830001
augucacaaaggugauugc

SEQ ID NO: 1830003 - RNA, 19 nt, Artificial Sequence
  Description of Artificial Sequence: Synthetic oligonucleotide
  Sense strand starting at position 3432 of SEQ ID NO: 1563763
uugugacaucuccacuaug

SEQ ID NO: 1830004 - RNA, 19 nt, Artificial Sequence
  Description of Artificial Sequence: Synthetic oligonucleotide
  Antisense strand to SEQ ID NO: 1830003
cauaguggagaugucacaa

SEQ ID NO: 1830005 - RNA, 19 nt, Artificial Sequence
  Description of Artificial Sequence: Synthetic oligonucleotide
  Sense strand starting at position 3467 of SEQ ID NO: 1563763
cccggugauccacacucau

SEQ ID NO: 1830006 - RNA, 19 nt, Artificial Sequence
  Description of Artificial Sequence: Synthetic oligonucleotide
  Antisense strand to SEQ ID NO: 1830005
augaguguggaucaccggg

SEQ ID NO: 1830007 - RNA, 19 nt, Artificial Sequence
  Description of Artificial Sequence: Synthetic oligonucleotide
  Sense strand starting at position 3529 of SEQ ID NO: 1563763
gggauugugauguauuauc

SEQ ID NO: 1830008 - RNA, 19 nt, Artificial Sequence
  Description of Artificial Sequence: Synthetic oligonucleotide
  Antisense strand to SEQ ID NO: 1830007
gauaauacaucacaauccc

SEQ ID NO: 1830009 - RNA, 19 nt, Artificial Sequence
  Description of Artificial Sequence: Synthetic oligonucleotide
  Sense strand starting at position 3547 of SEQ ID NO: 1563763
cuuaguauaucuuuccuga

SEQ ID NO: 1830010 - RNA, 19 nt, Artificial Sequence
  Description of Artificial Sequence: Synthetic oligonucleotide
  Antisense strand to SEQ ID NO: 1830009
ucaggaaagauauacuaag

SEQ ID NO: 1830011 - RNA, 19 nt, Artificial Sequence
  Description of Artificial Sequence: Synthetic oligonucleotide
  Sense strand starting at position 3634 of SEQ ID NO: 1563763
cgaucaagggaguauguga

SEQ ID NO: 1830012 - RNA, 19 nt, Artificial Sequence
  Description of Artificial Sequence: Synthetic oligonucleotide
  Antisense strand to SEQ ID NO: 1830011
ucacauacucccuugaucg

SEQ ID NO: 1830013 - RNA, 19 nt, Artificial Sequence
  Description of Artificial Sequence: Synthetic oligonucleotide
  Sense strand starting at position 3724 of SEQ ID NO: 1563763
uguugcugugaggauuauu

SEQ ID NO: 1830014 - RNA, 19 nt, Artificial Sequence
  Description of Artificial Sequence: Synthetic oligonucleotide
  Antisense strand to SEQ ID NO: 1830013
aauaauccucacagcaaca

SEQ ID NO: 1830015 - RNA, 19 nt, Artificial Sequence
  Description of Artificial Sequence: Synthetic oligonucleotide
  Sense strand starting at position 3732 of SEQ ID NO: 1563763
ugaggauuauuugguauaa

SEQ ID NO: 1830016 - RNA, 19 nt, Artificial Sequence
  Description of Artificial Sequence: Synthetic oligonucleotide
  Antisense strand to SEQ ID NO: 1830015
uuauaccaaauaauccuca

SEQ ID NO: 1830017 - RNA, 19 nt, Artificial Sequence
  Description of Artificial Sequence: Synthetic oligonucleotide
  Sense strand starting at position 3734 of SEQ ID NO: 1563763
aggauuauuugguauaaug

SEQ ID NO: 1830018 - RNA, 19 nt, Artificial Sequence
  Description of Artificial Sequence: Synthetic oligonucleotide
  Antisense strand to SEQ ID NO: 1830017
cauuauaccaaauaauccu

SEQ ID NO: 1830019 - RNA, 19 nt, Artificial Sequence
  Description of Artificial Sequence: Synthetic oligonucleotide
  Sense strand starting at position 3808 of SEQ ID NO: 1563763
uuauccugggauuguuauu

SEQ ID NO: 1830020 - RNA, 19 nt, Artificial Sequence
  Description of Artificial Sequence: Synthetic oligonucleotide
  Antisense strand to SEQ ID NO: 1830019
aauaacaaucccaggauaa

SEQ ID NO: 1830021 - RNA, 19 nt, Artificial Sequence
  Description of Artificial Sequence: Synthetic oligonucleotide
  Sense strand starting at position 3905 of SEQ ID NO: 1563763
ucuagaacugcuuaagauc

SEQ ID NO: 1830022 - RNA, 19 nt, Artificial Sequence
  Description of Artificial Sequence: Synthetic oligonucleotide
  Antisense strand to SEQ ID NO: 1830021
gaucuuaagcaguucuaga

SEQ ID NO: 1830023 - RNA, 19 nt, Artificial Sequence
  Description of Artificial Sequence: Synthetic oligonucleotide
  Sense strand starting at position 126 of SEQ ID NO: 1563764
uggauuguggguugcuuaa

SEQ ID NO: 1830024 - RNA, 19 nt, Artificial Sequence
  Description of Artificial Sequence: Synthetic oligonucleotide
  Antisense strand to SEQ ID NO: 1830023
uuaagcaacccacaaucca

SEQ ID NO: 1830025 - RNA, 19 nt, Artificial Sequence
  Description of Artificial Sequence: Synthetic oligonucleotide
  Sense strand starting at position 148 of SEQ ID NO: 1563764
aagcaaagacguugugcaa

SEQ ID NO: 1830026 - RNA, 19 nt, Artificial Sequence
  Description of Artificial Sequence: Synthetic oligonucleotide
  Antisense strand to SEQ ID NO: 1830025
uugcacaacgucuuugcuu

SEQ ID NO: 1830027 - RNA, 19 nt, Artificial Sequence
  Description of Artificial Sequence: Synthetic oligonucleotide
  Sense strand starting at position 332 of SEQ ID NO: 1563764
ggaaucucauccucagcuu

SEQ ID NO: 1830028 - RNA, 19 nt, Artificial Sequence
  Description of Artificial Sequence: Synthetic oligonucleotide
  Antisense strand to SEQ ID NO: 1830027
aagcugaggaugagauucc

SEQ ID NO: 1830029 - RNA, 19 nt, Artificial Sequence
  Description of Artificial Sequence: Synthetic oligonucleotide
  Sense strand starting at position 410 of SEQ ID NO: 1563764
cggauuuccuugcaacuca

SEQ ID NO: 1830030 - RNA, 19 nt, Artificial Sequence
  Description of Artificial Sequence: Synthetic oligonucleotide
  Antisense strand to SEQ ID NO: 1830029
ugaguugcaaggaaauccg

SEQ ID NO: 1830031 - RNA, 19 nt, Artificial Sequence
  Description of Artificial Sequence: Synthetic oligonucleotide
  Sense strand starting at position 531 of SEQ ID NO: 1563764
ccaccauuguggucacuca

SEQ ID NO: 1830032 - RNA, 19 nt, Artificial Sequence
  Description of Artificial Sequence: Synthetic oligonucleotide
  Antisense strand to SEQ ID NO: 1830031
ugagugaccacaauggugg

SEQ ID NO: 1830033 - RNA, 19 nt, Artificial Sequence
  Description of Artificial Sequence: Synthetic oligonucleotide
  Sense strand starting at position 1827 of SEQ ID NO: 1563764
cgcggagcacuauuguauu

SEQ ID NO: 1830034 - RNA, 19 nt, Artificial Sequence
  Description of Artificial Sequence: Synthetic oligonucleotide
  Antisense strand to SEQ ID NO: 1830033
aauacaauagugcuccgcg

SEQ ID NO: 1830035 - RNA, 19 nt, Artificial Sequence
  Description of Artificial Sequence: Synthetic oligonucleotide
  Sense strand starting at position 1833 of SEQ ID NO: 1563764
gcacuauuguauuccugac

SEQ ID NO: 1830036 - RNA, 19 nt, Artificial Sequence
  Description of Artificial Sequence: Synthetic oligonucleotide
  Antisense strand to SEQ ID NO: 1830035
gucaggaauacaauagugc

SEQ ID NO: 1830037 - RNA, 19 nt, Artificial Sequence
  Description of Artificial Sequence: Synthetic oligonucleotide
  Sense strand starting at position 2233 of SEQ ID NO: 1563764
ggccgcuauugauuuaugu

SEQ ID NO: 1830038 - RNA, 19 nt, Artificial Sequence
  Description of Artificial Sequence: Synthetic oligonucleotide
  Antisense strand to SEQ ID NO: 1830037
acauaaaucaauagcggcc

SEQ ID NO: 1830039 - RNA, 19 nt, Artificial Sequence
  Description of Artificial Sequence: Synthetic oligonucleotide
  Sense strand starting at position 2251 of SEQ ID NO: 1563764
ucgcuugugcuugaauuac

SEQ ID NO: 1830040 - RNA, 19 nt, Artificial Sequence
  Description of Artificial Sequence: Synthetic oligonucleotide
  Antisense strand to SEQ ID NO: 1830039
guaauucaagcacaagcga

SEQ ID NO: 1830041 - RNA, 19 nt, Artificial Sequence
  Description of Artificial Sequence: Synthetic oligonucleotide
  Sense strand starting at position 2257 of SEQ ID NO: 1563764
gugcuugaauuaccuguaa

SEQ ID NO: 1830042 - RNA, 19 nt, Artificial Sequence
  Description of Artificial Sequence: Synthetic oligonucleotide
  Antisense strand to SEQ ID NO: 1830041
uuacagguaauucaagcac

SEQ ID NO: 1830043 - RNA, 19 nt, Artificial Sequence
  Description of Artificial Sequence: Synthetic oligonucleotide
  Sense strand starting at position 2357 of SEQ ID NO: 1563764
cgauguguccacugguuag

SEQ ID NO: 1830044 - RNA, 19 nt, Artificial Sequence
  Description of Artificial Sequence: Synthetic oligonucleotide
  Antisense strand to SEQ ID NO: 1830043
cuaaccaguggacacaucg

SEQ ID NO: 1830045 - RNA, 19 nt, Artificial Sequence
  Description of Artificial Sequence: Synthetic oligonucleotide
  Sense strand starting at position 2375 of SEQ ID NO: 1563764
ggcuaucgcccacaguuau

SEQ ID NO: 1830046 - RNA, 19 nt, Artificial Sequence
  Description of Artificial Sequence: Synthetic oligonucleotide
  Antisense strand to SEQ ID NO: 1830045
auaacugugggcgauagcc

SEQ ID NO: 1830047 - RNA, 19 nt, Artificial Sequence
  Description of Artificial Sequence: Synthetic oligonucleotide
  Sense strand starting at position 2387 of SEQ ID NO: 1563764
caguuauuugaucgaaugc

SEQ ID NO: 1830048 - RNA, 19 nt, Artificial Sequence
  Description of Artificial Sequence: Synthetic oligonucleotide
  Antisense strand to SEQ ID NO: 1830047
gcauucgaucaaauaacug

SEQ ID NO: 1830049 - RNA, 19 nt, Artificial Sequence
  Description of Artificial Sequence: Synthetic oligonucleotide
  Sense strand starting at position 2413 of SEQ ID NO: 1563764
gguguugcucuggagguau

SEQ ID NO: 1830050 - RNA, 19 nt, Artificial Sequence
  Description of Artificial Sequence: Synthetic oligonucleotide
  Antisense strand to SEQ ID NO: 1830049
auaccuccagagcaacacc

SEQ ID NO: 1830051 - RNA, 19 nt, Artificial Sequence
  Description of Artificial Sequence: Synthetic oligonucleotide
  Sense strand starting at position 2415 of SEQ ID NO: 1563764
uguugcucuggagguauuu

SEQ ID NO: 1830052 - RNA, 19 nt, Artificial Sequence
  Description of Artificial Sequence: Synthetic oligonucleotide
  Antisense strand to SEQ ID NO: 1830051
aaauaccuccagagcaaca

SEQ ID NO: 1830053 - RNA, 19 nt, Artificial Sequence
  Description of Artificial Sequence: Synthetic oligonucleotide
  Sense strand starting at position 2476 of SEQ ID NO: 1563764
gggagauaauccuggauaa

SEQ ID NO: 1830054 - RNA, 19 nt, Artificial Sequence
  Description of Artificial Sequence: Synthetic oligonucleotide
  Antisense strand to SEQ ID NO: 1830053
uuauccaggauuaucuccc

SEQ ID NO: 1830055 - RNA, 19 nt, Artificial Sequence
  Description of Artificial Sequence: Synthetic oligonucleotide
  Sense strand starting at position 2508 of SEQ ID NO: 1563764
gacggaaucaguuggaaag

SEQ ID NO: 1830056 - RNA, 19 nt, Artificial Sequence
  Description of Artificial Sequence: Synthetic oligonucleotide
  Antisense strand to SEQ ID NO: 1830055
cuuuccaacugauuccguc

SEQ ID NO: 1830057 - RNA, 19 nt, Artificial Sequence
  Description of Artificial Sequence: Synthetic oligonucleotide
  Sense strand starting at position 2548 of SEQ ID NO: 1563764
ugcugaguacgucagagaa

SEQ ID NO: 1830058 - RNA, 19 nt, Artificial Sequence
  Description of Artificial Sequence: Synthetic oligonucleotide
  Antisense strand to SEQ ID NO: 1830057
uucucugacguacucagca

SEQ ID NO: 1830059 - RNA, 19 nt, Artificial Sequence
  Description of Artificial Sequence: Synthetic oligonucleotide
  Sense strand starting at position 2583 of SEQ ID NO: 1563764
ggaugacaccuuuggccua

SEQ ID NO: 1830060 - RNA, 19 nt, Artificial Sequence
  Description of Artificial Sequence: Synthetic oligonucleotide
  Antisense strand to SEQ ID NO: 1830059
uaggccaaaggugucaucc

SEQ ID NO: 1830061 - RNA, 19 nt, Artificial Sequence
  Description of Artificial Sequence: Synthetic oligonucleotide
  Sense strand starting at position 2641 of SEQ ID NO: 1563764
gacuguaugcccuacagau

SEQ ID NO: 1830062 - RNA, 19 nt, Artificial Sequence
  Description of Artificial Sequence: Synthetic oligonucleotide
  Antisense strand to SEQ ID NO: 1830061
aucuguagggcauacaguc

SEQ ID NO: 1830063 - RNA, 19 nt, Artificial Sequence
  Description of Artificial Sequence: Synthetic oligonucleotide
  Sense strand starting at position 2675 of SEQ ID NO: 1563764
ccaccauaaucgucuaaga

SEQ ID NO: 1830064 - RNA, 19 nt, Artificial Sequence
  Description of Artificial Sequence: Synthetic oligonucleotide
  Antisense strand to SEQ ID NO: 1830063
ucuuagacgauuauggugg

SEQ ID NO: 1830065 - RNA, 19 nt, Artificial Sequence
  Description of Artificial Sequence: Synthetic oligonucleotide
  Sense strand starting at position 2691 of SEQ ID NO: 1563764
agacaauagcuucgaagaa

SEQ ID NO: 1830066 - RNA, 19 nt, Artificial Sequence
  Description of Artificial Sequence: Synthetic oligonucleotide
  Antisense strand to SEQ ID NO: 1830065
uucuucgaagcuauugucu

SEQ ID NO: 1830067 - RNA, 19 nt, Artificial Sequence
  Description of Artificial Sequence: Synthetic oligonucleotide
  Sense strand starting at position 2735 of SEQ ID NO: 1563764
guauauucccaccacgcau

SEQ ID NO: 1830068 - RNA, 19 nt, Artificial Sequence
  Description of Artificial Sequence: Synthetic oligonucleotide
  Antisense strand to SEQ ID NO: 1830067
augcguggugggaauauac

SEQ ID NO: 1830069 - RNA, 19 nt, Artificial Sequence
  Description of Artificial Sequence: Synthetic oligonucleotide
  Sense strand starting at position 2903 of SEQ ID NO: 1563764
ucugauccuuugguugaau

SEQ ID NO: 1830070 - RNA, 19 nt, Artificial Sequence
  Description of Artificial Sequence: Synthetic oligonucleotide
  Antisense strand to SEQ ID NO: 1830069
auucaaccaaaggaucaga

SEQ ID NO: 1830071 - RNA, 19 nt, Artificial Sequence
  Description of Artificial Sequence: Synthetic oligonucleotide
  Sense strand starting at position 2928 of SEQ ID NO: 1563764
auagauguuuaagcaacaa

SEQ ID NO: 1830072 - RNA, 19 nt, Artificial Sequence
  Description of Artificial Sequence: Synthetic oligonucleotide
  Antisense strand to SEQ ID NO: 1830071
uuguugcuuaaacaucuau

SEQ ID NO: 1830073 - RNA, 19 nt, Artificial Sequence
  Description of Artificial Sequence: Synthetic oligonucleotide
  Sense strand starting at position 2961 of SEQ ID NO: 1563764
ccucucuggguuuggaaau

SEQ ID NO: 1830074 - RNA, 19 nt, Artificial Sequence
  Description of Artificial Sequence: Synthetic oligonucleotide
  Antisense strand to SEQ ID NO: 1830073
auuuccaaacccagagagg

SEQ ID NO: 1830075 - RNA, 19 nt, Artificial Sequence
  Description of Artificial Sequence: Synthetic oligonucleotide
  Sense strand starting at position 2967 of SEQ ID NO: 1563764
uggguuuggaaaugugcua

SEQ ID NO: 1830076 - RNA, 19 nt, Artificial Sequence
  Description of Artificial Sequence: Synthetic oligonucleotide
  Antisense strand to SEQ ID NO: 1830075
uagcacauuuccaaaccca

SEQ ID NO: 1830077 - RNA, 19 nt, Artificial Sequence
  Description of Artificial Sequence: Synthetic oligonucleotide
  Sense strand starting at position 2974 of SEQ ID NO: 1563764
ggaaaugugcuauaugcaa

SEQ ID NO: 1830078 - RNA, 19 nt, Artificial Sequence
  Description of Artificial Sequence: Synthetic oligonucleotide
  Antisense strand to SEQ ID NO: 1830077
uugcauauagcacauuucc

SEQ ID NO: 1830079 - RNA, 19 nt, Artificial Sequence
  Description of Artificial Sequence: Synthetic oligonucleotide
  Sense strand starting at position 3138 of SEQ ID NO: 1563764
gugagaucucuuggcucac

SEQ ID NO: 1830080 - RNA, 19 nt, Artificial Sequence
  Description of Artificial Sequence: Synthetic oligonucleotide
  Antisense strand to SEQ ID NO: 1830079
gugagccaagagaucucac

SEQ ID NO: 1830081 - RNA, 19 nt, Artificial Sequence
  Description of Artificial Sequence: Synthetic oligonucleotide
  Sense strand starting at position 3139 of SEQ ID NO: 1563764
ugagaucucuuggcucacu

SEQ ID NO: 1830082 - RNA, 19 nt, Artificial Sequence
  Description of Artificial Sequence: Synthetic oligonucleotide
  Antisense strand to SEQ ID NO: 1830081
agugagccaagagaucuca

SEQ ID NO: 1830083 - RNA, 19 nt, Artificial Sequence
  Description of Artificial Sequence: Synthetic oligonucleotide
  Sense strand starting at position 3409 of SEQ ID NO: 1563764
cguuuacauuucuaggaug

SEQ ID NO: 1830084 - RNA, 19 nt, Artificial Sequence
  Description of Artificial Sequence: Synthetic oligonucleotide
  Antisense strand to SEQ ID NO: 1830083
cauccuagaaauguaaacg

SEQ ID NO: 1830085 - RNA, 19 nt, Artificial Sequence
  Description of Artificial Sequence: Synthetic oligonucleotide
  Sense strand starting at position 3495 of SEQ ID NO: 1563764
uauggaaaugcgugaguuc

SEQ ID NO: 1830086 - RNA, 19 nt, Artificial Sequence
  Description of Artificial Sequence: Synthetic oligonucleotide
  Antisense strand to SEQ ID NO: 1830085
gaacucacgcauuuccaua

SEQ ID NO: 1830087 - RNA, 19 nt, Artificial Sequence
  Description of Artificial Sequence: Synthetic oligonucleotide
  Sense strand starting at position 3496 of SEQ ID NO: 1563764
auggaaaugcgugaguucu

SEQ ID NO: 1830088 - RNA, 19 nt, Artificial Sequence
  Description of Artificial Sequence: Synthetic oligonucleotide
  Antisense strand to SEQ ID NO: 1830087
agaacucacgcauuuccau

SEQ ID NO: 1830089 - RNA, 19 nt, Artificial Sequence
  Description of Artificial Sequence: Synthetic oligonucleotide
  Sense strand starting at position 3498 of SEQ ID NO: 1563764
ggaaaugcgugaguucuaa

SEQ ID NO: 1830090 - RNA, 19 nt, Artificial Sequence
  Description of Artificial Sequence: Synthetic oligonucleotide
  Antisense strand to SEQ ID NO: 1830089
uuagaacucacgcauuucc

SEQ ID NO: 1830091 - RNA, 19 nt, Artificial Sequence
  Description of Artificial Sequence: Synthetic oligonucleotide
  Sense strand starting at position 3732 of SEQ ID NO: 1563764
gauuucugagucuguguau

SEQ ID NO: 1830092 - RNA, 19 nt, Artificial Sequence
  Description of Artificial Sequence: Synthetic oligonucleotide
  Antisense strand to SEQ ID NO: 1830091
auacacagacucagaaauc

SEQ ID NO: 1830093 - RNA, 19 nt, Artificial Sequence
  Description of Artificial Sequence: Synthetic oligonucleotide
  Sense strand starting at position 3733 of SEQ ID NO: 1563764
auuucugagucuguguaua

SEQ ID NO: 1830094 - RNA, 19 nt, Artificial Sequence
  Description of Artificial Sequence: Synthetic oligonucleotide
  Antisense strand to SEQ ID NO: 1830093
uauacacagacucagaaau

SEQ ID NO: 1830095 - RNA, 19 nt, Artificial Sequence
  Description of Artificial Sequence: Synthetic oligonucleotide
  Sense strand starting at position 3735 of SEQ ID NO: 1563764
uucugagucuguguauaua

SEQ ID NO: 1830096 - RNA, 19 nt, Artificial Sequence
  Description of Artificial Sequence: Synthetic oligonucleotide
  Antisense strand to SEQ ID NO: 1830095
uauauacacagacucagaa

SEQ ID NO: 1830097 - RNA, 19 nt, Artificial Sequence
  Description of Artificial Sequence: Synthetic oligonucleotide
  Sense strand starting at position 3738 of SEQ ID NO: 1563764
ugagucuguguauauaguu

SEQ ID NO: 1830098 - RNA, 19 nt, Artificial Sequence
  Description of Artificial Sequence: Synthetic oligonucleotide
  Antisense strand to SEQ ID NO: 1830097
aacuauauacacagacuca

SEQ ID NO: 1830099 - RNA, 19 nt, Artificial Sequence
  Description of Artificial Sequence: Synthetic oligonucleotide
  Sense strand starting at position 3747 of SEQ ID NO: 1563764
guauauaguucugugcaau

SEQ ID NO: 1830100 - RNA, 19 nt, Artificial Sequence
  Description of Artificial Sequence: Synthetic oligonucleotide
  Antisense strand to SEQ ID NO: 1830099
auugcacagaacuauauac

SEQ ID NO: 1830101 - RNA, 19 nt, Artificial Sequence
  Description of Artificial Sequence: Synthetic oligonucleotide
  Sense strand starting at position 3833 of SEQ ID NO: 1563764
uacacuuuguagucacagu

SEQ ID NO: 1830102 - RNA, 19 nt, Artificial Sequence
  Description of Artificial Sequence: Synthetic oligonucleotide
  Antisense strand to SEQ ID NO: 1830101
acugugacuacaaagugua

SEQ ID NO: 1830103 - RNA, 19 nt, Artificial Sequence
  Description of Artificial Sequence: Synthetic oligonucleotide
  Sense strand starting at position 38 of SEQ ID NO: 1563765
uacguauccgaagaguaau

SEQ ID NO: 1830104 - RNA, 19 nt, Artificial Sequence
  Description of Artificial Sequence: Synthetic oligonucleotide
  Antisense strand to SEQ ID NO: 1830103
auuacucuucggauacgua

SEQ ID NO: 1830105 - RNA, 19 nt, Artificial Sequence
  Description of Artificial Sequence: Synthetic oligonucleotide
  Sense strand starting at position 44 of SEQ ID NO: 1563765
uccgaagaguaaucacaug

SEQ ID NO: 1830106 - RNA, 19 nt, Artificial Sequence
  Description of Artificial Sequence: Synthetic oligonucleotide
  Antisense strand to SEQ ID NO: 1830105
caugugauuacucuucgga

SEQ ID NO: 1830107 - RNA, 19 nt, Artificial Sequence
  Description of Artificial Sequence: Synthetic oligonucleotide
  Sense strand starting at position 50 of SEQ ID NO: 1563765
gaguaaucacaugaugcua

SEQ ID NO: 1830108 - RNA, 19 nt, Artificial Sequence
  Description of Artificial Sequence: Synthetic oligonucleotide
  Antisense strand to SEQ ID NO: 1830107
uagcaucaugugauuacuc

SEQ ID NO: 1830109 - RNA, 19 nt, Artificial Sequence
  Description of Artificial Sequence: Synthetic oligonucleotide
  Sense strand starting at position 119 of SEQ ID NO: 1563765
acucccauugucuacagau

SEQ ID NO: 1830110 - RNA, 19 nt, Artificial Sequence
  Description of Artificial Sequence: Synthetic oligonucleotide
  Antisense strand to SEQ ID NO: 1830109
aucuguagacaaugggagu

SEQ ID NO: 1830111 - RNA, 19 nt, Artificial Sequence
  Description of Artificial Sequence: Synthetic oligonucleotide
  Sense strand starting at position 121 of SEQ ID NO: 1563765
ucccauugucuacagaugu

SEQ ID NO: 1830112 - RNA, 19 nt, Artificial Sequence
  Description of Artificial Sequence: Synthetic oligonucleotide
  Antisense strand to SEQ ID NO: 1830111
acaucuguagacaauggga

SEQ ID NO: 1830113 - RNA, 19 nt, Artificial Sequence
  Description of Artificial Sequence: Synthetic oligonucleotide
  Sense strand starting at position 283 of SEQ ID NO: 1563765
uggauuguggguugcuuaa

SEQ ID NO: 1830114 - RNA, 19 nt, Artificial Sequence
  Description of Artificial Sequence: Synthetic oligonucleotide
  Antisense strand to SEQ ID NO: 1830113
uuaagcaacccacaaucca

SEQ ID NO: 1830115 - RNA, 19 nt, Artificial Sequence
  Description of Artificial Sequence: Synthetic oligonucleotide
  Sense strand starting at position 305 of SEQ ID NO: 1563765
aagcaaagacguugugcaa

SEQ ID NO: 1830116 - RNA, 19 nt, Artificial Sequence
  Description of Artificial Sequence: Synthetic oligonucleotide
  Antisense strand to SEQ ID NO: 1830115
uugcacaacgucuuugcuu

SEQ ID NO: 1830117 - RNA, 19 nt, Artificial Sequence
  Description of Artificial Sequence: Synthetic oligonucleotide
  Sense strand starting at position 489 of SEQ ID NO: 1563765
ggaaucucauccucagcuu

SEQ ID NO: 1830118 - RNA, 19 nt, Artificial Sequence
  Description of Artificial Sequence: Synthetic oligonucleotide
  Antisense strand to SEQ ID NO: 1830117
aagcugaggaugagauucc

SEQ ID NO: 1830119 - RNA, 19 nt, Artificial Sequence
  Description of Artificial Sequence: Synthetic oligonucleotide
  Sense strand starting at position 688 of SEQ ID NO: 1563765
ccaccauuguggucacuca

SEQ ID NO: 1830120 - RNA, 19 nt, Artificial Sequence
  Description of Artificial Sequence: Synthetic oligonucleotide
  Antisense strand to SEQ ID NO: 1830119
ugagugaccacaauggugg

SEQ ID NO: 1830121 - RNA, 19 nt, Artificial Sequence
  Description of Artificial Sequence: Synthetic oligonucleotide
  Sense strand starting at position 1984 of SEQ ID NO: 1563765
cgcggagcacuauuguauu

SEQ ID NO: 1830122 - RNA, 19 nt, Artificial Sequence
  Description of Artificial Sequence: Synthetic oligonucleotide
  Antisense strand to SEQ ID NO: 1830121
aauacaauagugcuccgcg

SEQ ID NO: 1830123 - RNA, 19 nt, Artificial Sequence
  Description of Artificial Sequence: Synthetic oligonucleotide
  Sense strand starting at position 1990 of SEQ ID NO: 1563765
gcacuauuguauuccugac

SEQ ID NO: 1830124 - RNA, 19 nt, Artificial Sequence
  Description of Artificial Sequence: Synthetic oligonucleotide
  Antisense strand to SEQ ID NO: 1830123
gucaggaauacaauagugc

SEQ ID NO: 1830125 - RNA, 19 nt, Artificial Sequence
  Description of Artificial Sequence: Synthetic oligonucleotide
  Sense strand starting at position 2390 of SEQ ID NO: 1563765
ggccgcuauugauuuaugu

SEQ ID NO: 1830126 - RNA, 19 nt, Artificial Sequence
  Description of Artificial Sequence: Synthetic oligonucleotide
  Antisense strand to SEQ ID NO: 1830125
acauaaaucaauagcggcc

SEQ ID NO: 1830127 - RNA, 19 nt, Artificial Sequence
  Description of Artificial Sequence: Synthetic oligonucleotide
  Sense strand starting at position 2414 of SEQ ID NO: 1563765
gugcuugaauuaccuguaa

SEQ ID NO: 1830128 - RNA, 19 nt, Artificial Sequence
  Description of Artificial Sequence: Synthetic oligonucleotide
  Antisense strand to SEQ ID NO: 1830127
uuacagguaauucaagcac

SEQ ID NO: 1830129 - RNA, 19 nt, Artificial Sequence
  Description of Artificial Sequence: Synthetic oligonucleotide
  Sense strand starting at position 2532 of SEQ ID NO: 1563765
ggcuaucgcccacaguuau

SEQ ID NO: 1830130 - RNA, 19 nt, Artificial Sequence
  Description of Artificial Sequence: Synthetic oligonucleotide
  Antisense strand to SEQ ID NO: 1830129
auaacugugggcgauagcc

SEQ ID NO: 1830131 - RNA, 19 nt, Artificial Sequence
  Description of Artificial Sequence: Synthetic oligonucleotide
  Sense strand starting at position 2544 of SEQ ID NO: 1563765
caguuauuugaucgaaugc

SEQ ID NO: 1830132 - RNA, 19 nt, Artificial Sequence
  Description of Artificial Sequence: Synthetic oligonucleotide
  Antisense strand to SEQ ID NO: 1830131
gcauucgaucaaauaacug

SEQ ID NO: 1830133 - RNA, 19 nt, Artificial Sequence
  Description of Artificial Sequence: Synthetic oligonucleotide
  Sense strand starting at position 2570 of SEQ ID NO: 1563765
gguguugcucuggagguau

SEQ ID NO: 1830134 - RNA, 19 nt, Artificial Sequence
  Description of Artificial Sequence: Synthetic oligonucleotide
  Antisense strand to SEQ ID NO: 1830133
auaccuccagagcaacacc

SEQ ID NO: 1830135 - RNA, 19 nt, Artificial Sequence
  Description of Artificial Sequence: Synthetic oligonucleotide
  Sense strand starting at position 2572 of SEQ ID NO: 1563765
uguugcucuggagguauuu

SEQ ID NO: 1830136 - RNA, 19 nt, Artificial Sequence
  Description of Artificial Sequence: Synthetic oligonucleotide
  Antisense strand to SEQ ID NO: 1830135
aaauaccuccagagcaaca

SEQ ID NO: 1830137 - RNA, 19 nt, Artificial Sequence
  Description of Artificial Sequence: Synthetic oligonucleotide
  Sense strand starting at position 2633 of SEQ ID NO: 1563765
gggagauaauccuggauaa

SEQ ID NO: 1830138 - RNA, 19 nt, Artificial Sequence
  Description of Artificial Sequence: Synthetic oligonucleotide
  Antisense strand to SEQ ID NO: 1830137
uuauccaggauuaucuccc

SEQ ID NO: 1830139 - RNA, 19 nt, Artificial Sequence
  Description of Artificial Sequence: Synthetic oligonucleotide
  Sense strand starting at position 2665 of SEQ ID NO: 1563765
gacggaaucaguuggaaag

SEQ ID NO: 1830140 - RNA, 19 nt, Artificial Sequence
  Description of Artificial Sequence: Synthetic oligonucleotide
  Antisense strand to SEQ ID NO: 1830139
cuuuccaacugauuccguc

SEQ ID NO: 1830141 - RNA, 19 nt, Artificial Sequence
  Description of Artificial Sequence: Synthetic oligonucleotide
  Sense strand starting at position 2705 of SEQ ID NO: 1563765
ugcugaguacgucagagaa

SEQ ID NO: 1830142 - RNA, 19 nt, Artificial Sequence
  Description of Artificial Sequence: Synthetic oligonucleotide
  Antisense strand to SEQ ID NO: 1830141
uucucugacguacucagca

SEQ ID NO: 1830143 - RNA, 19 nt, Artificial Sequence
  Description of Artificial Sequence: Synthetic oligonucleotide
  Sense strand starting at position 2740 of SEQ ID NO: 1563765
ggaugacaccuuuggccua

SEQ ID NO: 1830144 - RNA, 19 nt, Artificial Sequence
  Description of Artificial Sequence: Synthetic oligonucleotide
  Antisense strand to SEQ ID NO: 1830143
uaggccaaaggugucaucc

SEQ ID NO: 1830145 - RNA, 19 nt, Artificial Sequence
  Description of Artificial Sequence: Synthetic oligonucleotide
  Sense strand starting at position 2798 of SEQ ID NO: 1563765
gacuguaugcccuacagau

SEQ ID NO: 1830146 - RNA, 19 nt, Artificial Sequence
  Description of Artificial Sequence: Synthetic oligonucleotide
  Antisense strand to SEQ ID NO: 1830145
aucuguagggcauacaguc

SEQ ID NO: 1830147 - RNA, 19 nt, Artificial Sequence
  Description of Artificial Sequence: Synthetic oligonucleotide
  Sense strand starting at position 2832 of SEQ ID NO: 1563765
ccaccauaaucgucuaaga

SEQ ID NO: 1830148 - RNA, 19 nt, Artificial Sequence
  Description of Artificial Sequence: Synthetic oligonucleotide
  Antisense strand to SEQ ID NO: 1830147
ucuuagacgauuauggugg

SEQ ID NO: 1830149 - RNA, 19 nt, Artificial Sequence
  Description of Artificial Sequence: Synthetic oligonucleotide
  Sense strand starting at position 2848 of SEQ ID NO: 1563765
agacaauagcuucgaagaa

SEQ ID NO: 1830150 - RNA, 19 nt, Artificial Sequence
  Description of Artificial Sequence: Synthetic oligonucleotide
  Antisense strand to SEQ ID NO: 1830149
uucuucgaagcuauugucu

SEQ ID NO: 1830151 - RNA, 19 nt, Artificial Sequence
  Description of Artificial Sequence: Synthetic oligonucleotide
  Sense strand starting at position 2892 of SEQ ID NO: 1563765
guauauucccaccacgcau

SEQ ID NO: 1830152 - RNA, 19 nt, Artificial Sequence
  Description of Artificial Sequence: Synthetic oligonucleotide
  Antisense strand to SEQ ID NO: 1830151
augcguggugggaauauac

SEQ ID NO: 1830153 - RNA, 19 nt, Artificial Sequence
  Description of Artificial Sequence: Synthetic oligonucleotide
  Sense strand starting at position 3060 of SEQ ID NO: 1563765
ucugauccuuugguugaau

SEQ ID NO: 1830154 - RNA, 19 nt, Artificial Sequence
  Description of Artificial Sequence: Synthetic oligonucleotide
  Antisense strand to SEQ ID NO: 1830153
auucaaccaaaggaucaga

SEQ ID NO: 1830155 - RNA, 19 nt, Artificial Sequence
  Description of Artificial Sequence: Synthetic oligonucleotide
  Sense strand starting at position 3085 of SEQ ID NO: 1563765
auagauguuuaagcaacaa

SEQ ID NO: 1830156 - RNA, 19 nt, Artificial Sequence
  Description of Artificial Sequence: Synthetic oligonucleotide
  Antisense strand to SEQ ID NO: 1830155
uuguugcuuaaacaucuau

SEQ ID NO: 1830157 - RNA, 19 nt, Artificial Sequence
  Description of Artificial Sequence: Synthetic oligonucleotide
  Sense strand starting at position 3118 of SEQ ID NO: 1563765
ccucucuggguuuggaaau

SEQ ID NO: 1830158 - RNA, 19 nt, Artificial Sequence
  Description of Artificial Sequence: Synthetic oligonucleotide
  Antisense strand to SEQ ID NO: 1830157
auuuccaaacccagagagg

SEQ ID NO: 1830159 - RNA, 19 nt, Artificial Sequence
  Description of Artificial Sequence: Synthetic oligonucleotide
  Sense strand starting at position 3124 of SEQ ID NO: 1563765
uggguuuggaaaugugcua

SEQ ID NO: 1830160 - RNA, 19 nt, Artificial Sequence
  Description of Artificial Sequence: Synthetic oligonucleotide
  Antisense strand to SEQ ID NO: 1830159
uagcacauuuccaaaccca

SEQ ID NO: 1830161 - RNA, 19 nt, Artificial Sequence
  Description of Artificial Sequence: Synthetic oligonucleotide
  Sense strand starting at position 3131 of SEQ ID NO: 1563765
ggaaaugugcuauaugcaa

SEQ ID NO: 1830162 - RNA, 19 nt, Artificial Sequence
  Description of Artificial Sequence: Synthetic oligonucleotide
  Antisense strand to SEQ ID NO: 1830161
uugcauauagcacauuucc

SEQ ID NO: 1830163 - RNA, 19 nt, Artificial Sequence
  Description of Artificial Sequence: Synthetic oligonucleotide
  Sense strand starting at position 3295 of SEQ ID NO: 1563765
gugagaucucuuggcucac

SEQ ID NO: 1830164 - RNA, 19 nt, Artificial Sequence
  Description of Artificial Sequence: Synthetic oligonucleotide
  Antisense strand to SEQ ID NO: 1830163
gugagccaagagaucucac

SEQ ID NO: 1830165 - RNA, 19 nt, Artificial Sequence
  Description of Artificial Sequence: Synthetic oligonucleotide
  Sense strand starting at position 3296 of SEQ ID NO: 1563765
ugagaucucuuggcucacu

SEQ ID NO: 1830166 - RNA, 19 nt, Artificial Sequence
  Description of Artificial Sequence: Synthetic oligonucleotide
  Antisense strand to SEQ ID NO: 1830165
agugagccaagagaucuca

SEQ ID NO: 1830167 - RNA, 19 nt, Artificial Sequence
  Description of Artificial Sequence: Synthetic oligonucleotide
  Sense strand starting at position 3566 of SEQ ID NO: 1563765
cguuuacauuucuaggaug

SEQ ID NO: 1830168 - RNA, 19 nt, Artificial Sequence
  Description of Artificial Sequence: Synthetic oligonucleotide
  Antisense strand to SEQ ID NO: 1830167
cauccuagaaauguaaacg

SEQ ID NO: 1830169 - RNA, 19 nt, Artificial Sequence
  Description of Artificial Sequence: Synthetic oligonucleotide
  Sense strand starting at position 3652 of SEQ ID NO: 1563765
uauggaaaugcgugaguuc

SEQ ID NO: 1830170 - RNA, 19 nt, Artificial Sequence
  Description of Artificial Sequence: Synthetic oligonucleotide
  Antisense strand to SEQ ID NO: 1830169
gaacucacgcauuuccaua

SEQ ID NO: 1830171 - RNA, 19 nt, Artificial Sequence
  Description of Artificial Sequence: Synthetic oligonucleotide
  Sense strand starting at position 3653 of SEQ ID NO: 1563765
auggaaaugcgugaguucu

SEQ ID NO: 1830172 - RNA, 19 nt, Artificial Sequence
  Description of Artificial Sequence: Synthetic oligonucleotide
  Antisense strand to SEQ ID NO: 1830171
agaacucacgcauuuccau

SEQ ID NO: 1830173 - RNA, 19 nt, Artificial Sequence
  Description of Artificial Sequence: Synthetic oligonucleotide
  Sense strand starting at position 3655 of SEQ ID NO: 1563765
ggaaaugcgugaguucuaa

SEQ ID NO: 1830174 - RNA, 19 nt, Artificial Sequence
  Description of Artificial Sequence: Synthetic oligonucleotide
  Antisense strand to SEQ ID NO: 1830173
uuagaacucacgcauuucc

SEQ ID NO: 1830175 - RNA, 19 nt, Artificial Sequence
  Description of Artificial Sequence: Synthetic oligonucleotide
  Sense strand starting at position 3889 of SEQ ID NO: 1563765
gauuucugagucuguguau

SEQ ID NO: 1830176 - RNA, 19 nt, Artificial Sequence
  Description of Artificial Sequence: Synthetic oligonucleotide
  Antisense strand to SEQ ID NO: 1830175
auacacagacucagaaauc

SEQ ID NO: 1830177 - RNA, 19 nt, Artificial Sequence
  Description of Artificial Sequence: Synthetic oligonucleotide
  Sense strand starting at position 3890 of SEQ ID NO: 1563765
auuucugagucuguguaua

SEQ ID NO: 1830178 - RNA, 19 nt, Artificial Sequence
  Description of Artificial Sequence: Synthetic oligonucleotide
  Antisense strand to SEQ ID NO: 1830177
uauacacagacucagaaau

SEQ ID NO: 1830179 - RNA, 19 nt, Artificial Sequence
  Description of Artificial Sequence: Synthetic oligonucleotide
  Sense strand starting at position 3892 of SEQ ID NO: 1563765
uucugagucuguguauaua

SEQ ID NO: 1830180 - RNA, 19 nt, Artificial Sequence
  Description of Artificial Sequence: Synthetic oligonucleotide
  Antisense strand to SEQ ID NO: 1830179
uauauacacagacucagaa

SEQ ID NO: 1830181 - RNA, 19 nt, Artificial Sequence
  Description of Artificial Sequence: Synthetic oligonucleotide
  Sense strand starting at position 3895 of SEQ ID NO: 1563765
ugagucuguguauauaguu

SEQ ID NO: 1830182 - RNA, 19 nt, Artificial Sequence
  Description of Artificial Sequence: Synthetic oligonucleotide
  Antisense strand to SEQ ID NO: 1830181
aacuauauacacagacuca

SEQ ID NO: 1830183 - RNA, 19 nt, Artificial Sequence
  Description of Artificial Sequence: Synthetic oligonucleotide
  Sense strand starting at position 42 of SEQ ID NO: 1563766
aucuuaggagagugacuuu

SEQ ID NO: 1830184 - RNA, 19 nt, Artificial Sequence
  Description of Artificial Sequence: Synthetic oligonucleotide
  Antisense strand to SEQ ID NO: 1830183
aaagucacucuccuaagau

SEQ ID NO: 1830185 - RNA, 19 nt, Artificial Sequence
  Description of Artificial Sequence: Synthetic oligonucleotide
  Sense strand starting at position 52 of SEQ ID NO: 1563766
agugacuuucaggguagga

SEQ ID NO: 1830186 - RNA, 19 nt, Artificial Sequence
  Description of Artificial Sequence: Synthetic oligonucleotide
  Antisense strand to SEQ ID NO: 1830185
uccuacccugaaagucacu

SEQ ID NO: 1830187 - RNA, 19 nt, Artificial Sequence
  Description of Artificial Sequence: Synthetic oligonucleotide
  Sense strand starting at position 123 of SEQ ID NO: 1563766
ccaggaugucuggguaauu

SEQ ID NO: 1830188 - RNA, 19 nt, Artificial Sequence
  Description of Artificial Sequence: Synthetic oligonucleotide
  Antisense strand to SEQ ID NO: 1830187
aauuacccagacauccugg

SEQ ID NO: 1830189 - RNA, 19 nt, Artificial Sequence
  Description of Artificial Sequence: Synthetic oligonucleotide
  Sense strand starting at position 165 of SEQ ID NO: 1563766
gucuuccauucccugaaga

SEQ ID NO: 1830190 - RNA, 19 nt, Artificial Sequence
  Description of Artificial Sequence: Synthetic oligonucleotide
  Antisense strand to SEQ ID NO: 1830189
ucuucagggaauggaagac

SEQ ID NO: 1830191 - RNA, 19 nt, Artificial Sequence
  Description of Artificial Sequence: Synthetic oligonucleotide
  Sense strand starting at position 236 of SEQ ID NO: 1563766
uucuacgacuuagaacaaa

SEQ ID NO: 1830192 - RNA, 19 nt, Artificial Sequence
  Description of Artificial Sequence: Synthetic oligonucleotide
  Antisense strand to SEQ ID NO: 1830191
uuuguucuaagucguagaa

SEQ ID NO: 1830193 - RNA, 19 nt, Artificial Sequence
  Description of Artificial Sequence: Synthetic oligonucleotide
  Sense strand starting at position 523 of SEQ ID NO: 1563766
ccuccagaguuucccugaa

SEQ ID NO: 1830194 - RNA, 19 nt, Artificial Sequence
  Description of Artificial Sequence: Synthetic oligonucleotide
  Antisense strand to SEQ ID NO: 1830193
uucagggaaacucuggagg

SEQ ID NO: 1830195 - RNA, 19 nt, Artificial Sequence
  Description of Artificial Sequence: Synthetic oligonucleotide
  Sense strand starting at position 527 of SEQ ID NO: 1563766
cagaguuucccugaagcga

SEQ ID NO: 1830196 - RNA, 19 nt, Artificial Sequence
  Description of Artificial Sequence: Synthetic oligonucleotide
  Antisense strand to SEQ ID NO: 1830195
ucgcuucagggaaacucug

SEQ ID NO: 1830197 - RNA, 19 nt, Artificial Sequence
  Description of Artificial Sequence: Synthetic oligonucleotide
  Sense strand starting at position 991 of SEQ ID NO: 1563766
agggcaagaccuugaaucu

SEQ ID NO: 1830198 - RNA, 19 nt, Artificial Sequence
  Description of Artificial Sequence: Synthetic oligonucleotide
  Antisense strand to SEQ ID NO: 1830197
agauucaaggucuugcccu

SEQ ID NO: 1830199 - RNA, 19 nt, Artificial Sequence
  Description of Artificial Sequence: Synthetic oligonucleotide
  Sense strand starting at position 1643 of SEQ ID NO: 1563766
ccuggaagugcuggaagaa

SEQ ID NO: 1830200 - RNA, 19 nt, Artificial Sequence
  Description of Artificial Sequence: Synthetic oligonucleotide
  Antisense strand to SEQ ID NO: 1830199
uucuuccagcacuuccagg

SEQ ID NO: 1830201 - RNA, 19 nt, Artificial Sequence
  Description of Artificial Sequence: Synthetic oligonucleotide
  Sense strand starting at position 1662 of SEQ ID NO: 1563766
ggcggagaugcgagugauc

SEQ ID NO: 1830202 - RNA, 19 nt, Artificial Sequence
  Description of Artificial Sequence: Synthetic oligonucleotide
  Antisense strand to SEQ ID NO: 1830201
gaucacucgcaucuccgcc

SEQ ID NO: 1830203 - RNA, 19 nt, Artificial Sequence
  Description of Artificial Sequence: Synthetic oligonucleotide
  Sense strand starting at position 1664 of SEQ ID NO: 1563766
cggagaugcgagugaucug

SEQ ID NO: 1830204 - RNA, 19 nt, Artificial Sequence
  Description of Artificial Sequence: Synthetic oligonucleotide
  Antisense strand to SEQ ID NO: 1830203
cagaucacucgcaucuccg

SEQ ID NO: 1830205 - RNA, 19 nt, Artificial Sequence
  Description of Artificial Sequence: Synthetic oligonucleotide
  Sense strand starting at position 1946 of SEQ ID NO: 1563766
gcgacugagccggaaaguu

SEQ ID NO: 1830206 - RNA, 19 nt, Artificial Sequence
  Description of Artificial Sequence: Synthetic oligonucleotide
  Antisense strand to SEQ ID NO: 1830205
aacuuuccggcucagucgc

SEQ ID NO: 1830207 - RNA, 19 nt, Artificial Sequence
  Description of Artificial Sequence: Synthetic oligonucleotide
  Sense strand starting at position 2533 of SEQ ID NO: 1563766
uacagugucccggagacaa

SEQ ID NO: 1830208 - RNA, 19 nt, Artificial Sequence
  Description of Artificial Sequence: Synthetic oligonucleotide
  Antisense strand to SEQ ID NO: 1830207
uugucuccgggacacugua

SEQ ID NO: 1830209 - RNA, 19 nt, Artificial Sequence
  Description of Artificial Sequence: Synthetic oligonucleotide
  Sense strand starting at position 2535 of SEQ ID NO: 1563766
cagugucccggagacaaau

SEQ ID NO: 1830210 - RNA, 19 nt, Artificial Sequence
  Description of Artificial Sequence: Synthetic oligonucleotide
  Antisense strand to SEQ ID NO: 1830209
auuugucuccgggacacug

SEQ ID NO: 1830211 - RNA, 19 nt, Artificial Sequence
  Description of Artificial Sequence: Synthetic oligonucleotide
  Sense strand starting at position 2631 of SEQ ID NO: 1563766
gagacagucucagugcaua

SEQ ID NO: 1830212 - RNA, 19 nt, Artificial Sequence
  Description of Artificial Sequence: Synthetic oligonucleotide
  Antisense strand to SEQ ID NO: 1830211
uaugcacugagacugucuc

SEQ ID NO: 1830213 - RNA, 19 nt, Artificial Sequence
  Description of Artificial Sequence: Synthetic oligonucleotide
  Sense strand starting at position 2636 of SEQ ID NO: 1563766
agucucagugcauagcuaa

SEQ ID NO: 1830214 - RNA, 19 nt, Artificial Sequence
  Description of Artificial Sequence: Synthetic oligonucleotide
  Antisense strand to SEQ ID NO: 1830213
uuagcuaugcacugagacu

SEQ ID NO: 1830215 - RNA, 19 nt, Artificial Sequence
  Description of Artificial Sequence: Synthetic oligonucleotide
  Sense strand starting at position 2772 of SEQ ID NO: 1563766
ccacgauuugcccgagccu

SEQ ID NO: 1830216 - RNA, 19 nt, Artificial Sequence
  Description of Artificial Sequence: Synthetic oligonucleotide
  Antisense strand to SEQ ID NO: 1830215
aggcucgggcaaaucgugg

SEQ ID NO: 1830217 - RNA, 19 nt, Artificial Sequence
  Description of Artificial Sequence: Synthetic oligonucleotide
  Sense strand starting at position 2851 of SEQ ID NO: 1563766
aguguucucucagcacaca

SEQ ID NO: 1830218 - RNA, 19 nt, Artificial Sequence
  Description of Artificial Sequence: Synthetic oligonucleotide
  Antisense strand to SEQ ID NO: 1830217
ugugugcugagagaacacu

SEQ ID NO: 1830219 - RNA, 19 nt, Artificial Sequence
  Description of Artificial Sequence: Synthetic oligonucleotide
  Sense strand starting at position 2852 of SEQ ID NO: 1563766
guguucucucagcacacaa

SEQ ID NO: 1830220 - RNA, 19 nt, Artificial Sequence
  Description of Artificial Sequence: Synthetic oligonucleotide
  Antisense strand to SEQ ID NO: 1830219
uugugugcugagagaacac

SEQ ID NO: 1830221 - RNA, 19 nt, Artificial Sequence
  Description of Artificial Sequence: Synthetic oligonucleotide
  Sense strand starting at position 3024 of SEQ ID NO: 1563766
cuccuauucgaauggacaa

SEQ ID NO: 1830222 - RNA, 19 nt, Artificial Sequence
  Description of Artificial Sequence: Synthetic oligonucleotide
  Antisense strand to SEQ ID NO: 1830221
uuguccauucgaauaggag

SEQ ID NO: 1830223 - RNA, 19 nt, Artificial Sequence
  Description of Artificial Sequence: Synthetic oligonucleotide
  Sense strand starting at position 3055 of SEQ ID NO: 1563766
guuccuuugcucugacauc

SEQ ID NO: 1830224 - RNA, 19 nt, Artificial Sequence
  Description of Artificial Sequence: Synthetic oligonucleotide
  Antisense strand to SEQ ID NO: 1830223
gaugucagagcaaaggaac

SEQ ID NO: 1830225 - RNA, 19 nt, Artificial Sequence
  Description of Artificial Sequence: Synthetic oligonucleotide
  Sense strand starting at position 3113 of SEQ ID NO: 1563766
acgggaucucuauaagcac

SEQ ID NO: 1830226 - RNA, 19 nt, Artificial Sequence
  Description of Artificial Sequence: Synthetic oligonucleotide
  Antisense strand to SEQ ID NO: 1830225
gugcuuauagagaucccgu

SEQ ID NO: 1830227 - RNA, 19 nt, Artificial Sequence
  Description of Artificial Sequence: Synthetic oligonucleotide
  Sense strand starting at position 3193 of SEQ ID NO: 1563766
cuggaauccucuuugcaca

SEQ ID NO: 1830228 - RNA, 19 nt, Artificial Sequence
  Description of Artificial Sequence: Synthetic oligonucleotide
  Antisense strand to SEQ ID NO: 1830227
ugugcaaagaggauuccag

SEQ ID NO: 1830229 - RNA, 19 nt, Artificial Sequence
  Description of Artificial Sequence: Synthetic oligonucleotide
  Sense strand starting at position 3194 of SEQ ID NO: 1563766
uggaauccucuuugcacaa

SEQ ID NO: 1830230 - RNA, 19 nt, Artificial Sequence
  Description of Artificial Sequence: Synthetic oligonucleotide
  Antisense strand to SEQ ID NO: 1830229
uugugcaaagaggauucca

SEQ ID NO: 1830231 - RNA, 19 nt, Artificial Sequence
  Description of Artificial Sequence: Synthetic oligonucleotide
  Sense strand starting at position 3195 of SEQ ID NO: 1563766
ggaauccucuuugcacaaa

SEQ ID NO: 1830232 - RNA, 19 nt, Artificial Sequence
  Description of Artificial Sequence: Synthetic oligonucleotide
  Antisense strand to SEQ ID NO: 1830231
uuugugcaaagaggauucc

SEQ ID NO: 1830233 - RNA, 19 nt, Artificial Sequence
  Description of Artificial Sequence: Synthetic oligonucleotide
  Sense strand starting at position 3207 of SEQ ID NO: 1563766
gcacaaagccuauauaguu

SEQ ID NO: 1830234 - RNA, 19 nt, Artificial Sequence
  Description of Artificial Sequence: Synthetic oligonucleotide
  Antisense strand to SEQ ID NO: 1830233
aacuauauaggcuuugugc

SEQ ID NO: 1830235 - RNA, 19 nt, Artificial Sequence
  Description of Artificial Sequence: Synthetic oligonucleotide
  Sense strand starting at position 3283 of SEQ ID NO: 1563766
uugagaucugccuguuaac

SEQ ID NO: 1830236 - RNA, 19 nt, Artificial Sequence
  Description of Artificial Sequence: Synthetic oligonucleotide
  Antisense strand to SEQ ID NO: 1830235
guuaacaggcagaucucaa

SEQ ID NO: 1830237 - RNA, 19 nt, Artificial Sequence
  Description of Artificial Sequence: Synthetic oligonucleotide
  Sense strand starting at position 3329 of SEQ ID NO: 1563766
auccuauuaugagugcuuu

SEQ ID NO: 1830238 - RNA, 19 nt, Artificial Sequence
  Description of Artificial Sequence: Synthetic oligonucleotide
  Antisense strand to SEQ ID NO: 1830237
aaagcacucauaauaggau

SEQ ID NO: 1830239 - RNA, 19 nt, Artificial Sequence
  Description of Artificial Sequence: Synthetic oligonucleotide
  Sense strand starting at position 3425 of SEQ ID NO: 1563766
guguuucucagcgaauuag

SEQ ID NO: 1830240 - RNA, 19 nt, Artificial Sequence
  Description of Artificial Sequence: Synthetic oligonucleotide
  Antisense strand to SEQ ID NO: 1830239
cuaauucgcugagaaacac

SEQ ID NO: 1830241 - RNA, 19 nt, Artificial Sequence
  Description of Artificial Sequence: Synthetic oligonucleotide
  Sense strand starting at position 3445 of SEQ ID NO: 1563766
aaaucagggucaucuuguu

SEQ ID NO: 1830242 - RNA, 19 nt, Artificial Sequence
  Description of Artificial Sequence: Synthetic oligonucleotide
  Antisense strand to SEQ ID NO: 1830241
aacaagaugacccugauuu

SEQ ID NO: 1830243 - RNA, 19 nt, Artificial Sequence
  Description of Artificial Sequence: Synthetic oligonucleotide
  Sense strand starting at position 3495 of SEQ ID NO: 1563766
ggacaugcaagcuguacaa

SEQ ID NO: 1830244 - RNA, 19 nt, Artificial Sequence
  Description of Artificial Sequence: Synthetic oligonucleotide
  Antisense strand to SEQ ID NO: 1830243
uuguacagcuugcaugucc

SEQ ID NO: 1830245 - RNA, 19 nt, Artificial Sequence
  Description of Artificial Sequence: Synthetic oligonucleotide
  Sense strand starting at position 3631 of SEQ ID NO: 1563766
cugugccucaggugagaaa

SEQ ID NO: 1830246 - RNA, 19 nt, Artificial Sequence
  Description of Artificial Sequence: Synthetic oligonucleotide
  Antisense strand to SEQ ID NO: 1830245
uuucucaccugaggcacag

SEQ ID NO: 1830247 - RNA, 19 nt, Artificial Sequence
  Description of Artificial Sequence: Synthetic oligonucleotide
  Sense strand starting at position 3632 of SEQ ID NO: 1563766
ugugccucaggugagaaau

SEQ ID NO: 1830248 - RNA, 19 nt, Artificial Sequence
  Description of Artificial Sequence: Synthetic oligonucleotide
  Antisense strand to SEQ ID NO: 1830247
auuucucaccugaggcaca

SEQ ID NO: 1830249 - RNA, 19 nt, Artificial Sequence
  Description of Artificial Sequence: Synthetic oligonucleotide
  Sense strand starting at position 3643 of SEQ ID NO: 1563766
ugagaaaucaguggcagca

SEQ ID NO: 1830250 - RNA, 19 nt, Artificial Sequence
  Description of Artificial Sequence: Synthetic oligonucleotide
  Antisense strand to SEQ ID NO: 1830249
ugcugccacugauuucuca

SEQ ID NO: 1830251 - RNA, 19 nt, Artificial Sequence
  Description of Artificial Sequence: Synthetic oligonucleotide
  Sense strand starting at position 3692 of SEQ ID NO: 1563766
gugaacuaugcaugcgaga

SEQ ID NO: 1830252 - RNA, 19 nt, Artificial Sequence
  Description of Artificial Sequence: Synthetic oligonucleotide
  Antisense strand to SEQ ID NO: 1830251
ucucgcaugcauaguucac

SEQ ID NO: 1830253 - RNA, 19 nt, Artificial Sequence
  Description of Artificial Sequence: Synthetic oligonucleotide
  Sense strand starting at position 3694 of SEQ ID NO: 1563766
gaacuaugcaugcgagaug

SEQ ID NO: 1830254 - RNA, 19 nt, Artificial Sequence
  Description of Artificial Sequence: Synthetic oligonucleotide
  Antisense strand to SEQ ID NO: 1830253
caucucgcaugcauaguuc

SEQ ID NO: 1830255 - RNA, 19 nt, Artificial Sequence
  Description of Artificial Sequence: Synthetic oligonucleotide
  Sense strand starting at position 3697 of SEQ ID NO: 1563766
cuaugcaugcgagaugucu

SEQ ID NO: 1830256 - RNA, 19 nt, Artificial Sequence
  Description of Artificial Sequence: Synthetic oligonucleotide
  Antisense strand to SEQ ID NO: 1830255
agacaucucgcaugcauag

SEQ ID NO: 1830257 - RNA, 19 nt, Artificial Sequence
  Description of Artificial Sequence: Synthetic oligonucleotide
  Sense strand starting at position 3703 of SEQ ID NO: 1563766
augcgagaugucuagguag

SEQ ID NO: 1830258 - RNA, 19 nt, Artificial Sequence
  Description of Artificial Sequence: Synthetic oligonucleotide
  Antisense strand to SEQ ID NO: 1830257
cuaccuagacaucucgcau

SEQ ID NO: 1830259 - RNA, 19 nt, Artificial Sequence
  Description of Artificial Sequence: Synthetic oligonucleotide
  Sense strand starting at position 3719 of SEQ ID NO: 1563766
uagcgcacuccuuaugaga

SEQ ID NO: 1830260 - RNA, 19 nt, Artificial Sequence
  Description of Artificial Sequence: Synthetic oligonucleotide
  Antisense strand to SEQ ID NO: 1830259
ucucauaaggagugcgcua

SEQ ID NO: 1830261 - RNA, 19 nt, Artificial Sequence
  Description of Artificial Sequence: Synthetic oligonucleotide
  Sense strand starting at position 3736 of SEQ ID NO: 1563766
gaaucuaaugucgaucuga

SEQ ID NO: 1830262 - RNA, 19 nt, Artificial Sequence
  Description of Artificial Sequence: Synthetic oligonucleotide
  Antisense strand to SEQ ID NO: 1830261
ucagaucgacauuagauuc

SEQ ID NO: 1830263 - RNA, 19 nt, Artificial Sequence
  Description of Artificial Sequence: Synthetic oligonucleotide
  Sense strand starting at position 133 of SEQ ID NO: 1563767
gguagaaguucagcacaug

SEQ ID NO: 1830264 - RNA, 19 nt, Artificial Sequence
  Description of Artificial Sequence: Synthetic oligonucleotide
  Antisense strand to SEQ ID NO: 1830263
caugugcugaacuucuacc

SEQ ID NO: 1830265 - RNA, 19 nt, Artificial Sequence
  Description of Artificial Sequence: Synthetic oligonucleotide
  Sense strand starting at position 166 of SEQ ID NO: 1563767
ggucgcgaucgaagaagua

SEQ ID NO: 1830266 - RNA, 19 nt, Artificial Sequence
  Description of Artificial Sequence: Synthetic oligonucleotide
  Antisense strand to SEQ ID NO: 1830265
uacuucuucgaucgcgacc

SEQ ID NO: 1830267 - RNA, 19 nt, Artificial Sequence
  Description of Artificial Sequence: Synthetic oligonucleotide
  Sense strand starting at position 175 of SEQ ID NO: 1563767
cgaagaaguacucgccuga

SEQ ID NO: 1830268 - RNA, 19 nt, Artificial Sequence
  Description of Artificial Sequence: Synthetic oligonucleotide
  Antisense strand to SEQ ID NO: 1830267
ucaggcgaguacuucuucg

SEQ ID NO: 1830269 - RNA, 19 nt, Artificial Sequence
  Description of Artificial Sequence: Synthetic oligonucleotide
  Sense strand starting at position 179 of SEQ ID NO: 1563767
gaaguacucgccugaguca

SEQ ID NO: 1830270 - RNA, 19 nt, Artificial Sequence
  Description of Artificial Sequence: Synthetic oligonucleotide
  Antisense strand to SEQ ID NO: 1830269
ugacucaggcgaguacuuc

SEQ ID NO: 1830271 - RNA, 19 nt, Artificial Sequence
  Description of Artificial Sequence: Synthetic oligonucleotide
  Sense strand starting at position 190 of SEQ ID NO: 1563767
cugagucagcaucguagaa

SEQ ID NO: 1830272 - RNA, 19 nt, Artificial Sequence
  Description of Artificial Sequence: Synthetic oligonucleotide
  Antisense strand to SEQ ID NO: 1830271
uucuacgaugcugacucag

SEQ ID NO: 1830273 - RNA, 19 nt, Artificial Sequence
  Description of Artificial Sequence: Synthetic oligonucleotide
  Sense strand starting at position 194 of SEQ ID NO: 1563767
gucagcaucguagaagaau

SEQ ID NO: 1830274 - RNA, 19 nt, Artificial Sequence
  Description of Artificial Sequence: Synthetic oligonucleotide
  Antisense strand to SEQ ID NO: 1830273
auucuucuacgaugcugac

SEQ ID NO: 1830275 - RNA, 19 nt, Artificial Sequence
  Description of Artificial Sequence: Synthetic oligonucleotide
  Sense strand starting at position 306 of SEQ ID NO: 1563767
accucaucuccucgagaug

SEQ ID NO: 1830276 - RNA, 19 nt, Artificial Sequence
  Description of Artificial Sequence: Synthetic oligonucleotide
  Antisense strand to SEQ ID NO: 1830275
caucucgaggagaugaggu

SEQ ID NO: 1830277 - RNA, 19 nt, Artificial Sequence
  Description of Artificial Sequence: Synthetic oligonucleotide
  Sense strand starting at position 638 of SEQ ID NO: 1563767
caauguucugagggacuga

SEQ ID NO: 1830278 - RNA, 19 nt, Artificial Sequence
  Description of Artificial Sequence: Synthetic oligonucleotide
  Antisense strand to SEQ ID NO: 1830277
ucagucccucagaacauug

SEQ ID NO: 1830279 - RNA, 19 nt, Artificial Sequence
  Description of Artificial Sequence: Synthetic oligonucleotide
  Sense strand starting at position 732 of SEQ ID NO: 1563767
uagagagacugagaugauu

SEQ ID NO: 1830280 - RNA, 19 nt, Artificial Sequence
  Description of Artificial Sequence: Synthetic oligonucleotide
  Antisense strand to SEQ ID NO: 1830279
aaucaucucagucucucua

SEQ ID NO: 1830281 - RNA, 19 nt, Artificial Sequence
  Description of Artificial Sequence: Synthetic oligonucleotide
  Sense strand starting at position 740 of SEQ ID NO: 1563767
cugagaugauucuaaagga

SEQ ID NO: 1830282 - RNA, 19 nt, Artificial Sequence
  Description of Artificial Sequence: Synthetic oligonucleotide
  Antisense strand to SEQ ID NO: 1830281
uccuuuagaaucaucucag

SEQ ID NO: 1830283 - RNA, 19 nt, Artificial Sequence
  Description of Artificial Sequence: Synthetic oligonucleotide
  Sense strand starting at position 849 of SEQ ID NO: 1563767
ggcagaagagccuggaauu

SEQ ID NO: 1830284 - RNA, 19 nt, Artificial Sequence
  Description of Artificial Sequence: Synthetic oligonucleotide
  Antisense strand to SEQ ID NO: 1830283
aauuccaggcucuucugcc

SEQ ID NO: 1830285 - RNA, 19 nt, Artificial Sequence
  Description of Artificial Sequence: Synthetic oligonucleotide
  Sense strand starting at position 860 of SEQ ID NO: 1563767
cuggaauuccuuugcagug

SEQ ID NO: 1830286 - RNA, 19 nt, Artificial Sequence
  Description of Artificial Sequence: Synthetic oligonucleotide
  Antisense strand to SEQ ID NO: 1830285
cacugcaaaggaauuccag

SEQ ID NO: 1830287 - RNA, 19 nt, Artificial Sequence
  Description of Artificial Sequence: Synthetic oligonucleotide
  Sense strand starting at position 919 of SEQ ID NO: 1563767
accagaggugcuugaaaga

SEQ ID NO: 1830288 - RNA, 19 nt, Artificial Sequence
  Description of Artificial Sequence: Synthetic oligonucleotide
  Antisense strand to SEQ ID NO: 1830287
ucuuucaagcaccucuggu

SEQ ID NO: 1830289 - RNA, 19 nt, Artificial Sequence
  Description of Artificial Sequence: Synthetic oligonucleotide
  Sense strand starting at position 1112 of SEQ ID NO: 1563767
gcugaaaggugucuuggga

SEQ ID NO: 1830290 - RNA, 19 nt, Artificial Sequence
  Description of Artificial Sequence: Synthetic oligonucleotide
  Antisense strand to SEQ ID NO: 1830289
ucccaagacaccuuucagc

SEQ ID NO: 1830291 - RNA, 19 nt, Artificial Sequence
  Description of Artificial Sequence: Synthetic oligonucleotide
  Sense strand starting at position 1132 of SEQ ID NO: 1563767
ugccuagaguugccaagaa

SEQ ID NO: 1830292 - RNA, 19 nt, Artificial Sequence
  Description of Artificial Sequence: Synthetic oligonucleotide
  Antisense strand to SEQ ID NO: 1830291
uucuuggcaacucuaggca

SEQ ID NO: 1830293 - RNA, 19 nt, Artificial Sequence
  Description of Artificial Sequence: Synthetic oligonucleotide
  Sense strand starting at position 1163 of SEQ ID NO: 1563767
gugucuauacucuacagga

SEQ ID NO: 1830294 - RNA, 19 nt, Artificial Sequence
  Description of Artificial Sequence: Synthetic oligonucleotide
  Antisense strand to SEQ ID NO: 1830293
uccuguagaguauagacac

SEQ ID NO: 1830295 - RNA, 19 nt, Artificial Sequence
  Description of Artificial Sequence: Synthetic oligonucleotide
  Sense strand starting at position 1165 of SEQ ID NO: 1563767
gucuauacucuacaggagu

SEQ ID NO: 1830296 - RNA, 19 nt, Artificial Sequence
  Description of Artificial Sequence: Synthetic oligonucleotide
  Antisense strand to SEQ ID NO: 1830295
acuccuguagaguauagac

SEQ ID NO: 1830297 - RNA, 19 nt, Artificial Sequence
  Description of Artificial Sequence: Synthetic oligonucleotide
  Sense strand starting at position 2172 of SEQ ID NO: 1563767
agggaacuucgccaauucu

SEQ ID NO: 1830298 - RNA, 19 nt, Artificial Sequence
  Description of Artificial Sequence: Synthetic oligonucleotide
  Antisense strand to SEQ ID NO: 1830297
agaauuggcgaaguucccu

SEQ ID NO: 1830299 - RNA, 19 nt, Artificial Sequence
  Description of Artificial Sequence: Synthetic oligonucleotide
  Sense strand starting at position 2304 of SEQ ID NO: 1563767
ugggaaggcgucuguuaau

SEQ ID NO: 1830300 - RNA, 19 nt, Artificial Sequence
  Description of Artificial Sequence: Synthetic oligonucleotide
  Antisense strand to SEQ ID NO: 1830299
auuaacagacgccuuccca

SEQ ID NO: 1830301 - RNA, 19 nt, Artificial Sequence
  Description of Artificial Sequence: Synthetic oligonucleotide
  Sense strand starting at position 2425 of SEQ ID NO: 1563767
gggaguguuucucuagaug

SEQ ID NO: 1830302 - RNA, 19 nt, Artificial Sequence
  Description of Artificial Sequence: Synthetic oligonucleotide
  Antisense strand to SEQ ID NO: 1830301
caucuagagaaacacuccc

SEQ ID NO: 1830303 - RNA, 19 nt, Artificial Sequence
  Description of Artificial Sequence: Synthetic oligonucleotide
  Sense strand starting at position 2501 of SEQ ID NO: 1563767
uaagacuucggcuguggga

SEQ ID NO: 1830304 - RNA, 19 nt, Artificial Sequence
  Description of Artificial Sequence: Synthetic oligonucleotide
  Antisense strand to SEQ ID NO: 1830303
ucccacagccgaagucuua

SEQ ID NO: 1830305 - RNA, 19 nt, Artificial Sequence
  Description of Artificial Sequence: Synthetic oligonucleotide
  Sense strand starting at position 2503 of SEQ ID NO: 1563767
agacuucggcugugggauu

SEQ ID NO: 1830306 - RNA, 19 nt, Artificial Sequence
  Description of Artificial Sequence: Synthetic oligonucleotide
  Antisense strand to SEQ ID NO: 1830305
aaucccacagccgaagucu

SEQ ID NO: 1830307 - RNA, 19 nt, Artificial Sequence
  Description of Artificial Sequence: Synthetic oligonucleotide
  Sense strand starting at position 2740 of SEQ ID NO: 1563767
ggcuauggguggguucaaa

SEQ ID NO: 1830308 - RNA, 19 nt, Artificial Sequence
  Description of Artificial Sequence: Synthetic oligonucleotide
  Antisense strand to SEQ ID NO: 1830307
uuugaacccacccauagcc

SEQ ID NO: 1830309 - RNA, 19 nt, Artificial Sequence
  Description of Artificial Sequence: Synthetic oligonucleotide
  Sense strand starting at position 2808 of SEQ ID NO: 1563767
uguuuccucaguugucaga

SEQ ID NO: 1830310 - RNA, 19 nt, Artificial Sequence
  Description of Artificial Sequence: Synthetic oligonucleotide
  Antisense strand to SEQ ID NO: 1830309
ucugacaacugaggaaaca

SEQ ID NO: 1830311 - RNA, 19 nt, Artificial Sequence
  Description of Artificial Sequence: Synthetic oligonucleotide
  Sense strand starting at position 2815 of SEQ ID NO: 1563767
ucaguugucagauggagag

SEQ ID NO: 1830312 - RNA, 19 nt, Artificial Sequence
  Description of Artificial Sequence: Synthetic oligonucleotide
  Antisense strand to SEQ ID NO: 1830311
cucuccaucugacaacuga

SEQ ID NO: 1830313 - RNA, 19 nt, Artificial Sequence
  Description of Artificial Sequence: Synthetic oligonucleotide
  Sense strand starting at position 2870 of SEQ ID NO: 1563767
caugaugugaaaggugaua

SEQ ID NO: 1830314 - RNA, 19 nt, Artificial Sequence
  Description of Artificial Sequence: Synthetic oligonucleotide
  Antisense strand to SEQ ID NO: 1830313
uaucaccuuucacaucaug

SEQ ID NO: 1830315 - RNA, 19 nt, Artificial Sequence
  Description of Artificial Sequence: Synthetic oligonucleotide
  Sense strand starting at position 2882 of SEQ ID NO: 1563767
ggugauagcacuggacaca

SEQ ID NO: 1830316 - RNA, 19 nt, Artificial Sequence
  Description of Artificial Sequence: Synthetic oligonucleotide
  Antisense strand to SEQ ID NO: 1830315
uguguccagugcuaucacc

SEQ ID NO: 1830317 - RNA, 19 nt, Artificial Sequence
  Description of Artificial Sequence: Synthetic oligonucleotide
  Sense strand starting at position 2910 of SEQ ID NO: 1563767
agggaugcuuaaucuuaau

SEQ ID NO: 1830318 - RNA, 19 nt, Artificial Sequence
  Description of Artificial Sequence: Synthetic oligonucleotide
  Antisense strand to SEQ ID NO: 1830317
auuaagauuaagcaucccu

SEQ ID NO: 1830319 - RNA, 19 nt, Artificial Sequence
  Description of Artificial Sequence: Synthetic oligonucleotide
  Sense strand starting at position 2916 of SEQ ID NO: 1563767
gcuuaaucuuaauuaaagg

SEQ ID NO: 1830320 - RNA, 19 nt, Artificial Sequence
  Description of Artificial Sequence: Synthetic oligonucleotide
  Antisense strand to SEQ ID NO: 1830319
ccuuuaauuaagauuaagc

SEQ ID NO: 1830321 - RNA, 19 nt, Artificial Sequence
  Description of Artificial Sequence: Synthetic oligonucleotide
  Sense strand starting at position 2925 of SEQ ID NO: 1563767
uaauuaaaggagugugaug

SEQ ID NO: 1830322 - RNA, 19 nt, Artificial Sequence
  Description of Artificial Sequence: Synthetic oligonucleotide
  Antisense strand to SEQ ID NO: 1830321
caucacacuccuuuaauua

SEQ ID NO: 1830323 - RNA, 19 nt, Artificial Sequence
  Description of Artificial Sequence: Synthetic oligonucleotide
  Sense strand starting at position 3132 of SEQ ID NO: 1563767
ccacuuagucguuaaucua

SEQ ID NO: 1830324 - RNA, 19 nt, Artificial Sequence
  Description of Artificial Sequence: Synthetic oligonucleotide
  Antisense strand to SEQ ID NO: 1830323
uagauuaacgacuaagugg

SEQ ID NO: 1830325 - RNA, 19 nt, Artificial Sequence
  Description of Artificial Sequence: Synthetic oligonucleotide
  Sense strand starting at position 3185 of SEQ ID NO: 1563767
ccauuuggcuguuugccaa

SEQ ID NO: 1830326 - RNA, 19 nt, Artificial Sequence
  Description of Artificial Sequence: Synthetic oligonucleotide
  Antisense strand to SEQ ID NO: 1830325
uuggcaaacagccaaaugg

SEQ ID NO: 1830327 - RNA, 19 nt, Artificial Sequence
  Description of Artificial Sequence: Synthetic oligonucleotide
  Sense strand starting at position 3199 of SEQ ID NO: 1563767
gccaaucuaucuguaugua

SEQ ID NO: 1830328 - RNA, 19 nt, Artificial Sequence
  Description of Artificial Sequence: Synthetic oligonucleotide
  Antisense strand to SEQ ID NO: 1830327
uacauacagauagauuggc

SEQ ID NO: 1830329 - RNA, 19 nt, Artificial Sequence
  Description of Artificial Sequence: Synthetic oligonucleotide
  Sense strand starting at position 3200 of SEQ ID NO: 1563767
ccaaucuaucuguauguau

SEQ ID NO: 1830330 - RNA, 19 nt, Artificial Sequence
  Description of Artificial Sequence: Synthetic oligonucleotide
  Antisense strand to SEQ ID NO: 1830329
auacauacagauagauugg

SEQ ID NO: 1830331 - RNA, 19 nt, Artificial Sequence
  Description of Artificial Sequence: Synthetic oligonucleotide
  Sense strand starting at position 3259 of SEQ ID NO: 1563767
ggugacauccucugcccau

SEQ ID NO: 1830332 - RNA, 19 nt, Artificial Sequence
  Description of Artificial Sequence: Synthetic oligonucleotide
  Antisense strand to SEQ ID NO: 1830331
augggcagaggaugucacc

SEQ ID NO: 1830333 - RNA, 19 nt, Artificial Sequence
  Description of Artificial Sequence: Synthetic oligonucleotide
  Sense strand starting at position 3272 of SEQ ID NO: 1563767
gcccaucucuguccauaca

SEQ ID NO: 1830334 - RNA, 19 nt, Artificial Sequence
  Description of Artificial Sequence: Synthetic oligonucleotide
  Antisense strand to SEQ ID NO: 1830333
uguauggacagagaugggc

SEQ ID NO: 1830335 - RNA, 19 nt, Artificial Sequence
  Description of Artificial Sequence: Synthetic oligonucleotide
  Sense strand starting at position 3671 of SEQ ID NO: 1563767
auacaugucuacccaugua

SEQ ID NO: 1830336 - RNA, 19 nt, Artificial Sequence
  Description of Artificial Sequence: Synthetic oligonucleotide
  Antisense strand to SEQ ID NO: 1830335
uacauggguagacauguau

SEQ ID NO: 1830337 - RNA, 19 nt, Artificial Sequence
  Description of Artificial Sequence: Synthetic oligonucleotide
  Sense strand starting at position 3686 of SEQ ID NO: 1563767
uguacauaucugcagguau

SEQ ID NO: 1830338 - RNA, 19 nt, Artificial Sequence
  Description of Artificial Sequence: Synthetic oligonucleotide
  Antisense strand to SEQ ID NO: 1830337
auaccugcagauauguaca

SEQ ID NO: 1830339 - RNA, 19 nt, Artificial Sequence
  Description of Artificial Sequence: Synthetic oligonucleotide
  Sense strand starting at position 3803 of SEQ ID NO: 1563767
ucccuauuccaauggugua

SEQ ID NO: 1830340 - RNA, 19 nt, Artificial Sequence
  Description of Artificial Sequence: Synthetic oligonucleotide
  Antisense strand to SEQ ID NO: 1830339
uacaccauuggaauaggga

SEQ ID NO: 1830341 - RNA, 19 nt, Artificial Sequence
  Description of Artificial Sequence: Synthetic oligonucleotide
  Sense strand starting at position 3947 of SEQ ID NO: 1563767
uugcuagaacgcugaacau

SEQ ID NO: 1830342 - RNA, 19 nt, Artificial Sequence
  Description of Artificial Sequence: Synthetic oligonucleotide
  Antisense strand to SEQ ID NO: 1830341
auguucagcguucuagcaa

SEQ ID NO: 1830343 - RNA, 19 nt, Artificial Sequence
  Description of Artificial Sequence: Synthetic oligonucleotide
  Sense strand starting at position 164 of SEQ ID NO: 1563768
uuauuaagguggcuucuaa

SEQ ID NO: 1830344 - RNA, 19 nt, Artificial Sequence
  Description of Artificial Sequence: Synthetic oligonucleotide
  Antisense strand to SEQ ID NO: 1830343
uuagaagccaccuuaauaa

SEQ ID NO: 1830345 - RNA, 19 nt, Artificial Sequence
  Description of Artificial Sequence: Synthetic oligonucleotide
  Sense strand starting at position 243 of SEQ ID NO: 1563768
gaaagacugcauugugauc

SEQ ID NO: 1830346 - RNA, 19 nt, Artificial Sequence
  Description of Artificial Sequence: Synthetic oligonucleotide
  Antisense strand to SEQ ID NO: 1830345
gaucacaaugcagucuuuc

SEQ ID NO: 1830347 - RNA, 19 nt, Artificial Sequence
  Description of Artificial Sequence: Synthetic oligonucleotide
  Sense strand starting at position 248 of SEQ ID NO: 1563768
acugcauugugaucuuuga

SEQ ID NO: 1830348 - RNA, 19 nt, Artificial Sequence
  Description of Artificial Sequence: Synthetic oligonucleotide
  Antisense strand to SEQ ID NO: 1830347
ucaaagaucacaaugcagu

SEQ ID NO: 1830349 - RNA, 19 nt, Artificial Sequence
  Description of Artificial Sequence: Synthetic oligonucleotide
  Sense strand starting at position 252 of SEQ ID NO: 1563768
cauugugaucuuugaaagu

SEQ ID NO: 1830350 - RNA, 19 nt, Artificial Sequence
  Description of Artificial Sequence: Synthetic oligonucleotide
  Antisense strand to SEQ ID NO: 1830349
acuuucaaagaucacaaug

SEQ ID NO: 1830351 - RNA, 19 nt, Artificial Sequence
  Description of Artificial Sequence: Synthetic oligonucleotide
  Sense strand starting at position 301 of SEQ ID NO: 1563768
guaauaaaguagguauaac

SEQ ID NO: 1830352 - RNA, 19 nt, Artificial Sequence
  Description of Artificial Sequence: Synthetic oligonucleotide
  Antisense strand to SEQ ID NO: 1830351
guuauaccuacuuuauuac

SEQ ID NO: 1830353 - RNA, 19 nt, Artificial Sequence
  Description of Artificial Sequence: Synthetic oligonucleotide
  Sense strand starting at position 473 of SEQ ID NO: 1563768
aggauuccuucuccauaug

SEQ ID NO: 1830354 - RNA, 19 nt, Artificial Sequence
  Description of Artificial Sequence: Synthetic oligonucleotide
  Antisense strand to SEQ ID NO: 1830353
cauauggagaaggaauccu

SEQ ID NO: 1830355 - RNA, 19 nt, Artificial Sequence
  Description of Artificial Sequence: Synthetic oligonucleotide
  Sense strand starting at position 476 of SEQ ID NO: 1563768
auuccuucuccauauggua

SEQ ID NO: 1830356 - RNA, 19 nt, Artificial Sequence
  Description of Artificial Sequence: Synthetic oligonucleotide
  Antisense strand to SEQ ID NO: 1830355
uaccauauggagaaggaau

SEQ ID NO: 1830357 - RNA, 19 nt, Artificial Sequence
  Description of Artificial Sequence: Synthetic oligonucleotide
  Sense strand starting at position 498 of SEQ ID NO: 1563768
ggucuuaaggcuggaaucu

SEQ ID NO: 1830358 - RNA, 19 nt, Artificial Sequence
  Description of Artificial Sequence: Synthetic oligonucleotide
  Antisense strand to SEQ ID NO: 1830357
agauuccagccuuaagacc

SEQ ID NO: 1830359 - RNA, 19 nt, Artificial Sequence
  Description of Artificial Sequence: Synthetic oligonucleotide
  Sense strand starting at position 532 of SEQ ID NO: 1563768
ugcguuauuguuuaaacaa

SEQ ID NO: 1830360 - RNA, 19 nt, Artificial Sequence
  Description of Artificial Sequence: Synthetic oligonucleotide
  Antisense strand to SEQ ID NO: 1830359
uuguuuaaacaauaacgca

SEQ ID NO: 1830361 - RNA, 19 nt, Artificial Sequence
  Description of Artificial Sequence: Synthetic oligonucleotide
  Sense strand starting at position 696 of SEQ ID NO: 1563768
aaugguaauccucagcaga

SEQ ID NO: 1830362 - RNA, 19 nt, Artificial Sequence
  Description of Artificial Sequence: Synthetic oligonucleotide
  Antisense strand to SEQ ID NO: 1830361
ucugcugaggauuaccauu

SEQ ID NO: 1830363 - RNA, 19 nt, Artificial Sequence
  Description of Artificial Sequence: Synthetic oligonucleotide
  Sense strand starting at position 698 of SEQ ID NO: 1563768
ugguaauccucagcagaag

SEQ ID NO: 1830364 - RNA, 19 nt, Artificial Sequence
  Description of Artificial Sequence: Synthetic oligonucleotide
  Antisense strand to SEQ ID NO: 1830363
cuucugcugaggauuacca

SEQ ID NO: 1830365 - RNA, 19 nt, Artificial Sequence
  Description of Artificial Sequence: Synthetic oligonucleotide
  Sense strand starting at position 739 of SEQ ID NO: 1563768
ggcguuaccacugggauga

SEQ ID NO: 1830366 - RNA, 19 nt, Artificial Sequence
  Description of Artificial Sequence: Synthetic oligonucleotide
  Antisense strand to SEQ ID NO: 1830365
ucaucccagugguaacgcc

SEQ ID NO: 1830367 - RNA, 19 nt, Artificial Sequence
  Description of Artificial Sequence: Synthetic oligonucleotide
  Sense strand starting at position 740 of SEQ ID NO: 1563768
gcguuaccacugggaugaa

SEQ ID NO: 1830368 - RNA, 19 nt, Artificial Sequence
  Description of Artificial Sequence: Synthetic oligonucleotide
  Antisense strand to SEQ ID NO: 1830367
uucaucccagugguaacgc

SEQ ID NO: 1830369 - RNA, 19 nt, Artificial Sequence
  Description of Artificial Sequence: Synthetic oligonucleotide
  Sense strand starting at position 781 of SEQ ID NO: 1563768
uacgguuggagucauagau

SEQ ID NO: 1830370 - RNA, 19 nt, Artificial Sequence
  Description of Artificial Sequence: Synthetic oligonucleotide
  Antisense strand to SEQ ID NO: 1830369
aucuaugacuccaaccgua

SEQ ID NO: 1830371 - RNA, 19 nt, Artificial Sequence
  Description of Artificial Sequence: Synthetic oligonucleotide
  Sense strand starting at position 785 of SEQ ID NO: 1563768
guuggagucauagaucauu

SEQ ID NO: 1830372 - RNA, 19 nt, Artificial Sequence
  Description of Artificial Sequence: Synthetic oligonucleotide
  Antisense strand to SEQ ID NO: 1830371
aaugaucuaugacuccaac

SEQ ID NO: 1830373 - RNA, 19 nt, Artificial Sequence
  Description of Artificial Sequence: Synthetic oligonucleotide
  Sense strand starting at position 1232 of SEQ ID NO: 1563768
gggagaaacuggcccgaau

SEQ ID NO: 1830374 - RNA, 19 nt, Artificial Sequence
  Description of Artificial Sequence: Synthetic oligonucleotide
  Antisense strand to SEQ ID NO: 1830373
auucgggccaguuucuccc

SEQ ID NO: 1830375 - RNA, 19 nt, Artificial Sequence
  Description of Artificial Sequence: Synthetic oligonucleotide
  Sense strand starting at position 1655 of SEQ ID NO: 1563768
ucaugaugagcaggaugua

SEQ ID NO: 1830376 - RNA, 19 nt, Artificial Sequence
  Description of Artificial Sequence: Synthetic oligonucleotide
  Antisense strand to SEQ ID NO: 1830375
uacauccugcucaucauga

SEQ ID NO: 1830377 - RNA, 19 nt, Artificial Sequence
  Description of Artificial Sequence: Synthetic oligonucleotide
  Sense strand starting at position 2402 of SEQ ID NO: 1563768
cgccuuuccgcagcagaga

SEQ ID NO: 1830378 - RNA, 19 nt, Artificial Sequence
  Description of Artificial Sequence: Synthetic oligonucleotide
  Antisense strand to SEQ ID NO: 1830377
ucucugcugcggaaaggcg

SEQ ID NO: 1830379 - RNA, 19 nt, Artificial Sequence
  Description of Artificial Sequence: Synthetic oligonucleotide
  Sense strand starting at position 2621 of SEQ ID NO: 1563768
aguagaacucccugguuau

SEQ ID NO: 1830380 - RNA, 19 nt, Artificial Sequence
  Description of Artificial Sequence: Synthetic oligonucleotide
  Antisense strand to SEQ ID NO: 1830379
auaaccagggaguucuacu

SEQ ID NO: 1830381 - RNA, 19 nt, Artificial Sequence
  Description of Artificial Sequence: Synthetic oligonucleotide
  Sense strand starting at position 2622 of SEQ ID NO: 1563768
guagaacucccugguuauc

SEQ ID NO: 1830382 - RNA, 19 nt, Artificial Sequence
  Description of Artificial Sequence: Synthetic oligonucleotide
  Antisense strand to SEQ ID NO: 1830381
gauaaccagggaguucuac

SEQ ID NO: 1830383 - RNA, 19 nt, Artificial Sequence
  Description of Artificial Sequence: Synthetic oligonucleotide
  Sense strand starting at position 2624 of SEQ ID NO: 1563768
agaacucccugguuaucca

SEQ ID NO: 1830384 - RNA, 19 nt, Artificial Sequence
  Description of Artificial Sequence: Synthetic oligonucleotide
  Antisense strand to SEQ ID NO: 1830383
uggauaaccagggaguucu

SEQ ID NO: 1830385 - RNA, 19 nt, Artificial Sequence
  Description of Artificial Sequence: Synthetic oligonucleotide
  Sense strand starting at position 2645 of SEQ ID NO: 1563768
augguuucuggugauauaa

SEQ ID NO: 1830386 - RNA, 19 nt, Artificial Sequence
  Description of Artificial Sequence: Synthetic oligonucleotide
  Antisense strand to SEQ ID NO: 1830385
uuauaucaccagaaaccau

SEQ ID NO: 1830387 - RNA, 19 nt, Artificial Sequence
  Description of Artificial Sequence: Synthetic oligonucleotide
  Sense strand starting at position 2653 of SEQ ID NO: 1563768
uggugauauaagugauauu

SEQ ID NO: 1830388 - RNA, 19 nt, Artificial Sequence
  Description of Artificial Sequence: Synthetic oligonucleotide
  Antisense strand to SEQ ID NO: 1830387
aauaucacuuauaucacca

SEQ ID NO: 1830389 - RNA, 19 nt, Artificial Sequence
  Description of Artificial Sequence: Synthetic oligonucleotide
  Sense strand starting at position 2696 of SEQ ID NO: 1563768
ucugauguccuaugacacu

SEQ ID NO: 1830390 - RNA, 19 nt, Artificial Sequence
  Description of Artificial Sequence: Synthetic oligonucleotide
  Antisense strand to SEQ ID NO: 1830389
agugucauaggacaucaga

SEQ ID NO: 1830391 - RNA, 19 nt, Artificial Sequence
  Description of Artificial Sequence: Synthetic oligonucleotide
  Sense strand starting at position 2732 of SEQ ID NO: 1563768
aucuuagcacaugaaugua

SEQ ID NO: 1830392 - RNA, 19 nt, Artificial Sequence
  Description of Artificial Sequence: Synthetic oligonucleotide
  Antisense strand to SEQ ID NO: 1830391
uacauucaugugcuaagau

SEQ ID NO: 1830393 - RNA, 19 nt, Artificial Sequence
  Description of Artificial Sequence: Synthetic oligonucleotide
  Sense strand starting at position 2770 of SEQ ID NO: 1563768
guuucccauggguaaguaa

SEQ ID NO: 1830394 - RNA, 19 nt, Artificial Sequence
  Description of Artificial Sequence: Synthetic oligonucleotide
  Antisense strand to SEQ ID NO: 1830393
uuacuuacccaugggaaac

SEQ ID NO: 1830395 - RNA, 19 nt, Artificial Sequence
  Description of Artificial Sequence: Synthetic oligonucleotide
  Sense strand starting at position 2789 of SEQ ID NO: 1563768
gccaucuucccagaaguga

SEQ ID NO: 1830396 - RNA, 19 nt, Artificial Sequence
  Description of Artificial Sequence: Synthetic oligonucleotide
  Antisense strand to SEQ ID NO: 1830395
ucacuucugggaagauggc

SEQ ID NO: 1830397 - RNA, 19 nt, Artificial Sequence
  Description of Artificial Sequence: Synthetic oligonucleotide
  Sense strand starting at position 2823 of SEQ ID NO: 1563768
auaagaguagcaugcacau

SEQ ID NO: 1830398 - RNA, 19 nt, Artificial Sequence
  Description of Artificial Sequence: Synthetic oligonucleotide
  Antisense strand to SEQ ID NO: 1830397
augugcaugcuacucuuau

SEQ ID NO: 1830399 - RNA, 19 nt, Artificial Sequence
  Description of Artificial Sequence: Synthetic oligonucleotide
  Sense strand starting at position 2856 of SEQ ID NO: 1563768
ugacuacacucuguggaua

SEQ ID NO: 1830400 - RNA, 19 nt, Artificial Sequence
  Description of Artificial Sequence: Synthetic oligonucleotide
  Antisense strand to SEQ ID NO: 1830399
uauccacagaguguaguca

SEQ ID NO: 1830401 - RNA, 19 nt, Artificial Sequence
  Description of Artificial Sequence: Synthetic oligonucleotide
  Sense strand starting at position 2857 of SEQ ID NO: 1563768
gacuacacucuguggauau

SEQ ID NO: 1830402 - RNA, 19 nt, Artificial Sequence
  Description of Artificial Sequence: Synthetic oligonucleotide
  Antisense strand to SEQ ID NO: 1830401
auauccacagaguguaguc

SEQ ID NO: 1830403 - RNA, 19 nt, Artificial Sequence
  Description of Artificial Sequence: Synthetic oligonucleotide
  Sense strand starting at position 2867 of SEQ ID NO: 1563768
uguggauaucucgggaucu

SEQ ID NO: 1830404 - RNA, 19 nt, Artificial Sequence
  Description of Artificial Sequence: Synthetic oligonucleotide
  Antisense strand to SEQ ID NO: 1830403
agaucccgagauauccaca

SEQ ID NO: 1830405 - RNA, 19 nt, Artificial Sequence
  Description of Artificial Sequence: Synthetic oligonucleotide
  Sense strand starting at position 2891 of SEQ ID NO: 1563768
gugccaguucuagagaaua

SEQ ID NO: 1830406 - RNA, 19 nt, Artificial Sequence
  Description of Artificial Sequence: Synthetic oligonucleotide
  Antisense strand to SEQ ID NO: 1830405
uauucucuagaacuggcac

SEQ ID NO: 1830407 - RNA, 19 nt, Artificial Sequence
  Description of Artificial Sequence: Synthetic oligonucleotide
  Sense strand starting at position 2893 of SEQ ID NO: 1563768
gccaguucuagagaauaug

SEQ ID NO: 1830408 - RNA, 19 nt, Artificial Sequence
  Description of Artificial Sequence: Synthetic oligonucleotide
  Antisense strand to SEQ ID NO: 1830407
cauauucucuagaacuggc

SEQ ID NO: 1830409 - RNA, 19 nt, Artificial Sequence
  Description of Artificial Sequence: Synthetic oligonucleotide
  Sense strand starting at position 2952 of SEQ ID NO: 1563768
cucucuagacuugguaaca

SEQ ID NO: 1830410 - RNA, 19 nt, Artificial Sequence
  Description of Artificial Sequence: Synthetic oligonucleotide
  Antisense strand to SEQ ID NO: 1830409
uguuaccaagucuagagag

SEQ ID NO: 1830411 - RNA, 19 nt, Artificial Sequence
  Description of Artificial Sequence: Synthetic oligonucleotide
  Sense strand starting at position 3059 of SEQ ID NO: 1563768
caggccagauauguuaaau

SEQ ID NO: 1830412 - RNA, 19 nt, Artificial Sequence
  Description of Artificial Sequence: Synthetic oligonucleotide
  Antisense strand to SEQ ID NO: 1830411
auuuaacauaucuggccug

SEQ ID NO: 1830413 - RNA, 19 nt, Artificial Sequence
  Description of Artificial Sequence: Synthetic oligonucleotide
  Sense strand starting at position 3277 of SEQ ID NO: 1563768
auaggugccauggguuaaa

SEQ ID NO: 1830414 - RNA, 19 nt, Artificial Sequence
  Description of Artificial Sequence: Synthetic oligonucleotide
  Antisense strand to SEQ ID NO: 1830413
uuuaacccauggcaccuau

SEQ ID NO: 1830415 - RNA, 19 nt, Artificial Sequence
  Description of Artificial Sequence: Synthetic oligonucleotide
  Sense strand starting at position 3542 of SEQ ID NO: 1563768
gcaacuuggcaggaugaau

SEQ ID NO: 1830416 - RNA, 19 nt, Artificial Sequence
  Description of Artificial Sequence: Synthetic oligonucleotide
  Antisense strand to SEQ ID NO: 1830415
auucauccugccaaguugc

SEQ ID NO: 1830417 - RNA, 19 nt, Artificial Sequence
  Description of Artificial Sequence: Synthetic oligonucleotide
  Sense strand starting at position 3603 of SEQ ID NO: 1563768
uagugauaugacuguugag

SEQ ID NO: 1830418 - RNA, 19 nt, Artificial Sequence
  Description of Artificial Sequence: Synthetic oligonucleotide
  Antisense strand to SEQ ID NO: 1830417
cucaacagucauaucacua

SEQ ID NO: 1830419 - RNA, 19 nt, Artificial Sequence
  Description of Artificial Sequence: Synthetic oligonucleotide
  Sense strand starting at position 3970 of SEQ ID NO: 1563768
ugaggacugcuguguuaac

SEQ ID NO: 1830420 - RNA, 19 nt, Artificial Sequence
  Description of Artificial Sequence: Synthetic oligonucleotide
  Antisense strand to SEQ ID NO: 1830419
guuaacacagcaguccuca

SEQ ID NO: 1830421 - RNA, 19 nt, Artificial Sequence
  Description of Artificial Sequence: Synthetic oligonucleotide
  Sense strand starting at position 3971 of SEQ ID NO: 1563768
gaggacugcuguguuaaca

SEQ ID NO: 1830422 - RNA, 19 nt, Artificial Sequence
  Description of Artificial Sequence: Synthetic oligonucleotide
  Antisense strand to SEQ ID NO: 1830421
uguuaacacagcaguccuc

SEQ ID NO: 1830423 - RNA, 19 nt, Artificial Sequence
  Description of Artificial Sequence: Synthetic oligonucleotide
  Sense strand starting at position 246 of SEQ ID NO: 1563769
ggagacuucuagccugaag

SEQ ID NO: 1830424 - RNA, 19 nt, Artificial Sequence
  Description of Artificial Sequence: Synthetic oligonucleotide
  Antisense strand to SEQ ID NO: 1830423
cuucaggcuagaagucucc

SEQ ID NO: 1830425 - RNA, 19 nt, Artificial Sequence
  Description of Artificial Sequence: Synthetic oligonucleotide
  Sense strand starting at position 274 of SEQ ID NO: 1563769
ggaggaaagcuauggccuu

SEQ ID NO: 1830426 - RNA, 19 nt, Artificial Sequence
  Description of Artificial Sequence: Synthetic oligonucleotide
  Antisense strand to SEQ ID NO: 1830425
aaggccauagcuuuccucc

SEQ ID NO: 1830427 - RNA, 19 nt, Artificial Sequence
  Description of Artificial Sequence: Synthetic oligonucleotide
  Sense strand starting at position 328 of SEQ ID NO: 1563769
acagaauuccauggcucca

SEQ ID NO: 1830428 - RNA, 19 nt, Artificial Sequence
  Description of Artificial Sequence: Synthetic oligonucleotide
  Antisense strand to SEQ ID NO: 1830427
uggagccauggaauucugu

SEQ ID NO: 1830429 - RNA, 19 nt, Artificial Sequence
  Description of Artificial Sequence: Synthetic oligonucleotide
  Sense strand starting at position 450 of SEQ ID NO: 1563769
agcugaccgguccaaacau

SEQ ID NO: 1830430 - RNA, 19 nt, Artificial Sequence
  Description of Artificial Sequence: Synthetic oligonucleotide
  Antisense strand to SEQ ID NO: 1830429
auguuuggaccggucagcu

SEQ ID NO: 1830431 - RNA, 19 nt, Artificial Sequence
  Description of Artificial Sequence: Synthetic oligonucleotide
  Sense strand starting at position 481 of SEQ ID NO: 1563769
ucaagucugcgggaugaug

SEQ ID NO: 1830432 - RNA, 19 nt, Artificial Sequence
  Description of Artificial Sequence: Synthetic oligonucleotide
  Antisense strand to SEQ ID NO: 1830431
caucaucccgcagacuuga

SEQ ID NO: 1830433 - RNA, 19 nt, Artificial Sequence
  Description of Artificial Sequence: Synthetic oligonucleotide
  Sense strand starting at position 574 of SEQ ID NO: 1563769
cagagcaaucccugugaga

SEQ ID NO: 1830434 - RNA, 19 nt, Artificial Sequence
  Description of Artificial Sequence: Synthetic oligonucleotide
  Antisense strand to SEQ ID NO: 1830433
ucucacagggauugcucug

SEQ ID NO: 1830435 - RNA, 19 nt, Artificial Sequence
  Description of Artificial Sequence: Synthetic oligonucleotide
  Sense strand starting at position 576 of SEQ ID NO: 1563769
gagcaaucccugugagacu

SEQ ID NO: 1830436 - RNA, 19 nt, Artificial Sequence
  Description of Artificial Sequence: Synthetic oligonucleotide
  Antisense strand to SEQ ID NO: 1830435
agucucacagggauugcuc

SEQ ID NO: 1830437 - RNA, 19 nt, Artificial Sequence
  Description of Artificial Sequence: Synthetic oligonucleotide
  Sense strand starting at position 634 of SEQ ID NO: 1563769
gaugaauuggccuggcaag

SEQ ID NO: 1830438 - RNA, 19 nt, Artificial Sequence
  Description of Artificial Sequence: Synthetic oligonucleotide
  Antisense strand to SEQ ID NO: 1830437
cuugccaggccaauucauc

SEQ ID NO: 1830439 - RNA, 19 nt, Artificial Sequence
  Description of Artificial Sequence: Synthetic oligonucleotide
  Sense strand starting at position 644 of SEQ ID NO: 1563769
ccuggcaagguaugaguaa

SEQ ID NO: 1830440 - RNA, 19 nt, Artificial Sequence
  Description of Artificial Sequence: Synthetic oligonucleotide
  Antisense strand to SEQ ID NO: 1830439
uuacucauaccuugccagg

SEQ ID NO: 1830441 - RNA, 19 nt, Artificial Sequence
  Description of Artificial Sequence: Synthetic oligonucleotide
  Sense strand starting at position 812 of SEQ ID NO: 1563769
cgggcucagagagauuacu

SEQ ID NO: 1830442 - RNA, 19 nt, Artificial Sequence
  Description of Artificial Sequence: Synthetic oligonucleotide
  Antisense strand to SEQ ID NO: 1830441
aguaaucucucugagcccg

SEQ ID NO: 1830443 - RNA, 19 nt, Artificial Sequence
  Description of Artificial Sequence: Synthetic oligonucleotide
  Sense strand starting at position 1060 of SEQ ID NO: 1563769
aggaaucccugucuuaaac

SEQ ID NO: 1830444 - RNA, 19 nt, Artificial Sequence
  Description of Artificial Sequence: Synthetic oligonucleotide
  Antisense strand to SEQ ID NO: 1830443
guuuaagacagggauuccu

SEQ ID NO: 1830445 - RNA, 19 nt, Artificial Sequence
  Description of Artificial Sequence: Synthetic oligonucleotide
  Sense strand starting at position 1070 of SEQ ID NO: 1563769
gucuuaaacccggagugau

SEQ ID NO: 1830446 - RNA, 19 nt, Artificial Sequence
  Description of Artificial Sequence: Synthetic oligonucleotide
  Antisense strand to SEQ ID NO: 1830445
aucacuccggguuuaagac

SEQ ID NO: 1830447 - RNA, 19 nt, Artificial Sequence
  Description of Artificial Sequence: Synthetic oligonucleotide
  Sense strand starting at position 1334 of SEQ ID NO: 1563769
uugcaaaugcccgauuucu

SEQ ID NO: 1830448 - RNA, 19 nt, Artificial Sequence
  Description of Artificial Sequence: Synthetic oligonucleotide
  Antisense strand to SEQ ID NO: 1830447
agaaaucgggcauuugcaa

SEQ ID NO: 1830449 - RNA, 19 nt, Artificial Sequence
  Description of Artificial Sequence: Synthetic oligonucleotide
  Sense strand starting at position 2048 of SEQ ID NO: 1563769
acguuuaaaggccagugau

SEQ ID NO: 1830450 - RNA, 19 nt, Artificial Sequence
  Description of Artificial Sequence: Synthetic oligonucleotide
  Antisense strand to SEQ ID NO: 1830449
aucacuggccuuuaaacgu

SEQ ID NO: 1830451 - RNA, 19 nt, Artificial Sequence
  Description of Artificial Sequence: Synthetic oligonucleotide
  Sense strand starting at position 2226 of SEQ ID NO: 1563769
cugggagccugauugcaaa

SEQ ID NO: 1830452 - RNA, 19 nt, Artificial Sequence
  Description of Artificial Sequence: Synthetic oligonucleotide
  Antisense strand to SEQ ID NO: 1830451
uuugcaaucaggcucccag

SEQ ID NO: 1830453 - RNA, 19 nt, Artificial Sequence
  Description of Artificial Sequence: Synthetic oligonucleotide
  Sense strand starting at position 2371 of SEQ ID NO: 1563769
uuaggauucugagucccaa

SEQ ID NO: 1830454 - RNA, 19 nt, Artificial Sequence
  Description of Artificial Sequence: Synthetic oligonucleotide
  Antisense strand to SEQ ID NO: 1830453
uugggacucagaauccuaa

SEQ ID NO: 1830455 - RNA, 19 nt, Artificial Sequence
  Description of Artificial Sequence: Synthetic oligonucleotide
  Sense strand starting at position 2580 of SEQ ID NO: 1563769
acuauuggauguuuagcaa

SEQ ID NO: 1830456 - RNA, 19 nt, Artificial Sequence
  Description of Artificial Sequence: Synthetic oligonucleotide
  Antisense strand to SEQ ID NO: 1830455
uugcuaaacauccaauagu

SEQ ID NO: 1830457 - RNA, 19 nt, Artificial Sequence
  Description of Artificial Sequence: Synthetic oligonucleotide
  Sense strand starting at position 2592 of SEQ ID NO: 1563769
uuagcaacggcguauuuau

SEQ ID NO: 1830458 - RNA, 19 nt, Artificial Sequence
  Description of Artificial Sequence: Synthetic oligonucleotide
  Antisense strand to SEQ ID NO: 1830457
auaaauacgccguugcuaa

SEQ ID NO: 1830459 - RNA, 19 nt, Artificial Sequence
  Description of Artificial Sequence: Synthetic oligonucleotide
  Sense strand starting at position 2600 of SEQ ID NO: 1563769
ggcguauuuauccaguguc

SEQ ID NO: 1830460 - RNA, 19 nt, Artificial Sequence
  Description of Artificial Sequence: Synthetic oligonucleotide
  Antisense strand to SEQ ID NO: 1830459
gacacuggauaaauacgcc

SEQ ID NO: 1830461 - RNA, 19 nt, Artificial Sequence
  Description of Artificial Sequence: Synthetic oligonucleotide
  Sense strand starting at position 2603 of SEQ ID NO: 1563769
guauuuauccagugucaac

SEQ ID NO: 1830462 - RNA, 19 nt, Artificial Sequence
  Description of Artificial Sequence: Synthetic oligonucleotide
  Antisense strand to SEQ ID NO: 1830461
guugacacuggauaaauac

SEQ ID NO: 1830463 - RNA, 19 nt, Artificial Sequence
  Description of Artificial Sequence: Synthetic oligonucleotide
  Sense strand starting at position 2640 of SEQ ID NO: 1563769
gcccauuugugagccuaca

SEQ ID NO: 1830464 - RNA, 19 nt, Artificial Sequence
  Description of Artificial Sequence: Synthetic oligonucleotide
  Antisense strand to SEQ ID NO: 1830463
uguaggcucacaaaugggc

SEQ ID NO: 1830465 - RNA, 19 nt, Artificial Sequence
  Description of Artificial Sequence: Synthetic oligonucleotide
  Sense strand starting at position 2794 of SEQ ID NO: 1563769
acuacaguacuuugaauga

SEQ ID NO: 1830466 - RNA, 19 nt, Artificial Sequence
  Description of Artificial Sequence: Synthetic oligonucleotide
  Antisense strand to SEQ ID NO: 1830465
ucauucaaaguacuguagu

SEQ ID NO: 1830467 - RNA, 19 nt, Artificial Sequence
  Description of Artificial Sequence: Synthetic oligonucleotide
  Sense strand starting at position 2798 of SEQ ID NO: 1563769
caguacuuugaaugaguau

SEQ ID NO: 1830468 - RNA, 19 nt, Artificial Sequence
  Description of Artificial Sequence: Synthetic oligonucleotide
  Antisense strand to SEQ ID NO: 1830467
auacucauucaaaguacug

SEQ ID NO: 1830469 - RNA, 19 nt, Artificial Sequence
  Description of Artificial Sequence: Synthetic oligonucleotide
  Sense strand starting at position 2834 of SEQ ID NO: 1563769
guacauauacaucaggcau

SEQ ID NO: 1830470 - RNA, 19 nt, Artificial Sequence
  Description of Artificial Sequence: Synthetic oligonucleotide
  Antisense strand to SEQ ID NO: 1830469
augccugauguauauguac

SEQ ID NO: 1830471 - RNA, 19 nt, Artificial Sequence
  Description of Artificial Sequence: Synthetic oligonucleotide
  Sense strand starting at position 2849 of SEQ ID NO: 1563769
gcaucuacugauuggagga

SEQ ID NO: 1830472 - RNA, 19 nt, Artificial Sequence
  Description of Artificial Sequence: Synthetic oligonucleotide
  Antisense strand to SEQ ID NO: 1830471
uccuccaaucaguagaugc

SEQ ID NO: 1830473 - RNA, 19 nt, Artificial Sequence
  Description of Artificial Sequence: Synthetic oligonucleotide
  Sense strand starting at position 2862 of SEQ ID NO: 1563769
ggaggaucaucugugucau

SEQ ID NO: 1830474 - RNA, 19 nt, Artificial Sequence
  Description of Artificial Sequence: Synthetic oligonucleotide
  Antisense strand to SEQ ID NO: 1830473
augacacagaugauccucc

SEQ ID NO: 1830475 - RNA, 19 nt, Artificial Sequence
  Description of Artificial Sequence: Synthetic oligonucleotide
  Sense strand starting at position 2863 of SEQ ID NO: 1563769
gaggaucaucugugucauu

SEQ ID NO: 1830476 - RNA, 19 nt, Artificial Sequence
  Description of Artificial Sequence: Synthetic oligonucleotide
  Antisense strand to SEQ ID NO: 1830475
aaugacacagaugauccuc

SEQ ID NO: 1830477 - RNA, 19 nt, Artificial Sequence
  Description of Artificial Sequence: Synthetic oligonucleotide
  Sense strand starting at position 2929 of SEQ ID NO: 1563769
auauuugaguacuugcgua

SEQ ID NO: 1830478 - RNA, 19 nt, Artificial Sequence
  Description of Artificial Sequence: Synthetic oligonucleotide
  Antisense strand to SEQ ID NO: 1830477
uacgcaaguacucaaauau

SEQ ID NO: 1830479 - RNA, 19 nt, Artificial Sequence
  Description of Artificial Sequence: Synthetic oligonucleotide
  Sense strand starting at position 2945 of SEQ ID NO: 1563769
guacaugcugauuaaguaa

SEQ ID NO: 1830480 - RNA, 19 nt, Artificial Sequence
  Description of Artificial Sequence: Synthetic oligonucleotide
  Antisense strand to SEQ ID NO: 1830479
uuacuuaaucagcauguac

SEQ ID NO: 1830481 - RNA, 19 nt, Artificial Sequence
  Description of Artificial Sequence: Synthetic oligonucleotide
  Sense strand starting at position 3004 of SEQ ID NO: 1563769
gggaccauguggccuuaua

SEQ ID NO: 1830482 - RNA, 19 nt, Artificial Sequence
  Description of Artificial Sequence: Synthetic oligonucleotide
  Antisense strand to SEQ ID NO: 1830481
uauaaggccacaugguccc

SEQ ID NO: 1830483 - RNA, 19 nt, Artificial Sequence
  Description of Artificial Sequence: Synthetic oligonucleotide
  Sense strand starting at position 3036 of SEQ ID NO: 1563769
uggcauguuaagcaguaaa

SEQ ID NO: 1830484 - RNA, 19 nt, Artificial Sequence
  Description of Artificial Sequence: Synthetic oligonucleotide
  Antisense strand to SEQ ID NO: 1830483
uuuacugcuuaacaugcca

SEQ ID NO: 1830485 - RNA, 19 nt, Artificial Sequence
  Description of Artificial Sequence: Synthetic oligonucleotide
  Sense strand starting at position 3039 of SEQ ID NO: 1563769
cauguuaagcaguaaauga

SEQ ID NO: 1830486 - RNA, 19 nt, Artificial Sequence
  Description of Artificial Sequence: Synthetic oligonucleotide
  Antisense strand to SEQ ID NO: 1830485
ucauuuacugcuuaacaug

SEQ ID NO: 1830487 - RNA, 19 nt, Artificial Sequence
  Description of Artificial Sequence: Synthetic oligonucleotide
  Sense strand starting at position 3080 of SEQ ID NO: 1563769
augaauaaauguccuuagu

SEQ ID NO: 1830488 - RNA, 19 nt, Artificial Sequence
  Description of Artificial Sequence: Synthetic oligonucleotide
  Antisense strand to SEQ ID NO: 1830487
acuaaggacauuuauucau

SEQ ID NO: 1830489 - RNA, 19 nt, Artificial Sequence
  Description of Artificial Sequence: Synthetic oligonucleotide
  Sense strand starting at position 3177 of SEQ ID NO: 1563769
gcagauagggagugucaua

SEQ ID NO: 1830490 - RNA, 19 nt, Artificial Sequence
  Description of Artificial Sequence: Synthetic oligonucleotide
  Antisense strand to SEQ ID NO: 1830489
uaugacacucccuaucugc

SEQ ID NO: 1830491 - RNA, 19 nt, Artificial Sequence
  Description of Artificial Sequence: Synthetic oligonucleotide
  Sense strand starting at position 3187 of SEQ ID NO: 1563769
agugucauaccuucgugca

SEQ ID NO: 1830492 - RNA, 19 nt, Artificial Sequence
  Description of Artificial Sequence: Synthetic oligonucleotide
  Antisense strand to SEQ ID NO: 1830491
ugcacgaagguaugacacu

SEQ ID NO: 1830493 - RNA, 19 nt, Artificial Sequence
  Description of Artificial Sequence: Synthetic oligonucleotide
  Sense strand starting at position 3205 of SEQ ID NO: 1563769
aguuaacuguuccuaauca

SEQ ID NO: 1830494 - RNA, 19 nt, Artificial Sequence
  Description of Artificial Sequence: Synthetic oligonucleotide
  Antisense strand to SEQ ID NO: 1830493
ugauuaggaacaguuaacu

SEQ ID NO: 1830495 - RNA, 19 nt, Artificial Sequence
  Description of Artificial Sequence: Synthetic oligonucleotide
  Sense strand starting at position 3220 of SEQ ID NO: 1563769
aucagauacugugccaauu

SEQ ID NO: 1830496 - RNA, 19 nt, Artificial Sequence
  Description of Artificial Sequence: Synthetic oligonucleotide
  Antisense strand to SEQ ID NO: 1830495
aauuggcacaguaucugau

SEQ ID NO: 1830497 - RNA, 19 nt, Artificial Sequence
  Description of Artificial Sequence: Synthetic oligonucleotide
  Sense strand starting at position 3371 of SEQ ID NO: 1563769
ucuaguuuguaaccuugaa

SEQ ID NO: 1830498 - RNA, 19 nt, Artificial Sequence
  Description of Artificial Sequence: Synthetic oligonucleotide
  Antisense strand to SEQ ID NO: 1830497
uucaagguuacaaacuaga

SEQ ID NO: 1830499 - RNA, 19 nt, Artificial Sequence
  Description of Artificial Sequence: Synthetic oligonucleotide
  Sense strand starting at position 3375 of SEQ ID NO: 1563769
guuuguaaccuugaacaag

SEQ ID NO: 1830500 - RNA, 19 nt, Artificial Sequence
  Description of Artificial Sequence: Synthetic oligonucleotide
  Antisense strand to SEQ ID NO: 1830499
cuuguucaagguuacaaac

SEQ ID NO: 1830501 - RNA, 19 nt, Artificial Sequence
  Description of Artificial Sequence: Synthetic oligonucleotide
  Sense strand starting at position 3643 of SEQ ID NO: 1563769
uguggagacuugucccaag

SEQ ID NO: 1830502 - RNA, 19 nt, Artificial Sequence
  Description of Artificial Sequence: Synthetic oligonucleotide
  Antisense strand to SEQ ID NO: 1830501
cuugggacaagucuccaca

SEQ ID NO: 1830503 - RNA, 19 nt, Artificial Sequence
  Description of Artificial Sequence: Synthetic oligonucleotide
  Sense strand starting at position 139 of SEQ ID NO: 1563770
augcauacagauugagacu

SEQ ID NO: 1830504 - RNA, 19 nt, Artificial Sequence
  Description of Artificial Sequence: Synthetic oligonucleotide
  Antisense strand to SEQ ID NO: 1830503
agucucaaucuguaugcau

SEQ ID NO: 1830505 - RNA, 19 nt, Artificial Sequence
  Description of Artificial Sequence: Synthetic oligonucleotide
  Sense strand starting at position 237 of SEQ ID NO: 1563770
ugcuuccaagcuuaugaaa

SEQ ID NO: 1830506 - RNA, 19 nt, Artificial Sequence
  Description of Artificial Sequence: Synthetic oligonucleotide
  Antisense strand to SEQ ID NO: 1830505
uuucauaagcuuggaagca

SEQ ID NO: 1830507 - RNA, 19 nt, Artificial Sequence
  Description of Artificial Sequence: Synthetic oligonucleotide
  Sense strand starting at position 274 of SEQ ID NO: 1563770
gcaaauaaucuuggguaau

SEQ ID NO: 1830508 - RNA, 19 nt, Artificial Sequence
  Description of Artificial Sequence: Synthetic oligonucleotide
  Antisense strand to SEQ ID NO: 1830507
auuacccaagauuauuugc

SEQ ID NO: 1830509 - RNA, 19 nt, Artificial Sequence
  Description of Artificial Sequence: Synthetic oligonucleotide
  Sense strand starting at position 437 of SEQ ID NO: 1563770
aggagcagccauuacuuaa

SEQ ID NO: 1830510 - RNA, 19 nt, Artificial Sequence
  Description of Artificial Sequence: Synthetic oligonucleotide
  Antisense strand to SEQ ID NO: 1830509
uuaaguaauggcugcuccu

SEQ ID NO: 1830511 - RNA, 19 nt, Artificial Sequence
  Description of Artificial Sequence: Synthetic oligonucleotide
  Sense strand starting at position 572 of SEQ ID NO: 1563770
acaaauaacuacgguauuu

SEQ ID NO: 1830512 - RNA, 19 nt, Artificial Sequence
  Description of Artificial Sequence: Synthetic oligonucleotide
  Antisense strand to SEQ ID NO: 1830511
aaauaccguaguuauuugu

SEQ ID NO: 1830513 - RNA, 19 nt, Artificial Sequence
  Description of Artificial Sequence: Synthetic oligonucleotide
  Sense strand starting at position 582 of SEQ ID NO: 1563770
acgguauuucuaugccaaa

SEQ ID NO: 1830514 - RNA, 19 nt, Artificial Sequence
  Description of Artificial Sequence: Synthetic oligonucleotide
  Antisense strand to SEQ ID NO: 1830513
uuuggcauagaaauaccgu

SEQ ID NO: 1830515 - RNA, 19 nt, Artificial Sequence
  Description of Artificial Sequence: Synthetic oligonucleotide
  Sense strand starting at position 646 of SEQ ID NO: 1563770
cugcaaucgagauacaugu

SEQ ID NO: 1830516 - RNA, 19 nt, Artificial Sequence
  Description of Artificial Sequence: Synthetic oligonucleotide
  Antisense strand to SEQ ID NO: 1830515
acauguaucucgauugcag

SEQ ID NO: 1830517 - RNA, 19 nt, Artificial Sequence
  Description of Artificial Sequence: Synthetic oligonucleotide
  Sense strand starting at position 690 of SEQ ID NO: 1563770
cgaccuaaacuccgugaaa

SEQ ID NO: 1830518 - RNA, 19 nt, Artificial Sequence
  Description of Artificial Sequence: Synthetic oligonucleotide
  Antisense strand to SEQ ID NO: 1830517
uuucacggaguuuaggucg

SEQ ID NO: 1830519 - RNA, 19 nt, Artificial Sequence
  Description of Artificial Sequence: Synthetic oligonucleotide
  Sense strand starting at position 691 of SEQ ID NO: 1563770
gaccuaaacuccgugaaac

SEQ ID NO: 1830520 - RNA, 19 nt, Artificial Sequence
  Description of Artificial Sequence: Synthetic oligonucleotide
  Antisense strand to SEQ ID NO: 1830519
guuucacggaguuuagguc

SEQ ID NO: 1830521 - RNA, 19 nt, Artificial Sequence
  Description of Artificial Sequence: Synthetic oligonucleotide
  Sense strand starting at position 692 of SEQ ID NO: 1563770
accuaaacuccgugaaacu

SEQ ID NO: 1830522 - RNA, 19 nt, Artificial Sequence
  Description of Artificial Sequence: Synthetic oligonucleotide
  Antisense strand to SEQ ID NO: 1830521
aguuucacggaguuuaggu

SEQ ID NO: 1830523 - RNA, 19 nt, Artificial Sequence
  Description of Artificial Sequence: Synthetic oligonucleotide
  Sense strand starting at position 693 of SEQ ID NO: 1563770
ccuaaacuccgugaaacuu

SEQ ID NO: 1830524 - RNA, 19 nt, Artificial Sequence
  Description of Artificial Sequence: Synthetic oligonucleotide
  Antisense strand to SEQ ID NO: 1830523
aaguuucacggaguuuagg

SEQ ID NO: 1830525 - RNA, 19 nt, Artificial Sequence
  Description of Artificial Sequence: Synthetic oligonucleotide
  Sense strand starting at position 817 of SEQ ID NO: 1563770
gcaaguuaaguccgaaauu

SEQ ID NO: 1830526 - RNA, 19 nt, Artificial Sequence
  Description of Artificial Sequence: Synthetic oligonucleotide
  Antisense strand to SEQ ID NO: 1830525
aauuucggacuuaacuugc

SEQ ID NO: 1830527 - RNA, 19 nt, Artificial Sequence
  Description of Artificial Sequence: Synthetic oligonucleotide
  Sense strand starting at position 818 of SEQ ID NO: 1563770
caaguuaaguccgaaauuu

SEQ ID NO: 1830528 - RNA, 19 nt, Artificial Sequence
  Description of Artificial Sequence: Synthetic oligonucleotide
  Antisense strand to SEQ ID NO: 1830527
aaauuucggacuuaacuug

SEQ ID NO: 1830529 - RNA, 19 nt, Artificial Sequence
  Description of Artificial Sequence: Synthetic oligonucleotide
  Sense strand starting at position 927 of SEQ ID NO: 1563770
gcaguugugucgacccagu

SEQ ID NO: 1830530 - RNA, 19 nt, Artificial Sequence
  Description of Artificial Sequence: Synthetic oligonucleotide
  Antisense strand to SEQ ID NO: 1830529
acugggucgacacaacugc

SEQ ID NO: 1830531 - RNA, 19 nt, Artificial Sequence
  Description of Artificial Sequence: Synthetic oligonucleotide
  Sense strand starting at position 960 of SEQ ID NO: 1563770
aagcgaucccgucucuguu

SEQ ID NO: 1830532 - RNA, 19 nt, Artificial Sequence
  Description of Artificial Sequence: Synthetic oligonucleotide
  Antisense strand to SEQ ID NO: 1830531
aacagagacgggaucgcuu

SEQ ID NO: 1830533 - RNA, 19 nt, Artificial Sequence
  Description of Artificial Sequence: Synthetic oligonucleotide
  Sense strand starting at position 1002 of SEQ ID NO: 1563770
gcgauuucgcaagggagca

SEQ ID NO: 1830534 - RNA, 19 nt, Artificial Sequence
  Description of Artificial Sequence: Synthetic oligonucleotide
  Antisense strand to SEQ ID NO: 1830533
ugcucccuugcgaaaucgc

SEQ ID NO: 1830535 - RNA, 19 nt, Artificial Sequence
  Description of Artificial Sequence: Synthetic oligonucleotide
  Sense strand starting at position 1003 of SEQ ID NO: 1563770
cgauuucgcaagggagcaa

SEQ ID NO: 1830536 - RNA, 19 nt, Artificial Sequence
  Description of Artificial Sequence: Synthetic oligonucleotide
  Antisense strand to SEQ ID NO: 1830535
uugcucccuugcgaaaucg

SEQ ID NO: 1830537 - RNA, 19 nt, Artificial Sequence
  Description of Artificial Sequence: Synthetic oligonucleotide
  Sense strand starting at position 1056 of SEQ ID NO: 1563770
aggaaauaguuuccggaag

SEQ ID NO: 1830538 - RNA, 19 nt, Artificial Sequence
  Description of Artificial Sequence: Synthetic oligonucleotide
  Antisense strand to SEQ ID NO: 1830537
cuuccggaaacuauuuccu

SEQ ID NO: 1830539 - RNA, 19 nt, Artificial Sequence
  Description of Artificial Sequence: Synthetic oligonucleotide
  Sense strand starting at position 1264 of SEQ ID NO: 1563770
gacacaguuuacucguuaa

SEQ ID NO: 1830540 - RNA, 19 nt, Artificial Sequence
  Description of Artificial Sequence: Synthetic oligonucleotide
  Antisense strand to SEQ ID NO: 1830539
uuaacgaguaaacuguguc

SEQ ID NO: 1830541 - RNA, 19 nt, Artificial Sequence
  Description of Artificial Sequence: Synthetic oligonucleotide
  Sense strand starting at position 1275 of SEQ ID NO: 1563770
cucguuaacgcucagggaa

SEQ ID NO: 1830542 - RNA, 19 nt, Artificial Sequence
  Description of Artificial Sequence: Synthetic oligonucleotide
  Antisense strand to SEQ ID NO: 1830541
uucccugagcguuaacgag

SEQ ID NO: 1830543 - RNA, 19 nt, Artificial Sequence
  Description of Artificial Sequence: Synthetic oligonucleotide
  Sense strand starting at position 2258 of SEQ ID NO: 1563770
gguugugcugguuaaauac

SEQ ID NO: 1830544 - RNA, 19 nt, Artificial Sequence
  Description of Artificial Sequence: Synthetic oligonucleotide
  Antisense strand to SEQ ID NO: 1830543
guauuuaaccagcacaacc

SEQ ID NO: 1830545 - RNA, 19 nt, Artificial Sequence
  Description of Artificial Sequence: Synthetic oligonucleotide
  Sense strand starting at position 2581 of SEQ ID NO: 1563770
uuuggcacugcuggaaaua

SEQ ID NO: 1830546 - RNA, 19 nt, Artificial Sequence
  Description of Artificial Sequence: Synthetic oligonucleotide
  Antisense strand to SEQ ID NO: 1830545
uauuuccagcagugccaaa

SEQ ID NO: 1830547 - RNA, 19 nt, Artificial Sequence
  Description of Artificial Sequence: Synthetic oligonucleotide
  Sense strand starting at position 2582 of SEQ ID NO: 1563770
uuggcacugcuggaaauaa

SEQ ID NO: 1830548 - RNA, 19 nt, Artificial Sequence
  Description of Artificial Sequence: Synthetic oligonucleotide
  Antisense strand to SEQ ID NO: 1830547
uuauuuccagcagugccaa

SEQ ID NO: 1830549 - RNA, 19 nt, Artificial Sequence
  Description of Artificial Sequence: Synthetic oligonucleotide
  Sense strand starting at position 2866 of SEQ ID NO: 1563770
uguguuuacccugugucuu

SEQ ID NO: 1830550 - RNA, 19 nt, Artificial Sequence
  Description of Artificial Sequence: Synthetic oligonucleotide
  Antisense strand to SEQ ID NO: 1830549
aagacacaggguaaacaca

SEQ ID NO: 1830551 - RNA, 19 nt, Artificial Sequence
  Description of Artificial Sequence: Synthetic oligonucleotide
  Sense strand starting at position 2935 of SEQ ID NO: 1563770
gcgggaucugcagaauguu

SEQ ID NO: 1830552 - RNA, 19 nt, Artificial Sequence
  Description of Artificial Sequence: Synthetic oligonucleotide
  Antisense strand to SEQ ID NO: 1830551
aacauucugcagaucccgc

SEQ ID NO: 1830553 - RNA, 19 nt, Artificial Sequence
  Description of Artificial Sequence: Synthetic oligonucleotide
  Sense strand starting at position 2944 of SEQ ID NO: 1563770
gcagaauguuggguucuau

SEQ ID NO: 1830554 - RNA, 19 nt, Artificial Sequence
  Description of Artificial Sequence: Synthetic oligonucleotide
  Antisense strand to SEQ ID NO: 1830553
auagaacccaacauucugc

SEQ ID NO: 1830555 - RNA, 19 nt, Artificial Sequence
  Description of Artificial Sequence: Synthetic oligonucleotide
  Sense strand starting at position 2953 of SEQ ID NO: 1563770
uggguucuauugccaugau

SEQ ID NO: 1830556 - RNA, 19 nt, Artificial Sequence
  Description of Artificial Sequence: Synthetic oligonucleotide
  Antisense strand to SEQ ID NO: 1830555
aucauggcaauagaaccca

SEQ ID NO: 1830557 - RNA, 19 nt, Artificial Sequence
  Description of Artificial Sequence: Synthetic oligonucleotide
  Sense strand starting at position 2956 of SEQ ID NO: 1563770
guucuauugccaugauuuc

SEQ ID NO: 1830558 - RNA, 19 nt, Artificial Sequence
  Description of Artificial Sequence: Synthetic oligonucleotide
  Antisense strand to SEQ ID NO: 1830557
gaaaucauggcaauagaac

SEQ ID NO: 1830559 - RNA, 19 nt, Artificial Sequence
  Description of Artificial Sequence: Synthetic oligonucleotide
  Sense strand starting at position 2975 of SEQ ID NO: 1563770
aguggagccuucuuacaaa

SEQ ID NO: 1830560 - RNA, 19 nt, Artificial Sequence
  Description of Artificial Sequence: Synthetic oligonucleotide
  Antisense strand to SEQ ID NO: 1830559
uuuguaagaaggcuccacu

SEQ ID NO: 1830561 - RNA, 19 nt, Artificial Sequence
  Description of Artificial Sequence: Synthetic oligonucleotide
  Sense strand starting at position 3148 of SEQ ID NO: 1563770
aaggcuuuagucugacuuu

SEQ ID NO: 1830562 - RNA, 19 nt, Artificial Sequence
  Description of Artificial Sequence: Synthetic oligonucleotide
  Antisense strand to SEQ ID NO: 1830561
aaagucagacuaaagccuu

SEQ ID NO: 1830563 - RNA, 19 nt, Artificial Sequence
  Description of Artificial Sequence: Synthetic oligonucleotide
  Sense strand starting at position 3245 of SEQ ID NO: 1563770
ugucuuauaacagggauag

SEQ ID NO: 1830564 - RNA, 19 nt, Artificial Sequence
  Description of Artificial Sequence: Synthetic oligonucleotide
  Antisense strand to SEQ ID NO: 1830563
cuaucccuguuauaagaca

SEQ ID NO: 1830565 - RNA, 19 nt, Artificial Sequence
  Description of Artificial Sequence: Synthetic oligonucleotide
  Sense strand starting at position 3286 of SEQ ID NO: 1563770
ggacaagauucuguuuaua

SEQ ID NO: 1830566 - RNA, 19 nt, Artificial Sequence
  Description of Artificial Sequence: Synthetic oligonucleotide
  Antisense strand to SEQ ID NO: 1830565
uauaaacagaaucuugucc

SEQ ID NO: 1830567 - RNA, 19 nt, Artificial Sequence
  Description of Artificial Sequence: Synthetic oligonucleotide
  Sense strand starting at position 3296 of SEQ ID NO: 1563770
cuguuuauaaacggaguuu

SEQ ID NO: 1830568 - RNA, 19 nt, Artificial Sequence
  Description of Artificial Sequence: Synthetic oligonucleotide
  Antisense strand to SEQ ID NO: 1830567
aaacuccguuuauaaacag

SEQ ID NO: 1830569 - RNA, 19 nt, Artificial Sequence
  Description of Artificial Sequence: Synthetic oligonucleotide
  Sense strand starting at position 3421 of SEQ ID NO: 1563770
accaguauucagcgggaag

SEQ ID NO: 1830570 - RNA, 19 nt, Artificial Sequence
  Description of Artificial Sequence: Synthetic oligonucleotide
  Antisense strand to SEQ ID NO: 1830569
cuucccgcugaauacuggu

SEQ ID NO: 1830571 - RNA, 19 nt, Artificial Sequence
  Description of Artificial Sequence: Synthetic oligonucleotide
  Sense strand starting at position 3424 of SEQ ID NO: 1563770
aguauucagcgggaagcua

SEQ ID NO: 1830572 - RNA, 19 nt, Artificial Sequence
  Description of Artificial Sequence: Synthetic oligonucleotide
  Antisense strand to SEQ ID NO: 1830571
uagcuucccgcugaauacu

SEQ ID NO: 1830573 - RNA, 19 nt, Artificial Sequence
  Description of Artificial Sequence: Synthetic oligonucleotide
  Sense strand starting at position 3590 of SEQ ID NO: 1563770
cuugaaugaguguguacaa

SEQ ID NO: 1830574 - RNA, 19 nt, Artificial Sequence
  Description of Artificial Sequence: Synthetic oligonucleotide
  Antisense strand to SEQ ID NO: 1830573
uuguacacacucauucaag

SEQ ID NO: 1830575 - RNA, 19 nt, Artificial Sequence
  Description of Artificial Sequence: Synthetic oligonucleotide
  Sense strand starting at position 3591 of SEQ ID NO: 1563770
uugaaugaguguguacaaa

SEQ ID NO: 1830576 - RNA, 19 nt, Artificial Sequence
  Description of Artificial Sequence: Synthetic oligonucleotide
  Antisense strand to SEQ ID NO: 1830575
uuuguacacacucauucaa

SEQ ID NO: 1830577 - RNA, 19 nt, Artificial Sequence
  Description of Artificial Sequence: Synthetic oligonucleotide
  Sense strand starting at position 3642 of SEQ ID NO: 1563770
auuguuaacuuugucacaa

SEQ ID NO: 1830578 - RNA, 19 nt, Artificial Sequence
  Description of Artificial Sequence: Synthetic oligonucleotide
  Antisense strand to SEQ ID NO: 1830577
uugugacaaaguuaacaau

SEQ ID NO: 1830579 - RNA, 19 nt, Artificial Sequence
  Description of Artificial Sequence: Synthetic oligonucleotide
  Sense strand starting at position 3643 of SEQ ID NO: 1563770
uuguuaacuuugucacaaa

SEQ ID NO: 1830580 - RNA, 19 nt, Artificial Sequence
  Description of Artificial Sequence: Synthetic oligonucleotide
  Antisense strand to SEQ ID NO: 1830579
uuugugacaaaguuaacaa

SEQ ID NO: 1830581 - RNA, 19 nt, Artificial Sequence
  Description of Artificial Sequence: Synthetic oligonucleotide
  Sense strand starting at position 3790 of SEQ ID NO: 1563770
ugacuaucucccugaaguu

SEQ ID NO: 1830582 - RNA, 19 nt, Artificial Sequence
  Description of Artificial Sequence: Synthetic oligonucleotide
  Antisense strand to SEQ ID NO: 1830581
aacuucagggagauaguca

SEQ ID NO: 1830583 - RNA, 19 nt, Artificial Sequence
  Description of Artificial Sequence: Synthetic oligonucleotide
  Sense strand starting at position 84 of SEQ ID NO: 1563771
uacaguaacuaguuuggaa

SEQ ID NO: 1830584 - RNA, 19 nt, Artificial Sequence
  Description of Artificial Sequence: Synthetic oligonucleotide
  Antisense strand to SEQ ID NO: 1830583
uuccaaacuaguuacugua

SEQ ID NO: 1830585 - RNA, 19 nt, Artificial Sequence
  Description of Artificial Sequence: Synthetic oligonucleotide
  Sense strand starting at position 86 of SEQ ID NO: 1563771
caguaacuaguuuggaauu

SEQ ID NO: 1830586 - RNA, 19 nt, Artificial Sequence
  Description of Artificial Sequence: Synthetic oligonucleotide
  Antisense strand to SEQ ID NO: 1830585
aauuccaaacuaguuacug

SEQ ID NO: 1830587 - RNA, 19 nt, Artificial Sequence
  Description of Artificial Sequence: Synthetic oligonucleotide
  Sense strand starting at position 132 of SEQ ID NO: 1563771
agagacucauuugauuaga

SEQ ID NO: 1830588 - RNA, 19 nt, Artificial Sequence
  Description of Artificial Sequence: Synthetic oligonucleotide
  Antisense strand to SEQ ID NO: 1830587
ucuaaucaaaugagucucu

SEQ ID NO: 1830589 - RNA, 19 nt, Artificial Sequence
  Description of Artificial Sequence: Synthetic oligonucleotide
  Sense strand starting at position 137 of SEQ ID NO: 1563771
cucauuugauuagagcaaa

SEQ ID NO: 1830590 - RNA, 19 nt, Artificial Sequence
  Description of Artificial Sequence: Synthetic oligonucleotide
  Antisense strand to SEQ ID NO: 1830589
uuugcucuaaucaaaugag

SEQ ID NO: 1830591 - RNA, 19 nt, Artificial Sequence
  Description of Artificial Sequence: Synthetic oligonucleotide
  Sense strand starting at position 336 of SEQ ID NO: 1563771
uguguuucugcccaaauuu

SEQ ID NO: 1830592 - RNA, 19 nt, Artificial Sequence
  Description of Artificial Sequence: Synthetic oligonucleotide
  Antisense strand to SEQ ID NO: 1830591
aaauuugggcagaaacaca

SEQ ID NO: 1830593 - RNA, 19 nt, Artificial Sequence
  Description of Artificial Sequence: Synthetic oligonucleotide
  Sense strand starting at position 370 of SEQ ID NO: 1563771
uugggcuuccuugagaaag

SEQ ID NO: 1830594 - RNA, 19 nt, Artificial Sequence
  Description of Artificial Sequence: Synthetic oligonucleotide
  Antisense strand to SEQ ID NO: 1830593
cuuucucaaggaagcccaa

SEQ ID NO: 1830595 - RNA, 19 nt, Artificial Sequence
  Description of Artificial Sequence: Synthetic oligonucleotide
  Sense strand starting at position 734 of SEQ ID NO: 1563771
gugcaucuucguucaguca

SEQ ID NO: 1830596 - RNA, 19 nt, Artificial Sequence
  Description of Artificial Sequence: Synthetic oligonucleotide
  Antisense strand to SEQ ID NO: 1830595
ugacugaacgaagaugcac

SEQ ID NO: 1830597 - RNA, 19 nt, Artificial Sequence
  Description of Artificial Sequence: Synthetic oligonucleotide
  Sense strand starting at position 822 of SEQ ID NO: 1563771
guuucucccagagggagaa

SEQ ID NO: 1830598 - RNA, 19 nt, Artificial Sequence
  Description of Artificial Sequence: Synthetic oligonucleotide
  Antisense strand to SEQ ID NO: 1830597
uucucccucugggagaaac

SEQ ID NO: 1830599 - RNA, 19 nt, Artificial Sequence
  Description of Artificial Sequence: Synthetic oligonucleotide
  Sense strand starting at position 897 of SEQ ID NO: 1563771
ggagacuugcaaugaguga

SEQ ID NO: 1830600 - RNA, 19 nt, Artificial Sequence
  Description of Artificial Sequence: Synthetic oligonucleotide
  Antisense strand to SEQ ID NO: 1830599
ucacucauugcaagucucc

SEQ ID NO: 1830601 - RNA, 19 nt, Artificial Sequence
  Description of Artificial Sequence: Synthetic oligonucleotide
  Sense strand starting at position 931 of SEQ ID NO: 1563771
gugauuccaaguuggaaua

SEQ ID NO: 1830602 - RNA, 19 nt, Artificial Sequence
  Description of Artificial Sequence: Synthetic oligonucleotide
  Antisense strand to SEQ ID NO: 1830601
uauuccaacuuggaaucac

SEQ ID NO: 1830603 - RNA, 19 nt, Artificial Sequence
  Description of Artificial Sequence: Synthetic oligonucleotide
  Sense strand starting at position 1138 of SEQ ID NO: 1563771
agaauauacugcuugaaua

SEQ ID NO: 1830604 - RNA, 19 nt, Artificial Sequence
  Description of Artificial Sequence: Synthetic oligonucleotide
  Antisense strand to SEQ ID NO: 1830603
uauucaagcaguauauucu

SEQ ID NO: 1830605 - RNA, 19 nt, Artificial Sequence
  Description of Artificial Sequence: Synthetic oligonucleotide
  Sense strand starting at position 1188 of SEQ ID NO: 1563771
uauuguacagcuuggaaua

SEQ ID NO: 1830606 - RNA, 19 nt, Artificial Sequence
  Description of Artificial Sequence: Synthetic oligonucleotide
  Antisense strand to SEQ ID NO: 1830605
uauuccaagcuguacaaua

SEQ ID NO: 1830607 - RNA, 19 nt, Artificial Sequence
  Description of Artificial Sequence: Synthetic oligonucleotide
  Sense strand starting at position 1189 of SEQ ID NO: 1563771
auuguacagcuuggaauaa

SEQ ID NO: 1830608 - RNA, 19 nt, Artificial Sequence
  Description of Artificial Sequence: Synthetic oligonucleotide
  Antisense strand to SEQ ID NO: 1830607
uuauuccaagcuguacaau

SEQ ID NO: 1830609 - RNA, 19 nt, Artificial Sequence
  Description of Artificial Sequence: Synthetic oligonucleotide
  Sense strand starting at position 1242 of SEQ ID NO: 1563771
gugauucuucucuacucau

SEQ ID NO: 1830610 - RNA, 19 nt, Artificial Sequence
  Description of Artificial Sequence: Synthetic oligonucleotide
  Antisense strand to SEQ ID NO: 1830609
augaguagagaagaaucac

SEQ ID NO: 1830611 - RNA, 19 nt, Artificial Sequence
  Description of Artificial Sequence: Synthetic oligonucleotide
  Sense strand starting at position 1436 of SEQ ID NO: 1563771
accacauuauuugacggaa

SEQ ID NO: 1830612 - RNA, 19 nt, Artificial Sequence
  Description of Artificial Sequence: Synthetic oligonucleotide
  Antisense strand to SEQ ID NO: 1830611
uuccgucaaauaauguggu

SEQ ID NO: 1830613 - RNA, 19 nt, Artificial Sequence
  Description of Artificial Sequence: Synthetic oligonucleotide
  Sense strand starting at position 1459 of SEQ ID NO: 1563771
ugcugucaguuauuugaau

SEQ ID NO: 1830614 - RNA, 19 nt, Artificial Sequence
  Description of Artificial Sequence: Synthetic oligonucleotide
  Antisense strand to SEQ ID NO: 1830613
auucaaauaacugacagca

SEQ ID NO: 1830615 - RNA, 19 nt, Artificial Sequence
  Description of Artificial Sequence: Synthetic oligonucleotide
  Sense strand starting at position 1460 of SEQ ID NO: 1563771
gcugucaguuauuugaaug

SEQ ID NO: 1830616 - RNA, 19 nt, Artificial Sequence
  Description of Artificial Sequence: Synthetic oligonucleotide
  Antisense strand to SEQ ID NO: 1830615
cauucaaauaacugacagc

SEQ ID NO: 1830617 - RNA, 19 nt, Artificial Sequence
  Description of Artificial Sequence: Synthetic oligonucleotide
  Sense strand starting at position 1465 of SEQ ID NO: 1563771
caguuauuugaaugguguu

SEQ ID NO: 1830618 - RNA, 19 nt, Artificial Sequence
  Description of Artificial Sequence: Synthetic oligonucleotide
  Antisense strand to SEQ ID NO: 1830617
aacaccauucaaauaacug

SEQ ID NO: 1830619 - RNA, 19 nt, Artificial Sequence
  Description of Artificial Sequence: Synthetic oligonucleotide
  Sense strand starting at position 1477 of SEQ ID NO: 1563771
ugguguuacuaaucaauga

SEQ ID NO: 1830620 - RNA, 19 nt, Artificial Sequence
  Description of Artificial Sequence: Synthetic oligonucleotide
  Antisense strand to SEQ ID NO: 1830619
ucauugauuaguaacacca

SEQ ID NO: 1830621 - RNA, 19 nt, Artificial Sequence
  Description of Artificial Sequence: Synthetic oligonucleotide
  Sense strand starting at position 1517 of SEQ ID NO: 1563771
guuuguguggugcuuuacu

SEQ ID NO: 1830622 - RNA, 19 nt, Artificial Sequence
  Description of Artificial Sequence: Synthetic oligonucleotide
  Antisense strand to SEQ ID NO: 1830621
aguaaagcaccacacaaac

SEQ ID NO: 1830623 - RNA, 19 nt, Artificial Sequence
  Description of Artificial Sequence: Synthetic oligonucleotide
  Sense strand starting at position 1519 of SEQ ID NO: 1563771
uuguguggugcuuuacuuu

SEQ ID NO: 1830624 - RNA, 19 nt, Artificial Sequence
  Description of Artificial Sequence: Synthetic oligonucleotide
  Antisense strand to SEQ ID NO: 1830623
aaaguaaagcaccacacaa

SEQ ID NO: 1830625 - RNA, 19 nt, Artificial Sequence
  Description of Artificial Sequence: Synthetic oligonucleotide
  Sense strand starting at position 1644 of SEQ ID NO: 1563771
cuucucagacuugagucau

SEQ ID NO: 1830626 - RNA, 19 nt, Artificial Sequence
  Description of Artificial Sequence: Synthetic oligonucleotide
  Antisense strand to SEQ ID NO: 1830625
augacucaagucugagaag

SEQ ID NO: 1830627 - RNA, 19 nt, Artificial Sequence
  Description of Artificial Sequence: Synthetic oligonucleotide
  Sense strand starting at position 1692 of SEQ ID NO: 1563771
guaggagugccacaaagua

SEQ ID NO: 1830628 - RNA, 19 nt, Artificial Sequence
  Description of Artificial Sequence: Synthetic oligonucleotide
  Antisense strand to SEQ ID NO: 1830627
uacuuuguggcacuccuac

SEQ ID NO: 1830629 - RNA, 19 nt, Artificial Sequence
  Description of Artificial Sequence: Synthetic oligonucleotide
  Sense strand starting at position 1769 of SEQ ID NO: 1563771
uagguauuuccaggucagu

SEQ ID NO: 1830630 - RNA, 19 nt, Artificial Sequence
  Description of Artificial Sequence: Synthetic oligonucleotide
  Antisense strand to SEQ ID NO: 1830629
acugaccuggaaauaccua

SEQ ID NO: 1830631 - RNA, 19 nt, Artificial Sequence
  Description of Artificial Sequence: Synthetic oligonucleotide
  Sense strand starting at position 1859 of SEQ ID NO: 1563771
ugcaacagccuugggaaua

SEQ ID NO: 1830632 - RNA, 19 nt, Artificial Sequence
  Description of Artificial Sequence: Synthetic oligonucleotide
  Antisense strand to SEQ ID NO: 1830631
uauucccaaggcuguugca

SEQ ID NO: 1830633 - RNA, 19 nt, Artificial Sequence
  Description of Artificial Sequence: Synthetic oligonucleotide
  Sense strand starting at position 2626 of SEQ ID NO: 1563771
uuccuuacaugguuaggaa

SEQ ID NO: 1830634 - RNA, 19 nt, Artificial Sequence
  Description of Artificial Sequence: Synthetic oligonucleotide
  Antisense strand to SEQ ID NO: 1830633
uuccuaaccauguaaggaa

SEQ ID NO: 1830635 - RNA, 19 nt, Artificial Sequence
  Description of Artificial Sequence: Synthetic oligonucleotide
  Sense strand starting at position 2758 of SEQ ID NO: 1563771
agaaguaauuuggagauga

SEQ ID NO: 1830636 - RNA, 19 nt, Artificial Sequence
  Description of Artificial Sequence: Synthetic oligonucleotide
  Antisense strand to SEQ ID NO: 1830635
ucaucuccaaauuacuucu

SEQ ID NO: 1830637 - RNA, 19 nt, Artificial Sequence
  Description of Artificial Sequence: Synthetic oligonucleotide
  Sense strand starting at position 2833 of SEQ ID NO: 1563771
uugggaaggcgauguaaau

SEQ ID NO: 1830638 - RNA, 19 nt, Artificial Sequence
  Description of Artificial Sequence: Synthetic oligonucleotide
  Antisense strand to SEQ ID NO: 1830637
auuuacaucgccuucccaa

SEQ ID NO: 1830639 - RNA, 19 nt, Artificial Sequence
  Description of Artificial Sequence: Synthetic oligonucleotide
  Sense strand starting at position 2967 of SEQ ID NO: 1563771
ucuagaugugaacacuguu

SEQ ID NO: 1830640 - RNA, 19 nt, Artificial Sequence
  Description of Artificial Sequence: Synthetic oligonucleotide
  Antisense strand to SEQ ID NO: 1830639
aacaguguucacaucuaga

SEQ ID NO: 1830641 - RNA, 19 nt, Artificial Sequence
  Description of Artificial Sequence: Synthetic oligonucleotide
  Sense strand starting at position 3100 of SEQ ID NO: 1563771
uucugcccucgagaugaaa

SEQ ID NO: 1830642 - RNA, 19 nt, Artificial Sequence
  Description of Artificial Sequence: Synthetic oligonucleotide
  Antisense strand to SEQ ID NO: 1830641
uuucaucucgagggcagaa

SEQ ID NO: 1830643 - RNA, 19 nt, Artificial Sequence
  Description of Artificial Sequence: Synthetic oligonucleotide
  Sense strand starting at position 3197 of SEQ ID NO: 1563771
agaucagauuguguccaca

SEQ ID NO: 1830644 - RNA, 19 nt, Artificial Sequence
  Description of Artificial Sequence: Synthetic oligonucleotide
  Antisense strand to SEQ ID NO: 1830643
uguggacacaaucugaucu

SEQ ID NO: 1830645 - RNA, 19 nt, Artificial Sequence
  Description of Artificial Sequence: Synthetic oligonucleotide
  Sense strand starting at position 3199 of SEQ ID NO: 1563771
aucagauuguguccacaga

SEQ ID NO: 1830646 - RNA, 19 nt, Artificial Sequence
  Description of Artificial Sequence: Synthetic oligonucleotide
  Antisense strand to SEQ ID NO: 1830645
ucuguggacacaaucugau

SEQ ID NO: 1830647 - RNA, 19 nt, Artificial Sequence
  Description of Artificial Sequence: Synthetic oligonucleotide
  Sense strand starting at position 3200 of SEQ ID NO: 1563771
ucagauuguguccacagaa

SEQ ID NO: 1830648 - RNA, 19 nt, Artificial Sequence
  Description of Artificial Sequence: Synthetic oligonucleotide
  Antisense strand to SEQ ID NO: 1830647
uucuguggacacaaucuga

SEQ ID NO: 1830649 - RNA, 19 nt, Artificial Sequence
  Description of Artificial Sequence: Synthetic oligonucleotide
  Sense strand starting at position 3342 of SEQ ID NO: 1563771
gccucugagaugcacagau

SEQ ID NO: 1830650 - RNA, 19 nt, Artificial Sequence
  Description of Artificial Sequence: Synthetic oligonucleotide
  Antisense strand to SEQ ID NO: 1830649
aucugugcaucucagaggc

SEQ ID NO: 1830651 - RNA, 19 nt, Artificial Sequence
  Description of Artificial Sequence: Synthetic oligonucleotide
  Sense strand starting at position 3480 of SEQ ID NO: 1563771
ugauuucuccugugcaugu

SEQ ID NO: 1830652 - RNA, 19 nt, Artificial Sequence
  Description of Artificial Sequence: Synthetic oligonucleotide
  Antisense strand to SEQ ID NO: 1830651
acaugcacaggagaaauca

SEQ ID NO: 1830653 - RNA, 19 nt, Artificial Sequence
  Description of Artificial Sequence: Synthetic oligonucleotide
  Sense strand starting at position 3481 of SEQ ID NO: 1563771
gauuucuccugugcaugua

SEQ ID NO: 1830654 - RNA, 19 nt, Artificial Sequence
  Description of Artificial Sequence: Synthetic oligonucleotide
  Antisense strand to SEQ ID NO: 1830653
uacaugcacaggagaaauc

SEQ ID NO: 1830655 - RNA, 19 nt, Artificial Sequence
  Description of Artificial Sequence: Synthetic oligonucleotide
  Sense strand starting at position 3539 of SEQ ID NO: 1563771
cugacaggcuuuccaaauu

SEQ ID NO: 1830656 - RNA, 19 nt, Artificial Sequence
  Description of Artificial Sequence: Synthetic oligonucleotide
  Antisense strand to SEQ ID NO: 1830655
aauuuggaaagccugucag

SEQ ID NO: 1830657 - RNA, 19 nt, Artificial Sequence
  Description of Artificial Sequence: Synthetic oligonucleotide
  Sense strand starting at position 3552 of SEQ ID NO: 1563771
caaauuggguuuguccaaa

SEQ ID NO: 1830658 - RNA, 19 nt, Artificial Sequence
  Description of Artificial Sequence: Synthetic oligonucleotide
  Antisense strand to SEQ ID NO: 1830657
uuuggacaaacccaauuug

SEQ ID NO: 1830659 - RNA, 19 nt, Artificial Sequence
  Description of Artificial Sequence: Synthetic oligonucleotide
  Sense strand starting at position 3811 of SEQ ID NO: 1563771
cugaccuguggcuagaauu

SEQ ID NO: 1830660 - RNA, 19 nt, Artificial Sequence
  Description of Artificial Sequence: Synthetic oligonucleotide
  Antisense strand to SEQ ID NO: 1830659
aauucuagccacaggucag

SEQ ID NO: 1830661 - RNA, 19 nt, Artificial Sequence
  Description of Artificial Sequence: Synthetic oligonucleotide
  Sense strand starting at position 3853 of SEQ ID NO: 1563771
ucaaauuugugguuaguuc

SEQ ID NO: 1830662 - RNA, 19 nt, Artificial Sequence
  Description of Artificial Sequence: Synthetic oligonucleotide
  Antisense strand to SEQ ID NO: 1830661
gaacuaaccacaaauuuga

SEQ ID NO: 1830663 - RNA, 19 nt, Artificial Sequence
  Description of Artificial Sequence: Synthetic oligonucleotide
  Sense strand starting at position 81 of SEQ ID NO: 1563772
uaagaacgucacugcugua

SEQ ID NO: 1830664 - RNA, 19 nt, Artificial Sequence
  Description of Artificial Sequence: Synthetic oligonucleotide
  Antisense strand to SEQ ID NO: 1830663
uacagcagugacguucuua

SEQ ID NO: 1830665 - RNA, 19 nt, Artificial Sequence
  Description of Artificial Sequence: Synthetic oligonucleotide
  Sense strand starting at position 86 of SEQ ID NO: 1563772
acgucacugcuguaaauaa

SEQ ID NO: 1830666 - RNA, 19 nt, Artificial Sequence
  Description of Artificial Sequence: Synthetic oligonucleotide
  Antisense strand to SEQ ID NO: 1830665
uuauuuacagcagugacgu

SEQ ID NO: 1830667 - RNA, 19 nt, Artificial Sequence
  Description of Artificial Sequence: Synthetic oligonucleotide
  Sense strand starting at position 112 of SEQ ID NO: 1563772
ggucauauguuaccucaug

SEQ ID NO: 1830668 - RNA, 19 nt, Artificial Sequence
  Description of Artificial Sequence: Synthetic oligonucleotide
  Antisense strand to SEQ ID NO: 1830667
caugagguaacauaugacc

SEQ ID NO: 1830669 - RNA, 19 nt, Artificial Sequence
  Description of Artificial Sequence: Synthetic oligonucleotide
  Sense strand starting at position 113 of SEQ ID NO: 1563772
gucauauguuaccucaugu

SEQ ID NO: 1830670 - RNA, 19 nt, Artificial Sequence
  Description of Artificial Sequence: Synthetic oligonucleotide
  Antisense strand to SEQ ID NO: 1830669
acaugagguaacauaugac

SEQ ID NO: 1830671 - RNA, 19 nt, Artificial Sequence
  Description of Artificial Sequence: Synthetic oligonucleotide
  Sense strand starting at position 175 of SEQ ID NO: 1563772
ucguaaggaguucagagaa

SEQ ID NO: 1830672 - RNA, 19 nt, Artificial Sequence
  Description of Artificial Sequence: Synthetic oligonucleotide
  Antisense strand to SEQ ID NO: 1830671
uucucugaacuccuuacga

SEQ ID NO: 1830673 - RNA, 19 nt, Artificial Sequence
  Description of Artificial Sequence: Synthetic oligonucleotide
  Sense strand starting at position 275 of SEQ ID NO: 1563772
ccgggauuaaagugcuuua

SEQ ID NO: 1830674 - RNA, 19 nt, Artificial Sequence
  Description of Artificial Sequence: Synthetic oligonucleotide
  Antisense strand to SEQ ID NO: 1830673
uaaagcacuuuaaucccgg

SEQ ID NO: 1830675 - RNA, 19 nt, Artificial Sequence
  Description of Artificial Sequence: Synthetic oligonucleotide
  Sense strand starting at position 278 of SEQ ID NO: 1563772
ggauuaaagugcuuuagac

SEQ ID NO: 1830676 - RNA, 19 nt, Artificial Sequence
  Description of Artificial Sequence: Synthetic oligonucleotide
  Antisense strand to SEQ ID NO: 1830675
gucuaaagcacuuuaaucc

SEQ ID NO: 1830677 - RNA, 19 nt, Artificial Sequence
  Description of Artificial Sequence: Synthetic oligonucleotide
  Sense strand starting at position 612 of SEQ ID NO: 1563772
ugcugaaaucgcugaauuc

SEQ ID NO: 1830678 - RNA, 19 nt, Artificial Sequence
  Description of Artificial Sequence: Synthetic oligonucleotide
  Antisense strand to SEQ ID NO: 1830677
gaauucagcgauuucagca

SEQ ID NO: 1830679 - RNA, 19 nt, Artificial Sequence
  Description of Artificial Sequence: Synthetic oligonucleotide
  Sense strand starting at position 621 of SEQ ID NO: 1563772
cgcugaauuccucagcgga

SEQ ID NO: 1830680 - RNA, 19 nt, Artificial Sequence
  Description of Artificial Sequence: Synthetic oligonucleotide
  Antisense strand to SEQ ID NO: 1830679
uccgcugaggaauucagcg

SEQ ID NO: 1830681 - RNA, 19 nt, Artificial Sequence
  Description of Artificial Sequence: Synthetic oligonucleotide
  Sense strand starting at position 623 of SEQ ID NO: 1563772
cugaauuccucagcggaac

SEQ ID NO: 1830682 - RNA, 19 nt, Artificial Sequence
  Description of Artificial Sequence: Synthetic oligonucleotide
  Antisense strand to SEQ ID NO: 1830681
guuccgcugaggaauucag

SEQ ID NO: 1830683 - RNA, 19 nt, Artificial Sequence
  Description of Artificial Sequence: Synthetic oligonucleotide
  Sense strand starting at position 1193 of SEQ ID NO: 1563772
aggccuuuccuagauugca

SEQ ID NO: 1830684 - RNA, 19 nt, Artificial Sequence
  Description of Artificial Sequence: Synthetic oligonucleotide
  Antisense strand to SEQ ID NO: 1830683
ugcaaucuaggaaaggccu

SEQ ID NO: 1830685 - RNA, 19 nt, Artificial Sequence
  Description of Artificial Sequence: Synthetic oligonucleotide
  Sense strand starting at position 1697 of SEQ ID NO: 1563772
gggcucuggcccugaaacu

SEQ ID NO: 1830686 - RNA, 19 nt, Artificial Sequence
  Description of Artificial Sequence: Synthetic oligonucleotide
  Antisense strand to SEQ ID NO: 1830685
aguuucagggccagagccc

SEQ ID NO: 1830687 - RNA, 19 nt, Artificial Sequence
  Description of Artificial Sequence: Synthetic oligonucleotide
  Sense strand starting at position 2155 of SEQ ID NO: 1563772
ggagcugucucugcccauu

SEQ ID NO: 1830688 - RNA, 19 nt, Artificial Sequence
  Description of Artificial Sequence: Synthetic oligonucleotide
  Antisense strand to SEQ ID NO: 1830687
aaugggcagagacagcucc

SEQ ID NO: 1830689 - RNA, 19 nt, Artificial Sequence
  Description of Artificial Sequence: Synthetic oligonucleotide
  Sense strand starting at position 2412 of SEQ ID NO: 1563772
cgcggccaccugucauaaa

SEQ ID NO: 1830690 - RNA, 19 nt, Artificial Sequence
  Description of Artificial Sequence: Synthetic oligonucleotide
  Antisense strand to SEQ ID NO: 1830689
uuuaugacagguggccgcg

SEQ ID NO: 1830691 - RNA, 19 nt, Artificial Sequence
  Description of Artificial Sequence: Synthetic oligonucleotide
  Sense strand starting at position 2605 of SEQ ID NO: 1563772
ggaagaauauuugaauggu

SEQ ID NO: 1830692 - RNA, 19 nt, Artificial Sequence
  Description of Artificial Sequence: Synthetic oligonucleotide
  Antisense strand to SEQ ID NO: 1830691
accauucaaauauucuucc

SEQ ID NO: 1830693 - RNA, 19 nt, Artificial Sequence
  Description of Artificial Sequence: Synthetic oligonucleotide
  Sense strand starting at position 2919 of SEQ ID NO: 1563772
ucuggaguccugggugcaa

SEQ ID NO: 1830694 - RNA, 19 nt, Artificial Sequence
  Description of Artificial Sequence: Synthetic oligonucleotide
  Antisense strand to SEQ ID NO: 1830693
uugcacccaggacuccaga

SEQ ID NO: 1830695 - RNA, 19 nt, Artificial Sequence
  Description of Artificial Sequence: Synthetic oligonucleotide
  Sense strand starting at position 2995 of SEQ ID NO: 1563772
aaagguugguacuagaaca

SEQ ID NO: 1830696 - RNA, 19 nt, Artificial Sequence
  Description of Artificial Sequence: Synthetic oligonucleotide
  Antisense strand to SEQ ID NO: 1830695
uguucuaguaccaaccuuu

SEQ ID NO: 1830697 - RNA, 19 nt, Artificial Sequence
  Description of Artificial Sequence: Synthetic oligonucleotide
  Sense strand starting at position 3099 of SEQ ID NO: 1563772
ucagauuucuuugcugcca

SEQ ID NO: 1830698 - RNA, 19 nt, Artificial Sequence
  Description of Artificial Sequence: Synthetic oligonucleotide
  Antisense strand to SEQ ID NO: 1830697
uggcagcaaagaaaucuga

SEQ ID NO: 1830699 - RNA, 19 nt, Artificial Sequence
  Description of Artificial Sequence: Synthetic oligonucleotide
  Sense strand starting at position 3150 of SEQ ID NO: 1563772
ggcuuugagaucugaugug

SEQ ID NO: 1830700 - RNA, 19 nt, Artificial Sequence
  Description of Artificial Sequence: Synthetic oligonucleotide
  Antisense strand to SEQ ID NO: 1830699
cacaucagaucucaaagcc

SEQ ID NO: 1830701 - RNA, 19 nt, Artificial Sequence
  Description of Artificial Sequence: Synthetic oligonucleotide
  Sense strand starting at position 3155 of SEQ ID NO: 1563772
ugagaucugaugugugcaa

SEQ ID NO: 1830702 - RNA, 19 nt, Artificial Sequence
  Description of Artificial Sequence: Synthetic oligonucleotide
  Antisense strand to SEQ ID NO: 1830701
uugcacacaucagaucuca

SEQ ID NO: 1830703 - RNA, 19 nt, Artificial Sequence
  Description of Artificial Sequence: Synthetic oligonucleotide
  Sense strand starting at position 3157 of SEQ ID NO: 1563772
agaucugaugugugcaacu

SEQ ID NO: 1830704 - RNA, 19 nt, Artificial Sequence
  Description of Artificial Sequence: Synthetic oligonucleotide
  Antisense strand to SEQ ID NO: 1830703
aguugcacacaucagaucu

SEQ ID NO: 1830705 - RNA, 19 nt, Artificial Sequence
  Description of Artificial Sequence: Synthetic oligonucleotide
  Sense strand starting at position 3166 of SEQ ID NO: 1563772
gugugcaacuucucaccau

SEQ ID NO: 1830706 - RNA, 19 nt, Artificial Sequence
  Description of Artificial Sequence: Synthetic oligonucleotide
  Antisense strand to SEQ ID NO: 1830705
auggugagaaguugcacac

SEQ ID NO: 1830707 - RNA, 19 nt, Artificial Sequence
  Description of Artificial Sequence: Synthetic oligonucleotide
  Sense strand starting at position 3260 of SEQ ID NO: 1563772
agauaaauguuccagauau

SEQ ID NO: 1830708 - RNA, 19 nt, Artificial Sequence
  Description of Artificial Sequence: Synthetic oligonucleotide
  Antisense strand to SEQ ID NO: 1830707
auaucuggaacauuuaucu

SEQ ID NO: 1830709 - RNA, 19 nt, Artificial Sequence
  Description of Artificial Sequence: Synthetic oligonucleotide
  Sense strand starting at position 3285 of SEQ ID NO: 1563772
gacaauaaggucuggguca

SEQ ID NO: 1830710 - RNA, 19 nt, Artificial Sequence
  Description of Artificial Sequence: Synthetic oligonucleotide
  Antisense strand to SEQ ID NO: 1830709
ugacccagaccuuauuguc

SEQ ID NO: 1830711 - RNA, 19 nt, Artificial Sequence
  Description of Artificial Sequence: Synthetic oligonucleotide
  Sense strand starting at position 3287 of SEQ ID NO: 1563772
caauaaggucugggucacu

SEQ ID NO: 1830712 - RNA, 19 nt, Artificial Sequence
  Description of Artificial Sequence: Synthetic oligonucleotide
  Antisense strand to SEQ ID NO: 1830711
agugacccagaccuuauug

SEQ ID NO: 1830713 - RNA, 19 nt, Artificial Sequence
  Description of Artificial Sequence: Synthetic oligonucleotide
  Sense strand starting at position 3290 of SEQ ID NO: 1563772
uaaggucugggucacuuua

SEQ ID NO: 1830714 - RNA, 19 nt, Artificial Sequence
  Description of Artificial Sequence: Synthetic oligonucleotide
  Antisense strand to SEQ ID NO: 1830713
uaaagugacccagaccuua

SEQ ID NO: 1830715 - RNA, 19 nt, Artificial Sequence
  Description of Artificial Sequence: Synthetic oligonucleotide
  Sense strand starting at position 3309 of SEQ ID NO: 1563772
ccaaguuugaggcgcucua

SEQ ID NO: 1830716 - RNA, 19 nt, Artificial Sequence
  Description of Artificial Sequence: Synthetic oligonucleotide
  Antisense strand to SEQ ID NO: 1830715
uagagcgccucaaacuugg

SEQ ID NO: 1830717 - RNA, 19 nt, Artificial Sequence
  Description of Artificial Sequence: Synthetic oligonucleotide
  Sense strand starting at position 3349 of SEQ ID NO: 1563772
acaauaaacugucuguaug

SEQ ID NO: 1830718 - RNA, 19 nt, Artificial Sequence
  Description of Artificial Sequence: Synthetic oligonucleotide
  Antisense strand to SEQ ID NO: 1830717
cauacagacaguuuauugu

SEQ ID NO: 1830719 - RNA, 19 nt, Artificial Sequence
  Description of Artificial Sequence: Synthetic oligonucleotide
  Sense strand starting at position 3502 of SEQ ID NO: 1563772
cuuauuggguccuuacuau

SEQ ID NO: 1830720 - RNA, 19 nt, Artificial Sequence
  Description of Artificial Sequence: Synthetic oligonucleotide
  Antisense strand to SEQ ID NO: 1830719
auaguaaggacccaauaag

SEQ ID NO: 1830721 - RNA, 19 nt, Artificial Sequence
  Description of Artificial Sequence: Synthetic oligonucleotide
  Sense strand starting at position 3611 of SEQ ID NO: 1563772
ucgagucacaaggaaguua

SEQ ID NO: 1830722 - RNA, 19 nt, Artificial Sequence
  Description of Artificial Sequence: Synthetic oligonucleotide
  Antisense strand to SEQ ID NO: 1830721
uaacuuccuugugacucga

SEQ ID NO: 1830723 - RNA, 19 nt, Artificial Sequence
  Description of Artificial Sequence: Synthetic oligonucleotide
  Sense strand starting at position 3620 of SEQ ID NO: 1563772
aaggaaguuagguauaugu

SEQ ID NO: 1830724 - RNA, 19 nt, Artificial Sequence
  Description of Artificial Sequence: Synthetic oligonucleotide
  Antisense strand to SEQ ID NO: 1830723
acauauaccuaacuuccuu

SEQ ID NO: 1830725 - RNA, 19 nt, Artificial Sequence
  Description of Artificial Sequence: Synthetic oligonucleotide
  Sense strand starting at position 3622 of SEQ ID NO: 1563772
ggaaguuagguauaugugu

SEQ ID NO: 1830726 - RNA, 19 nt, Artificial Sequence
  Description of Artificial Sequence: Synthetic oligonucleotide
  Antisense strand to SEQ ID NO: 1830725
acacauauaccuaacuucc

SEQ ID NO: 1830727 - RNA, 19 nt, Artificial Sequence
  Description of Artificial Sequence: Synthetic oligonucleotide
  Sense strand starting at position 3627 of SEQ ID NO: 1563772
uuagguauauguguccuga

SEQ ID NO: 1830728 - RNA, 19 nt, Artificial Sequence
  Description of Artificial Sequence: Synthetic oligonucleotide
  Antisense strand to SEQ ID NO: 1830727
ucaggacacauauaccuaa

SEQ ID NO: 1830729 - RNA, 19 nt, Artificial Sequence
  Description of Artificial Sequence: Synthetic oligonucleotide
  Sense strand starting at position 3679 of SEQ ID NO: 1563772
gugagacacugugcaaaua

SEQ ID NO: 1830730 - RNA, 19 nt, Artificial Sequence
  Description of Artificial Sequence: Synthetic oligonucleotide
  Antisense strand to SEQ ID NO: 1830729
uauuugcacagugucucac

SEQ ID NO: 1830731 - RNA, 19 nt, Artificial Sequence
  Description of Artificial Sequence: Synthetic oligonucleotide
  Sense strand starting at position 3718 of SEQ ID NO: 1563772
uggaauaaauaagaagaca

SEQ ID NO: 1830732 - RNA, 19 nt, Artificial Sequence
  Description of Artificial Sequence: Synthetic oligonucleotide
  Antisense strand to SEQ ID NO: 1830731
ugucuucuuauuuauucca

SEQ ID NO: 1830733 - RNA, 19 nt, Artificial Sequence
  Description of Artificial Sequence: Synthetic oligonucleotide
  Sense strand starting at position 3740 of SEQ ID NO: 1563772
uuuggccucuguucucaaa

SEQ ID NO: 1830734 - RNA, 19 nt, Artificial Sequence
  Description of Artificial Sequence: Synthetic oligonucleotide
  Antisense strand to SEQ ID NO: 1830733
uuugagaacagaggccaaa

SEQ ID NO: 1830735 - RNA, 19 nt, Artificial Sequence
  Description of Artificial Sequence: Synthetic oligonucleotide
  Sense strand starting at position 3912 of SEQ ID NO: 1563772
aaguuaguugcuuauuugu

SEQ ID NO: 1830736 - RNA, 19 nt, Artificial Sequence
  Description of Artificial Sequence: Synthetic oligonucleotide
  Antisense strand to SEQ ID NO: 1830735
acaaauaagcaacuaacuu

SEQ ID NO: 1830737 - RNA, 19 nt, Artificial Sequence
  Description of Artificial Sequence: Synthetic oligonucleotide
  Sense strand starting at position 3914 of SEQ ID NO: 1563772
guuaguugcuuauuuguua

SEQ ID NO: 1830738 - RNA, 19 nt, Artificial Sequence
  Description of Artificial Sequence: Synthetic oligonucleotide
  Antisense strand to SEQ ID NO: 1830737
uaacaaauaagcaacuaac

SEQ ID NO: 1830739 - RNA, 19 nt, Artificial Sequence
  Description of Artificial Sequence: Synthetic oligonucleotide
  Sense strand starting at position 3921 of SEQ ID NO: 1563772
gcuuauuuguuaccaguua

SEQ ID NO: 1830740 - RNA, 19 nt, Artificial Sequence
  Description of Artificial Sequence: Synthetic oligonucleotide
  Antisense strand to SEQ ID NO: 1830739
uaacugguaacaaauaagc

SEQ ID NO: 1830741 - RNA, 19 nt, Artificial Sequence
  Description of Artificial Sequence: Synthetic oligonucleotide
  Sense strand starting at position 3922 of SEQ ID NO: 1563772
cuuauuuguuaccaguuau

SEQ ID NO: 1830742 - RNA, 19 nt, Artificial Sequence
  Description of Artificial Sequence: Synthetic oligonucleotide
  Antisense strand to SEQ ID NO: 1830741
auaacugguaacaaauaag

SEQ ID NO: 1830743 - RNA, 19 nt, Artificial Sequence
  Description of Artificial Sequence: Synthetic oligonucleotide
  Sense strand starting at position 81 of SEQ ID NO: 1563773
auagcuguugccuagaaga

SEQ ID NO: 1830744 - RNA, 19 nt, Artificial Sequence
  Description of Artificial Sequence: Synthetic oligonucleotide
  Antisense strand to SEQ ID NO: 1830743
ucuucuaggcaacagcuau

SEQ ID NO: 1830745 - RNA, 19 nt, Artificial Sequence
  Description of Artificial Sequence: Synthetic oligonucleotide
  Sense strand starting at position 83 of SEQ ID NO: 1563773
agcuguugccuagaagaag

SEQ ID NO: 1830746 - RNA, 19 nt, Artificial Sequence
  Description of Artificial Sequence: Synthetic oligonucleotide
  Antisense strand to SEQ ID NO: 1830745
cuucuucuaggcaacagcu

SEQ ID NO: 1830747 - RNA, 19 nt, Artificial Sequence
  Description of Artificial Sequence: Synthetic oligonucleotide
  Sense strand starting at position 116 of SEQ ID NO: 1563773
gaacuaacaucacugggua

SEQ ID NO: 1830748 - RNA, 19 nt, Artificial Sequence
  Description of Artificial Sequence: Synthetic oligonucleotide
  Antisense strand to SEQ ID NO: 1830747
uacccagugauguuaguuc

SEQ ID NO: 1830749 - RNA, 19 nt, Artificial Sequence
  Description of Artificial Sequence: Synthetic oligonucleotide
  Sense strand starting at position 119 of SEQ ID NO: 1563773
cuaacaucacuggguagaa

SEQ ID NO: 1830750 - RNA, 19 nt, Artificial Sequence
  Description of Artificial Sequence: Synthetic oligonucleotide
  Antisense strand to SEQ ID NO: 1830749
uucuacccagugauguuag

SEQ ID NO: 1830751 - RNA, 19 nt, Artificial Sequence
  Description of Artificial Sequence: Synthetic oligonucleotide
  Sense strand starting at position 360 of SEQ ID NO: 1563773
cuagcaugccaugauucua

SEQ ID NO: 1830752 - RNA, 19 nt, Artificial Sequence
  Description of Artificial Sequence: Synthetic oligonucleotide
  Antisense strand to SEQ ID NO: 1830751
uagaaucauggcaugcuag

SEQ ID NO: 1830753 - RNA, 19 nt, Artificial Sequence
  Description of Artificial Sequence: Synthetic oligonucleotide
  Sense strand starting at position 482 of SEQ ID NO: 1563773
gguccucaacagcauuaaa

SEQ ID NO: 1830754 - RNA, 19 nt, Artificial Sequence
  Description of Artificial Sequence: Synthetic oligonucleotide
  Antisense strand to SEQ ID NO: 1830753
uuuaaugcuguugaggacc

SEQ ID NO: 1830755 - RNA, 19 nt, Artificial Sequence
  Description of Artificial Sequence: Synthetic oligonucleotide
  Sense strand starting at position 523 of SEQ ID NO: 1563773
uuauuaacuggugauagua

SEQ ID NO: 1830756 - RNA, 19 nt, Artificial Sequence
  Description of Artificial Sequence: Synthetic oligonucleotide
  Antisense strand to SEQ ID NO: 1830755
uacuaucaccaguuaauaa

SEQ ID NO: 1830757 - RNA, 19 nt, Artificial Sequence
  Description of Artificial Sequence: Synthetic oligonucleotide
  Sense strand starting at position 531 of SEQ ID NO: 1563773
uggugauaguauucagagg

SEQ ID NO: 1830758 - RNA, 19 nt, Artificial Sequence
  Description of Artificial Sequence: Synthetic oligonucleotide
  Antisense strand to SEQ ID NO: 1830757
ccucugaauacuaucacca

SEQ ID NO: 1830759 - RNA, 19 nt, Artificial Sequence
  Description of Artificial Sequence: Synthetic oligonucleotide
  Sense strand starting at position 1077 of SEQ ID NO: 1563773
ugacaaauguuauuaggcu

SEQ ID NO: 1830760 - RNA, 19 nt, Artificial Sequence
  Description of Artificial Sequence: Synthetic oligonucleotide
  Antisense strand to SEQ ID NO: 1830759
agccuaauaacauuuguca

SEQ ID NO: 1830761 - RNA, 19 nt, Artificial Sequence
  Description of Artificial Sequence: Synthetic oligonucleotide
  Sense strand starting at position 1169 of SEQ ID NO: 1563773
cauaguauaugcucaagga

SEQ ID NO: 1830762 - RNA, 19 nt, Artificial Sequence
  Description of Artificial Sequence: Synthetic oligonucleotide
  Antisense strand to SEQ ID NO: 1830761
uccuugagcauauacuaug

SEQ ID NO: 1830763 - RNA, 19 nt, Artificial Sequence
  Description of Artificial Sequence: Synthetic oligonucleotide
  Sense strand starting at position 1173 of SEQ ID NO: 1563773
guauaugcucaaggaauau

SEQ ID NO: 1830764 - RNA, 19 nt, Artificial Sequence
  Description of Artificial Sequence: Synthetic oligonucleotide
  Antisense strand to SEQ ID NO: 1830763
auauuccuugagcauauac

SEQ ID NO: 1830765 - RNA, 19 nt, Artificial Sequence
  Description of Artificial Sequence: Synthetic oligonucleotide
  Sense strand starting at position 2119 of SEQ ID NO: 1563773
cagacugaauugucaguga

SEQ ID NO: 1830766 - RNA, 19 nt, Artificial Sequence
  Description of Artificial Sequence: Synthetic oligonucleotide
  Antisense strand to SEQ ID NO: 1830765
ucacugacaauucagucug

SEQ ID NO: 1830767 - RNA, 19 nt, Artificial Sequence
  Description of Artificial Sequence: Synthetic oligonucleotide
  Sense strand starting at position 2124 of SEQ ID NO: 1563773
ugaauugucagugagcgga

SEQ ID NO: 1830768 - RNA, 19 nt, Artificial Sequence
  Description of Artificial Sequence: Synthetic oligonucleotide
  Antisense strand to SEQ ID NO: 1830767
uccgcucacugacaauuca

SEQ ID NO: 1830769 - RNA, 19 nt, Artificial Sequence
  Description of Artificial Sequence: Synthetic oligonucleotide
  Sense strand starting at position 2183 of SEQ ID NO: 1563773
ggcguuuaugcggcugaga

SEQ ID NO: 1830770 - RNA, 19 nt, Artificial Sequence
  Description of Artificial Sequence: Synthetic oligonucleotide
  Antisense strand to SEQ ID NO: 1830769
ucucagccgcauaaacgcc

SEQ ID NO: 1830771 - RNA, 19 nt, Artificial Sequence
  Description of Artificial Sequence: Synthetic oligonucleotide
  Sense strand starting at position 2184 of SEQ ID NO: 1563773
gcguuuaugcggcugagag

SEQ ID NO: 1830772 - RNA, 19 nt, Artificial Sequence
  Description of Artificial Sequence: Synthetic oligonucleotide
  Antisense strand to SEQ ID NO: 1830771
cucucagccgcauaaacgc

SEQ ID NO: 1830773 - RNA, 19 nt, Artificial Sequence
  Description of Artificial Sequence: Synthetic oligonucleotide
  Sense strand starting at position 2406 of SEQ ID NO: 1563773
cagguuugagacgguaaca

SEQ ID NO: 1830774 - RNA, 19 nt, Artificial Sequence
  Description of Artificial Sequence: Synthetic oligonucleotide
  Antisense strand to SEQ ID NO: 1830773
uguuaccgucucaaaccug

SEQ ID NO: 1830775 - RNA, 19 nt, Artificial Sequence
  Description of Artificial Sequence: Synthetic oligonucleotide
  Sense strand starting at position 2479 of SEQ ID NO: 1563773
uugcuuggcauccagaaga

SEQ ID NO: 1830776 - RNA, 19 nt, Artificial Sequence
  Description of Artificial Sequence: Synthetic oligonucleotide
  Antisense strand to SEQ ID NO: 1830775
ucuucuggaugccaagcaa

SEQ ID NO: 1830777 - RNA, 19 nt, Artificial Sequence
  Description of Artificial Sequence: Synthetic oligonucleotide
  Sense strand starting at position 2489 of SEQ ID NO: 1563773
uccagaagauguuuagcua

SEQ ID NO: 1830778 - RNA, 19 nt, Artificial Sequence
  Description of Artificial Sequence: Synthetic oligonucleotide
  Antisense strand to SEQ ID NO: 1830777
uagcuaaacaucuucugga

SEQ ID NO: 1830779 - RNA, 19 nt, Artificial Sequence
  Description of Artificial Sequence: Synthetic oligonucleotide
  Sense strand starting at position 2490 of SEQ ID NO: 1563773
ccagaagauguuuagcuaa

SEQ ID NO: 1830780 - RNA, 19 nt, Artificial Sequence
  Description of Artificial Sequence: Synthetic oligonucleotide
  Antisense strand to SEQ ID NO: 1830779
uuagcuaaacaucuucugg

SEQ ID NO: 1830781 - RNA, 19 nt, Artificial Sequence
  Description of Artificial Sequence: Synthetic oligonucleotide
  Sense strand starting at position 2492 of SEQ ID NO: 1563773
agaagauguuuagcuaagu

SEQ ID NO: 1830782 - RNA, 19 nt, Artificial Sequence
  Description of Artificial Sequence: Synthetic oligonucleotide
  Antisense strand to SEQ ID NO: 1830781
acuuagcuaaacaucuucu

SEQ ID NO: 1830783 - RNA, 19 nt, Artificial Sequence
  Description of Artificial Sequence: Synthetic oligonucleotide
  Sense strand starting at position 2577 of SEQ ID NO: 1563773
gacugacugccuuggaaug

SEQ ID NO: 1830784 - RNA, 19 nt, Artificial Sequence
  Description of Artificial Sequence: Synthetic oligonucleotide
  Antisense strand to SEQ ID NO: 1830783
cauuccaaggcagucaguc

SEQ ID NO: 1830785 - RNA, 19 nt, Artificial Sequence
  Description of Artificial Sequence: Synthetic oligonucleotide
  Sense strand starting at position 2739 of SEQ ID NO: 1563773
cuaugagaauccuccagca

SEQ ID NO: 1830786 - RNA, 19 nt, Artificial Sequence
  Description of Artificial Sequence: Synthetic oligonucleotide
  Antisense strand to SEQ ID NO: 1830785
ugcuggaggauucucauag

SEQ ID NO: 1830787 - RNA, 19 nt, Artificial Sequence
  Description of Artificial Sequence: Synthetic oligonucleotide
  Sense strand starting at position 2787 of SEQ ID NO: 1563773
cuguauuccugaguaggag

SEQ ID NO: 1830788 - RNA, 19 nt, Artificial Sequence
  Description of Artificial Sequence: Synthetic oligonucleotide
  Antisense strand to SEQ ID NO: 1830787
cuccuacucaggaauacag

SEQ ID NO: 1830789 - RNA, 19 nt, Artificial Sequence
  Description of Artificial Sequence: Synthetic oligonucleotide
  Sense strand starting at position 2788 of SEQ ID NO: 1563773
uguauuccugaguaggaga

SEQ ID NO: 1830790 - RNA, 19 nt, Artificial Sequence
  Description of Artificial Sequence: Synthetic oligonucleotide
  Antisense strand to SEQ ID NO: 1830789
ucuccuacucaggaauaca

SEQ ID NO: 1830791 - RNA, 19 nt, Artificial Sequence
  Description of Artificial Sequence: Synthetic oligonucleotide
  Sense strand starting at position 2790 of SEQ ID NO: 1563773
uauuccugaguaggagauu

SEQ ID NO: 1830792 - RNA, 19 nt, Artificial Sequence
  Description of Artificial Sequence: Synthetic oligonucleotide
  Antisense strand to SEQ ID NO: 1830791
aaucuccuacucaggaaua

SEQ ID NO: 1830793 - RNA, 19 nt, Artificial Sequence
  Description of Artificial Sequence: Synthetic oligonucleotide
  Sense strand starting at position 2791 of SEQ ID NO: 1563773
auuccugaguaggagauuu

SEQ ID NO: 1830794 - RNA, 19 nt, Artificial Sequence
  Description of Artificial Sequence: Synthetic oligonucleotide
  Antisense strand to SEQ ID NO: 1830793
aaaucuccuacucaggaau

SEQ ID NO: 1830795 - RNA, 19 nt, Artificial Sequence
  Description of Artificial Sequence: Synthetic oligonucleotide
  Sense strand starting at position 2843 of SEQ ID NO: 1563773
guaggauagcaggguuaga

SEQ ID NO: 1830796 - RNA, 19 nt, Artificial Sequence
  Description of Artificial Sequence: Synthetic oligonucleotide
  Antisense strand to SEQ ID NO: 1830795
ucuaacccugcuauccuac

SEQ ID NO: 1830797 - RNA, 19 nt, Artificial Sequence
  Description of Artificial Sequence: Synthetic oligonucleotide
  Sense strand starting at position 2874 of SEQ ID NO: 1563773
gagugaaucuuagcacuug

SEQ ID NO: 1830798 - RNA, 19 nt, Artificial Sequence
  Description of Artificial Sequence: Synthetic oligonucleotide
  Antisense strand to SEQ ID NO: 1830797
caagugcuaagauucacuc

SEQ ID NO: 1830799 - RNA, 19 nt, Artificial Sequence
  Description of Artificial Sequence: Synthetic oligonucleotide
  Sense strand starting at position 2911 of SEQ ID NO: 1563773
gcuggauucugagcaacag

SEQ ID NO: 1830800 - RNA, 19 nt, Artificial Sequence
  Description of Artificial Sequence: Synthetic oligonucleotide
  Antisense strand to SEQ ID NO: 1830799
cuguugcucagaauccagc

SEQ ID NO: 1830801 - RNA, 19 nt, Artificial Sequence
  Description of Artificial Sequence: Synthetic oligonucleotide
  Sense strand starting at position 2936 of SEQ ID NO: 1563773
uugggaacuucuuuaugga

SEQ ID NO: 1830802 - RNA, 19 nt, Artificial Sequence
  Description of Artificial Sequence: Synthetic oligonucleotide
  Antisense strand to SEQ ID NO: 1830801
uccauaaagaaguucccaa

SEQ ID NO: 1830803 - RNA, 19 nt, Artificial Sequence
  Description of Artificial Sequence: Synthetic oligonucleotide
  Sense strand starting at position 3371 of SEQ ID NO: 1563773
acucauuuagucuguguua

SEQ ID NO: 1830804 - RNA, 19 nt, Artificial Sequence
  Description of Artificial Sequence: Synthetic oligonucleotide
  Antisense strand to SEQ ID NO: 1830803
uaacacagacuaaaugagu

SEQ ID NO: 1830805 - RNA, 19 nt, Artificial Sequence
  Description of Artificial Sequence: Synthetic oligonucleotide
  Sense strand starting at position 3372 of SEQ ID NO: 1563773
cucauuuagucuguguuau

SEQ ID NO: 1830806 - RNA, 19 nt, Artificial Sequence
  Description of Artificial Sequence: Synthetic oligonucleotide
  Antisense strand to SEQ ID NO: 1830805
auaacacagacuaaaugag

SEQ ID NO: 1830807 - RNA, 19 nt, Artificial Sequence
  Description of Artificial Sequence: Synthetic oligonucleotide
  Sense strand starting at position 3373 of SEQ ID NO: 1563773
ucauuuagucuguguuauc

SEQ ID NO: 1830808 - RNA, 19 nt, Artificial Sequence
  Description of Artificial Sequence: Synthetic oligonucleotide
  Antisense strand to SEQ ID NO: 1830807
gauaacacagacuaaauga

SEQ ID NO: 1830809 - RNA, 19 nt, Artificial Sequence
  Description of Artificial Sequence: Synthetic oligonucleotide
  Sense strand starting at position 3374 of SEQ ID NO: 1563773
cauuuagucuguguuaucu

SEQ ID NO: 1830810 - RNA, 19 nt, Artificial Sequence
  Description of Artificial Sequence: Synthetic oligonucleotide
  Antisense strand to SEQ ID NO: 1830809
agauaacacagacuaaaug

SEQ ID NO: 1830811 - RNA, 19 nt, Artificial Sequence
  Description of Artificial Sequence: Synthetic oligonucleotide
  Sense strand starting at position 3450 of SEQ ID NO: 1563773
aguguuucagaugaaggua

SEQ ID NO: 1830812 - RNA, 19 nt, Artificial Sequence
  Description of Artificial Sequence: Synthetic oligonucleotide
  Antisense strand to SEQ ID NO: 1830811
uaccuucaucugaaacacu

SEQ ID NO: 1830813 - RNA, 19 nt, Artificial Sequence
  Description of Artificial Sequence: Synthetic oligonucleotide
  Sense strand starting at position 3466 of SEQ ID NO: 1563773
guaggugugaaguaagacu

SEQ ID NO: 1830814 - RNA, 19 nt, Artificial Sequence
  Description of Artificial Sequence: Synthetic oligonucleotide
  Antisense strand to SEQ ID NO: 1830813
agucuuacuucacaccuac

SEQ ID NO: 1830815 - RNA, 19 nt, Artificial Sequence
  Description of Artificial Sequence: Synthetic oligonucleotide
  Sense strand starting at position 3499 of SEQ ID NO: 1563773
gguugcugugucuugcaga

SEQ ID NO: 1830816 - RNA, 19 nt, Artificial Sequence
  Description of Artificial Sequence: Synthetic oligonucleotide
  Antisense strand to SEQ ID NO: 1830815
ucugcaagacacagcaacc

SEQ ID NO: 1830817 - RNA, 19 nt, Artificial Sequence
  Description of Artificial Sequence: Synthetic oligonucleotide
  Sense strand starting at position 3691 of SEQ ID NO: 1563773
ugaggaaacuuuccuucuu

SEQ ID NO: 1830818 - RNA, 19 nt, Artificial Sequence
  Description of Artificial Sequence: Synthetic oligonucleotide
  Antisense strand to SEQ ID NO: 1830817
aagaaggaaaguuuccuca

SEQ ID NO: 1830819 - RNA, 19 nt, Artificial Sequence
  Description of Artificial Sequence: Synthetic oligonucleotide
  Sense strand starting at position 3701 of SEQ ID NO: 1563773
uuccuucuuguggacagaa

SEQ ID NO: 1830820 - RNA, 19 nt, Artificial Sequence
  Description of Artificial Sequence: Synthetic oligonucleotide
  Antisense strand to SEQ ID NO: 1830819
uucuguccacaagaaggaa

SEQ ID NO: 1830821 - RNA, 19 nt, Artificial Sequence
  Description of Artificial Sequence: Synthetic oligonucleotide
  Sense strand starting at position 3839 of SEQ ID NO: 1563773
ugugcucuugucuuacagu

SEQ ID NO: 1830822 - RNA, 19 nt, Artificial Sequence
  Description of Artificial Sequence: Synthetic oligonucleotide
  Antisense strand to SEQ ID NO: 1830821
acuguaagacaagagcaca

SEQ ID NO: 1830823 - RNA, 19 nt, Artificial Sequence
  Description of Artificial Sequence: Synthetic oligonucleotide
  Sense strand starting at position 53 of SEQ ID NO: 1563774
aguaucuacugagauagaa

SEQ ID NO: 1830824 - RNA, 19 nt, Artificial Sequence
  Description of Artificial Sequence: Synthetic oligonucleotide
  Antisense strand to SEQ ID NO: 1830823
uucuaucucaguagauacu

SEQ ID NO: 1830825 - RNA, 19 nt, Artificial Sequence
  Description of Artificial Sequence: Synthetic oligonucleotide
  Sense strand starting at position 78 of SEQ ID NO: 1563774
aucugcauucuauggaaga

SEQ ID NO: 1830826 - RNA, 19 nt, Artificial Sequence
  Description of Artificial Sequence: Synthetic oligonucleotide
  Antisense strand to SEQ ID NO: 1830825
ucuuccauagaaugcagau

SEQ ID NO: 1830827 - RNA, 19 nt, Artificial Sequence
  Description of Artificial Sequence: Synthetic oligonucleotide
  Sense strand starting at position 112 of SEQ ID NO: 1563774
gggugaugcagcuaauaag

SEQ ID NO: 1830828 - RNA, 19 nt, Artificial Sequence
  Description of Artificial Sequence: Synthetic oligonucleotide
  Antisense strand to SEQ ID NO: 1830827
cuuauuagcugcaucaccc

SEQ ID NO: 1830829 - RNA, 19 nt, Artificial Sequence
  Description of Artificial Sequence: Synthetic oligonucleotide
  Sense strand starting at position 235 of SEQ ID NO: 1563774
cugggugacaggugcuuaa

SEQ ID NO: 1830830 - RNA, 19 nt, Artificial Sequence
  Description of Artificial Sequence: Synthetic oligonucleotide
  Antisense strand to SEQ ID NO: 1830829
uuaagcaccugucacccag

SEQ ID NO: 1830831 - RNA, 19 nt, Artificial Sequence
  Description of Artificial Sequence: Synthetic oligonucleotide
  Sense strand starting at position 238 of SEQ ID NO: 1563774
ggugacaggugcuuaauaa

SEQ ID NO: 1830832 - RNA, 19 nt, Artificial Sequence
  Description of Artificial Sequence: Synthetic oligonucleotide
  Antisense strand to SEQ ID NO: 1830831
uuauuaagcaccugucacc

SEQ ID NO: 1830833 - RNA, 19 nt, Artificial Sequence
  Description of Artificial Sequence: Synthetic oligonucleotide
  Sense strand starting at position 239 of SEQ ID NO: 1563774
gugacaggugcuuaauaaa

SEQ ID NO: 1830834 - RNA, 19 nt, Artificial Sequence
  Description of Artificial Sequence: Synthetic oligonucleotide
  Antisense strand to SEQ ID NO: 1830833
uuuauuaagcaccugucac

SEQ ID NO: 1830835 - RNA, 19 nt, Artificial Sequence
  Description of Artificial Sequence: Synthetic oligonucleotide
  Sense strand starting at position 259 of SEQ ID NO: 1563774
gcguuucuucacgaugaau

SEQ ID NO: 1830836 - RNA, 19 nt, Artificial Sequence
  Description of Artificial Sequence: Synthetic oligonucleotide
  Antisense strand to SEQ ID NO: 1830835
auucaucgugaagaaacgc

SEQ ID NO: 1830837 - RNA, 19 nt, Artificial Sequence
  Description of Artificial Sequence: Synthetic oligonucleotide
  Sense strand starting at position 270 of SEQ ID NO: 1563774
cgaugaauauaauaccaaa

SEQ ID NO: 1830838 - RNA, 19 nt, Artificial Sequence
  Description of Artificial Sequence: Synthetic oligonucleotide
  Antisense strand to SEQ ID NO: 1830837
uuugguauuauauucaucg

SEQ ID NO: 1830839 - RNA, 19 nt, Artificial Sequence
  Description of Artificial Sequence: Synthetic oligonucleotide
  Sense strand starting at position 317 of SEQ ID NO: 1563774
cuguuuggaugugauuuau

SEQ ID NO: 1830840 - RNA, 19 nt, Artificial Sequence
  Description of Artificial Sequence: Synthetic oligonucleotide
  Antisense strand to SEQ ID NO: 1830839
auaaaucacauccaaacag

SEQ ID NO: 1830841 - RNA, 19 nt, Artificial Sequence
  Description of Artificial Sequence: Synthetic oligonucleotide
  Sense strand starting at position 663 of SEQ ID NO: 1563774
ucagaagcuucucuaggua

SEQ ID NO: 1830842 - RNA, 19 nt, Artificial Sequence
  Description of Artificial Sequence: Synthetic oligonucleotide
  Antisense strand to SEQ ID NO: 1830841
uaccuagagaagcuucuga

SEQ ID NO: 1830843 - RNA, 19 nt, Artificial Sequence
  Description of Artificial Sequence: Synthetic oligonucleotide
  Sense strand starting at position 710 of SEQ ID NO: 1563774
gagcuuuggccuugugaau

SEQ ID NO: 1830844 - RNA, 19 nt, Artificial Sequence
  Description of Artificial Sequence: Synthetic oligonucleotide
  Antisense strand to SEQ ID NO: 1830843
auucacaaggccaaagcuc

SEQ ID NO: 1830845 - RNA, 19 nt, Artificial Sequence
  Description of Artificial Sequence: Synthetic oligonucleotide
  Sense strand starting at position 722 of SEQ ID NO: 1563774
ugugaauccuguucucucu

SEQ ID NO: 1830846 - RNA, 19 nt, Artificial Sequence
  Description of Artificial Sequence: Synthetic oligonucleotide
  Antisense strand to SEQ ID NO: 1830845
agagagaacaggauucaca

SEQ ID NO: 1830847 - RNA, 19 nt, Artificial Sequence
  Description of Artificial Sequence: Synthetic oligonucleotide
  Sense strand starting at position 774 of SEQ ID NO: 1563774
agacaauccuuaccgcuua

SEQ ID NO: 1830848 - RNA, 19 nt, Artificial Sequence
  Description of Artificial Sequence: Synthetic oligonucleotide
  Antisense strand to SEQ ID NO: 1830847
uaagcgguaaggauugucu

SEQ ID NO: 1830849 - RNA, 19 nt, Artificial Sequence
  Description of Artificial Sequence: Synthetic oligonucleotide
  Sense strand starting at position 950 of SEQ ID NO: 1563774
uccacauaguguucuuaac

SEQ ID NO: 1830850 - RNA, 19 nt, Artificial Sequence
  Description of Artificial Sequence: Synthetic oligonucleotide
  Antisense strand to SEQ ID NO: 1830849
guuaagaacacuaugugga

SEQ ID NO: 1830851 - RNA, 19 nt, Artificial Sequence
  Description of Artificial Sequence: Synthetic oligonucleotide
  Sense strand starting at position 1074 of SEQ ID NO: 1563774
guauuagucccagagucac

SEQ ID NO: 1830852 - RNA, 19 nt, Artificial Sequence
  Description of Artificial Sequence: Synthetic oligonucleotide
  Antisense strand to SEQ ID NO: 1830851
gugacucugggacuaauac

SEQ ID NO: 1830853 - RNA, 19 nt, Artificial Sequence
  Description of Artificial Sequence: Synthetic oligonucleotide
  Sense strand starting at position 2279 of SEQ ID NO: 1563774
accuauuuacuccgguuau

SEQ ID NO: 1830854 - RNA, 19 nt, Artificial Sequence
  Description of Artificial Sequence: Synthetic oligonucleotide
  Antisense strand to SEQ ID NO: 1830853
auaaccggaguaaauaggu

SEQ ID NO: 1830855 - RNA, 19 nt, Artificial Sequence
  Description of Artificial Sequence: Synthetic oligonucleotide
  Sense strand starting at position 2291 of SEQ ID NO: 1563774
cgguuaugcuaauucucca

SEQ ID NO: 1830856 - RNA, 19 nt, Artificial Sequence
  Description of Artificial Sequence: Synthetic oligonucleotide
  Antisense strand to SEQ ID NO: 1830855
uggagaauuagcauaaccg

SEQ ID NO: 1830857 - RNA, 19 nt, Artificial Sequence
  Description of Artificial Sequence: Synthetic oligonucleotide
  Sense strand starting at position 2449 of SEQ ID NO: 1563774
cacagugucuucucaggga

SEQ ID NO: 1830858 - RNA, 19 nt, Artificial Sequence
  Description of Artificial Sequence: Synthetic oligonucleotide
  Antisense strand to SEQ ID NO: 1830857
ucccugagaagacacugug

SEQ ID NO: 1830859 - RNA, 19 nt, Artificial Sequence
  Description of Artificial Sequence: Synthetic oligonucleotide
  Sense strand starting at position 2453 of SEQ ID NO: 1563774
gugucuucucagggaggaa

SEQ ID NO: 1830860 - RNA, 19 nt, Artificial Sequence
  Description of Artificial Sequence: Synthetic oligonucleotide
  Antisense strand to SEQ ID NO: 1830859
uuccucccugagaagacac

SEQ ID NO: 1830861 - RNA, 19 nt, Artificial Sequence
  Description of Artificial Sequence: Synthetic oligonucleotide
  Sense strand starting at position 2565 of SEQ ID NO: 1563774
aguugaagaugaucuguga

SEQ ID NO: 1830862 - RNA, 19 nt, Artificial Sequence
  Description of Artificial Sequence: Synthetic oligonucleotide
  Antisense strand to SEQ ID NO: 1830861
ucacagaucaucuucaacu

SEQ ID NO: 1830863 - RNA, 19 nt, Artificial Sequence
  Description of Artificial Sequence: Synthetic oligonucleotide
  Sense strand starting at position 2639 of SEQ ID NO: 1563774
ccagaccucuaagaauaga

SEQ ID NO: 1830864 - RNA, 19 nt, Artificial Sequence
  Description of Artificial Sequence: Synthetic oligonucleotide
  Antisense strand to SEQ ID NO: 1830863
ucuauucuuagaggucugg

SEQ ID NO: 1830865 - RNA, 19 nt, Artificial Sequence
  Description of Artificial Sequence: Synthetic oligonucleotide
  Sense strand starting at position 2731 of SEQ ID NO: 1563774
ggagccauguuuccaggau

SEQ ID NO: 1830866 - RNA, 19 nt, Artificial Sequence
  Description of Artificial Sequence: Synthetic oligonucleotide
  Antisense strand to SEQ ID NO: 1830865
auccuggaaacauggcucc

SEQ ID NO: 1830867 - RNA, 19 nt, Artificial Sequence
  Description of Artificial Sequence: Synthetic oligonucleotide
  Sense strand starting at position 3118 of SEQ ID NO: 1563774
ucuacuuacuuaguugaua

SEQ ID NO: 1830868 - RNA, 19 nt, Artificial Sequence
  Description of Artificial Sequence: Synthetic oligonucleotide
  Antisense strand to SEQ ID NO: 1830867
uaucaacuaaguaaguaga

SEQ ID NO: 1830869 - RNA, 19 nt, Artificial Sequence
  Description of Artificial Sequence: Synthetic oligonucleotide
  Sense strand starting at position 3119 of SEQ ID NO: 1563774
cuacuuacuuaguugauau

SEQ ID NO: 1830870 - RNA, 19 nt, Artificial Sequence
  Description of Artificial Sequence: Synthetic oligonucleotide
  Antisense strand to SEQ ID NO: 1830869
auaucaacuaaguaaguag

SEQ ID NO: 1830871 - RNA, 19 nt, Artificial Sequence
  Description of Artificial Sequence: Synthetic oligonucleotide
  Sense strand starting at position 3146 of SEQ ID NO: 1563774
gaaugucuucugugcaucu

SEQ ID NO: 1830872 - RNA, 19 nt, Artificial Sequence
  Description of Artificial Sequence: Synthetic oligonucleotide
  Antisense strand to SEQ ID NO: 1830871
agaugcacagaagacauuc

SEQ ID NO: 1830873 - RNA, 19 nt, Artificial Sequence
  Description of Artificial Sequence: Synthetic oligonucleotide
  Sense strand starting at position 3332 of SEQ ID NO: 1563774
gggcuuuaccuggauuaca

SEQ ID NO: 1830874 - RNA, 19 nt, Artificial Sequence
  Description of Artificial Sequence: Synthetic oligonucleotide
  Antisense strand to SEQ ID NO: 1830873
uguaauccagguaaagccc

SEQ ID NO: 1830875 - RNA, 19 nt, Artificial Sequence
  Description of Artificial Sequence: Synthetic oligonucleotide
  Sense strand starting at position 3346 of SEQ ID NO: 1563774
uuacaaaucccugggaauu

SEQ ID NO: 1830876 - RNA, 19 nt, Artificial Sequence
  Description of Artificial Sequence: Synthetic oligonucleotide
  Antisense strand to SEQ ID NO: 1830875
aauucccagggauuuguaa

SEQ ID NO: 1830877 - RNA, 19 nt, Artificial Sequence
  Description of Artificial Sequence: Synthetic oligonucleotide
  Sense strand starting at position 3420 of SEQ ID NO: 1563774
agacuaagcucucugucca

SEQ ID NO: 1830878 - RNA, 19 nt, Artificial Sequence
  Description of Artificial Sequence: Synthetic oligonucleotide
  Antisense strand to SEQ ID NO: 1830877
uggacagagagcuuagucu

SEQ ID NO: 1830879 - RNA, 19 nt, Artificial Sequence
  Description of Artificial Sequence: Synthetic oligonucleotide
  Sense strand starting at position 3577 of SEQ ID NO: 1563774
ggcacauauuuguugguau

SEQ ID NO: 1830880 - RNA, 19 nt, Artificial Sequence
  Description of Artificial Sequence: Synthetic oligonucleotide
  Antisense strand to SEQ ID NO: 1830879
auaccaacaaauaugugcc

SEQ ID NO: 1830881 - RNA, 19 nt, Artificial Sequence
  Description of Artificial Sequence: Synthetic oligonucleotide
  Sense strand starting at position 3615 of SEQ ID NO: 1563774
acuauaaaguccuugagcu

SEQ ID NO: 1830882 - RNA, 19 nt, Artificial Sequence
  Description of Artificial Sequence: Synthetic oligonucleotide
  Antisense strand to SEQ ID NO: 1830881
agcucaaggacuuuauagu

SEQ ID NO: 1830883 - RNA, 19 nt, Artificial Sequence
  Description of Artificial Sequence: Synthetic oligonucleotide
  Sense strand starting at position 3616 of SEQ ID NO: 1563774
cuauaaaguccuugagcug

SEQ ID NO: 1830884 - RNA, 19 nt, Artificial Sequence
  Description of Artificial Sequence: Synthetic oligonucleotide
  Antisense strand to SEQ ID NO: 1830883
cagcucaaggacuuuauag

SEQ ID NO: 1830885 - RNA, 19 nt, Artificial Sequence
  Description of Artificial Sequence: Synthetic oligonucleotide
  Sense strand starting at position 3617 of SEQ ID NO: 1563774
uauaaaguccuugagcuga

SEQ ID NO: 1830886 - RNA, 19 nt, Artificial Sequence
  Description of Artificial Sequence: Synthetic oligonucleotide
  Antisense strand to SEQ ID NO: 1830885
ucagcucaaggacuuuaua

SEQ ID NO: 1830887 - RNA, 19 nt, Artificial Sequence
  Description of Artificial Sequence: Synthetic oligonucleotide
  Sense strand starting at position 3698 of SEQ ID NO: 1563774
auaguuauugagcauuaac

SEQ ID NO: 1830888 - RNA, 19 nt, Artificial Sequence
  Description of Artificial Sequence: Synthetic oligonucleotide
  Antisense strand to SEQ ID NO: 1830887
guuaaugcucaauaacuau

SEQ ID NO: 1830889 - RNA, 19 nt, Artificial Sequence
  Description of Artificial Sequence: Synthetic oligonucleotide
  Sense strand starting at position 3701 of SEQ ID NO: 1563774
guuauugagcauuaacuau

SEQ ID NO: 1830890 - RNA, 19 nt, Artificial Sequence
  Description of Artificial Sequence: Synthetic oligonucleotide
  Antisense strand to SEQ ID NO: 1830889
auaguuaaugcucaauaac

SEQ ID NO: 1830891 - RNA, 19 nt, Artificial Sequence
  Description of Artificial Sequence: Synthetic oligonucleotide
  Sense strand starting at position 3719 of SEQ ID NO: 1563774
uguacuaaacucuguugua

SEQ ID NO: 1830892 - RNA, 19 nt, Artificial Sequence
  Description of Artificial Sequence: Synthetic oligonucleotide
  Antisense strand to SEQ ID NO: 1830891
uacaacagaguuuaguaca

SEQ ID NO: 1830893 - RNA, 19 nt, Artificial Sequence
  Description of Artificial Sequence: Synthetic oligonucleotide
  Sense strand starting at position 3720 of SEQ ID NO: 1563774
guacuaaacucuguuguaa

SEQ ID NO: 1830894 - RNA, 19 nt, Artificial Sequence
  Description of Artificial Sequence: Synthetic oligonucleotide
  Antisense strand to SEQ ID NO: 1830893
uuacaacagaguuuaguac

SEQ ID NO: 1830895 - RNA, 19 nt, Artificial Sequence
  Description of Artificial Sequence: Synthetic oligonucleotide
  Sense strand starting at position 3870 of SEQ ID NO: 1563774
aaagaaugucccuguagua

SEQ ID NO: 1830896 - RNA, 19 nt, Artificial Sequence
  Description of Artificial Sequence: Synthetic oligonucleotide
  Antisense strand to SEQ ID NO: 1830895
uacuacagggacauucuuu

SEQ ID NO: 1830897 - RNA, 19 nt, Artificial Sequence
  Description of Artificial Sequence: Synthetic oligonucleotide
  Sense strand starting at position 3948 of SEQ ID NO: 1563774
ccaagcuuacaagguaaga

SEQ ID NO: 1830898 - RNA, 19 nt, Artificial Sequence
  Description of Artificial Sequence: Synthetic oligonucleotide
  Antisense strand to SEQ ID NO: 1830897
ucuuaccuuguaagcuugg

SEQ ID NO: 1830899 - RNA, 19 nt, Artificial Sequence
  Description of Artificial Sequence: Synthetic oligonucleotide
  Sense strand starting at position 3953 of SEQ ID NO: 1563774
cuuacaagguaagauauau

SEQ ID NO: 1830900 - RNA, 19 nt, Artificial Sequence
  Description of Artificial Sequence: Synthetic oligonucleotide
  Antisense strand to SEQ ID NO: 1830899
auauaucuuaccuuguaag

SEQ ID NO: 1830901 - RNA, 19 nt, Artificial Sequence
  Description of Artificial Sequence: Synthetic oligonucleotide
  Sense strand starting at position 3963 of SEQ ID NO: 1563774
aagauauauugagauggaa

SEQ ID NO: 1830902 - RNA, 19 nt, Artificial Sequence
  Description of Artificial Sequence: Synthetic oligonucleotide
  Antisense strand to SEQ ID NO: 1830901
uuccaucucaauauaucuu

SEQ ID NO: 1830903 - RNA, 19 nt, Artificial Sequence
  Description of Artificial Sequence: Synthetic oligonucleotide
  Sense strand starting at position 5 of SEQ ID NO: 1563775
aguaucuacugagauagaa

SEQ ID NO: 1830904 - RNA, 19 nt, Artificial Sequence
  Description of Artificial Sequence: Synthetic oligonucleotide
  Antisense strand to SEQ ID NO: 1830903
uucuaucucaguagauacu

SEQ ID NO: 1830905 - RNA, 19 nt, Artificial Sequence
  Description of Artificial Sequence: Synthetic oligonucleotide
  Sense strand starting at position 30 of SEQ ID NO: 1563775
aucugcauucuauggaaga

SEQ ID NO: 1830906 - RNA, 19 nt, Artificial Sequence
  Description of Artificial Sequence: Synthetic oligonucleotide
  Antisense strand to SEQ ID NO: 1830905
ucuuccauagaaugcagau

SEQ ID NO: 1830907 - RNA, 19 nt, Artificial Sequence
  Description of Artificial Sequence: Synthetic oligonucleotide
  Sense strand starting at position 64 of SEQ ID NO: 1563775
gggugaugcagcuaauaag

SEQ ID NO: 1830908 - RNA, 19 nt, Artificial Sequence
  Description of Artificial Sequence: Synthetic oligonucleotide
  Antisense strand to SEQ ID NO: 1830907
cuuauuagcugcaucaccc

SEQ ID NO: 1830909 - RNA, 19 nt, Artificial Sequence
  Description of Artificial Sequence: Synthetic oligonucleotide
  Sense strand starting at position 187 of SEQ ID NO: 1563775
cugggugacaggugcuuaa

SEQ ID NO: 1830910 - RNA, 19 nt, Artificial Sequence
  Description of Artificial Sequence: Synthetic oligonucleotide
  Antisense strand to SEQ ID NO: 1830909
uuaagcaccugucacccag

SEQ ID NO: 1830911 - RNA, 19 nt, Artificial Sequence
  Description of Artificial Sequence: Synthetic oligonucleotide
  Sense strand starting at position 190 of SEQ ID NO: 1563775
ggugacaggugcuuaauaa

SEQ ID NO: 1830912 - RNA, 19 nt, Artificial Sequence
  Description of Artificial Sequence: Synthetic oligonucleotide
  Antisense strand to SEQ ID NO: 1830911
uuauuaagcaccugucacc

SEQ ID NO: 1830913 - RNA, 19 nt, Artificial Sequence
  Description of Artificial Sequence: Synthetic oligonucleotide
  Sense strand starting at position 191 of SEQ ID NO: 1563775
gugacaggugcuuaauaaa

SEQ ID NO: 1830914 - RNA, 19 nt, Artificial Sequence
  Description of Artificial Sequence: Synthetic oligonucleotide
  Antisense strand to SEQ ID NO: 1830913
uuuauuaagcaccugucac

SEQ ID NO: 1830915 - RNA, 19 nt, Artificial Sequence
  Description of Artificial Sequence: Synthetic oligonucleotide
  Sense strand starting at position 211 of SEQ ID NO: 1563775
gcguuucuucacgaugaau

SEQ ID NO: 1830916 - RNA, 19 nt, Artificial Sequence
  Description of Artificial Sequence: Synthetic oligonucleotide
  Antisense strand to SEQ ID NO: 1830915
auucaucgugaagaaacgc

SEQ ID NO: 1830917 - RNA, 19 nt, Artificial Sequence
  Description of Artificial Sequence: Synthetic oligonucleotide
  Sense strand starting at position 222 of SEQ ID NO: 1563775
cgaugaauauaauaccaaa

SEQ ID NO: 1830918 - RNA, 19 nt, Artificial Sequence
  Description of Artificial Sequence: Synthetic oligonucleotide
  Antisense strand to SEQ ID NO: 1830917
uuugguauuauauucaucg

SEQ ID NO: 1830919 - RNA, 19 nt, Artificial Sequence
  Description of Artificial Sequence: Synthetic oligonucleotide
  Sense strand starting at position 269 of SEQ ID NO: 1563775
cuguuuggaugugauuuau

SEQ ID NO: 1830920 - RNA, 19 nt, Artificial Sequence
  Description of Artificial Sequence: Synthetic oligonucleotide
  Antisense strand to SEQ ID NO: 1830919
auaaaucacauccaaacag

SEQ ID NO: 1830921 - RNA, 19 nt, Artificial Sequence
  Description of Artificial Sequence: Synthetic oligonucleotide
  Sense strand starting at position 615 of SEQ ID NO: 1563775
ucagaagcuucucuaggua

SEQ ID NO: 1830922 - RNA, 19 nt, Artificial Sequence
  Description of Artificial Sequence: Synthetic oligonucleotide
  Antisense strand to SEQ ID NO: 1830921
uaccuagagaagcuucuga

SEQ ID NO: 1830923 - RNA, 19 nt, Artificial Sequence
  Description of Artificial Sequence: Synthetic oligonucleotide
  Sense strand starting at position 662 of SEQ ID NO: 1563775
gagcuuuggccuugugaau

SEQ ID NO: 1830924 - RNA, 19 nt, Artificial Sequence
  Description of Artificial Sequence: Synthetic oligonucleotide
  Antisense strand to SEQ ID NO: 1830923
auucacaaggccaaagcuc

SEQ ID NO: 1830925 - RNA, 19 nt, Artificial Sequence
  Description of Artificial Sequence: Synthetic oligonucleotide
  Sense strand starting at position 674 of SEQ ID NO: 1563775
ugugaauccuguucucucu

SEQ ID NO: 1830926 - RNA, 19 nt, Artificial Sequence
  Description of Artificial Sequence: Synthetic oligonucleotide
  Antisense strand to SEQ ID NO: 1830925
agagagaacaggauucaca

SEQ ID NO: 1830927 - RNA, 19 nt, Artificial Sequence
  Description of Artificial Sequence: Synthetic oligonucleotide
  Sense strand starting at position 726 of SEQ ID NO: 1563775
agacaauccuuaccgcuua

SEQ ID NO: 1830928 - RNA, 19 nt, Artificial Sequence
  Description of Artificial Sequence: Synthetic oligonucleotide
  Antisense strand to SEQ ID NO: 1830927
uaagcgguaaggauugucu

SEQ ID NO: 1830929 - RNA, 19 nt, Artificial Sequence
  Description of Artificial Sequence: Synthetic oligonucleotide
  Sense strand starting at position 902 of SEQ ID NO: 1563775
uccacauaguguucuuaac

SEQ ID NO: 1830930 - RNA, 19 nt, Artificial Sequence
  Description of Artificial Sequence: Synthetic oligonucleotide
  Antisense strand to SEQ ID NO: 1830929
guuaagaacacuaugugga

SEQ ID NO: 1830931 - RNA, 19 nt, Artificial Sequence
  Description of Artificial Sequence: Synthetic oligonucleotide
  Sense strand starting at position 1026 of SEQ ID NO: 1563775
guauuagucccagagucac

SEQ ID NO: 1830932 - RNA, 19 nt, Artificial Sequence
  Description of Artificial Sequence: Synthetic oligonucleotide
  Antisense strand to SEQ ID NO: 1830931
gugacucugggacuaauac

SEQ ID NO: 1830933 - RNA, 19 nt, Artificial Sequence
  Description of Artificial Sequence: Synthetic oligonucleotide
  Sense strand starting at position 2231 of SEQ ID NO: 1563775
accuauuuacuccgguuau

SEQ ID NO: 1830934 - RNA, 19 nt, Artificial Sequence
  Description of Artificial Sequence: Synthetic oligonucleotide
  Antisense strand to SEQ ID NO: 1830933
auaaccggaguaaauaggu

SEQ ID NO: 1830935 - RNA, 19 nt, Artificial Sequence
  Description of Artificial Sequence: Synthetic oligonucleotide
  Sense strand starting at position 2243 of SEQ ID NO: 1563775
cgguuaugcuaauucucca

SEQ ID NO: 1830936 - RNA, 19 nt, Artificial Sequence
  Description of Artificial Sequence: Synthetic oligonucleotide
  Antisense strand to SEQ ID NO: 1830935
uggagaauuagcauaaccg

SEQ ID NO: 1830937 - RNA, 19 nt, Artificial Sequence
  Description of Artificial Sequence: Synthetic oligonucleotide
  Sense strand starting at position 2401 of SEQ ID NO: 1563775
cacagugucuucucaggga

SEQ ID NO: 1830938 - RNA, 19 nt, Artificial Sequence
  Description of Artificial Sequence: Synthetic oligonucleotide
  Antisense strand to SEQ ID NO: 1830937
ucccugagaagacacugug

SEQ ID NO: 1830939 - RNA, 19 nt, Artificial Sequence
  Description of Artificial Sequence: Synthetic oligonucleotide
  Sense strand starting at position 2405 of SEQ ID NO: 1563775
gugucuucucagggaggaa

SEQ ID NO: 1830940 - RNA, 19 nt, Artificial Sequence
  Description of Artificial Sequence: Synthetic oligonucleotide
  Antisense strand to SEQ ID NO: 1830939
uuccucccugagaagacac

SEQ ID NO: 1830941 - RNA, 19 nt, Artificial Sequence
  Description of Artificial Sequence: Synthetic oligonucleotide
  Sense strand starting at position 2517 of SEQ ID NO: 1563775
aguugaagaugaucuguga

SEQ ID NO: 1830942 - RNA, 19 nt, Artificial Sequence
  Description of Artificial Sequence: Synthetic oligonucleotide
  Antisense strand to SEQ ID NO: 1830941
ucacagaucaucuucaacu

SEQ ID NO: 1830943 - RNA, 19 nt, Artificial Sequence
  Description of Artificial Sequence: Synthetic oligonucleotide
  Sense strand starting at position 2591 of SEQ ID NO: 1563775
ccagaccucuaagaauaga

SEQ ID NO: 1830944 - RNA, 19 nt, Artificial Sequence
  Description of Artificial Sequence: Synthetic oligonucleotide
  Antisense strand to SEQ ID NO: 1830943
ucuauucuuagaggucugg

SEQ ID NO: 1830945 - RNA, 19 nt, Artificial Sequence
  Description of Artificial Sequence: Synthetic oligonucleotide
  Sense strand starting at position 2683 of SEQ ID NO: 1563775
ggagccauguuuccaggau

SEQ ID NO: 1830946 - RNA, 19 nt, Artificial Sequence
  Description of Artificial Sequence: Synthetic oligonucleotide
  Antisense strand to SEQ ID NO: 1830945
auccuggaaacauggcucc

SEQ ID NO: 1830947 - RNA, 19 nt, Artificial Sequence
  Description of Artificial Sequence: Synthetic oligonucleotide
  Sense strand starting at position 3070 of SEQ ID NO: 1563775
ucuacuuacuuaguugaua

SEQ ID NO: 1830948 - RNA, 19 nt, Artificial Sequence
  Description of Artificial Sequence: Synthetic oligonucleotide
  Antisense strand to SEQ ID NO: 1830947
uaucaacuaaguaaguaga

SEQ ID NO: 1830949 - RNA, 19 nt, Artificial Sequence
  Description of Artificial Sequence: Synthetic oligonucleotide
  Sense strand starting at position 3071 of SEQ ID NO: 1563775
cuacuuacuuaguugauau

SEQ ID NO: 1830950 - RNA, 19 nt, Artificial Sequence
  Description of Artificial Sequence: Synthetic oligonucleotide
  Antisense strand to SEQ ID NO: 1830949
auaucaacuaaguaaguag

SEQ ID NO: 1830951 - RNA, 19 nt, Artificial Sequence
  Description of Artificial Sequence: Synthetic oligonucleotide
  Sense strand starting at position 3284 of SEQ ID NO: 1563775
gggcuuuaccuggauuaca

SEQ ID NO: 1830952 - RNA, 19 nt, Artificial Sequence
  Description of Artificial Sequence: Synthetic oligonucleotide
  Antisense strand to SEQ ID NO: 1830951
uguaauccagguaaagccc

SEQ ID NO: 1830953 - RNA, 19 nt, Artificial Sequence
  Description of Artificial Sequence: Synthetic oligonucleotide
  Sense strand starting at position 3298 of SEQ ID NO: 1563775
uuacaaaucccugggaauu

SEQ ID NO: 1830954 - RNA, 19 nt, Artificial Sequence
  Description of Artificial Sequence: Synthetic oligonucleotide
  Antisense strand to SEQ ID NO: 1830953
aauucccagggauuuguaa

SEQ ID NO: 1830955 - RNA, 19 nt, Artificial Sequence
  Description of Artificial Sequence: Synthetic oligonucleotide
  Sense strand starting at position 3372 of SEQ ID NO: 1563775
agacuaagcucucugucca

SEQ ID NO: 1830956 - RNA, 19 nt, Artificial Sequence
  Description of Artificial Sequence: Synthetic oligonucleotide
  Antisense strand to SEQ ID NO: 1830955
uggacagagagcuuagucu

SEQ ID NO: 1830957 - RNA, 19 nt, Artificial Sequence
  Description of Artificial Sequence: Synthetic oligonucleotide
  Sense strand starting at position 3529 of SEQ ID NO: 1563775
ggcacauauuuguugguau

SEQ ID NO: 1830958 - RNA, 19 nt, Artificial Sequence
  Description of Artificial Sequence: Synthetic oligonucleotide
  Antisense strand to SEQ ID NO: 1830957
auaccaacaaauaugugcc

SEQ ID NO: 1830959 - RNA, 19 nt, Artificial Sequence
  Description of Artificial Sequence: Synthetic oligonucleotide
  Sense strand starting at position 3567 of SEQ ID NO: 1563775
acuauaaaguccuugagcu

SEQ ID NO: 1830960 - RNA, 19 nt, Artificial Sequence
  Description of Artificial Sequence: Synthetic oligonucleotide
  Antisense strand to SEQ ID NO: 1830959
agcucaaggacuuuauagu

SEQ ID NO: 1830961 - RNA, 19 nt, Artificial Sequence
  Description of Artificial Sequence: Synthetic oligonucleotide
  Sense strand starting at position 3568 of SEQ ID NO: 1563775
cuauaaaguccuugagcug

SEQ ID NO: 1830962 - RNA, 19 nt, Artificial Sequence
  Description of Artificial Sequence: Synthetic oligonucleotide
  Antisense strand to SEQ ID NO: 1830961
cagcucaaggacuuuauag

SEQ ID NO: 1830963 - RNA, 19 nt, Artificial Sequence
  Description of Artificial Sequence: Synthetic oligonucleotide
  Sense strand starting at position 3569 of SEQ ID NO: 1563775
uauaaaguccuugagcuga

SEQ ID NO: 1830964 - RNA, 19 nt, Artificial Sequence
  Description of Artificial Sequence: Synthetic oligonucleotide
  Antisense strand to SEQ ID NO: 1830963
ucagcucaaggacuuuaua

SEQ ID NO: 1830965 - RNA, 19 nt, Artificial Sequence
  Description of Artificial Sequence: Synthetic oligonucleotide
  Sense strand starting at position 3650 of SEQ ID NO: 1563775
auaguuauugagcauuaac

SEQ ID NO: 1830966 - RNA, 19 nt, Artificial Sequence
  Description of Artificial Sequence: Synthetic oligonucleotide
  Antisense strand to SEQ ID NO: 1830965
guuaaugcucaauaacuau

SEQ ID NO: 1830967 - RNA, 19 nt, Artificial Sequence
  Description of Artificial Sequence: Synthetic oligonucleotide
  Sense strand starting at position 3653 of SEQ ID NO: 1563775
guuauugagcauuaacuau

SEQ ID NO: 1830968 - RNA, 19 nt, Artificial Sequence
  Description of Artificial Sequence: Synthetic oligonucleotide
  Antisense strand to SEQ ID NO: 1830967
auaguuaaugcucaauaac

SEQ ID NO: 1830969 - RNA, 19 nt, Artificial Sequence
  Description of Artificial Sequence: Synthetic oligonucleotide
  Sense strand starting at position 3671 of SEQ ID NO: 1563775
uguacuaaacucuguugua

SEQ ID NO: 1830970 - RNA, 19 nt, Artificial Sequence
  Description of Artificial Sequence: Synthetic oligonucleotide
  Antisense strand to SEQ ID NO: 1830969
uacaacagaguuuaguaca

SEQ ID NO: 1830971 - RNA, 19 nt, Artificial Sequence
  Description of Artificial Sequence: Synthetic oligonucleotide
  Sense strand starting at position 3672 of SEQ ID NO: 1563775
guacuaaacucuguuguaa

SEQ ID NO: 1830972 - RNA, 19 nt, Artificial Sequence
  Description of Artificial Sequence: Synthetic oligonucleotide
  Antisense strand to SEQ ID NO: 1830971
uuacaacagaguuuaguac

SEQ ID NO: 1830973 - RNA, 19 nt, Artificial Sequence
  Description of Artificial Sequence: Synthetic oligonucleotide
  Sense strand starting at position 3822 of SEQ ID NO: 1563775
aaagaaugucccuguagua

SEQ ID NO: 1830974 - RNA, 19 nt, Artificial Sequence
  Description of Artificial Sequence: Synthetic oligonucleotide
  Antisense strand to SEQ ID NO: 1830973
uacuacagggacauucuuu

SEQ ID NO: 1830975 - RNA, 19 nt, Artificial Sequence
  Description of Artificial Sequence: Synthetic oligonucleotide
  Sense strand starting at position 3900 of SEQ ID NO: 1563775
ccaagcuuacaagguaaga

SEQ ID NO: 1830976 - RNA, 19 nt, Artificial Sequence
  Description of Artificial Sequence: Synthetic oligonucleotide
  Antisense strand to SEQ ID NO: 1830975
ucuuaccuuguaagcuugg

SEQ ID NO: 1830977 - RNA, 19 nt, Artificial Sequence
  Description of Artificial Sequence: Synthetic oligonucleotide
  Sense strand starting at position 3905 of SEQ ID NO: 1563775
cuuacaagguaagauauau

SEQ ID NO: 1830978 - RNA, 19 nt, Artificial Sequence
  Description of Artificial Sequence: Synthetic oligonucleotide
  Antisense strand to SEQ ID NO: 1830977
auauaucuuaccuuguaag

SEQ ID NO: 1830979 - RNA, 19 nt, Artificial Sequence
  Description of Artificial Sequence: Synthetic oligonucleotide
  Sense strand starting at position 3915 of SEQ ID NO: 1563775
aagauauauugagauggaa

SEQ ID NO: 1830980 - RNA, 19 nt, Artificial Sequence
  Description of Artificial Sequence: Synthetic oligonucleotide
  Antisense strand to SEQ ID NO: 1830979
uuccaucucaauauaucuu

SEQ ID NO: 1830981 - RNA, 19 nt, Artificial Sequence
  Description of Artificial Sequence: Synthetic oligonucleotide
  Sense strand starting at position 3981 of SEQ ID NO: 1563775
acuuuauuccuuggaggcu

SEQ ID NO: 1830982 - RNA, 19 nt, Artificial Sequence
  Description of Artificial Sequence: Synthetic oligonucleotide
  Antisense strand to SEQ ID NO: 1830981
agccuccaaggaauaaagu

SEQ ID NO: 1830983 - RNA, 19 nt, Artificial Sequence
  Description of Artificial Sequence: Synthetic oligonucleotide
  Sense strand starting at position 57 of SEQ ID NO: 1563776
cuggacauacccugaaguu

SEQ ID NO: 1830984 - RNA, 19 nt, Artificial Sequence
  Description of Artificial Sequence: Synthetic oligonucleotide
  Antisense strand to SEQ ID NO: 1830983
aacuucaggguauguccag

SEQ ID NO: 1830985 - RNA, 19 nt, Artificial Sequence
  Description of Artificial Sequence: Synthetic oligonucleotide
  Sense strand starting at position 345 of SEQ ID NO: 1563776
uuuagaagcuuucuuaaug

SEQ ID NO: 1830986 - RNA, 19 nt, Artificial Sequence
  Description of Artificial Sequence: Synthetic oligonucleotide
  Antisense strand to SEQ ID NO: 1830985
cauuaagaaagcuucuaaa

SEQ ID NO: 1830987 - RNA, 19 nt, Artificial Sequence
  Description of Artificial Sequence: Synthetic oligonucleotide
  Sense strand starting at position 388 of SEQ ID NO: 1563776
gggcauuaagcauaacaau

SEQ ID NO: 1830988 - RNA, 19 nt, Artificial Sequence
  Description of Artificial Sequence: Synthetic oligonucleotide
  Antisense strand to SEQ ID NO: 1830987
auuguuaugcuuaaugccc

SEQ ID NO: 1830989 - RNA, 19 nt, Artificial Sequence
  Description of Artificial Sequence: Synthetic oligonucleotide
  Sense strand starting at position 791 of SEQ ID NO: 1563776
cugguacugccucaggaau

SEQ ID NO: 1830990 - RNA, 19 nt, Artificial Sequence
  Description of Artificial Sequence: Synthetic oligonucleotide
  Antisense strand to SEQ ID NO: 1830989
auuccugaggcaguaccag

SEQ ID NO: 1830991 - RNA, 19 nt, Artificial Sequence
  Description of Artificial Sequence: Synthetic oligonucleotide
  Sense strand starting at position 898 of SEQ ID NO: 1563776
aauguuugaugagcucuaa

SEQ ID NO: 1830992 - RNA, 19 nt, Artificial Sequence
  Description of Artificial Sequence: Synthetic oligonucleotide
  Antisense strand to SEQ ID NO: 1830991
uuagagcucaucaaacauu

SEQ ID NO: 1830993 - RNA, 19 nt, Artificial Sequence
  Description of Artificial Sequence: Synthetic oligonucleotide
  Sense strand starting at position 902 of SEQ ID NO: 1563776
uuugaugagcucuaauaua

SEQ ID NO: 1830994 - RNA, 19 nt, Artificial Sequence
  Description of Artificial Sequence: Synthetic oligonucleotide
  Antisense strand to SEQ ID NO: 1830993
uauauuagagcucaucaaa

SEQ ID NO: 1830995 - RNA, 19 nt, Artificial Sequence
  Description of Artificial Sequence: Synthetic oligonucleotide
  Sense strand starting at position 954 of SEQ ID NO: 1563776
uuguuaucagcauauagaa

SEQ ID NO: 1830996 - RNA, 19 nt, Artificial Sequence
  Description of Artificial Sequence: Synthetic oligonucleotide
  Antisense strand to SEQ ID NO: 1830995
uucuauaugcugauaacaa

SEQ ID NO: 1830997 - RNA, 19 nt, Artificial Sequence
  Description of Artificial Sequence: Synthetic oligonucleotide
  Sense strand starting at position 970 of SEQ ID NO: 1563776
gaaaguaagcauuagccuu

SEQ ID NO: 1830998 - RNA, 19 nt, Artificial Sequence
  Description of Artificial Sequence: Synthetic oligonucleotide
  Antisense strand to SEQ ID NO: 1830997
aaggcuaaugcuuacuuuc

SEQ ID NO: 1830999 - RNA, 19 nt, Artificial Sequence
  Description of Artificial Sequence: Synthetic oligonucleotide
  Sense strand starting at position 1228 of SEQ ID NO: 1563776
acaguacuauuugaaagua

SEQ ID NO: 1831000 - RNA, 19 nt, Artificial Sequence
  Description of Artificial Sequence: Synthetic oligonucleotide
  Antisense strand to SEQ ID NO: 1830999
uacuuucaaauaguacugu

SEQ ID NO: 1831001 - RNA, 19 nt, Artificial Sequence
  Description of Artificial Sequence: Synthetic oligonucleotide
  Sense strand starting at position 1295 of SEQ ID NO: 1563776
gcuauaauaggucaaauuc

SEQ ID NO: 1831002 - RNA, 19 nt, Artificial Sequence
  Description of Artificial Sequence: Synthetic oligonucleotide
  Antisense strand to SEQ ID NO: 1831001
gaauuugaccuauuauagc

SEQ ID NO: 1831003 - RNA, 19 nt, Artificial Sequence
  Description of Artificial Sequence: Synthetic oligonucleotide
  Sense strand starting at position 1475 of SEQ ID NO: 1563776
ucuggcaacugagugaaau

SEQ ID NO: 1831004 - RNA, 19 nt, Artificial Sequence
  Description of Artificial Sequence: Synthetic oligonucleotide
  Antisense strand to SEQ ID NO: 1831003
auuucacucaguugccaga

SEQ ID NO: 1831005 - RNA, 19 nt, Artificial Sequence
  Description of Artificial Sequence: Synthetic oligonucleotide
  Sense strand starting at position 1476 of SEQ ID NO: 1563776
cuggcaacugagugaaauu

SEQ ID NO: 1831006 - RNA, 19 nt, Artificial Sequence
  Description of Artificial Sequence: Synthetic oligonucleotide
  Antisense strand to SEQ ID NO: 1831005
aauuucacucaguugccag

SEQ ID NO: 1831007 - RNA, 19 nt, Artificial Sequence
  Description of Artificial Sequence: Synthetic oligonucleotide
  Sense strand starting at position 1859 of SEQ ID NO: 1563776
ucucaucauuugucauguu

SEQ ID NO: 1831008 - RNA, 19 nt, Artificial Sequence
  Description of Artificial Sequence: Synthetic oligonucleotide
  Antisense strand to SEQ ID NO: 1831007
aacaugacaaaugaugaga

SEQ ID NO: 1831009 - RNA, 19 nt, Artificial Sequence
  Description of Artificial Sequence: Synthetic oligonucleotide
  Sense strand starting at position 1894 of SEQ ID NO: 1563776
ucaucaaauucucuggagu

SEQ ID NO: 1831010 - RNA, 19 nt, Artificial Sequence
  Description of Artificial Sequence: Synthetic oligonucleotide
  Antisense strand to SEQ ID NO: 1831009
acuccagagaauuugauga

SEQ ID NO: 1831011 - RNA, 19 nt, Artificial Sequence
  Description of Artificial Sequence: Synthetic oligonucleotide
  Sense strand starting at position 2080 of SEQ ID NO: 1563776
ggaaauuguagucagugua

SEQ ID NO: 1831012 - RNA, 19 nt, Artificial Sequence
  Description of Artificial Sequence: Synthetic oligonucleotide
  Antisense strand to SEQ ID NO: 1831011
uacacugacuacaauuucc

SEQ ID NO: 1831013 - RNA, 19 nt, Artificial Sequence
  Description of Artificial Sequence: Synthetic oligonucleotide
  Sense strand starting at position 2125 of SEQ ID NO: 1563776
aacugcuggccagauauga

SEQ ID NO: 1831014 - RNA, 19 nt, Artificial Sequence
  Description of Artificial Sequence: Synthetic oligonucleotide
  Antisense strand to SEQ ID NO: 1831013
ucauaucuggccagcaguu

SEQ ID NO: 1831015 - RNA, 19 nt, Artificial Sequence
  Description of Artificial Sequence: Synthetic oligonucleotide
  Sense strand starting at position 2203 of SEQ ID NO: 1563776
ucaucuuuggagcaaaggu

SEQ ID NO: 1831016 - RNA, 19 nt, Artificial Sequence
  Description of Artificial Sequence: Synthetic oligonucleotide
  Antisense strand to SEQ ID NO: 1831015
accuuugcuccaaagauga

SEQ ID NO: 1831017 - RNA, 19 nt, Artificial Sequence
  Description of Artificial Sequence: Synthetic oligonucleotide
  Sense strand starting at position 2269 of SEQ ID NO: 1563776
acaugcuuaccugaaagua

SEQ ID NO: 1831018 - RNA, 19 nt, Artificial Sequence
  Description of Artificial Sequence: Synthetic oligonucleotide
  Antisense strand to SEQ ID NO: 1831017
uacuuucagguaagcaugu

SEQ ID NO: 1831019 - RNA, 19 nt, Artificial Sequence
  Description of Artificial Sequence: Synthetic oligonucleotide
  Sense strand starting at position 2312 of SEQ ID NO: 1563776
uccugcuauuuguuguauu

SEQ ID NO: 1831020 - RNA, 19 nt, Artificial Sequence
  Description of Artificial Sequence: Synthetic oligonucleotide
  Antisense strand to SEQ ID NO: 1831019
aauacaacaaauagcagga

SEQ ID NO: 1831021 - RNA, 19 nt, Artificial Sequence
  Description of Artificial Sequence: Synthetic oligonucleotide
  Sense strand starting at position 2608 of SEQ ID NO: 1563776
uauugaauuggcuacaugu

SEQ ID NO: 1831022 - RNA, 19 nt, Artificial Sequence
  Description of Artificial Sequence: Synthetic oligonucleotide
  Antisense strand to SEQ ID NO: 1831021
acauguagccaauucaaua

SEQ ID NO: 1831023 - RNA, 19 nt, Artificial Sequence
  Description of Artificial Sequence: Synthetic oligonucleotide
  Sense strand starting at position 2610 of SEQ ID NO: 1563776
uugaauuggcuacauguua

SEQ ID NO: 1831024 - RNA, 19 nt, Artificial Sequence
  Description of Artificial Sequence: Synthetic oligonucleotide
  Antisense strand to SEQ ID NO: 1831023
uaacauguagccaauucaa

SEQ ID NO: 1831025 - RNA, 19 nt, Artificial Sequence
  Description of Artificial Sequence: Synthetic oligonucleotide
  Sense strand starting at position 2706 of SEQ ID NO: 1563776
gagggaagcaggcauguau

SEQ ID NO: 1831026 - RNA, 19 nt, Artificial Sequence
  Description of Artificial Sequence: Synthetic oligonucleotide
  Antisense strand to SEQ ID NO: 1831025
auacaugccugcuucccuc

SEQ ID NO: 1831027 - RNA, 19 nt, Artificial Sequence
  Description of Artificial Sequence: Synthetic oligonucleotide
  Sense strand starting at position 2758 of SEQ ID NO: 1563776
guaauauaagccuagcauu

SEQ ID NO: 1831028 - RNA, 19 nt, Artificial Sequence
  Description of Artificial Sequence: Synthetic oligonucleotide
  Antisense strand to SEQ ID NO: 1831027
aaugcuaggcuuauauuac

SEQ ID NO: 1831029 - RNA, 19 nt, Artificial Sequence
  Description of Artificial Sequence: Synthetic oligonucleotide
  Sense strand starting at position 2853 of SEQ ID NO: 1563776
gaagaaauagccugugcaa

SEQ ID NO: 1831030 - RNA, 19 nt, Artificial Sequence
  Description of Artificial Sequence: Synthetic oligonucleotide
  Antisense strand to SEQ ID NO: 1831029
uugcacaggcuauuucuuc

SEQ ID NO: 1831031 - RNA, 19 nt, Artificial Sequence
  Description of Artificial Sequence: Synthetic oligonucleotide
  Sense strand starting at position 2855 of SEQ ID NO: 1563776
agaaauagccugugcaaag

SEQ ID NO: 1831032 - RNA, 19 nt, Artificial Sequence
  Description of Artificial Sequence: Synthetic oligonucleotide
  Antisense strand to SEQ ID NO: 1831031
cuuugcacaggcuauuucu

SEQ ID NO: 1831033 - RNA, 19 nt, Artificial Sequence
  Description of Artificial Sequence: Synthetic oligonucleotide
  Sense strand starting at position 2856 of SEQ ID NO: 1563776
gaaauagccugugcaaaga

SEQ ID NO: 1831034 - RNA, 19 nt, Artificial Sequence
  Description of Artificial Sequence: Synthetic oligonucleotide
  Antisense strand to SEQ ID NO: 1831033
ucuuugcacaggcuauuuc

SEQ ID NO: 1831035 - RNA, 19 nt, Artificial Sequence
  Description of Artificial Sequence: Synthetic oligonucleotide
  Sense strand starting at position 2895 of SEQ ID NO: 1563776
caacauguugcagggauca

SEQ ID NO: 1831036 - RNA, 19 nt, Artificial Sequence
  Description of Artificial Sequence: Synthetic oligonucleotide
  Antisense strand to SEQ ID NO: 1831035
ugaucccugcaacauguug

SEQ ID NO: 1831037 - RNA, 19 nt, Artificial Sequence
  Description of Artificial Sequence: Synthetic oligonucleotide
  Sense strand starting at position 2963 of SEQ ID NO: 1563776
guacauaguguugagugga

SEQ ID NO: 1831038 - RNA, 19 nt, Artificial Sequence
  Description of Artificial Sequence: Synthetic oligonucleotide
  Antisense strand to SEQ ID NO: 1831037
uccacucaacacuauguac

SEQ ID NO: 1831039 - RNA, 19 nt, Artificial Sequence
  Description of Artificial Sequence: Synthetic oligonucleotide
  Sense strand starting at position 2968 of SEQ ID NO: 1563776
uaguguugaguggaguaga

SEQ ID NO: 1831040 - RNA, 19 nt, Artificial Sequence
  Description of Artificial Sequence: Synthetic oligonucleotide
  Antisense strand to SEQ ID NO: 1831039
ucuacuccacucaacacua

SEQ ID NO: 1831041 - RNA, 19 nt, Artificial Sequence
  Description of Artificial Sequence: Synthetic oligonucleotide
  Sense strand starting at position 3050 of SEQ ID NO: 1563776
uauccugugggcuaugaga

SEQ ID NO: 1831042 - RNA, 19 nt, Artificial Sequence
  Description of Artificial Sequence: Synthetic oligonucleotide
  Antisense strand to SEQ ID NO: 1831041
ucucauagcccacaggaua

SEQ ID NO: 1831043 - RNA, 19 nt, Artificial Sequence
  Description of Artificial Sequence: Synthetic oligonucleotide
  Sense strand starting at position 3052 of SEQ ID NO: 1563776
uccugugggcuaugagaaa

SEQ ID NO: 1831044 - RNA, 19 nt, Artificial Sequence
  Description of Artificial Sequence: Synthetic oligonucleotide
  Antisense strand to SEQ ID NO: 1831043
uuucucauagcccacagga

SEQ ID NO: 1831045 - RNA, 19 nt, Artificial Sequence
  Description of Artificial Sequence: Synthetic oligonucleotide
  Sense strand starting at position 3161 of SEQ ID NO: 1563776
uccaguuuacuguaguaaa

SEQ ID NO: 1831046 - RNA, 19 nt, Artificial Sequence
  Description of Artificial Sequence: Synthetic oligonucleotide
  Antisense strand to SEQ ID NO: 1831045
uuuacuacaguaaacugga

SEQ ID NO: 1831047 - RNA, 19 nt, Artificial Sequence
  Description of Artificial Sequence: Synthetic oligonucleotide
  Sense strand starting at position 3323 of SEQ ID NO: 1563776
ccauuugcuucugugauau

SEQ ID NO: 1831048 - RNA, 19 nt, Artificial Sequence
  Description of Artificial Sequence: Synthetic oligonucleotide
  Antisense strand to SEQ ID NO: 1831047
auaucacagaagcaaaugg

SEQ ID NO: 1831049 - RNA, 19 nt, Artificial Sequence
  Description of Artificial Sequence: Synthetic oligonucleotide
  Sense strand starting at position 3504 of SEQ ID NO: 1563776
aggucagagccucagagua

SEQ ID NO: 1831050 - RNA, 19 nt, Artificial Sequence
  Description of Artificial Sequence: Synthetic oligonucleotide
  Antisense strand to SEQ ID NO: 1831049
uacucugaggcucugaccu

SEQ ID NO: 1831051 - RNA, 19 nt, Artificial Sequence
  Description of Artificial Sequence: Synthetic oligonucleotide
  Sense strand starting at position 3509 of SEQ ID NO: 1563776
agagccucagaguaaguaa

SEQ ID NO: 1831052 - RNA, 19 nt, Artificial Sequence
  Description of Artificial Sequence: Synthetic oligonucleotide
  Antisense strand to SEQ ID NO: 1831051
uuacuuacucugaggcucu

SEQ ID NO: 1831053 - RNA, 19 nt, Artificial Sequence
  Description of Artificial Sequence: Synthetic oligonucleotide
  Sense strand starting at position 3631 of SEQ ID NO: 1563776
gagagauggaccuguguug

SEQ ID NO: 1831054 - RNA, 19 nt, Artificial Sequence
  Description of Artificial Sequence: Synthetic oligonucleotide
  Antisense strand to SEQ ID NO: 1831053
caacacagguccaucucuc

SEQ ID NO: 1831055 - RNA, 19 nt, Artificial Sequence
  Description of Artificial Sequence: Synthetic oligonucleotide
  Sense strand starting at position 3788 of SEQ ID NO: 1563776
gcuguaaguggagagaaau

SEQ ID NO: 1831056 - RNA, 19 nt, Artificial Sequence
  Description of Artificial Sequence: Synthetic oligonucleotide
  Antisense strand to SEQ ID NO: 1831055
auuucucuccacuuacagc

SEQ ID NO: 1831057 - RNA, 19 nt, Artificial Sequence
  Description of Artificial Sequence: Synthetic oligonucleotide
  Sense strand starting at position 3896 of SEQ ID NO: 1563776
aagagaugagugggugagu

SEQ ID NO: 1831058 - RNA, 19 nt, Artificial Sequence
  Description of Artificial Sequence: Synthetic oligonucleotide
  Antisense strand to SEQ ID NO: 1831057
acucacccacucaucucuu

SEQ ID NO: 1831059 - RNA, 19 nt, Artificial Sequence
  Description of Artificial Sequence: Synthetic oligonucleotide
  Sense strand starting at position 3899 of SEQ ID NO: 1563776
agaugagugggugagugua

SEQ ID NO: 1831060 - RNA, 19 nt, Artificial Sequence
  Description of Artificial Sequence: Synthetic oligonucleotide
  Antisense strand to SEQ ID NO: 1831059
uacacucacccacucaucu

SEQ ID NO: 1831061 - RNA, 19 nt, Artificial Sequence
  Description of Artificial Sequence: Synthetic oligonucleotide
  Sense strand starting at position 3957 of SEQ ID NO: 1563776
gcuuuaauaggaggaaauc

SEQ ID NO: 1831062 - RNA, 19 nt, Artificial Sequence
  Description of Artificial Sequence: Synthetic oligonucleotide
  Antisense strand to SEQ ID NO: 1831061
gauuuccuccuauuaaagc

SEQ ID NO: 1831063 - RNA, 19 nt, Artificial Sequence
  Description of Artificial Sequence: Synthetic oligonucleotide
  Sense strand starting at position 671 of SEQ ID NO: 1563777
uuugcaauuccuuagguau

SEQ ID NO: 1831064 - RNA, 19 nt, Artificial Sequence
  Description of Artificial Sequence: Synthetic oligonucleotide
  Antisense strand to SEQ ID NO: 1831063
auaccuaaggaauugcaaa

SEQ ID NO: 1831065 - RNA, 19 nt, Artificial Sequence
  Description of Artificial Sequence: Synthetic oligonucleotide
  Sense strand starting at position 702 of SEQ ID NO: 1563777
ucacacugguaauuagauu

SEQ ID NO: 1831066 - RNA, 19 nt, Artificial Sequence
  Description of Artificial Sequence: Synthetic oligonucleotide
  Antisense strand to SEQ ID NO: 1831065
aaucuaauuaccaguguga

SEQ ID NO: 1831067 - RNA, 19 nt, Artificial Sequence
  Description of Artificial Sequence: Synthetic oligonucleotide
  Sense strand starting at position 801 of SEQ ID NO: 1563777
guaagcaagcuugagguuu

SEQ ID NO: 1831068 - RNA, 19 nt, Artificial Sequence
  Description of Artificial Sequence: Synthetic oligonucleotide
  Antisense strand to SEQ ID NO: 1831067
aaaccucaagcuugcuuac

SEQ ID NO: 1831069 - RNA, 19 nt, Artificial Sequence
  Description of Artificial Sequence: Synthetic oligonucleotide
  Sense strand starting at position 951 of SEQ ID NO: 1563777
uggaguugaccuggauguu

SEQ ID NO: 1831070 - RNA, 19 nt, Artificial Sequence
  Description of Artificial Sequence: Synthetic oligonucleotide
  Antisense strand to SEQ ID NO: 1831069
aacauccaggucaacucca

SEQ ID NO: 1831071 - RNA, 19 nt, Artificial Sequence
  Description of Artificial Sequence: Synthetic oligonucleotide
  Sense strand starting at position 952 of SEQ ID NO: 1563777
ggaguugaccuggauguuu

SEQ ID NO: 1831072 - RNA, 19 nt, Artificial Sequence
  Description of Artificial Sequence: Synthetic oligonucleotide
  Antisense strand to SEQ ID NO: 1831071
aaacauccaggucaacucc

SEQ ID NO: 1831073 - RNA, 19 nt, Artificial Sequence
  Description of Artificial Sequence: Synthetic oligonucleotide
  Sense strand starting at position 1059 of SEQ ID NO: 1563777
uaaagagcguuuccauaac

SEQ ID NO: 1831074 - RNA, 19 nt, Artificial Sequence
  Description of Artificial Sequence: Synthetic oligonucleotide
  Antisense strand to SEQ ID NO: 1831073
guuauggaaacgcucuuua

SEQ ID NO: 1831075 - RNA, 19 nt, Artificial Sequence
  Description of Artificial Sequence: Synthetic oligonucleotide
  Sense strand starting at position 1282 of SEQ ID NO: 1563777
cguugacugcaguauauuu

SEQ ID NO: 1831076 - RNA, 19 nt, Artificial Sequence
  Description of Artificial Sequence: Synthetic oligonucleotide
  Antisense strand to SEQ ID NO: 1831075
aaauauacugcagucaacg

SEQ ID NO: 1831077 - RNA, 19 nt, Artificial Sequence
  Description of Artificial Sequence: Synthetic oligonucleotide
  Sense strand starting at position 1392 of SEQ ID NO: 1563777
cuaccuuaacagggauacu

SEQ ID NO: 1831078 - RNA, 19 nt, Artificial Sequence
  Description of Artificial Sequence: Synthetic oligonucleotide
  Antisense strand to SEQ ID NO: 1831077
aguaucccuguuaagguag

SEQ ID NO: 1831079 - RNA, 19 nt, Artificial Sequence
  Description of Artificial Sequence: Synthetic oligonucleotide
  Sense strand starting at position 1419 of SEQ ID NO: 1563777
guacuauauucugcaccua

SEQ ID NO: 1831080 - RNA, 19 nt, Artificial Sequence
  Description of Artificial Sequence: Synthetic oligonucleotide
  Antisense strand to SEQ ID NO: 1831079
uaggugcagaauauaguac

SEQ ID NO: 1831081 - RNA, 19 nt, Artificial Sequence
  Description of Artificial Sequence: Synthetic oligonucleotide
  Sense strand starting at position 1597 of SEQ ID NO: 1563777
uuaggcuaccgcuaauaga

SEQ ID NO: 1831082 - RNA, 19 nt, Artificial Sequence
  Description of Artificial Sequence: Synthetic oligonucleotide
  Antisense strand to SEQ ID NO: 1831081
ucuauuagcgguagccuaa

SEQ ID NO: 1831083 - RNA, 19 nt, Artificial Sequence
  Description of Artificial Sequence: Synthetic oligonucleotide
  Sense strand starting at position 1604 of SEQ ID NO: 1563777
accgcuaauagagaucagu

SEQ ID NO: 1831084 - RNA, 19 nt, Artificial Sequence
  Description of Artificial Sequence: Synthetic oligonucleotide
  Antisense strand to SEQ ID NO: 1831083
acugaucucuauuagcggu

SEQ ID NO: 1831085 - RNA, 19 nt, Artificial Sequence
  Description of Artificial Sequence: Synthetic oligonucleotide
  Sense strand starting at position 1722 of SEQ ID NO: 1563777
cugcuuuccagcuaggaga

SEQ ID NO: 1831086 - RNA, 19 nt, Artificial Sequence
  Description of Artificial Sequence: Synthetic oligonucleotide
  Antisense strand to SEQ ID NO: 1831085
ucuccuagcuggaaagcag

SEQ ID NO: 1831087 - RNA, 19 nt, Artificial Sequence
  Description of Artificial Sequence: Synthetic oligonucleotide
  Sense strand starting at position 1956 of SEQ ID NO: 1563777
ggacgcuaucaacaaucua

SEQ ID NO: 1831088 - RNA, 19 nt, Artificial Sequence
  Description of Artificial Sequence: Synthetic oligonucleotide
  Antisense strand to SEQ ID NO: 1831087
uagauuguugauagcgucc

SEQ ID NO: 1831089 - RNA, 19 nt, Artificial Sequence
  Description of Artificial Sequence: Synthetic oligonucleotide
  Sense strand starting at position 2141 of SEQ ID NO: 1563777
uccgguaaccuauagggau

SEQ ID NO: 1831090 - RNA, 19 nt, Artificial Sequence
  Description of Artificial Sequence: Synthetic oligonucleotide
  Antisense strand to SEQ ID NO: 1831089
aucccuauagguuaccgga

SEQ ID NO: 1831091 - RNA, 19 nt, Artificial Sequence
  Description of Artificial Sequence: Synthetic oligonucleotide
  Sense strand starting at position 2143 of SEQ ID NO: 1563777
cgguaaccuauagggauua

SEQ ID NO: 1831092 - RNA, 19 nt, Artificial Sequence
  Description of Artificial Sequence: Synthetic oligonucleotide
  Antisense strand to SEQ ID NO: 1831091
uaaucccuauagguuaccg

SEQ ID NO: 1831093 - RNA, 19 nt, Artificial Sequence
  Description of Artificial Sequence: Synthetic oligonucleotide
  Sense strand starting at position 2155 of SEQ ID NO: 1563777
gggauuagcgauugucaag

SEQ ID NO: 1831094 - RNA, 19 nt, Artificial Sequence
  Description of Artificial Sequence: Synthetic oligonucleotide
  Antisense strand to SEQ ID NO: 1831093
cuugacaaucgcuaauccc

SEQ ID NO: 1831095 - RNA, 19 nt, Artificial Sequence
  Description of Artificial Sequence: Synthetic oligonucleotide
  Sense strand starting at position 2219 of SEQ ID NO: 1563777
ucaugaaagcaauggcaaa

SEQ ID NO: 1831096 - RNA, 19 nt, Artificial Sequence
  Description of Artificial Sequence: Synthetic oligonucleotide
  Antisense strand to SEQ ID NO: 1831095
uuugccauugcuuucauga

SEQ ID NO: 1831097 - RNA, 19 nt, Artificial Sequence
  Description of Artificial Sequence: Synthetic oligonucleotide
  Sense strand starting at position 2241 of SEQ ID NO: 1563777
agggcucaucuauauuguu

SEQ ID NO: 1831098 - RNA, 19 nt, Artificial Sequence
  Description of Artificial Sequence: Synthetic oligonucleotide
  Antisense strand to SEQ ID NO: 1831097
aacaauauagaugagcccu

SEQ ID NO: 1831099 - RNA, 19 nt, Artificial Sequence
  Description of Artificial Sequence: Synthetic oligonucleotide
  Sense strand starting at position 2284 of SEQ ID NO: 1563777
uuguaaaugcccugaaagu

SEQ ID NO: 1831100 - RNA, 19 nt, Artificial Sequence
  Description of Artificial Sequence: Synthetic oligonucleotide
  Antisense strand to SEQ ID NO: 1831099
acuuucagggcauuuacaa

SEQ ID NO: 1831101 - RNA, 19 nt, Artificial Sequence
  Description of Artificial Sequence: Synthetic oligonucleotide
  Sense strand starting at position 2285 of SEQ ID NO: 1563777
uguaaaugcccugaaagug

SEQ ID NO: 1831102 - RNA, 19 nt, Artificial Sequence
  Description of Artificial Sequence: Synthetic oligonucleotide
  Antisense strand to SEQ ID NO: 1831101
cacuuucagggcauuuaca

SEQ ID NO: 1831103 - RNA, 19 nt, Artificial Sequence
  Description of Artificial Sequence: Synthetic oligonucleotide
  Sense strand starting at position 2384 of SEQ ID NO: 1563777
gaguauuaugcugaacugu

SEQ ID NO: 1831104 - RNA, 19 nt, Artificial Sequence
  Description of Artificial Sequence: Synthetic oligonucleotide
  Antisense strand to SEQ ID NO: 1831103
acaguucagcauaauacuc

SEQ ID NO: 1831105 - RNA, 19 nt, Artificial Sequence
  Description of Artificial Sequence: Synthetic oligonucleotide
  Sense strand starting at position 2517 of SEQ ID NO: 1563777
ggcagaucaugauugacau

SEQ ID NO: 1831106 - RNA, 19 nt, Artificial Sequence
  Description of Artificial Sequence: Synthetic oligonucleotide
  Antisense strand to SEQ ID NO: 1831105
augucaaucaugaucugcc

SEQ ID NO: 1831107 - RNA, 19 nt, Artificial Sequence
  Description of Artificial Sequence: Synthetic oligonucleotide
  Sense strand starting at position 2518 of SEQ ID NO: 1563777
gcagaucaugauugacaug

SEQ ID NO: 1831108 - RNA, 19 nt, Artificial Sequence
  Description of Artificial Sequence: Synthetic oligonucleotide
  Antisense strand to SEQ ID NO: 1831107
caugucaaucaugaucugc

SEQ ID NO: 1831109 - RNA, 19 nt, Artificial Sequence
  Description of Artificial Sequence: Synthetic oligonucleotide
  Sense strand starting at position 2592 of SEQ ID NO: 1563777
ucaagucuguauccaaaca

SEQ ID NO: 1831110 - RNA, 19 nt, Artificial Sequence
  Description of Artificial Sequence: Synthetic oligonucleotide
  Antisense strand to SEQ ID NO: 1831109
uguuuggauacagacuuga

SEQ ID NO: 1831111 - RNA, 19 nt, Artificial Sequence
  Description of Artificial Sequence: Synthetic oligonucleotide
  Sense strand starting at position 2643 of SEQ ID NO: 1563777
guucgaauauucuuuccaa

SEQ ID NO: 1831112 - RNA, 19 nt, Artificial Sequence
  Description of Artificial Sequence: Synthetic oligonucleotide
  Antisense strand to SEQ ID NO: 1831111
uuggaaagaauauucgaac

SEQ ID NO: 1831113 - RNA, 19 nt, Artificial Sequence
  Description of Artificial Sequence: Synthetic oligonucleotide
  Sense strand starting at position 3017 of SEQ ID NO: 1563777
gucagccaucauuaccuua

SEQ ID NO: 1831114 - RNA, 19 nt, Artificial Sequence
  Description of Artificial Sequence: Synthetic oligonucleotide
  Antisense strand to SEQ ID NO: 1831113
uaagguaaugauggcugac

SEQ ID NO: 1831115 - RNA, 19 nt, Artificial Sequence
  Description of Artificial Sequence: Synthetic oligonucleotide
  Sense strand starting at position 3277 of SEQ ID NO: 1563777
uuagaaggcuuucugcaau

SEQ ID NO: 1831116 - RNA, 19 nt, Artificial Sequence
  Description of Artificial Sequence: Synthetic oligonucleotide
  Antisense strand to SEQ ID NO: 1831115
auugcagaaagccuucuaa

SEQ ID NO: 1831117 - RNA, 19 nt, Artificial Sequence
  Description of Artificial Sequence: Synthetic oligonucleotide
  Sense strand starting at position 3283 of SEQ ID NO: 1563777
ggcuuucugcaauaauccu

SEQ ID NO: 1831118 - RNA, 19 nt, Artificial Sequence
  Description of Artificial Sequence: Synthetic oligonucleotide
  Antisense strand to SEQ ID NO: 1831117
aggauuauugcagaaagcc

SEQ ID NO: 1831119 - RNA, 19 nt, Artificial Sequence
  Description of Artificial Sequence: Synthetic oligonucleotide
  Sense strand starting at position 3290 of SEQ ID NO: 1563777
ugcaauaauccuuaauggu

SEQ ID NO: 1831120 - RNA, 19 nt, Artificial Sequence
  Description of Artificial Sequence: Synthetic oligonucleotide
  Antisense strand to SEQ ID NO: 1831119
accauuaaggauuauugca

SEQ ID NO: 1831121 - RNA, 19 nt, Artificial Sequence
  Description of Artificial Sequence: Synthetic oligonucleotide
  Sense strand starting at position 3343 of SEQ ID NO: 1563777
gggcaacuuguuugaaauc

SEQ ID NO: 1831122 - RNA, 19 nt, Artificial Sequence
  Description of Artificial Sequence: Synthetic oligonucleotide
  Antisense strand to SEQ ID NO: 1831121
gauuucaaacaaguugccc

SEQ ID NO: 1831123 - RNA, 19 nt, Artificial Sequence
  Description of Artificial Sequence: Synthetic oligonucleotide
  Sense strand starting at position 3417 of SEQ ID NO: 1563777
guaugaacacaucaaguuu

SEQ ID NO: 1831124 - RNA, 19 nt, Artificial Sequence
  Description of Artificial Sequence: Synthetic oligonucleotide
  Antisense strand to SEQ ID NO: 1831123
aaacuugauguguucauac

SEQ ID NO: 1831125 - RNA, 19 nt, Artificial Sequence
  Description of Artificial Sequence: Synthetic oligonucleotide
  Sense strand starting at position 3440 of SEQ ID NO: 1563777
ugucuuauuccacagugag

SEQ ID NO: 1831126 - RNA, 19 nt, Artificial Sequence
  Description of Artificial Sequence: Synthetic oligonucleotide
  Antisense strand to SEQ ID NO: 1831125
cucacuguggaauaagaca

SEQ ID NO: 1831127 - RNA, 19 nt, Artificial Sequence
  Description of Artificial Sequence: Synthetic oligonucleotide
  Sense strand starting at position 3443 of SEQ ID NO: 1563777
cuuauuccacagugaguuu

SEQ ID NO: 1831128 - RNA, 19 nt, Artificial Sequence
  Description of Artificial Sequence: Synthetic oligonucleotide
  Antisense strand to SEQ ID NO: 1831127
aaacucacuguggaauaag

SEQ ID NO: 1831129 - RNA, 19 nt, Artificial Sequence
  Description of Artificial Sequence: Synthetic oligonucleotide
  Sense strand starting at position 3534 of SEQ ID NO: 1563777
guaguaaggaggugauguu

SEQ ID NO: 1831130 - RNA, 19 nt, Artificial Sequence
  Description of Artificial Sequence: Synthetic oligonucleotide
  Antisense strand to SEQ ID NO: 1831129
aacaucaccuccuuacuac

SEQ ID NO: 1831131 - RNA, 19 nt, Artificial Sequence
  Description of Artificial Sequence: Synthetic oligonucleotide
  Sense strand starting at position 3945 of SEQ ID NO: 1563777
agugaaguguuuccaggag

SEQ ID NO: 1831132 - RNA, 19 nt, Artificial Sequence
  Description of Artificial Sequence: Synthetic oligonucleotide
  Antisense strand to SEQ ID NO: 1831131
cuccuggaaacacuucacu

SEQ ID NO: 1831133 - RNA, 19 nt, Artificial Sequence
  Description of Artificial Sequence: Synthetic oligonucleotide
  Sense strand starting at position 3949 of SEQ ID NO: 1563777
aaguguuuccaggaguuua

SEQ ID NO: 1831134 - RNA, 19 nt, Artificial Sequence
  Description of Artificial Sequence: Synthetic oligonucleotide
  Antisense strand to SEQ ID NO: 1831133
uaaacuccuggaaacacuu

SEQ ID NO: 1831135 - RNA, 19 nt, Artificial Sequence
  Description of Artificial Sequence: Synthetic oligonucleotide
  Sense strand starting at position 3957 of SEQ ID NO: 1563777
ccaggaguuuaucugucua

SEQ ID NO: 1831136 - RNA, 19 nt, Artificial Sequence
  Description of Artificial Sequence: Synthetic oligonucleotide
  Antisense strand to SEQ ID NO: 1831135
uagacagauaaacuccugg

SEQ ID NO: 1831137 - RNA, 19 nt, Artificial Sequence
  Description of Artificial Sequence: Synthetic oligonucleotide
  Sense strand starting at position 3959 of SEQ ID NO: 1563777
aggaguuuaucugucuaug

SEQ ID NO: 1831138 - RNA, 19 nt, Artificial Sequence
  Description of Artificial Sequence: Synthetic oligonucleotide
  Antisense strand to SEQ ID NO: 1831137
cauagacagauaaacuccu

SEQ ID NO: 1831139 - RNA, 19 nt, Artificial Sequence
  Description of Artificial Sequence: Synthetic oligonucleotide
  Sense strand starting at position 3961 of SEQ ID NO: 1563777
gaguuuaucugucuaugaa

SEQ ID NO: 1831140 - RNA, 19 nt, Artificial Sequence
  Description of Artificial Sequence: Synthetic oligonucleotide
  Antisense strand to SEQ ID NO: 1831139
uucauagacagauaaacuc

SEQ ID NO: 1831141 - RNA, 19 nt, Artificial Sequence
  Description of Artificial Sequence: Synthetic oligonucleotide
  Sense strand starting at position 3962 of SEQ ID NO: 1563777
aguuuaucugucuaugaag

SEQ ID NO: 1831142 - RNA, 19 nt, Artificial Sequence
  Description of Artificial Sequence: Synthetic oligonucleotide
  Antisense strand to SEQ ID NO: 1831141
cuucauagacagauaaacu

SEQ ID NO: 1831143 - RNA, 19 nt, Artificial Sequence
  Description of Artificial Sequence: Synthetic oligonucleotide
  Sense strand starting at position 32 of SEQ ID NO: 1563778
gggagaaagcgauaucgcu

SEQ ID NO: 1831144 - RNA, 19 nt, Artificial Sequence
  Description of Artificial Sequence: Synthetic oligonucleotide
  Antisense strand to SEQ ID NO: 1831143
agcgauaucgcuuucuccc

SEQ ID NO: 1831145 - RNA, 19 nt, Artificial Sequence
  Description of Artificial Sequence: Synthetic oligonucleotide
  Sense strand starting at position 38 of SEQ ID NO: 1563778
aagcgauaucgcuaagagu

SEQ ID NO: 1831146 - RNA, 19 nt, Artificial Sequence
  Description of Artificial Sequence: Synthetic oligonucleotide
  Antisense strand to SEQ ID NO: 1831145
acucuuagcgauaucgcuu

SEQ ID NO: 1831147 - RNA, 19 nt, Artificial Sequence
  Description of Artificial Sequence: Synthetic oligonucleotide
  Sense strand starting at position 40 of SEQ ID NO: 1563778
gcgauaucgcuaagaguga

SEQ ID NO: 1831148 - RNA, 19 nt, Artificial Sequence
  Description of Artificial Sequence: Synthetic oligonucleotide
  Antisense strand to SEQ ID NO: 1831147
ucacucuuagcgauaucgc

SEQ ID NO: 1831149 - RNA, 19 nt, Artificial Sequence
  Description of Artificial Sequence: Synthetic oligonucleotide
  Sense strand starting at position 239 of SEQ ID NO: 1563778
gcuaacuugagcgacuuua

SEQ ID NO: 1831150 - RNA, 19 nt, Artificial Sequence
  Description of Artificial Sequence: Synthetic oligonucleotide
  Antisense strand to SEQ ID NO: 1831149
uaaagucgcucaaguuagc

SEQ ID NO: 1831151 - RNA, 19 nt, Artificial Sequence
  Description of Artificial Sequence: Synthetic oligonucleotide
  Sense strand starting at position 406 of SEQ ID NO: 1563778
uacgaagauugcguaccaa

SEQ ID NO: 1831152 - RNA, 19 nt, Artificial Sequence
  Description of Artificial Sequence: Synthetic oligonucleotide
  Antisense strand to SEQ ID NO: 1831151
uugguacgcaaucuucgua

SEQ ID NO: 1831153 - RNA, 19 nt, Artificial Sequence
  Description of Artificial Sequence: Synthetic oligonucleotide
  Sense strand starting at position 448 of SEQ ID NO: 1563778
gcuauuguucuuggacuaa

SEQ ID NO: 1831154 - RNA, 19 nt, Artificial Sequence
  Description of Artificial Sequence: Synthetic oligonucleotide
  Antisense strand to SEQ ID NO: 1831153
uuaguccaagaacaauagc

SEQ ID NO: 1831155 - RNA, 19 nt, Artificial Sequence
  Description of Artificial Sequence: Synthetic oligonucleotide
  Sense strand starting at position 452 of SEQ ID NO: 1563778
uuguucuuggacuaaguua

SEQ ID NO: 1831156 - RNA, 19 nt, Artificial Sequence
  Description of Artificial Sequence: Synthetic oligonucleotide
  Antisense strand to SEQ ID NO: 1831155
uaacuuaguccaagaacaa

SEQ ID NO: 1831157 - RNA, 19 nt, Artificial Sequence
  Description of Artificial Sequence: Synthetic oligonucleotide
  Sense strand starting at position 488 of SEQ ID NO: 1563778
acuuuaaaguucccuaguu

SEQ ID NO: 1831158 - RNA, 19 nt, Artificial Sequence
  Description of Artificial Sequence: Synthetic oligonucleotide
  Antisense strand to SEQ ID NO: 1831157
aacuagggaacuuuaaagu

SEQ ID NO: 1831159 - RNA, 19 nt, Artificial Sequence
  Description of Artificial Sequence: Synthetic oligonucleotide
  Sense strand starting at position 489 of SEQ ID NO: 1563778
cuuuaaaguucccuaguug

SEQ ID NO: 1831160 - RNA, 19 nt, Artificial Sequence
  Description of Artificial Sequence: Synthetic oligonucleotide
  Antisense strand to SEQ ID NO: 1831159
caacuagggaacuuuaaag

SEQ ID NO: 1831161 - RNA, 19 nt, Artificial Sequence
  Description of Artificial Sequence: Synthetic oligonucleotide
  Sense strand starting at position 490 of SEQ ID NO: 1563778
uuuaaaguucccuaguuga

SEQ ID NO: 1831162 - RNA, 19 nt, Artificial Sequence
  Description of Artificial Sequence: Synthetic oligonucleotide
  Antisense strand to SEQ ID NO: 1831161
ucaacuagggaacuuuaaa

SEQ ID NO: 1831163 - RNA, 19 nt, Artificial Sequence
  Description of Artificial Sequence: Synthetic oligonucleotide
  Sense strand starting at position 517 of SEQ ID NO: 1563778
aaggcuauuuagugaagga

SEQ ID NO: 1831164 - RNA, 19 nt, Artificial Sequence
  Description of Artificial Sequence: Synthetic oligonucleotide
  Antisense strand to SEQ ID NO: 1831163
uccuucacuaaauagccuu

SEQ ID NO: 1831165 - RNA, 19 nt, Artificial Sequence
  Description of Artificial Sequence: Synthetic oligonucleotide
  Sense strand starting at position 721 of SEQ ID NO: 1563778
ggagccuccuaaguuagaa

SEQ ID NO: 1831166 - RNA, 19 nt, Artificial Sequence
  Description of Artificial Sequence: Synthetic oligonucleotide
  Antisense strand to SEQ ID NO: 1831165
uucuaacuuaggaggcucc

SEQ ID NO: 1831167 - RNA, 19 nt, Artificial Sequence
  Description of Artificial Sequence: Synthetic oligonucleotide
  Sense strand starting at position 734 of SEQ ID NO: 1563778
uuagaagauucugaaggag

SEQ ID NO: 1831168 - RNA, 19 nt, Artificial Sequence
  Description of Artificial Sequence: Synthetic oligonucleotide
  Antisense strand to SEQ ID NO: 1831167
cuccuucagaaucuucuaa

SEQ ID NO: 1831169 - RNA, 19 nt, Artificial Sequence
  Description of Artificial Sequence: Synthetic oligonucleotide
  Sense strand starting at position 960 of SEQ ID NO: 1563778
aagggaugcgaagguguaa

SEQ ID NO: 1831170 - RNA, 19 nt, Artificial Sequence
  Description of Artificial Sequence: Synthetic oligonucleotide
  Antisense strand to SEQ ID NO: 1831169
uuacaccuucgcaucccuu

SEQ ID NO: 1831171 - RNA, 19 nt, Artificial Sequence
  Description of Artificial Sequence: Synthetic oligonucleotide
  Sense strand starting at position 1788 of SEQ ID NO: 1563778
ucaaguauccagggacaac

SEQ ID NO: 1831172 - RNA, 19 nt, Artificial Sequence
  Description of Artificial Sequence: Synthetic oligonucleotide
  Antisense strand to SEQ ID NO: 1831171
guugucccuggauacuuga

SEQ ID NO: 1831173 - RNA, 19 nt, Artificial Sequence
  Description of Artificial Sequence: Synthetic oligonucleotide
  Sense strand starting at position 1992 of SEQ ID NO: 1563778
acucuucuagugggauaag

SEQ ID NO: 1831174 - RNA, 19 nt, Artificial Sequence
  Description of Artificial Sequence: Synthetic oligonucleotide
  Antisense strand to SEQ ID NO: 1831173
cuuaucccacuagaagagu

SEQ ID NO: 1831175 - RNA, 19 nt, Artificial Sequence
  Description of Artificial Sequence: Synthetic oligonucleotide
  Sense strand starting at position 2196 of SEQ ID NO: 1563778
aacugagguguauagguua

SEQ ID NO: 1831176 - RNA, 19 nt, Artificial Sequence
  Description of Artificial Sequence: Synthetic oligonucleotide
  Antisense strand to SEQ ID NO: 1831175
uaaccuauacaccucaguu

SEQ ID NO: 1831177 - RNA, 19 nt, Artificial Sequence
  Description of Artificial Sequence: Synthetic oligonucleotide
  Sense strand starting at position 2201 of SEQ ID NO: 1563778
agguguauagguuaaccaa

SEQ ID NO: 1831178 - RNA, 19 nt, Artificial Sequence
  Description of Artificial Sequence: Synthetic oligonucleotide
  Antisense strand to SEQ ID NO: 1831177
uugguuaaccuauacaccu

SEQ ID NO: 1831179 - RNA, 19 nt, Artificial Sequence
  Description of Artificial Sequence: Synthetic oligonucleotide
  Sense strand starting at position 2204 of SEQ ID NO: 1563778
uguauagguuaaccaaguu

SEQ ID NO: 1831180 - RNA, 19 nt, Artificial Sequence
  Description of Artificial Sequence: Synthetic oligonucleotide
  Antisense strand to SEQ ID NO: 1831179
aacuugguuaaccuauaca

SEQ ID NO: 1831181 - RNA, 19 nt, Artificial Sequence
  Description of Artificial Sequence: Synthetic oligonucleotide
  Sense strand starting at position 2220 of SEQ ID NO: 1563778
guugccagagguuacauaa

SEQ ID NO: 1831182 - RNA, 19 nt, Artificial Sequence
  Description of Artificial Sequence: Synthetic oligonucleotide
  Antisense strand to SEQ ID NO: 1831181
uuauguaaccucuggcaac

SEQ ID NO: 1831183 - RNA, 19 nt, Artificial Sequence
  Description of Artificial Sequence: Synthetic oligonucleotide
  Sense strand starting at position 2332 of SEQ ID NO: 1563778
ugggacugcucuucuaagu

SEQ ID NO: 1831184 - RNA, 19 nt, Artificial Sequence
  Description of Artificial Sequence: Synthetic oligonucleotide
  Antisense strand to SEQ ID NO: 1831183
acuuagaagagcaguccca

SEQ ID NO: 1831185 - RNA, 19 nt, Artificial Sequence
  Description of Artificial Sequence: Synthetic oligonucleotide
  Sense strand starting at position 2337 of SEQ ID NO: 1563778
cugcucuucuaagucagaa

SEQ ID NO: 1831186 - RNA, 19 nt, Artificial Sequence
  Description of Artificial Sequence: Synthetic oligonucleotide
  Antisense strand to SEQ ID NO: 1831185
uucugacuuagaagagcag

SEQ ID NO: 1831187 - RNA, 19 nt, Artificial Sequence
  Description of Artificial Sequence: Synthetic oligonucleotide
  Sense strand starting at position 2350 of SEQ ID NO: 1563778
ucagaaucuugauucugcu

SEQ ID NO: 1831188 - RNA, 19 nt, Artificial Sequence
  Description of Artificial Sequence: Synthetic oligonucleotide
  Antisense strand to SEQ ID NO: 1831187
agcagaaucaagauucuga

SEQ ID NO: 1831189 - RNA, 19 nt, Artificial Sequence
  Description of Artificial Sequence: Synthetic oligonucleotide
  Sense strand starting at position 2511 of SEQ ID NO: 1563778
ccagacuccuccuugggaa

SEQ ID NO: 1831190 - RNA, 19 nt, Artificial Sequence
  Description of Artificial Sequence: Synthetic oligonucleotide
  Antisense strand to SEQ ID NO: 1831189
uucccaaggaggagucugg

SEQ ID NO: 1831191 - RNA, 19 nt, Artificial Sequence
  Description of Artificial Sequence: Synthetic oligonucleotide
  Sense strand starting at position 2555 of SEQ ID NO: 1563778
ccaguuuaaucacuauugu

SEQ ID NO: 1831192 - RNA, 19 nt, Artificial Sequence
  Description of Artificial Sequence: Synthetic oligonucleotide
  Antisense strand to SEQ ID NO: 1831191
acaauagugauuaaacugg

SEQ ID NO: 1831193 - RNA, 19 nt, Artificial Sequence
  Description of Artificial Sequence: Synthetic oligonucleotide
  Sense strand starting at position 2920 of SEQ ID NO: 1563778
uggcuucuccacuaugcuu

SEQ ID NO: 1831194 - RNA, 19 nt, Artificial Sequence
  Description of Artificial Sequence: Synthetic oligonucleotide
  Antisense strand to SEQ ID NO: 1831193
aagcauaguggagaagcca

SEQ ID NO: 1831195 - RNA, 19 nt, Artificial Sequence
  Description of Artificial Sequence: Synthetic oligonucleotide
  Sense strand starting at position 2970 of SEQ ID NO: 1563778
acuaaaugcuuauugggua

SEQ ID NO: 1831196 - RNA, 19 nt, Artificial Sequence
  Description of Artificial Sequence: Synthetic oligonucleotide
  Antisense strand to SEQ ID NO: 1831195
uacccaauaagcauuuagu

SEQ ID NO: 1831197 - RNA, 19 nt, Artificial Sequence
  Description of Artificial Sequence: Synthetic oligonucleotide
  Sense strand starting at position 2974 of SEQ ID NO: 1563778
aaugcuuauuggguagaaa

SEQ ID NO: 1831198 - RNA, 19 nt, Artificial Sequence
  Description of Artificial Sequence: Synthetic oligonucleotide
  Antisense strand to SEQ ID NO: 1831197
uuucuacccaauaagcauu

SEQ ID NO: 1831199 - RNA, 19 nt, Artificial Sequence
  Description of Artificial Sequence: Synthetic oligonucleotide
  Sense strand starting at position 2977 of SEQ ID NO: 1563778
gcuuauuggguagaaagca

SEQ ID NO: 1831200 - RNA, 19 nt, Artificial Sequence
  Description of Artificial Sequence: Synthetic oligonucleotide
  Antisense strand to SEQ ID NO: 1831199
ugcuuucuacccaauaagc

SEQ ID NO: 1831201 - RNA, 19 nt, Artificial Sequence
  Description of Artificial Sequence: Synthetic oligonucleotide
  Sense strand starting at position 3009 of SEQ ID NO: 1563778
uuuacaaucucacugaggu

SEQ ID NO: 1831202 - RNA, 19 nt, Artificial Sequence
  Description of Artificial Sequence: Synthetic oligonucleotide
  Antisense strand to SEQ ID NO: 1831201
accucagugagauuguaaa

SEQ ID NO: 1831203 - RNA, 19 nt, Artificial Sequence
  Description of Artificial Sequence: Synthetic oligonucleotide
  Sense strand starting at position 3382 of SEQ ID NO: 1563778
augcuuauccaauagaagu

SEQ ID NO: 1831204 - RNA, 19 nt, Artificial Sequence
  Description of Artificial Sequence: Synthetic oligonucleotide
  Antisense strand to SEQ ID NO: 1831203
acuucuauuggauaagcau

SEQ ID NO: 1831205 - RNA, 19 nt, Artificial Sequence
  Description of Artificial Sequence: Synthetic oligonucleotide
  Sense strand starting at position 3393 of SEQ ID NO: 1563778
auagaaguccauugcuguu

SEQ ID NO: 1831206 - RNA, 19 nt, Artificial Sequence
  Description of Artificial Sequence: Synthetic oligonucleotide
  Antisense strand to SEQ ID NO: 1831205
aacagcaauggacuucuau

SEQ ID NO: 1831207 - RNA, 19 nt, Artificial Sequence
  Description of Artificial Sequence: Synthetic oligonucleotide
  Sense strand starting at position 3417 of SEQ ID NO: 1563778
ucggaugcuuuaucugaau

SEQ ID NO: 1831208 - RNA, 19 nt, Artificial Sequence
  Description of Artificial Sequence: Synthetic oligonucleotide
  Antisense strand to SEQ ID NO: 1831207
auucagauaaagcauccga

SEQ ID NO: 1831209 - RNA, 19 nt, Artificial Sequence
  Description of Artificial Sequence: Synthetic oligonucleotide
  Sense strand starting at position 3476 of SEQ ID NO: 1563778
gacaauuuaugugcuaugu

SEQ ID NO: 1831210 - RNA, 19 nt, Artificial Sequence
  Description of Artificial Sequence: Synthetic oligonucleotide
  Antisense strand to SEQ ID NO: 1831209
acauagcacauaaauuguc

SEQ ID NO: 1831211 - RNA, 19 nt, Artificial Sequence
  Description of Artificial Sequence: Synthetic oligonucleotide
  Sense strand starting at position 3480 of SEQ ID NO: 1563778
auuuaugugcuaugugaca

SEQ ID NO: 1831212 - RNA, 19 nt, Artificial Sequence
  Description of Artificial Sequence: Synthetic oligonucleotide
  Antisense strand to SEQ ID NO: 1831211
ugucacauagcacauaaau

SEQ ID NO: 1831213 - RNA, 19 nt, Artificial Sequence
  Description of Artificial Sequence: Synthetic oligonucleotide
  Sense strand starting at position 3499 of SEQ ID NO: 1563778
uuaaguuagugcucugaga

SEQ ID NO: 1831214 - RNA, 19 nt, Artificial Sequence
  Description of Artificial Sequence: Synthetic oligonucleotide
  Antisense strand to SEQ ID NO: 1831213
ucucagagcacuaacuuaa

SEQ ID NO: 1831215 - RNA, 19 nt, Artificial Sequence
  Description of Artificial Sequence: Synthetic oligonucleotide
  Sense strand starting at position 3503 of SEQ ID NO: 1563778
guuagugcucugagagugu

SEQ ID NO: 1831216 - RNA, 19 nt, Artificial Sequence
  Description of Artificial Sequence: Synthetic oligonucleotide
  Antisense strand to SEQ ID NO: 1831215
acacucucagagcacuaac

SEQ ID NO: 1831217 - RNA, 19 nt, Artificial Sequence
  Description of Artificial Sequence: Synthetic oligonucleotide
  Sense strand starting at position 3549 of SEQ ID NO: 1563778
auaauacuggucugauaug

SEQ ID NO: 1831218 - RNA, 19 nt, Artificial Sequence
  Description of Artificial Sequence: Synthetic oligonucleotide
  Antisense strand to SEQ ID NO: 1831217
cauaucagaccaguauuau

SEQ ID NO: 1831219 - RNA, 19 nt, Artificial Sequence
  Description of Artificial Sequence: Synthetic oligonucleotide
  Sense strand starting at position 3680 of SEQ ID NO: 1563778
gcccgaauccaauaugacu

SEQ ID NO: 1831220 - RNA, 19 nt, Artificial Sequence
  Description of Artificial Sequence: Synthetic oligonucleotide
  Antisense strand to SEQ ID NO: 1831219
agucauauuggauucgggc

SEQ ID NO: 1831221 - RNA, 19 nt, Artificial Sequence
  Description of Artificial Sequence: Synthetic oligonucleotide
  Sense strand starting at position 3955 of SEQ ID NO: 1563778
agaguauccgcugacuuag

SEQ ID NO: 1831222 - RNA, 19 nt, Artificial Sequence
  Description of Artificial Sequence: Synthetic oligonucleotide
  Antisense strand to SEQ ID NO: 1831221
cuaagucagcggauacucu

SEQ ID NO: 1831223 - RNA, 19 nt, Artificial Sequence
  Description of Artificial Sequence: Synthetic oligonucleotide
  Sense strand starting at position 14 of SEQ ID NO: 1563779
agcucuuauuuaucuguuu

SEQ ID NO: 1831224 - RNA, 19 nt, Artificial Sequence
  Description of Artificial Sequence: Synthetic oligonucleotide
  Antisense strand to SEQ ID NO: 1831223
aaacagauaaauaagagcu

SEQ ID NO: 1831225 - RNA, 19 nt, Artificial Sequence
  Description of Artificial Sequence: Synthetic oligonucleotide
  Sense strand starting at position 49 of SEQ ID NO: 1563779
gauguugcagcagaaacua

SEQ ID NO: 1831226 - RNA, 19 nt, Artificial Sequence
  Description of Artificial Sequence: Synthetic oligonucleotide
  Antisense strand to SEQ ID NO: 1831225
uaguuucugcugcaacauc

SEQ ID NO: 1831227 - RNA, 19 nt, Artificial Sequence
  Description of Artificial Sequence: Synthetic oligonucleotide
  Sense strand starting at position 94 of SEQ ID NO: 1563779
cuaccaggacagugaaauu

SEQ ID NO: 1831228 - RNA, 19 nt, Artificial Sequence
  Description of Artificial Sequence: Synthetic oligonucleotide
  Antisense strand to SEQ ID NO: 1831227
aauuucacuguccugguag

SEQ ID NO: 1831229 - RNA, 19 nt, Artificial Sequence
  Description of Artificial Sequence: Synthetic oligonucleotide
  Sense strand starting at position 180 of SEQ ID NO: 1563779
auggcaacacuuggucaua

SEQ ID NO: 1831230 - RNA, 19 nt, Artificial Sequence
  Description of Artificial Sequence: Synthetic oligonucleotide
  Antisense strand to SEQ ID NO: 1831229
uaugaccaaguguugccau

SEQ ID NO: 1831231 - RNA, 19 nt, Artificial Sequence
  Description of Artificial Sequence: Synthetic oligonucleotide
  Sense strand starting at position 182 of SEQ ID NO: 1563779
ggcaacacuuggucauaca

SEQ ID NO: 1831232 - RNA, 19 nt, Artificial Sequence
  Description of Artificial Sequence: Synthetic oligonucleotide
  Antisense strand to SEQ ID NO: 1831231
uguaugaccaaguguugcc

SEQ ID NO: 1831233 - RNA, 19 nt, Artificial Sequence
  Description of Artificial Sequence: Synthetic oligonucleotide
  Sense strand starting at position 183 of SEQ ID NO: 1563779
gcaacacuuggucauacau

SEQ ID NO: 1831234 - RNA, 19 nt, Artificial Sequence
  Description of Artificial Sequence: Synthetic oligonucleotide
  Antisense strand to SEQ ID NO: 1831233
auguaugaccaaguguugc

SEQ ID NO: 1831235 - RNA, 19 nt, Artificial Sequence
  Description of Artificial Sequence: Synthetic oligonucleotide
  Sense strand starting at position 219 of SEQ ID NO: 1563779
uaccguuaaguaugaggau

SEQ ID NO: 1831236 - RNA, 19 nt, Artificial Sequence
  Description of Artificial Sequence: Synthetic oligonucleotide
  Antisense strand to SEQ ID NO: 1831235
auccucauacuuaacggua

SEQ ID NO: 1831237 - RNA, 19 nt, Artificial Sequence
  Description of Artificial Sequence: Synthetic oligonucleotide
  Sense strand starting at position 231 of SEQ ID NO: 1563779
ugaggauauuaauaagaac

SEQ ID NO: 1831238 - RNA, 19 nt, Artificial Sequence
  Description of Artificial Sequence: Synthetic oligonucleotide
  Antisense strand to SEQ ID NO: 1831237
guucuuauuaauauccuca

SEQ ID NO: 1831239 - RNA, 19 nt, Artificial Sequence
  Description of Artificial Sequence: Synthetic oligonucleotide
  Sense strand starting at position 290 of SEQ ID NO: 1563779
gucauaaaugcugaauuau

SEQ ID NO: 1831240 - RNA, 19 nt, Artificial Sequence
  Description of Artificial Sequence: Synthetic oligonucleotide
  Antisense strand to SEQ ID NO: 1831239
auaauucagcauuuaugac

SEQ ID NO: 1831241 - RNA, 19 nt, Artificial Sequence
  Description of Artificial Sequence: Synthetic oligonucleotide
  Sense strand starting at position 444 of SEQ ID NO: 1563779
cuaauugcaguaugaaagu

SEQ ID NO: 1831242 - RNA, 19 nt, Artificial Sequence
  Description of Artificial Sequence: Synthetic oligonucleotide
  Antisense strand to SEQ ID NO: 1831241
acuuucauacugcaauuag

SEQ ID NO: 1831243 - RNA, 19 nt, Artificial Sequence
  Description of Artificial Sequence: Synthetic oligonucleotide
  Sense strand starting at position 450 of SEQ ID NO: 1563779
gcaguaugaaagugagcaa

SEQ ID NO: 1831244 - RNA, 19 nt, Artificial Sequence
  Description of Artificial Sequence: Synthetic oligonucleotide
  Antisense strand to SEQ ID NO: 1831243
uugcucacuuucauacugc

SEQ ID NO: 1831245 - RNA, 19 nt, Artificial Sequence
  Description of Artificial Sequence: Synthetic oligonucleotide
  Sense strand starting at position 507 of SEQ ID NO: 1563779
gggagaaagcgauaucgcu

SEQ ID NO: 1831246 - RNA, 19 nt, Artificial Sequence
  Description of Artificial Sequence: Synthetic oligonucleotide
  Antisense strand to SEQ ID NO: 1831245
agcgauaucgcuuucuccc

SEQ ID NO: 1831247 - RNA, 19 nt, Artificial Sequence
  Description of Artificial Sequence: Synthetic oligonucleotide
  Sense strand starting at position 515 of SEQ ID NO: 1563779
gcgauaucgcuaagaguga

SEQ ID NO: 1831248 - RNA, 19 nt, Artificial Sequence
  Description of Artificial Sequence: Synthetic oligonucleotide
  Antisense strand to SEQ ID NO: 1831247
ucacucuuagcgauaucgc

SEQ ID NO: 1831249 - RNA, 19 nt, Artificial Sequence
  Description of Artificial Sequence: Synthetic oligonucleotide
  Sense strand starting at position 714 of SEQ ID NO: 1563779
gcuaacuugagcgacuuua

SEQ ID NO: 1831250 - RNA, 19 nt, Artificial Sequence
  Description of Artificial Sequence: Synthetic oligonucleotide
  Antisense strand to SEQ ID NO: 1831249
uaaagucgcucaaguuagc

SEQ ID NO: 1831251 - RNA, 19 nt, Artificial Sequence
  Description of Artificial Sequence: Synthetic oligonucleotide
  Sense strand starting at position 927 of SEQ ID NO: 1563779
uuguucuuggacuaaguua

SEQ ID NO: 1831252 - RNA, 19 nt, Artificial Sequence
  Description of Artificial Sequence: Synthetic oligonucleotide
  Antisense strand to SEQ ID NO: 1831251
uaacuuaguccaagaacaa

SEQ ID NO: 1831253 - RNA, 19 nt, Artificial Sequence
  Description of Artificial Sequence: Synthetic oligonucleotide
  Sense strand starting at position 963 of SEQ ID NO: 1563779
acuuuaaaguucccuaguu

SEQ ID NO: 1831254 - RNA, 19 nt, Artificial Sequence
  Description of Artificial Sequence: Synthetic oligonucleotide
  Antisense strand to SEQ ID NO: 1831253
aacuagggaacuuuaaagu

SEQ ID NO: 1831255 - RNA, 19 nt, Artificial Sequence
  Description of Artificial Sequence: Synthetic oligonucleotide
  Sense strand starting at position 964 of SEQ ID NO: 1563779
cuuuaaaguucccuaguug

SEQ ID NO: 1831256 - RNA, 19 nt, Artificial Sequence
  Description of Artificial Sequence: Synthetic oligonucleotide
  Antisense strand to SEQ ID NO: 1831255
caacuagggaacuuuaaag

SEQ ID NO: 1831257 - RNA, 19 nt, Artificial Sequence
  Description of Artificial Sequence: Synthetic oligonucleotide
  Sense strand starting at position 965 of SEQ ID NO: 1563779
uuuaaaguucccuaguuga

SEQ ID NO: 1831258 - RNA, 19 nt, Artificial Sequence
  Description of Artificial Sequence: Synthetic oligonucleotide
  Antisense strand to SEQ ID NO: 1831257
ucaacuagggaacuuuaaa

SEQ ID NO: 1831259 - RNA, 19 nt, Artificial Sequence
  Description of Artificial Sequence: Synthetic oligonucleotide
  Sense strand starting at position 1196 of SEQ ID NO: 1563779
ggagccuccuaaguuagaa

SEQ ID NO: 1831260 - RNA, 19 nt, Artificial Sequence
  Description of Artificial Sequence: Synthetic oligonucleotide
  Antisense strand to SEQ ID NO: 1831259
uucuaacuuaggaggcucc

SEQ ID NO: 1831261 - RNA, 19 nt, Artificial Sequence
  Description of Artificial Sequence: Synthetic oligonucleotide
  Sense strand starting at position 1209 of SEQ ID NO: 1563779
uuagaagauucugaaggag

SEQ ID NO: 1831262 - RNA, 19 nt, Artificial Sequence
  Description of Artificial Sequence: Synthetic oligonucleotide
  Antisense strand to SEQ ID NO: 1831261
cuccuucagaaucuucuaa

SEQ ID NO: 1831263 - RNA, 19 nt, Artificial Sequence
  Description of Artificial Sequence: Synthetic oligonucleotide
  Sense strand starting at position 1435 of SEQ ID NO: 1563779
aagggaugcgaagguguaa

SEQ ID NO: 1831264 - RNA, 19 nt, Artificial Sequence
  Description of Artificial Sequence: Synthetic oligonucleotide
  Antisense strand to SEQ ID NO: 1831263
uuacaccuucgcaucccuu

SEQ ID NO: 1831265 - RNA, 19 nt, Artificial Sequence
  Description of Artificial Sequence: Synthetic oligonucleotide
  Sense strand starting at position 2263 of SEQ ID NO: 1563779
ucaaguauccagggacaac

SEQ ID NO: 1831266 - RNA, 19 nt, Artificial Sequence
  Description of Artificial Sequence: Synthetic oligonucleotide
  Antisense strand to SEQ ID NO: 1831265
guugucccuggauacuuga

SEQ ID NO: 1831267 - RNA, 19 nt, Artificial Sequence
  Description of Artificial Sequence: Synthetic oligonucleotide
  Sense strand starting at position 2467 of SEQ ID NO: 1563779
acucuucuagugggauaag

SEQ ID NO: 1831268 - RNA, 19 nt, Artificial Sequence
  Description of Artificial Sequence: Synthetic oligonucleotide
  Antisense strand to SEQ ID NO: 1831267
cuuaucccacuagaagagu

SEQ ID NO: 1831269 - RNA, 19 nt, Artificial Sequence
  Description of Artificial Sequence: Synthetic oligonucleotide
  Sense strand starting at position 2671 of SEQ ID NO: 1563779
aacugagguguauagguua

SEQ ID NO: 1831270 - RNA, 19 nt, Artificial Sequence
  Description of Artificial Sequence: Synthetic oligonucleotide
  Antisense strand to SEQ ID NO: 1831269
uaaccuauacaccucaguu

SEQ ID NO: 1831271 - RNA, 19 nt, Artificial Sequence
  Description of Artificial Sequence: Synthetic oligonucleotide
  Sense strand starting at position 2676 of SEQ ID NO: 1563779
agguguauagguuaaccaa

SEQ ID NO: 1831272 - RNA, 19 nt, Artificial Sequence
  Description of Artificial Sequence: Synthetic oligonucleotide
  Antisense strand to SEQ ID NO: 1831271
uugguuaaccuauacaccu

SEQ ID NO: 1831273 - RNA, 19 nt, Artificial Sequence
  Description of Artificial Sequence: Synthetic oligonucleotide
  Sense strand starting at position 2679 of SEQ ID NO: 1563779
uguauagguuaaccaaguu

SEQ ID NO: 1831274 - RNA, 19 nt, Artificial Sequence
  Description of Artificial Sequence: Synthetic oligonucleotide
  Antisense strand to SEQ ID NO: 1831273
aacuugguuaaccuauaca

SEQ ID NO: 1831275 - RNA, 19 nt, Artificial Sequence
  Description of Artificial Sequence: Synthetic oligonucleotide
  Sense strand starting at position 2695 of SEQ ID NO: 1563779
guugccagagguuacauaa

SEQ ID NO: 1831276 - RNA, 19 nt, Artificial Sequence
  Description of Artificial Sequence: Synthetic oligonucleotide
  Antisense strand to SEQ ID NO: 1831275
uuauguaaccucuggcaac

SEQ ID NO: 1831277 - RNA, 19 nt, Artificial Sequence
  Description of Artificial Sequence: Synthetic oligonucleotide
  Sense strand starting at position 2812 of SEQ ID NO: 1563779
cugcucuucuaagucagaa

SEQ ID NO: 1831278 - RNA, 19 nt, Artificial Sequence
  Description of Artificial Sequence: Synthetic oligonucleotide
  Antisense strand to SEQ ID NO: 1831277
uucugacuuagaagagcag

SEQ ID NO: 1831279 - RNA, 19 nt, Artificial Sequence
  Description of Artificial Sequence: Synthetic oligonucleotide
  Sense strand starting at position 2825 of SEQ ID NO: 1563779
ucagaaucuugauucugcu

SEQ ID NO: 1831280 - RNA, 19 nt, Artificial Sequence
  Description of Artificial Sequence: Synthetic oligonucleotide
  Antisense strand to SEQ ID NO: 1831279
agcagaaucaagauucuga

SEQ ID NO: 1831281 - RNA, 19 nt, Artificial Sequence
  Description of Artificial Sequence: Synthetic oligonucleotide
  Sense strand starting at position 2986 of SEQ ID NO: 1563779
ccagacuccuccuugggaa

SEQ ID NO: 1831282 - RNA, 19 nt, Artificial Sequence
  Description of Artificial Sequence: Synthetic oligonucleotide
  Antisense strand to SEQ ID NO: 1831281
uucccaaggaggagucugg

SEQ ID NO: 1831283 - RNA, 19 nt, Artificial Sequence
  Description of Artificial Sequence: Synthetic oligonucleotide
  Sense strand starting at position 3030 of SEQ ID NO: 1563779
ccaguuuaaucacuauugu

SEQ ID NO: 1831284 - RNA, 19 nt, Artificial Sequence
  Description of Artificial Sequence: Synthetic oligonucleotide
  Antisense strand to SEQ ID NO: 1831283
acaauagugauuaaacugg

SEQ ID NO: 1831285 - RNA, 19 nt, Artificial Sequence
  Description of Artificial Sequence: Synthetic oligonucleotide
  Sense strand starting at position 3445 of SEQ ID NO: 1563779
acuaaaugcuuauugggua

SEQ ID NO: 1831286 - RNA, 19 nt, Artificial Sequence
  Description of Artificial Sequence: Synthetic oligonucleotide
  Antisense strand to SEQ ID NO: 1831285
uacccaauaagcauuuagu

SEQ ID NO: 1831287 - RNA, 19 nt, Artificial Sequence
  Description of Artificial Sequence: Synthetic oligonucleotide
  Sense strand starting at position 3449 of SEQ ID NO: 1563779
aaugcuuauuggguagaaa

SEQ ID NO: 1831288 - RNA, 19 nt, Artificial Sequence
  Description of Artificial Sequence: Synthetic oligonucleotide
  Antisense strand to SEQ ID NO: 1831287
uuucuacccaauaagcauu

SEQ ID NO: 1831289 - RNA, 19 nt, Artificial Sequence
  Description of Artificial Sequence: Synthetic oligonucleotide
  Sense strand starting at position 3452 of SEQ ID NO: 1563779
gcuuauuggguagaaagca

SEQ ID NO: 1831290 - RNA, 19 nt, Artificial Sequence
  Description of Artificial Sequence: Synthetic oligonucleotide
  Antisense strand to SEQ ID NO: 1831289
ugcuuucuacccaauaagc

SEQ ID NO: 1831291 - RNA, 19 nt, Artificial Sequence
  Description of Artificial Sequence: Synthetic oligonucleotide
  Sense strand starting at position 3484 of SEQ ID NO: 1563779
uuuacaaucucacugaggu

SEQ ID NO: 1831292 - RNA, 19 nt, Artificial Sequence
  Description of Artificial Sequence: Synthetic oligonucleotide
  Antisense strand to SEQ ID NO: 1831291
accucagugagauuguaaa

SEQ ID NO: 1831293 - RNA, 19 nt, Artificial Sequence
  Description of Artificial Sequence: Synthetic oligonucleotide
  Sense strand starting at position 3857 of SEQ ID NO: 1563779
augcuuauccaauagaagu

SEQ ID NO: 1831294 - RNA, 19 nt, Artificial Sequence
  Description of Artificial Sequence: Synthetic oligonucleotide
  Antisense strand to SEQ ID NO: 1831293
acuucuauuggauaagcau

SEQ ID NO: 1831295 - RNA, 19 nt, Artificial Sequence
  Description of Artificial Sequence: Synthetic oligonucleotide
  Sense strand starting at position 3892 of SEQ ID NO: 1563779
ucggaugcuuuaucugaau

SEQ ID NO: 1831296 - RNA, 19 nt, Artificial Sequence
  Description of Artificial Sequence: Synthetic oligonucleotide
  Antisense strand to SEQ ID NO: 1831295
auucagauaaagcauccga

SEQ ID NO: 1831297 - RNA, 19 nt, Artificial Sequence
  Description of Artificial Sequence: Synthetic oligonucleotide
  Sense strand starting at position 3951 of SEQ ID NO: 1563779
gacaauuuaugugcuaugu

SEQ ID NO: 1831298 - RNA, 19 nt, Artificial Sequence
  Description of Artificial Sequence: Synthetic oligonucleotide
  Antisense strand to SEQ ID NO: 1831297
acauagcacauaaauuguc

SEQ ID NO: 1831299 - RNA, 19 nt, Artificial Sequence
  Description of Artificial Sequence: Synthetic oligonucleotide
  Sense strand starting at position 3955 of SEQ ID NO: 1563779
auuuaugugcuaugugaca

SEQ ID NO: 1831300 - RNA, 19 nt, Artificial Sequence
  Description of Artificial Sequence: Synthetic oligonucleotide
  Antisense strand to SEQ ID NO: 1831299
ugucacauagcacauaaau

SEQ ID NO: 1831301 - RNA, 19 nt, Artificial Sequence
  Description of Artificial Sequence: Synthetic oligonucleotide
  Sense strand starting at position 3978 of SEQ ID NO: 1563779
guuagugcucugagagugu

SEQ ID NO: 1831302 - RNA, 19 nt, Artificial Sequence
  Description of Artificial Sequence: Synthetic oligonucleotide
  Antisense strand to SEQ ID NO: 1831301
acacucucagagcacuaac

SEQ ID NO: 1831303 - RNA, 19 nt, Artificial Sequence
  Description of Artificial Sequence: Synthetic oligonucleotide
  Sense strand starting at position 730 of SEQ ID NO: 1563780
uuugcaauuccuuagguau

SEQ ID NO: 1831304 - RNA, 19 nt, Artificial Sequence
  Description of Artificial Sequence: Synthetic oligonucleotide
  Antisense strand to SEQ ID NO: 1831303
auaccuaaggaauugcaaa

SEQ ID NO: 1831305 - RNA, 19 nt, Artificial Sequence
  Description of Artificial Sequence: Synthetic oligonucleotide
  Sense strand starting at position 761 of SEQ ID NO: 1563780
ucacacugguaauuagauu

SEQ ID NO: 1831306 - RNA, 19 nt, Artificial Sequence
  Description of Artificial Sequence: Synthetic oligonucleotide
  Antisense strand to SEQ ID NO: 1831305
aaucuaauuaccaguguga

SEQ ID NO: 1831307 - RNA, 19 nt, Artificial Sequence
  Description of Artificial Sequence: Synthetic oligonucleotide
  Sense strand starting at position 860 of SEQ ID NO: 1563780
guaagcaagcuugagguuu

SEQ ID NO: 1831308 - RNA, 19 nt, Artificial Sequence
  Description of Artificial Sequence: Synthetic oligonucleotide
  Antisense strand to SEQ ID NO: 1831307
aaaccucaagcuugcuuac

SEQ ID NO: 1831309 - RNA, 19 nt, Artificial Sequence
  Description of Artificial Sequence: Synthetic oligonucleotide
  Sense strand starting at position 1010 of SEQ ID NO: 1563780
uggaguugaccuggauguu

SEQ ID NO: 1831310 - RNA, 19 nt, Artificial Sequence
  Description of Artificial Sequence: Synthetic oligonucleotide
  Antisense strand to SEQ ID NO: 1831309
aacauccaggucaacucca

SEQ ID NO: 1831311 - RNA, 19 nt, Artificial Sequence
  Description of Artificial Sequence: Synthetic oligonucleotide
  Sense strand starting at position 1011 of SEQ ID NO: 1563780
ggaguugaccuggauguuu

SEQ ID NO: 1831312 - RNA, 19 nt, Artificial Sequence
  Description of Artificial Sequence: Synthetic oligonucleotide
  Antisense strand to SEQ ID NO: 1831311
aaacauccaggucaacucc

SEQ ID NO: 1831313 - RNA, 19 nt, Artificial Sequence
  Description of Artificial Sequence: Synthetic oligonucleotide
  Sense strand starting at position 1118 of SEQ ID NO: 1563780
uaaagagcguuuccauaac

SEQ ID NO: 1831314 - RNA, 19 nt, Artificial Sequence
  Description of Artificial Sequence: Synthetic oligonucleotide
  Antisense strand to SEQ ID NO: 1831313
guuauggaaacgcucuuua

SEQ ID NO: 1831315 - RNA, 19 nt, Artificial Sequence
  Description of Artificial Sequence: Synthetic oligonucleotide
  Sense strand starting at position 1338 of SEQ ID NO: 1563780
aagcguugacugcaguaua

SEQ ID NO: 1831316 - RNA, 19 nt, Artificial Sequence
  Description of Artificial Sequence: Synthetic oligonucleotide
  Antisense strand to SEQ ID NO: 1831315
uauacugcagucaacgcuu

SEQ ID NO: 1831317 - RNA, 19 nt, Artificial Sequence
  Description of Artificial Sequence: Synthetic oligonucleotide
  Sense strand starting at position 1341 of SEQ ID NO: 1563780
cguugacugcaguauauuu

SEQ ID NO: 1831318 - RNA, 19 nt, Artificial Sequence
  Description of Artificial Sequence: Synthetic oligonucleotide
  Antisense strand to SEQ ID NO: 1831317
aaauauacugcagucaacg

SEQ ID NO: 1831319 - RNA, 19 nt, Artificial Sequence
  Description of Artificial Sequence: Synthetic oligonucleotide
  Sense strand starting at position 1451 of SEQ ID NO: 1563780
cuaccuuaacagggauacu

SEQ ID NO: 1831320 - RNA, 19 nt, Artificial Sequence
  Description of Artificial Sequence: Synthetic oligonucleotide
  Antisense strand to SEQ ID NO: 1831319
aguaucccuguuaagguag

SEQ ID NO: 1831321 - RNA, 19 nt, Artificial Sequence
  Description of Artificial Sequence: Synthetic oligonucleotide
  Sense strand starting at position 1478 of SEQ ID NO: 1563780
guacuauauucugcaccua

SEQ ID NO: 1831322 - RNA, 19 nt, Artificial Sequence
  Description of Artificial Sequence: Synthetic oligonucleotide
  Antisense strand to SEQ ID NO: 1831321
uaggugcagaauauaguac

SEQ ID NO: 1831323 - RNA, 19 nt, Artificial Sequence
  Description of Artificial Sequence: Synthetic oligonucleotide
  Sense strand starting at position 1656 of SEQ ID NO: 1563780
uuaggcuaccgcuaauaga

SEQ ID NO: 1831324 - RNA, 19 nt, Artificial Sequence
  Description of Artificial Sequence: Synthetic oligonucleotide
  Antisense strand to SEQ ID NO: 1831323
ucuauuagcgguagccuaa

SEQ ID NO: 1831325 - RNA, 19 nt, Artificial Sequence
  Description of Artificial Sequence: Synthetic oligonucleotide
  Sense strand starting at position 1663 of SEQ ID NO: 1563780
accgcuaauagagaucagu

SEQ ID NO: 1831326 - RNA, 19 nt, Artificial Sequence
  Description of Artificial Sequence: Synthetic oligonucleotide
  Antisense strand to SEQ ID NO: 1831325
acugaucucuauuagcggu

SEQ ID NO: 1831327 - RNA, 19 nt, Artificial Sequence
  Description of Artificial Sequence: Synthetic oligonucleotide
  Sense strand starting at position 1781 of SEQ ID NO: 1563780
cugcuuuccagcuaggaga

SEQ ID NO: 1831328 - RNA, 19 nt, Artificial Sequence
  Description of Artificial Sequence: Synthetic oligonucleotide
  Antisense strand to SEQ ID NO: 1831327
ucuccuagcuggaaagcag

SEQ ID NO: 1831329 - RNA, 19 nt, Artificial Sequence
  Description of Artificial Sequence: Synthetic oligonucleotide
  Sense strand starting at position 1982 of SEQ ID NO: 1563780
agaguagcaugcucuuaau

SEQ ID NO: 1831330 - RNA, 19 nt, Artificial Sequence
  Description of Artificial Sequence: Synthetic oligonucleotide
  Antisense strand to SEQ ID NO: 1831329
auuaagagcaugcuacucu

SEQ ID NO: 1831331 - RNA, 19 nt, Artificial Sequence
  Description of Artificial Sequence: Synthetic oligonucleotide
  Sense strand starting at position 2015 of SEQ ID NO: 1563780
ggacgcuaucaacaaucua

SEQ ID NO: 1831332 - RNA, 19 nt, Artificial Sequence
  Description of Artificial Sequence: Synthetic oligonucleotide
  Antisense strand to SEQ ID NO: 1831331
uagauuguugauagcgucc

SEQ ID NO: 1831333 - RNA, 19 nt, Artificial Sequence
  Description of Artificial Sequence: Synthetic oligonucleotide
  Sense strand starting at position 2200 of SEQ ID NO: 1563780
uccgguaaccuauagggau

SEQ ID NO: 1831334 - RNA, 19 nt, Artificial Sequence
  Description of Artificial Sequence: Synthetic oligonucleotide
  Antisense strand to SEQ ID NO: 1831333
aucccuauagguuaccgga

SEQ ID NO: 1831335 - RNA, 19 nt, Artificial Sequence
  Description of Artificial Sequence: Synthetic oligonucleotide
  Sense strand starting at position 2202 of SEQ ID NO: 1563780
cgguaaccuauagggauua

SEQ ID NO: 1831336 - RNA, 19 nt, Artificial Sequence
  Description of Artificial Sequence: Synthetic oligonucleotide
  Antisense strand to SEQ ID NO: 1831335
uaaucccuauagguuaccg

SEQ ID NO: 1831337 - RNA, 19 nt, Artificial Sequence
  Description of Artificial Sequence: Synthetic oligonucleotide
  Sense strand starting at position 2214 of SEQ ID NO: 1563780
gggauuagcgauugucaag

SEQ ID NO: 1831338 - RNA, 19 nt, Artificial Sequence
  Description of Artificial Sequence: Synthetic oligonucleotide
  Antisense strand to SEQ ID NO: 1831337
cuugacaaucgcuaauccc

SEQ ID NO: 1831339 - RNA, 19 nt, Artificial Sequence
  Description of Artificial Sequence: Synthetic oligonucleotide
  Sense strand starting at position 2220 of SEQ ID NO: 1563780
agcgauugucaaggagguu

SEQ ID NO: 1831340 - RNA, 19 nt, Artificial Sequence
  Description of Artificial Sequence: Synthetic oligonucleotide
  Antisense strand to SEQ ID NO: 1831339
aaccuccuugacaaucgcu

SEQ ID NO: 1831341 - RNA, 19 nt, Artificial Sequence
  Description of Artificial Sequence: Synthetic oligonucleotide
  Sense strand starting at position 2278 of SEQ ID NO: 1563780
ucaugaaagcaauggcaaa

SEQ ID NO: 1831342 - RNA, 19 nt, Artificial Sequence
  Description of Artificial Sequence: Synthetic oligonucleotide
  Antisense strand to SEQ ID NO: 1831341
uuugccauugcuuucauga

SEQ ID NO: 1831343 - RNA, 19 nt, Artificial Sequence
  Description of Artificial Sequence: Synthetic oligonucleotide
  Sense strand starting at position 2300 of SEQ ID NO: 1563780
agggcucaucuauauuguu

SEQ ID NO: 1831344 - RNA, 19 nt, Artificial Sequence
  Description of Artificial Sequence: Synthetic oligonucleotide
  Antisense strand to SEQ ID NO: 1831343
aacaauauagaugagcccu

SEQ ID NO: 1831345 - RNA, 19 nt, Artificial Sequence
  Description of Artificial Sequence: Synthetic oligonucleotide
  Sense strand starting at position 2341 of SEQ ID NO: 1563780
cguuguaaaugcccugaaa

SEQ ID NO: 1831346 - RNA, 19 nt, Artificial Sequence
  Description of Artificial Sequence: Synthetic oligonucleotide
  Antisense strand to SEQ ID NO: 1831345
uuucagggcauuuacaacg

SEQ ID NO: 1831347 - RNA, 19 nt, Artificial Sequence
  Description of Artificial Sequence: Synthetic oligonucleotide
  Sense strand starting at position 2343 of SEQ ID NO: 1563780
uuguaaaugcccugaaagu

SEQ ID NO: 1831348 - RNA, 19 nt, Artificial Sequence
  Description of Artificial Sequence: Synthetic oligonucleotide
  Antisense strand to SEQ ID NO: 1831347
acuuucagggcauuuacaa

SEQ ID NO: 1831349 - RNA, 19 nt, Artificial Sequence
  Description of Artificial Sequence: Synthetic oligonucleotide
  Sense strand starting at position 2344 of SEQ ID NO: 1563780
uguaaaugcccugaaagug

SEQ ID NO: 1831350 - RNA, 19 nt, Artificial Sequence
  Description of Artificial Sequence: Synthetic oligonucleotide
  Antisense strand to SEQ ID NO: 1831349
cacuuucagggcauuuaca

SEQ ID NO: 1831351 - RNA, 19 nt, Artificial Sequence
  Description of Artificial Sequence: Synthetic oligonucleotide
  Sense strand starting at position 2443 of SEQ ID NO: 1563780
gaguauuaugcugaacugu

SEQ ID NO: 1831352 - RNA, 19 nt, Artificial Sequence
  Description of Artificial Sequence: Synthetic oligonucleotide
  Antisense strand to SEQ ID NO: 1831351
acaguucagcauaauacuc

SEQ ID NO: 1831353 - RNA, 19 nt, Artificial Sequence
  Description of Artificial Sequence: Synthetic oligonucleotide
  Sense strand starting at position 2576 of SEQ ID NO: 1563780
ggcagaucaugauugacau

SEQ ID NO: 1831354 - RNA, 19 nt, Artificial Sequence
  Description of Artificial Sequence: Synthetic oligonucleotide
  Antisense strand to SEQ ID NO: 1831353
augucaaucaugaucugcc

SEQ ID NO: 1831355 - RNA, 19 nt, Artificial Sequence
  Description of Artificial Sequence: Synthetic oligonucleotide
  Sense strand starting at position 2577 of SEQ ID NO: 1563780
gcagaucaugauugacaug

SEQ ID NO: 1831356 - RNA, 19 nt, Artificial Sequence
  Description of Artificial Sequence: Synthetic oligonucleotide
  Antisense strand to SEQ ID NO: 1831355
caugucaaucaugaucugc

SEQ ID NO: 1831357 - RNA, 19 nt, Artificial Sequence
  Description of Artificial Sequence: Synthetic oligonucleotide
  Sense strand starting at position 2651 of SEQ ID NO: 1563780
ucaagucuguauccaaaca

SEQ ID NO: 1831358 - RNA, 19 nt, Artificial Sequence
  Description of Artificial Sequence: Synthetic oligonucleotide
  Antisense strand to SEQ ID NO: 1831357
uguuuggauacagacuuga

SEQ ID NO: 1831359 - RNA, 19 nt, Artificial Sequence
  Description of Artificial Sequence: Synthetic oligonucleotide
  Sense strand starting at position 2702 of SEQ ID NO: 1563780
guucgaauauucuuuccaa

SEQ ID NO: 1831360 - RNA, 19 nt, Artificial Sequence
  Description of Artificial Sequence: Synthetic oligonucleotide
  Antisense strand to SEQ ID NO: 1831359
uuggaaagaauauucgaac

SEQ ID NO: 1831361 - RNA, 19 nt, Artificial Sequence
  Description of Artificial Sequence: Synthetic oligonucleotide
  Sense strand starting at position 3028 of SEQ ID NO: 1563780
uugaaagauugacaaguaa

SEQ ID NO: 1831362 - RNA, 19 nt, Artificial Sequence
  Description of Artificial Sequence: Synthetic oligonucleotide
  Antisense strand to SEQ ID NO: 1831361
uuacuugucaaucuuucaa

SEQ ID NO: 1831363 - RNA, 19 nt, Artificial Sequence
  Description of Artificial Sequence: Synthetic oligonucleotide
  Sense strand starting at position 3076 of SEQ ID NO: 1563780
gucagccaucauuaccuua

SEQ ID NO: 1831364 - RNA, 19 nt, Artificial Sequence
  Description of Artificial Sequence: Synthetic oligonucleotide
  Antisense strand to SEQ ID NO: 1831363
uaagguaaugauggcugac

SEQ ID NO: 1831365 - RNA, 19 nt, Artificial Sequence
  Description of Artificial Sequence: Synthetic oligonucleotide
  Sense strand starting at position 3225 of SEQ ID NO: 1563780
ucaaaugagucagagaaag

SEQ ID NO: 1831366 - RNA, 19 nt, Artificial Sequence
  Description of Artificial Sequence: Synthetic oligonucleotide
  Antisense strand to SEQ ID NO: 1831365
cuuucucugacucauuuga

SEQ ID NO: 1831367 - RNA, 19 nt, Artificial Sequence
  Description of Artificial Sequence: Synthetic oligonucleotide
  Sense strand starting at position 3336 of SEQ ID NO: 1563780
uuagaaggcuuucugcaau

SEQ ID NO: 1831368 - RNA, 19 nt, Artificial Sequence
  Description of Artificial Sequence: Synthetic oligonucleotide
  Antisense strand to SEQ ID NO: 1831367
auugcagaaagccuucuaa

SEQ ID NO: 1831369 - RNA, 19 nt, Artificial Sequence
  Description of Artificial Sequence: Synthetic oligonucleotide
  Sense strand starting at position 3342 of SEQ ID NO: 1563780
ggcuuucugcaauaauccu

SEQ ID NO: 1831370 - RNA, 19 nt, Artificial Sequence
  Description of Artificial Sequence: Synthetic oligonucleotide
  Antisense strand to SEQ ID NO: 1831369
aggauuauugcagaaagcc

SEQ ID NO: 1831371 - RNA, 19 nt, Artificial Sequence
  Description of Artificial Sequence: Synthetic oligonucleotide
  Sense strand starting at position 3349 of SEQ ID NO: 1563780
ugcaauaauccuuaauggu

SEQ ID NO: 1831372 - RNA, 19 nt, Artificial Sequence
  Description of Artificial Sequence: Synthetic oligonucleotide
  Antisense strand to SEQ ID NO: 1831371
accauuaaggauuauugca

SEQ ID NO: 1831373 - RNA, 19 nt, Artificial Sequence
  Description of Artificial Sequence: Synthetic oligonucleotide
  Sense strand starting at position 3402 of SEQ ID NO: 1563780
gggcaacuuguuugaaauc

SEQ ID NO: 1831374 - RNA, 19 nt, Artificial Sequence
  Description of Artificial Sequence: Synthetic oligonucleotide
  Antisense strand to SEQ ID NO: 1831373
gauuucaaacaaguugccc

SEQ ID NO: 1831375 - RNA, 19 nt, Artificial Sequence
  Description of Artificial Sequence: Synthetic oligonucleotide
  Sense strand starting at position 3476 of SEQ ID NO: 1563780
guaugaacacaucaaguuu

SEQ ID NO: 1831376 - RNA, 19 nt, Artificial Sequence
  Description of Artificial Sequence: Synthetic oligonucleotide
  Antisense strand to SEQ ID NO: 1831375
aaacuugauguguucauac

SEQ ID NO: 1831377 - RNA, 19 nt, Artificial Sequence
  Description of Artificial Sequence: Synthetic oligonucleotide
  Sense strand starting at position 3499 of SEQ ID NO: 1563780
ugucuuauuccacagugag

SEQ ID NO: 1831378 - RNA, 19 nt, Artificial Sequence
  Description of Artificial Sequence: Synthetic oligonucleotide
  Antisense strand to SEQ ID NO: 1831377
cucacuguggaauaagaca

SEQ ID NO: 1831379 - RNA, 19 nt, Artificial Sequence
  Description of Artificial Sequence: Synthetic oligonucleotide
  Sense strand starting at position 3502 of SEQ ID NO: 1563780
cuuauuccacagugaguuu

SEQ ID NO: 1831380 - RNA, 19 nt, Artificial Sequence
  Description of Artificial Sequence: Synthetic oligonucleotide
  Antisense strand to SEQ ID NO: 1831379
aaacucacuguggaauaag

SEQ ID NO: 1831381 - RNA, 19 nt, Artificial Sequence
  Description of Artificial Sequence: Synthetic oligonucleotide
  Sense strand starting at position 3593 of SEQ ID NO: 1563780
guaguaaggaggugauguu

SEQ ID NO: 1831382 - RNA, 19 nt, Artificial Sequence
  Description of Artificial Sequence: Synthetic oligonucleotide
  Antisense strand to SEQ ID NO: 1831381
aacaucaccuccuuacuac

SEQ ID NO: 1831383 - RNA, 19 nt, Artificial Sequence
  Description of Artificial Sequence: Synthetic oligonucleotide
  Sense strand starting at position 610 of SEQ ID NO: 1563781
cgguuucccaccgaggaaa

SEQ ID NO: 1831384 - RNA, 19 nt, Artificial Sequence
  Description of Artificial Sequence: Synthetic oligonucleotide
  Antisense strand to SEQ ID NO: 1831383
uuuccucggugggaaaccg

SEQ ID NO: 1831385 - RNA, 19 nt, Artificial Sequence
  Description of Artificial Sequence: Synthetic oligonucleotide
  Sense strand starting at position 883 of SEQ ID NO: 1563781
uuccauagcuaccuguuau

SEQ ID NO: 1831386 - RNA, 19 nt, Artificial Sequence
  Description of Artificial Sequence: Synthetic oligonucleotide
  Antisense strand to SEQ ID NO: 1831385
auaacagguagcuauggaa

SEQ ID NO: 1831387 - RNA, 19 nt, Artificial Sequence
  Description of Artificial Sequence: Synthetic oligonucleotide
  Sense strand starting at position 907 of SEQ ID NO: 1563781
ugacuagaucugcgccaaa

SEQ ID NO: 1831388 - RNA, 19 nt, Artificial Sequence
  Description of Artificial Sequence: Synthetic oligonucleotide
  Antisense strand to SEQ ID NO: 1831387
uuuggcgcagaucuaguca

SEQ ID NO: 1831389 - RNA, 19 nt, Artificial Sequence
  Description of Artificial Sequence: Synthetic oligonucleotide
  Sense strand starting at position 910 of SEQ ID NO: 1563781
cuagaucugcgccaaauga

SEQ ID NO: 1831390 - RNA, 19 nt, Artificial Sequence
  Description of Artificial Sequence: Synthetic oligonucleotide
  Antisense strand to SEQ ID NO: 1831389
ucauuuggcgcagaucuag

SEQ ID NO: 1831391 - RNA, 19 nt, Artificial Sequence
  Description of Artificial Sequence: Synthetic oligonucleotide
  Sense strand starting at position 980 of SEQ ID NO: 1563781
uggcuuacugcacaacaau

SEQ ID NO: 1831392 - RNA, 19 nt, Artificial Sequence
  Description of Artificial Sequence: Synthetic oligonucleotide
  Antisense strand to SEQ ID NO: 1831391
auuguugugcaguaagcca

SEQ ID NO: 1831393 - RNA, 19 nt, Artificial Sequence
  Description of Artificial Sequence: Synthetic oligonucleotide
  Sense strand starting at position 1163 of SEQ ID NO: 1563781
auagaauucuagcuaguac

SEQ ID NO: 1831394 - RNA, 19 nt, Artificial Sequence
  Description of Artificial Sequence: Synthetic oligonucleotide
  Antisense strand to SEQ ID NO: 1831393
guacuagcuagaauucuau

SEQ ID NO: 1831395 - RNA, 19 nt, Artificial Sequence
  Description of Artificial Sequence: Synthetic oligonucleotide
  Sense strand starting at position 1251 of SEQ ID NO: 1563781
uggcaucucuuucugggaa

SEQ ID NO: 1831396 - RNA, 19 nt, Artificial Sequence
  Description of Artificial Sequence: Synthetic oligonucleotide
  Antisense strand to SEQ ID NO: 1831395
uucccagaaagagaugcca

SEQ ID NO: 1831397 - RNA, 19 nt, Artificial Sequence
  Description of Artificial Sequence: Synthetic oligonucleotide
  Sense strand starting at position 1271 of SEQ ID NO: 1563781
aguguagaugacggaaaua

SEQ ID NO: 1831398 - RNA, 19 nt, Artificial Sequence
  Description of Artificial Sequence: Synthetic oligonucleotide
  Antisense strand to SEQ ID NO: 1831397
uauuuccgucaucuacacu

SEQ ID NO: 1831399 - RNA, 19 nt, Artificial Sequence
  Description of Artificial Sequence: Synthetic oligonucleotide
  Sense strand starting at position 1335 of SEQ ID NO: 1563781
auccauugcccauagcaga

SEQ ID NO: 1831400 - RNA, 19 nt, Artificial Sequence
  Description of Artificial Sequence: Synthetic oligonucleotide
  Antisense strand to SEQ ID NO: 1831399
ucugcuaugggcaauggau

SEQ ID NO: 1831401 - RNA, 19 nt, Artificial Sequence
  Description of Artificial Sequence: Synthetic oligonucleotide
  Sense strand starting at position 1353 of SEQ ID NO: 1563781
auccuaaacugagguauuu

SEQ ID NO: 1831402 - RNA, 19 nt, Artificial Sequence
  Description of Artificial Sequence: Synthetic oligonucleotide
  Antisense strand to SEQ ID NO: 1831401
aaauaccucaguuuaggau

SEQ ID NO: 1831403 - RNA, 19 nt, Artificial Sequence
  Description of Artificial Sequence: Synthetic oligonucleotide
  Sense strand starting at position 1416 of SEQ ID NO: 1563781
ccaauaucccgaugaacuu

SEQ ID NO: 1831404 - RNA, 19 nt, Artificial Sequence
  Description of Artificial Sequence: Synthetic oligonucleotide
  Antisense strand to SEQ ID NO: 1831403
aaguucaucgggauauugg

SEQ ID NO: 1831405 - RNA, 19 nt, Artificial Sequence
  Description of Artificial Sequence: Synthetic oligonucleotide
  Sense strand starting at position 1426 of SEQ ID NO: 1563781
gaugaacuuuccgugagag

SEQ ID NO: 1831406 - RNA, 19 nt, Artificial Sequence
  Description of Artificial Sequence: Synthetic oligonucleotide
  Antisense strand to SEQ ID NO: 1831405
cucucacggaaaguucauc

SEQ ID NO: 1831407 - RNA, 19 nt, Artificial Sequence
  Description of Artificial Sequence: Synthetic oligonucleotide
  Sense strand starting at position 1427 of SEQ ID NO: 1563781
augaacuuuccgugagagg

SEQ ID NO: 1831408 - RNA, 19 nt, Artificial Sequence
  Description of Artificial Sequence: Synthetic oligonucleotide
  Antisense strand to SEQ ID NO: 1831407
ccucucacggaaaguucau

SEQ ID NO: 1831409 - RNA, 19 nt, Artificial Sequence
  Description of Artificial Sequence: Synthetic oligonucleotide
  Sense strand starting at position 1428 of SEQ ID NO: 1563781
ugaacuuuccgugagaggu

SEQ ID NO: 1831410 - RNA, 19 nt, Artificial Sequence
  Description of Artificial Sequence: Synthetic oligonucleotide
  Antisense strand to SEQ ID NO: 1831409
accucucacggaaaguuca

SEQ ID NO: 1831411 - RNA, 19 nt, Artificial Sequence
  Description of Artificial Sequence: Synthetic oligonucleotide
  Sense strand starting at position 1436 of SEQ ID NO: 1563781
ccgugagaggugucgcuaa

SEQ ID NO: 1831412 - RNA, 19 nt, Artificial Sequence
  Description of Artificial Sequence: Synthetic oligonucleotide
  Antisense strand to SEQ ID NO: 1831411
uuagcgacaccucucacgg

SEQ ID NO: 1831413 - RNA, 19 nt, Artificial Sequence
  Description of Artificial Sequence: Synthetic oligonucleotide
  Sense strand starting at position 1545 of SEQ ID NO: 1563781
gacuacuucgugggagaga

SEQ ID NO: 1831414 - RNA, 19 nt, Artificial Sequence
  Description of Artificial Sequence: Synthetic oligonucleotide
  Antisense strand to SEQ ID NO: 1831413
ucucucccacgaaguaguc

SEQ ID NO: 1831415 - RNA, 19 nt, Artificial Sequence
  Description of Artificial Sequence: Synthetic oligonucleotide
  Sense strand starting at position 1734 of SEQ ID NO: 1563781
cuugccauauuuguaucua

SEQ ID NO: 1831416 - RNA, 19 nt, Artificial Sequence
  Description of Artificial Sequence: Synthetic oligonucleotide
  Antisense strand to SEQ ID NO: 1831415
uagauacaaauauggcaag

SEQ ID NO: 1831417 - RNA, 19 nt, Artificial Sequence
  Description of Artificial Sequence: Synthetic oligonucleotide
  Sense strand starting at position 1866 of SEQ ID NO: 1563781
ugcauuauucccgaacauc

SEQ ID NO: 1831418 - RNA, 19 nt, Artificial Sequence
  Description of Artificial Sequence: Synthetic oligonucleotide
  Antisense strand to SEQ ID NO: 1831417
gauguucgggaauaaugca

SEQ ID NO: 1831419 - RNA, 19 nt, Artificial Sequence
  Description of Artificial Sequence: Synthetic oligonucleotide
  Sense strand starting at position 1880 of SEQ ID NO: 1563781
acaucuaaacgcugaguuu

SEQ ID NO: 1831420 - RNA, 19 nt, Artificial Sequence
  Description of Artificial Sequence: Synthetic oligonucleotide
  Antisense strand to SEQ ID NO: 1831419
aaacucagcguuuagaugu

SEQ ID NO: 1831421 - RNA, 19 nt, Artificial Sequence
  Description of Artificial Sequence: Synthetic oligonucleotide
  Sense strand starting at position 1943 of SEQ ID NO: 1563781
guggcacugaccugucuaa

SEQ ID NO: 1831422 - RNA, 19 nt, Artificial Sequence
  Description of Artificial Sequence: Synthetic oligonucleotide
  Antisense strand to SEQ ID NO: 1831421
uuagacaggucagugccac

SEQ ID NO: 1831423 - RNA, 19 nt, Artificial Sequence
  Description of Artificial Sequence: Synthetic oligonucleotide
  Sense strand starting at position 1964 of SEQ ID NO: 1563781
agaggcuucuguucuugau

SEQ ID NO: 1831424 - RNA, 19 nt, Artificial Sequence
  Description of Artificial Sequence: Synthetic oligonucleotide
  Antisense strand to SEQ ID NO: 1831423
aucaagaacagaagccucu

SEQ ID NO: 1831425 - RNA, 19 nt, Artificial Sequence
  Description of Artificial Sequence: Synthetic oligonucleotide
  Sense strand starting at position 2007 of SEQ ID NO: 1563781
gcgcucuuuguaccaggua

SEQ ID NO: 1831426 - RNA, 19 nt, Artificial Sequence
  Description of Artificial Sequence: Synthetic oligonucleotide
  Antisense strand to SEQ ID NO: 1831425
uaccugguacaaagagcgc

SEQ ID NO: 1831427 - RNA, 19 nt, Artificial Sequence
  Description of Artificial Sequence: Synthetic oligonucleotide
  Sense strand starting at position 2010 of SEQ ID NO: 1563781
cucuuuguaccagguauaa

SEQ ID NO: 1831428 - RNA, 19 nt, Artificial Sequence
  Description of Artificial Sequence: Synthetic oligonucleotide
  Antisense strand to SEQ ID NO: 1831427
uuauaccugguacaaagag

SEQ ID NO: 1831429 - RNA, 19 nt, Artificial Sequence
  Description of Artificial Sequence: Synthetic oligonucleotide
  Sense strand starting at position 2032 of SEQ ID NO: 1563781
uagugaguguaugucauaa

SEQ ID NO: 1831430 - RNA, 19 nt, Artificial Sequence
  Description of Artificial Sequence: Synthetic oligonucleotide
  Antisense strand to SEQ ID NO: 1831429
uuaugacauacacucacua

SEQ ID NO: 1831431 - RNA, 19 nt, Artificial Sequence
  Description of Artificial Sequence: Synthetic oligonucleotide
  Sense strand starting at position 2179 of SEQ ID NO: 1563781
auacguuuacuauaugaac

SEQ ID NO: 1831432 - RNA, 19 nt, Artificial Sequence
  Description of Artificial Sequence: Synthetic oligonucleotide
  Antisense strand to SEQ ID NO: 1831431
guucauauaguaaacguau

SEQ ID NO: 1831433 - RNA, 19 nt, Artificial Sequence
  Description of Artificial Sequence: Synthetic oligonucleotide
  Sense strand starting at position 2836 of SEQ ID NO: 1563781
uguaaugggaguuguuaaa

SEQ ID NO: 1831434 - RNA, 19 nt, Artificial Sequence
  Description of Artificial Sequence: Synthetic oligonucleotide
  Antisense strand to SEQ ID NO: 1831433
uuuaacaacucccauuaca

SEQ ID NO: 1831435 - RNA, 19 nt, Artificial Sequence
  Description of Artificial Sequence: Synthetic oligonucleotide
  Sense strand starting at position 2846 of SEQ ID NO: 1563781
guuguuaaauaccuugaga

SEQ ID NO: 1831436 - RNA, 19 nt, Artificial Sequence
  Description of Artificial Sequence: Synthetic oligonucleotide
  Antisense strand to SEQ ID NO: 1831435
ucucaagguauuuaacaac

SEQ ID NO: 1831437 - RNA, 19 nt, Artificial Sequence
  Description of Artificial Sequence: Synthetic oligonucleotide
  Sense strand starting at position 2848 of SEQ ID NO: 1563781
uguuaaauaccuugagagu

SEQ ID NO: 1831438 - RNA, 19 nt, Artificial Sequence
  Description of Artificial Sequence: Synthetic oligonucleotide
  Antisense strand to SEQ ID NO: 1831437
acucucaagguauuuaaca

SEQ ID NO: 1831439 - RNA, 19 nt, Artificial Sequence
  Description of Artificial Sequence: Synthetic oligonucleotide
  Sense strand starting at position 2880 of SEQ ID NO: 1563781
gguagagucccacagaggu

SEQ ID NO: 1831440 - RNA, 19 nt, Artificial Sequence
  Description of Artificial Sequence: Synthetic oligonucleotide
  Antisense strand to SEQ ID NO: 1831439
accucugugggacucuacc

SEQ ID NO: 1831441 - RNA, 19 nt, Artificial Sequence
  Description of Artificial Sequence: Synthetic oligonucleotide
  Sense strand starting at position 2920 of SEQ ID NO: 1563781
agcccucuagccuaaguau

SEQ ID NO: 1831442 - RNA, 19 nt, Artificial Sequence
  Description of Artificial Sequence: Synthetic oligonucleotide
  Antisense strand to SEQ ID NO: 1831441
auacuuaggcuagagggcu

SEQ ID NO: 1831443 - RNA, 19 nt, Artificial Sequence
  Description of Artificial Sequence: Synthetic oligonucleotide
  Sense strand starting at position 2929 of SEQ ID NO: 1563781
gccuaaguauuugagaaua

SEQ ID NO: 1831444 - RNA, 19 nt, Artificial Sequence
  Description of Artificial Sequence: Synthetic oligonucleotide
  Antisense strand to SEQ ID NO: 1831443
uauucucaaauacuuaggc

SEQ ID NO: 1831445 - RNA, 19 nt, Artificial Sequence
  Description of Artificial Sequence: Synthetic oligonucleotide
  Sense strand starting at position 2931 of SEQ ID NO: 1563781
cuaaguauuugagaauaca

SEQ ID NO: 1831446 - RNA, 19 nt, Artificial Sequence
  Description of Artificial Sequence: Synthetic oligonucleotide
  Antisense strand to SEQ ID NO: 1831445
uguauucucaaauacuuag

SEQ ID NO: 1831447 - RNA, 19 nt, Artificial Sequence
  Description of Artificial Sequence: Synthetic oligonucleotide
  Sense strand starting at position 3024 of SEQ ID NO: 1563781
guggaguuggaaugagguu

SEQ ID NO: 1831448 - RNA, 19 nt, Artificial Sequence
  Description of Artificial Sequence: Synthetic oligonucleotide
  Antisense strand to SEQ ID NO: 1831447
aaccucauuccaacuccac

SEQ ID NO: 1831449 - RNA, 19 nt, Artificial Sequence
  Description of Artificial Sequence: Synthetic oligonucleotide
  Sense strand starting at position 3384 of SEQ ID NO: 1563781
ggaacuagacgcugucuca

SEQ ID NO: 1831450 - RNA, 19 nt, Artificial Sequence
  Description of Artificial Sequence: Synthetic oligonucleotide
  Antisense strand to SEQ ID NO: 1831449
ugagacagcgucuaguucc

SEQ ID NO: 1831451 - RNA, 19 nt, Artificial Sequence
  Description of Artificial Sequence: Synthetic oligonucleotide
  Sense strand starting at position 3461 of SEQ ID NO: 1563781
uugucuugguaaucacuuu

SEQ ID NO: 1831452 - RNA, 19 nt, Artificial Sequence
  Description of Artificial Sequence: Synthetic oligonucleotide
  Antisense strand to SEQ ID NO: 1831451
aaagugauuaccaagacaa

SEQ ID NO: 1831453 - RNA, 19 nt, Artificial Sequence
  Description of Artificial Sequence: Synthetic oligonucleotide
  Sense strand starting at position 3796 of SEQ ID NO: 1563781
ugaucuuuccacuguacca

SEQ ID NO: 1831454 - RNA, 19 nt, Artificial Sequence
  Description of Artificial Sequence: Synthetic oligonucleotide
  Antisense strand to SEQ ID NO: 1831453
ugguacaguggaaagauca

SEQ ID NO: 1831455 - RNA, 19 nt, Artificial Sequence
  Description of Artificial Sequence: Synthetic oligonucleotide
  Sense strand starting at position 3878 of SEQ ID NO: 1563781
acaaauuguugguuugcaa

SEQ ID NO: 1831456 - RNA, 19 nt, Artificial Sequence
  Description of Artificial Sequence: Synthetic oligonucleotide
  Antisense strand to SEQ ID NO: 1831455
uugcaaaccaacaauuugu

SEQ ID NO: 1831457 - RNA, 19 nt, Artificial Sequence
  Description of Artificial Sequence: Synthetic oligonucleotide
  Sense strand starting at position 3920 of SEQ ID NO: 1563781
auuccauaaguauguguaa

SEQ ID NO: 1831458 - RNA, 19 nt, Artificial Sequence
  Description of Artificial Sequence: Synthetic oligonucleotide
  Antisense strand to SEQ ID NO: 1831457
uuacacauacuuauggaau

SEQ ID NO: 1831459 - RNA, 19 nt, Artificial Sequence
  Description of Artificial Sequence: Synthetic oligonucleotide
  Sense strand starting at position 3922 of SEQ ID NO: 1563781
uccauaaguauguguaagu

SEQ ID NO: 1831460 - RNA, 19 nt, Artificial Sequence
  Description of Artificial Sequence: Synthetic oligonucleotide
  Antisense strand to SEQ ID NO: 1831459
acuuacacauacuuaugga

SEQ ID NO: 1831461 - RNA, 19 nt, Artificial Sequence
  Description of Artificial Sequence: Synthetic oligonucleotide
  Sense strand starting at position 3932 of SEQ ID NO: 1563781
uguguaagugccuaguaca

SEQ ID NO: 1831462 - RNA, 19 nt, Artificial Sequence
  Description of Artificial Sequence: Synthetic oligonucleotide
  Antisense strand to SEQ ID NO: 1831461
uguacuaggcacuuacaca

SEQ ID NO: 1831463 - RNA, 19 nt, Artificial Sequence
  Description of Artificial Sequence: Synthetic oligonucleotide
  Sense strand starting at position 426 of SEQ ID NO: 1563782
ggugauuguacacaucgaa

SEQ ID NO: 1831464 - RNA, 19 nt, Artificial Sequence
  Description of Artificial Sequence: Synthetic oligonucleotide
  Antisense strand to SEQ ID NO: 1831463
uucgauguguacaaucacc

SEQ ID NO: 1831465 - RNA, 19 nt, Artificial Sequence
  Description of Artificial Sequence: Synthetic oligonucleotide
  Sense strand starting at position 687 of SEQ ID NO: 1563782
aguugagggccuggaugau

SEQ ID NO: 1831466 - RNA, 19 nt, Artificial Sequence
  Description of Artificial Sequence: Synthetic oligonucleotide
  Antisense strand to SEQ ID NO: 1831465
aucauccaggcccucaacu

SEQ ID NO: 1831467 - RNA, 19 nt, Artificial Sequence
  Description of Artificial Sequence: Synthetic oligonucleotide
  Sense strand starting at position 1296 of SEQ ID NO: 1563782
ugaaguagucacuggagca

SEQ ID NO: 1831468 - RNA, 19 nt, Artificial Sequence
  Description of Artificial Sequence: Synthetic oligonucleotide
  Antisense strand to SEQ ID NO: 1831467
ugcuccagugacuacuuca

SEQ ID NO: 1831469 - RNA, 19 nt, Artificial Sequence
  Description of Artificial Sequence: Synthetic oligonucleotide
  Sense strand starting at position 1297 of SEQ ID NO: 1563782
gaaguagucacuggagcac

SEQ ID NO: 1831470 - RNA, 19 nt, Artificial Sequence
  Description of Artificial Sequence: Synthetic oligonucleotide
  Antisense strand to SEQ ID NO: 1831469
gugcuccagugacuacuuc

SEQ ID NO: 1831471 - RNA, 19 nt, Artificial Sequence
  Description of Artificial Sequence: Synthetic oligonucleotide
  Sense strand starting at position 1421 of SEQ ID NO: 1563782
ccgccaugagcuuugcagu

SEQ ID NO: 1831472 - RNA, 19 nt, Artificial Sequence
  Description of Artificial Sequence: Synthetic oligonucleotide
  Antisense strand to SEQ ID NO: 1831471
acugcaaagcucauggcgg

SEQ ID NO: 1831473 - RNA, 19 nt, Artificial Sequence
  Description of Artificial Sequence: Synthetic oligonucleotide
  Sense strand starting at position 1427 of SEQ ID NO: 1563782
ugagcuuugcaguaagaca

SEQ ID NO: 1831474 - RNA, 19 nt, Artificial Sequence
  Description of Artificial Sequence: Synthetic oligonucleotide
  Antisense strand to SEQ ID NO: 1831473
ugucuuacugcaaagcuca

SEQ ID NO: 1831475 - RNA, 19 nt, Artificial Sequence
  Description of Artificial Sequence: Synthetic oligonucleotide
  Sense strand starting at position 1576 of SEQ ID NO: 1563782
gcccauuucugccugcuca

SEQ ID NO: 1831476 - RNA, 19 nt, Artificial Sequence
  Description of Artificial Sequence: Synthetic oligonucleotide
  Antisense strand to SEQ ID NO: 1831475
ugagcaggcagaaaugggc

SEQ ID NO: 1831477 - RNA, 19 nt, Artificial Sequence
  Description of Artificial Sequence: Synthetic oligonucleotide
  Sense strand starting at position 1583 of SEQ ID NO: 1563782
ucugccugcucaguuuaaa

SEQ ID NO: 1831478 - RNA, 19 nt, Artificial Sequence
  Description of Artificial Sequence: Synthetic oligonucleotide
  Antisense strand to SEQ ID NO: 1831477
uuuaaacugagcaggcaga

SEQ ID NO: 1831479 - RNA, 19 nt, Artificial Sequence
  Description of Artificial Sequence: Synthetic oligonucleotide
  Sense strand starting at position 2426 of SEQ ID NO: 1563782
ugucccugugucugggaaa

SEQ ID NO: 1831480 - RNA, 19 nt, Artificial Sequence
  Description of Artificial Sequence: Synthetic oligonucleotide
  Antisense strand to SEQ ID NO: 1831479
uuucccagacacagggaca

SEQ ID NO: 1831481 - RNA, 19 nt, Artificial Sequence
  Description of Artificial Sequence: Synthetic oligonucleotide
  Sense strand starting at position 2454 of SEQ ID NO: 1563782
gcucaacuuucugcuuuga

SEQ ID NO: 1831482 - RNA, 19 nt, Artificial Sequence
  Description of Artificial Sequence: Synthetic oligonucleotide
  Antisense strand to SEQ ID NO: 1831481
ucaaagcagaaaguugagc

SEQ ID NO: 1831483 - RNA, 19 nt, Artificial Sequence
  Description of Artificial Sequence: Synthetic oligonucleotide
  Sense strand starting at position 2456 of SEQ ID NO: 1563782
ucaacuuucugcuuugaag

SEQ ID NO: 1831484 - RNA, 19 nt, Artificial Sequence
  Description of Artificial Sequence: Synthetic oligonucleotide
  Antisense strand to SEQ ID NO: 1831483
cuucaaagcagaaaguuga

SEQ ID NO: 1831485 - RNA, 19 nt, Artificial Sequence
  Description of Artificial Sequence: Synthetic oligonucleotide
  Sense strand starting at position 2499 of SEQ ID NO: 1563782
cgaggauuaagcugcgacu

SEQ ID NO: 1831486 - RNA, 19 nt, Artificial Sequence
  Description of Artificial Sequence: Synthetic oligonucleotide
  Antisense strand to SEQ ID NO: 1831485
agucgcagcuuaauccucg

SEQ ID NO: 1831487 - RNA, 19 nt, Artificial Sequence
  Description of Artificial Sequence: Synthetic oligonucleotide
  Sense strand starting at position 2501 of SEQ ID NO: 1563782
aggauuaagcugcgacuuu

SEQ ID NO: 1831488 - RNA, 19 nt, Artificial Sequence
  Description of Artificial Sequence: Synthetic oligonucleotide
  Antisense strand to SEQ ID NO: 1831487
aaagucgcagcuuaauccu

SEQ ID NO: 1831489 - RNA, 19 nt, Artificial Sequence
  Description of Artificial Sequence: Synthetic oligonucleotide
  Sense strand starting at position 2512 of SEQ ID NO: 1563782
gcgacuuugcgcgcugaca

SEQ ID NO: 1831490 - RNA, 19 nt, Artificial Sequence
  Description of Artificial Sequence: Synthetic oligonucleotide
  Antisense strand to SEQ ID NO: 1831489
ugucagcgcgcaaagucgc

SEQ ID NO: 1831491 - RNA, 19 nt, Artificial Sequence
  Description of Artificial Sequence: Synthetic oligonucleotide
  Sense strand starting at position 2643 of SEQ ID NO: 1563782
gagagauucugggccuacu

SEQ ID NO: 1831492 - RNA, 19 nt, Artificial Sequence
  Description of Artificial Sequence: Synthetic oligonucleotide
  Antisense strand to SEQ ID NO: 1831491
aguaggcccagaaucucuc

SEQ ID NO: 1831493 - RNA, 19 nt, Artificial Sequence
  Description of Artificial Sequence: Synthetic oligonucleotide
  Sense strand starting at position 2913 of SEQ ID NO: 1563782
cuaauuacuggcugcuaca

SEQ ID NO: 1831494 - RNA, 19 nt, Artificial Sequence
  Description of Artificial Sequence: Synthetic oligonucleotide
  Antisense strand to SEQ ID NO: 1831493
uguagcagccaguaauuag

SEQ ID NO: 1831495 - RNA, 19 nt, Artificial Sequence
  Description of Artificial Sequence: Synthetic oligonucleotide
  Sense strand starting at position 2924 of SEQ ID NO: 1563782
cugcuacauccucgauguu

SEQ ID NO: 1831496 - RNA, 19 nt, Artificial Sequence
  Description of Artificial Sequence: Synthetic oligonucleotide
  Antisense strand to SEQ ID NO: 1831495
aacaucgaggauguagcag

SEQ ID NO: 1831497 - RNA, 19 nt, Artificial Sequence
  Description of Artificial Sequence: Synthetic oligonucleotide
  Sense strand starting at position 2925 of SEQ ID NO: 1563782
ugcuacauccucgauguua

SEQ ID NO: 1831498 - RNA, 19 nt, Artificial Sequence
  Description of Artificial Sequence: Synthetic oligonucleotide
  Antisense strand to SEQ ID NO: 1831497
uaacaucgaggauguagca

SEQ ID NO: 1831499 - RNA, 19 nt, Artificial Sequence
  Description of Artificial Sequence: Synthetic oligonucleotide
  Sense strand starting at position 2927 of SEQ ID NO: 1563782
cuacauccucgauguuauc

SEQ ID NO: 1831500 - RNA, 19 nt, Artificial Sequence
  Description of Artificial Sequence: Synthetic oligonucleotide
  Antisense strand to SEQ ID NO: 1831499
gauaacaucgaggauguag

SEQ ID NO: 1831501 - RNA, 19 nt, Artificial Sequence
  Description of Artificial Sequence: Synthetic oligonucleotide
  Sense strand starting at position 2936 of SEQ ID NO: 1563782
cgauguuaucccgggauaa

SEQ ID NO: 1831502 - RNA, 19 nt, Artificial Sequence
  Description of Artificial Sequence: Synthetic oligonucleotide
  Antisense strand to SEQ ID NO: 1831501
uuaucccgggauaacaucg

SEQ ID NO: 1831503 - RNA, 19 nt, Artificial Sequence
  Description of Artificial Sequence: Synthetic oligonucleotide
  Sense strand starting at position 2937 of SEQ ID NO: 1563782
gauguuaucccgggauaau

SEQ ID NO: 1831504 - RNA, 19 nt, Artificial Sequence
  Description of Artificial Sequence: Synthetic oligonucleotide
  Antisense strand to SEQ ID NO: 1831503
auuaucccgggauaacauc

SEQ ID NO: 1831505 - RNA, 19 nt, Artificial Sequence
  Description of Artificial Sequence: Synthetic oligonucleotide
  Sense strand starting at position 2938 of SEQ ID NO: 1563782
auguuaucccgggauaaug

SEQ ID NO: 1831506 - RNA, 19 nt, Artificial Sequence
  Description of Artificial Sequence: Synthetic oligonucleotide
  Antisense strand to SEQ ID NO: 1831505
cauuaucccgggauaacau

SEQ ID NO: 1831507 - RNA, 19 nt, Artificial Sequence
  Description of Artificial Sequence: Synthetic oligonucleotide
  Sense strand starting at position 2950 of SEQ ID NO: 1563782
gauaaugagccguacgguu

SEQ ID NO: 1831508 - RNA, 19 nt, Artificial Sequence
  Description of Artificial Sequence: Synthetic oligonucleotide
  Antisense strand to SEQ ID NO: 1831507
aaccguacggcucauuauc

SEQ ID NO: 1831509 - RNA, 19 nt, Artificial Sequence
  Description of Artificial Sequence: Synthetic oligonucleotide
  Sense strand starting at position 2967 of SEQ ID NO: 1563782
uugcaagcucgguaaagcu

SEQ ID NO: 1831510 - RNA, 19 nt, Artificial Sequence
  Description of Artificial Sequence: Synthetic oligonucleotide
  Antisense strand to SEQ ID NO: 1831509
agcuuuaccgagcuugcaa

SEQ ID NO: 1831511 - RNA, 19 nt, Artificial Sequence
  Description of Artificial Sequence: Synthetic oligonucleotide
  Sense strand starting at position 3058 of SEQ ID NO: 1563782
cagccugaucuugagacuu

SEQ ID NO: 1831512 - RNA, 19 nt, Artificial Sequence
  Description of Artificial Sequence: Synthetic oligonucleotide
  Antisense strand to SEQ ID NO: 1831511
aagucucaagaucaggcug

SEQ ID NO: 1831513 - RNA, 19 nt, Artificial Sequence
  Description of Artificial Sequence: Synthetic oligonucleotide
  Sense strand starting at position 3313 of SEQ ID NO: 1563782
uguaauaacucguauuucu

SEQ ID NO: 1831514 - RNA, 19 nt, Artificial Sequence
  Description of Artificial Sequence: Synthetic oligonucleotide
  Antisense strand to SEQ ID NO: 1831513
agaaauacgaguuauuaca

SEQ ID NO: 1831515 - RNA, 19 nt, Artificial Sequence
  Description of Artificial Sequence: Synthetic oligonucleotide
  Sense strand starting at position 3320 of SEQ ID NO: 1563782
acucguauuucugacagcu

SEQ ID NO: 1831516 - RNA, 19 nt, Artificial Sequence
  Description of Artificial Sequence: Synthetic oligonucleotide
  Antisense strand to SEQ ID NO: 1831515
agcugucagaaauacgagu

SEQ ID NO: 1831517 - RNA, 19 nt, Artificial Sequence
  Description of Artificial Sequence: Synthetic oligonucleotide
  Sense strand starting at position 3341 of SEQ ID NO: 1563782
gguuguauuucauagggaa

SEQ ID NO: 1831518 - RNA, 19 nt, Artificial Sequence
  Description of Artificial Sequence: Synthetic oligonucleotide
  Antisense strand to SEQ ID NO: 1831517
uucccuaugaaauacaacc

SEQ ID NO: 1831519 - RNA, 19 nt, Artificial Sequence
  Description of Artificial Sequence: Synthetic oligonucleotide
  Sense strand starting at position 3387 of SEQ ID NO: 1563782
gucauuuccuaccuggcau

SEQ ID NO: 1831520 - RNA, 19 nt, Artificial Sequence
  Description of Artificial Sequence: Synthetic oligonucleotide
  Antisense strand to SEQ ID NO: 1831519
augccagguaggaaaugac

SEQ ID NO: 1831521 - RNA, 19 nt, Artificial Sequence
  Description of Artificial Sequence: Synthetic oligonucleotide
  Sense strand starting at position 3399 of SEQ ID NO: 1563782
cuggcaugccauuaguacu

SEQ ID NO: 1831522 - RNA, 19 nt, Artificial Sequence
  Description of Artificial Sequence: Synthetic oligonucleotide
  Antisense strand to SEQ ID NO: 1831521
aguacuaauggcaugccag

SEQ ID NO: 1831523 - RNA, 19 nt, Artificial Sequence
  Description of Artificial Sequence: Synthetic oligonucleotide
  Sense strand starting at position 3423 of SEQ ID NO: 1563782
ggucuccaauuagaaguaa

SEQ ID NO: 1831524 - RNA, 19 nt, Artificial Sequence
  Description of Artificial Sequence: Synthetic oligonucleotide
  Antisense strand to SEQ ID NO: 1831523
uuacuucuaauuggagacc

SEQ ID NO: 1831525 - RNA, 19 nt, Artificial Sequence
  Description of Artificial Sequence: Synthetic oligonucleotide
  Sense strand starting at position 3862 of SEQ ID NO: 1563782
gaguacgguuugucuggau

SEQ ID NO: 1831526 - RNA, 19 nt, Artificial Sequence
  Description of Artificial Sequence: Synthetic oligonucleotide
  Antisense strand to SEQ ID NO: 1831525
auccagacaaaccguacuc

SEQ ID NO: 1831527 - RNA, 19 nt, Artificial Sequence
  Description of Artificial Sequence: Synthetic oligonucleotide
  Sense strand starting at position 3866 of SEQ ID NO: 1563782
acgguuugucuggaugacu

SEQ ID NO: 1831528 - RNA, 19 nt, Artificial Sequence
  Description of Artificial Sequence: Synthetic oligonucleotide
  Antisense strand to SEQ ID NO: 1831527
agucauccagacaaaccgu

SEQ ID NO: 1831529 - RNA, 19 nt, Artificial Sequence
  Description of Artificial Sequence: Synthetic oligonucleotide
  Sense strand starting at position 3874 of SEQ ID NO: 1563782
ucuggaugacuuggauauu

SEQ ID NO: 1831530 - RNA, 19 nt, Artificial Sequence
  Description of Artificial Sequence: Synthetic oligonucleotide
  Antisense strand to SEQ ID NO: 1831529
aauauccaagucauccaga

SEQ ID NO: 1831531 - RNA, 19 nt, Artificial Sequence
  Description of Artificial Sequence: Synthetic oligonucleotide
  Sense strand starting at position 3875 of SEQ ID NO: 1563782
cuggaugacuuggauauua

SEQ ID NO: 1831532 - RNA, 19 nt, Artificial Sequence
  Description of Artificial Sequence: Synthetic oligonucleotide
  Antisense strand to SEQ ID NO: 1831531
uaauauccaagucauccag

SEQ ID NO: 1831533 - RNA, 19 nt, Artificial Sequence
  Description of Artificial Sequence: Synthetic oligonucleotide
  Sense strand starting at position 3880 of SEQ ID NO: 1563782
ugacuuggauauuaaguua

SEQ ID NO: 1831534 - RNA, 19 nt, Artificial Sequence
  Description of Artificial Sequence: Synthetic oligonucleotide
  Antisense strand to SEQ ID NO: 1831533
uaacuuaauauccaaguca

SEQ ID NO: 1831535 - RNA, 19 nt, Artificial Sequence
  Description of Artificial Sequence: Synthetic oligonucleotide
  Sense strand starting at position 3896 of SEQ ID NO: 1563782
uuaccaagucuguacuaga

SEQ ID NO: 1831536 - RNA, 19 nt, Artificial Sequence
  Description of Artificial Sequence: Synthetic oligonucleotide
  Antisense strand to SEQ ID NO: 1831535
ucuaguacagacuugguaa

SEQ ID NO: 1831537 - RNA, 19 nt, Artificial Sequence
  Description of Artificial Sequence: Synthetic oligonucleotide
  Sense strand starting at position 3935 of SEQ ID NO: 1563782
uauauuaugugagcuuaug

SEQ ID NO: 1831538 - RNA, 19 nt, Artificial Sequence
  Description of Artificial Sequence: Synthetic oligonucleotide
  Antisense strand to SEQ ID NO: 1831537
cauaagcucacauaauaua

SEQ ID NO: 1831539 - RNA, 19 nt, Artificial Sequence
  Description of Artificial Sequence: Synthetic oligonucleotide
  Sense strand starting at position 3941 of SEQ ID NO: 1563782
augugagcuuauguaugau

SEQ ID NO: 1831540 - RNA, 19 nt, Artificial Sequence
  Description of Artificial Sequence: Synthetic oligonucleotide
  Antisense strand to SEQ ID NO: 1831539
aucauacauaagcucacau

SEQ ID NO: 1831541 - RNA, 19 nt, Artificial Sequence
  Description of Artificial Sequence: Synthetic oligonucleotide
  Sense strand starting at position 3944 of SEQ ID NO: 1563782
ugagcuuauguaugauaaa

SEQ ID NO: 1831542 - RNA, 19 nt, Artificial Sequence
  Description of Artificial Sequence: Synthetic oligonucleotide
  Antisense strand to SEQ ID NO: 1831541
uuuaucauacauaagcuca

SEQ ID NO: 1831543 - RNA, 19 nt, Artificial Sequence
  Description of Artificial Sequence: Synthetic oligonucleotide
  Sense strand starting at position 13 of SEQ ID NO: 1563783
ucuauauuacuuugagagu

SEQ ID NO: 1831544 - RNA, 19 nt, Artificial Sequence
  Description of Artificial Sequence: Synthetic oligonucleotide
  Antisense strand to SEQ ID NO: 1831543
acucucaaaguaauauaga

SEQ ID NO: 1831545 - RNA, 19 nt, Artificial Sequence
  Description of Artificial Sequence: Synthetic oligonucleotide
  Sense strand starting at position 118 of SEQ ID NO: 1563783
acacauacgugcuuuauuu

SEQ ID NO: 1831546 - RNA, 19 nt, Artificial Sequence
  Description of Artificial Sequence: Synthetic oligonucleotide
  Antisense strand to SEQ ID NO: 1831545
aaauaaagcacguaugugu

SEQ ID NO: 1831547 - RNA, 19 nt, Artificial Sequence
  Description of Artificial Sequence: Synthetic oligonucleotide
  Sense strand starting at position 125 of SEQ ID NO: 1563783
cgugcuuuauuuccugaga

SEQ ID NO: 1831548 - RNA, 19 nt, Artificial Sequence
  Description of Artificial Sequence: Synthetic oligonucleotide
  Antisense strand to SEQ ID NO: 1831547
ucucaggaaauaaagcacg

SEQ ID NO: 1831549 - RNA, 19 nt, Artificial Sequence
  Description of Artificial Sequence: Synthetic oligonucleotide
  Sense strand starting at position 386 of SEQ ID NO: 1563783
gagacauaguaugccagau

SEQ ID NO: 1831550 - RNA, 19 nt, Artificial Sequence
  Description of Artificial Sequence: Synthetic oligonucleotide
  Antisense strand to SEQ ID NO: 1831549
aucuggcauacuaugucuc

SEQ ID NO: 1831551 - RNA, 19 nt, Artificial Sequence
  Description of Artificial Sequence: Synthetic oligonucleotide
  Sense strand starting at position 511 of SEQ ID NO: 1563783
auuaucaacugugucuaaa

SEQ ID NO: 1831552 - RNA, 19 nt, Artificial Sequence
  Description of Artificial Sequence: Synthetic oligonucleotide
  Antisense strand to SEQ ID NO: 1831551
uuuagacacaguugauaau

SEQ ID NO: 1831553 - RNA, 19 nt, Artificial Sequence
  Description of Artificial Sequence: Synthetic oligonucleotide
  Sense strand starting at position 585 of SEQ ID NO: 1563783
aggauacacuagguuaagu

SEQ ID NO: 1831554 - RNA, 19 nt, Artificial Sequence
  Description of Artificial Sequence: Synthetic oligonucleotide
  Antisense strand to SEQ ID NO: 1831553
acuuaaccuaguguauccu

SEQ ID NO: 1831555 - RNA, 19 nt, Artificial Sequence
  Description of Artificial Sequence: Synthetic oligonucleotide
  Sense strand starting at position 599 of SEQ ID NO: 1563783
uaaguuauaguugacagua

SEQ ID NO: 1831556 - RNA, 19 nt, Artificial Sequence
  Description of Artificial Sequence: Synthetic oligonucleotide
  Antisense strand to SEQ ID NO: 1831555
uacugucaacuauaacuua

SEQ ID NO: 1831557 - RNA, 19 nt, Artificial Sequence
  Description of Artificial Sequence: Synthetic oligonucleotide
  Sense strand starting at position 785 of SEQ ID NO: 1563783
aucacauugcuguaaguag

SEQ ID NO: 1831558 - RNA, 19 nt, Artificial Sequence
  Description of Artificial Sequence: Synthetic oligonucleotide
  Antisense strand to SEQ ID NO: 1831557
cuacuuacagcaaugugau

SEQ ID NO: 1831559 - RNA, 19 nt, Artificial Sequence
  Description of Artificial Sequence: Synthetic oligonucleotide
  Sense strand starting at position 815 of SEQ ID NO: 1563783
cugcuuuauguagaauauu

SEQ ID NO: 1831560 - RNA, 19 nt, Artificial Sequence
  Description of Artificial Sequence: Synthetic oligonucleotide
  Antisense strand to SEQ ID NO: 1831559
aauauucuacauaaagcag

SEQ ID NO: 1831561 - RNA, 19 nt, Artificial Sequence
  Description of Artificial Sequence: Synthetic oligonucleotide
  Sense strand starting at position 969 of SEQ ID NO: 1563783
uaaggaugugcugaucagu

SEQ ID NO: 1831562 - RNA, 19 nt, Artificial Sequence
  Description of Artificial Sequence: Synthetic oligonucleotide
  Antisense strand to SEQ ID NO: 1831561
acugaucagcacauccuua

SEQ ID NO: 1831563 - RNA, 19 nt, Artificial Sequence
  Description of Artificial Sequence: Synthetic oligonucleotide
  Sense strand starting at position 1029 of SEQ ID NO: 1563783
cagaaagaguucuccguga

SEQ ID NO: 1831564 - RNA, 19 nt, Artificial Sequence
  Description of Artificial Sequence: Synthetic oligonucleotide
  Antisense strand to SEQ ID NO: 1831563
ucacggagaacucuuucug

SEQ ID NO: 1831565 - RNA, 19 nt, Artificial Sequence
  Description of Artificial Sequence: Synthetic oligonucleotide
  Sense strand starting at position 1203 of SEQ ID NO: 1563783
gguaauuauaaagacguau

SEQ ID NO: 1831566 - RNA, 19 nt, Artificial Sequence
  Description of Artificial Sequence: Synthetic oligonucleotide
  Antisense strand to SEQ ID NO: 1831565
auacgucuuuauaauuacc

SEQ ID NO: 1831567 - RNA, 19 nt, Artificial Sequence
  Description of Artificial Sequence: Synthetic oligonucleotide
  Sense strand starting at position 1270 of SEQ ID NO: 1563783
agacucugauuggcugaau

SEQ ID NO: 1831568 - RNA, 19 nt, Artificial Sequence
  Description of Artificial Sequence: Synthetic oligonucleotide
  Antisense strand to SEQ ID NO: 1831567
auucagccaaucagagucu

SEQ ID NO: 1831569 - RNA, 19 nt, Artificial Sequence
  Description of Artificial Sequence: Synthetic oligonucleotide
  Sense strand starting at position 1271 of SEQ ID NO: 1563783
gacucugauuggcugaaua

SEQ ID NO: 1831570 - RNA, 19 nt, Artificial Sequence
  Description of Artificial Sequence: Synthetic oligonucleotide
  Antisense strand to SEQ ID NO: 1831569
uauucagccaaucagaguc

SEQ ID NO: 1831571 - RNA, 19 nt, Artificial Sequence
  Description of Artificial Sequence: Synthetic oligonucleotide
  Sense strand starting at position 1273 of SEQ ID NO: 1563783
cucugauuggcugaauaca

SEQ ID NO: 1831572 - RNA, 19 nt, Artificial Sequence
  Description of Artificial Sequence: Synthetic oligonucleotide
  Antisense strand to SEQ ID NO: 1831571
uguauucagccaaucagag

SEQ ID NO: 1831573 - RNA, 19 nt, Artificial Sequence
  Description of Artificial Sequence: Synthetic oligonucleotide
  Sense strand starting at position 1345 of SEQ ID NO: 1563783
aggauaaguuaacugaagu

SEQ ID NO: 1831574 - RNA, 19 nt, Artificial Sequence
  Description of Artificial Sequence: Synthetic oligonucleotide
  Antisense strand to SEQ ID NO: 1831573
acuucaguuaacuuauccu

SEQ ID NO: 1831575 - RNA, 19 nt, Artificial Sequence
  Description of Artificial Sequence: Synthetic oligonucleotide
  Sense strand starting at position 1346 of SEQ ID NO: 1563783
ggauaaguuaacugaaguu

SEQ ID NO: 1831576 - RNA, 19 nt, Artificial Sequence
  Description of Artificial Sequence: Synthetic oligonucleotide
  Antisense strand to SEQ ID NO: 1831575
aacuucaguuaacuuaucc

SEQ ID NO: 1831577 - RNA, 19 nt, Artificial Sequence
  Description of Artificial Sequence: Synthetic oligonucleotide
  Sense strand starting at position 2234 of SEQ ID NO: 1563783
aagcgaaguguuuaaacuu

SEQ ID NO: 1831578 - RNA, 19 nt, Artificial Sequence
  Description of Artificial Sequence: Synthetic oligonucleotide
  Antisense strand to SEQ ID NO: 1831577
aaguuuaaacacuucgcuu

SEQ ID NO: 1831579 - RNA, 19 nt, Artificial Sequence
  Description of Artificial Sequence: Synthetic oligonucleotide
  Sense strand starting at position 2434 of SEQ ID NO: 1563783
cccucaugcggguucguaa

SEQ ID NO: 1831580 - RNA, 19 nt, Artificial Sequence
  Description of Artificial Sequence: Synthetic oligonucleotide
  Antisense strand to SEQ ID NO: 1831579
uuacgaacccgcaugaggg

SEQ ID NO: 1831581 - RNA, 19 nt, Artificial Sequence
  Description of Artificial Sequence: Synthetic oligonucleotide
  Sense strand starting at position 2435 of SEQ ID NO: 1563783
ccucaugcggguucguaau

SEQ ID NO: 1831582 - RNA, 19 nt, Artificial Sequence
  Description of Artificial Sequence: Synthetic oligonucleotide
  Antisense strand to SEQ ID NO: 1831581
auuacgaacccgcaugagg

SEQ ID NO: 1831583 - RNA, 19 nt, Artificial Sequence
  Description of Artificial Sequence: Synthetic oligonucleotide
  Sense strand starting at position 2479 of SEQ ID NO: 1563783
augugaaagucucuauaug

SEQ ID NO: 1831584 - RNA, 19 nt, Artificial Sequence
  Description of Artificial Sequence: Synthetic oligonucleotide
  Antisense strand to SEQ ID NO: 1831583
cauauagagacuuucacau

SEQ ID NO: 1831585 - RNA, 19 nt, Artificial Sequence
  Description of Artificial Sequence: Synthetic oligonucleotide
  Sense strand starting at position 2480 of SEQ ID NO: 1563783
ugugaaagucucuauauga

SEQ ID NO: 1831586 - RNA, 19 nt, Artificial Sequence
  Description of Artificial Sequence: Synthetic oligonucleotide
  Antisense strand to SEQ ID NO: 1831585
ucauauagagacuuucaca

SEQ ID NO: 1831587 - RNA, 19 nt, Artificial Sequence
  Description of Artificial Sequence: Synthetic oligonucleotide
  Sense strand starting at position 2539 of SEQ ID NO: 1563783
gaaaguauugguuacccau

SEQ ID NO: 1831588 - RNA, 19 nt, Artificial Sequence
  Description of Artificial Sequence: Synthetic oligonucleotide
  Antisense strand to SEQ ID NO: 1831587
auggguaaccaauacuuuc

SEQ ID NO: 1831589 - RNA, 19 nt, Artificial Sequence
  Description of Artificial Sequence: Synthetic oligonucleotide
  Sense strand starting at position 2541 of SEQ ID NO: 1563783
aaguauugguuacccauga

SEQ ID NO: 1831590 - RNA, 19 nt, Artificial Sequence
  Description of Artificial Sequence: Synthetic oligonucleotide
  Antisense strand to SEQ ID NO: 1831589
ucauggguaaccaauacuu

SEQ ID NO: 1831591 - RNA, 19 nt, Artificial Sequence
  Description of Artificial Sequence: Synthetic oligonucleotide
  Sense strand starting at position 2709 of SEQ ID NO: 1563783
gcuccaugccuggauacaa

SEQ ID NO: 1831592 - RNA, 19 nt, Artificial Sequence
  Description of Artificial Sequence: Synthetic oligonucleotide
  Antisense strand to SEQ ID NO: 1831591
uuguauccaggcauggagc

SEQ ID NO: 1831593 - RNA, 19 nt, Artificial Sequence
  Description of Artificial Sequence: Synthetic oligonucleotide
  Sense strand starting at position 2851 of SEQ ID NO: 1563783
aggaauaacugugcccaaa

SEQ ID NO: 1831594 - RNA, 19 nt, Artificial Sequence
  Description of Artificial Sequence: Synthetic oligonucleotide
  Antisense strand to SEQ ID NO: 1831593
uuugggcacaguuauuccu

SEQ ID NO: 1831595 - RNA, 19 nt, Artificial Sequence
  Description of Artificial Sequence: Synthetic oligonucleotide
  Sense strand starting at position 2862 of SEQ ID NO: 1563783
ugcccaaaguacuuugaga

SEQ ID NO: 1831596 - RNA, 19 nt, Artificial Sequence
  Description of Artificial Sequence: Synthetic oligonucleotide
  Antisense strand to SEQ ID NO: 1831595
ucucaaaguacuuugggca

SEQ ID NO: 1831597 - RNA, 19 nt, Artificial Sequence
  Description of Artificial Sequence: Synthetic oligonucleotide
  Sense strand starting at position 2864 of SEQ ID NO: 1563783
cccaaaguacuuugagauc

SEQ ID NO: 1831598 - RNA, 19 nt, Artificial Sequence
  Description of Artificial Sequence: Synthetic oligonucleotide
  Antisense strand to SEQ ID NO: 1831597
gaucucaaaguacuuuggg

SEQ ID NO: 1831599 - RNA, 19 nt, Artificial Sequence
  Description of Artificial Sequence: Synthetic oligonucleotide
  Sense strand starting at position 3022 of SEQ ID NO: 1563783
ggaaauuauacugguguau

SEQ ID NO: 1831600 - RNA, 19 nt, Artificial Sequence
  Description of Artificial Sequence: Synthetic oligonucleotide
  Antisense strand to SEQ ID NO: 1831599
auacaccaguauaauuucc

SEQ ID NO: 1831601 - RNA, 19 nt, Artificial Sequence
  Description of Artificial Sequence: Synthetic oligonucleotide
  Sense strand starting at position 3026 of SEQ ID NO: 1563783
auuauacugguguaugacu

SEQ ID NO: 1831602 - RNA, 19 nt, Artificial Sequence
  Description of Artificial Sequence: Synthetic oligonucleotide
  Antisense strand to SEQ ID NO: 1831601
agucauacaccaguauaau

SEQ ID NO: 1831603 - RNA, 19 nt, Artificial Sequence
  Description of Artificial Sequence: Synthetic oligonucleotide
  Sense strand starting at position 3031 of SEQ ID NO: 1563783
acugguguaugacuagaaa

SEQ ID NO: 1831604 - RNA, 19 nt, Artificial Sequence
  Description of Artificial Sequence: Synthetic oligonucleotide
  Antisense strand to SEQ ID NO: 1831603
uuucuagucauacaccagu

SEQ ID NO: 1831605 - RNA, 19 nt, Artificial Sequence
  Description of Artificial Sequence: Synthetic oligonucleotide
  Sense strand starting at position 3077 of SEQ ID NO: 1563783
uuaguuugacuuuaugguu

SEQ ID NO: 1831606 - RNA, 19 nt, Artificial Sequence
  Description of Artificial Sequence: Synthetic oligonucleotide
  Antisense strand to SEQ ID NO: 1831605
aaccauaaagucaaacuaa

SEQ ID NO: 1831607 - RNA, 19 nt, Artificial Sequence
  Description of Artificial Sequence: Synthetic oligonucleotide
  Sense strand starting at position 3082 of SEQ ID NO: 1563783
uugacuuuaugguuaauga

SEQ ID NO: 1831608 - RNA, 19 nt, Artificial Sequence
  Description of Artificial Sequence: Synthetic oligonucleotide
  Antisense strand to SEQ ID NO: 1831607
ucauuaaccauaaagucaa

SEQ ID NO: 1831609 - RNA, 19 nt, Artificial Sequence
  Description of Artificial Sequence: Synthetic oligonucleotide
  Sense strand starting at position 3376 of SEQ ID NO: 1563783
auauuuggcuagucucgau

SEQ ID NO: 1831610 - RNA, 19 nt, Artificial Sequence
  Description of Artificial Sequence: Synthetic oligonucleotide
  Antisense strand to SEQ ID NO: 1831609
aucgagacuagccaaauau

SEQ ID NO: 1831611 - RNA, 19 nt, Artificial Sequence
  Description of Artificial Sequence: Synthetic oligonucleotide
  Sense strand starting at position 3582 of SEQ ID NO: 1563783
ugggauuucuuccugccuu

SEQ ID NO: 1831612 - RNA, 19 nt, Artificial Sequence
  Description of Artificial Sequence: Synthetic oligonucleotide
  Antisense strand to SEQ ID NO: 1831611
aaggcaggaagaaauccca

SEQ ID NO: 1831613 - RNA, 19 nt, Artificial Sequence
  Description of Artificial Sequence: Synthetic oligonucleotide
  Sense strand starting at position 3596 of SEQ ID NO: 1563783
gccuuuagacuuuaacuga

SEQ ID NO: 1831614 - RNA, 19 nt, Artificial Sequence
  Description of Artificial Sequence: Synthetic oligonucleotide
  Antisense strand to SEQ ID NO: 1831613
ucaguuaaagucuaaaggc

SEQ ID NO: 1831615 - RNA, 19 nt, Artificial Sequence
  Description of Artificial Sequence: Synthetic oligonucleotide
  Sense strand starting at position 3646 of SEQ ID NO: 1563783
cagcauuugcgcuggaaau

SEQ ID NO: 1831616 - RNA, 19 nt, Artificial Sequence
  Description of Artificial Sequence: Synthetic oligonucleotide
  Antisense strand to SEQ ID NO: 1831615
auuuccagcgcaaaugcug

SEQ ID NO: 1831617 - RNA, 19 nt, Artificial Sequence
  Description of Artificial Sequence: Synthetic oligonucleotide
  Sense strand starting at position 3647 of SEQ ID NO: 1563783
agcauuugcgcuggaaaua

SEQ ID NO: 1831618 - RNA, 19 nt, Artificial Sequence
  Description of Artificial Sequence: Synthetic oligonucleotide
  Antisense strand to SEQ ID NO: 1831617
uauuuccagcgcaaaugcu

SEQ ID NO: 1831619 - RNA, 19 nt, Artificial Sequence
  Description of Artificial Sequence: Synthetic oligonucleotide
  Sense strand starting at position 3648 of SEQ ID NO: 1563783
gcauuugcgcuggaaauac

SEQ ID NO: 1831620 - RNA, 19 nt, Artificial Sequence
  Description of Artificial Sequence: Synthetic oligonucleotide
  Antisense strand to SEQ ID NO: 1831619
guauuuccagcgcaaaugc

SEQ ID NO: 1831621 - RNA, 19 nt, Artificial Sequence
  Description of Artificial Sequence: Synthetic oligonucleotide
  Sense strand starting at position 3931 of SEQ ID NO: 1563783
aggagucuauaaccuuauu

SEQ ID NO: 1831622 - RNA, 19 nt, Artificial Sequence
  Description of Artificial Sequence: Synthetic oligonucleotide
  Antisense strand to SEQ ID NO: 1831621
aauaagguuauagacuccu

SEQ ID NO: 1831623 - RNA, 19 nt, Artificial Sequence
  Description of Artificial Sequence: Synthetic oligonucleotide
  Sense strand starting at position 83 of SEQ ID NO: 1563784
ggagcuucugugcagagua

SEQ ID NO: 1831624 - RNA, 19 nt, Artificial Sequence
  Description of Artificial Sequence: Synthetic oligonucleotide
  Antisense strand to SEQ ID NO: 1831623
uacucugcacagaagcucc

SEQ ID NO: 1831625 - RNA, 19 nt, Artificial Sequence
  Description of Artificial Sequence: Synthetic oligonucleotide
  Sense strand starting at position 114 of SEQ ID NO: 1563784
ugcaacaaucauugugaca

SEQ ID NO: 1831626 - RNA, 19 nt, Artificial Sequence
  Description of Artificial Sequence: Synthetic oligonucleotide
  Antisense strand to SEQ ID NO: 1831625
ugucacaaugauuguugca

SEQ ID NO: 1831627 - RNA, 19 nt, Artificial Sequence
  Description of Artificial Sequence: Synthetic oligonucleotide
  Sense strand starting at position 280 of SEQ ID NO: 1563784
ucugcacuuuggucaggau

SEQ ID NO: 1831628 - RNA, 19 nt, Artificial Sequence
  Description of Artificial Sequence: Synthetic oligonucleotide
  Antisense strand to SEQ ID NO: 1831627
auccugaccaaagugcaga

SEQ ID NO: 1831629 - RNA, 19 nt, Artificial Sequence
  Description of Artificial Sequence: Synthetic oligonucleotide
  Sense strand starting at position 324 of SEQ ID NO: 1563784
gaagcaggugccugauuga

SEQ ID NO: 1831630 - RNA, 19 nt, Artificial Sequence
  Description of Artificial Sequence: Synthetic oligonucleotide
  Antisense strand to SEQ ID NO: 1831629
ucaaucaggcaccugcuuc

SEQ ID NO: 1831631 - RNA, 19 nt, Artificial Sequence
  Description of Artificial Sequence: Synthetic oligonucleotide
  Sense strand starting at position 461 of SEQ ID NO: 1563784
gccucauagcgccuuuaca

SEQ ID NO: 1831632 - RNA, 19 nt, Artificial Sequence
  Description of Artificial Sequence: Synthetic oligonucleotide
  Antisense strand to SEQ ID NO: 1831631
uguaaaggcgcuaugaggc

SEQ ID NO: 1831633 - RNA, 19 nt, Artificial Sequence
  Description of Artificial Sequence: Synthetic oligonucleotide
  Sense strand starting at position 698 of SEQ ID NO: 1563784
cuuucucugcccugaggau

SEQ ID NO: 1831634 - RNA, 19 nt, Artificial Sequence
  Description of Artificial Sequence: Synthetic oligonucleotide
  Antisense strand to SEQ ID NO: 1831633
auccucagggcagagaaag

SEQ ID NO: 1831635 - RNA, 19 nt, Artificial Sequence
  Description of Artificial Sequence: Synthetic oligonucleotide
  Sense strand starting at position 736 of SEQ ID NO: 1563784
ugaggcuucuccuccaacu

SEQ ID NO: 1831636 - RNA, 19 nt, Artificial Sequence
  Description of Artificial Sequence: Synthetic oligonucleotide
  Antisense strand to SEQ ID NO: 1831635
aguuggaggagaagccuca

SEQ ID NO: 1831637 - RNA, 19 nt, Artificial Sequence
  Description of Artificial Sequence: Synthetic oligonucleotide
  Sense strand starting at position 826 of SEQ ID NO: 1563784
aguugaggccaucacuaua

SEQ ID NO: 1831638 - RNA, 19 nt, Artificial Sequence
  Description of Artificial Sequence: Synthetic oligonucleotide
  Antisense strand to SEQ ID NO: 1831637
uauagugauggccucaacu

SEQ ID NO: 1831639 - RNA, 19 nt, Artificial Sequence
  Description of Artificial Sequence: Synthetic oligonucleotide
  Sense strand starting at position 1046 of SEQ ID NO: 1563784
ugcagugaaguugaguaaa

SEQ ID NO: 1831640 - RNA, 19 nt, Artificial Sequence
  Description of Artificial Sequence: Synthetic oligonucleotide
  Antisense strand to SEQ ID NO: 1831639
uuuacucaacuucacugca

SEQ ID NO: 1831641 - RNA, 19 nt, Artificial Sequence
  Description of Artificial Sequence: Synthetic oligonucleotide
  Sense strand starting at position 1091 of SEQ ID NO: 1563784
gggacaaugccucauucua

SEQ ID NO: 1831642 - RNA, 19 nt, Artificial Sequence
  Description of Artificial Sequence: Synthetic oligonucleotide
  Antisense strand to SEQ ID NO: 1831641
uagaaugaggcauuguccc

SEQ ID NO: 1831643 - RNA, 19 nt, Artificial Sequence
  Description of Artificial Sequence: Synthetic oligonucleotide
  Sense strand starting at position 1099 of SEQ ID NO: 1563784
gccucauucuagcuuuaag

SEQ ID NO: 1831644 - RNA, 19 nt, Artificial Sequence
  Description of Artificial Sequence: Synthetic oligonucleotide
  Antisense strand to SEQ ID NO: 1831643
cuuaaagcuagaaugaggc

SEQ ID NO: 1831645 - RNA, 19 nt, Artificial Sequence
  Description of Artificial Sequence: Synthetic oligonucleotide
  Sense strand starting at position 1102 of SEQ ID NO: 1563784
ucauucuagcuuuaagagu

SEQ ID NO: 1831646 - RNA, 19 nt, Artificial Sequence
  Description of Artificial Sequence: Synthetic oligonucleotide
  Antisense strand to SEQ ID NO: 1831645
acucuuaaagcuagaauga

SEQ ID NO: 1831647 - RNA, 19 nt, Artificial Sequence
  Description of Artificial Sequence: Synthetic oligonucleotide
  Sense strand starting at position 1136 of SEQ ID NO: 1563784
gcucaauuauccucaguga

SEQ ID NO: 1831648 - RNA, 19 nt, Artificial Sequence
  Description of Artificial Sequence: Synthetic oligonucleotide
  Antisense strand to SEQ ID NO: 1831647
ucacugaggauaauugagc

SEQ ID NO: 1831649 - RNA, 19 nt, Artificial Sequence
  Description of Artificial Sequence: Synthetic oligonucleotide
  Sense strand starting at position 1137 of SEQ ID NO: 1563784
cucaauuauccucagugag

SEQ ID NO: 1831650 - RNA, 19 nt, Artificial Sequence
  Description of Artificial Sequence: Synthetic oligonucleotide
  Antisense strand to SEQ ID NO: 1831649
cucacugaggauaauugag

SEQ ID NO: 1831651 - RNA, 19 nt, Artificial Sequence
  Description of Artificial Sequence: Synthetic oligonucleotide
  Sense strand starting at position 1140 of SEQ ID NO: 1563784
aauuauccucagugagcga

SEQ ID NO: 1831652 - RNA, 19 nt, Artificial Sequence
  Description of Artificial Sequence: Synthetic oligonucleotide
  Antisense strand to SEQ ID NO: 1831651
ucgcucacugaggauaauu

SEQ ID NO: 1831653 - RNA, 19 nt, Artificial Sequence
  Description of Artificial Sequence: Synthetic oligonucleotide
  Sense strand starting at position 1254 of SEQ ID NO: 1563784
ccguucuccgugcuggaaa

SEQ ID NO: 1831654 - RNA, 19 nt, Artificial Sequence
  Description of Artificial Sequence: Synthetic oligonucleotide
  Antisense strand to SEQ ID NO: 1831653
uuuccagcacggagaacgg

SEQ ID NO: 1831655 - RNA, 19 nt, Artificial Sequence
  Description of Artificial Sequence: Synthetic oligonucleotide
  Sense strand starting at position 1268 of SEQ ID NO: 1563784
ggaaauacaucagggaaca

SEQ ID NO: 1831656 - RNA, 19 nt, Artificial Sequence
  Description of Artificial Sequence: Synthetic oligonucleotide
  Antisense strand to SEQ ID NO: 1831655
uguucccugauguauuucc

SEQ ID NO: 1831657 - RNA, 19 nt, Artificial Sequence
  Description of Artificial Sequence: Synthetic oligonucleotide
  Sense strand starting at position 1395 of SEQ ID NO: 1563784
ggguuugcuaccuacguga

SEQ ID NO: 1831658 - RNA, 19 nt, Artificial Sequence
  Description of Artificial Sequence: Synthetic oligonucleotide
  Antisense strand to SEQ ID NO: 1831657
ucacguagguagcaaaccc

SEQ ID NO: 1831659 - RNA, 19 nt, Artificial Sequence
  Description of Artificial Sequence: Synthetic oligonucleotide
  Sense strand starting at position 1490 of SEQ ID NO: 1563784
ggcuccugugaagauuaau

SEQ ID NO: 1831660 - RNA, 19 nt, Artificial Sequence
  Description of Artificial Sequence: Synthetic oligonucleotide
  Antisense strand to SEQ ID NO: 1831659
auuaaucuucacaggagcc

SEQ ID NO: 1831661 - RNA, 19 nt, Artificial Sequence
  Description of Artificial Sequence: Synthetic oligonucleotide
  Sense strand starting at position 1509 of SEQ ID NO: 1563784
gugaaacauuugcaagguu

SEQ ID NO: 1831662 - RNA, 19 nt, Artificial Sequence
  Description of Artificial Sequence: Synthetic oligonucleotide
  Antisense strand to SEQ ID NO: 1831661
aaccuugcaaauguuucac

SEQ ID NO: 1831663 - RNA, 19 nt, Artificial Sequence
  Description of Artificial Sequence: Synthetic oligonucleotide
  Sense strand starting at position 2422 of SEQ ID NO: 1563784
cuggcucucagagagucau

SEQ ID NO: 1831664 - RNA, 19 nt, Artificial Sequence
  Description of Artificial Sequence: Synthetic oligonucleotide
  Antisense strand to SEQ ID NO: 1831663
augacucucugagagccag

SEQ ID NO: 1831665 - RNA, 19 nt, Artificial Sequence
  Description of Artificial Sequence: Synthetic oligonucleotide
  Sense strand starting at position 2430 of SEQ ID NO: 1563784
cagagagucaugggagcaa

SEQ ID NO: 1831666 - RNA, 19 nt, Artificial Sequence
  Description of Artificial Sequence: Synthetic oligonucleotide
  Antisense strand to SEQ ID NO: 1831665
uugcucccaugacucucug

SEQ ID NO: 1831667 - RNA, 19 nt, Artificial Sequence
  Description of Artificial Sequence: Synthetic oligonucleotide
  Sense strand starting at position 2510 of SEQ ID NO: 1563784
cagcgaucucuugaaauga

SEQ ID NO: 1831668 - RNA, 19 nt, Artificial Sequence
  Description of Artificial Sequence: Synthetic oligonucleotide
  Antisense strand to SEQ ID NO: 1831667
ucauuucaagagaucgcug

SEQ ID NO: 1831669 - RNA, 19 nt, Artificial Sequence
  Description of Artificial Sequence: Synthetic oligonucleotide
  Sense strand starting at position 2570 of SEQ ID NO: 1563784
gggcuccaauuccugagau

SEQ ID NO: 1831670 - RNA, 19 nt, Artificial Sequence
  Description of Artificial Sequence: Synthetic oligonucleotide
  Antisense strand to SEQ ID NO: 1831669
aucucaggaauuggagccc

SEQ ID NO: 1831671 - RNA, 19 nt, Artificial Sequence
  Description of Artificial Sequence: Synthetic oligonucleotide
  Sense strand starting at position 2703 of SEQ ID NO: 1563784
cuguaauggccuugaggaa

SEQ ID NO: 1831672 - RNA, 19 nt, Artificial Sequence
  Description of Artificial Sequence: Synthetic oligonucleotide
  Antisense strand to SEQ ID NO: 1831671
uuccucaaggccauuacag

SEQ ID NO: 1831673 - RNA, 19 nt, Artificial Sequence
  Description of Artificial Sequence: Synthetic oligonucleotide
  Sense strand starting at position 2875 of SEQ ID NO: 1563784
ggugccagacacuguuuau

SEQ ID NO: 1831674 - RNA, 19 nt, Artificial Sequence
  Description of Artificial Sequence: Synthetic oligonucleotide
  Antisense strand to SEQ ID NO: 1831673
auaaacagugucuggcacc

SEQ ID NO: 1831675 - RNA, 19 nt, Artificial Sequence
  Description of Artificial Sequence: Synthetic oligonucleotide
  Sense strand starting at position 2878 of SEQ ID NO: 1563784
gccagacacuguuuauaga

SEQ ID NO: 1831676 - RNA, 19 nt, Artificial Sequence
  Description of Artificial Sequence: Synthetic oligonucleotide
  Antisense strand to SEQ ID NO: 1831675
ucuauaaacagugucuggc

SEQ ID NO: 1831677 - RNA, 19 nt, Artificial Sequence
  Description of Artificial Sequence: Synthetic oligonucleotide
  Sense strand starting at position 2903 of SEQ ID NO: 1563784
uguuaaagcugaucaugga

SEQ ID NO: 1831678 - RNA, 19 nt, Artificial Sequence
  Description of Artificial Sequence: Synthetic oligonucleotide
  Antisense strand to SEQ ID NO: 1831677
uccaugaucagcuuuaaca

SEQ ID NO: 1831679 - RNA, 19 nt, Artificial Sequence
  Description of Artificial Sequence: Synthetic oligonucleotide
  Sense strand starting at position 3132 of SEQ ID NO: 1563784
gcaugugagcagugaauua

SEQ ID NO: 1831680 - RNA, 19 nt, Artificial Sequence
  Description of Artificial Sequence: Synthetic oligonucleotide
  Antisense strand to SEQ ID NO: 1831679
uaauucacugcucacaugc

SEQ ID NO: 1831681 - RNA, 19 nt, Artificial Sequence
  Description of Artificial Sequence: Synthetic oligonucleotide
  Sense strand starting at position 3142 of SEQ ID NO: 1563784
agugaauuauugcucauuc

SEQ ID NO: 1831682 - RNA, 19 nt, Artificial Sequence
  Description of Artificial Sequence: Synthetic oligonucleotide
  Antisense strand to SEQ ID NO: 1831681
gaaugagcaauaauucacu

SEQ ID NO: 1831683 - RNA, 19 nt, Artificial Sequence
  Description of Artificial Sequence: Synthetic oligonucleotide
  Sense strand starting at position 3271 of SEQ ID NO: 1563784
gcaggaaagggcuaauagu

SEQ ID NO: 1831684 - RNA, 19 nt, Artificial Sequence
  Description of Artificial Sequence: Synthetic oligonucleotide
  Antisense strand to SEQ ID NO: 1831683
acuauuagcccuuuccugc

SEQ ID NO: 1831685 - RNA, 19 nt, Artificial Sequence
  Description of Artificial Sequence: Synthetic oligonucleotide
  Sense strand starting at position 3279 of SEQ ID NO: 1563784
gggcuaauaguaugacagu

SEQ ID NO: 1831686 - RNA, 19 nt, Artificial Sequence
  Description of Artificial Sequence: Synthetic oligonucleotide
  Antisense strand to SEQ ID NO: 1831685
acugucauacuauuagccc

SEQ ID NO: 1831687 - RNA, 19 nt, Artificial Sequence
  Description of Artificial Sequence: Synthetic oligonucleotide
  Sense strand starting at position 3377 of SEQ ID NO: 1563784
uauggagauucugcaggaa

SEQ ID NO: 1831688 - RNA, 19 nt, Artificial Sequence
  Description of Artificial Sequence: Synthetic oligonucleotide
  Antisense strand to SEQ ID NO: 1831687
uuccugcagaaucuccaua

SEQ ID NO: 1831689 - RNA, 19 nt, Artificial Sequence
  Description of Artificial Sequence: Synthetic oligonucleotide
  Sense strand starting at position 3526 of SEQ ID NO: 1563784
ggccauuggugucuacuaa

SEQ ID NO: 1831690 - RNA, 19 nt, Artificial Sequence
  Description of Artificial Sequence: Synthetic oligonucleotide
  Antisense strand to SEQ ID NO: 1831689
uuaguagacaccaauggcc

SEQ ID NO: 1831691 - RNA, 19 nt, Artificial Sequence
  Description of Artificial Sequence: Synthetic oligonucleotide
  Sense strand starting at position 3527 of SEQ ID NO: 1563784
gccauuggugucuacuaau

SEQ ID NO: 1831692 - RNA, 19 nt, Artificial Sequence
  Description of Artificial Sequence: Synthetic oligonucleotide
  Antisense strand to SEQ ID NO: 1831691
auuaguagacaccaauggc

SEQ ID NO: 1831693 - RNA, 19 nt, Artificial Sequence
  Description of Artificial Sequence: Synthetic oligonucleotide
  Sense strand starting at position 3540 of SEQ ID NO: 1563784
acuaauccauuggaagaga

SEQ ID NO: 1831694 - RNA, 19 nt, Artificial Sequence
  Description of Artificial Sequence: Synthetic oligonucleotide
  Antisense strand to SEQ ID NO: 1831693
ucucuuccaauggauuagu

SEQ ID NO: 1831695 - RNA, 19 nt, Artificial Sequence
  Description of Artificial Sequence: Synthetic oligonucleotide
  Sense strand starting at position 3782 of SEQ ID NO: 1563784
uuuccauaggcaggagaau

SEQ ID NO: 1831696 - RNA, 19 nt, Artificial Sequence
  Description of Artificial Sequence: Synthetic oligonucleotide
  Antisense strand to SEQ ID NO: 1831695
auucuccugccuauggaaa

SEQ ID NO: 1831697 - RNA, 19 nt, Artificial Sequence
  Description of Artificial Sequence: Synthetic oligonucleotide
  Sense strand starting at position 3795 of SEQ ID NO: 1563784
gagaauauccaguguuaag

SEQ ID NO: 1831698 - RNA, 19 nt, Artificial Sequence
  Description of Artificial Sequence: Synthetic oligonucleotide
  Antisense strand to SEQ ID NO: 1831697
cuuaacacuggauauucuc

SEQ ID NO: 1831699 - RNA, 19 nt, Artificial Sequence
  Description of Artificial Sequence: Synthetic oligonucleotide
  Sense strand starting at position 3912 of SEQ ID NO: 1563784
uuauuugcaucuguaacga

SEQ ID NO: 1831700 - RNA, 19 nt, Artificial Sequence
  Description of Artificial Sequence: Synthetic oligonucleotide
  Antisense strand to SEQ ID NO: 1831699
ucguuacagaugcaaauaa

SEQ ID NO: 1831701 - RNA, 19 nt, Artificial Sequence
  Description of Artificial Sequence: Synthetic oligonucleotide
  Sense strand starting at position 3953 of SEQ ID NO: 1563784
ccuauuuacuucuagagga

SEQ ID NO: 1831702 - RNA, 19 nt, Artificial Sequence
  Description of Artificial Sequence: Synthetic oligonucleotide
  Antisense strand to SEQ ID NO: 1831701
uccucuagaaguaaauagg

SEQ ID NO: 1831703 - RNA, 19 nt, Artificial Sequence
  Description of Artificial Sequence: Synthetic oligonucleotide
  Sense strand starting at position 182 of SEQ ID NO: 1563785
agaacaagugcuggucagu

SEQ ID NO: 1831704 - RNA, 19 nt, Artificial Sequence
  Description of Artificial Sequence: Synthetic oligonucleotide
  Antisense strand to SEQ ID NO: 1831703
acugaccagcacuuguucu

SEQ ID NO: 1831705 - RNA, 19 nt, Artificial Sequence
  Description of Artificial Sequence: Synthetic oligonucleotide
  Sense strand starting at position 256 of SEQ ID NO: 1563785
ucccaucuuucuguagaga

SEQ ID NO: 1831706 - RNA, 19 nt, Artificial Sequence
  Description of Artificial Sequence: Synthetic oligonucleotide
  Antisense strand to SEQ ID NO: 1831705
ucucuacagaaagauggga

SEQ ID NO: 1831707 - RNA, 19 nt, Artificial Sequence
  Description of Artificial Sequence: Synthetic oligonucleotide
  Sense strand starting at position 257 of SEQ ID NO: 1563785
cccaucuuucuguagagaa

SEQ ID NO: 1831708 - RNA, 19 nt, Artificial Sequence
  Description of Artificial Sequence: Synthetic oligonucleotide
  Antisense strand to SEQ ID NO: 1831707
uucucuacagaaagauggg

SEQ ID NO: 1831709 - RNA, 19 nt, Artificial Sequence
  Description of Artificial Sequence: Synthetic oligonucleotide
  Sense strand starting at position 290 of SEQ ID NO: 1563785
uccacuguacaguguuaua

SEQ ID NO: 1831710 - RNA, 19 nt, Artificial Sequence
  Description of Artificial Sequence: Synthetic oligonucleotide
  Antisense strand to SEQ ID NO: 1831709
uauaacacuguacagugga

SEQ ID NO: 1831711 - RNA, 19 nt, Artificial Sequence
  Description of Artificial Sequence: Synthetic oligonucleotide
  Sense strand starting at position 302 of SEQ ID NO: 1563785
uguuauauuguguauccac

SEQ ID NO: 1831712 - RNA, 19 nt, Artificial Sequence
  Description of Artificial Sequence: Synthetic oligonucleotide
  Antisense strand to SEQ ID NO: 1831711
guggauacacaauauaaca

SEQ ID NO: 1831713 - RNA, 19 nt, Artificial Sequence
  Description of Artificial Sequence: Synthetic oligonucleotide
  Sense strand starting at position 323 of SEQ ID NO: 1563785
cuguguccucugggucuaa

SEQ ID NO: 1831714 - RNA, 19 nt, Artificial Sequence
  Description of Artificial Sequence: Synthetic oligonucleotide
  Antisense strand to SEQ ID NO: 1831713
uuagacccagaggacacag

SEQ ID NO: 1831715 - RNA, 19 nt, Artificial Sequence
  Description of Artificial Sequence: Synthetic oligonucleotide
  Sense strand starting at position 324 of SEQ ID NO: 1563785
uguguccucugggucuaaa

SEQ ID NO: 1831716 - RNA, 19 nt, Artificial Sequence
  Description of Artificial Sequence: Synthetic oligonucleotide
  Antisense strand to SEQ ID NO: 1831715
uuuagacccagaggacaca

SEQ ID NO: 1831717 - RNA, 19 nt, Artificial Sequence
  Description of Artificial Sequence: Synthetic oligonucleotide
  Sense strand starting at position 441 of SEQ ID NO: 1563785
ccaugugcaucuguaccaa

SEQ ID NO: 1831718 - RNA, 19 nt, Artificial Sequence
  Description of Artificial Sequence: Synthetic oligonucleotide
  Antisense strand to SEQ ID NO: 1831717
uugguacagaugcacaugg

SEQ ID NO: 1831719 - RNA, 19 nt, Artificial Sequence
  Description of Artificial Sequence: Synthetic oligonucleotide
  Sense strand starting at position 741 of SEQ ID NO: 1563785
caugauacccugugacaug

SEQ ID NO: 1831720 - RNA, 19 nt, Artificial Sequence
  Description of Artificial Sequence: Synthetic oligonucleotide
  Antisense strand to SEQ ID NO: 1831719
caugucacaggguaucaug

SEQ ID NO: 1831721 - RNA, 19 nt, Artificial Sequence
  Description of Artificial Sequence: Synthetic oligonucleotide
  Sense strand starting at position 819 of SEQ ID NO: 1563785
acacgcaaguguguacuua

SEQ ID NO: 1831722 - RNA, 19 nt, Artificial Sequence
  Description of Artificial Sequence: Synthetic oligonucleotide
  Antisense strand to SEQ ID NO: 1831721
uaaguacacacuugcgugu

SEQ ID NO: 1831723 - RNA, 19 nt, Artificial Sequence
  Description of Artificial Sequence: Synthetic oligonucleotide
  Sense strand starting at position 823 of SEQ ID NO: 1563785
gcaaguguguacuuacauu

SEQ ID NO: 1831724 - RNA, 19 nt, Artificial Sequence
  Description of Artificial Sequence: Synthetic oligonucleotide
  Antisense strand to SEQ ID NO: 1831723
aauguaaguacacacuugc

SEQ ID NO: 1831725 - RNA, 19 nt, Artificial Sequence
  Description of Artificial Sequence: Synthetic oligonucleotide
  Sense strand starting at position 876 of SEQ ID NO: 1563785
aucaaaugucguggucaaa

SEQ ID NO: 1831726 - RNA, 19 nt, Artificial Sequence
  Description of Artificial Sequence: Synthetic oligonucleotide
  Antisense strand to SEQ ID NO: 1831725
uuugaccacgacauuugau

SEQ ID NO: 1831727 - RNA, 19 nt, Artificial Sequence
  Description of Artificial Sequence: Synthetic oligonucleotide
  Sense strand starting at position 879 of SEQ ID NO: 1563785
aaaugucguggucaaauac

SEQ ID NO: 1831728 - RNA, 19 nt, Artificial Sequence
  Description of Artificial Sequence: Synthetic oligonucleotide
  Antisense strand to SEQ ID NO: 1831727
guauuugaccacgacauuu

SEQ ID NO: 1831729 - RNA, 19 nt, Artificial Sequence
  Description of Artificial Sequence: Synthetic oligonucleotide
  Sense strand starting at position 979 of SEQ ID NO: 1563785
acgaauaucuacgcucagu

SEQ ID NO: 1831730 - RNA, 19 nt, Artificial Sequence
  Description of Artificial Sequence: Synthetic oligonucleotide
  Antisense strand to SEQ ID NO: 1831729
acugagcguagauauucgu

SEQ ID NO: 1831731 - RNA, 19 nt, Artificial Sequence
  Description of Artificial Sequence: Synthetic oligonucleotide
  Sense strand starting at position 1026 of SEQ ID NO: 1563785
guguauccaugcuuaauca

SEQ ID NO: 1831732 - RNA, 19 nt, Artificial Sequence
  Description of Artificial Sequence: Synthetic oligonucleotide
  Antisense strand to SEQ ID NO: 1831731
ugauuaagcauggauacac

SEQ ID NO: 1831733 - RNA, 19 nt, Artificial Sequence
  Description of Artificial Sequence: Synthetic oligonucleotide
  Sense strand starting at position 1953 of SEQ ID NO: 1563785
gaaggacguuagugacuaa

SEQ ID NO: 1831734 - RNA, 19 nt, Artificial Sequence
  Description of Artificial Sequence: Synthetic oligonucleotide
  Antisense strand to SEQ ID NO: 1831733
uuagucacuaacguccuuc

SEQ ID NO: 1831735 - RNA, 19 nt, Artificial Sequence
  Description of Artificial Sequence: Synthetic oligonucleotide
  Sense strand starting at position 1956 of SEQ ID NO: 1563785
ggacguuagugacuaacau

SEQ ID NO: 1831736 - RNA, 19 nt, Artificial Sequence
  Description of Artificial Sequence: Synthetic oligonucleotide
  Antisense strand to SEQ ID NO: 1831735
auguuagucacuaacgucc

SEQ ID NO: 1831737 - RNA, 19 nt, Artificial Sequence
  Description of Artificial Sequence: Synthetic oligonucleotide
  Sense strand starting at position 1957 of SEQ ID NO: 1563785
gacguuagugacuaacauc

SEQ ID NO: 1831738 - RNA, 19 nt, Artificial Sequence
  Description of Artificial Sequence: Synthetic oligonucleotide
  Antisense strand to SEQ ID NO: 1831737
gauguuagucacuaacguc

SEQ ID NO: 1831739 - RNA, 19 nt, Artificial Sequence
  Description of Artificial Sequence: Synthetic oligonucleotide
  Sense strand starting at position 1964 of SEQ ID NO: 1563785
gugacuaacaucuggguaa

SEQ ID NO: 1831740 - RNA, 19 nt, Artificial Sequence
  Description of Artificial Sequence: Synthetic oligonucleotide
  Antisense strand to SEQ ID NO: 1831739
uuacccagauguuagucac

SEQ ID NO: 1831741 - RNA, 19 nt, Artificial Sequence
  Description of Artificial Sequence: Synthetic oligonucleotide
  Sense strand starting at position 1965 of SEQ ID NO: 1563785
ugacuaacaucuggguaag

SEQ ID NO: 1831742 - RNA, 19 nt, Artificial Sequence
  Description of Artificial Sequence: Synthetic oligonucleotide
  Antisense strand to SEQ ID NO: 1831741
cuuacccagauguuaguca

SEQ ID NO: 1831743 - RNA, 19 nt, Artificial Sequence
  Description of Artificial Sequence: Synthetic oligonucleotide
  Sense strand starting at position 2291 of SEQ ID NO: 1563785
agcuguaugugagcuggua

SEQ ID NO: 1831744 - RNA, 19 nt, Artificial Sequence
  Description of Artificial Sequence: Synthetic oligonucleotide
  Antisense strand to SEQ ID NO: 1831743
uaccagcucacauacagcu

SEQ ID NO: 1831745 - RNA, 19 nt, Artificial Sequence
  Description of Artificial Sequence: Synthetic oligonucleotide
  Sense strand starting at position 2293 of SEQ ID NO: 1563785
cuguaugugagcugguauu

SEQ ID NO: 1831746 - RNA, 19 nt, Artificial Sequence
  Description of Artificial Sequence: Synthetic oligonucleotide
  Antisense strand to SEQ ID NO: 1831745
aauaccagcucacauacag

SEQ ID NO: 1831747 - RNA, 19 nt, Artificial Sequence
  Description of Artificial Sequence: Synthetic oligonucleotide
  Sense strand starting at position 2303 of SEQ ID NO: 1563785
gcugguauuucuguggugu

SEQ ID NO: 1831748 - RNA, 19 nt, Artificial Sequence
  Description of Artificial Sequence: Synthetic oligonucleotide
  Antisense strand to SEQ ID NO: 1831747
acaccacagaaauaccagc

SEQ ID NO: 1831749 - RNA, 19 nt, Artificial Sequence
  Description of Artificial Sequence: Synthetic oligonucleotide
  Sense strand starting at position 2305 of SEQ ID NO: 1563785
ugguauuucuguggugugu

SEQ ID NO: 1831750 - RNA, 19 nt, Artificial Sequence
  Description of Artificial Sequence: Synthetic oligonucleotide
  Antisense strand to SEQ ID NO: 1831749
acacaccacagaaauacca

SEQ ID NO: 1831751 - RNA, 19 nt, Artificial Sequence
  Description of Artificial Sequence: Synthetic oligonucleotide
  Sense strand starting at position 2316 of SEQ ID NO: 1563785
uggugugucuucucuggga

SEQ ID NO: 1831752 - RNA, 19 nt, Artificial Sequence
  Description of Artificial Sequence: Synthetic oligonucleotide
  Antisense strand to SEQ ID NO: 1831751
ucccagagaagacacacca

SEQ ID NO: 1831753 - RNA, 19 nt, Artificial Sequence
  Description of Artificial Sequence: Synthetic oligonucleotide
  Sense strand starting at position 2402 of SEQ ID NO: 1563785
cuacgugugucuucuugua

SEQ ID NO: 1831754 - RNA, 19 nt, Artificial Sequence
  Description of Artificial Sequence: Synthetic oligonucleotide
  Antisense strand to SEQ ID NO: 1831753
uacaagaagacacacguag

SEQ ID NO: 1831755 - RNA, 19 nt, Artificial Sequence
  Description of Artificial Sequence: Synthetic oligonucleotide
  Sense strand starting at position 2404 of SEQ ID NO: 1563785
acgugugucuucuuguaug

SEQ ID NO: 1831756 - RNA, 19 nt, Artificial Sequence
  Description of Artificial Sequence: Synthetic oligonucleotide
  Antisense strand to SEQ ID NO: 1831755
cauacaagaagacacacgu

SEQ ID NO: 1831757 - RNA, 19 nt, Artificial Sequence
  Description of Artificial Sequence: Synthetic oligonucleotide
  Sense strand starting at position 2410 of SEQ ID NO: 1563785
gucuucuuguaugucuuua

SEQ ID NO: 1831758 - RNA, 19 nt, Artificial Sequence
  Description of Artificial Sequence: Synthetic oligonucleotide
  Antisense strand to SEQ ID NO: 1831757
uaaagacauacaagaagac

SEQ ID NO: 1831759 - RNA, 19 nt, Artificial Sequence
  Description of Artificial Sequence: Synthetic oligonucleotide
  Sense strand starting at position 2414 of SEQ ID NO: 1563785
ucuuguaugucuuuaugua

SEQ ID NO: 1831760 - RNA, 19 nt, Artificial Sequence
  Description of Artificial Sequence: Synthetic oligonucleotide
  Antisense strand to SEQ ID NO: 1831759
uacauaaagacauacaaga

SEQ ID NO: 1831761 - RNA, 19 nt, Artificial Sequence
  Description of Artificial Sequence: Synthetic oligonucleotide
  Sense strand starting at position 2415 of SEQ ID NO: 1563785
cuuguaugucuuuauguau

SEQ ID NO: 1831762 - RNA, 19 nt, Artificial Sequence
  Description of Artificial Sequence: Synthetic oligonucleotide
  Antisense strand to SEQ ID NO: 1831761
auacauaaagacauacaag

SEQ ID NO: 1831763 - RNA, 19 nt, Artificial Sequence
  Description of Artificial Sequence: Synthetic oligonucleotide
  Sense strand starting at position 2455 of SEQ ID NO: 1563785
ucuauuaucucugugugca

SEQ ID NO: 1831764 - RNA, 19 nt, Artificial Sequence
  Description of Artificial Sequence: Synthetic oligonucleotide
  Antisense strand to SEQ ID NO: 1831763
ugcacacagagauaauaga

SEQ ID NO: 1831765 - RNA, 19 nt, Artificial Sequence
  Description of Artificial Sequence: Synthetic oligonucleotide
  Sense strand starting at position 2456 of SEQ ID NO: 1563785
cuauuaucucugugugcac

SEQ ID NO: 1831766 - RNA, 19 nt, Artificial Sequence
  Description of Artificial Sequence: Synthetic oligonucleotide
  Antisense strand to SEQ ID NO: 1831765
gugcacacagagauaauag

SEQ ID NO: 1831767 - RNA, 19 nt, Artificial Sequence
  Description of Artificial Sequence: Synthetic oligonucleotide
  Sense strand starting at position 2486 of SEQ ID NO: 1563785
gaagaauucuucuugcagu

SEQ ID NO: 1831768 - RNA, 19 nt, Artificial Sequence
  Description of Artificial Sequence: Synthetic oligonucleotide
  Antisense strand to SEQ ID NO: 1831767
acugcaagaagaauucuuc

SEQ ID NO: 1831769 - RNA, 19 nt, Artificial Sequence
  Description of Artificial Sequence: Synthetic oligonucleotide
  Sense strand starting at position 2503 of SEQ ID NO: 1563785
gucacauugcuauagcuuu

SEQ ID NO: 1831770 - RNA, 19 nt, Artificial Sequence
  Description of Artificial Sequence: Synthetic oligonucleotide
  Antisense strand to SEQ ID NO: 1831769
aaagcuauagcaaugugac

SEQ ID NO: 1831771 - RNA, 19 nt, Artificial Sequence
  Description of Artificial Sequence: Synthetic oligonucleotide
  Sense strand starting at position 3777 of SEQ ID NO: 1563785
ccgugacaguguuucuaac

SEQ ID NO: 1831772 - RNA, 19 nt, Artificial Sequence
  Description of Artificial Sequence: Synthetic oligonucleotide
  Antisense strand to SEQ ID NO: 1831771
guuagaaacacugucacgg

SEQ ID NO: 1831773 - RNA, 19 nt, Artificial Sequence
  Description of Artificial Sequence: Synthetic oligonucleotide
  Sense strand starting at position 3779 of SEQ ID NO: 1563785
gugacaguguuucuaacac

SEQ ID NO: 1831774 - RNA, 19 nt, Artificial Sequence
  Description of Artificial Sequence: Synthetic oligonucleotide
  Antisense strand to SEQ ID NO: 1831773
guguuagaaacacugucac

SEQ ID NO: 1831775 - RNA, 19 nt, Artificial Sequence
  Description of Artificial Sequence: Synthetic oligonucleotide
  Sense strand starting at position 3797 of SEQ ID NO: 1563785
cuucuugugugucucaaag

SEQ ID NO: 1831776 - RNA, 19 nt, Artificial Sequence
  Description of Artificial Sequence: Synthetic oligonucleotide
  Antisense strand to SEQ ID NO: 1831775
cuuugagacacacaagaag

SEQ ID NO: 1831777 - RNA, 19 nt, Artificial Sequence
  Description of Artificial Sequence: Synthetic oligonucleotide
  Sense strand starting at position 3822 of SEQ ID NO: 1563785
uuucuaggucuuugucuga

SEQ ID NO: 1831778 - RNA, 19 nt, Artificial Sequence
  Description of Artificial Sequence: Synthetic oligonucleotide
  Antisense strand to SEQ ID NO: 1831777
ucagacaaagaccuagaaa

SEQ ID NO: 1831779 - RNA, 19 nt, Artificial Sequence
  Description of Artificial Sequence: Synthetic oligonucleotide
  Sense strand starting at position 3827 of SEQ ID NO: 1563785
aggucuuugucugagucuu

SEQ ID NO: 1831780 - RNA, 19 nt, Artificial Sequence
  Description of Artificial Sequence: Synthetic oligonucleotide
  Antisense strand to SEQ ID NO: 1831779
aagacucagacaaagaccu

SEQ ID NO: 1831781 - RNA, 19 nt, Artificial Sequence
  Description of Artificial Sequence: Synthetic oligonucleotide
  Sense strand starting at position 3931 of SEQ ID NO: 1563785
gacuaagggucugaaagag

SEQ ID NO: 1831782 - RNA, 19 nt, Artificial Sequence
  Description of Artificial Sequence: Synthetic oligonucleotide
  Antisense strand to SEQ ID NO: 1831781
cucuuucagacccuuaguc

SEQ ID NO: 1831783 - RNA, 19 nt, Artificial Sequence
  Description of Artificial Sequence: Synthetic oligonucleotide
  Sense strand starting at position 21 of SEQ ID NO: 1563786
cucugaaagcuuugucucu

SEQ ID NO: 1831784 - RNA, 19 nt, Artificial Sequence
  Description of Artificial Sequence: Synthetic oligonucleotide
  Antisense strand to SEQ ID NO: 1831783
agagacaaagcuuucagag

SEQ ID NO: 1831785 - RNA, 19 nt, Artificial Sequence
  Description of Artificial Sequence: Synthetic oligonucleotide
  Sense strand starting at position 26 of SEQ ID NO: 1563786
aaagcuuugucucugcaga

SEQ ID NO: 1831786 - RNA, 19 nt, Artificial Sequence
  Description of Artificial Sequence: Synthetic oligonucleotide
  Antisense strand to SEQ ID NO: 1831785
ucugcagagacaaagcuuu

SEQ ID NO: 1831787 - RNA, 19 nt, Artificial Sequence
  Description of Artificial Sequence: Synthetic oligonucleotide
  Sense strand starting at position 27 of SEQ ID NO: 1563786
aagcuuugucucugcagaa

SEQ ID NO: 1831788 - RNA, 19 nt, Artificial Sequence
  Description of Artificial Sequence: Synthetic oligonucleotide
  Antisense strand to SEQ ID NO: 1831787
uucugcagagacaaagcuu

SEQ ID NO: 1831789 - RNA, 19 nt, Artificial Sequence
  Description of Artificial Sequence: Synthetic oligonucleotide
  Sense strand starting at position 28 of SEQ ID NO: 1563786
agcuuugucucugcagaag

SEQ ID NO: 1831790 - RNA, 19 nt, Artificial Sequence
  Description of Artificial Sequence: Synthetic oligonucleotide
  Antisense strand to SEQ ID NO: 1831789
cuucugcagagacaaagcu

SEQ ID NO: 1831791 - RNA, 19 nt, Artificial Sequence
  Description of Artificial Sequence: Synthetic oligonucleotide
  Sense strand starting at position 42 of SEQ ID NO: 1563786
agaagaccucagugugaag

SEQ ID NO: 1831792 - RNA, 19 nt, Artificial Sequence
  Description of Artificial Sequence: Synthetic oligonucleotide
  Antisense strand to SEQ ID NO: 1831791
cuucacacugaggucuucu

SEQ ID NO: 1831793 - RNA, 19 nt, Artificial Sequence
  Description of Artificial Sequence: Synthetic oligonucleotide
  Sense strand starting at position 283 of SEQ ID NO: 1563786
agaacaagugcuggucagu

SEQ ID NO: 1831794 - RNA, 19 nt, Artificial Sequence
  Description of Artificial Sequence: Synthetic oligonucleotide
  Antisense strand to SEQ ID NO: 1831793
acugaccagcacuuguucu

SEQ ID NO: 1831795 - RNA, 19 nt, Artificial Sequence
  Description of Artificial Sequence: Synthetic oligonucleotide
  Sense strand starting at position 357 of SEQ ID NO: 1563786
ucccaucuuucuguagaga

SEQ ID NO: 1831796 - RNA, 19 nt, Artificial Sequence
  Description of Artificial Sequence: Synthetic oligonucleotide
  Antisense strand to SEQ ID NO: 1831795
ucucuacagaaagauggga

SEQ ID NO: 1831797 - RNA, 19 nt, Artificial Sequence
  Description of Artificial Sequence: Synthetic oligonucleotide
  Sense strand starting at position 358 of SEQ ID NO: 1563786
cccaucuuucuguagagaa

SEQ ID NO: 1831798 - RNA, 19 nt, Artificial Sequence
  Description of Artificial Sequence: Synthetic oligonucleotide
  Antisense strand to SEQ ID NO: 1831797
uucucuacagaaagauggg

SEQ ID NO: 1831799 - RNA, 19 nt, Artificial Sequence
  Description of Artificial Sequence: Synthetic oligonucleotide
  Sense strand starting at position 391 of SEQ ID NO: 1563786
uccacuguacaguguuaua

SEQ ID NO: 1831800 - RNA, 19 nt, Artificial Sequence
  Description of Artificial Sequence: Synthetic oligonucleotide
  Antisense strand to SEQ ID NO: 1831799
uauaacacuguacagugga

SEQ ID NO: 1831801 - RNA, 19 nt, Artificial Sequence
  Description of Artificial Sequence: Synthetic oligonucleotide
  Sense strand starting at position 403 of SEQ ID NO: 1563786
uguuauauuguguauccac

SEQ ID NO: 1831802 - RNA, 19 nt, Artificial Sequence
  Description of Artificial Sequence: Synthetic oligonucleotide
  Antisense strand to SEQ ID NO: 1831801
guggauacacaauauaaca

SEQ ID NO: 1831803 - RNA, 19 nt, Artificial Sequence
  Description of Artificial Sequence: Synthetic oligonucleotide
  Sense strand starting at position 424 of SEQ ID NO: 1563786
cuguguccucugggucuaa

SEQ ID NO: 1831804 - RNA, 19 nt, Artificial Sequence
  Description of Artificial Sequence: Synthetic oligonucleotide
  Antisense strand to SEQ ID NO: 1831803
uuagacccagaggacacag

SEQ ID NO: 1831805 - RNA, 19 nt, Artificial Sequence
  Description of Artificial Sequence: Synthetic oligonucleotide
  Sense strand starting at position 425 of SEQ ID NO: 1563786
uguguccucugggucuaaa

SEQ ID NO: 1831806 - RNA, 19 nt, Artificial Sequence
  Description of Artificial Sequence: Synthetic oligonucleotide
  Antisense strand to SEQ ID NO: 1831805
uuuagacccagaggacaca

SEQ ID NO: 1831807 - RNA, 19 nt, Artificial Sequence
  Description of Artificial Sequence: Synthetic oligonucleotide
  Sense strand starting at position 542 of SEQ ID NO: 1563786
ccaugugcaucuguaccaa

SEQ ID NO: 1831808 - RNA, 19 nt, Artificial Sequence
  Description of Artificial Sequence: Synthetic oligonucleotide
  Antisense strand to SEQ ID NO: 1831807
uugguacagaugcacaugg

SEQ ID NO: 1831809 - RNA, 19 nt, Artificial Sequence
  Description of Artificial Sequence: Synthetic oligonucleotide
  Sense strand starting at position 842 of SEQ ID NO: 1563786
caugauacccugugacaug

SEQ ID NO: 1831810 - RNA, 19 nt, Artificial Sequence
  Description of Artificial Sequence: Synthetic oligonucleotide
  Antisense strand to SEQ ID NO: 1831809
caugucacaggguaucaug

SEQ ID NO: 1831811 - RNA, 19 nt, Artificial Sequence
  Description of Artificial Sequence: Synthetic oligonucleotide
  Sense strand starting at position 920 of SEQ ID NO: 1563786
acacgcaaguguguacuua

SEQ ID NO: 1831812 - RNA, 19 nt, Artificial Sequence
  Description of Artificial Sequence: Synthetic oligonucleotide
  Antisense strand to SEQ ID NO: 1831811
uaaguacacacuugcgugu

SEQ ID NO: 1831813 - RNA, 19 nt, Artificial Sequence
  Description of Artificial Sequence: Synthetic oligonucleotide
  Sense strand starting at position 924 of SEQ ID NO: 1563786
gcaaguguguacuuacauu

SEQ ID NO: 1831814 - RNA, 19 nt, Artificial Sequence
  Description of Artificial Sequence: Synthetic oligonucleotide
  Antisense strand to SEQ ID NO: 1831813
aauguaaguacacacuugc

SEQ ID NO: 1831815 - RNA, 19 nt, Artificial Sequence
  Description of Artificial Sequence: Synthetic oligonucleotide
  Sense strand starting at position 977 of SEQ ID NO: 1563786
aucaaaugucguggucaaa

SEQ ID NO: 1831816 - RNA, 19 nt, Artificial Sequence
  Description of Artificial Sequence: Synthetic oligonucleotide
  Antisense strand to SEQ ID NO: 1831815
uuugaccacgacauuugau

SEQ ID NO: 1831817 - RNA, 19 nt, Artificial Sequence
  Description of Artificial Sequence: Synthetic oligonucleotide
  Sense strand starting at position 980 of SEQ ID NO: 1563786
aaaugucguggucaaauac

SEQ ID NO: 1831818 - RNA, 19 nt, Artificial Sequence
  Description of Artificial Sequence: Synthetic oligonucleotide
  Antisense strand to SEQ ID NO: 1831817
guauuugaccacgacauuu

SEQ ID NO: 1831819 - RNA, 19 nt, Artificial Sequence
  Description of Artificial Sequence: Synthetic oligonucleotide
  Sense strand starting at position 1080 of SEQ ID NO: 1563786
acgaauaucuacgcucagu

SEQ ID NO: 1831820 - RNA, 19 nt, Artificial Sequence
  Description of Artificial Sequence: Synthetic oligonucleotide
  Antisense strand to SEQ ID NO: 1831819
acugagcguagauauucgu

SEQ ID NO: 1831821 - RNA, 19 nt, Artificial Sequence
  Description of Artificial Sequence: Synthetic oligonucleotide
  Sense strand starting at position 1127 of SEQ ID NO: 1563786
guguauccaugcuuaauca

SEQ ID NO: 1831822 - RNA, 19 nt, Artificial Sequence
  Description of Artificial Sequence: Synthetic oligonucleotide
  Antisense strand to SEQ ID NO: 1831821
ugauuaagcauggauacac

SEQ ID NO: 1831823 - RNA, 19 nt, Artificial Sequence
  Description of Artificial Sequence: Synthetic oligonucleotide
  Sense strand starting at position 2057 of SEQ ID NO: 1563786
ggacguuagugacuaacau

SEQ ID NO: 1831824 - RNA, 19 nt, Artificial Sequence
  Description of Artificial Sequence: Synthetic oligonucleotide
  Antisense strand to SEQ ID NO: 1831823
auguuagucacuaacgucc

SEQ ID NO: 1831825 - RNA, 19 nt, Artificial Sequence
  Description of Artificial Sequence: Synthetic oligonucleotide
  Sense strand starting at position 2058 of SEQ ID NO: 1563786
gacguuagugacuaacauc

SEQ ID NO: 1831826 - RNA, 19 nt, Artificial Sequence
  Description of Artificial Sequence: Synthetic oligonucleotide
  Antisense strand to SEQ ID NO: 1831825
gauguuagucacuaacguc

SEQ ID NO: 1831827 - RNA, 19 nt, Artificial Sequence
  Description of Artificial Sequence: Synthetic oligonucleotide
  Sense strand starting at position 2065 of SEQ ID NO: 1563786
gugacuaacaucuggguaa

SEQ ID NO: 1831828 - RNA, 19 nt, Artificial Sequence
  Description of Artificial Sequence: Synthetic oligonucleotide
  Antisense strand to SEQ ID NO: 1831827
uuacccagauguuagucac

SEQ ID NO: 1831829 - RNA, 19 nt, Artificial Sequence
  Description of Artificial Sequence: Synthetic oligonucleotide
  Sense strand starting at position 2066 of SEQ ID NO: 1563786
ugacuaacaucuggguaag

SEQ ID NO: 1831830 - RNA, 19 nt, Artificial Sequence
  Description of Artificial Sequence: Synthetic oligonucleotide
  Antisense strand to SEQ ID NO: 1831829
cuuacccagauguuaguca

SEQ ID NO: 1831831 - RNA, 19 nt, Artificial Sequence
  Description of Artificial Sequence: Synthetic oligonucleotide
  Sense strand starting at position 2392 of SEQ ID NO: 1563786
agcuguaugugagcuggua

SEQ ID NO: 1831832 - RNA, 19 nt, Artificial Sequence
  Description of Artificial Sequence: Synthetic oligonucleotide
  Antisense strand to SEQ ID NO: 1831831
uaccagcucacauacagcu

SEQ ID NO: 1831833 - RNA, 19 nt, Artificial Sequence
  Description of Artificial Sequence: Synthetic oligonucleotide
  Sense strand starting at position 2394 of SEQ ID NO: 1563786
cuguaugugagcugguauu

SEQ ID NO: 1831834 - RNA, 19 nt, Artificial Sequence
  Description of Artificial Sequence: Synthetic oligonucleotide
  Antisense strand to SEQ ID NO: 1831833
aauaccagcucacauacag

SEQ ID NO: 1831835 - RNA, 19 nt, Artificial Sequence
  Description of Artificial Sequence: Synthetic oligonucleotide
  Sense strand starting at position 2404 of SEQ ID NO: 1563786
gcugguauuucuguggugu

SEQ ID NO: 1831836 - RNA, 19 nt, Artificial Sequence
  Description of Artificial Sequence: Synthetic oligonucleotide
  Antisense strand to SEQ ID NO: 1831835
acaccacagaaauaccagc

SEQ ID NO: 1831837 - RNA, 19 nt, Artificial Sequence
  Description of Artificial Sequence: Synthetic oligonucleotide
  Sense strand starting at position 2417 of SEQ ID NO: 1563786
uggugugucuucucuggga

SEQ ID NO: 1831838 - RNA, 19 nt, Artificial Sequence
  Description of Artificial Sequence: Synthetic oligonucleotide
  Antisense strand to SEQ ID NO: 1831837
ucccagagaagacacacca

SEQ ID NO: 1831839 - RNA, 19 nt, Artificial Sequence
  Description of Artificial Sequence: Synthetic oligonucleotide
  Sense strand starting at position 2505 of SEQ ID NO: 1563786
acgugugucuucuuguaug

SEQ ID NO: 1831840 - RNA, 19 nt, Artificial Sequence
  Description of Artificial Sequence: Synthetic oligonucleotide
  Antisense strand to SEQ ID NO: 1831839
cauacaagaagacacacgu

SEQ ID NO: 1831841 - RNA, 19 nt, Artificial Sequence
  Description of Artificial Sequence: Synthetic oligonucleotide
  Sense strand starting at position 2511 of SEQ ID NO: 1563786
gucuucuuguaugucuuua

SEQ ID NO: 1831842 - RNA, 19 nt, Artificial Sequence
  Description of Artificial Sequence: Synthetic oligonucleotide
  Antisense strand to SEQ ID NO: 1831841
uaaagacauacaagaagac

SEQ ID NO: 1831843 - RNA, 19 nt, Artificial Sequence
  Description of Artificial Sequence: Synthetic oligonucleotide
  Sense strand starting at position 2515 of SEQ ID NO: 1563786
ucuuguaugucuuuaugua

SEQ ID NO: 1831844 - RNA, 19 nt, Artificial Sequence
  Description of Artificial Sequence: Synthetic oligonucleotide
  Antisense strand to SEQ ID NO: 1831843
uacauaaagacauacaaga

SEQ ID NO: 1831845 - RNA, 19 nt, Artificial Sequence
  Description of Artificial Sequence: Synthetic oligonucleotide
  Sense strand starting at position 2516 of SEQ ID NO: 1563786
cuuguaugucuuuauguau

SEQ ID NO: 1831846 - RNA, 19 nt, Artificial Sequence
  Description of Artificial Sequence: Synthetic oligonucleotide
  Antisense strand to SEQ ID NO: 1831845
auacauaaagacauacaag

SEQ ID NO: 1831847 - RNA, 19 nt, Artificial Sequence
  Description of Artificial Sequence: Synthetic oligonucleotide
  Sense strand starting at position 2556 of SEQ ID NO: 1563786
ucuauuaucucugugugca

SEQ ID NO: 1831848 - RNA, 19 nt, Artificial Sequence
  Description of Artificial Sequence: Synthetic oligonucleotide
  Antisense strand to SEQ ID NO: 1831847
ugcacacagagauaauaga

SEQ ID NO: 1831849 - RNA, 19 nt, Artificial Sequence
  Description of Artificial Sequence: Synthetic oligonucleotide
  Sense strand starting at position 2557 of SEQ ID NO: 1563786
cuauuaucucugugugcac

SEQ ID NO: 1831850 - RNA, 19 nt, Artificial Sequence
  Description of Artificial Sequence: Synthetic oligonucleotide
  Antisense strand to SEQ ID NO: 1831849
gugcacacagagauaauag

SEQ ID NO: 1831851 - RNA, 19 nt, Artificial Sequence
  Description of Artificial Sequence: Synthetic oligonucleotide
  Sense strand starting at position 2587 of SEQ ID NO: 1563786
gaagaauucuucuugcagu

SEQ ID NO: 1831852 - RNA, 19 nt, Artificial Sequence
  Description of Artificial Sequence: Synthetic oligonucleotide
  Antisense strand to SEQ ID NO: 1831851
acugcaagaagaauucuuc

SEQ ID NO: 1831853 - RNA, 19 nt, Artificial Sequence
  Description of Artificial Sequence: Synthetic oligonucleotide
  Sense strand starting at position 2604 of SEQ ID NO: 1563786
gucacauugcuauagcuuu

SEQ ID NO: 1831854 - RNA, 19 nt, Artificial Sequence
  Description of Artificial Sequence: Synthetic oligonucleotide
  Antisense strand to SEQ ID NO: 1831853
aaagcuauagcaaugugac

SEQ ID NO: 1831855 - RNA, 19 nt, Artificial Sequence
  Description of Artificial Sequence: Synthetic oligonucleotide
  Sense strand starting at position 3878 of SEQ ID NO: 1563786
ccgugacaguguuucuaac

SEQ ID NO: 1831856 - RNA, 19 nt, Artificial Sequence
  Description of Artificial Sequence: Synthetic oligonucleotide
  Antisense strand to SEQ ID NO: 1831855
guuagaaacacugucacgg

SEQ ID NO: 1831857 - RNA, 19 nt, Artificial Sequence
  Description of Artificial Sequence: Synthetic oligonucleotide
  Sense strand starting at position 3880 of SEQ ID NO: 1563786
gugacaguguuucuaacac

SEQ ID NO: 1831858 - RNA, 19 nt, Artificial Sequence
  Description of Artificial Sequence: Synthetic oligonucleotide
  Antisense strand to SEQ ID NO: 1831857
guguuagaaacacugucac

SEQ ID NO: 1831859 - RNA, 19 nt, Artificial Sequence
  Description of Artificial Sequence: Synthetic oligonucleotide
  Sense strand starting at position 3898 of SEQ ID NO: 1563786
cuucuugugugucucaaag

SEQ ID NO: 1831860 - RNA, 19 nt, Artificial Sequence
  Description of Artificial Sequence: Synthetic oligonucleotide
  Antisense strand to SEQ ID NO: 1831859
cuuugagacacacaagaag

SEQ ID NO: 1831861 - RNA, 19 nt, Artificial Sequence
  Description of Artificial Sequence: Synthetic oligonucleotide
  Sense strand starting at position 3923 of SEQ ID NO: 1563786
uuucuaggucuuugucuga

SEQ ID NO: 1831862 - RNA, 19 nt, Artificial Sequence
  Description of Artificial Sequence: Synthetic oligonucleotide
  Antisense strand to SEQ ID NO: 1831861
ucagacaaagaccuagaaa

SEQ ID NO: 1831863 - RNA, 19 nt, Artificial Sequence
  Description of Artificial Sequence: Synthetic oligonucleotide
  Sense strand starting at position 151 of SEQ ID NO: 1563787
cgcugauuguccuccugau

SEQ ID NO: 1831864 - RNA, 19 nt, Artificial Sequence
  Description of Artificial Sequence: Synthetic oligonucleotide
  Antisense strand to SEQ ID NO: 1831863
aucaggaggacaaucagcg

SEQ ID NO: 1831865 - RNA, 19 nt, Artificial Sequence
  Description of Artificial Sequence: Synthetic oligonucleotide
  Sense strand starting at position 263 of SEQ ID NO: 1563787
uucccucuuggugaucaga

SEQ ID NO: 1831866 - RNA, 19 nt, Artificial Sequence
  Description of Artificial Sequence: Synthetic oligonucleotide
  Antisense strand to SEQ ID NO: 1831865
ucugaucaccaagagggaa

SEQ ID NO: 1831867 - RNA, 19 nt, Artificial Sequence
  Description of Artificial Sequence: Synthetic oligonucleotide
  Sense strand starting at position 274 of SEQ ID NO: 1563787
ugaucagaucacuagcgau

SEQ ID NO: 1831868 - RNA, 19 nt, Artificial Sequence
  Description of Artificial Sequence: Synthetic oligonucleotide
  Antisense strand to SEQ ID NO: 1831867
aucgcuagugaucugauca

SEQ ID NO: 1831869 - RNA, 19 nt, Artificial Sequence
  Description of Artificial Sequence: Synthetic oligonucleotide
  Sense strand starting at position 287 of SEQ ID NO: 1563787
agcgauucuuaauuucuuu

SEQ ID NO: 1831870 - RNA, 19 nt, Artificial Sequence
  Description of Artificial Sequence: Synthetic oligonucleotide
  Antisense strand to SEQ ID NO: 1831869
aaagaaauuaagaaucgcu

SEQ ID NO: 1831871 - RNA, 19 nt, Artificial Sequence
  Description of Artificial Sequence: Synthetic oligonucleotide
  Sense strand starting at position 324 of SEQ ID NO: 1563787
ucaaguguccuacaauaag

SEQ ID NO: 1831872 - RNA, 19 nt, Artificial Sequence
  Description of Artificial Sequence: Synthetic oligonucleotide
  Antisense strand to SEQ ID NO: 1831871
cuuauuguaggacacuuga

SEQ ID NO: 1831873 - RNA, 19 nt, Artificial Sequence
  Description of Artificial Sequence: Synthetic oligonucleotide
  Sense strand starting at position 330 of SEQ ID NO: 1563787
guccuacaauaagauguau

SEQ ID NO: 1831874 - RNA, 19 nt, Artificial Sequence
  Description of Artificial Sequence: Synthetic oligonucleotide
  Antisense strand to SEQ ID NO: 1831873
auacaucuuauuguaggac

SEQ ID NO: 1831875 - RNA, 19 nt, Artificial Sequence
  Description of Artificial Sequence: Synthetic oligonucleotide
  Sense strand starting at position 345 of SEQ ID NO: 1563787
guauuacuuucgggaucau

SEQ ID NO: 1831876 - RNA, 19 nt, Artificial Sequence
  Description of Artificial Sequence: Synthetic oligonucleotide
  Antisense strand to SEQ ID NO: 1831875
augaucccgaaaguaauac

SEQ ID NO: 1831877 - RNA, 19 nt, Artificial Sequence
  Description of Artificial Sequence: Synthetic oligonucleotide
  Sense strand starting at position 346 of SEQ ID NO: 1563787
uauuacuuucgggaucaua

SEQ ID NO: 1831878 - RNA, 19 nt, Artificial Sequence
  Description of Artificial Sequence: Synthetic oligonucleotide
  Antisense strand to SEQ ID NO: 1831877
uaugaucccgaaaguaaua

SEQ ID NO: 1831879 - RNA, 19 nt, Artificial Sequence
  Description of Artificial Sequence: Synthetic oligonucleotide
  Sense strand starting at position 680 of SEQ ID NO: 1563787
ggcggacugcacugauuua

SEQ ID NO: 1831880 - RNA, 19 nt, Artificial Sequence
  Description of Artificial Sequence: Synthetic oligonucleotide
  Antisense strand to SEQ ID NO: 1831879
uaaaucagugcaguccgcc

SEQ ID NO: 1831881 - RNA, 19 nt, Artificial Sequence
  Description of Artificial Sequence: Synthetic oligonucleotide
  Sense strand starting at position 707 of SEQ ID NO: 1563787
ccacaugagucagcagaga

SEQ ID NO: 1831882 - RNA, 19 nt, Artificial Sequence
  Description of Artificial Sequence: Synthetic oligonucleotide
  Antisense strand to SEQ ID NO: 1831881
ucucugcugacucaugugg

SEQ ID NO: 1831883 - RNA, 19 nt, Artificial Sequence
  Description of Artificial Sequence: Synthetic oligonucleotide
  Sense strand starting at position 904 of SEQ ID NO: 1563787
gauuguagugcguguucuu

SEQ ID NO: 1831884 - RNA, 19 nt, Artificial Sequence
  Description of Artificial Sequence: Synthetic oligonucleotide
  Antisense strand to SEQ ID NO: 1831883
aagaacacgcacuacaauc

SEQ ID NO: 1831885 - RNA, 19 nt, Artificial Sequence
  Description of Artificial Sequence: Synthetic oligonucleotide
  Sense strand starting at position 909 of SEQ ID NO: 1563787
uagugcguguucuuugcaa

SEQ ID NO: 1831886 - RNA, 19 nt, Artificial Sequence
  Description of Artificial Sequence: Synthetic oligonucleotide
  Antisense strand to SEQ ID NO: 1831885
uugcaaagaacacgcacua

SEQ ID NO: 1831887 - RNA, 19 nt, Artificial Sequence
  Description of Artificial Sequence: Synthetic oligonucleotide
  Sense strand starting at position 911 of SEQ ID NO: 1563787
gugcguguucuuugcaauc

SEQ ID NO: 1831888 - RNA, 19 nt, Artificial Sequence
  Description of Artificial Sequence: Synthetic oligonucleotide
  Antisense strand to SEQ ID NO: 1831887
gauugcaaagaacacgcac

SEQ ID NO: 1831889 - RNA, 19 nt, Artificial Sequence
  Description of Artificial Sequence: Synthetic oligonucleotide
  Sense strand starting at position 994 of SEQ ID NO: 1563787
cccauaaccgcacagagau

SEQ ID NO: 1831890 - RNA, 19 nt, Artificial Sequence
  Description of Artificial Sequence: Synthetic oligonucleotide
  Antisense strand to SEQ ID NO: 1831889
aucucugugcgguuauggg

SEQ ID NO: 1831891 - RNA, 19 nt, Artificial Sequence
  Description of Artificial Sequence: Synthetic oligonucleotide
  Sense strand starting at position 2274 of SEQ ID NO: 1563787
aagggagcccgcugugaaa

SEQ ID NO: 1831892 - RNA, 19 nt, Artificial Sequence
  Description of Artificial Sequence: Synthetic oligonucleotide
  Antisense strand to SEQ ID NO: 1831891
uuucacagcgggcucccuu

SEQ ID NO: 1831893 - RNA, 19 nt, Artificial Sequence
  Description of Artificial Sequence: Synthetic oligonucleotide
  Sense strand starting at position 2312 of SEQ ID NO: 1563787
gggcgagagugcucccaga

SEQ ID NO: 1831894 - RNA, 19 nt, Artificial Sequence
  Description of Artificial Sequence: Synthetic oligonucleotide
  Antisense strand to SEQ ID NO: 1831893
ucugggagcacucucgccc

SEQ ID NO: 1831895 - RNA, 19 nt, Artificial Sequence
  Description of Artificial Sequence: Synthetic oligonucleotide
  Sense strand starting at position 2654 of SEQ ID NO: 1563787
gaggguaucccucgaacug

SEQ ID NO: 1831896 - RNA, 19 nt, Artificial Sequence
  Description of Artificial Sequence: Synthetic oligonucleotide
  Antisense strand to SEQ ID NO: 1831895
caguucgagggauacccuc

SEQ ID NO: 1831897 - RNA, 19 nt, Artificial Sequence
  Description of Artificial Sequence: Synthetic oligonucleotide
  Sense strand starting at position 2701 of SEQ ID NO: 1563787
gcucucuggugucuuauuu

SEQ ID NO: 1831898 - RNA, 19 nt, Artificial Sequence
  Description of Artificial Sequence: Synthetic oligonucleotide
  Antisense strand to SEQ ID NO: 1831897
aaauaagacaccagagagc

SEQ ID NO: 1831899 - RNA, 19 nt, Artificial Sequence
  Description of Artificial Sequence: Synthetic oligonucleotide
  Sense strand starting at position 2716 of SEQ ID NO: 1563787
auuucuuuguccucgggau

SEQ ID NO: 1831900 - RNA, 19 nt, Artificial Sequence
  Description of Artificial Sequence: Synthetic oligonucleotide
  Antisense strand to SEQ ID NO: 1831899
aucccgaggacaaagaaau

SEQ ID NO: 1831901 - RNA, 19 nt, Artificial Sequence
  Description of Artificial Sequence: Synthetic oligonucleotide
  Sense strand starting at position 2717 of SEQ ID NO: 1563787
uuucuuuguccucgggauu

SEQ ID NO: 1831902 - RNA, 19 nt, Artificial Sequence
  Description of Artificial Sequence: Synthetic oligonucleotide
  Antisense strand to SEQ ID NO: 1831901
aaucccgaggacaaagaaa

SEQ ID NO: 1831903 - RNA, 19 nt, Artificial Sequence
  Description of Artificial Sequence: Synthetic oligonucleotide
  Sense strand starting at position 2988 of SEQ ID NO: 1563787
augccuguugcccagugaa

SEQ ID NO: 1831904 - RNA, 19 nt, Artificial Sequence
  Description of Artificial Sequence: Synthetic oligonucleotide
  Antisense strand to SEQ ID NO: 1831903
uucacugggcaacaggcau

SEQ ID NO: 1831905 - RNA, 19 nt, Artificial Sequence
  Description of Artificial Sequence: Synthetic oligonucleotide
  Sense strand starting at position 2991 of SEQ ID NO: 1563787
ccuguugcccagugaagca

SEQ ID NO: 1831906 - RNA, 19 nt, Artificial Sequence
  Description of Artificial Sequence: Synthetic oligonucleotide
  Antisense strand to SEQ ID NO: 1831905
ugcuucacugggcaacagg

SEQ ID NO: 1831907 - RNA, 19 nt, Artificial Sequence
  Description of Artificial Sequence: Synthetic oligonucleotide
  Sense strand starting at position 3022 of SEQ ID NO: 1563787
ucgacucagucucacaaga

SEQ ID NO: 1831908 - RNA, 19 nt, Artificial Sequence
  Description of Artificial Sequence: Synthetic oligonucleotide
  Antisense strand to SEQ ID NO: 1831907
ucuugugagacugagucga

SEQ ID NO: 1831909 - RNA, 19 nt, Artificial Sequence
  Description of Artificial Sequence: Synthetic oligonucleotide
  Sense strand starting at position 3161 of SEQ ID NO: 1563787
acccaucugugcucagaga

SEQ ID NO: 1831910 - RNA, 19 nt, Artificial Sequence
  Description of Artificial Sequence: Synthetic oligonucleotide
  Antisense strand to SEQ ID NO: 1831909
ucucugagcacagaugggu

SEQ ID NO: 1831911 - RNA, 19 nt, Artificial Sequence
  Description of Artificial Sequence: Synthetic oligonucleotide
  Sense strand starting at position 3202 of SEQ ID NO: 1563787
cagccuuuaggaggagaau

SEQ ID NO: 1831912 - RNA, 19 nt, Artificial Sequence
  Description of Artificial Sequence: Synthetic oligonucleotide
  Antisense strand to SEQ ID NO: 1831911
auucuccuccuaaaggcug

SEQ ID NO: 1831913 - RNA, 19 nt, Artificial Sequence
  Description of Artificial Sequence: Synthetic oligonucleotide
  Sense strand starting at position 3256 of SEQ ID NO: 1563787
uagggagacugcuuccaga

SEQ ID NO: 1831914 - RNA, 19 nt, Artificial Sequence
  Description of Artificial Sequence: Synthetic oligonucleotide
  Antisense strand to SEQ ID NO: 1831913
ucuggaagcagucucccua

SEQ ID NO: 1831915 - RNA, 19 nt, Artificial Sequence
  Description of Artificial Sequence: Synthetic oligonucleotide
  Sense strand starting at position 3289 of SEQ ID NO: 1563787
agggcaucuucaggugaca

SEQ ID NO: 1831916 - RNA, 19 nt, Artificial Sequence
  Description of Artificial Sequence: Synthetic oligonucleotide
  Antisense strand to SEQ ID NO: 1831915
ugucaccugaagaugcccu

SEQ ID NO: 1831917 - RNA, 19 nt, Artificial Sequence
  Description of Artificial Sequence: Synthetic oligonucleotide
  Sense strand starting at position 3370 of SEQ ID NO: 1563787
gcguacuuuccaugaggca

SEQ ID NO: 1831918 - RNA, 19 nt, Artificial Sequence
  Description of Artificial Sequence: Synthetic oligonucleotide
  Antisense strand to SEQ ID NO: 1831917
ugccucauggaaaguacgc

SEQ ID NO: 1831919 - RNA, 19 nt, Artificial Sequence
  Description of Artificial Sequence: Synthetic oligonucleotide
  Sense strand starting at position 3409 of SEQ ID NO: 1563787
ugccuuugcugaucugaac

SEQ ID NO: 1831920 - RNA, 19 nt, Artificial Sequence
  Description of Artificial Sequence: Synthetic oligonucleotide
  Antisense strand to SEQ ID NO: 1831919
guucagaucagcaaaggca

SEQ ID NO: 1831921 - RNA, 19 nt, Artificial Sequence
  Description of Artificial Sequence: Synthetic oligonucleotide
  Sense strand starting at position 3519 of SEQ ID NO: 1563787
uaccuaaucuaggguuuga

SEQ ID NO: 1831922 - RNA, 19 nt, Artificial Sequence
  Description of Artificial Sequence: Synthetic oligonucleotide
  Antisense strand to SEQ ID NO: 1831921
ucaaacccuagauuaggua

SEQ ID NO: 1831923 - RNA, 19 nt, Artificial Sequence
  Description of Artificial Sequence: Synthetic oligonucleotide
  Sense strand starting at position 3541 of SEQ ID NO: 1563787
ccaucaggauggugaagua

SEQ ID NO: 1831924 - RNA, 19 nt, Artificial Sequence
  Description of Artificial Sequence: Synthetic oligonucleotide
  Antisense strand to SEQ ID NO: 1831923
uacuucaccauccugaugg

SEQ ID NO: 1831925 - RNA, 19 nt, Artificial Sequence
  Description of Artificial Sequence: Synthetic oligonucleotide
  Sense strand starting at position 3564 of SEQ ID NO: 1563787
gggaauagagcccguuuau

SEQ ID NO: 1831926 - RNA, 19 nt, Artificial Sequence
  Description of Artificial Sequence: Synthetic oligonucleotide
  Antisense strand to SEQ ID NO: 1831925
auaaacgggcucuauuccc

SEQ ID NO: 1831927 - RNA, 19 nt, Artificial Sequence
  Description of Artificial Sequence: Synthetic oligonucleotide
  Sense strand starting at position 3588 of SEQ ID NO: 1563787
ccugcuaauguguagugau

SEQ ID NO: 1831928 - RNA, 19 nt, Artificial Sequence
  Description of Artificial Sequence: Synthetic oligonucleotide
  Antisense strand to SEQ ID NO: 1831927
aucacuacacauuagcagg

SEQ ID NO: 1831929 - RNA, 19 nt, Artificial Sequence
  Description of Artificial Sequence: Synthetic oligonucleotide
  Sense strand starting at position 3596 of SEQ ID NO: 1563787
uguguagugauggguccau

SEQ ID NO: 1831930 - RNA, 19 nt, Artificial Sequence
  Description of Artificial Sequence: Synthetic oligonucleotide
  Antisense strand to SEQ ID NO: 1831929
auggacccaucacuacaca

SEQ ID NO: 1831931 - RNA, 19 nt, Artificial Sequence
  Description of Artificial Sequence: Synthetic oligonucleotide
  Sense strand starting at position 3607 of SEQ ID NO: 1563787
ggguccauuuaugguaaca

SEQ ID NO: 1831932 - RNA, 19 nt, Artificial Sequence
  Description of Artificial Sequence: Synthetic oligonucleotide
  Antisense strand to SEQ ID NO: 1831931
uguuaccauaaauggaccc

SEQ ID NO: 1831933 - RNA, 19 nt, Artificial Sequence
  Description of Artificial Sequence: Synthetic oligonucleotide
  Sense strand starting at position 3609 of SEQ ID NO: 1563787
guccauuuaugguaacaaa

SEQ ID NO: 1831934 - RNA, 19 nt, Artificial Sequence
  Description of Artificial Sequence: Synthetic oligonucleotide
  Antisense strand to SEQ ID NO: 1831933
uuuguuaccauaaauggac

SEQ ID NO: 1831935 - RNA, 19 nt, Artificial Sequence
  Description of Artificial Sequence: Synthetic oligonucleotide
  Sense strand starting at position 3687 of SEQ ID NO: 1563787
ucguuacauuuccugcaca

SEQ ID NO: 1831936 - RNA, 19 nt, Artificial Sequence
  Description of Artificial Sequence: Synthetic oligonucleotide
  Antisense strand to SEQ ID NO: 1831935
ugugcaggaaauguaacga

SEQ ID NO: 1831937 - RNA, 19 nt, Artificial Sequence
  Description of Artificial Sequence: Synthetic oligonucleotide
  Sense strand starting at position 3688 of SEQ ID NO: 1563787
cguuacauuuccugcacau

SEQ ID NO: 1831938 - RNA, 19 nt, Artificial Sequence
  Description of Artificial Sequence: Synthetic oligonucleotide
  Antisense strand to SEQ ID NO: 1831937
augugcaggaaauguaacg

SEQ ID NO: 1831939 - RNA, 19 nt, Artificial Sequence
  Description of Artificial Sequence: Synthetic oligonucleotide
  Sense strand starting at position 3887 of SEQ ID NO: 1563787
ucacucucccagugaggua

SEQ ID NO: 1831940 - RNA, 19 nt, Artificial Sequence
  Description of Artificial Sequence: Synthetic oligonucleotide
  Antisense strand to SEQ ID NO: 1831939
uaccucacugggagaguga

SEQ ID NO: 1831941 - RNA, 19 nt, Artificial Sequence
  Description of Artificial Sequence: Synthetic oligonucleotide
  Sense strand starting at position 3942 of SEQ ID NO: 1563787
agaaauuggcacuaucagu

SEQ ID NO: 1831942 - RNA, 19 nt, Artificial Sequence
  Description of Artificial Sequence: Synthetic oligonucleotide
  Antisense strand to SEQ ID NO: 1831941
acugauagugccaauuucu

SEQ ID NO: 1831943 - RNA, 19 nt, Artificial Sequence
  Description of Artificial Sequence: Synthetic oligonucleotide
  Sense strand starting at position 184 of SEQ ID NO: 1563788
uucacugaucguuagagga

SEQ ID NO: 1831944 - RNA, 19 nt, Artificial Sequence
  Description of Artificial Sequence: Synthetic oligonucleotide
  Antisense strand to SEQ ID NO: 1831943
uccucuaacgaucagugaa

SEQ ID NO: 1831945 - RNA, 19 nt, Artificial Sequence
  Description of Artificial Sequence: Synthetic oligonucleotide
  Sense strand starting at position 186 of SEQ ID NO: 1563788
cacugaucguuagaggaaa

SEQ ID NO: 1831946 - RNA, 19 nt, Artificial Sequence
  Description of Artificial Sequence: Synthetic oligonucleotide
  Antisense strand to SEQ ID NO: 1831945
uuuccucuaacgaucagug

SEQ ID NO: 1831947 - RNA, 19 nt, Artificial Sequence
  Description of Artificial Sequence: Synthetic oligonucleotide
  Sense strand starting at position 255 of SEQ ID NO: 1563788
gcaaauauuauguggugua

SEQ ID NO: 1831948 - RNA, 19 nt, Artificial Sequence
  Description of Artificial Sequence: Synthetic oligonucleotide
  Antisense strand to SEQ ID NO: 1831947
uacaccacauaauauuugc

SEQ ID NO: 1831949 - RNA, 19 nt, Artificial Sequence
  Description of Artificial Sequence: Synthetic oligonucleotide
  Sense strand starting at position 256 of SEQ ID NO: 1563788
caaauauuaugugguguau

SEQ ID NO: 1831950 - RNA, 19 nt, Artificial Sequence
  Description of Artificial Sequence: Synthetic oligonucleotide
  Antisense strand to SEQ ID NO: 1831949
auacaccacauaauauuug

SEQ ID NO: 1831951 - RNA, 19 nt, Artificial Sequence
  Description of Artificial Sequence: Synthetic oligonucleotide
  Sense strand starting at position 262 of SEQ ID NO: 1563788
uuaugugguguauauuaca

SEQ ID NO: 1831952 - RNA, 19 nt, Artificial Sequence
  Description of Artificial Sequence: Synthetic oligonucleotide
  Antisense strand to SEQ ID NO: 1831951
uguaauauacaccacauaa

SEQ ID NO: 1831953 - RNA, 19 nt, Artificial Sequence
  Description of Artificial Sequence: Synthetic oligonucleotide
  Sense strand starting at position 331 of SEQ ID NO: 1563788
aaauguugacaguaguuaa

SEQ ID NO: 1831954 - RNA, 19 nt, Artificial Sequence
  Description of Artificial Sequence: Synthetic oligonucleotide
  Antisense strand to SEQ ID NO: 1831953
uuaacuacugucaacauuu

SEQ ID NO: 1831955 - RNA, 19 nt, Artificial Sequence
  Description of Artificial Sequence: Synthetic oligonucleotide
  Sense strand starting at position 338 of SEQ ID NO: 1563788
gacaguaguuaauccugaa

SEQ ID NO: 1831956 - RNA, 19 nt, Artificial Sequence
  Description of Artificial Sequence: Synthetic oligonucleotide
  Antisense strand to SEQ ID NO: 1831955
uucaggauuaacuacuguc

SEQ ID NO: 1831957 - RNA, 19 nt, Artificial Sequence
  Description of Artificial Sequence: Synthetic oligonucleotide
  Sense strand starting at position 341 of SEQ ID NO: 1563788
aguaguuaauccugaauga

SEQ ID NO: 1831958 - RNA, 19 nt, Artificial Sequence
  Description of Artificial Sequence: Synthetic oligonucleotide
  Antisense strand to SEQ ID NO: 1831957
ucauucaggauuaacuacu

SEQ ID NO: 1831959 - RNA, 19 nt, Artificial Sequence
  Description of Artificial Sequence: Synthetic oligonucleotide
  Sense strand starting at position 342 of SEQ ID NO: 1563788
guaguuaauccugaaugac

SEQ ID NO: 1831960 - RNA, 19 nt, Artificial Sequence
  Description of Artificial Sequence: Synthetic oligonucleotide
  Antisense strand to SEQ ID NO: 1831959
gucauucaggauuaacuac

SEQ ID NO: 1831961 - RNA, 19 nt, Artificial Sequence
  Description of Artificial Sequence: Synthetic oligonucleotide
  Sense strand starting at position 345 of SEQ ID NO: 1563788
guuaauccugaaugacaga

SEQ ID NO: 1831962 - RNA, 19 nt, Artificial Sequence
  Description of Artificial Sequence: Synthetic oligonucleotide
  Antisense strand to SEQ ID NO: 1831961
ucugucauucaggauuaac

SEQ ID NO: 1831963 - RNA, 19 nt, Artificial Sequence
  Description of Artificial Sequence: Synthetic oligonucleotide
  Sense strand starting at position 416 of SEQ ID NO: 1563788
guacuccuugaauaucuga

SEQ ID NO: 1831964 - RNA, 19 nt, Artificial Sequence
  Description of Artificial Sequence: Synthetic oligonucleotide
  Antisense strand to SEQ ID NO: 1831963
ucagauauucaaggaguac

SEQ ID NO: 1831965 - RNA, 19 nt, Artificial Sequence
  Description of Artificial Sequence: Synthetic oligonucleotide
  Sense strand starting at position 503 of SEQ ID NO: 1563788
aacucagacuuggaauagu

SEQ ID NO: 1831966 - RNA, 19 nt, Artificial Sequence
  Description of Artificial Sequence: Synthetic oligonucleotide
  Antisense strand to SEQ ID NO: 1831965
acuauuccaagucugaguu

SEQ ID NO: 1831967 - RNA, 19 nt, Artificial Sequence
  Description of Artificial Sequence: Synthetic oligonucleotide
  Sense strand starting at position 746 of SEQ ID NO: 1563788
caagaaaguugaugacgga

SEQ ID NO: 1831968 - RNA, 19 nt, Artificial Sequence
  Description of Artificial Sequence: Synthetic oligonucleotide
  Antisense strand to SEQ ID NO: 1831967
uccgucaucaacuuucuug

SEQ ID NO: 1831969 - RNA, 19 nt, Artificial Sequence
  Description of Artificial Sequence: Synthetic oligonucleotide
  Sense strand starting at position 749 of SEQ ID NO: 1563788
gaaaguugaugacggaaau

SEQ ID NO: 1831970 - RNA, 19 nt, Artificial Sequence
  Description of Artificial Sequence: Synthetic oligonucleotide
  Antisense strand to SEQ ID NO: 1831969
auuuccgucaucaacuuuc

SEQ ID NO: 1831971 - RNA, 19 nt, Artificial Sequence
  Description of Artificial Sequence: Synthetic oligonucleotide
  Sense strand starting at position 750 of SEQ ID NO: 1563788
aaaguugaugacggaaauu

SEQ ID NO: 1831972 - RNA, 19 nt, Artificial Sequence
  Description of Artificial Sequence: Synthetic oligonucleotide
  Antisense strand to SEQ ID NO: 1831971
aauuuccgucaucaacuuu

SEQ ID NO: 1831973 - RNA, 19 nt, Artificial Sequence
  Description of Artificial Sequence: Synthetic oligonucleotide
  Sense strand starting at position 775 of SEQ ID NO: 1563788
aggcgacagucuucagcuu

SEQ ID NO: 1831974 - RNA, 19 nt, Artificial Sequence
  Description of Artificial Sequence: Synthetic oligonucleotide
  Antisense strand to SEQ ID NO: 1831973
aagcugaagacugucgccu

SEQ ID NO: 1831975 - RNA, 19 nt, Artificial Sequence
  Description of Artificial Sequence: Synthetic oligonucleotide
  Sense strand starting at position 787 of SEQ ID NO: 1563788
ucagcuuuccagcggcuaa

SEQ ID NO: 1831976 - RNA, 19 nt, Artificial Sequence
  Description of Artificial Sequence: Synthetic oligonucleotide
  Antisense strand to SEQ ID NO: 1831975
uuagccgcuggaaagcuga

SEQ ID NO: 1831977 - RNA, 19 nt, Artificial Sequence
  Description of Artificial Sequence: Synthetic oligonucleotide
  Sense strand starting at position 1159 of SEQ ID NO: 1563788
gggucauucgguuaaggug

SEQ ID NO: 1831978 - RNA, 19 nt, Artificial Sequence
  Description of Artificial Sequence: Synthetic oligonucleotide
  Antisense strand to SEQ ID NO: 1831977
caccuuaaccgaaugaccc

SEQ ID NO: 1831979 - RNA, 19 nt, Artificial Sequence
  Description of Artificial Sequence: Synthetic oligonucleotide
  Sense strand starting at position 1167 of SEQ ID NO: 1563788
cgguuaaggugccaucuga

SEQ ID NO: 1831980 - RNA, 19 nt, Artificial Sequence
  Description of Artificial Sequence: Synthetic oligonucleotide
  Antisense strand to SEQ ID NO: 1831979
ucagauggcaccuuaaccg

SEQ ID NO: 1831981 - RNA, 19 nt, Artificial Sequence
  Description of Artificial Sequence: Synthetic oligonucleotide
  Sense strand starting at position 1188 of SEQ ID NO: 1563788
cgaucuugccuaugucuca

SEQ ID NO: 1831982 - RNA, 19 nt, Artificial Sequence
  Description of Artificial Sequence: Synthetic oligonucleotide
  Antisense strand to SEQ ID NO: 1831981
ugagacauaggcaagaucg

SEQ ID NO: 1831983 - RNA, 19 nt, Artificial Sequence
  Description of Artificial Sequence: Synthetic oligonucleotide
  Sense strand starting at position 1870 of SEQ ID NO: 1563788
ugcgguuuccuccagaaac

SEQ ID NO: 1831984 - RNA, 19 nt, Artificial Sequence
  Description of Artificial Sequence: Synthetic oligonucleotide
  Antisense strand to SEQ ID NO: 1831983
guuucuggaggaaaccgca

SEQ ID NO: 1831985 - RNA, 19 nt, Artificial Sequence
  Description of Artificial Sequence: Synthetic oligonucleotide
  Sense strand starting at position 1872 of SEQ ID NO: 1563788
cgguuuccuccagaaacuc

SEQ ID NO: 1831986 - RNA, 19 nt, Artificial Sequence
  Description of Artificial Sequence: Synthetic oligonucleotide
  Antisense strand to SEQ ID NO: 1831985
gaguuucuggaggaaaccg

SEQ ID NO: 1831987 - RNA, 19 nt, Artificial Sequence
  Description of Artificial Sequence: Synthetic oligonucleotide
  Sense strand starting at position 2139 of SEQ ID NO: 1563788
guuucuuaccuggacccaa

SEQ ID NO: 1831988 - RNA, 19 nt, Artificial Sequence
  Description of Artificial Sequence: Synthetic oligonucleotide
  Antisense strand to SEQ ID NO: 1831987
uuggguccagguaagaaac

SEQ ID NO: 1831989 - RNA, 19 nt, Artificial Sequence
  Description of Artificial Sequence: Synthetic oligonucleotide
  Sense strand starting at position 2184 of SEQ ID NO: 1563788
ccauguugcgauucgcaga

SEQ ID NO: 1831990 - RNA, 19 nt, Artificial Sequence
  Description of Artificial Sequence: Synthetic oligonucleotide
  Antisense strand to SEQ ID NO: 1831989
ucugcgaaucgcaacaugg

SEQ ID NO: 1831991 - RNA, 19 nt, Artificial Sequence
  Description of Artificial Sequence: Synthetic oligonucleotide
  Sense strand starting at position 2390 of SEQ ID NO: 1563788
augacagggccuugaauga

SEQ ID NO: 1831992 - RNA, 19 nt, Artificial Sequence
  Description of Artificial Sequence: Synthetic oligonucleotide
  Antisense strand to SEQ ID NO: 1831991
ucauucaaggcccugucau

SEQ ID NO: 1831993 - RNA, 19 nt, Artificial Sequence
  Description of Artificial Sequence: Synthetic oligonucleotide
  Sense strand starting at position 2421 of SEQ ID NO: 1563788
ugggucuaggucuaauaua

SEQ ID NO: 1831994 - RNA, 19 nt, Artificial Sequence
  Description of Artificial Sequence: Synthetic oligonucleotide
  Antisense strand to SEQ ID NO: 1831993
uauauuagaccuagaccca

SEQ ID NO: 1831995 - RNA, 19 nt, Artificial Sequence
  Description of Artificial Sequence: Synthetic oligonucleotide
  Sense strand starting at position 2429 of SEQ ID NO: 1563788
ggucuaauauaacgugaaa

SEQ ID NO: 1831996 - RNA, 19 nt, Artificial Sequence
  Description of Artificial Sequence: Synthetic oligonucleotide
  Antisense strand to SEQ ID NO: 1831995
uuucacguuauauuagacc

SEQ ID NO: 1831997 - RNA, 19 nt, Artificial Sequence
  Description of Artificial Sequence: Synthetic oligonucleotide
  Sense strand starting at position 2454 of SEQ ID NO: 1563788
acugcacaacuaugaguau

SEQ ID NO: 1831998 - RNA, 19 nt, Artificial Sequence
  Description of Artificial Sequence: Synthetic oligonucleotide
  Antisense strand to SEQ ID NO: 1831997
auacucauaguugugcagu

SEQ ID NO: 1831999 - RNA, 19 nt, Artificial Sequence
  Description of Artificial Sequence: Synthetic oligonucleotide
  Sense strand starting at position 2457 of SEQ ID NO: 1563788
gcacaacuaugaguaugaa

SEQ ID NO: 1832000 - RNA, 19 nt, Artificial Sequence
  Description of Artificial Sequence: Synthetic oligonucleotide
  Antisense strand to SEQ ID NO: 1831999
uucauacucauaguugugc

SEQ ID NO: 1832001 - RNA, 19 nt, Artificial Sequence
  Description of Artificial Sequence: Synthetic oligonucleotide
  Sense strand starting at position 2942 of SEQ ID NO: 1563788
agucucuuacuguacauau

SEQ ID NO: 1832002 - RNA, 19 nt, Artificial Sequence
  Description of Artificial Sequence: Synthetic oligonucleotide
  Antisense strand to SEQ ID NO: 1832001
auauguacaguaagagacu

SEQ ID NO: 1832003 - RNA, 19 nt, Artificial Sequence
  Description of Artificial Sequence: Synthetic oligonucleotide
  Sense strand starting at position 2979 of SEQ ID NO: 1563788
aauacagcgucagguaaau

SEQ ID NO: 1832004 - RNA, 19 nt, Artificial Sequence
  Description of Artificial Sequence: Synthetic oligonucleotide
  Antisense strand to SEQ ID NO: 1832003
auuuaccugacgcuguauu

SEQ ID NO: 1832005 - RNA, 19 nt, Artificial Sequence
  Description of Artificial Sequence: Synthetic oligonucleotide
  Sense strand starting at position 2988 of SEQ ID NO: 1563788
ucagguaaauccucaugau

SEQ ID NO: 1832006 - RNA, 19 nt, Artificial Sequence
  Description of Artificial Sequence: Synthetic oligonucleotide
  Antisense strand to SEQ ID NO: 1832005
aucaugaggauuuaccuga

SEQ ID NO: 1832007 - RNA, 19 nt, Artificial Sequence
  Description of Artificial Sequence: Synthetic oligonucleotide
  Sense strand starting at position 2991 of SEQ ID NO: 1563788
gguaaauccucaugaucuc

SEQ ID NO: 1832008 - RNA, 19 nt, Artificial Sequence
  Description of Artificial Sequence: Synthetic oligonucleotide
  Antisense strand to SEQ ID NO: 1832007
gagaucaugaggauuuacc

SEQ ID NO: 1832009 - RNA, 19 nt, Artificial Sequence
  Description of Artificial Sequence: Synthetic oligonucleotide
  Sense strand starting at position 3015 of SEQ ID NO: 1563788
auaguauggugggugacuu

SEQ ID NO: 1832010 - RNA, 19 nt, Artificial Sequence
  Description of Artificial Sequence: Synthetic oligonucleotide
  Antisense strand to SEQ ID NO: 1832009
aagucacccaccauacuau

SEQ ID NO: 1832011 - RNA, 19 nt, Artificial Sequence
  Description of Artificial Sequence: Synthetic oligonucleotide
  Sense strand starting at position 3457 of SEQ ID NO: 1563788
uuccaacaguguuugucau

SEQ ID NO: 1832012 - RNA, 19 nt, Artificial Sequence
  Description of Artificial Sequence: Synthetic oligonucleotide
  Antisense strand to SEQ ID NO: 1832011
augacaaacacuguuggaa

SEQ ID NO: 1832013 - RNA, 19 nt, Artificial Sequence
  Description of Artificial Sequence: Synthetic oligonucleotide
  Sense strand starting at position 3459 of SEQ ID NO: 1563788
ccaacaguguuugucaugu

SEQ ID NO: 1832014 - RNA, 19 nt, Artificial Sequence
  Description of Artificial Sequence: Synthetic oligonucleotide
  Antisense strand to SEQ ID NO: 1832013
acaugacaaacacuguugg

SEQ ID NO: 1832015 - RNA, 19 nt, Artificial Sequence
  Description of Artificial Sequence: Synthetic oligonucleotide
  Sense strand starting at position 3550 of SEQ ID NO: 1563788
uggguuucccucugaaaua

SEQ ID NO: 1832016 - RNA, 19 nt, Artificial Sequence
  Description of Artificial Sequence: Synthetic oligonucleotide
  Antisense strand to SEQ ID NO: 1832015
uauuucagagggaaaccca

SEQ ID NO: 1832017 - RNA, 19 nt, Artificial Sequence
  Description of Artificial Sequence: Synthetic oligonucleotide
  Sense strand starting at position 3551 of SEQ ID NO: 1563788
ggguuucccucugaaauag

SEQ ID NO: 1832018 - RNA, 19 nt, Artificial Sequence
  Description of Artificial Sequence: Synthetic oligonucleotide
  Antisense strand to SEQ ID NO: 1832017
cuauuucagagggaaaccc

SEQ ID NO: 1832019 - RNA, 19 nt, Artificial Sequence
  Description of Artificial Sequence: Synthetic oligonucleotide
  Sense strand starting at position 3562 of SEQ ID NO: 1563788
ugaaauagguuccacauca

SEQ ID NO: 1832020 - RNA, 19 nt, Artificial Sequence
  Description of Artificial Sequence: Synthetic oligonucleotide
  Antisense strand to SEQ ID NO: 1832019
ugauguggaaccuauuuca

SEQ ID NO: 1832021 - RNA, 19 nt, Artificial Sequence
  Description of Artificial Sequence: Synthetic oligonucleotide
  Sense strand starting at position 3891 of SEQ ID NO: 1563788
gcaggagcuuguuauccca

SEQ ID NO: 1832022 - RNA, 19 nt, Artificial Sequence
  Description of Artificial Sequence: Synthetic oligonucleotide
  Antisense strand to SEQ ID NO: 1832021
ugggauaacaagcuccugc

SEQ ID NO: 1832023 - RNA, 19 nt, Artificial Sequence
  Description of Artificial Sequence: Synthetic oligonucleotide
  Sense strand starting at position 103 of SEQ ID NO: 1563789
aucacuauuccaggguguu

SEQ ID NO: 1832024 - RNA, 19 nt, Artificial Sequence
  Description of Artificial Sequence: Synthetic oligonucleotide
  Antisense strand to SEQ ID NO: 1832023
aacacccuggaauagugau

SEQ ID NO: 1832025 - RNA, 19 nt, Artificial Sequence
  Description of Artificial Sequence: Synthetic oligonucleotide
  Sense strand starting at position 104 of SEQ ID NO: 1563789
ucacuauuccaggguguug

SEQ ID NO: 1832026 - RNA, 19 nt, Artificial Sequence
  Description of Artificial Sequence: Synthetic oligonucleotide
  Antisense strand to SEQ ID NO: 1832025
caacacccuggaauaguga

SEQ ID NO: 1832027 - RNA, 19 nt, Artificial Sequence
  Description of Artificial Sequence: Synthetic oligonucleotide
  Sense strand starting at position 214 of SEQ ID NO: 1563789
ugggucuguucuuuauguu

SEQ ID NO: 1832028 - RNA, 19 nt, Artificial Sequence
  Description of Artificial Sequence: Synthetic oligonucleotide
  Antisense strand to SEQ ID NO: 1832027
aacauaaagaacagaccca

SEQ ID NO: 1832029 - RNA, 19 nt, Artificial Sequence
  Description of Artificial Sequence: Synthetic oligonucleotide
  Sense strand starting at position 215 of SEQ ID NO: 1563789
gggucuguucuuuauguua

SEQ ID NO: 1832030 - RNA, 19 nt, Artificial Sequence
  Description of Artificial Sequence: Synthetic oligonucleotide
  Antisense strand to SEQ ID NO: 1832029
uaacauaaagaacagaccc

SEQ ID NO: 1832031 - RNA, 19 nt, Artificial Sequence
  Description of Artificial Sequence: Synthetic oligonucleotide
  Sense strand starting at position 217 of SEQ ID NO: 1563789
gucuguucuuuauguuauu

SEQ ID NO: 1832032 - RNA, 19 nt, Artificial Sequence
  Description of Artificial Sequence: Synthetic oligonucleotide
  Antisense strand to SEQ ID NO: 1832031
aauaacauaaagaacagac

SEQ ID NO: 1832033 - RNA, 19 nt, Artificial Sequence
  Description of Artificial Sequence: Synthetic oligonucleotide
  Sense strand starting at position 302 of SEQ ID NO: 1563789
gagacacuuuagucaaagu

SEQ ID NO: 1832034 - RNA, 19 nt, Artificial Sequence
  Description of Artificial Sequence: Synthetic oligonucleotide
  Antisense strand to SEQ ID NO: 1832033
acuuugacuaaagugucuc

SEQ ID NO: 1832035 - RNA, 19 nt, Artificial Sequence
  Description of Artificial Sequence: Synthetic oligonucleotide
  Sense strand starting at position 331 of SEQ ID NO: 1563789
gcauuaaaguuguuagcga

SEQ ID NO: 1832036 - RNA, 19 nt, Artificial Sequence
  Description of Artificial Sequence: Synthetic oligonucleotide
  Antisense strand to SEQ ID NO: 1832035
ucgcuaacaacuuuaaugc

SEQ ID NO: 1832037 - RNA, 19 nt, Artificial Sequence
  Description of Artificial Sequence: Synthetic oligonucleotide
  Sense strand starting at position 335 of SEQ ID NO: 1563789
uaaaguuguuagcgaccca

SEQ ID NO: 1832038 - RNA, 19 nt, Artificial Sequence
  Description of Artificial Sequence: Synthetic oligonucleotide
  Antisense strand to SEQ ID NO: 1832037
ugggucgcuaacaacuuua

SEQ ID NO: 1832039 - RNA, 19 nt, Artificial Sequence
  Description of Artificial Sequence: Synthetic oligonucleotide
  Sense strand starting at position 832 of SEQ ID NO: 1563789
agaagaaacucugaaggca

SEQ ID NO: 1832040 - RNA, 19 nt, Artificial Sequence
  Description of Artificial Sequence: Synthetic oligonucleotide
  Antisense strand to SEQ ID NO: 1832039
ugccuucagaguuucuucu

SEQ ID NO: 1832041 - RNA, 19 nt, Artificial Sequence
  Description of Artificial Sequence: Synthetic oligonucleotide
  Sense strand starting at position 853 of SEQ ID NO: 1563789
gagguagucuaccaaacuc

SEQ ID NO: 1832042 - RNA, 19 nt, Artificial Sequence
  Description of Artificial Sequence: Synthetic oligonucleotide
  Antisense strand to SEQ ID NO: 1832041
gaguuugguagacuaccuc

SEQ ID NO: 1832043 - RNA, 19 nt, Artificial Sequence
  Description of Artificial Sequence: Synthetic oligonucleotide
  Sense strand starting at position 1052 of SEQ ID NO: 1563789
agagguuggguccaaguuu

SEQ ID NO: 1832044 - RNA, 19 nt, Artificial Sequence
  Description of Artificial Sequence: Synthetic oligonucleotide
  Antisense strand to SEQ ID NO: 1832043
aaacuuggacccaaccucu

SEQ ID NO: 1832045 - RNA, 19 nt, Artificial Sequence
  Description of Artificial Sequence: Synthetic oligonucleotide
  Sense strand starting at position 1957 of SEQ ID NO: 1563789
gcgcuucagugcgagucau

SEQ ID NO: 1832046 - RNA, 19 nt, Artificial Sequence
  Description of Artificial Sequence: Synthetic oligonucleotide
  Antisense strand to SEQ ID NO: 1832045
augacucgcacugaagcgc

SEQ ID NO: 1832047 - RNA, 19 nt, Artificial Sequence
  Description of Artificial Sequence: Synthetic oligonucleotide
  Sense strand starting at position 1963 of SEQ ID NO: 1563789
cagugcgagucauaagacu

SEQ ID NO: 1832048 - RNA, 19 nt, Artificial Sequence
  Description of Artificial Sequence: Synthetic oligonucleotide
  Antisense strand to SEQ ID NO: 1832047
agucuuaugacucgcacug

SEQ ID NO: 1832049 - RNA, 19 nt, Artificial Sequence
  Description of Artificial Sequence: Synthetic oligonucleotide
  Sense strand starting at position 2008 of SEQ ID NO: 1563789
gccaaucuccgcgcuugaa

SEQ ID NO: 1832050 - RNA, 19 nt, Artificial Sequence
  Description of Artificial Sequence: Synthetic oligonucleotide
  Antisense strand to SEQ ID NO: 1832049
uucaagcgcggagauuggc

SEQ ID NO: 1832051 - RNA, 19 nt, Artificial Sequence
  Description of Artificial Sequence: Synthetic oligonucleotide
  Sense strand starting at position 2100 of SEQ ID NO: 1563789
uuccuaugcuccugagaga

SEQ ID NO: 1832052 - RNA, 19 nt, Artificial Sequence
  Description of Artificial Sequence: Synthetic oligonucleotide
  Antisense strand to SEQ ID NO: 1832051
ucucucaggagcauaggaa

SEQ ID NO: 1832053 - RNA, 19 nt, Artificial Sequence
  Description of Artificial Sequence: Synthetic oligonucleotide
  Sense strand starting at position 2101 of SEQ ID NO: 1563789
uccuaugcuccugagagau

SEQ ID NO: 1832054 - RNA, 19 nt, Artificial Sequence
  Description of Artificial Sequence: Synthetic oligonucleotide
  Antisense strand to SEQ ID NO: 1832053
aucucucaggagcauagga

SEQ ID NO: 1832055 - RNA, 19 nt, Artificial Sequence
  Description of Artificial Sequence: Synthetic oligonucleotide
  Sense strand starting at position 2103 of SEQ ID NO: 1563789
cuaugcuccugagagauau

SEQ ID NO: 1832056 - RNA, 19 nt, Artificial Sequence
  Description of Artificial Sequence: Synthetic oligonucleotide
  Antisense strand to SEQ ID NO: 1832055
auaucucucaggagcauag

SEQ ID NO: 1832057 - RNA, 19 nt, Artificial Sequence
  Description of Artificial Sequence: Synthetic oligonucleotide
  Sense strand starting at position 2538 of SEQ ID NO: 1563789
ggcauauaugugccacguu

SEQ ID NO: 1832058 - RNA, 19 nt, Artificial Sequence
  Description of Artificial Sequence: Synthetic oligonucleotide
  Antisense strand to SEQ ID NO: 1832057
aacguggcacauauaugcc

SEQ ID NO: 1832059 - RNA, 19 nt, Artificial Sequence
  Description of Artificial Sequence: Synthetic oligonucleotide
  Sense strand starting at position 2539 of SEQ ID NO: 1563789
gcauauaugugccacguuu

SEQ ID NO: 1832060 - RNA, 19 nt, Artificial Sequence
  Description of Artificial Sequence: Synthetic oligonucleotide
  Antisense strand to SEQ ID NO: 1832059
aaacguggcacauauaugc

SEQ ID NO: 1832061 - RNA, 19 nt, Artificial Sequence
  Description of Artificial Sequence: Synthetic oligonucleotide
  Sense strand starting at position 2637 of SEQ ID NO: 1563789
acgugugcaugcgucaaau

SEQ ID NO: 1832062 - RNA, 19 nt, Artificial Sequence
  Description of Artificial Sequence: Synthetic oligonucleotide
  Antisense strand to SEQ ID NO: 1832061
auuugacgcaugcacacgu

SEQ ID NO: 1832063 - RNA, 19 nt, Artificial Sequence
  Description of Artificial Sequence: Synthetic oligonucleotide
  Sense strand starting at position 2643 of SEQ ID NO: 1563789
gcaugcgucaaaugguauu

SEQ ID NO: 1832064 - RNA, 19 nt, Artificial Sequence
  Description of Artificial Sequence: Synthetic oligonucleotide
  Antisense strand to SEQ ID NO: 1832063
aauaccauuugacgcaugc

SEQ ID NO: 1832065 - RNA, 19 nt, Artificial Sequence
  Description of Artificial Sequence: Synthetic oligonucleotide
  Sense strand starting at position 2699 of SEQ ID NO: 1563789
gccacaauaguugaacuaa

SEQ ID NO: 1832066 - RNA, 19 nt, Artificial Sequence
  Description of Artificial Sequence: Synthetic oligonucleotide
  Antisense strand to SEQ ID NO: 1832065
uuaguucaacuauuguggc

SEQ ID NO: 1832067 - RNA, 19 nt, Artificial Sequence
  Description of Artificial Sequence: Synthetic oligonucleotide
  Sense strand starting at position 2885 of SEQ ID NO: 1563789
ucauguuuguugcugcaua

SEQ ID NO: 1832068 - RNA, 19 nt, Artificial Sequence
  Description of Artificial Sequence: Synthetic oligonucleotide
  Antisense strand to SEQ ID NO: 1832067
uaugcagcaacaaacauga

SEQ ID NO: 1832069 - RNA, 19 nt, Artificial Sequence
  Description of Artificial Sequence: Synthetic oligonucleotide
  Sense strand starting at position 2886 of SEQ ID NO: 1563789
cauguuuguugcugcauaa

SEQ ID NO: 1832070 - RNA, 19 nt, Artificial Sequence
  Description of Artificial Sequence: Synthetic oligonucleotide
  Antisense strand to SEQ ID NO: 1832069
uuaugcagcaacaaacaug

SEQ ID NO: 1832071 - RNA, 19 nt, Artificial Sequence
  Description of Artificial Sequence: Synthetic oligonucleotide
  Sense strand starting at position 3264 of SEQ ID NO: 1563789
uuggcuccuugacaaagaa

SEQ ID NO: 1832072 - RNA, 19 nt, Artificial Sequence
  Description of Artificial Sequence: Synthetic oligonucleotide
  Antisense strand to SEQ ID NO: 1832071
uucuuugucaaggagccaa

SEQ ID NO: 1832073 - RNA, 19 nt, Artificial Sequence
  Description of Artificial Sequence: Synthetic oligonucleotide
  Sense strand starting at position 3370 of SEQ ID NO: 1563789
uguuguuaccuaugcaguu

SEQ ID NO: 1832074 - RNA, 19 nt, Artificial Sequence
  Description of Artificial Sequence: Synthetic oligonucleotide
  Antisense strand to SEQ ID NO: 1832073
aacugcauagguaacaaca

SEQ ID NO: 1832075 - RNA, 19 nt, Artificial Sequence
  Description of Artificial Sequence: Synthetic oligonucleotide
  Sense strand starting at position 3382 of SEQ ID NO: 1563789
ugcaguucaugcugugaga

SEQ ID NO: 1832076 - RNA, 19 nt, Artificial Sequence
  Description of Artificial Sequence: Synthetic oligonucleotide
  Antisense strand to SEQ ID NO: 1832075
ucucacagcaugaacugca

SEQ ID NO: 1832077 - RNA, 19 nt, Artificial Sequence
  Description of Artificial Sequence: Synthetic oligonucleotide
  Sense strand starting at position 3723 of SEQ ID NO: 1563789
gcauacuguuugcuauacu

SEQ ID NO: 1832078 - RNA, 19 nt, Artificial Sequence
  Description of Artificial Sequence: Synthetic oligonucleotide
  Antisense strand to SEQ ID NO: 1832077
aguauagcaaacaguaugc

SEQ ID NO: 1832079 - RNA, 19 nt, Artificial Sequence
  Description of Artificial Sequence: Synthetic oligonucleotide
  Sense strand starting at position 3731 of SEQ ID NO: 1563789
uuugcuauacuugauagau

SEQ ID NO: 1832080 - RNA, 19 nt, Artificial Sequence
  Description of Artificial Sequence: Synthetic oligonucleotide
  Antisense strand to SEQ ID NO: 1832079
aucuaucaaguauagcaaa

SEQ ID NO: 1832081 - RNA, 19 nt, Artificial Sequence
  Description of Artificial Sequence: Synthetic oligonucleotide
  Sense strand starting at position 3733 of SEQ ID NO: 1563789
ugcuauacuugauagauga

SEQ ID NO: 1832082 - RNA, 19 nt, Artificial Sequence
  Description of Artificial Sequence: Synthetic oligonucleotide
  Antisense strand to SEQ ID NO: 1832081
ucaucuaucaaguauagca

SEQ ID NO: 1832083 - RNA, 19 nt, Artificial Sequence
  Description of Artificial Sequence: Synthetic oligonucleotide
  Sense strand starting at position 3805 of SEQ ID NO: 1563789
ggaauaaagcacugauucu

SEQ ID NO: 1832084 - RNA, 19 nt, Artificial Sequence
  Description of Artificial Sequence: Synthetic oligonucleotide
  Antisense strand to SEQ ID NO: 1832083
agaaucagugcuuuauucc

SEQ ID NO: 1832085 - RNA, 19 nt, Artificial Sequence
  Description of Artificial Sequence: Synthetic oligonucleotide
  Sense strand starting at position 3812 of SEQ ID NO: 1563789
agcacugauucucaagugu

SEQ ID NO: 1832086 - RNA, 19 nt, Artificial Sequence
  Description of Artificial Sequence: Synthetic oligonucleotide
  Antisense strand to SEQ ID NO: 1832085
acacuugagaaucagugcu

SEQ ID NO: 1832087 - RNA, 19 nt, Artificial Sequence
  Description of Artificial Sequence: Synthetic oligonucleotide
  Sense strand starting at position 3816 of SEQ ID NO: 1563789
cugauucucaaguguuagu

SEQ ID NO: 1832088 - RNA, 19 nt, Artificial Sequence
  Description of Artificial Sequence: Synthetic oligonucleotide
  Antisense strand to SEQ ID NO: 1832087
acuaacacuugagaaucag

SEQ ID NO: 1832089 - RNA, 19 nt, Artificial Sequence
  Description of Artificial Sequence: Synthetic oligonucleotide
  Sense strand starting at position 3899 of SEQ ID NO: 1563789
cccagagauucugaaacag

SEQ ID NO: 1832090 - RNA, 19 nt, Artificial Sequence
  Description of Artificial Sequence: Synthetic oligonucleotide
  Antisense strand to SEQ ID NO: 1832089
cuguuucagaaucucuggg

SEQ ID NO: 1832091 - RNA, 19 nt, Artificial Sequence
  Description of Artificial Sequence: Synthetic oligonucleotide
  Sense strand starting at position 3925 of SEQ ID NO: 1563789
guggcagucuuauuaauca

SEQ ID NO: 1832092 - RNA, 19 nt, Artificial Sequence
  Description of Artificial Sequence: Synthetic oligonucleotide
  Antisense strand to SEQ ID NO: 1832091
ugauuaauaagacugccac

SEQ ID NO: 1832093 - RNA, 19 nt, Artificial Sequence
  Description of Artificial Sequence: Synthetic oligonucleotide
  Sense strand starting at position 3963 of SEQ ID NO: 1563789
aagugauucugauucugug

SEQ ID NO: 1832094 - RNA, 19 nt, Artificial Sequence
  Description of Artificial Sequence: Synthetic oligonucleotide
  Antisense strand to SEQ ID NO: 1832093
cacagaaucagaaucacuu

SEQ ID NO: 1832095 - RNA, 19 nt, Artificial Sequence
  Description of Artificial Sequence: Synthetic oligonucleotide
  Sense strand starting at position 3969 of SEQ ID NO: 1563789
uucugauucugugguccau

SEQ ID NO: 1832096 - RNA, 19 nt, Artificial Sequence
  Description of Artificial Sequence: Synthetic oligonucleotide
  Antisense strand to SEQ ID NO: 1832095
auggaccacagaaucagaa

SEQ ID NO: 1832097 - RNA, 19 nt, Artificial Sequence
  Description of Artificial Sequence: Synthetic oligonucleotide
  Sense strand starting at position 29 of SEQ ID NO: 1563790
gugcacauucuuuaguaau

SEQ ID NO: 1832098 - RNA, 19 nt, Artificial Sequence
  Description of Artificial Sequence: Synthetic oligonucleotide
  Antisense strand to SEQ ID NO: 1832097
auuacuaaagaaugugcac

SEQ ID NO: 1832099 - RNA, 19 nt, Artificial Sequence
  Description of Artificial Sequence: Synthetic oligonucleotide
  Sense strand starting at position 102 of SEQ ID NO: 1563790
cucuguagaggugaucuaa

SEQ ID NO: 1832100 - RNA, 19 nt, Artificial Sequence
  Description of Artificial Sequence: Synthetic oligonucleotide
  Antisense strand to SEQ ID NO: 1832099
uuagaucaccucuacagag

SEQ ID NO: 1832101 - RNA, 19 nt, Artificial Sequence
  Description of Artificial Sequence: Synthetic oligonucleotide
  Sense strand starting at position 521 of SEQ ID NO: 1563790
gguacauuuccggguacgu

SEQ ID NO: 1832102 - RNA, 19 nt, Artificial Sequence
  Description of Artificial Sequence: Synthetic oligonucleotide
  Antisense strand to SEQ ID NO: 1832101
acguacccggaaauguacc

SEQ ID NO: 1832103 - RNA, 19 nt, Artificial Sequence
  Description of Artificial Sequence: Synthetic oligonucleotide
  Sense strand starting at position 534 of SEQ ID NO: 1563790
guacguuuccgucuacauu

SEQ ID NO: 1832104 - RNA, 19 nt, Artificial Sequence
  Description of Artificial Sequence: Synthetic oligonucleotide
  Antisense strand to SEQ ID NO: 1832103
aauguagacggaaacguac

SEQ ID NO: 1832105 - RNA, 19 nt, Artificial Sequence
  Description of Artificial Sequence: Synthetic oligonucleotide
  Sense strand starting at position 535 of SEQ ID NO: 1563790
uacguuuccgucuacauuu

SEQ ID NO: 1832106 - RNA, 19 nt, Artificial Sequence
  Description of Artificial Sequence: Synthetic oligonucleotide
  Antisense strand to SEQ ID NO: 1832105
aaauguagacggaaacgua

SEQ ID NO: 1832107 - RNA, 19 nt, Artificial Sequence
  Description of Artificial Sequence: Synthetic oligonucleotide
  Sense strand starting at position 537 of SEQ ID NO: 1563790
cguuuccgucuacauuuau

SEQ ID NO: 1832108 - RNA, 19 nt, Artificial Sequence
  Description of Artificial Sequence: Synthetic oligonucleotide
  Antisense strand to SEQ ID NO: 1832107
auaaauguagacggaaacg

SEQ ID NO: 1832109 - RNA, 19 nt, Artificial Sequence
  Description of Artificial Sequence: Synthetic oligonucleotide
  Sense strand starting at position 595 of SEQ ID NO: 1563790
auaagagccauggguugaa

SEQ ID NO: 1832110 - RNA, 19 nt, Artificial Sequence
  Description of Artificial Sequence: Synthetic oligonucleotide
  Antisense strand to SEQ ID NO: 1832109
uucaacccauggcucuuau

SEQ ID NO: 1832111 - RNA, 19 nt, Artificial Sequence
  Description of Artificial Sequence: Synthetic oligonucleotide
  Sense strand starting at position 659 of SEQ ID NO: 1563790
caguuauucuugguuacag

SEQ ID NO: 1832112 - RNA, 19 nt, Artificial Sequence
  Description of Artificial Sequence: Synthetic oligonucleotide
  Antisense strand to SEQ ID NO: 1832111
cuguaaccaagaauaacug

SEQ ID NO: 1832113 - RNA, 19 nt, Artificial Sequence
  Description of Artificial Sequence: Synthetic oligonucleotide
  Sense strand starting at position 660 of SEQ ID NO: 1563790
aguuauucuugguuacaga

SEQ ID NO: 1832114 - RNA, 19 nt, Artificial Sequence
  Description of Artificial Sequence: Synthetic oligonucleotide
  Antisense strand to SEQ ID NO: 1832113
ucuguaaccaagaauaacu

SEQ ID NO: 1832115 - RNA, 19 nt, Artificial Sequence
  Description of Artificial Sequence: Synthetic oligonucleotide
  Sense strand starting at position 661 of SEQ ID NO: 1563790
guuauucuugguuacagac

SEQ ID NO: 1832116 - RNA, 19 nt, Artificial Sequence
  Description of Artificial Sequence: Synthetic oligonucleotide
  Antisense strand to SEQ ID NO: 1832115
gucuguaaccaagaauaac

SEQ ID NO: 1832117 - RNA, 19 nt, Artificial Sequence
  Description of Artificial Sequence: Synthetic oligonucleotide
  Sense strand starting at position 911 of SEQ ID NO: 1563790
gccgaaucucaacaaauga

SEQ ID NO: 1832118 - RNA, 19 nt, Artificial Sequence
  Description of Artificial Sequence: Synthetic oligonucleotide
  Antisense strand to SEQ ID NO: 1832117
ucauuuguugagauucggc

SEQ ID NO: 1832119 - RNA, 19 nt, Artificial Sequence
  Description of Artificial Sequence: Synthetic oligonucleotide
  Sense strand starting at position 2114 of SEQ ID NO: 1563790
gcgggacacugaucuggaa

SEQ ID NO: 1832120 - RNA, 19 nt, Artificial Sequence
  Description of Artificial Sequence: Synthetic oligonucleotide
  Antisense strand to SEQ ID NO: 1832119
uuccagaucagugucccgc

SEQ ID NO: 1832121 - RNA, 19 nt, Artificial Sequence
  Description of Artificial Sequence: Synthetic oligonucleotide
  Sense strand starting at position 2414 of SEQ ID NO: 1563790
ggucgcuucggaguucuca

SEQ ID NO: 1832122 - RNA, 19 nt, Artificial Sequence
  Description of Artificial Sequence: Synthetic oligonucleotide
  Antisense strand to SEQ ID NO: 1832121
ugagaacuccgaagcgacc

SEQ ID NO: 1832123 - RNA, 19 nt, Artificial Sequence
  Description of Artificial Sequence: Synthetic oligonucleotide
  Sense strand starting at position 2415 of SEQ ID NO: 1563790
gucgcuucggaguucucau

SEQ ID NO: 1832124 - RNA, 19 nt, Artificial Sequence
  Description of Artificial Sequence: Synthetic oligonucleotide
  Antisense strand to SEQ ID NO: 1832123
augagaacuccgaagcgac

SEQ ID NO: 1832125 - RNA, 19 nt, Artificial Sequence
  Description of Artificial Sequence: Synthetic oligonucleotide
  Sense strand starting at position 2416 of SEQ ID NO: 1563790
ucgcuucggaguucucauu

SEQ ID NO: 1832126 - RNA, 19 nt, Artificial Sequence
  Description of Artificial Sequence: Synthetic oligonucleotide
  Antisense strand to SEQ ID NO: 1832125
aaugagaacuccgaagcga

SEQ ID NO: 1832127 - RNA, 19 nt, Artificial Sequence
  Description of Artificial Sequence: Synthetic oligonucleotide
  Sense strand starting at position 2422 of SEQ ID NO: 1563790
cggaguucucauuaugaau

SEQ ID NO: 1832128 - RNA, 19 nt, Artificial Sequence
  Description of Artificial Sequence: Synthetic oligonucleotide
  Antisense strand to SEQ ID NO: 1832127
auucauaaugagaacuccg

SEQ ID NO: 1832129 - RNA, 19 nt, Artificial Sequence
  Description of Artificial Sequence: Synthetic oligonucleotide
  Sense strand starting at position 2470 of SEQ ID NO: 1563790
gcacaucauguuuaaugca

SEQ ID NO: 1832130 - RNA, 19 nt, Artificial Sequence
  Description of Artificial Sequence: Synthetic oligonucleotide
  Antisense strand to SEQ ID NO: 1832129
ugcauuaaacaugaugugc

SEQ ID NO: 1832131 - RNA, 19 nt, Artificial Sequence
  Description of Artificial Sequence: Synthetic oligonucleotide
  Sense strand starting at position 2657 of SEQ ID NO: 1563790
ugaggucauuaacuaguua

SEQ ID NO: 1832132 - RNA, 19 nt, Artificial Sequence
  Description of Artificial Sequence: Synthetic oligonucleotide
  Antisense strand to SEQ ID NO: 1832131
uaacuaguuaaugaccuca

SEQ ID NO: 1832133 - RNA, 19 nt, Artificial Sequence
  Description of Artificial Sequence: Synthetic oligonucleotide
  Sense strand starting at position 2682 of SEQ ID NO: 1563790
ggauaaacgcucugugaga

SEQ ID NO: 1832134 - RNA, 19 nt, Artificial Sequence
  Description of Artificial Sequence: Synthetic oligonucleotide
  Antisense strand to SEQ ID NO: 1832133
ucucacagagcguuuaucc

SEQ ID NO: 1832135 - RNA, 19 nt, Artificial Sequence
  Description of Artificial Sequence: Synthetic oligonucleotide
  Sense strand starting at position 2683 of SEQ ID NO: 1563790
gauaaacgcucugugagaa

SEQ ID NO: 1832136 - RNA, 19 nt, Artificial Sequence
  Description of Artificial Sequence: Synthetic oligonucleotide
  Antisense strand to SEQ ID NO: 1832135
uucucacagagcguuuauc

SEQ ID NO: 1832137 - RNA, 19 nt, Artificial Sequence
  Description of Artificial Sequence: Synthetic oligonucleotide
  Sense strand starting at position 2829 of SEQ ID NO: 1563790
uaagauagacaugguccua

SEQ ID NO: 1832138 - RNA, 19 nt, Artificial Sequence
  Description of Artificial Sequence: Synthetic oligonucleotide
  Antisense strand to SEQ ID NO: 1832137
uaggaccaugucuaucuua

SEQ ID NO: 1832139 - RNA, 19 nt, Artificial Sequence
  Description of Artificial Sequence: Synthetic oligonucleotide
  Sense strand starting at position 2984 of SEQ ID NO: 1563790
cacgucucccaggaguauu

SEQ ID NO: 1832140 - RNA, 19 nt, Artificial Sequence
  Description of Artificial Sequence: Synthetic oligonucleotide
  Antisense strand to SEQ ID NO: 1832139
aauacuccugggagacgug

SEQ ID NO: 1832141 - RNA, 19 nt, Artificial Sequence
  Description of Artificial Sequence: Synthetic oligonucleotide
  Sense strand starting at position 3036 of SEQ ID NO: 1563790
gaguaaguggcucauagaa

SEQ ID NO: 1832142 - RNA, 19 nt, Artificial Sequence
  Description of Artificial Sequence: Synthetic oligonucleotide
  Antisense strand to SEQ ID NO: 1832141
uucuaugagccacuuacuc

SEQ ID NO: 1832143 - RNA, 19 nt, Artificial Sequence
  Description of Artificial Sequence: Synthetic oligonucleotide
  Sense strand starting at position 3138 of SEQ ID NO: 1563790
guuaaaugucaccaugauu

SEQ ID NO: 1832144 - RNA, 19 nt, Artificial Sequence
  Description of Artificial Sequence: Synthetic oligonucleotide
  Antisense strand to SEQ ID NO: 1832143
aaucauggugacauuuaac

SEQ ID NO: 1832145 - RNA, 19 nt, Artificial Sequence
  Description of Artificial Sequence: Synthetic oligonucleotide
  Sense strand starting at position 3195 of SEQ ID NO: 1563790
cuugauguagucugggaaa

SEQ ID NO: 1832146 - RNA, 19 nt, Artificial Sequence
  Description of Artificial Sequence: Synthetic oligonucleotide
  Antisense strand to SEQ ID NO: 1832145
uuucccagacuacaucaag

SEQ ID NO: 1832147 - RNA, 19 nt, Artificial Sequence
  Description of Artificial Sequence: Synthetic oligonucleotide
  Sense strand starting at position 3197 of SEQ ID NO: 1563790
ugauguagucugggaaaga

SEQ ID NO: 1832148 - RNA, 19 nt, Artificial Sequence
  Description of Artificial Sequence: Synthetic oligonucleotide
  Antisense strand to SEQ ID NO: 1832147
ucuuucccagacuacauca

SEQ ID NO: 1832149 - RNA, 19 nt, Artificial Sequence
  Description of Artificial Sequence: Synthetic oligonucleotide
  Sense strand starting at position 3219 of SEQ ID NO: 1563790
uuaguuugccaacaugauu

SEQ ID NO: 1832150 - RNA, 19 nt, Artificial Sequence
  Description of Artificial Sequence: Synthetic oligonucleotide
  Antisense strand to SEQ ID NO: 1832149
aaucauguuggcaaacuaa

SEQ ID NO: 1832151 - RNA, 19 nt, Artificial Sequence
  Description of Artificial Sequence: Synthetic oligonucleotide
  Sense strand starting at position 3230 of SEQ ID NO: 1563790
acaugauugccaggacuga

SEQ ID NO: 1832152 - RNA, 19 nt, Artificial Sequence
  Description of Artificial Sequence: Synthetic oligonucleotide
  Antisense strand to SEQ ID NO: 1832151
ucaguccuggcaaucaugu

SEQ ID NO: 1832153 - RNA, 19 nt, Artificial Sequence
  Description of Artificial Sequence: Synthetic oligonucleotide
  Sense strand starting at position 3356 of SEQ ID NO: 1563790
gggagcuugauauguuaaa

SEQ ID NO: 1832154 - RNA, 19 nt, Artificial Sequence
  Description of Artificial Sequence: Synthetic oligonucleotide
  Antisense strand to SEQ ID NO: 1832153
uuuaacauaucaagcuccc

SEQ ID NO: 1832155 - RNA, 19 nt, Artificial Sequence
  Description of Artificial Sequence: Synthetic oligonucleotide
  Sense strand starting at position 3357 of SEQ ID NO: 1563790
ggagcuugauauguuaaag

SEQ ID NO: 1832156 - RNA, 19 nt, Artificial Sequence
  Description of Artificial Sequence: Synthetic oligonucleotide
  Antisense strand to SEQ ID NO: 1832155
cuuuaacauaucaagcucc

SEQ ID NO: 1832157 - RNA, 19 nt, Artificial Sequence
  Description of Artificial Sequence: Synthetic oligonucleotide
  Sense strand starting at position 3408 of SEQ ID NO: 1563790
uugaguuucuccuugagac

SEQ ID NO: 1832158 - RNA, 19 nt, Artificial Sequence
  Description of Artificial Sequence: Synthetic oligonucleotide
  Antisense strand to SEQ ID NO: 1832157
gucucaaggagaaacucaa

SEQ ID NO: 1832159 - RNA, 19 nt, Artificial Sequence
  Description of Artificial Sequence: Synthetic oligonucleotide
  Sense strand starting at position 3409 of SEQ ID NO: 1563790
ugaguuucuccuugagacu

SEQ ID NO: 1832160 - RNA, 19 nt, Artificial Sequence
  Description of Artificial Sequence: Synthetic oligonucleotide
  Antisense strand to SEQ ID NO: 1832159
agucucaaggagaaacuca

SEQ ID NO: 1832161 - RNA, 19 nt, Artificial Sequence
  Description of Artificial Sequence: Synthetic oligonucleotide
  Sense strand starting at position 3502 of SEQ ID NO: 1563790
agccuuuaccagcagaaau

SEQ ID NO: 1832162 - RNA, 19 nt, Artificial Sequence
  Description of Artificial Sequence: Synthetic oligonucleotide
  Antisense strand to SEQ ID NO: 1832161
auuucugcugguaaaggcu

SEQ ID NO: 1832163 - RNA, 19 nt, Artificial Sequence
  Description of Artificial Sequence: Synthetic oligonucleotide
  Sense strand starting at position 3596 of SEQ ID NO: 1563790
gacucugauuauucuucga

SEQ ID NO: 1832164 - RNA, 19 nt, Artificial Sequence
  Description of Artificial Sequence: Synthetic oligonucleotide
  Antisense strand to SEQ ID NO: 1832163
ucgaagaauaaucagaguc

SEQ ID NO: 1832165 - RNA, 19 nt, Artificial Sequence
  Description of Artificial Sequence: Synthetic oligonucleotide
  Sense strand starting at position 3598 of SEQ ID NO: 1563790
cucugauuauucuucgaaa

SEQ ID NO: 1832166 - RNA, 19 nt, Artificial Sequence
  Description of Artificial Sequence: Synthetic oligonucleotide
  Antisense strand to SEQ ID NO: 1832165
uuucgaagaauaaucagag

SEQ ID NO: 1832167 - RNA, 19 nt, Artificial Sequence
  Description of Artificial Sequence: Synthetic oligonucleotide
  Sense strand starting at position 3599 of SEQ ID NO: 1563790
ucugauuauucuucgaaac

SEQ ID NO: 1832168 - RNA, 19 nt, Artificial Sequence
  Description of Artificial Sequence: Synthetic oligonucleotide
  Antisense strand to SEQ ID NO: 1832167
guuucgaagaauaaucaga

SEQ ID NO: 1832169 - RNA, 19 nt, Artificial Sequence
  Description of Artificial Sequence: Synthetic oligonucleotide
  Sense strand starting at position 3600 of SEQ ID NO: 1563790
cugauuauucuucgaaaca

SEQ ID NO: 1832170 - RNA, 19 nt, Artificial Sequence
  Description of Artificial Sequence: Synthetic oligonucleotide
  Antisense strand to SEQ ID NO: 1832169
uguuucgaagaauaaucag

SEQ ID NO: 1832171 - RNA, 19 nt, Artificial Sequence
  Description of Artificial Sequence: Synthetic oligonucleotide
  Sense strand starting at position 3675 of SEQ ID NO: 1563790
aauagaacuguguguaaac

SEQ ID NO: 1832172 - RNA, 19 nt, Artificial Sequence
  Description of Artificial Sequence: Synthetic oligonucleotide
  Antisense strand to SEQ ID NO: 1832171
guuuacacacaguucuauu

SEQ ID NO: 1832173 - RNA, 19 nt, Artificial Sequence
  Description of Artificial Sequence: Synthetic oligonucleotide
  Sense strand starting at position 3676 of SEQ ID NO: 1563790
auagaacuguguguaaaca

SEQ ID NO: 1832174 - RNA, 19 nt, Artificial Sequence
  Description of Artificial Sequence: Synthetic oligonucleotide
  Antisense strand to SEQ ID NO: 1832173
uguuuacacacaguucuau

SEQ ID NO: 1832175 - RNA, 19 nt, Artificial Sequence
  Description of Artificial Sequence: Synthetic oligonucleotide
  Sense strand starting at position 3688 of SEQ ID NO: 1563790
guaaacacgucuccaagaa

SEQ ID NO: 1832176 - RNA, 19 nt, Artificial Sequence
  Description of Artificial Sequence: Synthetic oligonucleotide
  Antisense strand to SEQ ID NO: 1832175
uucuuggagacguguuuac

SEQ ID NO: 1832177 - RNA, 19 nt, Artificial Sequence
  Description of Artificial Sequence: Synthetic oligonucleotide
  Sense strand starting at position 28 of SEQ ID NO: 1563791
ugaauaagacacugcucua

SEQ ID NO: 1832178 - RNA, 19 nt, Artificial Sequence
  Description of Artificial Sequence: Synthetic oligonucleotide
  Antisense strand to SEQ ID NO: 1832177
uagagcagugucuuauuca

SEQ ID NO: 1832179 - RNA, 19 nt, Artificial Sequence
  Description of Artificial Sequence: Synthetic oligonucleotide
  Sense strand starting at position 53 of SEQ ID NO: 1563791
aacaguucggucuaggaua

SEQ ID NO: 1832180 - RNA, 19 nt, Artificial Sequence
  Description of Artificial Sequence: Synthetic oligonucleotide
  Antisense strand to SEQ ID NO: 1832179
uauccuagaccgaacuguu

SEQ ID NO: 1832181 - RNA, 19 nt, Artificial Sequence
  Description of Artificial Sequence: Synthetic oligonucleotide
  Sense strand starting at position 55 of SEQ ID NO: 1563791
caguucggucuaggauaaa

SEQ ID NO: 1832182 - RNA, 19 nt, Artificial Sequence
  Description of Artificial Sequence: Synthetic oligonucleotide
  Antisense strand to SEQ ID NO: 1832181
uuuauccuagaccgaacug

SEQ ID NO: 1832183 - RNA, 19 nt, Artificial Sequence
  Description of Artificial Sequence: Synthetic oligonucleotide
  Sense strand starting at position 89 of SEQ ID NO: 1563791
guaacauauuaggcuagaa

SEQ ID NO: 1832184 - RNA, 19 nt, Artificial Sequence
  Description of Artificial Sequence: Synthetic oligonucleotide
  Antisense strand to SEQ ID NO: 1832183
uucuagccuaauauguuac

SEQ ID NO: 1832185 - RNA, 19 nt, Artificial Sequence
  Description of Artificial Sequence: Synthetic oligonucleotide
  Sense strand starting at position 277 of SEQ ID NO: 1563791
uguauacagcuagaaccau

SEQ ID NO: 1832186 - RNA, 19 nt, Artificial Sequence
  Description of Artificial Sequence: Synthetic oligonucleotide
  Antisense strand to SEQ ID NO: 1832185
augguucuagcuguauaca

SEQ ID NO: 1832187 - RNA, 19 nt, Artificial Sequence
  Description of Artificial Sequence: Synthetic oligonucleotide
  Sense strand starting at position 363 of SEQ ID NO: 1563791
aguguucaugagggagaga

SEQ ID NO: 1832188 - RNA, 19 nt, Artificial Sequence
  Description of Artificial Sequence: Synthetic oligonucleotide
  Antisense strand to SEQ ID NO: 1832187
ucucucccucaugaacacu

SEQ ID NO: 1832189 - RNA, 19 nt, Artificial Sequence
  Description of Artificial Sequence: Synthetic oligonucleotide
  Sense strand starting at position 390 of SEQ ID NO: 1563791
aggguagugcuaggaauag

SEQ ID NO: 1832190 - RNA, 19 nt, Artificial Sequence
  Description of Artificial Sequence: Synthetic oligonucleotide
  Antisense strand to SEQ ID NO: 1832189
cuauuccuagcacuacccu

SEQ ID NO: 1832191 - RNA, 19 nt, Artificial Sequence
  Description of Artificial Sequence: Synthetic oligonucleotide
  Sense strand starting at position 465 of SEQ ID NO: 1563791
cagacaaguuccucugggu

SEQ ID NO: 1832192 - RNA, 19 nt, Artificial Sequence
  Description of Artificial Sequence: Synthetic oligonucleotide
  Antisense strand to SEQ ID NO: 1832191
acccagaggaacuugucug

SEQ ID NO: 1832193 - RNA, 19 nt, Artificial Sequence
  Description of Artificial Sequence: Synthetic oligonucleotide
  Sense strand starting at position 471 of SEQ ID NO: 1563791
aguuccucugggugaggaa

SEQ ID NO: 1832194 - RNA, 19 nt, Artificial Sequence
  Description of Artificial Sequence: Synthetic oligonucleotide
  Antisense strand to SEQ ID NO: 1832193
uuccucacccagaggaacu

SEQ ID NO: 1832195 - RNA, 19 nt, Artificial Sequence
  Description of Artificial Sequence: Synthetic oligonucleotide
  Sense strand starting at position 472 of SEQ ID NO: 1563791
guuccucugggugaggaau

SEQ ID NO: 1832196 - RNA, 19 nt, Artificial Sequence
  Description of Artificial Sequence: Synthetic oligonucleotide
  Antisense strand to SEQ ID NO: 1832195
auuccucacccagaggaac

SEQ ID NO: 1832197 - RNA, 19 nt, Artificial Sequence
  Description of Artificial Sequence: Synthetic oligonucleotide
  Sense strand starting at position 530 of SEQ ID NO: 1563791
cagagaucaccuggucuga

SEQ ID NO: 1832198 - RNA, 19 nt, Artificial Sequence
  Description of Artificial Sequence: Synthetic oligonucleotide
  Antisense strand to SEQ ID NO: 1832197
ucagaccaggugaucucug

SEQ ID NO: 1832199 - RNA, 19 nt, Artificial Sequence
  Description of Artificial Sequence: Synthetic oligonucleotide
  Sense strand starting at position 618 of SEQ ID NO: 1563791
agaggaaugcguugacgag

SEQ ID NO: 1832200 - RNA, 19 nt, Artificial Sequence
  Description of Artificial Sequence: Synthetic oligonucleotide
  Antisense strand to SEQ ID NO: 1832199
cucgucaacgcauuccucu

SEQ ID NO: 1832201 - RNA, 19 nt, Artificial Sequence
  Description of Artificial Sequence: Synthetic oligonucleotide
  Sense strand starting at position 857 of SEQ ID NO: 1563791
aguuacauccaagagcuua

SEQ ID NO: 1832202 - RNA, 19 nt, Artificial Sequence
  Description of Artificial Sequence: Synthetic oligonucleotide
  Antisense strand to SEQ ID NO: 1832201
uaagcucuuggauguaacu

SEQ ID NO: 1832203 - RNA, 19 nt, Artificial Sequence
  Description of Artificial Sequence: Synthetic oligonucleotide
  Sense strand starting at position 1085 of SEQ ID NO: 1563791
gucugugggauccaacagu

SEQ ID NO: 1832204 - RNA, 19 nt, Artificial Sequence
  Description of Artificial Sequence: Synthetic oligonucleotide
  Antisense strand to SEQ ID NO: 1832203
acuguuggaucccacagac

SEQ ID NO: 1832205 - RNA, 19 nt, Artificial Sequence
  Description of Artificial Sequence: Synthetic oligonucleotide
  Sense strand starting at position 1149 of SEQ ID NO: 1563791
cugguagacuguccaucaa

SEQ ID NO: 1832206 - RNA, 19 nt, Artificial Sequence
  Description of Artificial Sequence: Synthetic oligonucleotide
  Antisense strand to SEQ ID NO: 1832205
uugauggacagucuaccag

SEQ ID NO: 1832207 - RNA, 19 nt, Artificial Sequence
  Description of Artificial Sequence: Synthetic oligonucleotide
  Sense strand starting at position 1296 of SEQ ID NO: 1563791
cugucuugcaggcaagacu

SEQ ID NO: 1832208 - RNA, 19 nt, Artificial Sequence
  Description of Artificial Sequence: Synthetic oligonucleotide
  Antisense strand to SEQ ID NO: 1832207
agucuugccugcaagacag

SEQ ID NO: 1832209 - RNA, 19 nt, Artificial Sequence
  Description of Artificial Sequence: Synthetic oligonucleotide
  Sense strand starting at position 1505 of SEQ ID NO: 1563791
acgggauuagcgcaagaga

SEQ ID NO: 1832210 - RNA, 19 nt, Artificial Sequence
  Description of Artificial Sequence: Synthetic oligonucleotide
  Antisense strand to SEQ ID NO: 1832209
ucucuugcgcuaaucccgu

SEQ ID NO: 1832211 - RNA, 19 nt, Artificial Sequence
  Description of Artificial Sequence: Synthetic oligonucleotide
  Sense strand starting at position 1716 of SEQ ID NO: 1563791
aacuuauggucgucacaga

SEQ ID NO: 1832212 - RNA, 19 nt, Artificial Sequence
  Description of Artificial Sequence: Synthetic oligonucleotide
  Antisense strand to SEQ ID NO: 1832211
ucugugacgaccauaaguu

SEQ ID NO: 1832213 - RNA, 19 nt, Artificial Sequence
  Description of Artificial Sequence: Synthetic oligonucleotide
  Sense strand starting at position 1717 of SEQ ID NO: 1563791
acuuauggucgucacagaa

SEQ ID NO: 1832214 - RNA, 19 nt, Artificial Sequence
  Description of Artificial Sequence: Synthetic oligonucleotide
  Antisense strand to SEQ ID NO: 1832213
uucugugacgaccauaagu

SEQ ID NO: 1832215 - RNA, 19 nt, Artificial Sequence
  Description of Artificial Sequence: Synthetic oligonucleotide
  Sense strand starting at position 1892 of SEQ ID NO: 1563791
cccggauucccacgacaua

SEQ ID NO: 1832216 - RNA, 19 nt, Artificial Sequence
  Description of Artificial Sequence: Synthetic oligonucleotide
  Antisense strand to SEQ ID NO: 1832215
uaugucgugggaauccggg

SEQ ID NO: 1832217 - RNA, 19 nt, Artificial Sequence
  Description of Artificial Sequence: Synthetic oligonucleotide
  Sense strand starting at position 2179 of SEQ ID NO: 1563791
ccaauuuccugguugcuaa

SEQ ID NO: 1832218 - RNA, 19 nt, Artificial Sequence
  Description of Artificial Sequence: Synthetic oligonucleotide
  Antisense strand to SEQ ID NO: 1832217
uuagcaaccaggaaauugg

SEQ ID NO: 1832219 - RNA, 19 nt, Artificial Sequence
  Description of Artificial Sequence: Synthetic oligonucleotide
  Sense strand starting at position 2281 of SEQ ID NO: 1563791
auuguagucauccagugaa

SEQ ID NO: 1832220 - RNA, 19 nt, Artificial Sequence
  Description of Artificial Sequence: Synthetic oligonucleotide
  Antisense strand to SEQ ID NO: 1832219
uucacuggaugacuacaau

SEQ ID NO: 1832221 - RNA, 19 nt, Artificial Sequence
  Description of Artificial Sequence: Synthetic oligonucleotide
  Sense strand starting at position 2284 of SEQ ID NO: 1563791
guagucauccagugaacug

SEQ ID NO: 1832222 - RNA, 19 nt, Artificial Sequence
  Description of Artificial Sequence: Synthetic oligonucleotide
  Antisense strand to SEQ ID NO: 1832221
caguucacuggaugacuac

SEQ ID NO: 1832223 - RNA, 19 nt, Artificial Sequence
  Description of Artificial Sequence: Synthetic oligonucleotide
  Sense strand starting at position 2408 of SEQ ID NO: 1563791
aguuacaguuggguugaaa

SEQ ID NO: 1832224 - RNA, 19 nt, Artificial Sequence
  Description of Artificial Sequence: Synthetic oligonucleotide
  Antisense strand to SEQ ID NO: 1832223
uuucaacccaacuguaacu

SEQ ID NO: 1832225 - RNA, 19 nt, Artificial Sequence
  Description of Artificial Sequence: Synthetic oligonucleotide
  Sense strand starting at position 2812 of SEQ ID NO: 1563791
agccuagagaccugaguuu

SEQ ID NO: 1832226 - RNA, 19 nt, Artificial Sequence
  Description of Artificial Sequence: Synthetic oligonucleotide
  Antisense strand to SEQ ID NO: 1832225
aaacucaggucucuaggcu

SEQ ID NO: 1832227 - RNA, 19 nt, Artificial Sequence
  Description of Artificial Sequence: Synthetic oligonucleotide
  Sense strand starting at position 2859 of SEQ ID NO: 1563791
gacuuagacuagucucagu

SEQ ID NO: 1832228 - RNA, 19 nt, Artificial Sequence
  Description of Artificial Sequence: Synthetic oligonucleotide
  Antisense strand to SEQ ID NO: 1832227
acugagacuagucuaaguc

SEQ ID NO: 1832229 - RNA, 19 nt, Artificial Sequence
  Description of Artificial Sequence: Synthetic oligonucleotide
  Sense strand starting at position 2882 of SEQ ID NO: 1563791
ccaucuguacagugagagu

SEQ ID NO: 1832230 - RNA, 19 nt, Artificial Sequence
  Description of Artificial Sequence: Synthetic oligonucleotide
  Antisense strand to SEQ ID NO: 1832229
acucucacuguacagaugg

SEQ ID NO: 1832231 - RNA, 19 nt, Artificial Sequence
  Description of Artificial Sequence: Synthetic oligonucleotide
  Sense strand starting at position 3031 of SEQ ID NO: 1563791
uuuggaguucugggagaaa

SEQ ID NO: 1832232 - RNA, 19 nt, Artificial Sequence
  Description of Artificial Sequence: Synthetic oligonucleotide
  Antisense strand to SEQ ID NO: 1832231
uuucucccagaacuccaaa

SEQ ID NO: 1832233 - RNA, 19 nt, Artificial Sequence
  Description of Artificial Sequence: Synthetic oligonucleotide
  Sense strand starting at position 3076 of SEQ ID NO: 1563791
uuacgaguugacugaaaua

SEQ ID NO: 1832234 - RNA, 19 nt, Artificial Sequence
  Description of Artificial Sequence: Synthetic oligonucleotide
  Antisense strand to SEQ ID NO: 1832233
uauuucagucaacucguaa

SEQ ID NO: 1832235 - RNA, 19 nt, Artificial Sequence
  Description of Artificial Sequence: Synthetic oligonucleotide
  Sense strand starting at position 3086 of SEQ ID NO: 1563791
acugaaauauguuuaggac

SEQ ID NO: 1832236 - RNA, 19 nt, Artificial Sequence
  Description of Artificial Sequence: Synthetic oligonucleotide
  Antisense strand to SEQ ID NO: 1832235
guccuaaacauauuucagu

SEQ ID NO: 1832237 - RNA, 19 nt, Artificial Sequence
  Description of Artificial Sequence: Synthetic oligonucleotide
  Sense strand starting at position 3114 of SEQ ID NO: 1563791
auccuucuugcagaaguua

SEQ ID NO: 1832238 - RNA, 19 nt, Artificial Sequence
  Description of Artificial Sequence: Synthetic oligonucleotide
  Antisense strand to SEQ ID NO: 1832237
uaacuucugcaagaaggau

SEQ ID NO: 1832239 - RNA, 19 nt, Artificial Sequence
  Description of Artificial Sequence: Synthetic oligonucleotide
  Sense strand starting at position 3164 of SEQ ID NO: 1563791
agagaacuguugcuaacga

SEQ ID NO: 1832240 - RNA, 19 nt, Artificial Sequence
  Description of Artificial Sequence: Synthetic oligonucleotide
  Antisense strand to SEQ ID NO: 1832239
ucguuagcaacaguucucu

SEQ ID NO: 1832241 - RNA, 19 nt, Artificial Sequence
  Description of Artificial Sequence: Synthetic oligonucleotide
  Sense strand starting at position 3285 of SEQ ID NO: 1563791
auagucugccuauaguuau

SEQ ID NO: 1832242 - RNA, 19 nt, Artificial Sequence
  Description of Artificial Sequence: Synthetic oligonucleotide
  Antisense strand to SEQ ID NO: 1832241
auaacuauaggcagacuau

SEQ ID NO: 1832243 - RNA, 19 nt, Artificial Sequence
  Description of Artificial Sequence: Synthetic oligonucleotide
  Sense strand starting at position 3627 of SEQ ID NO: 1563791
augguucuugacugacagu

SEQ ID NO: 1832244 - RNA, 19 nt, Artificial Sequence
  Description of Artificial Sequence: Synthetic oligonucleotide
  Antisense strand to SEQ ID NO: 1832243
acugucagucaagaaccau

SEQ ID NO: 1832245 - RNA, 19 nt, Artificial Sequence
  Description of Artificial Sequence: Synthetic oligonucleotide
  Sense strand starting at position 3628 of SEQ ID NO: 1563791
ugguucuugacugacaguu

SEQ ID NO: 1832246 - RNA, 19 nt, Artificial Sequence
  Description of Artificial Sequence: Synthetic oligonucleotide
  Antisense strand to SEQ ID NO: 1832245
aacugucagucaagaacca

SEQ ID NO: 1832247 - RNA, 19 nt, Artificial Sequence
  Description of Artificial Sequence: Synthetic oligonucleotide
  Sense strand starting at position 3682 of SEQ ID NO: 1563791
aggugucugccugaaacca

SEQ ID NO: 1832248 - RNA, 19 nt, Artificial Sequence
  Description of Artificial Sequence: Synthetic oligonucleotide
  Antisense strand to SEQ ID NO: 1832247
ugguuucaggcagacaccu

SEQ ID NO: 1832249 - RNA, 19 nt, Artificial Sequence
  Description of Artificial Sequence: Synthetic oligonucleotide
  Sense strand starting at position 3800 of SEQ ID NO: 1563791
ccagaucugcggcaaucau

SEQ ID NO: 1832250 - RNA, 19 nt, Artificial Sequence
  Description of Artificial Sequence: Synthetic oligonucleotide
  Antisense strand to SEQ ID NO: 1832249
augauugccgcagaucugg

SEQ ID NO: 1832251 - RNA, 19 nt, Artificial Sequence
  Description of Artificial Sequence: Synthetic oligonucleotide
  Sense strand starting at position 3919 of SEQ ID NO: 1563791
ucucuauuccguguguucu

SEQ ID NO: 1832252 - RNA, 19 nt, Artificial Sequence
  Description of Artificial Sequence: Synthetic oligonucleotide
  Antisense strand to SEQ ID NO: 1832251
agaacacacggaauagaga

SEQ ID NO: 1832253 - RNA, 19 nt, Artificial Sequence
  Description of Artificial Sequence: Synthetic oligonucleotide
  Sense strand starting at position 3965 of SEQ ID NO: 1563791
agagcauuaugucuaauau

SEQ ID NO: 1832254 - RNA, 19 nt, Artificial Sequence
  Description of Artificial Sequence: Synthetic oligonucleotide
  Antisense strand to SEQ ID NO: 1832253
auauuagacauaaugcucu

SEQ ID NO: 1832255 - RNA, 19 nt, Artificial Sequence
  Description of Artificial Sequence: Synthetic oligonucleotide
  Sense strand starting at position 3966 of SEQ ID NO: 1563791
gagcauuaugucuaauaug

SEQ ID NO: 1832256 - RNA, 19 nt, Artificial Sequence
  Description of Artificial Sequence: Synthetic oligonucleotide
  Antisense strand to SEQ ID NO: 1832255
cauauuagacauaaugcuc

SEQ ID NO: 1832257 - RNA, 19 nt, Artificial Sequence
  Description of Artificial Sequence: Synthetic oligonucleotide
  Sense strand starting at position 16 of SEQ ID NO: 1563792
ggauccgggacuuaauguu

SEQ ID NO: 1832258 - RNA, 19 nt, Artificial Sequence
  Description of Artificial Sequence: Synthetic oligonucleotide
  Antisense strand to SEQ ID NO: 1832257
aacauuaagucccggaucc

SEQ ID NO: 1832259 - RNA, 19 nt, Artificial Sequence
  Description of Artificial Sequence: Synthetic oligonucleotide
  Sense strand starting at position 51 of SEQ ID NO: 1563792
agugacauguuggcuauuu

SEQ ID NO: 1832260 - RNA, 19 nt, Artificial Sequence
  Description of Artificial Sequence: Synthetic oligonucleotide
  Antisense strand to SEQ ID NO: 1832259
aaauagccaacaugucacu

SEQ ID NO: 1832261 - RNA, 19 nt, Artificial Sequence
  Description of Artificial Sequence: Synthetic oligonucleotide
  Sense strand starting at position 70 of SEQ ID NO: 1563792
ggaguuugaaagugacaau

SEQ ID NO: 1832262 - RNA, 19 nt, Artificial Sequence
  Description of Artificial Sequence: Synthetic oligonucleotide
  Antisense strand to SEQ ID NO: 1832261
auugucacuuucaaacucc

SEQ ID NO: 1832263 - RNA, 19 nt, Artificial Sequence
  Description of Artificial Sequence: Synthetic oligonucleotide
  Sense strand starting at position 330 of SEQ ID NO: 1563792
uugccagggcuuuaagaaa

SEQ ID NO: 1832264 - RNA, 19 nt, Artificial Sequence
  Description of Artificial Sequence: Synthetic oligonucleotide
  Antisense strand to SEQ ID NO: 1832263
uuucuuaaagcccuggcaa

SEQ ID NO: 1832265 - RNA, 19 nt, Artificial Sequence
  Description of Artificial Sequence: Synthetic oligonucleotide
  Sense strand starting at position 343 of SEQ ID NO: 1563792
aagaaaugcguuggugaag

SEQ ID NO: 1832266 - RNA, 19 nt, Artificial Sequence
  Description of Artificial Sequence: Synthetic oligonucleotide
  Antisense strand to SEQ ID NO: 1832265
cuucaccaacgcauuucuu

SEQ ID NO: 1832267 - RNA, 19 nt, Artificial Sequence
  Description of Artificial Sequence: Synthetic oligonucleotide
  Sense strand starting at position 365 of SEQ ID NO: 1563792
gcaucagaacccugacaaa

SEQ ID NO: 1832268 - RNA, 19 nt, Artificial Sequence
  Description of Artificial Sequence: Synthetic oligonucleotide
  Antisense strand to SEQ ID NO: 1832267
uuugucaggguucugaugc

SEQ ID NO: 1832269 - RNA, 19 nt, Artificial Sequence
  Description of Artificial Sequence: Synthetic oligonucleotide
  Sense strand starting at position 376 of SEQ ID NO: 1563792
cugacaaagcccugaggua

SEQ ID NO: 1832270 - RNA, 19 nt, Artificial Sequence
  Description of Artificial Sequence: Synthetic oligonucleotide
  Antisense strand to SEQ ID NO: 1832269
uaccucagggcuuugucag

SEQ ID NO: 1832271 - RNA, 19 nt, Artificial Sequence
  Description of Artificial Sequence: Synthetic oligonucleotide
  Sense strand starting at position 429 of SEQ ID NO: 1563792
auacuaggauugguuguau

SEQ ID NO: 1832272 - RNA, 19 nt, Artificial Sequence
  Description of Artificial Sequence: Synthetic oligonucleotide
  Antisense strand to SEQ ID NO: 1832271
auacaaccaauccuaguau

SEQ ID NO: 1832273 - RNA, 19 nt, Artificial Sequence
  Description of Artificial Sequence: Synthetic oligonucleotide
  Sense strand starting at position 440 of SEQ ID NO: 1563792
gguuguauucccugauuuc

SEQ ID NO: 1832274 - RNA, 19 nt, Artificial Sequence
  Description of Artificial Sequence: Synthetic oligonucleotide
  Antisense strand to SEQ ID NO: 1832273
gaaaucagggaauacaacc

SEQ ID NO: 1832275 - RNA, 19 nt, Artificial Sequence
  Description of Artificial Sequence: Synthetic oligonucleotide
  Sense strand starting at position 464 of SEQ ID NO: 1563792
gaauaaugguagucagagu

SEQ ID NO: 1832276 - RNA, 19 nt, Artificial Sequence
  Description of Artificial Sequence: Synthetic oligonucleotide
  Antisense strand to SEQ ID NO: 1832275
acucugacuaccauuauuc

SEQ ID NO: 1832277 - RNA, 19 nt, Artificial Sequence
  Description of Artificial Sequence: Synthetic oligonucleotide
  Sense strand starting at position 602 of SEQ ID NO: 1563792
ggcugagugcuuguuuguu

SEQ ID NO: 1832278 - RNA, 19 nt, Artificial Sequence
  Description of Artificial Sequence: Synthetic oligonucleotide
  Antisense strand to SEQ ID NO: 1832277
aacaaacaagcacucagcc

SEQ ID NO: 1832279 - RNA, 19 nt, Artificial Sequence
  Description of Artificial Sequence: Synthetic oligonucleotide
  Sense strand starting at position 846 of SEQ ID NO: 1563792
uguccaaaucaaugucuga

SEQ ID NO: 1832280 - RNA, 19 nt, Artificial Sequence
  Description of Artificial Sequence: Synthetic oligonucleotide
  Antisense strand to SEQ ID NO: 1832279
ucagacauugauuuggaca

SEQ ID NO: 1832281 - RNA, 19 nt, Artificial Sequence
  Description of Artificial Sequence: Synthetic oligonucleotide
  Sense strand starting at position 898 of SEQ ID NO: 1563792
gguccugaucucgaaaggu

SEQ ID NO: 1832282 - RNA, 19 nt, Artificial Sequence
  Description of Artificial Sequence: Synthetic oligonucleotide
  Antisense strand to SEQ ID NO: 1832281
accuuucgagaucaggacc

SEQ ID NO: 1832283 - RNA, 19 nt, Artificial Sequence
  Description of Artificial Sequence: Synthetic oligonucleotide
  Sense strand starting at position 902 of SEQ ID NO: 1563792
cugaucucgaaagguggua

SEQ ID NO: 1832284 - RNA, 19 nt, Artificial Sequence
  Description of Artificial Sequence: Synthetic oligonucleotide
  Antisense strand to SEQ ID NO: 1832283
uaccaccuuucgagaucag

SEQ ID NO: 1832285 - RNA, 19 nt, Artificial Sequence
  Description of Artificial Sequence: Synthetic oligonucleotide
  Sense strand starting at position 958 of SEQ ID NO: 1563792
cagcauaguucucugggaa

SEQ ID NO: 1832286 - RNA, 19 nt, Artificial Sequence
  Description of Artificial Sequence: Synthetic oligonucleotide
  Antisense strand to SEQ ID NO: 1832285
uucccagagaacuaugcug

SEQ ID NO: 1832287 - RNA, 19 nt, Artificial Sequence
  Description of Artificial Sequence: Synthetic oligonucleotide
  Sense strand starting at position 959 of SEQ ID NO: 1563792
agcauaguucucugggaag

SEQ ID NO: 1832288 - RNA, 19 nt, Artificial Sequence
  Description of Artificial Sequence: Synthetic oligonucleotide
  Antisense strand to SEQ ID NO: 1832287
cuucccagagaacuaugcu

SEQ ID NO: 1832289 - RNA, 19 nt, Artificial Sequence
  Description of Artificial Sequence: Synthetic oligonucleotide
  Sense strand starting at position 961 of SEQ ID NO: 1563792
cauaguucucugggaagau

SEQ ID NO: 1832290 - RNA, 19 nt, Artificial Sequence
  Description of Artificial Sequence: Synthetic oligonucleotide
  Antisense strand to SEQ ID NO: 1832289
aucuucccagagaacuaug

SEQ ID NO: 1832291 - RNA, 19 nt, Artificial Sequence
  Description of Artificial Sequence: Synthetic oligonucleotide
  Sense strand starting at position 965 of SEQ ID NO: 1563792
guucucugggaagauguaa

SEQ ID NO: 1832292 - RNA, 19 nt, Artificial Sequence
  Description of Artificial Sequence: Synthetic oligonucleotide
  Antisense strand to SEQ ID NO: 1832291
uuacaucuucccagagaac

SEQ ID NO: 1832293 - RNA, 19 nt, Artificial Sequence
  Description of Artificial Sequence: Synthetic oligonucleotide
  Sense strand starting at position 1023 of SEQ ID NO: 1563792
uggucugcgcaguuuguaa

SEQ ID NO: 1832294 - RNA, 19 nt, Artificial Sequence
  Description of Artificial Sequence: Synthetic oligonucleotide
  Antisense strand to SEQ ID NO: 1832293
uuacaaacugcgcagacca

SEQ ID NO: 1832295 - RNA, 19 nt, Artificial Sequence
  Description of Artificial Sequence: Synthetic oligonucleotide
  Sense strand starting at position 1451 of SEQ ID NO: 1563792
ccgguaaucaccuaggaug

SEQ ID NO: 1832296 - RNA, 19 nt, Artificial Sequence
  Description of Artificial Sequence: Synthetic oligonucleotide
  Antisense strand to SEQ ID NO: 1832295
cauccuaggugauuaccgg

SEQ ID NO: 1832297 - RNA, 19 nt, Artificial Sequence
  Description of Artificial Sequence: Synthetic oligonucleotide
  Sense strand starting at position 1558 of SEQ ID NO: 1563792
ugcagaaucgguucucguu

SEQ ID NO: 1832298 - RNA, 19 nt, Artificial Sequence
  Description of Artificial Sequence: Synthetic oligonucleotide
  Antisense strand to SEQ ID NO: 1832297
aacgagaaccgauucugca

SEQ ID NO: 1832299 - RNA, 19 nt, Artificial Sequence
  Description of Artificial Sequence: Synthetic oligonucleotide
  Sense strand starting at position 1570 of SEQ ID NO: 1563792
ucucguucacgagcaugua

SEQ ID NO: 1832300 - RNA, 19 nt, Artificial Sequence
  Description of Artificial Sequence: Synthetic oligonucleotide
  Antisense strand to SEQ ID NO: 1832299
uacaugcucgugaacgaga

SEQ ID NO: 1832301 - RNA, 19 nt, Artificial Sequence
  Description of Artificial Sequence: Synthetic oligonucleotide
  Sense strand starting at position 1621 of SEQ ID NO: 1563792
gggagcucucgccauuaaa

SEQ ID NO: 1832302 - RNA, 19 nt, Artificial Sequence
  Description of Artificial Sequence: Synthetic oligonucleotide
  Antisense strand to SEQ ID NO: 1832301
uuuaauggcgagagcuccc

SEQ ID NO: 1832303 - RNA, 19 nt, Artificial Sequence
  Description of Artificial Sequence: Synthetic oligonucleotide
  Sense strand starting at position 2156 of SEQ ID NO: 1563792
gcaguuaaaggcugggaua

SEQ ID NO: 1832304 - RNA, 19 nt, Artificial Sequence
  Description of Artificial Sequence: Synthetic oligonucleotide
  Antisense strand to SEQ ID NO: 1832303
uaucccagccuuuaacugc

SEQ ID NO: 1832305 - RNA, 19 nt, Artificial Sequence
  Description of Artificial Sequence: Synthetic oligonucleotide
  Sense strand starting at position 2234 of SEQ ID NO: 1563792
uccggucucagagaaggua

SEQ ID NO: 1832306 - RNA, 19 nt, Artificial Sequence
  Description of Artificial Sequence: Synthetic oligonucleotide
  Antisense strand to SEQ ID NO: 1832305
uaccuucucugagaccgga

SEQ ID NO: 1832307 - RNA, 19 nt, Artificial Sequence
  Description of Artificial Sequence: Synthetic oligonucleotide
  Sense strand starting at position 2237 of SEQ ID NO: 1563792
ggucucagagaagguaaau

SEQ ID NO: 1832308 - RNA, 19 nt, Artificial Sequence
  Description of Artificial Sequence: Synthetic oligonucleotide
  Antisense strand to SEQ ID NO: 1832307
auuuaccuucucugagacc

SEQ ID NO: 1832309 - RNA, 19 nt, Artificial Sequence
  Description of Artificial Sequence: Synthetic oligonucleotide
  Sense strand starting at position 2337 of SEQ ID NO: 1563792
uagauucucuuggcuugau

SEQ ID NO: 1832310 - RNA, 19 nt, Artificial Sequence
  Description of Artificial Sequence: Synthetic oligonucleotide
  Antisense strand to SEQ ID NO: 1832309
aucaagccaagagaaucua

SEQ ID NO: 1832311 - RNA, 19 nt, Artificial Sequence
  Description of Artificial Sequence: Synthetic oligonucleotide
  Sense strand starting at position 2504 of SEQ ID NO: 1563792
gugacuucuuuaguaggga

SEQ ID NO: 1832312 - RNA, 19 nt, Artificial Sequence
  Description of Artificial Sequence: Synthetic oligonucleotide
  Antisense strand to SEQ ID NO: 1832311
ucccuacuaaagaagucac

SEQ ID NO: 1832313 - RNA, 19 nt, Artificial Sequence
  Description of Artificial Sequence: Synthetic oligonucleotide
  Sense strand starting at position 2507 of SEQ ID NO: 1563792
acuucuuuaguagggaaau

SEQ ID NO: 1832314 - RNA, 19 nt, Artificial Sequence
  Description of Artificial Sequence: Synthetic oligonucleotide
  Antisense strand to SEQ ID NO: 1832313
auuucccuacuaaagaagu

SEQ ID NO: 1832315 - RNA, 19 nt, Artificial Sequence
  Description of Artificial Sequence: Synthetic oligonucleotide
  Sense strand starting at position 2630 of SEQ ID NO: 1563792
gcaggcaucccacauaucu

SEQ ID NO: 1832316 - RNA, 19 nt, Artificial Sequence
  Description of Artificial Sequence: Synthetic oligonucleotide
  Antisense strand to SEQ ID NO: 1832315
agauaugugggaugccugc

SEQ ID NO: 1832317 - RNA, 19 nt, Artificial Sequence
  Description of Artificial Sequence: Synthetic oligonucleotide
  Sense strand starting at position 2656 of SEQ ID NO: 1563792
ucuauuucuugucuugcua

SEQ ID NO: 1832318 - RNA, 19 nt, Artificial Sequence
  Description of Artificial Sequence: Synthetic oligonucleotide
  Antisense strand to SEQ ID NO: 1832317
uagcaagacaagaaauaga

SEQ ID NO: 1832319 - RNA, 19 nt, Artificial Sequence
  Description of Artificial Sequence: Synthetic oligonucleotide
  Sense strand starting at position 2693 of SEQ ID NO: 1563792
ggguauuauucuguacuua

SEQ ID NO: 1832320 - RNA, 19 nt, Artificial Sequence
  Description of Artificial Sequence: Synthetic oligonucleotide
  Antisense strand to SEQ ID NO: 1832319
uaaguacagaauaauaccc

SEQ ID NO: 1832321 - RNA, 19 nt, Artificial Sequence
  Description of Artificial Sequence: Synthetic oligonucleotide
  Sense strand starting at position 2694 of SEQ ID NO: 1563792
gguauuauucuguacuuaa

SEQ ID NO: 1832322 - RNA, 19 nt, Artificial Sequence
  Description of Artificial Sequence: Synthetic oligonucleotide
  Antisense strand to SEQ ID NO: 1832321
uuaaguacagaauaauacc

SEQ ID NO: 1832323 - RNA, 19 nt, Artificial Sequence
  Description of Artificial Sequence: Synthetic oligonucleotide
  Sense strand starting at position 2767 of SEQ ID NO: 1563792
auggaucccugauucuaga

SEQ ID NO: 1832324 - RNA, 19 nt, Artificial Sequence
  Description of Artificial Sequence: Synthetic oligonucleotide
  Antisense strand to SEQ ID NO: 1832323
ucuagaaucagggauccau

SEQ ID NO: 1832325 - RNA, 19 nt, Artificial Sequence
  Description of Artificial Sequence: Synthetic oligonucleotide
  Sense strand starting at position 2887 of SEQ ID NO: 1563792
cccagacugcugcaacuaa

SEQ ID NO: 1832326 - RNA, 19 nt, Artificial Sequence
  Description of Artificial Sequence: Synthetic oligonucleotide
  Antisense strand to SEQ ID NO: 1832325
uuaguugcagcagucuggg

SEQ ID NO: 1832327 - RNA, 19 nt, Artificial Sequence
  Description of Artificial Sequence: Synthetic oligonucleotide
  Sense strand starting at position 2933 of SEQ ID NO: 1563792
auaguauauucuccauaga

SEQ ID NO: 1832328 - RNA, 19 nt, Artificial Sequence
  Description of Artificial Sequence: Synthetic oligonucleotide
  Antisense strand to SEQ ID NO: 1832327
ucuauggagaauauacuau

SEQ ID NO: 1832329 - RNA, 19 nt, Artificial Sequence
  Description of Artificial Sequence: Synthetic oligonucleotide
  Sense strand starting at position 2936 of SEQ ID NO: 1563792
guauauucuccauagagua

SEQ ID NO: 1832330 - RNA, 19 nt, Artificial Sequence
  Description of Artificial Sequence: Synthetic oligonucleotide
  Antisense strand to SEQ ID NO: 1832329
uacucuauggagaauauac

SEQ ID NO: 1832331 - RNA, 19 nt, Artificial Sequence
  Description of Artificial Sequence: Synthetic oligonucleotide
  Sense strand starting at position 3392 of SEQ ID NO: 1563792
guuucugcugugcucuaau

SEQ ID NO: 1832332 - RNA, 19 nt, Artificial Sequence
  Description of Artificial Sequence: Synthetic oligonucleotide
  Antisense strand to SEQ ID NO: 1832331
auuagagcacagcagaaac

SEQ ID NO: 1832333 - RNA, 19 nt, Artificial Sequence
  Description of Artificial Sequence: Synthetic oligonucleotide
  Sense strand starting at position 3756 of SEQ ID NO: 1563792
aaaguucuggcccagagua

SEQ ID NO: 1832334 - RNA, 19 nt, Artificial Sequence
  Description of Artificial Sequence: Synthetic oligonucleotide
  Antisense strand to SEQ ID NO: 1832333
uacucugggccagaacuuu

SEQ ID NO: 1832335 - RNA, 19 nt, Artificial Sequence
  Description of Artificial Sequence: Synthetic oligonucleotide
  Sense strand starting at position 3758 of SEQ ID NO: 1563792
aguucuggcccagaguaga

SEQ ID NO: 1832336 - RNA, 19 nt, Artificial Sequence
  Description of Artificial Sequence: Synthetic oligonucleotide
  Antisense strand to SEQ ID NO: 1832335
ucuacucugggccagaacu

SEQ ID NO: 1832337 - RNA, 19 nt, Artificial Sequence
  Description of Artificial Sequence: Synthetic oligonucleotide
  Sense strand starting at position 38 of SEQ ID NO: 1563793
uuccuuucuccagaguuug

SEQ ID NO: 1832338 - RNA, 19 nt, Artificial Sequence
  Description of Artificial Sequence: Synthetic oligonucleotide
  Antisense strand to SEQ ID NO: 1832337
caaacucuggagaaaggaa

SEQ ID NO: 1832339 - RNA, 19 nt, Artificial Sequence
  Description of Artificial Sequence: Synthetic oligonucleotide
  Sense strand starting at position 204 of SEQ ID NO: 1563793
uucuuauucuggcuagaca

SEQ ID NO: 1832340 - RNA, 19 nt, Artificial Sequence
  Description of Artificial Sequence: Synthetic oligonucleotide
  Antisense strand to SEQ ID NO: 1832339
ugucuagccagaauaagaa

SEQ ID NO: 1832341 - RNA, 19 nt, Artificial Sequence
  Description of Artificial Sequence: Synthetic oligonucleotide
  Sense strand starting at position 205 of SEQ ID NO: 1563793
ucuuauucuggcuagacag

SEQ ID NO: 1832342 - RNA, 19 nt, Artificial Sequence
  Description of Artificial Sequence: Synthetic oligonucleotide
  Antisense strand to SEQ ID NO: 1832341
cugucuagccagaauaaga

SEQ ID NO: 1832343 - RNA, 19 nt, Artificial Sequence
  Description of Artificial Sequence: Synthetic oligonucleotide
  Sense strand starting at position 273 of SEQ ID NO: 1563793
acucucagcugguuagaaa

SEQ ID NO: 1832344 - RNA, 19 nt, Artificial Sequence
  Description of Artificial Sequence: Synthetic oligonucleotide
  Antisense strand to SEQ ID NO: 1832343
uuucuaaccagcugagagu

SEQ ID NO: 1832345 - RNA, 19 nt, Artificial Sequence
  Description of Artificial Sequence: Synthetic oligonucleotide
  Sense strand starting at position 298 of SEQ ID NO: 1563793
cuaucaagaucccuggcaa

SEQ ID NO: 1832346 - RNA, 19 nt, Artificial Sequence
  Description of Artificial Sequence: Synthetic oligonucleotide
  Antisense strand to SEQ ID NO: 1832345
uugccagggaucuugauag

SEQ ID NO: 1832347 - RNA, 19 nt, Artificial Sequence
  Description of Artificial Sequence: Synthetic oligonucleotide
  Sense strand starting at position 310 of SEQ ID NO: 1563793
cuggcaagacauuguuaag

SEQ ID NO: 1832348 - RNA, 19 nt, Artificial Sequence
  Description of Artificial Sequence: Synthetic oligonucleotide
  Antisense strand to SEQ ID NO: 1832347
cuuaacaaugucuugccag

SEQ ID NO: 1832349 - RNA, 19 nt, Artificial Sequence
  Description of Artificial Sequence: Synthetic oligonucleotide
  Sense strand starting at position 316 of SEQ ID NO: 1563793
agacauuguuaagcccuaa

SEQ ID NO: 1832350 - RNA, 19 nt, Artificial Sequence
  Description of Artificial Sequence: Synthetic oligonucleotide
  Antisense strand to SEQ ID NO: 1832349
uuagggcuuaacaaugucu

SEQ ID NO: 1832351 - RNA, 19 nt, Artificial Sequence
  Description of Artificial Sequence: Synthetic oligonucleotide
  Sense strand starting at position 376 of SEQ ID NO: 1563793
auuguauaagcugggaaua

SEQ ID NO: 1832352 - RNA, 19 nt, Artificial Sequence
  Description of Artificial Sequence: Synthetic oligonucleotide
  Antisense strand to SEQ ID NO: 1832351
uauucccagcuuauacaau

SEQ ID NO: 1832353 - RNA, 19 nt, Artificial Sequence
  Description of Artificial Sequence: Synthetic oligonucleotide
  Sense strand starting at position 377 of SEQ ID NO: 1563793
uuguauaagcugggaauaa

SEQ ID NO: 1832354 - RNA, 19 nt, Artificial Sequence
  Description of Artificial Sequence: Synthetic oligonucleotide
  Antisense strand to SEQ ID NO: 1832353
uuauucccagcuuauacaa

SEQ ID NO: 1832355 - RNA, 19 nt, Artificial Sequence
  Description of Artificial Sequence: Synthetic oligonucleotide
  Sense strand starting at position 415 of SEQ ID NO: 1563793
acuucuauugagugaaucu

SEQ ID NO: 1832356 - RNA, 19 nt, Artificial Sequence
  Description of Artificial Sequence: Synthetic oligonucleotide
  Antisense strand to SEQ ID NO: 1832355
agauucacucaauagaagu

SEQ ID NO: 1832357 - RNA, 19 nt, Artificial Sequence
  Description of Artificial Sequence: Synthetic oligonucleotide
  Sense strand starting at position 424 of SEQ ID NO: 1563793
gagugaaucuggcccauau

SEQ ID NO: 1832358 - RNA, 19 nt, Artificial Sequence
  Description of Artificial Sequence: Synthetic oligonucleotide
  Antisense strand to SEQ ID NO: 1832357
auaugggccagauucacuc

SEQ ID NO: 1832359 - RNA, 19 nt, Artificial Sequence
  Description of Artificial Sequence: Synthetic oligonucleotide
  Sense strand starting at position 502 of SEQ ID NO: 1563793
guauaucaagaauguuugu

SEQ ID NO: 1832360 - RNA, 19 nt, Artificial Sequence
  Description of Artificial Sequence: Synthetic oligonucleotide
  Antisense strand to SEQ ID NO: 1832359
acaaacauucuugauauac

SEQ ID NO: 1832361 - RNA, 19 nt, Artificial Sequence
  Description of Artificial Sequence: Synthetic oligonucleotide
  Sense strand starting at position 507 of SEQ ID NO: 1563793
ucaagaauguuugucucaa

SEQ ID NO: 1832362 - RNA, 19 nt, Artificial Sequence
  Description of Artificial Sequence: Synthetic oligonucleotide
  Antisense strand to SEQ ID NO: 1832361
uugagacaaacauucuuga

SEQ ID NO: 1832363 - RNA, 19 nt, Artificial Sequence
  Description of Artificial Sequence: Synthetic oligonucleotide
  Sense strand starting at position 837 of SEQ ID NO: 1563793
agugaaacaucugcacuau

SEQ ID NO: 1832364 - RNA, 19 nt, Artificial Sequence
  Description of Artificial Sequence: Synthetic oligonucleotide
  Antisense strand to SEQ ID NO: 1832363
auagugcagauguuucacu

SEQ ID NO: 1832365 - RNA, 19 nt, Artificial Sequence
  Description of Artificial Sequence: Synthetic oligonucleotide
  Sense strand starting at position 838 of SEQ ID NO: 1563793
gugaaacaucugcacuaua

SEQ ID NO: 1832366 - RNA, 19 nt, Artificial Sequence
  Description of Artificial Sequence: Synthetic oligonucleotide
  Antisense strand to SEQ ID NO: 1832365
uauagugcagauguuucac

SEQ ID NO: 1832367 - RNA, 19 nt, Artificial Sequence
  Description of Artificial Sequence: Synthetic oligonucleotide
  Sense strand starting at position 1549 of SEQ ID NO: 1563793
uucucugagcuuugagaug

SEQ ID NO: 1832368 - RNA, 19 nt, Artificial Sequence
  Description of Artificial Sequence: Synthetic oligonucleotide
  Antisense strand to SEQ ID NO: 1832367
caucucaaagcucagagaa

SEQ ID NO: 1832369 - RNA, 19 nt, Artificial Sequence
  Description of Artificial Sequence: Synthetic oligonucleotide
  Sense strand starting at position 1554 of SEQ ID NO: 1563793
ugagcuuugagaugaaagg

SEQ ID NO: 1832370 - RNA, 19 nt, Artificial Sequence
  Description of Artificial Sequence: Synthetic oligonucleotide
  Antisense strand to SEQ ID NO: 1832369
ccuuucaucucaaagcuca

SEQ ID NO: 1832371 - RNA, 19 nt, Artificial Sequence
  Description of Artificial Sequence: Synthetic oligonucleotide
  Sense strand starting at position 1811 of SEQ ID NO: 1563793
uugcuuuaccuuugggaga

SEQ ID NO: 1832372 - RNA, 19 nt, Artificial Sequence
  Description of Artificial Sequence: Synthetic oligonucleotide
  Antisense strand to SEQ ID NO: 1832371
ucucccaaagguaaagcaa

SEQ ID NO: 1832373 - RNA, 19 nt, Artificial Sequence
  Description of Artificial Sequence: Synthetic oligonucleotide
  Sense strand starting at position 2078 of SEQ ID NO: 1563793
gcuugaacugcguuaucuu

SEQ ID NO: 1832374 - RNA, 19 nt, Artificial Sequence
  Description of Artificial Sequence: Synthetic oligonucleotide
  Antisense strand to SEQ ID NO: 1832373
aagauaacgcaguucaagc

SEQ ID NO: 1832375 - RNA, 19 nt, Artificial Sequence
  Description of Artificial Sequence: Synthetic oligonucleotide
  Sense strand starting at position 2193 of SEQ ID NO: 1563793
gacccauguggcuagaagu

SEQ ID NO: 1832376 - RNA, 19 nt, Artificial Sequence
  Description of Artificial Sequence: Synthetic oligonucleotide
  Antisense strand to SEQ ID NO: 1832375
acuucuagccacauggguc

SEQ ID NO: 1832377 - RNA, 19 nt, Artificial Sequence
  Description of Artificial Sequence: Synthetic oligonucleotide
  Sense strand starting at position 2417 of SEQ ID NO: 1563793
guguuuaauuuaucccagu

SEQ ID NO: 1832378 - RNA, 19 nt, Artificial Sequence
  Description of Artificial Sequence: Synthetic oligonucleotide
  Antisense strand to SEQ ID NO: 1832377
acugggauaaauuaaacac

SEQ ID NO: 1832379 - RNA, 19 nt, Artificial Sequence
  Description of Artificial Sequence: Synthetic oligonucleotide
  Sense strand starting at position 2468 of SEQ ID NO: 1563793
agcugaguggucuggagau

SEQ ID NO: 1832380 - RNA, 19 nt, Artificial Sequence
  Description of Artificial Sequence: Synthetic oligonucleotide
  Antisense strand to SEQ ID NO: 1832379
aucuccagaccacucagcu

SEQ ID NO: 1832381 - RNA, 19 nt, Artificial Sequence
  Description of Artificial Sequence: Synthetic oligonucleotide
  Sense strand starting at position 2511 of SEQ ID NO: 1563793
acuccaacccgaugucaua

SEQ ID NO: 1832382 - RNA, 19 nt, Artificial Sequence
  Description of Artificial Sequence: Synthetic oligonucleotide
  Antisense strand to SEQ ID NO: 1832381
uaugacaucggguuggagu

SEQ ID NO: 1832383 - RNA, 19 nt, Artificial Sequence
  Description of Artificial Sequence: Synthetic oligonucleotide
  Sense strand starting at position 2538 of SEQ ID NO: 1563793
cugugaaugucccugacac

SEQ ID NO: 1832384 - RNA, 19 nt, Artificial Sequence
  Description of Artificial Sequence: Synthetic oligonucleotide
  Antisense strand to SEQ ID NO: 1832383
gugucagggacauucacag

SEQ ID NO: 1832385 - RNA, 19 nt, Artificial Sequence
  Description of Artificial Sequence: Synthetic oligonucleotide
  Sense strand starting at position 2539 of SEQ ID NO: 1563793
ugugaaugucccugacacu

SEQ ID NO: 1832386 - RNA, 19 nt, Artificial Sequence
  Description of Artificial Sequence: Synthetic oligonucleotide
  Antisense strand to SEQ ID NO: 1832385
agugucagggacauucaca

SEQ ID NO: 1832387 - RNA, 19 nt, Artificial Sequence
  Description of Artificial Sequence: Synthetic oligonucleotide
  Sense strand starting at position 2540 of SEQ ID NO: 1563793
gugaaugucccugacacuu

SEQ ID NO: 1832388 - RNA, 19 nt, Artificial Sequence
  Description of Artificial Sequence: Synthetic oligonucleotide
  Antisense strand to SEQ ID NO: 1832387
aagugucagggacauucac

SEQ ID NO: 1832389 - RNA, 19 nt, Artificial Sequence
  Description of Artificial Sequence: Synthetic oligonucleotide
  Sense strand starting at position 2780 of SEQ ID NO: 1563793
aaaggugauuaggccuauu

SEQ ID NO: 1832390 - RNA, 19 nt, Artificial Sequence
  Description of Artificial Sequence: Synthetic oligonucleotide
  Antisense strand to SEQ ID NO: 1832389
aauaggccuaaucaccuuu

SEQ ID NO: 1832391 - RNA, 19 nt, Artificial Sequence
  Description of Artificial Sequence: Synthetic oligonucleotide
  Sense strand starting at position 2851 of SEQ ID NO: 1563793
auuguaccgugauuauuua

SEQ ID NO: 1832392 - RNA, 19 nt, Artificial Sequence
  Description of Artificial Sequence: Synthetic oligonucleotide
  Antisense strand to SEQ ID NO: 1832391
uaaauaaucacgguacaau

SEQ ID NO: 1832393 - RNA, 19 nt, Artificial Sequence
  Description of Artificial Sequence: Synthetic oligonucleotide
  Sense strand starting at position 2947 of SEQ ID NO: 1563793
ucaugcauguauuugucua

SEQ ID NO: 1832394 - RNA, 19 nt, Artificial Sequence
  Description of Artificial Sequence: Synthetic oligonucleotide
  Antisense strand to SEQ ID NO: 1832393
uagacaaauacaugcauga

SEQ ID NO: 1832395 - RNA, 19 nt, Artificial Sequence
  Description of Artificial Sequence: Synthetic oligonucleotide
  Sense strand starting at position 2951 of SEQ ID NO: 1563793
gcauguauuugucuaucua

SEQ ID NO: 1832396 - RNA, 19 nt, Artificial Sequence
  Description of Artificial Sequence: Synthetic oligonucleotide
  Antisense strand to SEQ ID NO: 1832395
uagauagacaaauacaugc

SEQ ID NO: 1832397 - RNA, 19 nt, Artificial Sequence
  Description of Artificial Sequence: Synthetic oligonucleotide
  Sense strand starting at position 2955 of SEQ ID NO: 1563793
guauuugucuaucuagcaa

SEQ ID NO: 1832398 - RNA, 19 nt, Artificial Sequence
  Description of Artificial Sequence: Synthetic oligonucleotide
  Antisense strand to SEQ ID NO: 1832397
uugcuagauagacaaauac

SEQ ID NO: 1832399 - RNA, 19 nt, Artificial Sequence
  Description of Artificial Sequence: Synthetic oligonucleotide
  Sense strand starting at position 3047 of SEQ ID NO: 1563793
uacugaggccaucauguuu

SEQ ID NO: 1832400 - RNA, 19 nt, Artificial Sequence
  Description of Artificial Sequence: Synthetic oligonucleotide
  Antisense strand to SEQ ID NO: 1832399
aaacaugauggccucagua

SEQ ID NO: 1832401 - RNA, 19 nt, Artificial Sequence
  Description of Artificial Sequence: Synthetic oligonucleotide
  Sense strand starting at position 3077 of SEQ ID NO: 1563793
acagaugacuccuuaggug

SEQ ID NO: 1832402 - RNA, 19 nt, Artificial Sequence
  Description of Artificial Sequence: Synthetic oligonucleotide
  Antisense strand to SEQ ID NO: 1832401
caccuaaggagucaucugu

SEQ ID NO: 1832403 - RNA, 19 nt, Artificial Sequence
  Description of Artificial Sequence: Synthetic oligonucleotide
  Sense strand starting at position 3587 of SEQ ID NO: 1563793
ucguaagauuauguggaaa

SEQ ID NO: 1832404 - RNA, 19 nt, Artificial Sequence
  Description of Artificial Sequence: Synthetic oligonucleotide
  Antisense strand to SEQ ID NO: 1832403
uuuccacauaaucuuacga

SEQ ID NO: 1832405 - RNA, 19 nt, Artificial Sequence
  Description of Artificial Sequence: Synthetic oligonucleotide
  Sense strand starting at position 3598 of SEQ ID NO: 1563793
uguggaaaggcuugagaaa

SEQ ID NO: 1832406 - RNA, 19 nt, Artificial Sequence
  Description of Artificial Sequence: Synthetic oligonucleotide
  Antisense strand to SEQ ID NO: 1832405
uuucucaagccuuuccaca

SEQ ID NO: 1832407 - RNA, 19 nt, Artificial Sequence
  Description of Artificial Sequence: Synthetic oligonucleotide
  Sense strand starting at position 3722 of SEQ ID NO: 1563793
gagauucugcaaggguaag

SEQ ID NO: 1832408 - RNA, 19 nt, Artificial Sequence
  Description of Artificial Sequence: Synthetic oligonucleotide
  Antisense strand to SEQ ID NO: 1832407
cuuacccuugcagaaucuc

SEQ ID NO: 1832409 - RNA, 19 nt, Artificial Sequence
  Description of Artificial Sequence: Synthetic oligonucleotide
  Sense strand starting at position 3723 of SEQ ID NO: 1563793
agauucugcaaggguaaga

SEQ ID NO: 1832410 - RNA, 19 nt, Artificial Sequence
  Description of Artificial Sequence: Synthetic oligonucleotide
  Antisense strand to SEQ ID NO: 1832409
ucuuacccuugcagaaucu

SEQ ID NO: 1832411 - RNA, 19 nt, Artificial Sequence
  Description of Artificial Sequence: Synthetic oligonucleotide
  Sense strand starting at position 3734 of SEQ ID NO: 1563793
ggguaagauauggguaaca

SEQ ID NO: 1832412 - RNA, 19 nt, Artificial Sequence
  Description of Artificial Sequence: Synthetic oligonucleotide
  Antisense strand to SEQ ID NO: 1832411
uguuacccauaucuuaccc

SEQ ID NO: 1832413 - RNA, 19 nt, Artificial Sequence
  Description of Artificial Sequence: Synthetic oligonucleotide
  Sense strand starting at position 3746 of SEQ ID NO: 1563793
gguaacaggugauucugau

SEQ ID NO: 1832414 - RNA, 19 nt, Artificial Sequence
  Description of Artificial Sequence: Synthetic oligonucleotide
  Antisense strand to SEQ ID NO: 1832413
aucagaaucaccuguuacc

SEQ ID NO: 1832415 - RNA, 19 nt, Artificial Sequence
  Description of Artificial Sequence: Synthetic oligonucleotide
  Sense strand starting at position 3801 of SEQ ID NO: 1563793
uguuguauacaauagcauu

SEQ ID NO: 1832416 - RNA, 19 nt, Artificial Sequence
  Description of Artificial Sequence: Synthetic oligonucleotide
  Antisense strand to SEQ ID NO: 1832415
aaugcuauuguauacaaca

SEQ ID NO: 1832417 - RNA, 19 nt, Artificial Sequence
  Description of Artificial Sequence: Synthetic oligonucleotide
  Sense strand starting at position 2282 of SEQ ID NO: 1563794
ggaccagcuuccuuugaga

SEQ ID NO: 1832418 - RNA, 19 nt, Artificial Sequence
  Description of Artificial Sequence: Synthetic oligonucleotide
  Antisense strand to SEQ ID NO: 1832417
ucucaaaggaagcuggucc

SEQ ID NO: 1832419 - RNA, 19 nt, Artificial Sequence
  Description of Artificial Sequence: Synthetic oligonucleotide
  Sense strand starting at position 2284 of SEQ ID NO: 1563794
accagcuuccuuugagaag

SEQ ID NO: 1832420 - RNA, 19 nt, Artificial Sequence
  Description of Artificial Sequence: Synthetic oligonucleotide
  Antisense strand to SEQ ID NO: 1832419
cuucucaaaggaagcuggu

SEQ ID NO: 1832421 - RNA, 19 nt, Artificial Sequence
  Description of Artificial Sequence: Synthetic oligonucleotide
  Sense strand starting at position 2486 of SEQ ID NO: 1563794
guggguuugagaggugaca

SEQ ID NO: 1832422 - RNA, 19 nt, Artificial Sequence
  Description of Artificial Sequence: Synthetic oligonucleotide
  Antisense strand to SEQ ID NO: 1832421
ugucaccucucaaacccac

SEQ ID NO: 1832423 - RNA, 19 nt, Artificial Sequence
  Description of Artificial Sequence: Synthetic oligonucleotide
  Sense strand starting at position 2876 of SEQ ID NO: 1563794
gcacucgauuucucacuga

SEQ ID NO: 1832424 - RNA, 19 nt, Artificial Sequence
  Description of Artificial Sequence: Synthetic oligonucleotide
  Antisense strand to SEQ ID NO: 1832423
ucagugagaaaucgagugc

SEQ ID NO: 1832425 - RNA, 19 nt, Artificial Sequence
  Description of Artificial Sequence: Synthetic oligonucleotide
  Sense strand starting at position 46 of SEQ ID NO: 1563795
aggaauaacugcucaguuu

SEQ ID NO: 1832426 - RNA, 19 nt, Artificial Sequence
  Description of Artificial Sequence: Synthetic oligonucleotide
  Antisense strand to SEQ ID NO: 1832425
aaacugagcaguuauuccu

SEQ ID NO: 1832427 - RNA, 19 nt, Artificial Sequence
  Description of Artificial Sequence: Synthetic oligonucleotide
  Sense strand starting at position 67 of SEQ ID NO: 1563795
uacauauaugguuauguga

SEQ ID NO: 1832428 - RNA, 19 nt, Artificial Sequence
  Description of Artificial Sequence: Synthetic oligonucleotide
  Antisense strand to SEQ ID NO: 1832427
ucacauaaccauauaugua

SEQ ID NO: 1832429 - RNA, 19 nt, Artificial Sequence
  Description of Artificial Sequence: Synthetic oligonucleotide
  Sense strand starting at position 70 of SEQ ID NO: 1563795
auauaugguuaugugagaa

SEQ ID NO: 1832430 - RNA, 19 nt, Artificial Sequence
  Description of Artificial Sequence: Synthetic oligonucleotide
  Antisense strand to SEQ ID NO: 1832429
uucucacauaaccauauau

SEQ ID NO: 1832431 - RNA, 19 nt, Artificial Sequence
  Description of Artificial Sequence: Synthetic oligonucleotide
  Sense strand starting at position 122 of SEQ ID NO: 1563795
ggacauggugucugggaca

SEQ ID NO: 1832432 - RNA, 19 nt, Artificial Sequence
  Description of Artificial Sequence: Synthetic oligonucleotide
  Antisense strand to SEQ ID NO: 1832431
ugucccagacaccaugucc

SEQ ID NO: 1832433 - RNA, 19 nt, Artificial Sequence
  Description of Artificial Sequence: Synthetic oligonucleotide
  Sense strand starting at position 536 of SEQ ID NO: 1563795
cccuaaucucaguaacugu

SEQ ID NO: 1832434 - RNA, 19 nt, Artificial Sequence
  Description of Artificial Sequence: Synthetic oligonucleotide
  Antisense strand to SEQ ID NO: 1832433
acaguuacugagauuaggg

SEQ ID NO: 1832435 - RNA, 19 nt, Artificial Sequence
  Description of Artificial Sequence: Synthetic oligonucleotide
  Sense strand starting at position 622 of SEQ ID NO: 1563795
cuuuauaugguagggagau

SEQ ID NO: 1832436 - RNA, 19 nt, Artificial Sequence
  Description of Artificial Sequence: Synthetic oligonucleotide
  Antisense strand to SEQ ID NO: 1832435
aucucccuaccauauaaag

SEQ ID NO: 1832437 - RNA, 19 nt, Artificial Sequence
  Description of Artificial Sequence: Synthetic oligonucleotide
  Sense strand starting at position 628 of SEQ ID NO: 1563795
augguagggagauguuauu

SEQ ID NO: 1832438 - RNA, 19 nt, Artificial Sequence
  Description of Artificial Sequence: Synthetic oligonucleotide
  Antisense strand to SEQ ID NO: 1832437
aauaacaucucccuaccau

SEQ ID NO: 1832439 - RNA, 19 nt, Artificial Sequence
  Description of Artificial Sequence: Synthetic oligonucleotide
  Sense strand starting at position 639 of SEQ ID NO: 1563795
auguuauuaccaugacaua

SEQ ID NO: 1832440 - RNA, 19 nt, Artificial Sequence
  Description of Artificial Sequence: Synthetic oligonucleotide
  Antisense strand to SEQ ID NO: 1832439
uaugucaugguaauaacau

SEQ ID NO: 1832441 - RNA, 19 nt, Artificial Sequence
  Description of Artificial Sequence: Synthetic oligonucleotide
  Sense strand starting at position 1066 of SEQ ID NO: 1563795
aguuuacaggguugauuau

SEQ ID NO: 1832442 - RNA, 19 nt, Artificial Sequence
  Description of Artificial Sequence: Synthetic oligonucleotide
  Antisense strand to SEQ ID NO: 1832441
auaaucaacccuguaaacu

SEQ ID NO: 1832443 - RNA, 19 nt, Artificial Sequence
  Description of Artificial Sequence: Synthetic oligonucleotide
  Sense strand starting at position 1067 of SEQ ID NO: 1563795
guuuacaggguugauuauu

SEQ ID NO: 1832444 - RNA, 19 nt, Artificial Sequence
  Description of Artificial Sequence: Synthetic oligonucleotide
  Antisense strand to SEQ ID NO: 1832443
aauaaucaacccuguaaac

SEQ ID NO: 1832445 - RNA, 19 nt, Artificial Sequence
  Description of Artificial Sequence: Synthetic oligonucleotide
  Sense strand starting at position 1075 of SEQ ID NO: 1563795
gguugauuauuugcuguag

SEQ ID NO: 1832446 - RNA, 19 nt, Artificial Sequence
  Description of Artificial Sequence: Synthetic oligonucleotide
  Antisense strand to SEQ ID NO: 1832445
cuacagcaaauaaucaacc

SEQ ID NO: 1832447 - RNA, 19 nt, Artificial Sequence
  Description of Artificial Sequence: Synthetic oligonucleotide
  Sense strand starting at position 1086 of SEQ ID NO: 1563795
ugcuguagccaacaauaau

SEQ ID NO: 1832448 - RNA, 19 nt, Artificial Sequence
  Description of Artificial Sequence: Synthetic oligonucleotide
  Antisense strand to SEQ ID NO: 1832447
auuauuguuggcuacagca

SEQ ID NO: 1832449 - RNA, 19 nt, Artificial Sequence
  Description of Artificial Sequence: Synthetic oligonucleotide
  Sense strand starting at position 1172 of SEQ ID NO: 1563795
ccaacaaaucagugagcca

SEQ ID NO: 1832450 - RNA, 19 nt, Artificial Sequence
  Description of Artificial Sequence: Synthetic oligonucleotide
  Antisense strand to SEQ ID NO: 1832449
uggcucacugauuuguugg

SEQ ID NO: 1832451 - RNA, 19 nt, Artificial Sequence
  Description of Artificial Sequence: Synthetic oligonucleotide
  Sense strand starting at position 1272 of SEQ ID NO: 1563795
ggaaauauuugguagagca

SEQ ID NO: 1832452 - RNA, 19 nt, Artificial Sequence
  Description of Artificial Sequence: Synthetic oligonucleotide
  Antisense strand to SEQ ID NO: 1832451
ugcucuaccaaauauuucc

SEQ ID NO: 1832453 - RNA, 19 nt, Artificial Sequence
  Description of Artificial Sequence: Synthetic oligonucleotide
  Sense strand starting at position 2096 of SEQ ID NO: 1563795
ccaagagggagguguugua

SEQ ID NO: 1832454 - RNA, 19 nt, Artificial Sequence
  Description of Artificial Sequence: Synthetic oligonucleotide
  Antisense strand to SEQ ID NO: 1832453
uacaacaccucccucuugg

SEQ ID NO: 1832455 - RNA, 19 nt, Artificial Sequence
  Description of Artificial Sequence: Synthetic oligonucleotide
  Sense strand starting at position 2105 of SEQ ID NO: 1563795
agguguuguauuggagaaa

SEQ ID NO: 1832456 - RNA, 19 nt, Artificial Sequence
  Description of Artificial Sequence: Synthetic oligonucleotide
  Antisense strand to SEQ ID NO: 1832455
uuucuccaauacaacaccu

SEQ ID NO: 1832457 - RNA, 19 nt, Artificial Sequence
  Description of Artificial Sequence: Synthetic oligonucleotide
  Sense strand starting at position 2191 of SEQ ID NO: 1563795
ccgcgauauuucccgaaag

SEQ ID NO: 1832458 - RNA, 19 nt, Artificial Sequence
  Description of Artificial Sequence: Synthetic oligonucleotide
  Antisense strand to SEQ ID NO: 1832457
cuuucgggaaauaucgcgg

SEQ ID NO: 1832459 - RNA, 19 nt, Artificial Sequence
  Description of Artificial Sequence: Synthetic oligonucleotide
  Sense strand starting at position 2193 of SEQ ID NO: 1563795
gcgauauuucccgaaagcu

SEQ ID NO: 1832460 - RNA, 19 nt, Artificial Sequence
  Description of Artificial Sequence: Synthetic oligonucleotide
  Antisense strand to SEQ ID NO: 1832459
agcuuucgggaaauaucgc

SEQ ID NO: 1832461 - RNA, 19 nt, Artificial Sequence
  Description of Artificial Sequence: Synthetic oligonucleotide
  Sense strand starting at position 2258 of SEQ ID NO: 1563795
ggugcaaagacaugaauaa

SEQ ID NO: 1832462 - RNA, 19 nt, Artificial Sequence
  Description of Artificial Sequence: Synthetic oligonucleotide
  Antisense strand to SEQ ID NO: 1832461
uuauucaugucuuugcacc

SEQ ID NO: 1832463 - RNA, 19 nt, Artificial Sequence
  Description of Artificial Sequence: Synthetic oligonucleotide
  Sense strand starting at position 2274 of SEQ ID NO: 1563795
uaaggucggccacaaauau

SEQ ID NO: 1832464 - RNA, 19 nt, Artificial Sequence
  Description of Artificial Sequence: Synthetic oligonucleotide
  Antisense strand to SEQ ID NO: 1832463
auauuuguggccgaccuua

SEQ ID NO: 1832465 - RNA, 19 nt, Artificial Sequence
  Description of Artificial Sequence: Synthetic oligonucleotide
  Sense strand starting at position 2404 of SEQ ID NO: 1563795
ggagcuauacgccaacauu

SEQ ID NO: 1832466 - RNA, 19 nt, Artificial Sequence
  Description of Artificial Sequence: Synthetic oligonucleotide
  Antisense strand to SEQ ID NO: 1832465
aauguuggcguauagcucc

SEQ ID NO: 1832467 - RNA, 19 nt, Artificial Sequence
  Description of Artificial Sequence: Synthetic oligonucleotide
  Sense strand starting at position 2515 of SEQ ID NO: 1563795
augagaagguugucccuuu

SEQ ID NO: 1832468 - RNA, 19 nt, Artificial Sequence
  Description of Artificial Sequence: Synthetic oligonucleotide
  Antisense strand to SEQ ID NO: 1832467
aaagggacaaccuucucau

SEQ ID NO: 1832469 - RNA, 19 nt, Artificial Sequence
  Description of Artificial Sequence: Synthetic oligonucleotide
  Sense strand starting at position 2633 of SEQ ID NO: 1563795
cuaugcugucaugaacacu

SEQ ID NO: 1832470 - RNA, 19 nt, Artificial Sequence
  Description of Artificial Sequence: Synthetic oligonucleotide
  Antisense strand to SEQ ID NO: 1832469
aguguucaugacagcauag

SEQ ID NO: 1832471 - RNA, 19 nt, Artificial Sequence
  Description of Artificial Sequence: Synthetic oligonucleotide
  Sense strand starting at position 2693 of SEQ ID NO: 1563795
gguguagaugccuaggagu

SEQ ID NO: 1832472 - RNA, 19 nt, Artificial Sequence
  Description of Artificial Sequence: Synthetic oligonucleotide
  Antisense strand to SEQ ID NO: 1832471
acuccuaggcaucuacacc

SEQ ID NO: 1832473 - RNA, 19 nt, Artificial Sequence
  Description of Artificial Sequence: Synthetic oligonucleotide
  Sense strand starting at position 2699 of SEQ ID NO: 1563795
gaugccuaggagugaaauu

SEQ ID NO: 1832474 - RNA, 19 nt, Artificial Sequence
  Description of Artificial Sequence: Synthetic oligonucleotide
  Antisense strand to SEQ ID NO: 1832473
aauuucacuccuaggcauc

SEQ ID NO: 1832475 - RNA, 19 nt, Artificial Sequence
  Description of Artificial Sequence: Synthetic oligonucleotide
  Sense strand starting at position 2728 of SEQ ID NO: 1563795
auguuaagugcgcauuuaa

SEQ ID NO: 1832476 - RNA, 19 nt, Artificial Sequence
  Description of Artificial Sequence: Synthetic oligonucleotide
  Antisense strand to SEQ ID NO: 1832475
uuaaaugcgcacuuaacau

SEQ ID NO: 1832477 - RNA, 19 nt, Artificial Sequence
  Description of Artificial Sequence: Synthetic oligonucleotide
  Sense strand starting at position 2886 of SEQ ID NO: 1563795
ugacauucugugugaccaa

SEQ ID NO: 1832478 - RNA, 19 nt, Artificial Sequence
  Description of Artificial Sequence: Synthetic oligonucleotide
  Antisense strand to SEQ ID NO: 1832477
uuggucacacagaauguca

SEQ ID NO: 1832479 - RNA, 19 nt, Artificial Sequence
  Description of Artificial Sequence: Synthetic oligonucleotide
  Sense strand starting at position 3022 of SEQ ID NO: 1563795
uuuaacuggguuugagaga

SEQ ID NO: 1832480 - RNA, 19 nt, Artificial Sequence
  Description of Artificial Sequence: Synthetic oligonucleotide
  Antisense strand to SEQ ID NO: 1832479
ucucucaaacccaguuaaa

SEQ ID NO: 1832481 - RNA, 19 nt, Artificial Sequence
  Description of Artificial Sequence: Synthetic oligonucleotide
  Sense strand starting at position 3064 of SEQ ID NO: 1563795
uggauugugaagggucaca

SEQ ID NO: 1832482 - RNA, 19 nt, Artificial Sequence
  Description of Artificial Sequence: Synthetic oligonucleotide
  Antisense strand to SEQ ID NO: 1832481
ugugacccuucacaaucca

SEQ ID NO: 1832483 - RNA, 19 nt, Artificial Sequence
  Description of Artificial Sequence: Synthetic oligonucleotide
  Sense strand starting at position 3264 of SEQ ID NO: 1563795
ggaucauacggucaaugcu

SEQ ID NO: 1832484 - RNA, 19 nt, Artificial Sequence
  Description of Artificial Sequence: Synthetic oligonucleotide
  Antisense strand to SEQ ID NO: 1832483
agcauugaccguaugaucc

SEQ ID NO: 1832485 - RNA, 19 nt, Artificial Sequence
  Description of Artificial Sequence: Synthetic oligonucleotide
  Sense strand starting at position 3325 of SEQ ID NO: 1563795
ugacacucagauuguaauu

SEQ ID NO: 1832486 - RNA, 19 nt, Artificial Sequence
  Description of Artificial Sequence: Synthetic oligonucleotide
  Antisense strand to SEQ ID NO: 1832485
aauuacaaucugaguguca

SEQ ID NO: 1832487 - RNA, 19 nt, Artificial Sequence
  Description of Artificial Sequence: Synthetic oligonucleotide
  Sense strand starting at position 3383 of SEQ ID NO: 1563795
cugcaauaagcaugauuau

SEQ ID NO: 1832488 - RNA, 19 nt, Artificial Sequence
  Description of Artificial Sequence: Synthetic oligonucleotide
  Antisense strand to SEQ ID NO: 1832487
auaaucaugcuuauugcag

SEQ ID NO: 1832489 - RNA, 19 nt, Artificial Sequence
  Description of Artificial Sequence: Synthetic oligonucleotide
  Sense strand starting at position 3384 of SEQ ID NO: 1563795
ugcaauaagcaugauuauu

SEQ ID NO: 1832490 - RNA, 19 nt, Artificial Sequence
  Description of Artificial Sequence: Synthetic oligonucleotide
  Antisense strand to SEQ ID NO: 1832489
aauaaucaugcuuauugca

SEQ ID NO: 1832491 - RNA, 19 nt, Artificial Sequence
  Description of Artificial Sequence: Synthetic oligonucleotide
  Sense strand starting at position 3436 of SEQ ID NO: 1563795
aacaguugucucgggaaac

SEQ ID NO: 1832492 - RNA, 19 nt, Artificial Sequence
  Description of Artificial Sequence: Synthetic oligonucleotide
  Antisense strand to SEQ ID NO: 1832491
guuucccgagacaacuguu

SEQ ID NO: 1832493 - RNA, 19 nt, Artificial Sequence
  Description of Artificial Sequence: Synthetic oligonucleotide
  Sense strand starting at position 3496 of SEQ ID NO: 1563795
gcaagaccaugucuccaau

SEQ ID NO: 1832494 - RNA, 19 nt, Artificial Sequence
  Description of Artificial Sequence: Synthetic oligonucleotide
  Antisense strand to SEQ ID NO: 1832493
auuggagacauggucuugc

SEQ ID NO: 1832495 - RNA, 19 nt, Artificial Sequence
  Description of Artificial Sequence: Synthetic oligonucleotide
  Sense strand starting at position 3520 of SEQ ID NO: 1563795
guugucaagcaauggaaga

SEQ ID NO: 1832496 - RNA, 19 nt, Artificial Sequence
  Description of Artificial Sequence: Synthetic oligonucleotide
  Antisense strand to SEQ ID NO: 1832495
ucuuccauugcuugacaac

SEQ ID NO: 1832497 - RNA, 19 nt, Artificial Sequence
  Description of Artificial Sequence: Synthetic oligonucleotide
  Sense strand starting at position 3521 of SEQ ID NO: 1563795
uugucaagcaauggaagau

SEQ ID NO: 1832498 - RNA, 19 nt, Artificial Sequence
  Description of Artificial Sequence: Synthetic oligonucleotide
  Antisense strand to SEQ ID NO: 1832497
aucuuccauugcuugacaa

SEQ ID NO: 1832499 - RNA, 19 nt, Artificial Sequence
  Description of Artificial Sequence: Synthetic oligonucleotide
  Sense strand starting at position 3540 of SEQ ID NO: 1563795
ucauuaguuugaguacaua

SEQ ID NO: 1832500 - RNA, 19 nt, Artificial Sequence
  Description of Artificial Sequence: Synthetic oligonucleotide
  Antisense strand to SEQ ID NO: 1832499
uauguacucaaacuaauga

SEQ ID NO: 1832501 - RNA, 19 nt, Artificial Sequence
  Description of Artificial Sequence: Synthetic oligonucleotide
  Sense strand starting at position 3689 of SEQ ID NO: 1563795
auaacaaacucguuaguau

SEQ ID NO: 1832502 - RNA, 19 nt, Artificial Sequence
  Description of Artificial Sequence: Synthetic oligonucleotide
  Antisense strand to SEQ ID NO: 1832501
auacuaacgaguuuguuau

SEQ ID NO: 1832503 - RNA, 19 nt, Artificial Sequence
  Description of Artificial Sequence: Synthetic oligonucleotide
  Sense strand starting at position 3808 of SEQ ID NO: 1563795
ugucuuaaggucuauuacu

SEQ ID NO: 1832504 - RNA, 19 nt, Artificial Sequence
  Description of Artificial Sequence: Synthetic oligonucleotide
  Antisense strand to SEQ ID NO: 1832503
aguaauagaccuuaagaca

SEQ ID NO: 1832505 - RNA, 19 nt, Artificial Sequence
  Description of Artificial Sequence: Synthetic oligonucleotide
  Sense strand starting at position 206 of SEQ ID NO: 1563796
gugcgaggcucugucuuaa

SEQ ID NO: 1832506 - RNA, 19 nt, Artificial Sequence
  Description of Artificial Sequence: Synthetic oligonucleotide
  Antisense strand to SEQ ID NO: 1832505
uuaagacagagccucgcac

SEQ ID NO: 1832507 - RNA, 19 nt, Artificial Sequence
  Description of Artificial Sequence: Synthetic oligonucleotide
  Sense strand starting at position 384 of SEQ ID NO: 1563796
ggucucaguugaugguuua

SEQ ID NO: 1832508 - RNA, 19 nt, Artificial Sequence
  Description of Artificial Sequence: Synthetic oligonucleotide
  Antisense strand to SEQ ID NO: 1832507
uaaaccaucaacugagacc

SEQ ID NO: 1832509 - RNA, 19 nt, Artificial Sequence
  Description of Artificial Sequence: Synthetic oligonucleotide
  Sense strand starting at position 440 of SEQ ID NO: 1563796
aguaauaccugcguaacca

SEQ ID NO: 1832510 - RNA, 19 nt, Artificial Sequence
  Description of Artificial Sequence: Synthetic oligonucleotide
  Antisense strand to SEQ ID NO: 1832509
ugguuacgcagguauuacu

SEQ ID NO: 1832511 - RNA, 19 nt, Artificial Sequence
  Description of Artificial Sequence: Synthetic oligonucleotide
  Sense strand starting at position 543 of SEQ ID NO: 1563796
cuugcaguuucuuucuaga

SEQ ID NO: 1832512 - RNA, 19 nt, Artificial Sequence
  Description of Artificial Sequence: Synthetic oligonucleotide
  Antisense strand to SEQ ID NO: 1832511
ucuagaaagaaacugcaag

SEQ ID NO: 1832513 - RNA, 19 nt, Artificial Sequence
  Description of Artificial Sequence: Synthetic oligonucleotide
  Sense strand starting at position 546 of SEQ ID NO: 1563796
gcaguuucuuucuagaaau

SEQ ID NO: 1832514 - RNA, 19 nt, Artificial Sequence
  Description of Artificial Sequence: Synthetic oligonucleotide
  Antisense strand to SEQ ID NO: 1832513
auuucuagaaagaaacugc

SEQ ID NO: 1832515 - RNA, 19 nt, Artificial Sequence
  Description of Artificial Sequence: Synthetic oligonucleotide
  Sense strand starting at position 559 of SEQ ID NO: 1563796
agaaauuaggugcauggua

SEQ ID NO: 1832516 - RNA, 19 nt, Artificial Sequence
  Description of Artificial Sequence: Synthetic oligonucleotide
  Antisense strand to SEQ ID NO: 1832515
uaccaugcaccuaauuucu

SEQ ID NO: 1832517 - RNA, 19 nt, Artificial Sequence
  Description of Artificial Sequence: Synthetic oligonucleotide
  Sense strand starting at position 561 of SEQ ID NO: 1563796
aaauuaggugcaugguaua

SEQ ID NO: 1832518 - RNA, 19 nt, Artificial Sequence
  Description of Artificial Sequence: Synthetic oligonucleotide
  Antisense strand to SEQ ID NO: 1832517
uauaccaugcaccuaauuu

SEQ ID NO: 1832519 - RNA, 19 nt, Artificial Sequence
  Description of Artificial Sequence: Synthetic oligonucleotide
  Sense strand starting at position 608 of SEQ ID NO: 1563796
ucacaaagaugucaaguuu

SEQ ID NO: 1832520 - RNA, 19 nt, Artificial Sequence
  Description of Artificial Sequence: Synthetic oligonucleotide
  Antisense strand to SEQ ID NO: 1832519
aaacuugacaucuuuguga

SEQ ID NO: 1832521 - RNA, 19 nt, Artificial Sequence
  Description of Artificial Sequence: Synthetic oligonucleotide
  Sense strand starting at position 643 of SEQ ID NO: 1563796
gcaauugaauuggcaaaga

SEQ ID NO: 1832522 - RNA, 19 nt, Artificial Sequence
  Description of Artificial Sequence: Synthetic oligonucleotide
  Antisense strand to SEQ ID NO: 1832521
ucuuugccaauucaauugc

SEQ ID NO: 1832523 - RNA, 19 nt, Artificial Sequence
  Description of Artificial Sequence: Synthetic oligonucleotide
  Sense strand starting at position 692 of SEQ ID NO: 1563796
aguauucuauaaccaagua

SEQ ID NO: 1832524 - RNA, 19 nt, Artificial Sequence
  Description of Artificial Sequence: Synthetic oligonucleotide
  Antisense strand to SEQ ID NO: 1832523
uacuugguuauagaauacu

SEQ ID NO: 1832525 - RNA, 19 nt, Artificial Sequence
  Description of Artificial Sequence: Synthetic oligonucleotide
  Sense strand starting at position 708 of SEQ ID NO: 1563796
guaaacaccugcuaugacu

SEQ ID NO: 1832526 - RNA, 19 nt, Artificial Sequence
  Description of Artificial Sequence: Synthetic oligonucleotide
  Antisense strand to SEQ ID NO: 1832525
agucauagcagguguuuac

SEQ ID NO: 1832527 - RNA, 19 nt, Artificial Sequence
  Description of Artificial Sequence: Synthetic oligonucleotide
  Sense strand starting at position 2475 of SEQ ID NO: 1563796
ugggacuugucggcuucau

SEQ ID NO: 1832528 - RNA, 19 nt, Artificial Sequence
  Description of Artificial Sequence: Synthetic oligonucleotide
  Antisense strand to SEQ ID NO: 1832527
augaagccgacaaguccca

SEQ ID NO: 1832529 - RNA, 19 nt, Artificial Sequence
  Description of Artificial Sequence: Synthetic oligonucleotide
  Sense strand starting at position 2516 of SEQ ID NO: 1563796
cauccuauguugccagaga

SEQ ID NO: 1832530 - RNA, 19 nt, Artificial Sequence
  Description of Artificial Sequence: Synthetic oligonucleotide
  Antisense strand to SEQ ID NO: 1832529
ucucuggcaacauaggaug

SEQ ID NO: 1832531 - RNA, 19 nt, Artificial Sequence
  Description of Artificial Sequence: Synthetic oligonucleotide
  Sense strand starting at position 2638 of SEQ ID NO: 1563796
cagucuggacccuagcaau

SEQ ID NO: 1832532 - RNA, 19 nt, Artificial Sequence
  Description of Artificial Sequence: Synthetic oligonucleotide
  Antisense strand to SEQ ID NO: 1832531
auugcuaggguccagacug

SEQ ID NO: 1832533 - RNA, 19 nt, Artificial Sequence
  Description of Artificial Sequence: Synthetic oligonucleotide
  Sense strand starting at position 2666 of SEQ ID NO: 1563796
acacuaggugcccgagaaa

SEQ ID NO: 1832534 - RNA, 19 nt, Artificial Sequence
  Description of Artificial Sequence: Synthetic oligonucleotide
  Antisense strand to SEQ ID NO: 1832533
uuucucgggcaccuagugu

SEQ ID NO: 1832535 - RNA, 19 nt, Artificial Sequence
  Description of Artificial Sequence: Synthetic oligonucleotide
  Sense strand starting at position 2774 of SEQ ID NO: 1563796
ccaagugcccguugaaguu

SEQ ID NO: 1832536 - RNA, 19 nt, Artificial Sequence
  Description of Artificial Sequence: Synthetic oligonucleotide
  Antisense strand to SEQ ID NO: 1832535
aacuucaacgggcacuugg

SEQ ID NO: 1832537 - RNA, 19 nt, Artificial Sequence
  Description of Artificial Sequence: Synthetic oligonucleotide
  Sense strand starting at position 2780 of SEQ ID NO: 1563796
gcccguugaaguuguuaaa

SEQ ID NO: 1832538 - RNA, 19 nt, Artificial Sequence
  Description of Artificial Sequence: Synthetic oligonucleotide
  Antisense strand to SEQ ID NO: 1832537
uuuaacaacuucaacgggc

SEQ ID NO: 1832539 - RNA, 19 nt, Artificial Sequence
  Description of Artificial Sequence: Synthetic oligonucleotide
  Sense strand starting at position 2783 of SEQ ID NO: 1563796
cguugaaguuguuaaacua

SEQ ID NO: 1832540 - RNA, 19 nt, Artificial Sequence
  Description of Artificial Sequence: Synthetic oligonucleotide
  Antisense strand to SEQ ID NO: 1832539
uaguuuaacaacuucaacg

SEQ ID NO: 1832541 - RNA, 19 nt, Artificial Sequence
  Description of Artificial Sequence: Synthetic oligonucleotide
  Sense strand starting at position 2795 of SEQ ID NO: 1563796
uaaacuaggucuccggaaa

SEQ ID NO: 1832542 - RNA, 19 nt, Artificial Sequence
  Description of Artificial Sequence: Synthetic oligonucleotide
  Antisense strand to SEQ ID NO: 1832541
uuuccggagaccuaguuua

SEQ ID NO: 1832543 - RNA, 19 nt, Artificial Sequence
  Description of Artificial Sequence: Synthetic oligonucleotide
  Sense strand starting at position 2796 of SEQ ID NO: 1563796
aaacuaggucuccggaaag

SEQ ID NO: 1832544 - RNA, 19 nt, Artificial Sequence
  Description of Artificial Sequence: Synthetic oligonucleotide
  Antisense strand to SEQ ID NO: 1832543
cuuuccggagaccuaguuu

SEQ ID NO: 1832545 - RNA, 19 nt, Artificial Sequence
  Description of Artificial Sequence: Synthetic oligonucleotide
  Sense strand starting at position 2814 of SEQ ID NO: 1563796
gugcuccaguccugauuga

SEQ ID NO: 1832546 - RNA, 19 nt, Artificial Sequence
  Description of Artificial Sequence: Synthetic oligonucleotide
  Antisense strand to SEQ ID NO: 1832545
ucaaucaggacuggagcac

SEQ ID NO: 1832547 - RNA, 19 nt, Artificial Sequence
  Description of Artificial Sequence: Synthetic oligonucleotide
  Sense strand starting at position 2818 of SEQ ID NO: 1563796
uccaguccugauugagaac

SEQ ID NO: 1832548 - RNA, 19 nt, Artificial Sequence
  Description of Artificial Sequence: Synthetic oligonucleotide
  Antisense strand to SEQ ID NO: 1832547
guucucaaucaggacugga

SEQ ID NO: 1832549 - RNA, 19 nt, Artificial Sequence
  Description of Artificial Sequence: Synthetic oligonucleotide
  Sense strand starting at position 2821 of SEQ ID NO: 1563796
aguccugauugagaacuuu

SEQ ID NO: 1832550 - RNA, 19 nt, Artificial Sequence
  Description of Artificial Sequence: Synthetic oligonucleotide
  Antisense strand to SEQ ID NO: 1832549
aaaguucucaaucaggacu

SEQ ID NO: 1832551 - RNA, 19 nt, Artificial Sequence
  Description of Artificial Sequence: Synthetic oligonucleotide
  Sense strand starting at position 2829 of SEQ ID NO: 1563796
uugagaacuuuccugcugu

SEQ ID NO: 1832552 - RNA, 19 nt, Artificial Sequence
  Description of Artificial Sequence: Synthetic oligonucleotide
  Antisense strand to SEQ ID NO: 1832551
acagcaggaaaguucucaa

SEQ ID NO: 1832553 - RNA, 19 nt, Artificial Sequence
  Description of Artificial Sequence: Synthetic oligonucleotide
  Sense strand starting at position 2830 of SEQ ID NO: 1563796
ugagaacuuuccugcuguc

SEQ ID NO: 1832554 - RNA, 19 nt, Artificial Sequence
  Description of Artificial Sequence: Synthetic oligonucleotide
  Antisense strand to SEQ ID NO: 1832553
gacagcaggaaaguucuca

SEQ ID NO: 1832555 - RNA, 19 nt, Artificial Sequence
  Description of Artificial Sequence: Synthetic oligonucleotide
  Sense strand starting at position 2974 of SEQ ID NO: 1563796
aguggauucuguguggacu

SEQ ID NO: 1832556 - RNA, 19 nt, Artificial Sequence
  Description of Artificial Sequence: Synthetic oligonucleotide
  Antisense strand to SEQ ID NO: 1832555
aguccacacagaauccacu

SEQ ID NO: 1832557 - RNA, 19 nt, Artificial Sequence
  Description of Artificial Sequence: Synthetic oligonucleotide
  Sense strand starting at position 2975 of SEQ ID NO: 1563796
guggauucuguguggacua

SEQ ID NO: 1832558 - RNA, 19 nt, Artificial Sequence
  Description of Artificial Sequence: Synthetic oligonucleotide
  Antisense strand to SEQ ID NO: 1832557
uaguccacacagaauccac

SEQ ID NO: 1832559 - RNA, 19 nt, Artificial Sequence
  Description of Artificial Sequence: Synthetic oligonucleotide
  Sense strand starting at position 2977 of SEQ ID NO: 1563796
ggauucuguguggacuacu

SEQ ID NO: 1832560 - RNA, 19 nt, Artificial Sequence
  Description of Artificial Sequence: Synthetic oligonucleotide
  Antisense strand to SEQ ID NO: 1832559
aguaguccacacagaaucc

SEQ ID NO: 1832561 - RNA, 19 nt, Artificial Sequence
  Description of Artificial Sequence: Synthetic oligonucleotide
  Sense strand starting at position 2986 of SEQ ID NO: 1563796
guggacuacucucaacuau

SEQ ID NO: 1832562 - RNA, 19 nt, Artificial Sequence
  Description of Artificial Sequence: Synthetic oligonucleotide
  Antisense strand to SEQ ID NO: 1832561
auaguugagaguaguccac

SEQ ID NO: 1832563 - RNA, 19 nt, Artificial Sequence
  Description of Artificial Sequence: Synthetic oligonucleotide
  Sense strand starting at position 3203 of SEQ ID NO: 1563796
auggaacacuaacgucauu

SEQ ID NO: 1832564 - RNA, 19 nt, Artificial Sequence
  Description of Artificial Sequence: Synthetic oligonucleotide
  Antisense strand to SEQ ID NO: 1832563
aaugacguuaguguuccau

SEQ ID NO: 1832565 - RNA, 19 nt, Artificial Sequence
  Description of Artificial Sequence: Synthetic oligonucleotide
  Sense strand starting at position 3283 of SEQ ID NO: 1563796
cagagcaaacuguguuaaa

SEQ ID NO: 1832566 - RNA, 19 nt, Artificial Sequence
  Description of Artificial Sequence: Synthetic oligonucleotide
  Antisense strand to SEQ ID NO: 1832565
uuuaacacaguuugcucug

SEQ ID NO: 1832567 - RNA, 19 nt, Artificial Sequence
  Description of Artificial Sequence: Synthetic oligonucleotide
  Sense strand starting at position 3416 of SEQ ID NO: 1563796
guggaauaauugcuaagua

SEQ ID NO: 1832568 - RNA, 19 nt, Artificial Sequence
  Description of Artificial Sequence: Synthetic oligonucleotide
  Antisense strand to SEQ ID NO: 1832567
uacuuagcaauuauuccac

SEQ ID NO: 1832569 - RNA, 19 nt, Artificial Sequence
  Description of Artificial Sequence: Synthetic oligonucleotide
  Sense strand starting at position 3417 of SEQ ID NO: 1563796
uggaauaauugcuaaguau

SEQ ID NO: 1832570 - RNA, 19 nt, Artificial Sequence
  Description of Artificial Sequence: Synthetic oligonucleotide
  Antisense strand to SEQ ID NO: 1832569
auacuuagcaauuauucca

SEQ ID NO: 1832571 - RNA, 19 nt, Artificial Sequence
  Description of Artificial Sequence: Synthetic oligonucleotide
  Sense strand starting at position 3424 of SEQ ID NO: 1563796
auugcuaaguauccagaaa

SEQ ID NO: 1832572 - RNA, 19 nt, Artificial Sequence
  Description of Artificial Sequence: Synthetic oligonucleotide
  Antisense strand to SEQ ID NO: 1832571
uuucuggauacuuagcaau

SEQ ID NO: 1832573 - RNA, 19 nt, Artificial Sequence
  Description of Artificial Sequence: Synthetic oligonucleotide
  Sense strand starting at position 3598 of SEQ ID NO: 1563796
agugaauugugcccuuucu

SEQ ID NO: 1832574 - RNA, 19 nt, Artificial Sequence
  Description of Artificial Sequence: Synthetic oligonucleotide
  Antisense strand to SEQ ID NO: 1832573
agaaagggcacaauucacu

SEQ ID NO: 1832575 - RNA, 19 nt, Artificial Sequence
  Description of Artificial Sequence: Synthetic oligonucleotide
  Sense strand starting at position 3657 of SEQ ID NO: 1563796
ccauauguguaauuggacu

SEQ ID NO: 1832576 - RNA, 19 nt, Artificial Sequence
  Description of Artificial Sequence: Synthetic oligonucleotide
  Antisense strand to SEQ ID NO: 1832575
aguccaauuacacauaugg

SEQ ID NO: 1832577 - RNA, 19 nt, Artificial Sequence
  Description of Artificial Sequence: Synthetic oligonucleotide
  Sense strand starting at position 3732 of SEQ ID NO: 1563796
agagauacguuucucauuc

SEQ ID NO: 1832578 - RNA, 19 nt, Artificial Sequence
  Description of Artificial Sequence: Synthetic oligonucleotide
  Antisense strand to SEQ ID NO: 1832577
gaaugagaaacguaucucu

SEQ ID NO: 1832579 - RNA, 19 nt, Artificial Sequence
  Description of Artificial Sequence: Synthetic oligonucleotide
  Sense strand starting at position 3733 of SEQ ID NO: 1563796
gagauacguuucucauucu

SEQ ID NO: 1832580 - RNA, 19 nt, Artificial Sequence
  Description of Artificial Sequence: Synthetic oligonucleotide
  Antisense strand to SEQ ID NO: 1832579
agaaugagaaacguaucuc

SEQ ID NO: 1832581 - RNA, 19 nt, Artificial Sequence
  Description of Artificial Sequence: Synthetic oligonucleotide
  Sense strand starting at position 3734 of SEQ ID NO: 1563796
agauacguuucucauucuu

SEQ ID NO: 1832582 - RNA, 19 nt, Artificial Sequence
  Description of Artificial Sequence: Synthetic oligonucleotide
  Antisense strand to SEQ ID NO: 1832581
aagaaugagaaacguaucu

SEQ ID NO: 1832583 - RNA, 19 nt, Artificial Sequence
  Description of Artificial Sequence: Synthetic oligonucleotide
  Sense strand starting at position 3899 of SEQ ID NO: 1563796
gcaucacagucauuaucac

SEQ ID NO: 1832584 - RNA, 19 nt, Artificial Sequence
  Description of Artificial Sequence: Synthetic oligonucleotide
  Antisense strand to SEQ ID NO: 1832583
gugauaaugacugugaugc

SEQ ID NO: 1832585 - RNA, 19 nt, Artificial Sequence
  Description of Artificial Sequence: Synthetic oligonucleotide
  Sense strand starting at position 279 of SEQ ID NO: 1563797
gggaugguuuccgaagcga

SEQ ID NO: 1832586 - RNA, 19 nt, Artificial Sequence
  Description of Artificial Sequence: Synthetic oligonucleotide
  Antisense strand to SEQ ID NO: 1832585
ucgcuucggaaaccauccc

SEQ ID NO: 1832587 - RNA, 19 nt, Artificial Sequence
  Description of Artificial Sequence: Synthetic oligonucleotide
  Sense strand starting at position 313 of SEQ ID NO: 1563797
ucaguuaccucagcgguua

SEQ ID NO: 1832588 - RNA, 19 nt, Artificial Sequence
  Description of Artificial Sequence: Synthetic oligonucleotide
  Antisense strand to SEQ ID NO: 1832587
uaaccgcugagguaacuga

SEQ ID NO: 1832589 - RNA, 19 nt, Artificial Sequence
  Description of Artificial Sequence: Synthetic oligonucleotide
  Sense strand starting at position 400 of SEQ ID NO: 1563797
gugcucuccugaccuaauu

SEQ ID NO: 1832590 - RNA, 19 nt, Artificial Sequence
  Description of Artificial Sequence: Synthetic oligonucleotide
  Antisense strand to SEQ ID NO: 1832589
aauuaggucaggagagcac

SEQ ID NO: 1832591 - RNA, 19 nt, Artificial Sequence
  Description of Artificial Sequence: Synthetic oligonucleotide
  Sense strand starting at position 410 of SEQ ID NO: 1563797
gaccuaauuccaugccgga

SEQ ID NO: 1832592 - RNA, 19 nt, Artificial Sequence
  Description of Artificial Sequence: Synthetic oligonucleotide
  Antisense strand to SEQ ID NO: 1832591
uccggcauggaauuagguc

SEQ ID NO: 1832593 - RNA, 19 nt, Artificial Sequence
  Description of Artificial Sequence: Synthetic oligonucleotide
  Sense strand starting at position 1999 of SEQ ID NO: 1563797
acugucuugucucagcaaa

SEQ ID NO: 1832594 - RNA, 19 nt, Artificial Sequence
  Description of Artificial Sequence: Synthetic oligonucleotide
  Antisense strand to SEQ ID NO: 1832593
uuugcugagacaagacagu

SEQ ID NO: 1832595 - RNA, 19 nt, Artificial Sequence
  Description of Artificial Sequence: Synthetic oligonucleotide
  Sense strand starting at position 2001 of SEQ ID NO: 1563797
ugucuugucucagcaaagu

SEQ ID NO: 1832596 - RNA, 19 nt, Artificial Sequence
  Description of Artificial Sequence: Synthetic oligonucleotide
  Antisense strand to SEQ ID NO: 1832595
acuuugcugagacaagaca

SEQ ID NO: 1832597 - RNA, 19 nt, Artificial Sequence
  Description of Artificial Sequence: Synthetic oligonucleotide
  Sense strand starting at position 2007 of SEQ ID NO: 1563797
gucucagcaaaguguuaua

SEQ ID NO: 1832598 - RNA, 19 nt, Artificial Sequence
  Description of Artificial Sequence: Synthetic oligonucleotide
  Antisense strand to SEQ ID NO: 1832597
uauaacacuuugcugagac

SEQ ID NO: 1832599 - RNA, 19 nt, Artificial Sequence
  Description of Artificial Sequence: Synthetic oligonucleotide
  Sense strand starting at position 2010 of SEQ ID NO: 1563797
ucagcaaaguguuauauaa

SEQ ID NO: 1832600 - RNA, 19 nt, Artificial Sequence
  Description of Artificial Sequence: Synthetic oligonucleotide
  Antisense strand to SEQ ID NO: 1832599
uuauauaacacuuugcuga

SEQ ID NO: 1832601 - RNA, 19 nt, Artificial Sequence
  Description of Artificial Sequence: Synthetic oligonucleotide
  Sense strand starting at position 2156 of SEQ ID NO: 1563797
ugagguuguuuguguuuac

SEQ ID NO: 1832602 - RNA, 19 nt, Artificial Sequence
  Description of Artificial Sequence: Synthetic oligonucleotide
  Antisense strand to SEQ ID NO: 1832601
guaaacacaaacaaccuca

SEQ ID NO: 1832603 - RNA, 19 nt, Artificial Sequence
  Description of Artificial Sequence: Synthetic oligonucleotide
  Sense strand starting at position 2157 of SEQ ID NO: 1563797
gagguuguuuguguuuaca

SEQ ID NO: 1832604 - RNA, 19 nt, Artificial Sequence
  Description of Artificial Sequence: Synthetic oligonucleotide
  Antisense strand to SEQ ID NO: 1832603
uguaaacacaaacaaccuc

SEQ ID NO: 1832605 - RNA, 19 nt, Artificial Sequence
  Description of Artificial Sequence: Synthetic oligonucleotide
  Sense strand starting at position 2159 of SEQ ID NO: 1563797
gguuguuuguguuuacacu

SEQ ID NO: 1832606 - RNA, 19 nt, Artificial Sequence
  Description of Artificial Sequence: Synthetic oligonucleotide
  Antisense strand to SEQ ID NO: 1832605
aguguaaacacaaacaacc

SEQ ID NO: 1832607 - RNA, 19 nt, Artificial Sequence
  Description of Artificial Sequence: Synthetic oligonucleotide
  Sense strand starting at position 2160 of SEQ ID NO: 1563797
guuguuuguguuuacacuu

SEQ ID NO: 1832608 - RNA, 19 nt, Artificial Sequence
  Description of Artificial Sequence: Synthetic oligonucleotide
  Antisense strand to SEQ ID NO: 1832607
aaguguaaacacaaacaac

SEQ ID NO: 1832609 - RNA, 19 nt, Artificial Sequence
  Description of Artificial Sequence: Synthetic oligonucleotide
  Sense strand starting at position 2167 of SEQ ID NO: 1563797
guguuuacacuucgccuua

SEQ ID NO: 1832610 - RNA, 19 nt, Artificial Sequence
  Description of Artificial Sequence: Synthetic oligonucleotide
  Antisense strand to SEQ ID NO: 1832609
uaaggcgaaguguaaacac

SEQ ID NO: 1832611 - RNA, 19 nt, Artificial Sequence
  Description of Artificial Sequence: Synthetic oligonucleotide
  Sense strand starting at position 2169 of SEQ ID NO: 1563797
guuuacacuucgccuuauu

SEQ ID NO: 1832612 - RNA, 19 nt, Artificial Sequence
  Description of Artificial Sequence: Synthetic oligonucleotide
  Antisense strand to SEQ ID NO: 1832611
aauaaggcgaaguguaaac

SEQ ID NO: 1832613 - RNA, 19 nt, Artificial Sequence
  Description of Artificial Sequence: Synthetic oligonucleotide
  Sense strand starting at position 2233 of SEQ ID NO: 1563797
gggagaaacucagugucuu

SEQ ID NO: 1832614 - RNA, 19 nt, Artificial Sequence
  Description of Artificial Sequence: Synthetic oligonucleotide
  Antisense strand to SEQ ID NO: 1832613
aagacacugaguuucuccc

SEQ ID NO: 1832615 - RNA, 19 nt, Artificial Sequence
  Description of Artificial Sequence: Synthetic oligonucleotide
  Sense strand starting at position 2234 of SEQ ID NO: 1563797
ggagaaacucagugucuuc

SEQ ID NO: 1832616 - RNA, 19 nt, Artificial Sequence
  Description of Artificial Sequence: Synthetic oligonucleotide
  Antisense strand to SEQ ID NO: 1832615
gaagacacugaguuucucc

SEQ ID NO: 1832617 - RNA, 19 nt, Artificial Sequence
  Description of Artificial Sequence: Synthetic oligonucleotide
  Sense strand starting at position 2435 of SEQ ID NO: 1563797
gcugcugucagggaaagga

SEQ ID NO: 1832618 - RNA, 19 nt, Artificial Sequence
  Description of Artificial Sequence: Synthetic oligonucleotide
  Antisense strand to SEQ ID NO: 1832617
uccuuucccugacagcagc

SEQ ID NO: 1832619 - RNA, 19 nt, Artificial Sequence
  Description of Artificial Sequence: Synthetic oligonucleotide
  Sense strand starting at position 2598 of SEQ ID NO: 1563797
gguguucugugccaagagu

SEQ ID NO: 1832620 - RNA, 19 nt, Artificial Sequence
  Description of Artificial Sequence: Synthetic oligonucleotide
  Antisense strand to SEQ ID NO: 1832619
acucuuggcacagaacacc

SEQ ID NO: 1832621 - RNA, 19 nt, Artificial Sequence
  Description of Artificial Sequence: Synthetic oligonucleotide
  Sense strand starting at position 2599 of SEQ ID NO: 1563797
guguucugugccaagagug

SEQ ID NO: 1832622 - RNA, 19 nt, Artificial Sequence
  Description of Artificial Sequence: Synthetic oligonucleotide
  Antisense strand to SEQ ID NO: 1832621
cacucuuggcacagaacac

SEQ ID NO: 1832623 - RNA, 19 nt, Artificial Sequence
  Description of Artificial Sequence: Synthetic oligonucleotide
  Sense strand starting at position 2928 of SEQ ID NO: 1563797
agcgcuauucaggagaaag

SEQ ID NO: 1832624 - RNA, 19 nt, Artificial Sequence
  Description of Artificial Sequence: Synthetic oligonucleotide
  Antisense strand to SEQ ID NO: 1832623
cuuucuccugaauagcgcu

SEQ ID NO: 1832625 - RNA, 19 nt, Artificial Sequence
  Description of Artificial Sequence: Synthetic oligonucleotide
  Sense strand starting at position 2978 of SEQ ID NO: 1563797
ccgaauagccuccagguuu

SEQ ID NO: 1832626 - RNA, 19 nt, Artificial Sequence
  Description of Artificial Sequence: Synthetic oligonucleotide
  Antisense strand to SEQ ID NO: 1832625
aaaccuggaggcuauucgg

SEQ ID NO: 1832627 - RNA, 19 nt, Artificial Sequence
  Description of Artificial Sequence: Synthetic oligonucleotide
  Sense strand starting at position 2989 of SEQ ID NO: 1563797
ccagguuugucgcuccuga

SEQ ID NO: 1832628 - RNA, 19 nt, Artificial Sequence
  Description of Artificial Sequence: Synthetic oligonucleotide
  Antisense strand to SEQ ID NO: 1832627
ucaggagcgacaaaccugg

SEQ ID NO: 1832629 - RNA, 19 nt, Artificial Sequence
  Description of Artificial Sequence: Synthetic oligonucleotide
  Sense strand starting at position 3076 of SEQ ID NO: 1563797
gacgguguccuacacacuu

SEQ ID NO: 1832630 - RNA, 19 nt, Artificial Sequence
  Description of Artificial Sequence: Synthetic oligonucleotide
  Antisense strand to SEQ ID NO: 1832629
aaguguguaggacaccguc

SEQ ID NO: 1832631 - RNA, 19 nt, Artificial Sequence
  Description of Artificial Sequence: Synthetic oligonucleotide
  Sense strand starting at position 3388 of SEQ ID NO: 1563797
uuugcuucugaacaaaugu

SEQ ID NO: 1832632 - RNA, 19 nt, Artificial Sequence
  Description of Artificial Sequence: Synthetic oligonucleotide
  Antisense strand to SEQ ID NO: 1832631
acauuuguucagaagcaaa

SEQ ID NO: 1832633 - RNA, 19 nt, Artificial Sequence
  Description of Artificial Sequence: Synthetic oligonucleotide
  Sense strand starting at position 3402 of SEQ ID NO: 1563797
aauguuagagcugaucuua

SEQ ID NO: 1832634 - RNA, 19 nt, Artificial Sequence
  Description of Artificial Sequence: Synthetic oligonucleotide
  Antisense strand to SEQ ID NO: 1832633
uaagaucagcucuaacauu

SEQ ID NO: 1832635 - RNA, 19 nt, Artificial Sequence
  Description of Artificial Sequence: Synthetic oligonucleotide
  Sense strand starting at position 3410 of SEQ ID NO: 1563797
agcugaucuuacuugggau

SEQ ID NO: 1832636 - RNA, 19 nt, Artificial Sequence
  Description of Artificial Sequence: Synthetic oligonucleotide
  Antisense strand to SEQ ID NO: 1832635
aucccaaguaagaucagcu

SEQ ID NO: 1832637 - RNA, 19 nt, Artificial Sequence
  Description of Artificial Sequence: Synthetic oligonucleotide
  Sense strand starting at position 3411 of SEQ ID NO: 1563797
gcugaucuuacuugggauu

SEQ ID NO: 1832638 - RNA, 19 nt, Artificial Sequence
  Description of Artificial Sequence: Synthetic oligonucleotide
  Antisense strand to SEQ ID NO: 1832637
aaucccaaguaagaucagc

SEQ ID NO: 1832639 - RNA, 19 nt, Artificial Sequence
  Description of Artificial Sequence: Synthetic oligonucleotide
  Sense strand starting at position 3412 of SEQ ID NO: 1563797
cugaucuuacuugggauua

SEQ ID NO: 1832640 - RNA, 19 nt, Artificial Sequence
  Description of Artificial Sequence: Synthetic oligonucleotide
  Antisense strand to SEQ ID NO: 1832639
uaaucccaaguaagaucag

SEQ ID NO: 1832641 - RNA, 19 nt, Artificial Sequence
  Description of Artificial Sequence: Synthetic oligonucleotide
  Sense strand starting at position 3413 of SEQ ID NO: 1563797
ugaucuuacuugggauuaa

SEQ ID NO: 1832642 - RNA, 19 nt, Artificial Sequence
  Description of Artificial Sequence: Synthetic oligonucleotide
  Antisense strand to SEQ ID NO: 1832641
uuaaucccaaguaagauca

SEQ ID NO: 1832643 - RNA, 19 nt, Artificial Sequence
  Description of Artificial Sequence: Synthetic oligonucleotide
  Sense strand starting at position 3414 of SEQ ID NO: 1563797
gaucuuacuugggauuaag

SEQ ID NO: 1832644 - RNA, 19 nt, Artificial Sequence
  Description of Artificial Sequence: Synthetic oligonucleotide
  Antisense strand to SEQ ID NO: 1832643
cuuaaucccaaguaagauc

SEQ ID NO: 1832645 - RNA, 19 nt, Artificial Sequence
  Description of Artificial Sequence: Synthetic oligonucleotide
  Sense strand starting at position 3422 of SEQ ID NO: 1563797
uugggauuaagucauguuu

SEQ ID NO: 1832646 - RNA, 19 nt, Artificial Sequence
  Description of Artificial Sequence: Synthetic oligonucleotide
  Antisense strand to SEQ ID NO: 1832645
aaacaugacuuaaucccaa

SEQ ID NO: 1832647 - RNA, 19 nt, Artificial Sequence
  Description of Artificial Sequence: Synthetic oligonucleotide
  Sense strand starting at position 3436 of SEQ ID NO: 1563797
uguuucagaguuggguuau

SEQ ID NO: 1832648 - RNA, 19 nt, Artificial Sequence
  Description of Artificial Sequence: Synthetic oligonucleotide
  Antisense strand to SEQ ID NO: 1832647
auaacccaacucugaaaca

SEQ ID NO: 1832649 - RNA, 19 nt, Artificial Sequence
  Description of Artificial Sequence: Synthetic oligonucleotide
  Sense strand starting at position 3437 of SEQ ID NO: 1563797
guuucagaguuggguuaug

SEQ ID NO: 1832650 - RNA, 19 nt, Artificial Sequence
  Description of Artificial Sequence: Synthetic oligonucleotide
  Antisense strand to SEQ ID NO: 1832649
cauaacccaacucugaaac

SEQ ID NO: 1832651 - RNA, 19 nt, Artificial Sequence
  Description of Artificial Sequence: Synthetic oligonucleotide
  Sense strand starting at position 3472 of SEQ ID NO: 1563797
cucugcuucucuuuaggua

SEQ ID NO: 1832652 - RNA, 19 nt, Artificial Sequence
  Description of Artificial Sequence: Synthetic oligonucleotide
  Antisense strand to SEQ ID NO: 1832651
uaccuaaagagaagcagag

SEQ ID NO: 1832653 - RNA, 19 nt, Artificial Sequence
  Description of Artificial Sequence: Synthetic oligonucleotide
  Sense strand starting at position 3476 of SEQ ID NO: 1563797
gcuucucuuuagguaguua

SEQ ID NO: 1832654 - RNA, 19 nt, Artificial Sequence
  Description of Artificial Sequence: Synthetic oligonucleotide
  Antisense strand to SEQ ID NO: 1832653
uaacuaccuaaagagaagc

SEQ ID NO: 1832655 - RNA, 19 nt, Artificial Sequence
  Description of Artificial Sequence: Synthetic oligonucleotide
  Sense strand starting at position 3737 of SEQ ID NO: 1563797
gcuugaagccuuggauuug

SEQ ID NO: 1832656 - RNA, 19 nt, Artificial Sequence
  Description of Artificial Sequence: Synthetic oligonucleotide
  Antisense strand to SEQ ID NO: 1832655
caaauccaaggcuucaagc

SEQ ID NO: 1832657 - RNA, 19 nt, Artificial Sequence
  Description of Artificial Sequence: Synthetic oligonucleotide
  Sense strand starting at position 3834 of SEQ ID NO: 1563797
aaccuugaguggcuuugau

SEQ ID NO: 1832658 - RNA, 19 nt, Artificial Sequence
  Description of Artificial Sequence: Synthetic oligonucleotide
  Antisense strand to SEQ ID NO: 1832657
aucaaagccacucaagguu

SEQ ID NO: 1832659 - RNA, 19 nt, Artificial Sequence
  Description of Artificial Sequence: Synthetic oligonucleotide
  Sense strand starting at position 3838 of SEQ ID NO: 1563797
uugaguggcuuugauccua

SEQ ID NO: 1832660 - RNA, 19 nt, Artificial Sequence
  Description of Artificial Sequence: Synthetic oligonucleotide
  Antisense strand to SEQ ID NO: 1832659
uaggaucaaagccacucaa

SEQ ID NO: 1832661 - RNA, 19 nt, Artificial Sequence
  Description of Artificial Sequence: Synthetic oligonucleotide
  Sense strand starting at position 3880 of SEQ ID NO: 1563797
ucaguuacuuaaguacaaa

SEQ ID NO: 1832662 - RNA, 19 nt, Artificial Sequence
  Description of Artificial Sequence: Synthetic oligonucleotide
  Antisense strand to SEQ ID NO: 1832661
uuuguacuuaaguaacuga

SEQ ID NO: 1832663 - RNA, 19 nt, Artificial Sequence
  Description of Artificial Sequence: Synthetic oligonucleotide
  Sense strand starting at position 41 of SEQ ID NO: 1563798
uguuaaguccuguaugagu

SEQ ID NO: 1832664 - RNA, 19 nt, Artificial Sequence
  Description of Artificial Sequence: Synthetic oligonucleotide
  Antisense strand to SEQ ID NO: 1832663
acucauacaggacuuaaca

SEQ ID NO: 1832665 - RNA, 19 nt, Artificial Sequence
  Description of Artificial Sequence: Synthetic oligonucleotide
  Sense strand starting at position 43 of SEQ ID NO: 1563798
uuaaguccuguaugaguau

SEQ ID NO: 1832666 - RNA, 19 nt, Artificial Sequence
  Description of Artificial Sequence: Synthetic oligonucleotide
  Antisense strand to SEQ ID NO: 1832665
auacucauacaggacuuaa

SEQ ID NO: 1832667 - RNA, 19 nt, Artificial Sequence
  Description of Artificial Sequence: Synthetic oligonucleotide
  Sense strand starting at position 46 of SEQ ID NO: 1563798
aguccuguaugaguaugga

SEQ ID NO: 1832668 - RNA, 19 nt, Artificial Sequence
  Description of Artificial Sequence: Synthetic oligonucleotide
  Antisense strand to SEQ ID NO: 1832667
uccauacucauacaggacu

SEQ ID NO: 1832669 - RNA, 19 nt, Artificial Sequence
  Description of Artificial Sequence: Synthetic oligonucleotide
  Sense strand starting at position 49 of SEQ ID NO: 1563798
ccuguaugaguauggaucu

SEQ ID NO: 1832670 - RNA, 19 nt, Artificial Sequence
  Description of Artificial Sequence: Synthetic oligonucleotide
  Antisense strand to SEQ ID NO: 1832669
agauccauacucauacagg

SEQ ID NO: 1832671 - RNA, 19 nt, Artificial Sequence
  Description of Artificial Sequence: Synthetic oligonucleotide
  Sense strand starting at position 59 of SEQ ID NO: 1563798
uauggaucuugagcaaaug

SEQ ID NO: 1832672 - RNA, 19 nt, Artificial Sequence
  Description of Artificial Sequence: Synthetic oligonucleotide
  Antisense strand to SEQ ID NO: 1832671
cauuugcucaagauccaua

SEQ ID NO: 1832673 - RNA, 19 nt, Artificial Sequence
  Description of Artificial Sequence: Synthetic oligonucleotide
  Sense strand starting at position 67 of SEQ ID NO: 1563798
uugagcaaaugauaaguuu

SEQ ID NO: 1832674 - RNA, 19 nt, Artificial Sequence
  Description of Artificial Sequence: Synthetic oligonucleotide
  Antisense strand to SEQ ID NO: 1832673
aaacuuaucauuugcucaa

SEQ ID NO: 1832675 - RNA, 19 nt, Artificial Sequence
  Description of Artificial Sequence: Synthetic oligonucleotide
  Sense strand starting at position 240 of SEQ ID NO: 1563798
guggugucaguggugcauu

SEQ ID NO: 1832676 - RNA, 19 nt, Artificial Sequence
  Description of Artificial Sequence: Synthetic oligonucleotide
  Antisense strand to SEQ ID NO: 1832675
aaugcaccacugacaccac

SEQ ID NO: 1832677 - RNA, 19 nt, Artificial Sequence
  Description of Artificial Sequence: Synthetic oligonucleotide
  Sense strand starting at position 243 of SEQ ID NO: 1563798
gugucaguggugcauuaga

SEQ ID NO: 1832678 - RNA, 19 nt, Artificial Sequence
  Description of Artificial Sequence: Synthetic oligonucleotide
  Antisense strand to SEQ ID NO: 1832677
ucuaaugcaccacugacac

SEQ ID NO: 1832679 - RNA, 19 nt, Artificial Sequence
  Description of Artificial Sequence: Synthetic oligonucleotide
  Sense strand starting at position 310 of SEQ ID NO: 1563798
ccugguuuaugagugcagu

SEQ ID NO: 1832680 - RNA, 19 nt, Artificial Sequence
  Description of Artificial Sequence: Synthetic oligonucleotide
  Antisense strand to SEQ ID NO: 1832679
acugcacucauaaaccagg

SEQ ID NO: 1832681 - RNA, 19 nt, Artificial Sequence
  Description of Artificial Sequence: Synthetic oligonucleotide
  Sense strand starting at position 311 of SEQ ID NO: 1563798
cugguuuaugagugcagua

SEQ ID NO: 1832682 - RNA, 19 nt, Artificial Sequence
  Description of Artificial Sequence: Synthetic oligonucleotide
  Antisense strand to SEQ ID NO: 1832681
uacugcacucauaaaccag

SEQ ID NO: 1832683 - RNA, 19 nt, Artificial Sequence
  Description of Artificial Sequence: Synthetic oligonucleotide
  Sense strand starting at position 313 of SEQ ID NO: 1563798
gguuuaugagugcaguauu

SEQ ID NO: 1832684 - RNA, 19 nt, Artificial Sequence
  Description of Artificial Sequence: Synthetic oligonucleotide
  Antisense strand to SEQ ID NO: 1832683
aauacugcacucauaaacc

SEQ ID NO: 1832685 - RNA, 19 nt, Artificial Sequence
  Description of Artificial Sequence: Synthetic oligonucleotide
  Sense strand starting at position 321 of SEQ ID NO: 1563798
agugcaguauuaccaacaa

SEQ ID NO: 1832686 - RNA, 19 nt, Artificial Sequence
  Description of Artificial Sequence: Synthetic oligonucleotide
  Antisense strand to SEQ ID NO: 1832685
uuguugguaauacugcacu

SEQ ID NO: 1832687 - RNA, 19 nt, Artificial Sequence
  Description of Artificial Sequence: Synthetic oligonucleotide
  Sense strand starting at position 432 of SEQ ID NO: 1563798
gggaaugacugaugacauu

SEQ ID NO: 1832688 - RNA, 19 nt, Artificial Sequence
  Description of Artificial Sequence: Synthetic oligonucleotide
  Antisense strand to SEQ ID NO: 1832687
aaugucaucagucauuccc

SEQ ID NO: 1832689 - RNA, 19 nt, Artificial Sequence
  Description of Artificial Sequence: Synthetic oligonucleotide
  Sense strand starting at position 452 of SEQ ID NO: 1563798
guaacaccuuugucuacaa

SEQ ID NO: 1832690 - RNA, 19 nt, Artificial Sequence
  Description of Artificial Sequence: Synthetic oligonucleotide
  Antisense strand to SEQ ID NO: 1832689
uuguagacaaagguguuac

SEQ ID NO: 1832691 - RNA, 19 nt, Artificial Sequence
  Description of Artificial Sequence: Synthetic oligonucleotide
  Sense strand starting at position 564 of SEQ ID NO: 1563798
ggacaagguuucugggaau

SEQ ID NO: 1832692 - RNA, 19 nt, Artificial Sequence
  Description of Artificial Sequence: Synthetic oligonucleotide
  Antisense strand to SEQ ID NO: 1832691
auucccagaaaccuugucc

SEQ ID NO: 1832693 - RNA, 19 nt, Artificial Sequence
  Description of Artificial Sequence: Synthetic oligonucleotide
  Sense strand starting at position 567 of SEQ ID NO: 1563798
caagguuucugggaauaag

SEQ ID NO: 1832694 - RNA, 19 nt, Artificial Sequence
  Description of Artificial Sequence: Synthetic oligonucleotide
  Antisense strand to SEQ ID NO: 1832693
cuuauucccagaaaccuug

SEQ ID NO: 1832695 - RNA, 19 nt, Artificial Sequence
  Description of Artificial Sequence: Synthetic oligonucleotide
  Sense strand starting at position 633 of SEQ ID NO: 1563798
uggacaggcuauuagagau

SEQ ID NO: 1832696 - RNA, 19 nt, Artificial Sequence
  Description of Artificial Sequence: Synthetic oligonucleotide
  Antisense strand to SEQ ID NO: 1832695
aucucuaauagccugucca

SEQ ID NO: 1832697 - RNA, 19 nt, Artificial Sequence
  Description of Artificial Sequence: Synthetic oligonucleotide
  Sense strand starting at position 736 of SEQ ID NO: 1563798
ugggcagucacugauaacu

SEQ ID NO: 1832698 - RNA, 19 nt, Artificial Sequence
  Description of Artificial Sequence: Synthetic oligonucleotide
  Antisense strand to SEQ ID NO: 1832697
aguuaucagugacugccca

SEQ ID NO: 1832699 - RNA, 19 nt, Artificial Sequence
  Description of Artificial Sequence: Synthetic oligonucleotide
  Sense strand starting at position 745 of SEQ ID NO: 1563798
acugauaacuggucagacu

SEQ ID NO: 1832700 - RNA, 19 nt, Artificial Sequence
  Description of Artificial Sequence: Synthetic oligonucleotide
  Antisense strand to SEQ ID NO: 1832699
agucugaccaguuaucagu

SEQ ID NO: 1832701 - RNA, 19 nt, Artificial Sequence
  Description of Artificial Sequence: Synthetic oligonucleotide
  Sense strand starting at position 754 of SEQ ID NO: 1563798
uggucagacuuugaagcuu

SEQ ID NO: 1832702 - RNA, 19 nt, Artificial Sequence
  Description of Artificial Sequence: Synthetic oligonucleotide
  Antisense strand to SEQ ID NO: 1832701
aagcuucaaagucugacca

SEQ ID NO: 1832703 - RNA, 19 nt, Artificial Sequence
  Description of Artificial Sequence: Synthetic oligonucleotide
  Sense strand starting at position 814 of SEQ ID NO: 1563798
gugugcaguacuuggaaua

SEQ ID NO: 1832704 - RNA, 19 nt, Artificial Sequence
  Description of Artificial Sequence: Synthetic oligonucleotide
  Antisense strand to SEQ ID NO: 1832703
uauuccaaguacugcacac

SEQ ID NO: 1832705 - RNA, 19 nt, Artificial Sequence
  Description of Artificial Sequence: Synthetic oligonucleotide
  Sense strand starting at position 815 of SEQ ID NO: 1563798
ugugcaguacuuggaauaa

SEQ ID NO: 1832706 - RNA, 19 nt, Artificial Sequence
  Description of Artificial Sequence: Synthetic oligonucleotide
  Antisense strand to SEQ ID NO: 1832705
uuauuccaaguacugcaca

SEQ ID NO: 1832707 - RNA, 19 nt, Artificial Sequence
  Description of Artificial Sequence: Synthetic oligonucleotide
  Sense strand starting at position 874 of SEQ ID NO: 1563798
uuccucuuagaaggguaaa

SEQ ID NO: 1832708 - RNA, 19 nt, Artificial Sequence
  Description of Artificial Sequence: Synthetic oligonucleotide
  Antisense strand to SEQ ID NO: 1832707
uuuacccuucuaagaggaa

SEQ ID NO: 1832709 - RNA, 19 nt, Artificial Sequence
  Description of Artificial Sequence: Synthetic oligonucleotide
  Sense strand starting at position 1034 of SEQ ID NO: 1563798
agguauggaaucugccuua

SEQ ID NO: 1832710 - RNA, 19 nt, Artificial Sequence
  Description of Artificial Sequence: Synthetic oligonucleotide
  Antisense strand to SEQ ID NO: 1832709
uaaggcagauuccauaccu

SEQ ID NO: 1832711 - RNA, 19 nt, Artificial Sequence
  Description of Artificial Sequence: Synthetic oligonucleotide
  Sense strand starting at position 1037 of SEQ ID NO: 1563798
uauggaaucugccuuagag

SEQ ID NO: 1832712 - RNA, 19 nt, Artificial Sequence
  Description of Artificial Sequence: Synthetic oligonucleotide
  Antisense strand to SEQ ID NO: 1832711
cucuaaggcagauuccaua

SEQ ID NO: 1832713 - RNA, 19 nt, Artificial Sequence
  Description of Artificial Sequence: Synthetic oligonucleotide
  Sense strand starting at position 1047 of SEQ ID NO: 1563798
gccuuagagaucuagaguu

SEQ ID NO: 1832714 - RNA, 19 nt, Artificial Sequence
  Description of Artificial Sequence: Synthetic oligonucleotide
  Antisense strand to SEQ ID NO: 1832713
aacucuagaucucuaaggc

SEQ ID NO: 1832715 - RNA, 19 nt, Artificial Sequence
  Description of Artificial Sequence: Synthetic oligonucleotide
  Sense strand starting at position 1122 of SEQ ID NO: 1563798
cuagcuuccucuguggcaa

SEQ ID NO: 1832716 - RNA, 19 nt, Artificial Sequence
  Description of Artificial Sequence: Synthetic oligonucleotide
  Antisense strand to SEQ ID NO: 1832715
uugccacagaggaagcuag

SEQ ID NO: 1832717 - RNA, 19 nt, Artificial Sequence
  Description of Artificial Sequence: Synthetic oligonucleotide
  Sense strand starting at position 2031 of SEQ ID NO: 1563798
ucaguuaccucagcgguua

SEQ ID NO: 1832718 - RNA, 19 nt, Artificial Sequence
  Description of Artificial Sequence: Synthetic oligonucleotide
  Antisense strand to SEQ ID NO: 1832717
uaaccgcugagguaacuga

SEQ ID NO: 1832719 - RNA, 19 nt, Artificial Sequence
  Description of Artificial Sequence: Synthetic oligonucleotide
  Sense strand starting at position 2118 of SEQ ID NO: 1563798
gugcucuccugaccuaauu

SEQ ID NO: 1832720 - RNA, 19 nt, Artificial Sequence
  Description of Artificial Sequence: Synthetic oligonucleotide
  Antisense strand to SEQ ID NO: 1832719
aauuaggucaggagagcac

SEQ ID NO: 1832721 - RNA, 19 nt, Artificial Sequence
  Description of Artificial Sequence: Synthetic oligonucleotide
  Sense strand starting at position 2128 of SEQ ID NO: 1563798
gaccuaauuccaugccgga

SEQ ID NO: 1832722 - RNA, 19 nt, Artificial Sequence
  Description of Artificial Sequence: Synthetic oligonucleotide
  Antisense strand to SEQ ID NO: 1832721
uccggcauggaauuagguc

SEQ ID NO: 1832723 - RNA, 19 nt, Artificial Sequence
  Description of Artificial Sequence: Synthetic oligonucleotide
  Sense strand starting at position 3719 of SEQ ID NO: 1563798
ugucuugucucagcaaagu

SEQ ID NO: 1832724 - RNA, 19 nt, Artificial Sequence
  Description of Artificial Sequence: Synthetic oligonucleotide
  Antisense strand to SEQ ID NO: 1832723
acuuugcugagacaagaca

SEQ ID NO: 1832725 - RNA, 19 nt, Artificial Sequence
  Description of Artificial Sequence: Synthetic oligonucleotide
  Sense strand starting at position 3725 of SEQ ID NO: 1563798
gucucagcaaaguguuaua

SEQ ID NO: 1832726 - RNA, 19 nt, Artificial Sequence
  Description of Artificial Sequence: Synthetic oligonucleotide
  Antisense strand to SEQ ID NO: 1832725
uauaacacuuugcugagac

SEQ ID NO: 1832727 - RNA, 19 nt, Artificial Sequence
  Description of Artificial Sequence: Synthetic oligonucleotide
  Sense strand starting at position 3728 of SEQ ID NO: 1563798
ucagcaaaguguuauauaa

SEQ ID NO: 1832728 - RNA, 19 nt, Artificial Sequence
  Description of Artificial Sequence: Synthetic oligonucleotide
  Antisense strand to SEQ ID NO: 1832727
uuauauaacacuuugcuga

SEQ ID NO: 1832729 - RNA, 19 nt, Artificial Sequence
  Description of Artificial Sequence: Synthetic oligonucleotide
  Sense strand starting at position 3875 of SEQ ID NO: 1563798
gagguuguuuguguuuaca

SEQ ID NO: 1832730 - RNA, 19 nt, Artificial Sequence
  Description of Artificial Sequence: Synthetic oligonucleotide
  Antisense strand to SEQ ID NO: 1832729
uguaaacacaaacaaccuc

SEQ ID NO: 1832731 - RNA, 19 nt, Artificial Sequence
  Description of Artificial Sequence: Synthetic oligonucleotide
  Sense strand starting at position 3877 of SEQ ID NO: 1563798
gguuguuuguguuuacacu

SEQ ID NO: 1832732 - RNA, 19 nt, Artificial Sequence
  Description of Artificial Sequence: Synthetic oligonucleotide
  Antisense strand to SEQ ID NO: 1832731
aguguaaacacaaacaacc

SEQ ID NO: 1832733 - RNA, 19 nt, Artificial Sequence
  Description of Artificial Sequence: Synthetic oligonucleotide
  Sense strand starting at position 3878 of SEQ ID NO: 1563798
guuguuuguguuuacacuu

SEQ ID NO: 1832734 - RNA, 19 nt, Artificial Sequence
  Description of Artificial Sequence: Synthetic oligonucleotide
  Antisense strand to SEQ ID NO: 1832733
aaguguaaacacaaacaac

SEQ ID NO: 1832735 - RNA, 19 nt, Artificial Sequence
  Description of Artificial Sequence: Synthetic oligonucleotide
  Sense strand starting at position 3885 of SEQ ID NO: 1563798
guguuuacacuucgccuua

SEQ ID NO: 1832736 - RNA, 19 nt, Artificial Sequence
  Description of Artificial Sequence: Synthetic oligonucleotide
  Antisense strand to SEQ ID NO: 1832735
uaaggcgaaguguaaacac

SEQ ID NO: 1832737 - RNA, 19 nt, Artificial Sequence
  Description of Artificial Sequence: Synthetic oligonucleotide
  Sense strand starting at position 3887 of SEQ ID NO: 1563798
guuuacacuucgccuuauu

SEQ ID NO: 1832738 - RNA, 19 nt, Artificial Sequence
  Description of Artificial Sequence: Synthetic oligonucleotide
  Antisense strand to SEQ ID NO: 1832737
aauaaggcgaaguguaaac

SEQ ID NO: 1832739 - RNA, 19 nt, Artificial Sequence
  Description of Artificial Sequence: Synthetic oligonucleotide
  Sense strand starting at position 3951 of SEQ ID NO: 1563798
gggagaaacucagugucuu

SEQ ID NO: 1832740 - RNA, 19 nt, Artificial Sequence
  Description of Artificial Sequence: Synthetic oligonucleotide
  Antisense strand to SEQ ID NO: 1832739
aagacacugaguuucuccc

SEQ ID NO: 1832741 - RNA, 19 nt, Artificial Sequence
  Description of Artificial Sequence: Synthetic oligonucleotide
  Sense strand starting at position 3952 of SEQ ID NO: 1563798
ggagaaacucagugucuuc

SEQ ID NO: 1832742 - RNA, 19 nt, Artificial Sequence
  Description of Artificial Sequence: Synthetic oligonucleotide
  Antisense strand to SEQ ID NO: 1832741
gaagacacugaguuucucc

SEQ ID NO: 1832743 - RNA, 19 nt, Artificial Sequence
  Description of Artificial Sequence: Synthetic oligonucleotide
  Sense strand starting at position 281 of SEQ ID NO: 1563799
cugauuauuuauccgcuua

SEQ ID NO: 1832744 - RNA, 19 nt, Artificial Sequence
  Description of Artificial Sequence: Synthetic oligonucleotide
  Antisense strand to SEQ ID NO: 1832743
uaagcggauaaauaaucag

SEQ ID NO: 1832745 - RNA, 19 nt, Artificial Sequence
  Description of Artificial Sequence: Synthetic oligonucleotide
  Sense strand starting at position 413 of SEQ ID NO: 1563799
ggcagacuauaugugauga

SEQ ID NO: 1832746 - RNA, 19 nt, Artificial Sequence
  Description of Artificial Sequence: Synthetic oligonucleotide
  Antisense strand to SEQ ID NO: 1832745
ucaucacauauagucugcc

SEQ ID NO: 1832747 - RNA, 19 nt, Artificial Sequence
  Description of Artificial Sequence: Synthetic oligonucleotide
  Sense strand starting at position 460 of SEQ ID NO: 1563799
caauuaggcgcugaacaaa

SEQ ID NO: 1832748 - RNA, 19 nt, Artificial Sequence
  Description of Artificial Sequence: Synthetic oligonucleotide
  Antisense strand to SEQ ID NO: 1832747
uuuguucagcgccuaauug

SEQ ID NO: 1832749 - RNA, 19 nt, Artificial Sequence
  Description of Artificial Sequence: Synthetic oligonucleotide
  Sense strand starting at position 615 of SEQ ID NO: 1563799
cugaaagacuggccugauu

SEQ ID NO: 1832750 - RNA, 19 nt, Artificial Sequence
  Description of Artificial Sequence: Synthetic oligonucleotide
  Antisense strand to SEQ ID NO: 1832749
aaucaggccagucuuucag

SEQ ID NO: 1832751 - RNA, 19 nt, Artificial Sequence
  Description of Artificial Sequence: Synthetic oligonucleotide
  Sense strand starting at position 659 of SEQ ID NO: 1563799
cucugauuggcaggagaga

SEQ ID NO: 1832752 - RNA, 19 nt, Artificial Sequence
  Description of Artificial Sequence: Synthetic oligonucleotide
  Antisense strand to SEQ ID NO: 1832751
ucucuccugccaaucagag

SEQ ID NO: 1832753 - RNA, 19 nt, Artificial Sequence
  Description of Artificial Sequence: Synthetic oligonucleotide
  Sense strand starting at position 700 of SEQ ID NO: 1563799
aguuuaucaggugaacuca

SEQ ID NO: 1832754 - RNA, 19 nt, Artificial Sequence
  Description of Artificial Sequence: Synthetic oligonucleotide
  Antisense strand to SEQ ID NO: 1832753
ugaguucaccugauaaacu

SEQ ID NO: 1832755 - RNA, 19 nt, Artificial Sequence
  Description of Artificial Sequence: Synthetic oligonucleotide
  Sense strand starting at position 773 of SEQ ID NO: 1563799
aucuauguugaugggauau

SEQ ID NO: 1832756 - RNA, 19 nt, Artificial Sequence
  Description of Artificial Sequence: Synthetic oligonucleotide
  Antisense strand to SEQ ID NO: 1832755
auaucccaucaacauagau

SEQ ID NO: 1832757 - RNA, 19 nt, Artificial Sequence
  Description of Artificial Sequence: Synthetic oligonucleotide
  Sense strand starting at position 779 of SEQ ID NO: 1563799
guugaugggauaugauguu

SEQ ID NO: 1832758 - RNA, 19 nt, Artificial Sequence
  Description of Artificial Sequence: Synthetic oligonucleotide
  Antisense strand to SEQ ID NO: 1832757
aacaucauaucccaucaac

SEQ ID NO: 1832759 - RNA, 19 nt, Artificial Sequence
  Description of Artificial Sequence: Synthetic oligonucleotide
  Sense strand starting at position 786 of SEQ ID NO: 1563799
ggauaugauguugggaauu

SEQ ID NO: 1832760 - RNA, 19 nt, Artificial Sequence
  Description of Artificial Sequence: Synthetic oligonucleotide
  Antisense strand to SEQ ID NO: 1832759
aauucccaacaucauaucc

SEQ ID NO: 1832761 - RNA, 19 nt, Artificial Sequence
  Description of Artificial Sequence: Synthetic oligonucleotide
  Sense strand starting at position 847 of SEQ ID NO: 1563799
uggaucucagguuauuauu

SEQ ID NO: 1832762 - RNA, 19 nt, Artificial Sequence
  Description of Artificial Sequence: Synthetic oligonucleotide
  Antisense strand to SEQ ID NO: 1832761
aauaauaaccugagaucca

SEQ ID NO: 1832763 - RNA, 19 nt, Artificial Sequence
  Description of Artificial Sequence: Synthetic oligonucleotide
  Sense strand starting at position 958 of SEQ ID NO: 1563799
cuuugaauuugucuggucu

SEQ ID NO: 1832764 - RNA, 19 nt, Artificial Sequence
  Description of Artificial Sequence: Synthetic oligonucleotide
  Antisense strand to SEQ ID NO: 1832763
agaccagacaaauucaaag

SEQ ID NO: 1832765 - RNA, 19 nt, Artificial Sequence
  Description of Artificial Sequence: Synthetic oligonucleotide
  Sense strand starting at position 959 of SEQ ID NO: 1563799
uuugaauuugucuggucuu

SEQ ID NO: 1832766 - RNA, 19 nt, Artificial Sequence
  Description of Artificial Sequence: Synthetic oligonucleotide
  Antisense strand to SEQ ID NO: 1832765
aagaccagacaaauucaaa

SEQ ID NO: 1832767 - RNA, 19 nt, Artificial Sequence
  Description of Artificial Sequence: Synthetic oligonucleotide
  Sense strand starting at position 1279 of SEQ ID NO: 1563799
agacaugucauguauaguu

SEQ ID NO: 1832768 - RNA, 19 nt, Artificial Sequence
  Description of Artificial Sequence: Synthetic oligonucleotide
  Antisense strand to SEQ ID NO: 1832767
aacuauacaugacaugucu

SEQ ID NO: 1832769 - RNA, 19 nt, Artificial Sequence
  Description of Artificial Sequence: Synthetic oligonucleotide
  Sense strand starting at position 1367 of SEQ ID NO: 1563799
aaagcuagucgacauacuu

SEQ ID NO: 1832770 - RNA, 19 nt, Artificial Sequence
  Description of Artificial Sequence: Synthetic oligonucleotide
  Antisense strand to SEQ ID NO: 1832769
aaguaugucgacuagcuuu

SEQ ID NO: 1832771 - RNA, 19 nt, Artificial Sequence
  Description of Artificial Sequence: Synthetic oligonucleotide
  Sense strand starting at position 1426 of SEQ ID NO: 1563799
gaacaacuguguuuacaug

SEQ ID NO: 1832772 - RNA, 19 nt, Artificial Sequence
  Description of Artificial Sequence: Synthetic oligonucleotide
  Antisense strand to SEQ ID NO: 1832771
cauguaaacacaguuguuc

SEQ ID NO: 1832773 - RNA, 19 nt, Artificial Sequence
  Description of Artificial Sequence: Synthetic oligonucleotide
  Sense strand starting at position 1432 of SEQ ID NO: 1563799
cuguguuuacaugaaacag

SEQ ID NO: 1832774 - RNA, 19 nt, Artificial Sequence
  Description of Artificial Sequence: Synthetic oligonucleotide
  Antisense strand to SEQ ID NO: 1832773
cuguuucauguaaacacag

SEQ ID NO: 1832775 - RNA, 19 nt, Artificial Sequence
  Description of Artificial Sequence: Synthetic oligonucleotide
  Sense strand starting at position 2060 of SEQ ID NO: 1563799
uggcuaaggaggcauuauu

SEQ ID NO: 1832776 - RNA, 19 nt, Artificial Sequence
  Description of Artificial Sequence: Synthetic oligonucleotide
  Antisense strand to SEQ ID NO: 1832775
aauaaugccuccuuagcca

SEQ ID NO: 1832777 - RNA, 19 nt, Artificial Sequence
  Description of Artificial Sequence: Synthetic oligonucleotide
  Sense strand starting at position 2130 of SEQ ID NO: 1563799
cagucacuggacugaauaa

SEQ ID NO: 1832778 - RNA, 19 nt, Artificial Sequence
  Description of Artificial Sequence: Synthetic oligonucleotide
  Antisense strand to SEQ ID NO: 1832777
uuauucaguccagugacug

SEQ ID NO: 1832779 - RNA, 19 nt, Artificial Sequence
  Description of Artificial Sequence: Synthetic oligonucleotide
  Sense strand starting at position 2232 of SEQ ID NO: 1563799
agugucuuuccugaccaau

SEQ ID NO: 1832780 - RNA, 19 nt, Artificial Sequence
  Description of Artificial Sequence: Synthetic oligonucleotide
  Antisense strand to SEQ ID NO: 1832779
auuggucaggaaagacacu

SEQ ID NO: 1832781 - RNA, 19 nt, Artificial Sequence
  Description of Artificial Sequence: Synthetic oligonucleotide
  Sense strand starting at position 2515 of SEQ ID NO: 1563799
ucacuuaagccagauaagu

SEQ ID NO: 1832782 - RNA, 19 nt, Artificial Sequence
  Description of Artificial Sequence: Synthetic oligonucleotide
  Antisense strand to SEQ ID NO: 1832781
acuuaucuggcuuaaguga

SEQ ID NO: 1832783 - RNA, 19 nt, Artificial Sequence
  Description of Artificial Sequence: Synthetic oligonucleotide
  Sense strand starting at position 2531 of SEQ ID NO: 1563799
agugcccucagauagagau

SEQ ID NO: 1832784 - RNA, 19 nt, Artificial Sequence
  Description of Artificial Sequence: Synthetic oligonucleotide
  Antisense strand to SEQ ID NO: 1832783
aucucuaucugagggcacu

SEQ ID NO: 1832785 - RNA, 19 nt, Artificial Sequence
  Description of Artificial Sequence: Synthetic oligonucleotide
  Sense strand starting at position 2722 of SEQ ID NO: 1563799
aauagagaguuaucugcaa

SEQ ID NO: 1832786 - RNA, 19 nt, Artificial Sequence
  Description of Artificial Sequence: Synthetic oligonucleotide
  Antisense strand to SEQ ID NO: 1832785
uugcagauaacucucuauu

SEQ ID NO: 1832787 - RNA, 19 nt, Artificial Sequence
  Description of Artificial Sequence: Synthetic oligonucleotide
  Sense strand starting at position 2726 of SEQ ID NO: 1563799
gagaguuaucugcaacugu

SEQ ID NO: 1832788 - RNA, 19 nt, Artificial Sequence
  Description of Artificial Sequence: Synthetic oligonucleotide
  Antisense strand to SEQ ID NO: 1832787
acaguugcagauaacucuc

SEQ ID NO: 1832789 - RNA, 19 nt, Artificial Sequence
  Description of Artificial Sequence: Synthetic oligonucleotide
  Sense strand starting at position 3008 of SEQ ID NO: 1563799
ccuccucuggaaugaaauu

SEQ ID NO: 1832790 - RNA, 19 nt, Artificial Sequence
  Description of Artificial Sequence: Synthetic oligonucleotide
  Antisense strand to SEQ ID NO: 1832789
aauuucauuccagaggagg

SEQ ID NO: 1832791 - RNA, 19 nt, Artificial Sequence
  Description of Artificial Sequence: Synthetic oligonucleotide
  Sense strand starting at position 3021 of SEQ ID NO: 1563799
gaaauucucugcccaggga

SEQ ID NO: 1832792 - RNA, 19 nt, Artificial Sequence
  Description of Artificial Sequence: Synthetic oligonucleotide
  Antisense strand to SEQ ID NO: 1832791
ucccugggcagagaauuuc

SEQ ID NO: 1832793 - RNA, 19 nt, Artificial Sequence
  Description of Artificial Sequence: Synthetic oligonucleotide
  Sense strand starting at position 3024 of SEQ ID NO: 1563799
auucucugcccagggauaa

SEQ ID NO: 1832794 - RNA, 19 nt, Artificial Sequence
  Description of Artificial Sequence: Synthetic oligonucleotide
  Antisense strand to SEQ ID NO: 1832793
uuaucccugggcagagaau

SEQ ID NO: 1832795 - RNA, 19 nt, Artificial Sequence
  Description of Artificial Sequence: Synthetic oligonucleotide
  Sense strand starting at position 3359 of SEQ ID NO: 1563799
augucuauuucugucaguu

SEQ ID NO: 1832796 - RNA, 19 nt, Artificial Sequence
  Description of Artificial Sequence: Synthetic oligonucleotide
  Antisense strand to SEQ ID NO: 1832795
aacugacagaaauagacau

SEQ ID NO: 1832797 - RNA, 19 nt, Artificial Sequence
  Description of Artificial Sequence: Synthetic oligonucleotide
  Sense strand starting at position 3430 of SEQ ID NO: 1563799
accaguacucggugcauuu

SEQ ID NO: 1832798 - RNA, 19 nt, Artificial Sequence
  Description of Artificial Sequence: Synthetic oligonucleotide
  Antisense strand to SEQ ID NO: 1832797
aaaugcaccgaguacuggu

SEQ ID NO: 1832799 - RNA, 19 nt, Artificial Sequence
  Description of Artificial Sequence: Synthetic oligonucleotide
  Sense strand starting at position 3441 of SEQ ID NO: 1563799
gugcauuugucaguccaca

SEQ ID NO: 1832800 - RNA, 19 nt, Artificial Sequence
  Description of Artificial Sequence: Synthetic oligonucleotide
  Antisense strand to SEQ ID NO: 1832799
uguggacugacaaaugcac

SEQ ID NO: 1832801 - RNA, 19 nt, Artificial Sequence
  Description of Artificial Sequence: Synthetic oligonucleotide
  Sense strand starting at position 3570 of SEQ ID NO: 1563799
ggcaguuauauggagauug

SEQ ID NO: 1832802 - RNA, 19 nt, Artificial Sequence
  Description of Artificial Sequence: Synthetic oligonucleotide
  Antisense strand to SEQ ID NO: 1832801
caaucuccauauaacugcc

SEQ ID NO: 1832803 - RNA, 19 nt, Artificial Sequence
  Description of Artificial Sequence: Synthetic oligonucleotide
  Sense strand starting at position 3636 of SEQ ID NO: 1563799
ccaggaggguuucuuagaa

SEQ ID NO: 1832804 - RNA, 19 nt, Artificial Sequence
  Description of Artificial Sequence: Synthetic oligonucleotide
  Antisense strand to SEQ ID NO: 1832803
uucuaagaaacccuccugg

SEQ ID NO: 1832805 - RNA, 19 nt, Artificial Sequence
  Description of Artificial Sequence: Synthetic oligonucleotide
  Sense strand starting at position 3659 of SEQ ID NO: 1563799
ugggauuugugccacauuu

SEQ ID NO: 1832806 - RNA, 19 nt, Artificial Sequence
  Description of Artificial Sequence: Synthetic oligonucleotide
  Antisense strand to SEQ ID NO: 1832805
aaauguggcacaaauccca

SEQ ID NO: 1832807 - RNA, 19 nt, Artificial Sequence
  Description of Artificial Sequence: Synthetic oligonucleotide
  Sense strand starting at position 3735 of SEQ ID NO: 1563799
ggcagagcaaagugaucaa

SEQ ID NO: 1832808 - RNA, 19 nt, Artificial Sequence
  Description of Artificial Sequence: Synthetic oligonucleotide
  Antisense strand to SEQ ID NO: 1832807
uugaucacuuugcucugcc

SEQ ID NO: 1832809 - RNA, 19 nt, Artificial Sequence
  Description of Artificial Sequence: Synthetic oligonucleotide
  Sense strand starting at position 3738 of SEQ ID NO: 1563799
agagcaaagugaucaaaug

SEQ ID NO: 1832810 - RNA, 19 nt, Artificial Sequence
  Description of Artificial Sequence: Synthetic oligonucleotide
  Antisense strand to SEQ ID NO: 1832809
cauuugaucacuuugcucu

SEQ ID NO: 1832811 - RNA, 19 nt, Artificial Sequence
  Description of Artificial Sequence: Synthetic oligonucleotide
  Sense strand starting at position 3759 of SEQ ID NO: 1563799
gaagauguaaagugagagu

SEQ ID NO: 1832812 - RNA, 19 nt, Artificial Sequence
  Description of Artificial Sequence: Synthetic oligonucleotide
  Antisense strand to SEQ ID NO: 1832811
acucucacuuuacaucuuc

SEQ ID NO: 1832813 - RNA, 19 nt, Artificial Sequence
  Description of Artificial Sequence: Synthetic oligonucleotide
  Sense strand starting at position 3786 of SEQ ID NO: 1563799
aggagaccaguuuguaaag

SEQ ID NO: 1832814 - RNA, 19 nt, Artificial Sequence
  Description of Artificial Sequence: Synthetic oligonucleotide
  Antisense strand to SEQ ID NO: 1832813
cuuuacaaacuggucuccu

SEQ ID NO: 1832815 - RNA, 19 nt, Artificial Sequence
  Description of Artificial Sequence: Synthetic oligonucleotide
  Sense strand starting at position 3858 of SEQ ID NO: 1563799
cucaaugcacuauagugau

SEQ ID NO: 1832816 - RNA, 19 nt, Artificial Sequence
  Description of Artificial Sequence: Synthetic oligonucleotide
  Antisense strand to SEQ ID NO: 1832815
aucacuauagugcauugag

SEQ ID NO: 1832817 - RNA, 19 nt, Artificial Sequence
  Description of Artificial Sequence: Synthetic oligonucleotide
  Sense strand starting at position 3864 of SEQ ID NO: 1563799
gcacuauagugauugaagg

SEQ ID NO: 1832818 - RNA, 19 nt, Artificial Sequence
  Description of Artificial Sequence: Synthetic oligonucleotide
  Antisense strand to SEQ ID NO: 1832817
ccuucaaucacuauagugc

SEQ ID NO: 1832819 - RNA, 19 nt, Artificial Sequence
  Description of Artificial Sequence: Synthetic oligonucleotide
  Sense strand starting at position 3880 of SEQ ID NO: 1563799
aggguuaaccuauagucau

SEQ ID NO: 1832820 - RNA, 19 nt, Artificial Sequence
  Description of Artificial Sequence: Synthetic oligonucleotide
  Antisense strand to SEQ ID NO: 1832819
augacuauagguuaacccu

SEQ ID NO: 1832821 - RNA, 19 nt, Artificial Sequence
  Description of Artificial Sequence: Synthetic oligonucleotide
  Sense strand starting at position 3909 of SEQ ID NO: 1563799
ugucuauaugaucagcuca

SEQ ID NO: 1832822 - RNA, 19 nt, Artificial Sequence
  Description of Artificial Sequence: Synthetic oligonucleotide
  Antisense strand to SEQ ID NO: 1832821
ugagcugaucauauagaca

SEQ ID NO: 1832823 - RNA, 19 nt, Artificial Sequence
  Description of Artificial Sequence: Synthetic oligonucleotide
  Sense strand starting at position 15 of SEQ ID NO: 1563800
aguugaccuaguuggaaga

SEQ ID NO: 1832824 - RNA, 19 nt, Artificial Sequence
  Description of Artificial Sequence: Synthetic oligonucleotide
  Antisense strand to SEQ ID NO: 1832823
ucuuccaacuaggucaacu

SEQ ID NO: 1832825 - RNA, 19 nt, Artificial Sequence
  Description of Artificial Sequence: Synthetic oligonucleotide
  Sense strand starting at position 143 of SEQ ID NO: 1563800
guagaaggauccuuuauag

SEQ ID NO: 1832826 - RNA, 19 nt, Artificial Sequence
  Description of Artificial Sequence: Synthetic oligonucleotide
  Antisense strand to SEQ ID NO: 1832825
cuauaaaggauccuucuac

SEQ ID NO: 1832827 - RNA, 19 nt, Artificial Sequence
  Description of Artificial Sequence: Synthetic oligonucleotide
  Sense strand starting at position 149 of SEQ ID NO: 1563800
ggauccuuuauagguuaga

SEQ ID NO: 1832828 - RNA, 19 nt, Artificial Sequence
  Description of Artificial Sequence: Synthetic oligonucleotide
  Antisense strand to SEQ ID NO: 1832827
ucuaaccuauaaaggaucc

SEQ ID NO: 1832829 - RNA, 19 nt, Artificial Sequence
  Description of Artificial Sequence: Synthetic oligonucleotide
  Sense strand starting at position 150 of SEQ ID NO: 1563800
gauccuuuauagguuagaa

SEQ ID NO: 1832830 - RNA, 19 nt, Artificial Sequence
  Description of Artificial Sequence: Synthetic oligonucleotide
  Antisense strand to SEQ ID NO: 1832829
uucuaaccuauaaaggauc

SEQ ID NO: 1832831 - RNA, 19 nt, Artificial Sequence
  Description of Artificial Sequence: Synthetic oligonucleotide
  Sense strand starting at position 226 of SEQ ID NO: 1563800
aaugaugcagucugaaacu

SEQ ID NO: 1832832 - RNA, 19 nt, Artificial Sequence
  Description of Artificial Sequence: Synthetic oligonucleotide
  Antisense strand to SEQ ID NO: 1832831
aguuucagacugcaucauu

SEQ ID NO: 1832833 - RNA, 19 nt, Artificial Sequence
  Description of Artificial Sequence: Synthetic oligonucleotide
  Sense strand starting at position 250 of SEQ ID NO: 1563800
acuugaagccuuugaagaa

SEQ ID NO: 1832834 - RNA, 19 nt, Artificial Sequence
  Description of Artificial Sequence: Synthetic oligonucleotide
  Antisense strand to SEQ ID NO: 1832833
uucuucaaaggcuucaagu

SEQ ID NO: 1832835 - RNA, 19 nt, Artificial Sequence
  Description of Artificial Sequence: Synthetic oligonucleotide
  Sense strand starting at position 292 of SEQ ID NO: 1563800
gcuaacagucaugaauaug

SEQ ID NO: 1832836 - RNA, 19 nt, Artificial Sequence
  Description of Artificial Sequence: Synthetic oligonucleotide
  Antisense strand to SEQ ID NO: 1832835
cauauucaugacuguuagc

SEQ ID NO: 1832837 - RNA, 19 nt, Artificial Sequence
  Description of Artificial Sequence: Synthetic oligonucleotide
  Sense strand starting at position 298 of SEQ ID NO: 1563800
agucaugaauaugugaaca

SEQ ID NO: 1832838 - RNA, 19 nt, Artificial Sequence
  Description of Artificial Sequence: Synthetic oligonucleotide
  Antisense strand to SEQ ID NO: 1832837
uguucacauauucaugacu

SEQ ID NO: 1832839 - RNA, 19 nt, Artificial Sequence
  Description of Artificial Sequence: Synthetic oligonucleotide
  Sense strand starting at position 324 of SEQ ID NO: 1563800
uaggaaaucuguucugagu

SEQ ID NO: 1832840 - RNA, 19 nt, Artificial Sequence
  Description of Artificial Sequence: Synthetic oligonucleotide
  Antisense strand to SEQ ID NO: 1832839
acucagaacagauuuccua

SEQ ID NO: 1832841 - RNA, 19 nt, Artificial Sequence
  Description of Artificial Sequence: Synthetic oligonucleotide
  Sense strand starting at position 380 of SEQ ID NO: 1563800
aaaucaguggucgauuaca

SEQ ID NO: 1832842 - RNA, 19 nt, Artificial Sequence
  Description of Artificial Sequence: Synthetic oligonucleotide
  Antisense strand to SEQ ID NO: 1832841
uguaaucgaccacugauuu

SEQ ID NO: 1832843 - RNA, 19 nt, Artificial Sequence
  Description of Artificial Sequence: Synthetic oligonucleotide
  Sense strand starting at position 568 of SEQ ID NO: 1563800
uccucauuaugggugaauu

SEQ ID NO: 1832844 - RNA, 19 nt, Artificial Sequence
  Description of Artificial Sequence: Synthetic oligonucleotide
  Antisense strand to SEQ ID NO: 1832843
aauucacccauaaugagga

SEQ ID NO: 1832845 - RNA, 19 nt, Artificial Sequence
  Description of Artificial Sequence: Synthetic oligonucleotide
  Sense strand starting at position 744 of SEQ ID NO: 1563800
ccagcauugguuuauaaga

SEQ ID NO: 1832846 - RNA, 19 nt, Artificial Sequence
  Description of Artificial Sequence: Synthetic oligonucleotide
  Antisense strand to SEQ ID NO: 1832845
ucuuauaaaccaaugcugg

SEQ ID NO: 1832847 - RNA, 19 nt, Artificial Sequence
  Description of Artificial Sequence: Synthetic oligonucleotide
  Sense strand starting at position 995 of SEQ ID NO: 1563800
acauguaagugauugauga

SEQ ID NO: 1832848 - RNA, 19 nt, Artificial Sequence
  Description of Artificial Sequence: Synthetic oligonucleotide
  Antisense strand to SEQ ID NO: 1832847
ucaucaaucacuuacaugu

SEQ ID NO: 1832849 - RNA, 19 nt, Artificial Sequence
  Description of Artificial Sequence: Synthetic oligonucleotide
  Sense strand starting at position 996 of SEQ ID NO: 1563800
cauguaagugauugaugau

SEQ ID NO: 1832850 - RNA, 19 nt, Artificial Sequence
  Description of Artificial Sequence: Synthetic oligonucleotide
  Antisense strand to SEQ ID NO: 1832849
aucaucaaucacuuacaug

SEQ ID NO: 1832851 - RNA, 19 nt, Artificial Sequence
  Description of Artificial Sequence: Synthetic oligonucleotide
  Sense strand starting at position 1089 of SEQ ID NO: 1563800
ucuuuaaaggcauacguga

SEQ ID NO: 1832852 - RNA, 19 nt, Artificial Sequence
  Description of Artificial Sequence: Synthetic oligonucleotide
  Antisense strand to SEQ ID NO: 1832851
ucacguaugccuuuaaaga

SEQ ID NO: 1832853 - RNA, 19 nt, Artificial Sequence
  Description of Artificial Sequence: Synthetic oligonucleotide
  Sense strand starting at position 1121 of SEQ ID NO: 1563800
aagaauaucguaggaugau

SEQ ID NO: 1832854 - RNA, 19 nt, Artificial Sequence
  Description of Artificial Sequence: Synthetic oligonucleotide
  Antisense strand to SEQ ID NO: 1832853
aucauccuacgauauucuu

SEQ ID NO: 1832855 - RNA, 19 nt, Artificial Sequence
  Description of Artificial Sequence: Synthetic oligonucleotide
  Sense strand starting at position 1124 of SEQ ID NO: 1563800
aauaucguaggaugauuaa

SEQ ID NO: 1832856 - RNA, 19 nt, Artificial Sequence
  Description of Artificial Sequence: Synthetic oligonucleotide
  Antisense strand to SEQ ID NO: 1832855
uuaaucauccuacgauauu

SEQ ID NO: 1832857 - RNA, 19 nt, Artificial Sequence
  Description of Artificial Sequence: Synthetic oligonucleotide
  Sense strand starting at position 1209 of SEQ ID NO: 1563800
cacguaugccuuuaaggaa

SEQ ID NO: 1832858 - RNA, 19 nt, Artificial Sequence
  Description of Artificial Sequence: Synthetic oligonucleotide
  Antisense strand to SEQ ID NO: 1832857
uuccuuaaaggcauacgug

SEQ ID NO: 1832859 - RNA, 19 nt, Artificial Sequence
  Description of Artificial Sequence: Synthetic oligonucleotide
  Sense strand starting at position 1216 of SEQ ID NO: 1563800
gccuuuaaggaauauguag

SEQ ID NO: 1832860 - RNA, 19 nt, Artificial Sequence
  Description of Artificial Sequence: Synthetic oligonucleotide
  Antisense strand to SEQ ID NO: 1832859
cuacauauuccuuaaaggc

SEQ ID NO: 1832861 - RNA, 19 nt, Artificial Sequence
  Description of Artificial Sequence: Synthetic oligonucleotide
  Sense strand starting at position 1291 of SEQ ID NO: 1563800
cgggaagauccaggagagu

SEQ ID NO: 1832862 - RNA, 19 nt, Artificial Sequence
  Description of Artificial Sequence: Synthetic oligonucleotide
  Antisense strand to SEQ ID NO: 1832861
acucuccuggaucuucccg

SEQ ID NO: 1832863 - RNA, 19 nt, Artificial Sequence
  Description of Artificial Sequence: Synthetic oligonucleotide
  Sense strand starting at position 2110 of SEQ ID NO: 1563800
ggaggagguguuggauaga

SEQ ID NO: 1832864 - RNA, 19 nt, Artificial Sequence
  Description of Artificial Sequence: Synthetic oligonucleotide
  Antisense strand to SEQ ID NO: 1832863
ucuauccaacaccuccucc

SEQ ID NO: 1832865 - RNA, 19 nt, Artificial Sequence
  Description of Artificial Sequence: Synthetic oligonucleotide
  Sense strand starting at position 2131 of SEQ ID NO: 1563800
aaagaugauguuugaaagu

SEQ ID NO: 1832866 - RNA, 19 nt, Artificial Sequence
  Description of Artificial Sequence: Synthetic oligonucleotide
  Antisense strand to SEQ ID NO: 1832865
acuuucaaacaucaucuuu

SEQ ID NO: 1832867 - RNA, 19 nt, Artificial Sequence
  Description of Artificial Sequence: Synthetic oligonucleotide
  Sense strand starting at position 2153 of SEQ ID NO: 1563800
gaacgcuugcuuuaagaaa

SEQ ID NO: 1832868 - RNA, 19 nt, Artificial Sequence
  Description of Artificial Sequence: Synthetic oligonucleotide
  Antisense strand to SEQ ID NO: 1832867
uuucuuaaagcaagcguuc

SEQ ID NO: 1832869 - RNA, 19 nt, Artificial Sequence
  Description of Artificial Sequence: Synthetic oligonucleotide
  Sense strand starting at position 2173 of SEQ ID NO: 1563800
guaugauaagaaggaugcu

SEQ ID NO: 1832870 - RNA, 19 nt, Artificial Sequence
  Description of Artificial Sequence: Synthetic oligonucleotide
  Antisense strand to SEQ ID NO: 1832869
agcauccuucuuaucauac

SEQ ID NO: 1832871 - RNA, 19 nt, Artificial Sequence
  Description of Artificial Sequence: Synthetic oligonucleotide
  Sense strand starting at position 2412 of SEQ ID NO: 1563800
cugcaaaugccucaggaau

SEQ ID NO: 1832872 - RNA, 19 nt, Artificial Sequence
  Description of Artificial Sequence: Synthetic oligonucleotide
  Antisense strand to SEQ ID NO: 1832871
auuccugaggcauuugcag

SEQ ID NO: 1832873 - RNA, 19 nt, Artificial Sequence
  Description of Artificial Sequence: Synthetic oligonucleotide
  Sense strand starting at position 2423 of SEQ ID NO: 1563800
ucaggaauccuuuaccagu

SEQ ID NO: 1832874 - RNA, 19 nt, Artificial Sequence
  Description of Artificial Sequence: Synthetic oligonucleotide
  Antisense strand to SEQ ID NO: 1832873
acugguaaaggauuccuga

SEQ ID NO: 1832875 - RNA, 19 nt, Artificial Sequence
  Description of Artificial Sequence: Synthetic oligonucleotide
  Sense strand starting at position 2622 of SEQ ID NO: 1563800
uuggaagaguuauccacau

SEQ ID NO: 1832876 - RNA, 19 nt, Artificial Sequence
  Description of Artificial Sequence: Synthetic oligonucleotide
  Antisense strand to SEQ ID NO: 1832875
auguggauaacucuuccaa

SEQ ID NO: 1832877 - RNA, 19 nt, Artificial Sequence
  Description of Artificial Sequence: Synthetic oligonucleotide
  Sense strand starting at position 2707 of SEQ ID NO: 1563800
ucaguacugccugaugaaa

SEQ ID NO: 1832878 - RNA, 19 nt, Artificial Sequence
  Description of Artificial Sequence: Synthetic oligonucleotide
  Antisense strand to SEQ ID NO: 1832877
uuucaucaggcaguacuga

SEQ ID NO: 1832879 - RNA, 19 nt, Artificial Sequence
  Description of Artificial Sequence: Synthetic oligonucleotide
  Sense strand starting at position 2810 of SEQ ID NO: 1563800
guauuaugaagccaaucga

SEQ ID NO: 1832880 - RNA, 19 nt, Artificial Sequence
  Description of Artificial Sequence: Synthetic oligonucleotide
  Antisense strand to SEQ ID NO: 1832879
ucgauuggcuucauaauac

SEQ ID NO: 1832881 - RNA, 19 nt, Artificial Sequence
  Description of Artificial Sequence: Synthetic oligonucleotide
  Sense strand starting at position 3074 of SEQ ID NO: 1563800
cuaucagaaugcuuggaca

SEQ ID NO: 1832882 - RNA, 19 nt, Artificial Sequence
  Description of Artificial Sequence: Synthetic oligonucleotide
  Antisense strand to SEQ ID NO: 1832881
uguccaagcauucugauag

SEQ ID NO: 1832883 - RNA, 19 nt, Artificial Sequence
  Description of Artificial Sequence: Synthetic oligonucleotide
  Sense strand starting at position 3076 of SEQ ID NO: 1563800
aucagaaugcuuggacaua

SEQ ID NO: 1832884 - RNA, 19 nt, Artificial Sequence
  Description of Artificial Sequence: Synthetic oligonucleotide
  Antisense strand to SEQ ID NO: 1832883
uauguccaagcauucugau

SEQ ID NO: 1832885 - RNA, 19 nt, Artificial Sequence
  Description of Artificial Sequence: Synthetic oligonucleotide
  Sense strand starting at position 3099 of SEQ ID NO: 1563800
cuuaucauugaguauccua

SEQ ID NO: 1832886 - RNA, 19 nt, Artificial Sequence
  Description of Artificial Sequence: Synthetic oligonucleotide
  Antisense strand to SEQ ID NO: 1832885
uaggauacucaaugauaag

SEQ ID NO: 1832887 - RNA, 19 nt, Artificial Sequence
  Description of Artificial Sequence: Synthetic oligonucleotide
  Sense strand starting at position 3269 of SEQ ID NO: 1563800
ggcuauacugguuaacuaa

SEQ ID NO: 1832888 - RNA, 19 nt, Artificial Sequence
  Description of Artificial Sequence: Synthetic oligonucleotide
  Antisense strand to SEQ ID NO: 1832887
uuaguuaaccaguauagcc

SEQ ID NO: 1832889 - RNA, 19 nt, Artificial Sequence
  Description of Artificial Sequence: Synthetic oligonucleotide
  Sense strand starting at position 3349 of SEQ ID NO: 1563800
gaaucagacucuguauagu

SEQ ID NO: 1832890 - RNA, 19 nt, Artificial Sequence
  Description of Artificial Sequence: Synthetic oligonucleotide
  Antisense strand to SEQ ID NO: 1832889
acuauacagagucugauuc

SEQ ID NO: 1832891 - RNA, 19 nt, Artificial Sequence
  Description of Artificial Sequence: Synthetic oligonucleotide
  Sense strand starting at position 3352 of SEQ ID NO: 1563800
ucagacucuguauagugaa

SEQ ID NO: 1832892 - RNA, 19 nt, Artificial Sequence
  Description of Artificial Sequence: Synthetic oligonucleotide
  Antisense strand to SEQ ID NO: 1832891
uucacuauacagagucuga

SEQ ID NO: 1832893 - RNA, 19 nt, Artificial Sequence
  Description of Artificial Sequence: Synthetic oligonucleotide
  Sense strand starting at position 3360 of SEQ ID NO: 1563800
uguauagugaauuagcaag

SEQ ID NO: 1832894 - RNA, 19 nt, Artificial Sequence
  Description of Artificial Sequence: Synthetic oligonucleotide
  Antisense strand to SEQ ID NO: 1832893
cuugcuaauucacuauaca

SEQ ID NO: 1832895 - RNA, 19 nt, Artificial Sequence
  Description of Artificial Sequence: Synthetic oligonucleotide
  Sense strand starting at position 3367 of SEQ ID NO: 1563800
ugaauuagcaagugagaua

SEQ ID NO: 1832896 - RNA, 19 nt, Artificial Sequence
  Description of Artificial Sequence: Synthetic oligonucleotide
  Antisense strand to SEQ ID NO: 1832895
uaucucacuugcuaauuca

SEQ ID NO: 1832897 - RNA, 19 nt, Artificial Sequence
  Description of Artificial Sequence: Synthetic oligonucleotide
  Sense strand starting at position 3667 of SEQ ID NO: 1563800
agccaaauuuaagaaggaa

SEQ ID NO: 1832898 - RNA, 19 nt, Artificial Sequence
  Description of Artificial Sequence: Synthetic oligonucleotide
  Antisense strand to SEQ ID NO: 1832897
uuccuucuuaaauuuggcu

SEQ ID NO: 1832899 - RNA, 19 nt, Artificial Sequence
  Description of Artificial Sequence: Synthetic oligonucleotide
  Sense strand starting at position 3867 of SEQ ID NO: 1563800
cuguguaauacuugggaaa

SEQ ID NO: 1832900 - RNA, 19 nt, Artificial Sequence
  Description of Artificial Sequence: Synthetic oligonucleotide
  Antisense strand to SEQ ID NO: 1832899
uuucccaaguauuacacag

SEQ ID NO: 1832901 - RNA, 19 nt, Artificial Sequence
  Description of Artificial Sequence: Synthetic oligonucleotide
  Sense strand starting at position 3868 of SEQ ID NO: 1563800
uguguaauacuugggaaag

SEQ ID NO: 1832902 - RNA, 19 nt, Artificial Sequence
  Description of Artificial Sequence: Synthetic oligonucleotide
  Antisense strand to SEQ ID NO: 1832901
cuuucccaaguauuacaca

SEQ ID NO: 1832903 - RNA, 19 nt, Artificial Sequence
  Description of Artificial Sequence: Synthetic oligonucleotide
  Sense strand starting at position 175 of SEQ ID NO: 1563801
ggugaacccucuuuccacu

SEQ ID NO: 1832904 - RNA, 19 nt, Artificial Sequence
  Description of Artificial Sequence: Synthetic oligonucleotide
  Antisense strand to SEQ ID NO: 1832903
aguggaaagaggguucacc

SEQ ID NO: 1832905 - RNA, 19 nt, Artificial Sequence
  Description of Artificial Sequence: Synthetic oligonucleotide
  Sense strand starting at position 505 of SEQ ID NO: 1563801
gugguaggaucacuugauu

SEQ ID NO: 1832906 - RNA, 19 nt, Artificial Sequence
  Description of Artificial Sequence: Synthetic oligonucleotide
  Antisense strand to SEQ ID NO: 1832905
aaucaagugauccuaccac

SEQ ID NO: 1832907 - RNA, 19 nt, Artificial Sequence
  Description of Artificial Sequence: Synthetic oligonucleotide
  Sense strand starting at position 518 of SEQ ID NO: 1563801
uugauugagccugagagcu

SEQ ID NO: 1832908 - RNA, 19 nt, Artificial Sequence
  Description of Artificial Sequence: Synthetic oligonucleotide
  Antisense strand to SEQ ID NO: 1832907
agcucucaggcucaaucaa

SEQ ID NO: 1832909 - RNA, 19 nt, Artificial Sequence
  Description of Artificial Sequence: Synthetic oligonucleotide
  Sense strand starting at position 880 of SEQ ID NO: 1563801
ugcacaccugccugagaaa

SEQ ID NO: 1832910 - RNA, 19 nt, Artificial Sequence
  Description of Artificial Sequence: Synthetic oligonucleotide
  Antisense strand to SEQ ID NO: 1832909
uuucucaggcaggugugca

SEQ ID NO: 1832911 - RNA, 19 nt, Artificial Sequence
  Description of Artificial Sequence: Synthetic oligonucleotide
  Sense strand starting at position 1060 of SEQ ID NO: 1563801
cucccuaucuggcuuggaa

SEQ ID NO: 1832912 - RNA, 19 nt, Artificial Sequence
  Description of Artificial Sequence: Synthetic oligonucleotide
  Antisense strand to SEQ ID NO: 1832911
uuccaagccagauagggag

SEQ ID NO: 1832913 - RNA, 19 nt, Artificial Sequence
  Description of Artificial Sequence: Synthetic oligonucleotide
  Sense strand starting at position 1062 of SEQ ID NO: 1563801
cccuaucuggcuuggaaag

SEQ ID NO: 1832914 - RNA, 19 nt, Artificial Sequence
  Description of Artificial Sequence: Synthetic oligonucleotide
  Antisense strand to SEQ ID NO: 1832913
cuuuccaagccagauaggg

SEQ ID NO: 1832915 - RNA, 19 nt, Artificial Sequence
  Description of Artificial Sequence: Synthetic oligonucleotide
  Sense strand starting at position 1063 of SEQ ID NO: 1563801
ccuaucuggcuuggaaagu

SEQ ID NO: 1832916 - RNA, 19 nt, Artificial Sequence
  Description of Artificial Sequence: Synthetic oligonucleotide
  Antisense strand to SEQ ID NO: 1832915
acuuuccaagccagauagg

SEQ ID NO: 1832917 - RNA, 19 nt, Artificial Sequence
  Description of Artificial Sequence: Synthetic oligonucleotide
  Sense strand starting at position 1217 of SEQ ID NO: 1563801
guuccacucuccguguaga

SEQ ID NO: 1832918 - RNA, 19 nt, Artificial Sequence
  Description of Artificial Sequence: Synthetic oligonucleotide
  Antisense strand to SEQ ID NO: 1832917
ucuacacggagaguggaac

SEQ ID NO: 1832919 - RNA, 19 nt, Artificial Sequence
  Description of Artificial Sequence: Synthetic oligonucleotide
  Sense strand starting at position 1271 of SEQ ID NO: 1563801
aaaggcuauccagagcgaa

SEQ ID NO: 1832920 - RNA, 19 nt, Artificial Sequence
  Description of Artificial Sequence: Synthetic oligonucleotide
  Antisense strand to SEQ ID NO: 1832919
uucgcucuggauagccuuu

SEQ ID NO: 1832921 - RNA, 19 nt, Artificial Sequence
  Description of Artificial Sequence: Synthetic oligonucleotide
  Sense strand starting at position 1274 of SEQ ID NO: 1563801
ggcuauccagagcgaauaa

SEQ ID NO: 1832922 - RNA, 19 nt, Artificial Sequence
  Description of Artificial Sequence: Synthetic oligonucleotide
  Antisense strand to SEQ ID NO: 1832921
uuauucgcucuggauagcc

SEQ ID NO: 1832923 - RNA, 19 nt, Artificial Sequence
  Description of Artificial Sequence: Synthetic oligonucleotide
  Sense strand starting at position 1436 of SEQ ID NO: 1563801
ggcccuggaaucuagugau

SEQ ID NO: 1832924 - RNA, 19 nt, Artificial Sequence
  Description of Artificial Sequence: Synthetic oligonucleotide
  Antisense strand to SEQ ID NO: 1832923
aucacuagauuccagggcc

SEQ ID NO: 1832925 - RNA, 19 nt, Artificial Sequence
  Description of Artificial Sequence: Synthetic oligonucleotide
  Sense strand starting at position 1439 of SEQ ID NO: 1563801
ccuggaaucuagugauuua

SEQ ID NO: 1832926 - RNA, 19 nt, Artificial Sequence
  Description of Artificial Sequence: Synthetic oligonucleotide
  Antisense strand to SEQ ID NO: 1832925
uaaaucacuagauuccagg

SEQ ID NO: 1832927 - RNA, 19 nt, Artificial Sequence
  Description of Artificial Sequence: Synthetic oligonucleotide
  Sense strand starting at position 1446 of SEQ ID NO: 1563801
ucuagugauuuaugacauc

SEQ ID NO: 1832928 - RNA, 19 nt, Artificial Sequence
  Description of Artificial Sequence: Synthetic oligonucleotide
  Antisense strand to SEQ ID NO: 1832927
gaugucauaaaucacuaga

SEQ ID NO: 1832929 - RNA, 19 nt, Artificial Sequence
  Description of Artificial Sequence: Synthetic oligonucleotide
  Sense strand starting at position 1463 of SEQ ID NO: 1563801
uccgcuuggacugagaaga

SEQ ID NO: 1832930 - RNA, 19 nt, Artificial Sequence
  Description of Artificial Sequence: Synthetic oligonucleotide
  Antisense strand to SEQ ID NO: 1832929
ucuucucaguccaagcgga

SEQ ID NO: 1832931 - RNA, 19 nt, Artificial Sequence
  Description of Artificial Sequence: Synthetic oligonucleotide
  Sense strand starting at position 1485 of SEQ ID NO: 1563801
cuuggcuccauguguuuga

SEQ ID NO: 1832932 - RNA, 19 nt, Artificial Sequence
  Description of Artificial Sequence: Synthetic oligonucleotide
  Antisense strand to SEQ ID NO: 1832931
ucaaacacauggagccaag

SEQ ID NO: 1832933 - RNA, 19 nt, Artificial Sequence
  Description of Artificial Sequence: Synthetic oligonucleotide
  Sense strand starting at position 1489 of SEQ ID NO: 1563801
gcuccauguguuugaagga

SEQ ID NO: 1832934 - RNA, 19 nt, Artificial Sequence
  Description of Artificial Sequence: Synthetic oligonucleotide
  Antisense strand to SEQ ID NO: 1832933
uccuucaaacacauggagc

SEQ ID NO: 1832935 - RNA, 19 nt, Artificial Sequence
  Description of Artificial Sequence: Synthetic oligonucleotide
  Sense strand starting at position 1506 of SEQ ID NO: 1563801
gaggccaguaguuagguau

SEQ ID NO: 1832936 - RNA, 19 nt, Artificial Sequence
  Description of Artificial Sequence: Synthetic oligonucleotide
  Antisense strand to SEQ ID NO: 1832935
auaccuaacuacuggccuc

SEQ ID NO: 1832937 - RNA, 19 nt, Artificial Sequence
  Description of Artificial Sequence: Synthetic oligonucleotide
  Sense strand starting at position 1509 of SEQ ID NO: 1563801
gccaguaguuagguaucaa

SEQ ID NO: 1832938 - RNA, 19 nt, Artificial Sequence
  Description of Artificial Sequence: Synthetic oligonucleotide
  Antisense strand to SEQ ID NO: 1832937
uugauaccuaacuacuggc

SEQ ID NO: 1832939 - RNA, 19 nt, Artificial Sequence
  Description of Artificial Sequence: Synthetic oligonucleotide
  Sense strand starting at position 1510 of SEQ ID NO: 1563801
ccaguaguuagguaucaau

SEQ ID NO: 1832940 - RNA, 19 nt, Artificial Sequence
  Description of Artificial Sequence: Synthetic oligonucleotide
  Antisense strand to SEQ ID NO: 1832939
auugauaccuaacuacugg

SEQ ID NO: 1832941 - RNA, 19 nt, Artificial Sequence
  Description of Artificial Sequence: Synthetic oligonucleotide
  Sense strand starting at position 1520 of SEQ ID NO: 1563801
gguaucaauucuuaggaga

SEQ ID NO: 1832942 - RNA, 19 nt, Artificial Sequence
  Description of Artificial Sequence: Synthetic oligonucleotide
  Antisense strand to SEQ ID NO: 1832941
ucuccuaagaauugauacc

SEQ ID NO: 1832943 - RNA, 19 nt, Artificial Sequence
  Description of Artificial Sequence: Synthetic oligonucleotide
  Sense strand starting at position 1523 of SEQ ID NO: 1563801
aucaauucuuaggagagua

SEQ ID NO: 1832944 - RNA, 19 nt, Artificial Sequence
  Description of Artificial Sequence: Synthetic oligonucleotide
  Antisense strand to SEQ ID NO: 1832943
uacucuccuaagaauugau

SEQ ID NO: 1832945 - RNA, 19 nt, Artificial Sequence
  Description of Artificial Sequence: Synthetic oligonucleotide
  Sense strand starting at position 1793 of SEQ ID NO: 1563801
agcgcuaugccgaggucuu

SEQ ID NO: 1832946 - RNA, 19 nt, Artificial Sequence
  Description of Artificial Sequence: Synthetic oligonucleotide
  Antisense strand to SEQ ID NO: 1832945
aagaccucggcauagcgcu

SEQ ID NO: 1832947 - RNA, 19 nt, Artificial Sequence
  Description of Artificial Sequence: Synthetic oligonucleotide
  Sense strand starting at position 2136 of SEQ ID NO: 1563801
gagcuuggcucgcuagaag

SEQ ID NO: 1832948 - RNA, 19 nt, Artificial Sequence
  Description of Artificial Sequence: Synthetic oligonucleotide
  Antisense strand to SEQ ID NO: 1832947
cuucuagcgagccaagcuc

SEQ ID NO: 1832949 - RNA, 19 nt, Artificial Sequence
  Description of Artificial Sequence: Synthetic oligonucleotide
  Sense strand starting at position 2139 of SEQ ID NO: 1563801
cuuggcucgcuagaagaaa

SEQ ID NO: 1832950 - RNA, 19 nt, Artificial Sequence
  Description of Artificial Sequence: Synthetic oligonucleotide
  Antisense strand to SEQ ID NO: 1832949
uuucuucuagcgagccaag

SEQ ID NO: 1832951 - RNA, 19 nt, Artificial Sequence
  Description of Artificial Sequence: Synthetic oligonucleotide
  Sense strand starting at position 2218 of SEQ ID NO: 1563801
ccuagagcacuauguaguu

SEQ ID NO: 1832952 - RNA, 19 nt, Artificial Sequence
  Description of Artificial Sequence: Synthetic oligonucleotide
  Antisense strand to SEQ ID NO: 1832951
aacuacauagugcucuagg

SEQ ID NO: 1832953 - RNA, 19 nt, Artificial Sequence
  Description of Artificial Sequence: Synthetic oligonucleotide
  Sense strand starting at position 2228 of SEQ ID NO: 1563801
uauguaguuggcuacaagu

SEQ ID NO: 1832954 - RNA, 19 nt, Artificial Sequence
  Description of Artificial Sequence: Synthetic oligonucleotide
  Antisense strand to SEQ ID NO: 1832953
acuuguagccaacuacaua

SEQ ID NO: 1832955 - RNA, 19 nt, Artificial Sequence
  Description of Artificial Sequence: Synthetic oligonucleotide
  Sense strand starting at position 2230 of SEQ ID NO: 1563801
uguaguuggcuacaaguuu

SEQ ID NO: 1832956 - RNA, 19 nt, Artificial Sequence
  Description of Artificial Sequence: Synthetic oligonucleotide
  Antisense strand to SEQ ID NO: 1832955
aaacuuguagccaacuaca

SEQ ID NO: 1832957 - RNA, 19 nt, Artificial Sequence
  Description of Artificial Sequence: Synthetic oligonucleotide
  Sense strand starting at position 2314 of SEQ ID NO: 1563801
guugacauucauggcgaau

SEQ ID NO: 1832958 - RNA, 19 nt, Artificial Sequence
  Description of Artificial Sequence: Synthetic oligonucleotide
  Antisense strand to SEQ ID NO: 1832957
auucgccaugaaugucaac

SEQ ID NO: 1832959 - RNA, 19 nt, Artificial Sequence
  Description of Artificial Sequence: Synthetic oligonucleotide
  Sense strand starting at position 2401 of SEQ ID NO: 1563801
uuuaacaucuagggaggau

SEQ ID NO: 1832960 - RNA, 19 nt, Artificial Sequence
  Description of Artificial Sequence: Synthetic oligonucleotide
  Antisense strand to SEQ ID NO: 1832959
auccucccuagauguuaaa

SEQ ID NO: 1832961 - RNA, 19 nt, Artificial Sequence
  Description of Artificial Sequence: Synthetic oligonucleotide
  Sense strand starting at position 2422 of SEQ ID NO: 1563801
acagguuugcaaugccaca

SEQ ID NO: 1832962 - RNA, 19 nt, Artificial Sequence
  Description of Artificial Sequence: Synthetic oligonucleotide
  Antisense strand to SEQ ID NO: 1832961
uguggcauugcaaaccugu

SEQ ID NO: 1832963 - RNA, 19 nt, Artificial Sequence
  Description of Artificial Sequence: Synthetic oligonucleotide
  Sense strand starting at position 3327 of SEQ ID NO: 1563801
ccucuugggcuguagagau

SEQ ID NO: 1832964 - RNA, 19 nt, Artificial Sequence
  Description of Artificial Sequence: Synthetic oligonucleotide
  Antisense strand to SEQ ID NO: 1832963
aucucuacagcccaagagg

SEQ ID NO: 1832965 - RNA, 19 nt, Artificial Sequence
  Description of Artificial Sequence: Synthetic oligonucleotide
  Sense strand starting at position 3519 of SEQ ID NO: 1563801
uuguucuuguuaucaccua

SEQ ID NO: 1832966 - RNA, 19 nt, Artificial Sequence
  Description of Artificial Sequence: Synthetic oligonucleotide
  Antisense strand to SEQ ID NO: 1832965
uaggugauaacaagaacaa

SEQ ID NO: 1832967 - RNA, 19 nt, Artificial Sequence
  Description of Artificial Sequence: Synthetic oligonucleotide
  Sense strand starting at position 3571 of SEQ ID NO: 1563801
agagaaaucuugucacugg

SEQ ID NO: 1832968 - RNA, 19 nt, Artificial Sequence
  Description of Artificial Sequence: Synthetic oligonucleotide
  Antisense strand to SEQ ID NO: 1832967
ccagugacaagauuucucu

SEQ ID NO: 1832969 - RNA, 19 nt, Artificial Sequence
  Description of Artificial Sequence: Synthetic oligonucleotide
  Sense strand starting at position 3771 of SEQ ID NO: 1563801
ucuguuucuccaugcauau

SEQ ID NO: 1832970 - RNA, 19 nt, Artificial Sequence
  Description of Artificial Sequence: Synthetic oligonucleotide
  Antisense strand to SEQ ID NO: 1832969
auaugcauggagaaacaga

SEQ ID NO: 1832971 - RNA, 19 nt, Artificial Sequence
  Description of Artificial Sequence: Synthetic oligonucleotide
  Sense strand starting at position 3786 of SEQ ID NO: 1563801
auauacaauugccugaaga

SEQ ID NO: 1832972 - RNA, 19 nt, Artificial Sequence
  Description of Artificial Sequence: Synthetic oligonucleotide
  Antisense strand to SEQ ID NO: 1832971
ucuucaggcaauuguauau

SEQ ID NO: 1832973 - RNA, 19 nt, Artificial Sequence
  Description of Artificial Sequence: Synthetic oligonucleotide
  Sense strand starting at position 3836 of SEQ ID NO: 1563801
gcuguaauuuagucuguca

SEQ ID NO: 1832974 - RNA, 19 nt, Artificial Sequence
  Description of Artificial Sequence: Synthetic oligonucleotide
  Antisense strand to SEQ ID NO: 1832973
ugacagacuaaauuacagc

SEQ ID NO: 1832975 - RNA, 19 nt, Artificial Sequence
  Description of Artificial Sequence: Synthetic oligonucleotide
  Sense strand starting at position 3838 of SEQ ID NO: 1563801
uguaauuuagucugucaac

SEQ ID NO: 1832976 - RNA, 19 nt, Artificial Sequence
  Description of Artificial Sequence: Synthetic oligonucleotide
  Antisense strand to SEQ ID NO: 1832975
guugacagacuaaauuaca

SEQ ID NO: 1832977 - RNA, 19 nt, Artificial Sequence
  Description of Artificial Sequence: Synthetic oligonucleotide
  Sense strand starting at position 3888 of SEQ ID NO: 1563801
aggauacagguauguacaa

SEQ ID NO: 1832978 - RNA, 19 nt, Artificial Sequence
  Description of Artificial Sequence: Synthetic oligonucleotide
  Antisense strand to SEQ ID NO: 1832977
uuguacauaccuguauccu

SEQ ID NO: 1832979 - RNA, 19 nt, Artificial Sequence
  Description of Artificial Sequence: Synthetic oligonucleotide
  Sense strand starting at position 3889 of SEQ ID NO: 1563801
ggauacagguauguacaaa

SEQ ID NO: 1832980 - RNA, 19 nt, Artificial Sequence
  Description of Artificial Sequence: Synthetic oligonucleotide
  Antisense strand to SEQ ID NO: 1832979
uuuguacauaccuguaucc

SEQ ID NO: 1832981 - RNA, 19 nt, Artificial Sequence
  Description of Artificial Sequence: Synthetic oligonucleotide
  Sense strand starting at position 3969 of SEQ ID NO: 1563801
cugagaaauuagggaauaa

SEQ ID NO: 1832982 - RNA, 19 nt, Artificial Sequence
  Description of Artificial Sequence: Synthetic oligonucleotide
  Antisense strand to SEQ ID NO: 1832981
uuauucccuaauuucucag

SEQ ID NO: 1832983 - RNA, 19 nt, Artificial Sequence
  Description of Artificial Sequence: Synthetic oligonucleotide
  Sense strand starting at position 71 of SEQ ID NO: 1563802
gugagguguccagggcuga

SEQ ID NO: 1832984 - RNA, 19 nt, Artificial Sequence
  Description of Artificial Sequence: Synthetic oligonucleotide
  Antisense strand to SEQ ID NO: 1832983
ucagcccuggacaccucac

SEQ ID NO: 1832985 - RNA, 19 nt, Artificial Sequence
  Description of Artificial Sequence: Synthetic oligonucleotide
  Sense strand starting at position 107 of SEQ ID NO: 1563802
ugaggauuccaauagccuu

SEQ ID NO: 1832986 - RNA, 19 nt, Artificial Sequence
  Description of Artificial Sequence: Synthetic oligonucleotide
  Antisense strand to SEQ ID NO: 1832985
aaggcuauuggaauccuca

SEQ ID NO: 1832987 - RNA, 19 nt, Artificial Sequence
  Description of Artificial Sequence: Synthetic oligonucleotide
  Sense strand starting at position 113 of SEQ ID NO: 1563802
uuccaauagccuugucugu

SEQ ID NO: 1832988 - RNA, 19 nt, Artificial Sequence
  Description of Artificial Sequence: Synthetic oligonucleotide
  Antisense strand to SEQ ID NO: 1832987
acagacaaggcuauuggaa

SEQ ID NO: 1832989 - RNA, 19 nt, Artificial Sequence
  Description of Artificial Sequence: Synthetic oligonucleotide
  Sense strand starting at position 176 of SEQ ID NO: 1563802
ccaauucccugacaugagu

SEQ ID NO: 1832990 - RNA, 19 nt, Artificial Sequence
  Description of Artificial Sequence: Synthetic oligonucleotide
  Antisense strand to SEQ ID NO: 1832989
acucaugucagggaauugg

SEQ ID NO: 1832991 - RNA, 19 nt, Artificial Sequence
  Description of Artificial Sequence: Synthetic oligonucleotide
  Sense strand starting at position 384 of SEQ ID NO: 1563802
ggcacaucuugggccauau

SEQ ID NO: 1832992 - RNA, 19 nt, Artificial Sequence
  Description of Artificial Sequence: Synthetic oligonucleotide
  Antisense strand to SEQ ID NO: 1832991
auauggcccaagaugugcc

SEQ ID NO: 1832993 - RNA, 19 nt, Artificial Sequence
  Description of Artificial Sequence: Synthetic oligonucleotide
  Sense strand starting at position 388 of SEQ ID NO: 1563802
caucuugggccauauggau

SEQ ID NO: 1832994 - RNA, 19 nt, Artificial Sequence
  Description of Artificial Sequence: Synthetic oligonucleotide
  Antisense strand to SEQ ID NO: 1832993
auccauauggcccaagaug

SEQ ID NO: 1832995 - RNA, 19 nt, Artificial Sequence
  Description of Artificial Sequence: Synthetic oligonucleotide
  Sense strand starting at position 397 of SEQ ID NO: 1563802
ccauauggauccuggaacu

SEQ ID NO: 1832996 - RNA, 19 nt, Artificial Sequence
  Description of Artificial Sequence: Synthetic oligonucleotide
  Antisense strand to SEQ ID NO: 1832995
aguuccaggauccauaugg

SEQ ID NO: 1832997 - RNA, 19 nt, Artificial Sequence
  Description of Artificial Sequence: Synthetic oligonucleotide
  Sense strand starting at position 480 of SEQ ID NO: 1563802
gcaggaaauaugggccaua

SEQ ID NO: 1832998 - RNA, 19 nt, Artificial Sequence
  Description of Artificial Sequence: Synthetic oligonucleotide
  Antisense strand to SEQ ID NO: 1832997
uauggcccauauuuccugc

SEQ ID NO: 1832999 - RNA, 19 nt, Artificial Sequence
  Description of Artificial Sequence: Synthetic oligonucleotide
  Sense strand starting at position 481 of SEQ ID NO: 1563802
caggaaauaugggccauau

SEQ ID NO: 1833000 - RNA, 19 nt, Artificial Sequence
  Description of Artificial Sequence: Synthetic oligonucleotide
  Antisense strand to SEQ ID NO: 1832999
auauggcccauauuuccug

SEQ ID NO: 1833001 - RNA, 19 nt, Artificial Sequence
  Description of Artificial Sequence: Synthetic oligonucleotide
  Sense strand starting at position 527 of SEQ ID NO: 1563802
ggccgagguccacacugau

SEQ ID NO: 1833002 - RNA, 19 nt, Artificial Sequence
  Description of Artificial Sequence: Synthetic oligonucleotide
  Antisense strand to SEQ ID NO: 1833001
aucaguguggaccucggcc

SEQ ID NO: 1833003 - RNA, 19 nt, Artificial Sequence
  Description of Artificial Sequence: Synthetic oligonucleotide
  Sense strand starting at position 533 of SEQ ID NO: 1563802
gguccacacugaucuggau

SEQ ID NO: 1833004 - RNA, 19 nt, Artificial Sequence
  Description of Artificial Sequence: Synthetic oligonucleotide
  Antisense strand to SEQ ID NO: 1833003
auccagaucaguguggacc

SEQ ID NO: 1833005 - RNA, 19 nt, Artificial Sequence
  Description of Artificial Sequence: Synthetic oligonucleotide
  Sense strand starting at position 645 of SEQ ID NO: 1563802
gauucuugaggccagaagu

SEQ ID NO: 1833006 - RNA, 19 nt, Artificial Sequence
  Description of Artificial Sequence: Synthetic oligonucleotide
  Antisense strand to SEQ ID NO: 1833005
acuucuggccucaagaauc

SEQ ID NO: 1833007 - RNA, 19 nt, Artificial Sequence
  Description of Artificial Sequence: Synthetic oligonucleotide
  Sense strand starting at position 858 of SEQ ID NO: 1563802
cagggauucugacaagaug

SEQ ID NO: 1833008 - RNA, 19 nt, Artificial Sequence
  Description of Artificial Sequence: Synthetic oligonucleotide
  Antisense strand to SEQ ID NO: 1833007
caucuugucagaaucccug

SEQ ID NO: 1833009 - RNA, 19 nt, Artificial Sequence
  Description of Artificial Sequence: Synthetic oligonucleotide
  Sense strand starting at position 894 of SEQ ID NO: 1563802
uagguaugggaaugugagu

SEQ ID NO: 1833010 - RNA, 19 nt, Artificial Sequence
  Description of Artificial Sequence: Synthetic oligonucleotide
  Antisense strand to SEQ ID NO: 1833009
acucacauucccauaccua

SEQ ID NO: 1833011 - RNA, 19 nt, Artificial Sequence
  Description of Artificial Sequence: Synthetic oligonucleotide
  Sense strand starting at position 1066 of SEQ ID NO: 1563802
uacagauugcccugugggu

SEQ ID NO: 1833012 - RNA, 19 nt, Artificial Sequence
  Description of Artificial Sequence: Synthetic oligonucleotide
  Antisense strand to SEQ ID NO: 1833011
acccacagggcaaucugua

SEQ ID NO: 1833013 - RNA, 19 nt, Artificial Sequence
  Description of Artificial Sequence: Synthetic oligonucleotide
  Sense strand starting at position 1068 of SEQ ID NO: 1563802
cagauugcccuguggguua

SEQ ID NO: 1833014 - RNA, 19 nt, Artificial Sequence
  Description of Artificial Sequence: Synthetic oligonucleotide
  Antisense strand to SEQ ID NO: 1833013
uaacccacagggcaaucug

SEQ ID NO: 1833015 - RNA, 19 nt, Artificial Sequence
  Description of Artificial Sequence: Synthetic oligonucleotide
  Sense strand starting at position 1110 of SEQ ID NO: 1563802
ggugguccagcugagacau

SEQ ID NO: 1833016 - RNA, 19 nt, Artificial Sequence
  Description of Artificial Sequence: Synthetic oligonucleotide
  Antisense strand to SEQ ID NO: 1833015
augucucagcuggaccacc

SEQ ID NO: 1833017 - RNA, 19 nt, Artificial Sequence
  Description of Artificial Sequence: Synthetic oligonucleotide
  Sense strand starting at position 1316 of SEQ ID NO: 1563802
cucucagaucugugagguu

SEQ ID NO: 1833018 - RNA, 19 nt, Artificial Sequence
  Description of Artificial Sequence: Synthetic oligonucleotide
  Antisense strand to SEQ ID NO: 1833017
aaccucacagaucugagag

SEQ ID NO: 1833019 - RNA, 19 nt, Artificial Sequence
  Description of Artificial Sequence: Synthetic oligonucleotide
  Sense strand starting at position 1365 of SEQ ID NO: 1563802
gggcuucccuggguugaga

SEQ ID NO: 1833020 - RNA, 19 nt, Artificial Sequence
  Description of Artificial Sequence: Synthetic oligonucleotide
  Antisense strand to SEQ ID NO: 1833019
ucucaacccagggaagccc

SEQ ID NO: 1833021 - RNA, 19 nt, Artificial Sequence
  Description of Artificial Sequence: Synthetic oligonucleotide
  Sense strand starting at position 1554 of SEQ ID NO: 1563802
ggagguguagcugaggaga

SEQ ID NO: 1833022 - RNA, 19 nt, Artificial Sequence
  Description of Artificial Sequence: Synthetic oligonucleotide
  Antisense strand to SEQ ID NO: 1833021
ucuccucagcuacaccucc

SEQ ID NO: 1833023 - RNA, 19 nt, Artificial Sequence
  Description of Artificial Sequence: Synthetic oligonucleotide
  Sense strand starting at position 1665 of SEQ ID NO: 1563802
gaucuugaugccuggcaga

SEQ ID NO: 1833024 - RNA, 19 nt, Artificial Sequence
  Description of Artificial Sequence: Synthetic oligonucleotide
  Antisense strand to SEQ ID NO: 1833023
ucugccaggcaucaagauc

SEQ ID NO: 1833025 - RNA, 19 nt, Artificial Sequence
  Description of Artificial Sequence: Synthetic oligonucleotide
  Sense strand starting at position 2043 of SEQ ID NO: 1563802
cggauguuuccuggcggga

SEQ ID NO: 1833026 - RNA, 19 nt, Artificial Sequence
  Description of Artificial Sequence: Synthetic oligonucleotide
  Antisense strand to SEQ ID NO: 1833025
ucccgccaggaaacauccg

SEQ ID NO: 1833027 - RNA, 19 nt, Artificial Sequence
  Description of Artificial Sequence: Synthetic oligonucleotide
  Sense strand starting at position 2268 of SEQ ID NO: 1563802
cucagcccuccuugagaau

SEQ ID NO: 1833028 - RNA, 19 nt, Artificial Sequence
  Description of Artificial Sequence: Synthetic oligonucleotide
  Antisense strand to SEQ ID NO: 1833027
auucucaaggagggcugag

SEQ ID NO: 1833029 - RNA, 19 nt, Artificial Sequence
  Description of Artificial Sequence: Synthetic oligonucleotide
  Sense strand starting at position 2280 of SEQ ID NO: 1563802
ugagaauccugagcaugau

SEQ ID NO: 1833030 - RNA, 19 nt, Artificial Sequence
  Description of Artificial Sequence: Synthetic oligonucleotide
  Antisense strand to SEQ ID NO: 1833029
aucaugcucaggauucuca

SEQ ID NO: 1833031 - RNA, 19 nt, Artificial Sequence
  Description of Artificial Sequence: Synthetic oligonucleotide
  Sense strand starting at position 2290 of SEQ ID NO: 1563802
gagcaugaugucuggcaga

SEQ ID NO: 1833032 - RNA, 19 nt, Artificial Sequence
  Description of Artificial Sequence: Synthetic oligonucleotide
  Antisense strand to SEQ ID NO: 1833031
ucugccagacaucaugcuc

SEQ ID NO: 1833033 - RNA, 19 nt, Artificial Sequence
  Description of Artificial Sequence: Synthetic oligonucleotide
  Sense strand starting at position 2700 of SEQ ID NO: 1563802
gcgugaagauguuuggaug

SEQ ID NO: 1833034 - RNA, 19 nt, Artificial Sequence
  Description of Artificial Sequence: Synthetic oligonucleotide
  Antisense strand to SEQ ID NO: 1833033
cauccaaacaucuucacgc

SEQ ID NO: 1833035 - RNA, 19 nt, Artificial Sequence
  Description of Artificial Sequence: Synthetic oligonucleotide
  Sense strand starting at position 2703 of SEQ ID NO: 1563802
ugaagauguuuggaugggu

SEQ ID NO: 1833036 - RNA, 19 nt, Artificial Sequence
  Description of Artificial Sequence: Synthetic oligonucleotide
  Antisense strand to SEQ ID NO: 1833035
acccauccaaacaucuuca

SEQ ID NO: 1833037 - RNA, 19 nt, Artificial Sequence
  Description of Artificial Sequence: Synthetic oligonucleotide
  Sense strand starting at position 2879 of SEQ ID NO: 1563802
acccauauucucugccgau

SEQ ID NO: 1833038 - RNA, 19 nt, Artificial Sequence
  Description of Artificial Sequence: Synthetic oligonucleotide
  Antisense strand to SEQ ID NO: 1833037
aucggcagagaauaugggu

SEQ ID NO: 1833039 - RNA, 19 nt, Artificial Sequence
  Description of Artificial Sequence: Synthetic oligonucleotide
  Sense strand starting at position 2880 of SEQ ID NO: 1563802
cccauauucucugccgauu

SEQ ID NO: 1833040 - RNA, 19 nt, Artificial Sequence
  Description of Artificial Sequence: Synthetic oligonucleotide
  Antisense strand to SEQ ID NO: 1833039
aaucggcagagaauauggg

SEQ ID NO: 1833041 - RNA, 19 nt, Artificial Sequence
  Description of Artificial Sequence: Synthetic oligonucleotide
  Sense strand starting at position 2961 of SEQ ID NO: 1563802
ggguguggucgugguaaca

SEQ ID NO: 1833042 - RNA, 19 nt, Artificial Sequence
  Description of Artificial Sequence: Synthetic oligonucleotide
  Antisense strand to SEQ ID NO: 1833041
uguuaccacgaccacaccc

SEQ ID NO: 1833043 - RNA, 19 nt, Artificial Sequence
  Description of Artificial Sequence: Synthetic oligonucleotide
  Sense strand starting at position 2974 of SEQ ID NO: 1563802
guaacauugccagggucuu

SEQ ID NO: 1833044 - RNA, 19 nt, Artificial Sequence
  Description of Artificial Sequence: Synthetic oligonucleotide
  Antisense strand to SEQ ID NO: 1833043
aagacccuggcaauguuac

SEQ ID NO: 1833045 - RNA, 19 nt, Artificial Sequence
  Description of Artificial Sequence: Synthetic oligonucleotide
  Sense strand starting at position 3496 of SEQ ID NO: 1563802
gugagaaucgcuugcaccu

SEQ ID NO: 1833046 - RNA, 19 nt, Artificial Sequence
  Description of Artificial Sequence: Synthetic oligonucleotide
  Antisense strand to SEQ ID NO: 1833045
aggugcaagcgauucucac

SEQ ID NO: 1833047 - RNA, 19 nt, Artificial Sequence
  Description of Artificial Sequence: Synthetic oligonucleotide
  Sense strand starting at position 3629 of SEQ ID NO: 1563802
cguaucuuccaaggauaua

SEQ ID NO: 1833048 - RNA, 19 nt, Artificial Sequence
  Description of Artificial Sequence: Synthetic oligonucleotide
  Antisense strand to SEQ ID NO: 1833047
uauauccuuggaagauacg

SEQ ID NO: 1833049 - RNA, 19 nt, Artificial Sequence
  Description of Artificial Sequence: Synthetic oligonucleotide
  Sense strand starting at position 3645 of SEQ ID NO: 1563802
auauguagguagcuguaua

SEQ ID NO: 1833050 - RNA, 19 nt, Artificial Sequence
  Description of Artificial Sequence: Synthetic oligonucleotide
  Antisense strand to SEQ ID NO: 1833049
uauacagcuaccuacauau

SEQ ID NO: 1833051 - RNA, 19 nt, Artificial Sequence
  Description of Artificial Sequence: Synthetic oligonucleotide
  Sense strand starting at position 3751 of SEQ ID NO: 1563802
uuacguucuguugaaauaa

SEQ ID NO: 1833052 - RNA, 19 nt, Artificial Sequence
  Description of Artificial Sequence: Synthetic oligonucleotide
  Antisense strand to SEQ ID NO: 1833051
uuauuucaacagaacguaa

SEQ ID NO: 1833053 - RNA, 19 nt, Artificial Sequence
  Description of Artificial Sequence: Synthetic oligonucleotide
  Sense strand starting at position 3802 of SEQ ID NO: 1563802
guuggugucugguuguuau

SEQ ID NO: 1833054 - RNA, 19 nt, Artificial Sequence
  Description of Artificial Sequence: Synthetic oligonucleotide
  Antisense strand to SEQ ID NO: 1833053
auaacaaccagacaccaac

SEQ ID NO: 1833055 - RNA, 19 nt, Artificial Sequence
  Description of Artificial Sequence: Synthetic oligonucleotide
  Sense strand starting at position 3814 of SEQ ID NO: 1563802
uuguuauuaguggaacucu

SEQ ID NO: 1833056 - RNA, 19 nt, Artificial Sequence
  Description of Artificial Sequence: Synthetic oligonucleotide
  Antisense strand to SEQ ID NO: 1833055
agaguuccacuaauaacaa

SEQ ID NO: 1833057 - RNA, 19 nt, Artificial Sequence
  Description of Artificial Sequence: Synthetic oligonucleotide
  Sense strand starting at position 3888 of SEQ ID NO: 1563802
ggcuacuagcaucauguuu

SEQ ID NO: 1833058 - RNA, 19 nt, Artificial Sequence
  Description of Artificial Sequence: Synthetic oligonucleotide
  Antisense strand to SEQ ID NO: 1833057
aaacaugaugcuaguagcc

SEQ ID NO: 1833059 - RNA, 19 nt, Artificial Sequence
  Description of Artificial Sequence: Synthetic oligonucleotide
  Sense strand starting at position 3916 of SEQ ID NO: 1563802
gccucagacuguguaauga

SEQ ID NO: 1833060 - RNA, 19 nt, Artificial Sequence
  Description of Artificial Sequence: Synthetic oligonucleotide
  Antisense strand to SEQ ID NO: 1833059
ucauuacacagucugaggc

SEQ ID NO: 1833061 - RNA, 19 nt, Artificial Sequence
  Description of Artificial Sequence: Synthetic oligonucleotide
  Sense strand starting at position 3925 of SEQ ID NO: 1563802
uguguaaugaugugaagug

SEQ ID NO: 1833062 - RNA, 19 nt, Artificial Sequence
  Description of Artificial Sequence: Synthetic oligonucleotide
  Antisense strand to SEQ ID NO: 1833061
cacuucacaucauuacaca

SEQ ID NO: 1833063 - RNA, 19 nt, Artificial Sequence
  Description of Artificial Sequence: Synthetic oligonucleotide
  Sense strand starting at position 15 of SEQ ID NO: 1563803
gggcugaguccugugcguu

SEQ ID NO: 1833064 - RNA, 19 nt, Artificial Sequence
  Description of Artificial Sequence: Synthetic oligonucleotide
  Antisense strand to SEQ ID NO: 1833063
aacgcacaggacucagccc

SEQ ID NO: 1833065 - RNA, 19 nt, Artificial Sequence
  Description of Artificial Sequence: Synthetic oligonucleotide
  Sense strand starting at position 144 of SEQ ID NO: 1563803
accagugauccuuguauaa

SEQ ID NO: 1833066 - RNA, 19 nt, Artificial Sequence
  Description of Artificial Sequence: Synthetic oligonucleotide
  Antisense strand to SEQ ID NO: 1833065
uuauacaaggaucacuggu

SEQ ID NO: 1833067 - RNA, 19 nt, Artificial Sequence
  Description of Artificial Sequence: Synthetic oligonucleotide
  Sense strand starting at position 148 of SEQ ID NO: 1563803
gugauccuuguauaagaca

SEQ ID NO: 1833068 - RNA, 19 nt, Artificial Sequence
  Description of Artificial Sequence: Synthetic oligonucleotide
  Antisense strand to SEQ ID NO: 1833067
ugucuuauacaaggaucac

SEQ ID NO: 1833069 - RNA, 19 nt, Artificial Sequence
  Description of Artificial Sequence: Synthetic oligonucleotide
  Sense strand starting at position 191 of SEQ ID NO: 1563803
cuggguucuccagagugac

SEQ ID NO: 1833070 - RNA, 19 nt, Artificial Sequence
  Description of Artificial Sequence: Synthetic oligonucleotide
  Antisense strand to SEQ ID NO: 1833069
gucacucuggagaacccag

SEQ ID NO: 1833071 - RNA, 19 nt, Artificial Sequence
  Description of Artificial Sequence: Synthetic oligonucleotide
  Sense strand starting at position 292 of SEQ ID NO: 1563803
ccuggacucuugucagauc

SEQ ID NO: 1833072 - RNA, 19 nt, Artificial Sequence
  Description of Artificial Sequence: Synthetic oligonucleotide
  Antisense strand to SEQ ID NO: 1833071
gaucugacaagaguccagg

SEQ ID NO: 1833073 - RNA, 19 nt, Artificial Sequence
  Description of Artificial Sequence: Synthetic oligonucleotide
  Sense strand starting at position 380 of SEQ ID NO: 1563803
guucucaccucccugagau

SEQ ID NO: 1833074 - RNA, 19 nt, Artificial Sequence
  Description of Artificial Sequence: Synthetic oligonucleotide
  Antisense strand to SEQ ID NO: 1833073
aucucagggaggugagaac

SEQ ID NO: 1833075 - RNA, 19 nt, Artificial Sequence
  Description of Artificial Sequence: Synthetic oligonucleotide
  Sense strand starting at position 583 of SEQ ID NO: 1563803
cagccagacucugugacau

SEQ ID NO: 1833076 - RNA, 19 nt, Artificial Sequence
  Description of Artificial Sequence: Synthetic oligonucleotide
  Antisense strand to SEQ ID NO: 1833075
augucacagagucuggcug

SEQ ID NO: 1833077 - RNA, 19 nt, Artificial Sequence
  Description of Artificial Sequence: Synthetic oligonucleotide
  Sense strand starting at position 696 of SEQ ID NO: 1563803
uguggaacccuguaauaac

SEQ ID NO: 1833078 - RNA, 19 nt, Artificial Sequence
  Description of Artificial Sequence: Synthetic oligonucleotide
  Antisense strand to SEQ ID NO: 1833077
guuauuacaggguuccaca

SEQ ID NO: 1833079 - RNA, 19 nt, Artificial Sequence
  Description of Artificial Sequence: Synthetic oligonucleotide
  Sense strand starting at position 899 of SEQ ID NO: 1563803
uuggguguccuccagguau

SEQ ID NO: 1833080 - RNA, 19 nt, Artificial Sequence
  Description of Artificial Sequence: Synthetic oligonucleotide
  Antisense strand to SEQ ID NO: 1833079
auaccuggaggacacccaa

SEQ ID NO: 1833081 - RNA, 19 nt, Artificial Sequence
  Description of Artificial Sequence: Synthetic oligonucleotide
  Sense strand starting at position 1398 of SEQ ID NO: 1563803
aagagacaucucggucuga

SEQ ID NO: 1833082 - RNA, 19 nt, Artificial Sequence
  Description of Artificial Sequence: Synthetic oligonucleotide
  Antisense strand to SEQ ID NO: 1833081
ucagaccgagaugucucuu

SEQ ID NO: 1833083 - RNA, 19 nt, Artificial Sequence
  Description of Artificial Sequence: Synthetic oligonucleotide
  Sense strand starting at position 1399 of SEQ ID NO: 1563803
agagacaucucggucugag

SEQ ID NO: 1833084 - RNA, 19 nt, Artificial Sequence
  Description of Artificial Sequence: Synthetic oligonucleotide
  Antisense strand to SEQ ID NO: 1833083
cucagaccgagaugucucu

SEQ ID NO: 1833085 - RNA, 19 nt, Artificial Sequence
  Description of Artificial Sequence: Synthetic oligonucleotide
  Sense strand starting at position 1402 of SEQ ID NO: 1563803
gacaucucggucugagaca

SEQ ID NO: 1833086 - RNA, 19 nt, Artificial Sequence
  Description of Artificial Sequence: Synthetic oligonucleotide
  Antisense strand to SEQ ID NO: 1833085
ugucucagaccgagauguc

SEQ ID NO: 1833087 - RNA, 19 nt, Artificial Sequence
  Description of Artificial Sequence: Synthetic oligonucleotide
  Sense strand starting at position 1551 of SEQ ID NO: 1563803
agaugccgacgucagaauu

SEQ ID NO: 1833088 - RNA, 19 nt, Artificial Sequence
  Description of Artificial Sequence: Synthetic oligonucleotide
  Antisense strand to SEQ ID NO: 1833087
aauucugacgucggcaucu

SEQ ID NO: 1833089 - RNA, 19 nt, Artificial Sequence
  Description of Artificial Sequence: Synthetic oligonucleotide
  Sense strand starting at position 1561 of SEQ ID NO: 1563803
gucagaauuugcguuccug

SEQ ID NO: 1833090 - RNA, 19 nt, Artificial Sequence
  Description of Artificial Sequence: Synthetic oligonucleotide
  Antisense strand to SEQ ID NO: 1833089
caggaacgcaaauucugac

SEQ ID NO: 1833091 - RNA, 19 nt, Artificial Sequence
  Description of Artificial Sequence: Synthetic oligonucleotide
  Sense strand starting at position 1641 of SEQ ID NO: 1563803
gacauugaugcuggcagaa

SEQ ID NO: 1833092 - RNA, 19 nt, Artificial Sequence
  Description of Artificial Sequence: Synthetic oligonucleotide
  Antisense strand to SEQ ID NO: 1833091
uucugccagcaucaauguc

SEQ ID NO: 1833093 - RNA, 19 nt, Artificial Sequence
  Description of Artificial Sequence: Synthetic oligonucleotide
  Sense strand starting at position 2264 of SEQ ID NO: 1563803
cgaccuugaugccuggaaa

SEQ ID NO: 1833094 - RNA, 19 nt, Artificial Sequence
  Description of Artificial Sequence: Synthetic oligonucleotide
  Antisense strand to SEQ ID NO: 1833093
uuuccaggcaucaaggucg

SEQ ID NO: 1833095 - RNA, 19 nt, Artificial Sequence
  Description of Artificial Sequence: Synthetic oligonucleotide
  Sense strand starting at position 2507 of SEQ ID NO: 1563803
ugucucuuugaugaaguga

SEQ ID NO: 1833096 - RNA, 19 nt, Artificial Sequence
  Description of Artificial Sequence: Synthetic oligonucleotide
  Antisense strand to SEQ ID NO: 1833095
ucacuucaucaaagagaca

SEQ ID NO: 1833097 - RNA, 19 nt, Artificial Sequence
  Description of Artificial Sequence: Synthetic oligonucleotide
  Sense strand starting at position 2637 of SEQ ID NO: 1563803
cgugauuguaaugaccuau

SEQ ID NO: 1833098 - RNA, 19 nt, Artificial Sequence
  Description of Artificial Sequence: Synthetic oligonucleotide
  Antisense strand to SEQ ID NO: 1833097
auaggucauuacaaucacg

SEQ ID NO: 1833099 - RNA, 19 nt, Artificial Sequence
  Description of Artificial Sequence: Synthetic oligonucleotide
  Sense strand starting at position 2699 of SEQ ID NO: 1563803
caaguagacuuggcaaacu

SEQ ID NO: 1833100 - RNA, 19 nt, Artificial Sequence
  Description of Artificial Sequence: Synthetic oligonucleotide
  Antisense strand to SEQ ID NO: 1833099
aguuugccaagucuacuug

SEQ ID NO: 1833101 - RNA, 19 nt, Artificial Sequence
  Description of Artificial Sequence: Synthetic oligonucleotide
  Sense strand starting at position 2875 of SEQ ID NO: 1563803
cugccaaguguauauugaa

SEQ ID NO: 1833102 - RNA, 19 nt, Artificial Sequence
  Description of Artificial Sequence: Synthetic oligonucleotide
  Antisense strand to SEQ ID NO: 1833101
uucaauauacacuuggcag

SEQ ID NO: 1833103 - RNA, 19 nt, Artificial Sequence
  Description of Artificial Sequence: Synthetic oligonucleotide
  Sense strand starting at position 2959 of SEQ ID NO: 1563803
ucuggucuauucuuuauau

SEQ ID NO: 1833104 - RNA, 19 nt, Artificial Sequence
  Description of Artificial Sequence: Synthetic oligonucleotide
  Antisense strand to SEQ ID NO: 1833103
auauaaagaauagaccaga

SEQ ID NO: 1833105 - RNA, 19 nt, Artificial Sequence
  Description of Artificial Sequence: Synthetic oligonucleotide
  Sense strand starting at position 2960 of SEQ ID NO: 1563803
cuggucuauucuuuauauu

SEQ ID NO: 1833106 - RNA, 19 nt, Artificial Sequence
  Description of Artificial Sequence: Synthetic oligonucleotide
  Antisense strand to SEQ ID NO: 1833105
aauauaaagaauagaccag

SEQ ID NO: 1833107 - RNA, 19 nt, Artificial Sequence
  Description of Artificial Sequence: Synthetic oligonucleotide
  Sense strand starting at position 2961 of SEQ ID NO: 1563803
uggucuauucuuuauauuc

SEQ ID NO: 1833108 - RNA, 19 nt, Artificial Sequence
  Description of Artificial Sequence: Synthetic oligonucleotide
  Antisense strand to SEQ ID NO: 1833107
gaauauaaagaauagacca

SEQ ID NO: 1833109 - RNA, 19 nt, Artificial Sequence
  Description of Artificial Sequence: Synthetic oligonucleotide
  Sense strand starting at position 3039 of SEQ ID NO: 1563803
acuuguagcagaggaucaa

SEQ ID NO: 1833110 - RNA, 19 nt, Artificial Sequence
  Description of Artificial Sequence: Synthetic oligonucleotide
  Antisense strand to SEQ ID NO: 1833109
uugauccucugcuacaagu

SEQ ID NO: 1833111 - RNA, 19 nt, Artificial Sequence
  Description of Artificial Sequence: Synthetic oligonucleotide
  Sense strand starting at position 3141 of SEQ ID NO: 1563803
uccugcuguccugauauca

SEQ ID NO: 1833112 - RNA, 19 nt, Artificial Sequence
  Description of Artificial Sequence: Synthetic oligonucleotide
  Antisense strand to SEQ ID NO: 1833111
ugauaucaggacagcagga

SEQ ID NO: 1833113 - RNA, 19 nt, Artificial Sequence
  Description of Artificial Sequence: Synthetic oligonucleotide
  Sense strand starting at position 3151 of SEQ ID NO: 1563803
cugauaucacuccagagcu

SEQ ID NO: 1833114 - RNA, 19 nt, Artificial Sequence
  Description of Artificial Sequence: Synthetic oligonucleotide
  Antisense strand to SEQ ID NO: 1833113
agcucuggagugauaucag

SEQ ID NO: 1833115 - RNA, 19 nt, Artificial Sequence
  Description of Artificial Sequence: Synthetic oligonucleotide
  Sense strand starting at position 3206 of SEQ ID NO: 1563803
cagauugugcaauaaagca

SEQ ID NO: 1833116 - RNA, 19 nt, Artificial Sequence
  Description of Artificial Sequence: Synthetic oligonucleotide
  Antisense strand to SEQ ID NO: 1833115
ugcuuuauugcacaaucug

SEQ ID NO: 1833117 - RNA, 19 nt, Artificial Sequence
  Description of Artificial Sequence: Synthetic oligonucleotide
  Sense strand starting at position 3386 of SEQ ID NO: 1563803
uguguagaauuuguugagu

SEQ ID NO: 1833118 - RNA, 19 nt, Artificial Sequence
  Description of Artificial Sequence: Synthetic oligonucleotide
  Antisense strand to SEQ ID NO: 1833117
acucaacaaauucuacaca

SEQ ID NO: 1833119 - RNA, 19 nt, Artificial Sequence
  Description of Artificial Sequence: Synthetic oligonucleotide
  Sense strand starting at position 3446 of SEQ ID NO: 1563803
uggaguguaagucagcaau

SEQ ID NO: 1833120 - RNA, 19 nt, Artificial Sequence
  Description of Artificial Sequence: Synthetic oligonucleotide
  Antisense strand to SEQ ID NO: 1833119
auugcugacuuacacucca

SEQ ID NO: 1833121 - RNA, 19 nt, Artificial Sequence
  Description of Artificial Sequence: Synthetic oligonucleotide
  Sense strand starting at position 3449 of SEQ ID NO: 1563803
aguguaagucagcaauaug

SEQ ID NO: 1833122 - RNA, 19 nt, Artificial Sequence
  Description of Artificial Sequence: Synthetic oligonucleotide
  Antisense strand to SEQ ID NO: 1833121
cauauugcugacuuacacu

SEQ ID NO: 1833123 - RNA, 19 nt, Artificial Sequence
  Description of Artificial Sequence: Synthetic oligonucleotide
  Sense strand starting at position 3452 of SEQ ID NO: 1563803
guaagucagcaauaugaac

SEQ ID NO: 1833124 - RNA, 19 nt, Artificial Sequence
  Description of Artificial Sequence: Synthetic oligonucleotide
  Antisense strand to SEQ ID NO: 1833123
guucauauugcugacuuac

SEQ ID NO: 1833125 - RNA, 19 nt, Artificial Sequence
  Description of Artificial Sequence: Synthetic oligonucleotide
  Sense strand starting at position 3498 of SEQ ID NO: 1563803
ggcacuaauucuguaaaua

SEQ ID NO: 1833126 - RNA, 19 nt, Artificial Sequence
  Description of Artificial Sequence: Synthetic oligonucleotide
  Antisense strand to SEQ ID NO: 1833125
uauuuacagaauuagugcc

SEQ ID NO: 1833127 - RNA, 19 nt, Artificial Sequence
  Description of Artificial Sequence: Synthetic oligonucleotide
  Sense strand starting at position 3547 of SEQ ID NO: 1563803
ucuguucuccauuaaugga

SEQ ID NO: 1833128 - RNA, 19 nt, Artificial Sequence
  Description of Artificial Sequence: Synthetic oligonucleotide
  Antisense strand to SEQ ID NO: 1833127
uccauuaauggagaacaga

SEQ ID NO: 1833129 - RNA, 19 nt, Artificial Sequence
  Description of Artificial Sequence: Synthetic oligonucleotide
  Sense strand starting at position 3628 of SEQ ID NO: 1563803
aguugacuccaguaagauc

SEQ ID NO: 1833130 - RNA, 19 nt, Artificial Sequence
  Description of Artificial Sequence: Synthetic oligonucleotide
  Antisense strand to SEQ ID NO: 1833129
gaucuuacuggagucaacu

SEQ ID NO: 1833131 - RNA, 19 nt, Artificial Sequence
  Description of Artificial Sequence: Synthetic oligonucleotide
  Sense strand starting at position 3660 of SEQ ID NO: 1563803
uuaggauuaucuuuaaggu

SEQ ID NO: 1833132 - RNA, 19 nt, Artificial Sequence
  Description of Artificial Sequence: Synthetic oligonucleotide
  Antisense strand to SEQ ID NO: 1833131
accuuaaagauaauccuaa

SEQ ID NO: 1833133 - RNA, 19 nt, Artificial Sequence
  Description of Artificial Sequence: Synthetic oligonucleotide
  Sense strand starting at position 3840 of SEQ ID NO: 1563803
cuuugacuauucguuaaag

SEQ ID NO: 1833134 - RNA, 19 nt, Artificial Sequence
  Description of Artificial Sequence: Synthetic oligonucleotide
  Antisense strand to SEQ ID NO: 1833133
cuuuaacgaauagucaaag

SEQ ID NO: 1833135 - RNA, 19 nt, Artificial Sequence
  Description of Artificial Sequence: Synthetic oligonucleotide
  Sense strand starting at position 3841 of SEQ ID NO: 1563803
uuugacuauucguuaaaga

SEQ ID NO: 1833136 - RNA, 19 nt, Artificial Sequence
  Description of Artificial Sequence: Synthetic oligonucleotide
  Antisense strand to SEQ ID NO: 1833135
ucuuuaacgaauagucaaa

SEQ ID NO: 1833137 - RNA, 19 nt, Artificial Sequence
  Description of Artificial Sequence: Synthetic oligonucleotide
  Sense strand starting at position 3842 of SEQ ID NO: 1563803
uugacuauucguuaaagau

SEQ ID NO: 1833138 - RNA, 19 nt, Artificial Sequence
  Description of Artificial Sequence: Synthetic oligonucleotide
  Antisense strand to SEQ ID NO: 1833137
aucuuuaacgaauagucaa

SEQ ID NO: 1833139 - RNA, 19 nt, Artificial Sequence
  Description of Artificial Sequence: Synthetic oligonucleotide
  Sense strand starting at position 3898 of SEQ ID NO: 1563803
gcaucuuauuuaguuugau

SEQ ID NO: 1833140 - RNA, 19 nt, Artificial Sequence
  Description of Artificial Sequence: Synthetic oligonucleotide
  Antisense strand to SEQ ID NO: 1833139
aucaaacuaaauaagaugc

SEQ ID NO: 1833141 - RNA, 19 nt, Artificial Sequence
  Description of Artificial Sequence: Synthetic oligonucleotide
  Sense strand starting at position 3910 of SEQ ID NO: 1563803
guuugauacccauagcucu

SEQ ID NO: 1833142 - RNA, 19 nt, Artificial Sequence
  Description of Artificial Sequence: Synthetic oligonucleotide
  Antisense strand to SEQ ID NO: 1833141
agagcuauggguaucaaac

SEQ ID NO: 1833143 - RNA, 19 nt, Artificial Sequence
  Description of Artificial Sequence: Synthetic oligonucleotide
  Sense strand starting at position 15 of SEQ ID NO: 1563804
gggcugaguccugugcguu

SEQ ID NO: 1833144 - RNA, 19 nt, Artificial Sequence
  Description of Artificial Sequence: Synthetic oligonucleotide
  Antisense strand to SEQ ID NO: 1833143
aacgcacaggacucagccc

SEQ ID NO: 1833145 - RNA, 19 nt, Artificial Sequence
  Description of Artificial Sequence: Synthetic oligonucleotide
  Sense strand starting at position 144 of SEQ ID NO: 1563804
accagugauccuuguauaa

SEQ ID NO: 1833146 - RNA, 19 nt, Artificial Sequence
  Description of Artificial Sequence: Synthetic oligonucleotide
  Antisense strand to SEQ ID NO: 1833145
uuauacaaggaucacuggu

SEQ ID NO: 1833147 - RNA, 19 nt, Artificial Sequence
  Description of Artificial Sequence: Synthetic oligonucleotide
  Sense strand starting at position 148 of SEQ ID NO: 1563804
gugauccuuguauaagaca

SEQ ID NO: 1833148 - RNA, 19 nt, Artificial Sequence
  Description of Artificial Sequence: Synthetic oligonucleotide
  Antisense strand to SEQ ID NO: 1833147
ugucuuauacaaggaucac

SEQ ID NO: 1833149 - RNA, 19 nt, Artificial Sequence
  Description of Artificial Sequence: Synthetic oligonucleotide
  Sense strand starting at position 191 of SEQ ID NO: 1563804
cuggguucuccagagugac

SEQ ID NO: 1833150 - RNA, 19 nt, Artificial Sequence
  Description of Artificial Sequence: Synthetic oligonucleotide
  Antisense strand to SEQ ID NO: 1833149
gucacucuggagaacccag

SEQ ID NO: 1833151 - RNA, 19 nt, Artificial Sequence
  Description of Artificial Sequence: Synthetic oligonucleotide
  Sense strand starting at position 292 of SEQ ID NO: 1563804
ccuggacucuugucagauc

SEQ ID NO: 1833152 - RNA, 19 nt, Artificial Sequence
  Description of Artificial Sequence: Synthetic oligonucleotide
  Antisense strand to SEQ ID NO: 1833151
gaucugacaagaguccagg

SEQ ID NO: 1833153 - RNA, 19 nt, Artificial Sequence
  Description of Artificial Sequence: Synthetic oligonucleotide
  Sense strand starting at position 380 of SEQ ID NO: 1563804
guucucaccucccugagau

SEQ ID NO: 1833154 - RNA, 19 nt, Artificial Sequence
  Description of Artificial Sequence: Synthetic oligonucleotide
  Antisense strand to SEQ ID NO: 1833153
aucucagggaggugagaac

SEQ ID NO: 1833155 - RNA, 19 nt, Artificial Sequence
  Description of Artificial Sequence: Synthetic oligonucleotide
  Sense strand starting at position 583 of SEQ ID NO: 1563804
cagccagacucugugacau

SEQ ID NO: 1833156 - RNA, 19 nt, Artificial Sequence
  Description of Artificial Sequence: Synthetic oligonucleotide
  Antisense strand to SEQ ID NO: 1833155
augucacagagucuggcug

SEQ ID NO: 1833157 - RNA, 19 nt, Artificial Sequence
  Description of Artificial Sequence: Synthetic oligonucleotide
  Sense strand starting at position 696 of SEQ ID NO: 1563804
uguggaacccuguaauaac

SEQ ID NO: 1833158 - RNA, 19 nt, Artificial Sequence
  Description of Artificial Sequence: Synthetic oligonucleotide
  Antisense strand to SEQ ID NO: 1833157
guuauuacaggguuccaca

SEQ ID NO: 1833159 - RNA, 19 nt, Artificial Sequence
  Description of Artificial Sequence: Synthetic oligonucleotide
  Sense strand starting at position 899 of SEQ ID NO: 1563804
uuggguguccuccagguau

SEQ ID NO: 1833160 - RNA, 19 nt, Artificial Sequence
  Description of Artificial Sequence: Synthetic oligonucleotide
  Antisense strand to SEQ ID NO: 1833159
auaccuggaggacacccaa

SEQ ID NO: 1833161 - RNA, 19 nt, Artificial Sequence
  Description of Artificial Sequence: Synthetic oligonucleotide
  Sense strand starting at position 1398 of SEQ ID NO: 1563804
aagagacaucucggucuga

SEQ ID NO: 1833162 - RNA, 19 nt, Artificial Sequence
  Description of Artificial Sequence: Synthetic oligonucleotide
  Antisense strand to SEQ ID NO: 1833161
ucagaccgagaugucucuu

SEQ ID NO: 1833163 - RNA, 19 nt, Artificial Sequence
  Description of Artificial Sequence: Synthetic oligonucleotide
  Sense strand starting at position 1399 of SEQ ID NO: 1563804
agagacaucucggucugag

SEQ ID NO: 1833164 - RNA, 19 nt, Artificial Sequence
  Description of Artificial Sequence: Synthetic oligonucleotide
  Antisense strand to SEQ ID NO: 1833163
cucagaccgagaugucucu

SEQ ID NO: 1833165 - RNA, 19 nt, Artificial Sequence
  Description of Artificial Sequence: Synthetic oligonucleotide
  Sense strand starting at position 1402 of SEQ ID NO: 1563804
gacaucucggucugagaca

SEQ ID NO: 1833166 - RNA, 19 nt, Artificial Sequence
  Description of Artificial Sequence: Synthetic oligonucleotide
  Antisense strand to SEQ ID NO: 1833165
ugucucagaccgagauguc

SEQ ID NO: 1833167 - RNA, 19 nt, Artificial Sequence
  Description of Artificial Sequence: Synthetic oligonucleotide
  Sense strand starting at position 1551 of SEQ ID NO: 1563804
agaugccgacgucagaauu

SEQ ID NO: 1833168 - RNA, 19 nt, Artificial Sequence
  Description of Artificial Sequence: Synthetic oligonucleotide
  Antisense strand to SEQ ID NO: 1833167
aauucugacgucggcaucu

SEQ ID NO: 1833169 - RNA, 19 nt, Artificial Sequence
  Description of Artificial Sequence: Synthetic oligonucleotide
  Sense strand starting at position 1561 of SEQ ID NO: 1563804
gucagaauuugcguuccug

SEQ ID NO: 1833170 - RNA, 19 nt, Artificial Sequence
  Description of Artificial Sequence: Synthetic oligonucleotide
  Antisense strand to SEQ ID NO: 1833169
caggaacgcaaauucugac

SEQ ID NO: 1833171 - RNA, 19 nt, Artificial Sequence
  Description of Artificial Sequence: Synthetic oligonucleotide
  Sense strand starting at position 1641 of SEQ ID NO: 1563804
gacauugaugcuggcagaa

SEQ ID NO: 1833172 - RNA, 19 nt, Artificial Sequence
  Description of Artificial Sequence: Synthetic oligonucleotide
  Antisense strand to SEQ ID NO: 1833171
uucugccagcaucaauguc

SEQ ID NO: 1833173 - RNA, 19 nt, Artificial Sequence
  Description of Artificial Sequence: Synthetic oligonucleotide
  Sense strand starting at position 2264 of SEQ ID NO: 1563804
cgaccuugaugccuggaaa

SEQ ID NO: 1833174 - RNA, 19 nt, Artificial Sequence
  Description of Artificial Sequence: Synthetic oligonucleotide
  Antisense strand to SEQ ID NO: 1833173
uuuccaggcaucaaggucg

SEQ ID NO: 1833175 - RNA, 19 nt, Artificial Sequence
  Description of Artificial Sequence: Synthetic oligonucleotide
  Sense strand starting at position 2507 of SEQ ID NO: 1563804
ugucucuuugaugaaguga

SEQ ID NO: 1833176 - RNA, 19 nt, Artificial Sequence
  Description of Artificial Sequence: Synthetic oligonucleotide
  Antisense strand to SEQ ID NO: 1833175
ucacuucaucaaagagaca

SEQ ID NO: 1833177 - RNA, 19 nt, Artificial Sequence
  Description of Artificial Sequence: Synthetic oligonucleotide
  Sense strand starting at position 2637 of SEQ ID NO: 1563804
cgugauuguaaugaccuau

SEQ ID NO: 1833178 - RNA, 19 nt, Artificial Sequence
  Description of Artificial Sequence: Synthetic oligonucleotide
  Antisense strand to SEQ ID NO: 1833177
auaggucauuacaaucacg

SEQ ID NO: 1833179 - RNA, 19 nt, Artificial Sequence
  Description of Artificial Sequence: Synthetic oligonucleotide
  Sense strand starting at position 2699 of SEQ ID NO: 1563804
caaguagacuuggcaaacu

SEQ ID NO: 1833180 - RNA, 19 nt, Artificial Sequence
  Description of Artificial Sequence: Synthetic oligonucleotide
  Antisense strand to SEQ ID NO: 1833179
aguuugccaagucuacuug

SEQ ID NO: 1833181 - RNA, 19 nt, Artificial Sequence
  Description of Artificial Sequence: Synthetic oligonucleotide
  Sense strand starting at position 2875 of SEQ ID NO: 1563804
cugccaaguguauauugaa

SEQ ID NO: 1833182 - RNA, 19 nt, Artificial Sequence
  Description of Artificial Sequence: Synthetic oligonucleotide
  Antisense strand to SEQ ID NO: 1833181
uucaauauacacuuggcag

SEQ ID NO: 1833183 - RNA, 19 nt, Artificial Sequence
  Description of Artificial Sequence: Synthetic oligonucleotide
  Sense strand starting at position 2959 of SEQ ID NO: 1563804
ucuggucuauucuuuauau

SEQ ID NO: 1833184 - RNA, 19 nt, Artificial Sequence
  Description of Artificial Sequence: Synthetic oligonucleotide
  Antisense strand to SEQ ID NO: 1833183
auauaaagaauagaccaga

SEQ ID NO: 1833185 - RNA, 19 nt, Artificial Sequence
  Description of Artificial Sequence: Synthetic oligonucleotide
  Sense strand starting at position 2960 of SEQ ID NO: 1563804
cuggucuauucuuuauauu

SEQ ID NO: 1833186 - RNA, 19 nt, Artificial Sequence
  Description of Artificial Sequence: Synthetic oligonucleotide
  Antisense strand to SEQ ID NO: 1833185
aauauaaagaauagaccag

SEQ ID NO: 1833187 - RNA, 19 nt, Artificial Sequence
  Description of Artificial Sequence: Synthetic oligonucleotide
  Sense strand starting at position 2961 of SEQ ID NO: 1563804
uggucuauucuuuauauuc

SEQ ID NO: 1833188 - RNA, 19 nt, Artificial Sequence
  Description of Artificial Sequence: Synthetic oligonucleotide
  Antisense strand to SEQ ID NO: 1833187
gaauauaaagaauagacca

SEQ ID NO: 1833189 - RNA, 19 nt, Artificial Sequence
  Description of Artificial Sequence: Synthetic oligonucleotide
  Sense strand starting at position 3039 of SEQ ID NO: 1563804
acuuguagcagaggaucaa

SEQ ID NO: 1833190 - RNA, 19 nt, Artificial Sequence
  Description of Artificial Sequence: Synthetic oligonucleotide
  Antisense strand to SEQ ID NO: 1833189
uugauccucugcuacaagu

SEQ ID NO: 1833191 - RNA, 19 nt, Artificial Sequence
  Description of Artificial Sequence: Synthetic oligonucleotide
  Sense strand starting at position 3141 of SEQ ID NO: 1563804
uccugcuguccugauauca

SEQ ID NO: 1833192 - RNA, 19 nt, Artificial Sequence
  Description of Artificial Sequence: Synthetic oligonucleotide
  Antisense strand to SEQ ID NO: 1833191
ugauaucaggacagcagga

SEQ ID NO: 1833193 - RNA, 19 nt, Artificial Sequence
  Description of Artificial Sequence: Synthetic oligonucleotide
  Sense strand starting at position 3151 of SEQ ID NO: 1563804
cugauaucacuccagagcu

SEQ ID NO: 1833194 - RNA, 19 nt, Artificial Sequence
  Description of Artificial Sequence: Synthetic oligonucleotide
  Antisense strand to SEQ ID NO: 1833193
agcucuggagugauaucag

SEQ ID NO: 1833195 - RNA, 19 nt, Artificial Sequence
  Description of Artificial Sequence: Synthetic oligonucleotide
  Sense strand starting at position 3206 of SEQ ID NO: 1563804
cagauugugcaauaaagca

SEQ ID NO: 1833196 - RNA, 19 nt, Artificial Sequence
  Description of Artificial Sequence: Synthetic oligonucleotide
  Antisense strand to SEQ ID NO: 1833195
ugcuuuauugcacaaucug

SEQ ID NO: 1833197 - RNA, 19 nt, Artificial Sequence
  Description of Artificial Sequence: Synthetic oligonucleotide
  Sense strand starting at position 3386 of SEQ ID NO: 1563804
uguguagaauuuguugagu

SEQ ID NO: 1833198 - RNA, 19 nt, Artificial Sequence
  Description of Artificial Sequence: Synthetic oligonucleotide
  Antisense strand to SEQ ID NO: 1833197
acucaacaaauucuacaca

SEQ ID NO: 1833199 - RNA, 19 nt, Artificial Sequence
  Description of Artificial Sequence: Synthetic oligonucleotide
  Sense strand starting at position 3446 of SEQ ID NO: 1563804
uggaguguaagucagcaau

SEQ ID NO: 1833200 - RNA, 19 nt, Artificial Sequence
  Description of Artificial Sequence: Synthetic oligonucleotide
  Antisense strand to SEQ ID NO: 1833199
auugcugacuuacacucca

SEQ ID NO: 1833201 - RNA, 19 nt, Artificial Sequence
  Description of Artificial Sequence: Synthetic oligonucleotide
  Sense strand starting at position 3449 of SEQ ID NO: 1563804
aguguaagucagcaauaug

SEQ ID NO: 1833202 - RNA, 19 nt, Artificial Sequence
  Description of Artificial Sequence: Synthetic oligonucleotide
  Antisense strand to SEQ ID NO: 1833201
cauauugcugacuuacacu

SEQ ID NO: 1833203 - RNA, 19 nt, Artificial Sequence
  Description of Artificial Sequence: Synthetic oligonucleotide
  Sense strand starting at position 3452 of SEQ ID NO: 1563804
guaagucagcaauaugaac

SEQ ID NO: 1833204 - RNA, 19 nt, Artificial Sequence
  Description of Artificial Sequence: Synthetic oligonucleotide
  Antisense strand to SEQ ID NO: 1833203
guucauauugcugacuuac

SEQ ID NO: 1833205 - RNA, 19 nt, Artificial Sequence
  Description of Artificial Sequence: Synthetic oligonucleotide
  Sense strand starting at position 3498 of SEQ ID NO: 1563804
ggcacuaauucuguaaaua

SEQ ID NO: 1833206 - RNA, 19 nt, Artificial Sequence
  Description of Artificial Sequence: Synthetic oligonucleotide
  Antisense strand to SEQ ID NO: 1833205
uauuuacagaauuagugcc

SEQ ID NO: 1833207 - RNA, 19 nt, Artificial Sequence
  Description of Artificial Sequence: Synthetic oligonucleotide
  Sense strand starting at position 3547 of SEQ ID NO: 1563804
ucuguucuccauuaaugga

SEQ ID NO: 1833208 - RNA, 19 nt, Artificial Sequence
  Description of Artificial Sequence: Synthetic oligonucleotide
  Antisense strand to SEQ ID NO: 1833207
uccauuaauggagaacaga

SEQ ID NO: 1833209 - RNA, 19 nt, Artificial Sequence
  Description of Artificial Sequence: Synthetic oligonucleotide
  Sense strand starting at position 3628 of SEQ ID NO: 1563804
aguugacuccaguaagauc

SEQ ID NO: 1833210 - RNA, 19 nt, Artificial Sequence
  Description of Artificial Sequence: Synthetic oligonucleotide
  Antisense strand to SEQ ID NO: 1833209
gaucuuacuggagucaacu

SEQ ID NO: 1833211 - RNA, 19 nt, Artificial Sequence
  Description of Artificial Sequence: Synthetic oligonucleotide
  Sense strand starting at position 3660 of SEQ ID NO: 1563804
uuaggauuaucuuuaaggu

SEQ ID NO: 1833212 - RNA, 19 nt, Artificial Sequence
  Description of Artificial Sequence: Synthetic oligonucleotide
  Antisense strand to SEQ ID NO: 1833211
accuuaaagauaauccuaa

SEQ ID NO: 1833213 - RNA, 19 nt, Artificial Sequence
  Description of Artificial Sequence: Synthetic oligonucleotide
  Sense strand starting at position 3840 of SEQ ID NO: 1563804
cuuugacuauucguuaaag

SEQ ID NO: 1833214 - RNA, 19 nt, Artificial Sequence
  Description of Artificial Sequence: Synthetic oligonucleotide
  Antisense strand to SEQ ID NO: 1833213
cuuuaacgaauagucaaag

SEQ ID NO: 1833215 - RNA, 19 nt, Artificial Sequence
  Description of Artificial Sequence: Synthetic oligonucleotide
  Sense strand starting at position 3841 of SEQ ID NO: 1563804
uuugacuauucguuaaaga

SEQ ID NO: 1833216 - RNA, 19 nt, Artificial Sequence
  Description of Artificial Sequence: Synthetic oligonucleotide
  Antisense strand to SEQ ID NO: 1833215
ucuuuaacgaauagucaaa

SEQ ID NO: 1833217 - RNA, 19 nt, Artificial Sequence
  Description of Artificial Sequence: Synthetic oligonucleotide
  Sense strand starting at position 3842 of SEQ ID NO: 1563804
uugacuauucguuaaagau

SEQ ID NO: 1833218 - RNA, 19 nt, Artificial Sequence
  Description of Artificial Sequence: Synthetic oligonucleotide
  Antisense strand to SEQ ID NO: 1833217
aucuuuaacgaauagucaa

SEQ ID NO: 1833219 - RNA, 19 nt, Artificial Sequence
  Description of Artificial Sequence: Synthetic oligonucleotide
  Sense strand starting at position 3898 of SEQ ID NO: 1563804
gcaucuuauuuaguuugau

SEQ ID NO: 1833220 - RNA, 19 nt, Artificial Sequence
  Description of Artificial Sequence: Synthetic oligonucleotide
  Antisense strand to SEQ ID NO: 1833219
aucaaacuaaauaagaugc

SEQ ID NO: 1833221 - RNA, 19 nt, Artificial Sequence
  Description of Artificial Sequence: Synthetic oligonucleotide
  Sense strand starting at position 3910 of SEQ ID NO: 1563804
guuugauacccauagcucu

SEQ ID NO: 1833222 - RNA, 19 nt, Artificial Sequence
  Description of Artificial Sequence: Synthetic oligonucleotide
  Antisense strand to SEQ ID NO: 1833221
agagcuauggguaucaaac

SEQ ID NO: 1833223 - RNA, 19 nt, Artificial Sequence
  Description of Artificial Sequence: Synthetic oligonucleotide
  Sense strand starting at position 66 of SEQ ID NO: 1563805
gagucaagauccuugcucu

SEQ ID NO: 1833224 - RNA, 19 nt, Artificial Sequence
  Description of Artificial Sequence: Synthetic oligonucleotide
  Antisense strand to SEQ ID NO: 1833223
agagcaaggaucuugacuc

SEQ ID NO: 1833225 - RNA, 19 nt, Artificial Sequence
  Description of Artificial Sequence: Synthetic oligonucleotide
  Sense strand starting at position 67 of SEQ ID NO: 1563805
agucaagauccuugcucuu

SEQ ID NO: 1833226 - RNA, 19 nt, Artificial Sequence
  Description of Artificial Sequence: Synthetic oligonucleotide
  Antisense strand to SEQ ID NO: 1833225
aagagcaaggaucuugacu

SEQ ID NO: 1833227 - RNA, 19 nt, Artificial Sequence
  Description of Artificial Sequence: Synthetic oligonucleotide
  Sense strand starting at position 93 of SEQ ID NO: 1563805
augcuuguacauggucuaa

SEQ ID NO: 1833228 - RNA, 19 nt, Artificial Sequence
  Description of Artificial Sequence: Synthetic oligonucleotide
  Antisense strand to SEQ ID NO: 1833227
uuagaccauguacaagcau

SEQ ID NO: 1833229 - RNA, 19 nt, Artificial Sequence
  Description of Artificial Sequence: Synthetic oligonucleotide
  Sense strand starting at position 95 of SEQ ID NO: 1563805
gcuuguacauggucuaaga

SEQ ID NO: 1833230 - RNA, 19 nt, Artificial Sequence
  Description of Artificial Sequence: Synthetic oligonucleotide
  Antisense strand to SEQ ID NO: 1833229
ucuuagaccauguacaagc

SEQ ID NO: 1833231 - RNA, 19 nt, Artificial Sequence
  Description of Artificial Sequence: Synthetic oligonucleotide
  Sense strand starting at position 136 of SEQ ID NO: 1563805
cagugaacaugcccauagu

SEQ ID NO: 1833232 - RNA, 19 nt, Artificial Sequence
  Description of Artificial Sequence: Synthetic oligonucleotide
  Antisense strand to SEQ ID NO: 1833231
acuaugggcauguucacug

SEQ ID NO: 1833233 - RNA, 19 nt, Artificial Sequence
  Description of Artificial Sequence: Synthetic oligonucleotide
  Sense strand starting at position 185 of SEQ ID NO: 1563805
gccucuuucccggaggaga

SEQ ID NO: 1833234 - RNA, 19 nt, Artificial Sequence
  Description of Artificial Sequence: Synthetic oligonucleotide
  Antisense strand to SEQ ID NO: 1833233
ucuccuccgggaaagaggc

SEQ ID NO: 1833235 - RNA, 19 nt, Artificial Sequence
  Description of Artificial Sequence: Synthetic oligonucleotide
  Sense strand starting at position 576 of SEQ ID NO: 1563805
ugaggaaggucuucuagca

SEQ ID NO: 1833236 - RNA, 19 nt, Artificial Sequence
  Description of Artificial Sequence: Synthetic oligonucleotide
  Antisense strand to SEQ ID NO: 1833235
ugcuagaagaccuuccuca

SEQ ID NO: 1833237 - RNA, 19 nt, Artificial Sequence
  Description of Artificial Sequence: Synthetic oligonucleotide
  Sense strand starting at position 704 of SEQ ID NO: 1563805
ggacuagagugcucacuuc

SEQ ID NO: 1833238 - RNA, 19 nt, Artificial Sequence
  Description of Artificial Sequence: Synthetic oligonucleotide
  Antisense strand to SEQ ID NO: 1833237
gaagugagcacucuagucc

SEQ ID NO: 1833239 - RNA, 19 nt, Artificial Sequence
  Description of Artificial Sequence: Synthetic oligonucleotide
  Sense strand starting at position 757 of SEQ ID NO: 1563805
uggaguucuauggaaggcu

SEQ ID NO: 1833240 - RNA, 19 nt, Artificial Sequence
  Description of Artificial Sequence: Synthetic oligonucleotide
  Antisense strand to SEQ ID NO: 1833239
agccuuccauagaacucca

SEQ ID NO: 1833241 - RNA, 19 nt, Artificial Sequence
  Description of Artificial Sequence: Synthetic oligonucleotide
  Sense strand starting at position 787 of SEQ ID NO: 1563805
aagggauucuaugucuaaa

SEQ ID NO: 1833242 - RNA, 19 nt, Artificial Sequence
  Description of Artificial Sequence: Synthetic oligonucleotide
  Antisense strand to SEQ ID NO: 1833241
uuuagacauagaaucccuu

SEQ ID NO: 1833243 - RNA, 19 nt, Artificial Sequence
  Description of Artificial Sequence: Synthetic oligonucleotide
  Sense strand starting at position 818 of SEQ ID NO: 1563805
uggucuacuagugagauau

SEQ ID NO: 1833244 - RNA, 19 nt, Artificial Sequence
  Description of Artificial Sequence: Synthetic oligonucleotide
  Antisense strand to SEQ ID NO: 1833243
auaucucacuaguagacca

SEQ ID NO: 1833245 - RNA, 19 nt, Artificial Sequence
  Description of Artificial Sequence: Synthetic oligonucleotide
  Sense strand starting at position 904 of SEQ ID NO: 1563805
ugacuuuaguuacugcaaa

SEQ ID NO: 1833246 - RNA, 19 nt, Artificial Sequence
  Description of Artificial Sequence: Synthetic oligonucleotide
  Antisense strand to SEQ ID NO: 1833245
uuugcaguaacuaaaguca

SEQ ID NO: 1833247 - RNA, 19 nt, Artificial Sequence
  Description of Artificial Sequence: Synthetic oligonucleotide
  Sense strand starting at position 976 of SEQ ID NO: 1563805
guaccaucuccauggguuu

SEQ ID NO: 1833248 - RNA, 19 nt, Artificial Sequence
  Description of Artificial Sequence: Synthetic oligonucleotide
  Antisense strand to SEQ ID NO: 1833247
aaacccauggagaugguac

SEQ ID NO: 1833249 - RNA, 19 nt, Artificial Sequence
  Description of Artificial Sequence: Synthetic oligonucleotide
  Sense strand starting at position 1126 of SEQ ID NO: 1563805
gaggcauucugagcuggga

SEQ ID NO: 1833250 - RNA, 19 nt, Artificial Sequence
  Description of Artificial Sequence: Synthetic oligonucleotide
  Antisense strand to SEQ ID NO: 1833249
ucccagcucagaaugccuc

SEQ ID NO: 1833251 - RNA, 19 nt, Artificial Sequence
  Description of Artificial Sequence: Synthetic oligonucleotide
  Sense strand starting at position 1128 of SEQ ID NO: 1563805
ggcauucugagcugggaac

SEQ ID NO: 1833252 - RNA, 19 nt, Artificial Sequence
  Description of Artificial Sequence: Synthetic oligonucleotide
  Antisense strand to SEQ ID NO: 1833251
guucccagcucagaaugcc

SEQ ID NO: 1833253 - RNA, 19 nt, Artificial Sequence
  Description of Artificial Sequence: Synthetic oligonucleotide
  Sense strand starting at position 1129 of SEQ ID NO: 1563805
gcauucugagcugggaaca

SEQ ID NO: 1833254 - RNA, 19 nt, Artificial Sequence
  Description of Artificial Sequence: Synthetic oligonucleotide
  Antisense strand to SEQ ID NO: 1833253
uguucccagcucagaaugc

SEQ ID NO: 1833255 - RNA, 19 nt, Artificial Sequence
  Description of Artificial Sequence: Synthetic oligonucleotide
  Sense strand starting at position 1130 of SEQ ID NO: 1563805
cauucugagcugggaacau

SEQ ID NO: 1833256 - RNA, 19 nt, Artificial Sequence
  Description of Artificial Sequence: Synthetic oligonucleotide
  Antisense strand to SEQ ID NO: 1833255
auguucccagcucagaaug

SEQ ID NO: 1833257 - RNA, 19 nt, Artificial Sequence
  Description of Artificial Sequence: Synthetic oligonucleotide
  Sense strand starting at position 1169 of SEQ ID NO: 1563805
gcccuuuaucuauaguuac

SEQ ID NO: 1833258 - RNA, 19 nt, Artificial Sequence
  Description of Artificial Sequence: Synthetic oligonucleotide
  Antisense strand to SEQ ID NO: 1833257
guaacuauagauaaagggc

SEQ ID NO: 1833259 - RNA, 19 nt, Artificial Sequence
  Description of Artificial Sequence: Synthetic oligonucleotide
  Sense strand starting at position 1172 of SEQ ID NO: 1563805
cuuuaucuauaguuacuga

SEQ ID NO: 1833260 - RNA, 19 nt, Artificial Sequence
  Description of Artificial Sequence: Synthetic oligonucleotide
  Antisense strand to SEQ ID NO: 1833259
ucaguaacuauagauaaag

SEQ ID NO: 1833261 - RNA, 19 nt, Artificial Sequence
  Description of Artificial Sequence: Synthetic oligonucleotide
  Sense strand starting at position 1417 of SEQ ID NO: 1563805
ggauuacuacagugaucaa

SEQ ID NO: 1833262 - RNA, 19 nt, Artificial Sequence
  Description of Artificial Sequence: Synthetic oligonucleotide
  Antisense strand to SEQ ID NO: 1833261
uugaucacuguaguaaucc

SEQ ID NO: 1833263 - RNA, 19 nt, Artificial Sequence
  Description of Artificial Sequence: Synthetic oligonucleotide
  Sense strand starting at position 1420 of SEQ ID NO: 1563805
uuacuacagugaucaagag

SEQ ID NO: 1833264 - RNA, 19 nt, Artificial Sequence
  Description of Artificial Sequence: Synthetic oligonucleotide
  Antisense strand to SEQ ID NO: 1833263
cucuugaucacuguaguaa

SEQ ID NO: 1833265 - RNA, 19 nt, Artificial Sequence
  Description of Artificial Sequence: Synthetic oligonucleotide
  Sense strand starting at position 1491 of SEQ ID NO: 1563805
aauguaggcuaauuguaua

SEQ ID NO: 1833266 - RNA, 19 nt, Artificial Sequence
  Description of Artificial Sequence: Synthetic oligonucleotide
  Antisense strand to SEQ ID NO: 1833265
uauacaauuagccuacauu

SEQ ID NO: 1833267 - RNA, 19 nt, Artificial Sequence
  Description of Artificial Sequence: Synthetic oligonucleotide
  Sense strand starting at position 1496 of SEQ ID NO: 1563805
aggcuaauuguauauguau

SEQ ID NO: 1833268 - RNA, 19 nt, Artificial Sequence
  Description of Artificial Sequence: Synthetic oligonucleotide
  Antisense strand to SEQ ID NO: 1833267
auacauauacaauuagccu

SEQ ID NO: 1833269 - RNA, 19 nt, Artificial Sequence
  Description of Artificial Sequence: Synthetic oligonucleotide
  Sense strand starting at position 1723 of SEQ ID NO: 1563805
ucagaacagcuucggaaua

SEQ ID NO: 1833270 - RNA, 19 nt, Artificial Sequence
  Description of Artificial Sequence: Synthetic oligonucleotide
  Antisense strand to SEQ ID NO: 1833269
uauuccgaagcuguucuga

SEQ ID NO: 1833271 - RNA, 19 nt, Artificial Sequence
  Description of Artificial Sequence: Synthetic oligonucleotide
  Sense strand starting at position 1728 of SEQ ID NO: 1563805
acagcuucggaauaguaaa

SEQ ID NO: 1833272 - RNA, 19 nt, Artificial Sequence
  Description of Artificial Sequence: Synthetic oligonucleotide
  Antisense strand to SEQ ID NO: 1833271
uuuacuauuccgaagcugu

SEQ ID NO: 1833273 - RNA, 19 nt, Artificial Sequence
  Description of Artificial Sequence: Synthetic oligonucleotide
  Sense strand starting at position 1735 of SEQ ID NO: 1563805
cggaauaguaaagguggaa

SEQ ID NO: 1833274 - RNA, 19 nt, Artificial Sequence
  Description of Artificial Sequence: Synthetic oligonucleotide
  Antisense strand to SEQ ID NO: 1833273
uuccaccuuuacuauuccg

SEQ ID NO: 1833275 - RNA, 19 nt, Artificial Sequence
  Description of Artificial Sequence: Synthetic oligonucleotide
  Sense strand starting at position 1750 of SEQ ID NO: 1563805
ggaagacagucuucuguug

SEQ ID NO: 1833276 - RNA, 19 nt, Artificial Sequence
  Description of Artificial Sequence: Synthetic oligonucleotide
  Antisense strand to SEQ ID NO: 1833275
caacagaagacugucuucc

SEQ ID NO: 1833277 - RNA, 19 nt, Artificial Sequence
  Description of Artificial Sequence: Synthetic oligonucleotide
  Sense strand starting at position 1912 of SEQ ID NO: 1563805
ugucuuagagcuggucaua

SEQ ID NO: 1833278 - RNA, 19 nt, Artificial Sequence
  Description of Artificial Sequence: Synthetic oligonucleotide
  Antisense strand to SEQ ID NO: 1833277
uaugaccagcucuaagaca

SEQ ID NO: 1833279 - RNA, 19 nt, Artificial Sequence
  Description of Artificial Sequence: Synthetic oligonucleotide
  Sense strand starting at position 1915 of SEQ ID NO: 1563805
cuuagagcuggucauaaag

SEQ ID NO: 1833280 - RNA, 19 nt, Artificial Sequence
  Description of Artificial Sequence: Synthetic oligonucleotide
  Antisense strand to SEQ ID NO: 1833279
cuuuaugaccagcucuaag

SEQ ID NO: 1833281 - RNA, 19 nt, Artificial Sequence
  Description of Artificial Sequence: Synthetic oligonucleotide
  Sense strand starting at position 2070 of SEQ ID NO: 1563805
ccaacucagucucuuagua

SEQ ID NO: 1833282 - RNA, 19 nt, Artificial Sequence
  Description of Artificial Sequence: Synthetic oligonucleotide
  Antisense strand to SEQ ID NO: 1833281
uacuaagagacugaguugg

SEQ ID NO: 1833283 - RNA, 19 nt, Artificial Sequence
  Description of Artificial Sequence: Synthetic oligonucleotide
  Sense strand starting at position 2092 of SEQ ID NO: 1563805
gguuauaucuuucugucca

SEQ ID NO: 1833284 - RNA, 19 nt, Artificial Sequence
  Description of Artificial Sequence: Synthetic oligonucleotide
  Antisense strand to SEQ ID NO: 1833283
uggacagaaagauauaacc

SEQ ID NO: 1833285 - RNA, 19 nt, Artificial Sequence
  Description of Artificial Sequence: Synthetic oligonucleotide
  Sense strand starting at position 2329 of SEQ ID NO: 1563805
cuauguaccucuuuauaug

SEQ ID NO: 1833286 - RNA, 19 nt, Artificial Sequence
  Description of Artificial Sequence: Synthetic oligonucleotide
  Antisense strand to SEQ ID NO: 1833285
cauauaaagagguacauag

SEQ ID NO: 1833287 - RNA, 19 nt, Artificial Sequence
  Description of Artificial Sequence: Synthetic oligonucleotide
  Sense strand starting at position 2581 of SEQ ID NO: 1563805
gauagauagcgucagaaug

SEQ ID NO: 1833288 - RNA, 19 nt, Artificial Sequence
  Description of Artificial Sequence: Synthetic oligonucleotide
  Antisense strand to SEQ ID NO: 1833287
cauucugacgcuaucuauc

SEQ ID NO: 1833289 - RNA, 19 nt, Artificial Sequence
  Description of Artificial Sequence: Synthetic oligonucleotide
  Sense strand starting at position 2626 of SEQ ID NO: 1563805
gugucugcuguagaauuga

SEQ ID NO: 1833290 - RNA, 19 nt, Artificial Sequence
  Description of Artificial Sequence: Synthetic oligonucleotide
  Antisense strand to SEQ ID NO: 1833289
ucaauucuacagcagacac

SEQ ID NO: 1833291 - RNA, 19 nt, Artificial Sequence
  Description of Artificial Sequence: Synthetic oligonucleotide
  Sense strand starting at position 2746 of SEQ ID NO: 1563805
gaugaaaugcccuggugca

SEQ ID NO: 1833292 - RNA, 19 nt, Artificial Sequence
  Description of Artificial Sequence: Synthetic oligonucleotide
  Antisense strand to SEQ ID NO: 1833291
ugcaccagggcauuucauc

SEQ ID NO: 1833293 - RNA, 19 nt, Artificial Sequence
  Description of Artificial Sequence: Synthetic oligonucleotide
  Sense strand starting at position 2747 of SEQ ID NO: 1563805
augaaaugcccuggugcau

SEQ ID NO: 1833294 - RNA, 19 nt, Artificial Sequence
  Description of Artificial Sequence: Synthetic oligonucleotide
  Antisense strand to SEQ ID NO: 1833293
augcaccagggcauuucau

SEQ ID NO: 1833295 - RNA, 19 nt, Artificial Sequence
  Description of Artificial Sequence: Synthetic oligonucleotide
  Sense strand starting at position 2814 of SEQ ID NO: 1563805
agauuaugguucccagauu

SEQ ID NO: 1833296 - RNA, 19 nt, Artificial Sequence
  Description of Artificial Sequence: Synthetic oligonucleotide
  Antisense strand to SEQ ID NO: 1833295
aaucugggaaccauaaucu

SEQ ID NO: 1833297 - RNA, 19 nt, Artificial Sequence
  Description of Artificial Sequence: Synthetic oligonucleotide
  Sense strand starting at position 2815 of SEQ ID NO: 1563805
gauuaugguucccagauuu

SEQ ID NO: 1833298 - RNA, 19 nt, Artificial Sequence
  Description of Artificial Sequence: Synthetic oligonucleotide
  Antisense strand to SEQ ID NO: 1833297
aaaucugggaaccauaauc

SEQ ID NO: 1833299 - RNA, 19 nt, Artificial Sequence
  Description of Artificial Sequence: Synthetic oligonucleotide
  Sense strand starting at position 3917 of SEQ ID NO: 1563805
ggaggacuguaguucucuu

SEQ ID NO: 1833300 - RNA, 19 nt, Artificial Sequence
  Description of Artificial Sequence: Synthetic oligonucleotide
  Antisense strand to SEQ ID NO: 1833299
aagagaacuacaguccucc

SEQ ID NO: 1833301 - RNA, 19 nt, Artificial Sequence
  Description of Artificial Sequence: Synthetic oligonucleotide
  Sense strand starting at position 3939 of SEQ ID NO: 1563805
acaguuccacuagggaaua

SEQ ID NO: 1833302 - RNA, 19 nt, Artificial Sequence
  Description of Artificial Sequence: Synthetic oligonucleotide
  Antisense strand to SEQ ID NO: 1833301
uauucccuaguggaacugu

SEQ ID NO: 1833303 - RNA, 19 nt, Artificial Sequence
  Description of Artificial Sequence: Synthetic oligonucleotide
  Sense strand starting at position 213 of SEQ ID NO: 1563806
gaggguacauucuuaccuu

SEQ ID NO: 1833304 - RNA, 19 nt, Artificial Sequence
  Description of Artificial Sequence: Synthetic oligonucleotide
  Antisense strand to SEQ ID NO: 1833303
aagguaagaauguacccuc

SEQ ID NO: 1833305 - RNA, 19 nt, Artificial Sequence
  Description of Artificial Sequence: Synthetic oligonucleotide
  Sense strand starting at position 455 of SEQ ID NO: 1563806
cuggguuuccuccagguau

SEQ ID NO: 1833306 - RNA, 19 nt, Artificial Sequence
  Description of Artificial Sequence: Synthetic oligonucleotide
  Antisense strand to SEQ ID NO: 1833305
auaccuggaggaaacccag

SEQ ID NO: 1833307 - RNA, 19 nt, Artificial Sequence
  Description of Artificial Sequence: Synthetic oligonucleotide
  Sense strand starting at position 512 of SEQ ID NO: 1563806
ugcugaacuguggaugagu

SEQ ID NO: 1833308 - RNA, 19 nt, Artificial Sequence
  Description of Artificial Sequence: Synthetic oligonucleotide
  Antisense strand to SEQ ID NO: 1833307
acucauccacaguucagca

SEQ ID NO: 1833309 - RNA, 19 nt, Artificial Sequence
  Description of Artificial Sequence: Synthetic oligonucleotide
  Sense strand starting at position 514 of SEQ ID NO: 1563806
cugaacuguggaugaguuu

SEQ ID NO: 1833310 - RNA, 19 nt, Artificial Sequence
  Description of Artificial Sequence: Synthetic oligonucleotide
  Antisense strand to SEQ ID NO: 1833309
aaacucauccacaguucag

SEQ ID NO: 1833311 - RNA, 19 nt, Artificial Sequence
  Description of Artificial Sequence: Synthetic oligonucleotide
  Sense strand starting at position 643 of SEQ ID NO: 1563806
uuucuaccucagggauaau

SEQ ID NO: 1833312 - RNA, 19 nt, Artificial Sequence
  Description of Artificial Sequence: Synthetic oligonucleotide
  Antisense strand to SEQ ID NO: 1833311
auuaucccugagguagaaa

SEQ ID NO: 1833313 - RNA, 19 nt, Artificial Sequence
  Description of Artificial Sequence: Synthetic oligonucleotide
  Sense strand starting at position 654 of SEQ ID NO: 1563806
gggauaauugguugccuga

SEQ ID NO: 1833314 - RNA, 19 nt, Artificial Sequence
  Description of Artificial Sequence: Synthetic oligonucleotide
  Antisense strand to SEQ ID NO: 1833313
ucaggcaaccaauuauccc

SEQ ID NO: 1833315 - RNA, 19 nt, Artificial Sequence
  Description of Artificial Sequence: Synthetic oligonucleotide
  Sense strand starting at position 923 of SEQ ID NO: 1563806
ucagauucccaaggcugaa

SEQ ID NO: 1833316 - RNA, 19 nt, Artificial Sequence
  Description of Artificial Sequence: Synthetic oligonucleotide
  Antisense strand to SEQ ID NO: 1833315
uucagccuugggaaucuga

SEQ ID NO: 1833317 - RNA, 19 nt, Artificial Sequence
  Description of Artificial Sequence: Synthetic oligonucleotide
  Sense strand starting at position 1073 of SEQ ID NO: 1563806
ggucuuucucaugauacca

SEQ ID NO: 1833318 - RNA, 19 nt, Artificial Sequence
  Description of Artificial Sequence: Synthetic oligonucleotide
  Antisense strand to SEQ ID NO: 1833317
ugguaucaugagaaagacc

SEQ ID NO: 1833319 - RNA, 19 nt, Artificial Sequence
  Description of Artificial Sequence: Synthetic oligonucleotide
  Sense strand starting at position 1547 of SEQ ID NO: 1563806
ggcuaucacuucucucuga

SEQ ID NO: 1833320 - RNA, 19 nt, Artificial Sequence
  Description of Artificial Sequence: Synthetic oligonucleotide
  Antisense strand to SEQ ID NO: 1833319
ucagagagaagugauagcc

SEQ ID NO: 1833321 - RNA, 19 nt, Artificial Sequence
  Description of Artificial Sequence: Synthetic oligonucleotide
  Sense strand starting at position 1661 of SEQ ID NO: 1563806
gguggaaccucuccauaau

SEQ ID NO: 1833322 - RNA, 19 nt, Artificial Sequence
  Description of Artificial Sequence: Synthetic oligonucleotide
  Antisense strand to SEQ ID NO: 1833321
auuauggagagguuccacc

SEQ ID NO: 1833323 - RNA, 19 nt, Artificial Sequence
  Description of Artificial Sequence: Synthetic oligonucleotide
  Sense strand starting at position 1692 of SEQ ID NO: 1563806
ugauguugaugccuggaaa

SEQ ID NO: 1833324 - RNA, 19 nt, Artificial Sequence
  Description of Artificial Sequence: Synthetic oligonucleotide
  Antisense strand to SEQ ID NO: 1833323
uuuccaggcaucaacauca

SEQ ID NO: 1833325 - RNA, 19 nt, Artificial Sequence
  Description of Artificial Sequence: Synthetic oligonucleotide
  Sense strand starting at position 1693 of SEQ ID NO: 1563806
gauguugaugccuggaaag

SEQ ID NO: 1833326 - RNA, 19 nt, Artificial Sequence
  Description of Artificial Sequence: Synthetic oligonucleotide
  Antisense strand to SEQ ID NO: 1833325
cuuuccaggcaucaacauc

SEQ ID NO: 1833327 - RNA, 19 nt, Artificial Sequence
  Description of Artificial Sequence: Synthetic oligonucleotide
  Sense strand starting at position 1793 of SEQ ID NO: 1563806
gggauugucucagccugau

SEQ ID NO: 1833328 - RNA, 19 nt, Artificial Sequence
  Description of Artificial Sequence: Synthetic oligonucleotide
  Antisense strand to SEQ ID NO: 1833327
aucaggcugagacaauccc

SEQ ID NO: 1833329 - RNA, 19 nt, Artificial Sequence
  Description of Artificial Sequence: Synthetic oligonucleotide
  Sense strand starting at position 1796 of SEQ ID NO: 1563806
auugucucagccugauaau

SEQ ID NO: 1833330 - RNA, 19 nt, Artificial Sequence
  Description of Artificial Sequence: Synthetic oligonucleotide
  Antisense strand to SEQ ID NO: 1833329
auuaucaggcugagacaau

SEQ ID NO: 1833331 - RNA, 19 nt, Artificial Sequence
  Description of Artificial Sequence: Synthetic oligonucleotide
  Sense strand starting at position 1797 of SEQ ID NO: 1563806
uugucucagccugauaauu

SEQ ID NO: 1833332 - RNA, 19 nt, Artificial Sequence
  Description of Artificial Sequence: Synthetic oligonucleotide
  Antisense strand to SEQ ID NO: 1833331
aauuaucaggcugagacaa

SEQ ID NO: 1833333 - RNA, 19 nt, Artificial Sequence
  Description of Artificial Sequence: Synthetic oligonucleotide
  Sense strand starting at position 2043 of SEQ ID NO: 1563806
ccuggagcuucccuggauu

SEQ ID NO: 1833334 - RNA, 19 nt, Artificial Sequence
  Description of Artificial Sequence: Synthetic oligonucleotide
  Antisense strand to SEQ ID NO: 1833333
aauccagggaagcuccagg

SEQ ID NO: 1833335 - RNA, 19 nt, Artificial Sequence
  Description of Artificial Sequence: Synthetic oligonucleotide
  Sense strand starting at position 2221 of SEQ ID NO: 1563806
ucagguuucugaccuugau

SEQ ID NO: 1833336 - RNA, 19 nt, Artificial Sequence
  Description of Artificial Sequence: Synthetic oligonucleotide
  Antisense strand to SEQ ID NO: 1833335
aucaaggucagaaaccuga

SEQ ID NO: 1833337 - RNA, 19 nt, Artificial Sequence
  Description of Artificial Sequence: Synthetic oligonucleotide
  Sense strand starting at position 2231 of SEQ ID NO: 1563806
gaccuugauuccuugcaga

SEQ ID NO: 1833338 - RNA, 19 nt, Artificial Sequence
  Description of Artificial Sequence: Synthetic oligonucleotide
  Antisense strand to SEQ ID NO: 1833337
ucugcaaggaaucaagguc

SEQ ID NO: 1833339 - RNA, 19 nt, Artificial Sequence
  Description of Artificial Sequence: Synthetic oligonucleotide
  Sense strand starting at position 2291 of SEQ ID NO: 1563806
ggaccaagucucugacucu

SEQ ID NO: 1833340 - RNA, 19 nt, Artificial Sequence
  Description of Artificial Sequence: Synthetic oligonucleotide
  Antisense strand to SEQ ID NO: 1833339
agagucagagacuuggucc

SEQ ID NO: 1833341 - RNA, 19 nt, Artificial Sequence
  Description of Artificial Sequence: Synthetic oligonucleotide
  Sense strand starting at position 2483 of SEQ ID NO: 1563806
ugaagugaugggugggaga

SEQ ID NO: 1833342 - RNA, 19 nt, Artificial Sequence
  Description of Artificial Sequence: Synthetic oligonucleotide
  Antisense strand to SEQ ID NO: 1833341
ucucccacccaucacuuca

SEQ ID NO: 1833343 - RNA, 19 nt, Artificial Sequence
  Description of Artificial Sequence: Synthetic oligonucleotide
  Sense strand starting at position 2661 of SEQ ID NO: 1563806
agaucuagacuuugcaaac

SEQ ID NO: 1833344 - RNA, 19 nt, Artificial Sequence
  Description of Artificial Sequence: Synthetic oligonucleotide
  Antisense strand to SEQ ID NO: 1833343
guuugcaaagucuagaucu

SEQ ID NO: 1833345 - RNA, 19 nt, Artificial Sequence
  Description of Artificial Sequence: Synthetic oligonucleotide
  Sense strand starting at position 2736 of SEQ ID NO: 1563806
ugcggaaguccugcguuua

SEQ ID NO: 1833346 - RNA, 19 nt, Artificial Sequence
  Description of Artificial Sequence: Synthetic oligonucleotide
  Antisense strand to SEQ ID NO: 1833345
uaaacgcaggacuuccgca

SEQ ID NO: 1833347 - RNA, 19 nt, Artificial Sequence
  Description of Artificial Sequence: Synthetic oligonucleotide
  Sense strand starting at position 2741 of SEQ ID NO: 1563806
aaguccugcguuuagaauu

SEQ ID NO: 1833348 - RNA, 19 nt, Artificial Sequence
  Description of Artificial Sequence: Synthetic oligonucleotide
  Antisense strand to SEQ ID NO: 1833347
aauucuaaacgcaggacuu

SEQ ID NO: 1833349 - RNA, 19 nt, Artificial Sequence
  Description of Artificial Sequence: Synthetic oligonucleotide
  Sense strand starting at position 2945 of SEQ ID NO: 1563806
agugguuaucagcacaaau

SEQ ID NO: 1833350 - RNA, 19 nt, Artificial Sequence
  Description of Artificial Sequence: Synthetic oligonucleotide
  Antisense strand to SEQ ID NO: 1833349
auuugugcugauaaccacu

SEQ ID NO: 1833351 - RNA, 19 nt, Artificial Sequence
  Description of Artificial Sequence: Synthetic oligonucleotide
  Sense strand starting at position 2947 of SEQ ID NO: 1563806
ugguuaucagcacaaauuc

SEQ ID NO: 1833352 - RNA, 19 nt, Artificial Sequence
  Description of Artificial Sequence: Synthetic oligonucleotide
  Antisense strand to SEQ ID NO: 1833351
gaauuugugcugauaacca

SEQ ID NO: 1833353 - RNA, 19 nt, Artificial Sequence
  Description of Artificial Sequence: Synthetic oligonucleotide
  Sense strand starting at position 2968 of SEQ ID NO: 1563806
gccguauuccuuuaaucaa

SEQ ID NO: 1833354 - RNA, 19 nt, Artificial Sequence
  Description of Artificial Sequence: Synthetic oligonucleotide
  Antisense strand to SEQ ID NO: 1833353
uugauuaaaggaauacggc

SEQ ID NO: 1833355 - RNA, 19 nt, Artificial Sequence
  Description of Artificial Sequence: Synthetic oligonucleotide
  Sense strand starting at position 2995 of SEQ ID NO: 1563806
uccucauguccugaaguua

SEQ ID NO: 1833356 - RNA, 19 nt, Artificial Sequence
  Description of Artificial Sequence: Synthetic oligonucleotide
  Antisense strand to SEQ ID NO: 1833355
uaacuucaggacaugagga

SEQ ID NO: 1833357 - RNA, 19 nt, Artificial Sequence
  Description of Artificial Sequence: Synthetic oligonucleotide
  Sense strand starting at position 3221 of SEQ ID NO: 1563806
uuugcuuguuccuuuauuu

SEQ ID NO: 1833358 - RNA, 19 nt, Artificial Sequence
  Description of Artificial Sequence: Synthetic oligonucleotide
  Antisense strand to SEQ ID NO: 1833357
aaauaaaggaacaagcaaa

SEQ ID NO: 1833359 - RNA, 19 nt, Artificial Sequence
  Description of Artificial Sequence: Synthetic oligonucleotide
  Sense strand starting at position 3367 of SEQ ID NO: 1563806
agcccaguagcucaagauu

SEQ ID NO: 1833360 - RNA, 19 nt, Artificial Sequence
  Description of Artificial Sequence: Synthetic oligonucleotide
  Antisense strand to SEQ ID NO: 1833359
aaucuugagcuacugggcu

SEQ ID NO: 1833361 - RNA, 19 nt, Artificial Sequence
  Description of Artificial Sequence: Synthetic oligonucleotide
  Sense strand starting at position 3370 of SEQ ID NO: 1563806
ccaguagcucaagauuaau

SEQ ID NO: 1833362 - RNA, 19 nt, Artificial Sequence
  Description of Artificial Sequence: Synthetic oligonucleotide
  Antisense strand to SEQ ID NO: 1833361
auuaaucuugagcuacugg

SEQ ID NO: 1833363 - RNA, 19 nt, Artificial Sequence
  Description of Artificial Sequence: Synthetic oligonucleotide
  Sense strand starting at position 3376 of SEQ ID NO: 1563806
gcucaagauuaaucugaac

SEQ ID NO: 1833364 - RNA, 19 nt, Artificial Sequence
  Description of Artificial Sequence: Synthetic oligonucleotide
  Antisense strand to SEQ ID NO: 1833363
guucagauuaaucuugagc

SEQ ID NO: 1833365 - RNA, 19 nt, Artificial Sequence
  Description of Artificial Sequence: Synthetic oligonucleotide
  Sense strand starting at position 3645 of SEQ ID NO: 1563806
ccaacagaugccugagcuu

SEQ ID NO: 1833366 - RNA, 19 nt, Artificial Sequence
  Description of Artificial Sequence: Synthetic oligonucleotide
  Antisense strand to SEQ ID NO: 1833365
aagcucaggcaucuguugg

SEQ ID NO: 1833367 - RNA, 19 nt, Artificial Sequence
  Description of Artificial Sequence: Synthetic oligonucleotide
  Sense strand starting at position 3670 of SEQ ID NO: 1563806
caucuuggcugguuaagga

SEQ ID NO: 1833368 - RNA, 19 nt, Artificial Sequence
  Description of Artificial Sequence: Synthetic oligonucleotide
  Antisense strand to SEQ ID NO: 1833367
uccuuaaccagccaagaug

SEQ ID NO: 1833369 - RNA, 19 nt, Artificial Sequence
  Description of Artificial Sequence: Synthetic oligonucleotide
  Sense strand starting at position 3685 of SEQ ID NO: 1563806
aggaauuacgucugucaau

SEQ ID NO: 1833370 - RNA, 19 nt, Artificial Sequence
  Description of Artificial Sequence: Synthetic oligonucleotide
  Antisense strand to SEQ ID NO: 1833369
auugacagacguaauuccu

SEQ ID NO: 1833371 - RNA, 19 nt, Artificial Sequence
  Description of Artificial Sequence: Synthetic oligonucleotide
  Sense strand starting at position 3686 of SEQ ID NO: 1563806
ggaauuacgucugucaauu

SEQ ID NO: 1833372 - RNA, 19 nt, Artificial Sequence
  Description of Artificial Sequence: Synthetic oligonucleotide
  Antisense strand to SEQ ID NO: 1833371
aauugacagacguaauucc

SEQ ID NO: 1833373 - RNA, 19 nt, Artificial Sequence
  Description of Artificial Sequence: Synthetic oligonucleotide
  Sense strand starting at position 3771 of SEQ ID NO: 1563806
uguuuauuugggugcucuu

SEQ ID NO: 1833374 - RNA, 19 nt, Artificial Sequence
  Description of Artificial Sequence: Synthetic oligonucleotide
  Antisense strand to SEQ ID NO: 1833373
aagagcacccaaauaaaca

SEQ ID NO: 1833375 - RNA, 19 nt, Artificial Sequence
  Description of Artificial Sequence: Synthetic oligonucleotide
  Sense strand starting at position 3774 of SEQ ID NO: 1563806
uuauuugggugcucuuuga

SEQ ID NO: 1833376 - RNA, 19 nt, Artificial Sequence
  Description of Artificial Sequence: Synthetic oligonucleotide
  Antisense strand to SEQ ID NO: 1833375
ucaaagagcacccaaauaa

SEQ ID NO: 1833377 - RNA, 19 nt, Artificial Sequence
  Description of Artificial Sequence: Synthetic oligonucleotide
  Sense strand starting at position 3794 of SEQ ID NO: 1563806
cuggauauaucaguacuug

SEQ ID NO: 1833378 - RNA, 19 nt, Artificial Sequence
  Description of Artificial Sequence: Synthetic oligonucleotide
  Antisense strand to SEQ ID NO: 1833377
caaguacugauauauccag

SEQ ID NO: 1833379 - RNA, 19 nt, Artificial Sequence
  Description of Artificial Sequence: Synthetic oligonucleotide
  Sense strand starting at position 3795 of SEQ ID NO: 1563806
uggauauaucaguacuugu

SEQ ID NO: 1833380 - RNA, 19 nt, Artificial Sequence
  Description of Artificial Sequence: Synthetic oligonucleotide
  Antisense strand to SEQ ID NO: 1833379
acaaguacugauauaucca

SEQ ID NO: 1833381 - RNA, 19 nt, Artificial Sequence
  Description of Artificial Sequence: Synthetic oligonucleotide
  Sense strand starting at position 3964 of SEQ ID NO: 1563806
gaucuucuguucgcuauuu

SEQ ID NO: 1833382 - RNA, 19 nt, Artificial Sequence
  Description of Artificial Sequence: Synthetic oligonucleotide
  Antisense strand to SEQ ID NO: 1833381
aaauagcgaacagaagauc

SEQ ID NO: 1833383 - RNA, 19 nt, Artificial Sequence
  Description of Artificial Sequence: Synthetic oligonucleotide
  Sense strand starting at position 597 of SEQ ID NO: 1563807
ucaggcuucucaccuggau

SEQ ID NO: 1833384 - RNA, 19 nt, Artificial Sequence
  Description of Artificial Sequence: Synthetic oligonucleotide
  Antisense strand to SEQ ID NO: 1833383
auccaggugagaagccuga

SEQ ID NO: 1833385 - RNA, 19 nt, Artificial Sequence
  Description of Artificial Sequence: Synthetic oligonucleotide
  Sense strand starting at position 759 of SEQ ID NO: 1563807
guagguuguccagggcuga

SEQ ID NO: 1833386 - RNA, 19 nt, Artificial Sequence
  Description of Artificial Sequence: Synthetic oligonucleotide
  Antisense strand to SEQ ID NO: 1833385
ucagcccuggacaaccuac

SEQ ID NO: 1833387 - RNA, 19 nt, Artificial Sequence
  Description of Artificial Sequence: Synthetic oligonucleotide
  Sense strand starting at position 929 of SEQ ID NO: 1563807
caaccucuugccuguggua

SEQ ID NO: 1833388 - RNA, 19 nt, Artificial Sequence
  Description of Artificial Sequence: Synthetic oligonucleotide
  Antisense strand to SEQ ID NO: 1833387
uaccacaggcaagagguug

SEQ ID NO: 1833389 - RNA, 19 nt, Artificial Sequence
  Description of Artificial Sequence: Synthetic oligonucleotide
  Sense strand starting at position 931 of SEQ ID NO: 1563807
accucuugccugugguaca

SEQ ID NO: 1833390 - RNA, 19 nt, Artificial Sequence
  Description of Artificial Sequence: Synthetic oligonucleotide
  Antisense strand to SEQ ID NO: 1833389
uguaccacaggcaagaggu

SEQ ID NO: 1833391 - RNA, 19 nt, Artificial Sequence
  Description of Artificial Sequence: Synthetic oligonucleotide
  Sense strand starting at position 968 of SEQ ID NO: 1563807
agcuaucucugaucggguu

SEQ ID NO: 1833392 - RNA, 19 nt, Artificial Sequence
  Description of Artificial Sequence: Synthetic oligonucleotide
  Antisense strand to SEQ ID NO: 1833391
aacccgaucagagauagcu

SEQ ID NO: 1833393 - RNA, 19 nt, Artificial Sequence
  Description of Artificial Sequence: Synthetic oligonucleotide
  Sense strand starting at position 1148 of SEQ ID NO: 1563807
gcaaaucugucacccugaa

SEQ ID NO: 1833394 - RNA, 19 nt, Artificial Sequence
  Description of Artificial Sequence: Synthetic oligonucleotide
  Antisense strand to SEQ ID NO: 1833393
uucagggugacagauuugc

SEQ ID NO: 1833395 - RNA, 19 nt, Artificial Sequence
  Description of Artificial Sequence: Synthetic oligonucleotide
  Sense strand starting at position 1319 of SEQ ID NO: 1563807
gggucuguaucccuaggau

SEQ ID NO: 1833396 - RNA, 19 nt, Artificial Sequence
  Description of Artificial Sequence: Synthetic oligonucleotide
  Antisense strand to SEQ ID NO: 1833395
auccuagggauacagaccc

SEQ ID NO: 1833397 - RNA, 19 nt, Artificial Sequence
  Description of Artificial Sequence: Synthetic oligonucleotide
  Sense strand starting at position 2156 of SEQ ID NO: 1563807
acuggauucuuccuggaug

SEQ ID NO: 1833398 - RNA, 19 nt, Artificial Sequence
  Description of Artificial Sequence: Synthetic oligonucleotide
  Antisense strand to SEQ ID NO: 1833397
cauccaggaagaauccagu

SEQ ID NO: 1833399 - RNA, 19 nt, Artificial Sequence
  Description of Artificial Sequence: Synthetic oligonucleotide
  Sense strand starting at position 2440 of SEQ ID NO: 1563807
gugacauuauugccuaagu

SEQ ID NO: 1833400 - RNA, 19 nt, Artificial Sequence
  Description of Artificial Sequence: Synthetic oligonucleotide
  Antisense strand to SEQ ID NO: 1833399
acuuaggcaauaaugucac

SEQ ID NO: 1833401 - RNA, 19 nt, Artificial Sequence
  Description of Artificial Sequence: Synthetic oligonucleotide
  Sense strand starting at position 2441 of SEQ ID NO: 1563807
ugacauuauugccuaaguu

SEQ ID NO: 1833402 - RNA, 19 nt, Artificial Sequence
  Description of Artificial Sequence: Synthetic oligonucleotide
  Antisense strand to SEQ ID NO: 1833401
aacuuaggcaauaauguca

SEQ ID NO: 1833403 - RNA, 19 nt, Artificial Sequence
  Description of Artificial Sequence: Synthetic oligonucleotide
  Sense strand starting at position 2453 of SEQ ID NO: 1563807
cuaaguuuaccagggcuga

SEQ ID NO: 1833404 - RNA, 19 nt, Artificial Sequence
  Description of Artificial Sequence: Synthetic oligonucleotide
  Antisense strand to SEQ ID NO: 1833403
ucagcccugguaaacuuag

SEQ ID NO: 1833405 - RNA, 19 nt, Artificial Sequence
  Description of Artificial Sequence: Synthetic oligonucleotide
  Sense strand starting at position 2573 of SEQ ID NO: 1563807
ugaagugauuggcaggaga

SEQ ID NO: 1833406 - RNA, 19 nt, Artificial Sequence
  Description of Artificial Sequence: Synthetic oligonucleotide
  Antisense strand to SEQ ID NO: 1833405
ucuccugccaaucacuuca

SEQ ID NO: 1833407 - RNA, 19 nt, Artificial Sequence
  Description of Artificial Sequence: Synthetic oligonucleotide
  Sense strand starting at position 2575 of SEQ ID NO: 1563807
aagugauuggcaggagaua

SEQ ID NO: 1833408 - RNA, 19 nt, Artificial Sequence
  Description of Artificial Sequence: Synthetic oligonucleotide
  Antisense strand to SEQ ID NO: 1833407
uaucuccugccaaucacuu

SEQ ID NO: 1833409 - RNA, 19 nt, Artificial Sequence
  Description of Artificial Sequence: Synthetic oligonucleotide
  Sense strand starting at position 2588 of SEQ ID NO: 1563807
gagauacucuguuucugua

SEQ ID NO: 1833410 - RNA, 19 nt, Artificial Sequence
  Description of Artificial Sequence: Synthetic oligonucleotide
  Antisense strand to SEQ ID NO: 1833409
uacagaaacagaguaucuc

SEQ ID NO: 1833411 - RNA, 19 nt, Artificial Sequence
  Description of Artificial Sequence: Synthetic oligonucleotide
  Sense strand starting at position 2602 of SEQ ID NO: 1563807
cuguaacgucugugcauuu

SEQ ID NO: 1833412 - RNA, 19 nt, Artificial Sequence
  Description of Artificial Sequence: Synthetic oligonucleotide
  Antisense strand to SEQ ID NO: 1833411
aaaugcacagacguuacag

SEQ ID NO: 1833413 - RNA, 19 nt, Artificial Sequence
  Description of Artificial Sequence: Synthetic oligonucleotide
  Sense strand starting at position 2698 of SEQ ID NO: 1563807
cguauugaccucuggaaga

SEQ ID NO: 1833414 - RNA, 19 nt, Artificial Sequence
  Description of Artificial Sequence: Synthetic oligonucleotide
  Antisense strand to SEQ ID NO: 1833413
ucuuccagaggucaauacg

SEQ ID NO: 1833415 - RNA, 19 nt, Artificial Sequence
  Description of Artificial Sequence: Synthetic oligonucleotide
  Sense strand starting at position 2812 of SEQ ID NO: 1563807
cgguuuacauaucuuccaa

SEQ ID NO: 1833416 - RNA, 19 nt, Artificial Sequence
  Description of Artificial Sequence: Synthetic oligonucleotide
  Antisense strand to SEQ ID NO: 1833415
uuggaagauauguaaaccg

SEQ ID NO: 1833417 - RNA, 19 nt, Artificial Sequence
  Description of Artificial Sequence: Synthetic oligonucleotide
  Sense strand starting at position 2814 of SEQ ID NO: 1563807
guuuacauaucuuccaagu

SEQ ID NO: 1833418 - RNA, 19 nt, Artificial Sequence
  Description of Artificial Sequence: Synthetic oligonucleotide
  Antisense strand to SEQ ID NO: 1833417
acuuggaagauauguaaac

SEQ ID NO: 1833419 - RNA, 19 nt, Artificial Sequence
  Description of Artificial Sequence: Synthetic oligonucleotide
  Sense strand starting at position 2827 of SEQ ID NO: 1563807
ccaaguauauauguaggua

SEQ ID NO: 1833420 - RNA, 19 nt, Artificial Sequence
  Description of Artificial Sequence: Synthetic oligonucleotide
  Antisense strand to SEQ ID NO: 1833419
uaccuacauauauacuugg

SEQ ID NO: 1833421 - RNA, 19 nt, Artificial Sequence
  Description of Artificial Sequence: Synthetic oligonucleotide
  Sense strand starting at position 2831 of SEQ ID NO: 1563807
guauauauguagguagcga

SEQ ID NO: 1833422 - RNA, 19 nt, Artificial Sequence
  Description of Artificial Sequence: Synthetic oligonucleotide
  Antisense strand to SEQ ID NO: 1833421
ucgcuaccuacauauauac

SEQ ID NO: 1833423 - RNA, 19 nt, Artificial Sequence
  Description of Artificial Sequence: Synthetic oligonucleotide
  Sense strand starting at position 2832 of SEQ ID NO: 1563807
uauauauguagguagcgau

SEQ ID NO: 1833424 - RNA, 19 nt, Artificial Sequence
  Description of Artificial Sequence: Synthetic oligonucleotide
  Antisense strand to SEQ ID NO: 1833423
aucgcuaccuacauauaua

SEQ ID NO: 1833425 - RNA, 19 nt, Artificial Sequence
  Description of Artificial Sequence: Synthetic oligonucleotide
  Sense strand starting at position 2836 of SEQ ID NO: 1563807
uauguagguagcgauauau

SEQ ID NO: 1833426 - RNA, 19 nt, Artificial Sequence
  Description of Artificial Sequence: Synthetic oligonucleotide
  Antisense strand to SEQ ID NO: 1833425
auauaucgcuaccuacaua

SEQ ID NO: 1833427 - RNA, 19 nt, Artificial Sequence
  Description of Artificial Sequence: Synthetic oligonucleotide
  Sense strand starting at position 2936 of SEQ ID NO: 1563807
uuguguucuguugaaggaa

SEQ ID NO: 1833428 - RNA, 19 nt, Artificial Sequence
  Description of Artificial Sequence: Synthetic oligonucleotide
  Antisense strand to SEQ ID NO: 1833427
uuccuucaacagaacacaa

SEQ ID NO: 1833429 - RNA, 19 nt, Artificial Sequence
  Description of Artificial Sequence: Synthetic oligonucleotide
  Sense strand starting at position 3155 of SEQ ID NO: 1563807
uucuguuaucugccgucua

SEQ ID NO: 1833430 - RNA, 19 nt, Artificial Sequence
  Description of Artificial Sequence: Synthetic oligonucleotide
  Antisense strand to SEQ ID NO: 1833429
uagacggcagauaacagaa

SEQ ID NO: 1833431 - RNA, 19 nt, Artificial Sequence
  Description of Artificial Sequence: Synthetic oligonucleotide
  Sense strand starting at position 3397 of SEQ ID NO: 1563807
cuuguaaugucggcgacua

SEQ ID NO: 1833432 - RNA, 19 nt, Artificial Sequence
  Description of Artificial Sequence: Synthetic oligonucleotide
  Antisense strand to SEQ ID NO: 1833431
uagucgccgacauuacaag

SEQ ID NO: 1833433 - RNA, 19 nt, Artificial Sequence
  Description of Artificial Sequence: Synthetic oligonucleotide
  Sense strand starting at position 3399 of SEQ ID NO: 1563807
uguaaugucggcgacuaca

SEQ ID NO: 1833434 - RNA, 19 nt, Artificial Sequence
  Description of Artificial Sequence: Synthetic oligonucleotide
  Antisense strand to SEQ ID NO: 1833433
uguagucgccgacauuaca

SEQ ID NO: 1833435 - RNA, 19 nt, Artificial Sequence
  Description of Artificial Sequence: Synthetic oligonucleotide
  Sense strand starting at position 3534 of SEQ ID NO: 1563807
augucaguauacuucgaua

SEQ ID NO: 1833436 - RNA, 19 nt, Artificial Sequence
  Description of Artificial Sequence: Synthetic oligonucleotide
  Antisense strand to SEQ ID NO: 1833435
uaucgaaguauacugacau

SEQ ID NO: 1833437 - RNA, 19 nt, Artificial Sequence
  Description of Artificial Sequence: Synthetic oligonucleotide
  Sense strand starting at position 3536 of SEQ ID NO: 1563807
gucaguauacuucgauagu

SEQ ID NO: 1833438 - RNA, 19 nt, Artificial Sequence
  Description of Artificial Sequence: Synthetic oligonucleotide
  Antisense strand to SEQ ID NO: 1833437
acuaucgaaguauacugac

SEQ ID NO: 1833439 - RNA, 19 nt, Artificial Sequence
  Description of Artificial Sequence: Synthetic oligonucleotide
  Sense strand starting at position 3545 of SEQ ID NO: 1563807
cuucgauaguugccucuau

SEQ ID NO: 1833440 - RNA, 19 nt, Artificial Sequence
  Description of Artificial Sequence: Synthetic oligonucleotide
  Antisense strand to SEQ ID NO: 1833439
auagaggcaacuaucgaag

SEQ ID NO: 1833441 - RNA, 19 nt, Artificial Sequence
  Description of Artificial Sequence: Synthetic oligonucleotide
  Sense strand starting at position 3546 of SEQ ID NO: 1563807
uucgauaguugccucuaua

SEQ ID NO: 1833442 - RNA, 19 nt, Artificial Sequence
  Description of Artificial Sequence: Synthetic oligonucleotide
  Antisense strand to SEQ ID NO: 1833441
uauagaggcaacuaucgaa

SEQ ID NO: 1833443 - RNA, 19 nt, Artificial Sequence
  Description of Artificial Sequence: Synthetic oligonucleotide
  Sense strand starting at position 3549 of SEQ ID NO: 1563807
gauaguugccucuauaagc

SEQ ID NO: 1833444 - RNA, 19 nt, Artificial Sequence
  Description of Artificial Sequence: Synthetic oligonucleotide
  Antisense strand to SEQ ID NO: 1833443
gcuuauagaggcaacuauc

SEQ ID NO: 1833445 - RNA, 19 nt, Artificial Sequence
  Description of Artificial Sequence: Synthetic oligonucleotide
  Sense strand starting at position 3639 of SEQ ID NO: 1563807
gucuauuaauugcuguagu

SEQ ID NO: 1833446 - RNA, 19 nt, Artificial Sequence
  Description of Artificial Sequence: Synthetic oligonucleotide
  Antisense strand to SEQ ID NO: 1833445
acuacagcaauuaauagac

SEQ ID NO: 1833447 - RNA, 19 nt, Artificial Sequence
  Description of Artificial Sequence: Synthetic oligonucleotide
  Sense strand starting at position 3642 of SEQ ID NO: 1563807
uauuaauugcuguaguuag

SEQ ID NO: 1833448 - RNA, 19 nt, Artificial Sequence
  Description of Artificial Sequence: Synthetic oligonucleotide
  Antisense strand to SEQ ID NO: 1833447
cuaacuacagcaauuaaua

SEQ ID NO: 1833449 - RNA, 19 nt, Artificial Sequence
  Description of Artificial Sequence: Synthetic oligonucleotide
  Sense strand starting at position 3906 of SEQ ID NO: 1563807
ucucguuccugacuggaau

SEQ ID NO: 1833450 - RNA, 19 nt, Artificial Sequence
  Description of Artificial Sequence: Synthetic oligonucleotide
  Antisense strand to SEQ ID NO: 1833449
auuccagucaggaacgaga

SEQ ID NO: 1833451 - RNA, 19 nt, Artificial Sequence
  Description of Artificial Sequence: Synthetic oligonucleotide
  Sense strand starting at position 3909 of SEQ ID NO: 1563807
cguuccugacuggaaugau

SEQ ID NO: 1833452 - RNA, 19 nt, Artificial Sequence
  Description of Artificial Sequence: Synthetic oligonucleotide
  Antisense strand to SEQ ID NO: 1833451
aucauuccagucaggaacg

SEQ ID NO: 1833453 - RNA, 19 nt, Artificial Sequence
  Description of Artificial Sequence: Synthetic oligonucleotide
  Sense strand starting at position 3912 of SEQ ID NO: 1563807
uccugacuggaaugauagu

SEQ ID NO: 1833454 - RNA, 19 nt, Artificial Sequence
  Description of Artificial Sequence: Synthetic oligonucleotide
  Antisense strand to SEQ ID NO: 1833453
acuaucauuccagucagga

SEQ ID NO: 1833455 - RNA, 19 nt, Artificial Sequence
  Description of Artificial Sequence: Synthetic oligonucleotide
  Sense strand starting at position 3921 of SEQ ID NO: 1563807
gaaugauaguucuucgaac

SEQ ID NO: 1833456 - RNA, 19 nt, Artificial Sequence
  Description of Artificial Sequence: Synthetic oligonucleotide
  Antisense strand to SEQ ID NO: 1833455
guucgaagaacuaucauuc

SEQ ID NO: 1833457 - RNA, 19 nt, Artificial Sequence
  Description of Artificial Sequence: Synthetic oligonucleotide
  Sense strand starting at position 3922 of SEQ ID NO: 1563807
aaugauaguucuucgaaca

SEQ ID NO: 1833458 - RNA, 19 nt, Artificial Sequence
  Description of Artificial Sequence: Synthetic oligonucleotide
  Antisense strand to SEQ ID NO: 1833457
uguucgaagaacuaucauu

SEQ ID NO: 1833459 - RNA, 19 nt, Artificial Sequence
  Description of Artificial Sequence: Synthetic oligonucleotide
  Sense strand starting at position 3923 of SEQ ID NO: 1563807
augauaguucuucgaacau

SEQ ID NO: 1833460 - RNA, 19 nt, Artificial Sequence
  Description of Artificial Sequence: Synthetic oligonucleotide
  Antisense strand to SEQ ID NO: 1833459
auguucgaagaacuaucau

SEQ ID NO: 1833461 - RNA, 19 nt, Artificial Sequence
  Description of Artificial Sequence: Synthetic oligonucleotide
  Sense strand starting at position 3980 of SEQ ID NO: 1563807
ggaagugcucuuugaauau

SEQ ID NO: 1833462 - RNA, 19 nt, Artificial Sequence
  Description of Artificial Sequence: Synthetic oligonucleotide
  Antisense strand to SEQ ID NO: 1833461
auauucaaagagcacuucc

SEQ ID NO: 1833463 - RNA, 19 nt, Artificial Sequence
  Description of Artificial Sequence: Synthetic oligonucleotide
  Sense strand starting at position 514 of SEQ ID NO: 1563808
ucaggcuucucaccuggau

SEQ ID NO: 1833464 - RNA, 19 nt, Artificial Sequence
  Description of Artificial Sequence: Synthetic oligonucleotide
  Antisense strand to SEQ ID NO: 1833463
auccaggugagaagccuga

SEQ ID NO: 1833465 - RNA, 19 nt, Artificial Sequence
  Description of Artificial Sequence: Synthetic oligonucleotide
  Sense strand starting at position 676 of SEQ ID NO: 1563808
guagguuguccagggcuga

SEQ ID NO: 1833466 - RNA, 19 nt, Artificial Sequence
  Description of Artificial Sequence: Synthetic oligonucleotide
  Antisense strand to SEQ ID NO: 1833465
ucagcccuggacaaccuac

SEQ ID NO: 1833467 - RNA, 19 nt, Artificial Sequence
  Description of Artificial Sequence: Synthetic oligonucleotide
  Sense strand starting at position 846 of SEQ ID NO: 1563808
caaccucuugccuguggua

SEQ ID NO: 1833468 - RNA, 19 nt, Artificial Sequence
  Description of Artificial Sequence: Synthetic oligonucleotide
  Antisense strand to SEQ ID NO: 1833467
uaccacaggcaagagguug

SEQ ID NO: 1833469 - RNA, 19 nt, Artificial Sequence
  Description of Artificial Sequence: Synthetic oligonucleotide
  Sense strand starting at position 848 of SEQ ID NO: 1563808
accucuugccugugguaca

SEQ ID NO: 1833470 - RNA, 19 nt, Artificial Sequence
  Description of Artificial Sequence: Synthetic oligonucleotide
  Antisense strand to SEQ ID NO: 1833469
uguaccacaggcaagaggu

SEQ ID NO: 1833471 - RNA, 19 nt, Artificial Sequence
  Description of Artificial Sequence: Synthetic oligonucleotide
  Sense strand starting at position 885 of SEQ ID NO: 1563808
agcuaucucugaucggguu

SEQ ID NO: 1833472 - RNA, 19 nt, Artificial Sequence
  Description of Artificial Sequence: Synthetic oligonucleotide
  Antisense strand to SEQ ID NO: 1833471
aacccgaucagagauagcu

SEQ ID NO: 1833473 - RNA, 19 nt, Artificial Sequence
  Description of Artificial Sequence: Synthetic oligonucleotide
  Sense strand starting at position 1065 of SEQ ID NO: 1563808
gcaaaucugucacccugaa

SEQ ID NO: 1833474 - RNA, 19 nt, Artificial Sequence
  Description of Artificial Sequence: Synthetic oligonucleotide
  Antisense strand to SEQ ID NO: 1833473
uucagggugacagauuugc

SEQ ID NO: 1833475 - RNA, 19 nt, Artificial Sequence
  Description of Artificial Sequence: Synthetic oligonucleotide
  Sense strand starting at position 1236 of SEQ ID NO: 1563808
gggucuguaucccuaggau

SEQ ID NO: 1833476 - RNA, 19 nt, Artificial Sequence
  Description of Artificial Sequence: Synthetic oligonucleotide
  Antisense strand to SEQ ID NO: 1833475
auccuagggauacagaccc

SEQ ID NO: 1833477 - RNA, 19 nt, Artificial Sequence
  Description of Artificial Sequence: Synthetic oligonucleotide
  Sense strand starting at position 2073 of SEQ ID NO: 1563808
acuggauucuuccuggaug

SEQ ID NO: 1833478 - RNA, 19 nt, Artificial Sequence
  Description of Artificial Sequence: Synthetic oligonucleotide
  Antisense strand to SEQ ID NO: 1833477
cauccaggaagaauccagu

SEQ ID NO: 1833479 - RNA, 19 nt, Artificial Sequence
  Description of Artificial Sequence: Synthetic oligonucleotide
  Sense strand starting at position 2357 of SEQ ID NO: 1563808
gugacauuauugccuaagu

SEQ ID NO: 1833480 - RNA, 19 nt, Artificial Sequence
  Description of Artificial Sequence: Synthetic oligonucleotide
  Antisense strand to SEQ ID NO: 1833479
acuuaggcaauaaugucac

SEQ ID NO: 1833481 - RNA, 19 nt, Artificial Sequence
  Description of Artificial Sequence: Synthetic oligonucleotide
  Sense strand starting at position 2358 of SEQ ID NO: 1563808
ugacauuauugccuaaguu

SEQ ID NO: 1833482 - RNA, 19 nt, Artificial Sequence
  Description of Artificial Sequence: Synthetic oligonucleotide
  Antisense strand to SEQ ID NO: 1833481
aacuuaggcaauaauguca

SEQ ID NO: 1833483 - RNA, 19 nt, Artificial Sequence
  Description of Artificial Sequence: Synthetic oligonucleotide
  Sense strand starting at position 2370 of SEQ ID NO: 1563808
cuaaguuuaccagggcuga

SEQ ID NO: 1833484 - RNA, 19 nt, Artificial Sequence
  Description of Artificial Sequence: Synthetic oligonucleotide
  Antisense strand to SEQ ID NO: 1833483
ucagcccugguaaacuuag

SEQ ID NO: 1833485 - RNA, 19 nt, Artificial Sequence
  Description of Artificial Sequence: Synthetic oligonucleotide
  Sense strand starting at position 2490 of SEQ ID NO: 1563808
ugaagugauuggcaggaga

SEQ ID NO: 1833486 - RNA, 19 nt, Artificial Sequence
  Description of Artificial Sequence: Synthetic oligonucleotide
  Antisense strand to SEQ ID NO: 1833485
ucuccugccaaucacuuca

SEQ ID NO: 1833487 - RNA, 19 nt, Artificial Sequence
  Description of Artificial Sequence: Synthetic oligonucleotide
  Sense strand starting at position 2492 of SEQ ID NO: 1563808
aagugauuggcaggagaua

SEQ ID NO: 1833488 - RNA, 19 nt, Artificial Sequence
  Description of Artificial Sequence: Synthetic oligonucleotide
  Antisense strand to SEQ ID NO: 1833487
uaucuccugccaaucacuu

SEQ ID NO: 1833489 - RNA, 19 nt, Artificial Sequence
  Description of Artificial Sequence: Synthetic oligonucleotide
  Sense strand starting at position 2505 of SEQ ID NO: 1563808
gagauacucuguuucugua

SEQ ID NO: 1833490 - RNA, 19 nt, Artificial Sequence
  Description of Artificial Sequence: Synthetic oligonucleotide
  Antisense strand to SEQ ID NO: 1833489
uacagaaacagaguaucuc

SEQ ID NO: 1833491 - RNA, 19 nt, Artificial Sequence
  Description of Artificial Sequence: Synthetic oligonucleotide
  Sense strand starting at position 2519 of SEQ ID NO: 1563808
cuguaacgucugugcauuu

SEQ ID NO: 1833492 - RNA, 19 nt, Artificial Sequence
  Description of Artificial Sequence: Synthetic oligonucleotide
  Antisense strand to SEQ ID NO: 1833491
aaaugcacagacguuacag

SEQ ID NO: 1833493 - RNA, 19 nt, Artificial Sequence
  Description of Artificial Sequence: Synthetic oligonucleotide
  Sense strand starting at position 2615 of SEQ ID NO: 1563808
cguauugaccucuggaaga

SEQ ID NO: 1833494 - RNA, 19 nt, Artificial Sequence
  Description of Artificial Sequence: Synthetic oligonucleotide
  Antisense strand to SEQ ID NO: 1833493
ucuuccagaggucaauacg

SEQ ID NO: 1833495 - RNA, 19 nt, Artificial Sequence
  Description of Artificial Sequence: Synthetic oligonucleotide
  Sense strand starting at position 2729 of SEQ ID NO: 1563808
cgguuuacauaucuuccaa

SEQ ID NO: 1833496 - RNA, 19 nt, Artificial Sequence
  Description of Artificial Sequence: Synthetic oligonucleotide
  Antisense strand to SEQ ID NO: 1833495
uuggaagauauguaaaccg

SEQ ID NO: 1833497 - RNA, 19 nt, Artificial Sequence
  Description of Artificial Sequence: Synthetic oligonucleotide
  Sense strand starting at position 2731 of SEQ ID NO: 1563808
guuuacauaucuuccaagu

SEQ ID NO: 1833498 - RNA, 19 nt, Artificial Sequence
  Description of Artificial Sequence: Synthetic oligonucleotide
  Antisense strand to SEQ ID NO: 1833497
acuuggaagauauguaaac

SEQ ID NO: 1833499 - RNA, 19 nt, Artificial Sequence
  Description of Artificial Sequence: Synthetic oligonucleotide
  Sense strand starting at position 2744 of SEQ ID NO: 1563808
ccaaguauauauguaggua

SEQ ID NO: 1833500 - RNA, 19 nt, Artificial Sequence
  Description of Artificial Sequence: Synthetic oligonucleotide
  Antisense strand to SEQ ID NO: 1833499
uaccuacauauauacuugg

SEQ ID NO: 1833501 - RNA, 19 nt, Artificial Sequence
  Description of Artificial Sequence: Synthetic oligonucleotide
  Sense strand starting at position 2748 of SEQ ID NO: 1563808
guauauauguagguagcga

SEQ ID NO: 1833502 - RNA, 19 nt, Artificial Sequence
  Description of Artificial Sequence: Synthetic oligonucleotide
  Antisense strand to SEQ ID NO: 1833501
ucgcuaccuacauauauac

SEQ ID NO: 1833503 - RNA, 19 nt, Artificial Sequence
  Description of Artificial Sequence: Synthetic oligonucleotide
  Sense strand starting at position 2749 of SEQ ID NO: 1563808
uauauauguagguagcgau

SEQ ID NO: 1833504 - RNA, 19 nt, Artificial Sequence
  Description of Artificial Sequence: Synthetic oligonucleotide
  Antisense strand to SEQ ID NO: 1833503
aucgcuaccuacauauaua

SEQ ID NO: 1833505 - RNA, 19 nt, Artificial Sequence
  Description of Artificial Sequence: Synthetic oligonucleotide
  Sense strand starting at position 2753 of SEQ ID NO: 1563808
uauguagguagcgauauau

SEQ ID NO: 1833506 - RNA, 19 nt, Artificial Sequence
  Description of Artificial Sequence: Synthetic oligonucleotide
  Antisense strand to SEQ ID NO: 1833505
auauaucgcuaccuacaua

SEQ ID NO: 1833507 - RNA, 19 nt, Artificial Sequence
  Description of Artificial Sequence: Synthetic oligonucleotide
  Sense strand starting at position 2853 of SEQ ID NO: 1563808
uuguguucuguugaaggaa

SEQ ID NO: 1833508 - RNA, 19 nt, Artificial Sequence
  Description of Artificial Sequence: Synthetic oligonucleotide
  Antisense strand to SEQ ID NO: 1833507
uuccuucaacagaacacaa

SEQ ID NO: 1833509 - RNA, 19 nt, Artificial Sequence
  Description of Artificial Sequence: Synthetic oligonucleotide
  Sense strand starting at position 3072 of SEQ ID NO: 1563808
uucuguuaucugccgucua

SEQ ID NO: 1833510 - RNA, 19 nt, Artificial Sequence
  Description of Artificial Sequence: Synthetic oligonucleotide
  Antisense strand to SEQ ID NO: 1833509
uagacggcagauaacagaa

SEQ ID NO: 1833511 - RNA, 19 nt, Artificial Sequence
  Description of Artificial Sequence: Synthetic oligonucleotide
  Sense strand starting at position 3316 of SEQ ID NO: 1563808
uguaaugucggcgacuaca

SEQ ID NO: 1833512 - RNA, 19 nt, Artificial Sequence
  Description of Artificial Sequence: Synthetic oligonucleotide
  Antisense strand to SEQ ID NO: 1833511
uguagucgccgacauuaca

SEQ ID NO: 1833513 - RNA, 19 nt, Artificial Sequence
  Description of Artificial Sequence: Synthetic oligonucleotide
  Sense strand starting at position 3451 of SEQ ID NO: 1563808
augucaguauacuucgaua

SEQ ID NO: 1833514 - RNA, 19 nt, Artificial Sequence
  Description of Artificial Sequence: Synthetic oligonucleotide
  Antisense strand to SEQ ID NO: 1833513
uaucgaaguauacugacau

SEQ ID NO: 1833515 - RNA, 19 nt, Artificial Sequence
  Description of Artificial Sequence: Synthetic oligonucleotide
  Sense strand starting at position 3453 of SEQ ID NO: 1563808
gucaguauacuucgauagu

SEQ ID NO: 1833516 - RNA, 19 nt, Artificial Sequence
  Description of Artificial Sequence: Synthetic oligonucleotide
  Antisense strand to SEQ ID NO: 1833515
acuaucgaaguauacugac

SEQ ID NO: 1833517 - RNA, 19 nt, Artificial Sequence
  Description of Artificial Sequence: Synthetic oligonucleotide
  Sense strand starting at position 3462 of SEQ ID NO: 1563808
cuucgauaguugccucuau

SEQ ID NO: 1833518 - RNA, 19 nt, Artificial Sequence
  Description of Artificial Sequence: Synthetic oligonucleotide
  Antisense strand to SEQ ID NO: 1833517
auagaggcaacuaucgaag

SEQ ID NO: 1833519 - RNA, 19 nt, Artificial Sequence
  Description of Artificial Sequence: Synthetic oligonucleotide
  Sense strand starting at position 3463 of SEQ ID NO: 1563808
uucgauaguugccucuaua

SEQ ID NO: 1833520 - RNA, 19 nt, Artificial Sequence
  Description of Artificial Sequence: Synthetic oligonucleotide
  Antisense strand to SEQ ID NO: 1833519
uauagaggcaacuaucgaa

SEQ ID NO: 1833521 - RNA, 19 nt, Artificial Sequence
  Description of Artificial Sequence: Synthetic oligonucleotide
  Sense strand starting at position 3466 of SEQ ID NO: 1563808
gauaguugccucuauaagc

SEQ ID NO: 1833522 - RNA, 19 nt, Artificial Sequence
  Description of Artificial Sequence: Synthetic oligonucleotide
  Antisense strand to SEQ ID NO: 1833521
gcuuauagaggcaacuauc

SEQ ID NO: 1833523 - RNA, 19 nt, Artificial Sequence
  Description of Artificial Sequence: Synthetic oligonucleotide
  Sense strand starting at position 3556 of SEQ ID NO: 1563808
gucuauuaauugcuguagu

SEQ ID NO: 1833524 - RNA, 19 nt, Artificial Sequence
  Description of Artificial Sequence: Synthetic oligonucleotide
  Antisense strand to SEQ ID NO: 1833523
acuacagcaauuaauagac

SEQ ID NO: 1833525 - RNA, 19 nt, Artificial Sequence
  Description of Artificial Sequence: Synthetic oligonucleotide
  Sense strand starting at position 3559 of SEQ ID NO: 1563808
uauuaauugcuguaguuag

SEQ ID NO: 1833526 - RNA, 19 nt, Artificial Sequence
  Description of Artificial Sequence: Synthetic oligonucleotide
  Antisense strand to SEQ ID NO: 1833525
cuaacuacagcaauuaaua

SEQ ID NO: 1833527 - RNA, 19 nt, Artificial Sequence
  Description of Artificial Sequence: Synthetic oligonucleotide
  Sense strand starting at position 3823 of SEQ ID NO: 1563808
ucucguuccugacuggaau

SEQ ID NO: 1833528 - RNA, 19 nt, Artificial Sequence
  Description of Artificial Sequence: Synthetic oligonucleotide
  Antisense strand to SEQ ID NO: 1833527
auuccagucaggaacgaga

SEQ ID NO: 1833529 - RNA, 19 nt, Artificial Sequence
  Description of Artificial Sequence: Synthetic oligonucleotide
  Sense strand starting at position 3826 of SEQ ID NO: 1563808
cguuccugacuggaaugau

SEQ ID NO: 1833530 - RNA, 19 nt, Artificial Sequence
  Description of Artificial Sequence: Synthetic oligonucleotide
  Antisense strand to SEQ ID NO: 1833529
aucauuccagucaggaacg

SEQ ID NO: 1833531 - RNA, 19 nt, Artificial Sequence
  Description of Artificial Sequence: Synthetic oligonucleotide
  Sense strand starting at position 3829 of SEQ ID NO: 1563808
uccugacuggaaugauagu

SEQ ID NO: 1833532 - RNA, 19 nt, Artificial Sequence
  Description of Artificial Sequence: Synthetic oligonucleotide
  Antisense strand to SEQ ID NO: 1833531
acuaucauuccagucagga

SEQ ID NO: 1833533 - RNA, 19 nt, Artificial Sequence
  Description of Artificial Sequence: Synthetic oligonucleotide
  Sense strand starting at position 3838 of SEQ ID NO: 1563808
gaaugauaguucuucgaac

SEQ ID NO: 1833534 - RNA, 19 nt, Artificial Sequence
  Description of Artificial Sequence: Synthetic oligonucleotide
  Antisense strand to SEQ ID NO: 1833533
guucgaagaacuaucauuc

SEQ ID NO: 1833535 - RNA, 19 nt, Artificial Sequence
  Description of Artificial Sequence: Synthetic oligonucleotide
  Sense strand starting at position 3839 of SEQ ID NO: 1563808
aaugauaguucuucgaaca

SEQ ID NO: 1833536 - RNA, 19 nt, Artificial Sequence
  Description of Artificial Sequence: Synthetic oligonucleotide
  Antisense strand to SEQ ID NO: 1833535
uguucgaagaacuaucauu

SEQ ID NO: 1833537 - RNA, 19 nt, Artificial Sequence
  Description of Artificial Sequence: Synthetic oligonucleotide
  Sense strand starting at position 3840 of SEQ ID NO: 1563808
augauaguucuucgaacau

SEQ ID NO: 1833538 - RNA, 19 nt, Artificial Sequence
  Description of Artificial Sequence: Synthetic oligonucleotide
  Antisense strand to SEQ ID NO: 1833537
auguucgaagaacuaucau

SEQ ID NO: 1833539 - RNA, 19 nt, Artificial Sequence
  Description of Artificial Sequence: Synthetic oligonucleotide
  Sense strand starting at position 3897 of SEQ ID NO: 1563808
ggaagugcucuuugaauau

SEQ ID NO: 1833540 - RNA, 19 nt, Artificial Sequence
  Description of Artificial Sequence: Synthetic oligonucleotide
  Antisense strand to SEQ ID NO: 1833539
auauucaaagagcacuucc

SEQ ID NO: 1833541 - RNA, 19 nt, Artificial Sequence
  Description of Artificial Sequence: Synthetic oligonucleotide
  Sense strand starting at position 3901 of SEQ ID NO: 1563808
gugcucuuugaauauaggu

SEQ ID NO: 1833542 - RNA, 19 nt, Artificial Sequence
  Description of Artificial Sequence: Synthetic oligonucleotide
  Antisense strand to SEQ ID NO: 1833541
accuauauucaaagagcac

SEQ ID NO: 1833543 - RNA, 19 nt, Artificial Sequence
  Description of Artificial Sequence: Synthetic oligonucleotide
  Sense strand starting at position 124 of SEQ ID NO: 1563809
gcuugagaaucucucaugu

SEQ ID NO: 1833544 - RNA, 19 nt, Artificial Sequence
  Description of Artificial Sequence: Synthetic oligonucleotide
  Antisense strand to SEQ ID NO: 1833543
acaugagagauucucaagc

SEQ ID NO: 1833545 - RNA, 19 nt, Artificial Sequence
  Description of Artificial Sequence: Synthetic oligonucleotide
  Sense strand starting at position 150 of SEQ ID NO: 1563809
ucacaucccugauauggua

SEQ ID NO: 1833546 - RNA, 19 nt, Artificial Sequence
  Description of Artificial Sequence: Synthetic oligonucleotide
  Antisense strand to SEQ ID NO: 1833545
uaccauaucagggauguga

SEQ ID NO: 1833547 - RNA, 19 nt, Artificial Sequence
  Description of Artificial Sequence: Synthetic oligonucleotide
  Sense strand starting at position 705 of SEQ ID NO: 1563809
uagggugaacguuaugaug

SEQ ID NO: 1833548 - RNA, 19 nt, Artificial Sequence
  Description of Artificial Sequence: Synthetic oligonucleotide
  Antisense strand to SEQ ID NO: 1833547
caucauaacguucacccua

SEQ ID NO: 1833549 - RNA, 19 nt, Artificial Sequence
  Description of Artificial Sequence: Synthetic oligonucleotide
  Sense strand starting at position 864 of SEQ ID NO: 1563809
aaaugagauugucacuuag

SEQ ID NO: 1833550 - RNA, 19 nt, Artificial Sequence
  Description of Artificial Sequence: Synthetic oligonucleotide
  Antisense strand to SEQ ID NO: 1833549
cuaagugacaaucucauuu

SEQ ID NO: 1833551 - RNA, 19 nt, Artificial Sequence
  Description of Artificial Sequence: Synthetic oligonucleotide
  Sense strand starting at position 1248 of SEQ ID NO: 1563809
cuaggauucccgcggcuga

SEQ ID NO: 1833552 - RNA, 19 nt, Artificial Sequence
  Description of Artificial Sequence: Synthetic oligonucleotide
  Antisense strand to SEQ ID NO: 1833551
ucagccgcgggaauccuag

SEQ ID NO: 1833553 - RNA, 19 nt, Artificial Sequence
  Description of Artificial Sequence: Synthetic oligonucleotide
  Sense strand starting at position 1249 of SEQ ID NO: 1563809
uaggauucccgcggcugaa

SEQ ID NO: 1833554 - RNA, 19 nt, Artificial Sequence
  Description of Artificial Sequence: Synthetic oligonucleotide
  Antisense strand to SEQ ID NO: 1833553
uucagccgcgggaauccua

SEQ ID NO: 1833555 - RNA, 19 nt, Artificial Sequence
  Description of Artificial Sequence: Synthetic oligonucleotide
  Sense strand starting at position 1601 of SEQ ID NO: 1563809
gggauugguagugagggua

SEQ ID NO: 1833556 - RNA, 19 nt, Artificial Sequence
  Description of Artificial Sequence: Synthetic oligonucleotide
  Antisense strand to SEQ ID NO: 1833555
uacccucacuaccaauccc

SEQ ID NO: 1833557 - RNA, 19 nt, Artificial Sequence
  Description of Artificial Sequence: Synthetic oligonucleotide
  Sense strand starting at position 2343 of SEQ ID NO: 1563809
gugagaucauugccagugu

SEQ ID NO: 1833558 - RNA, 19 nt, Artificial Sequence
  Description of Artificial Sequence: Synthetic oligonucleotide
  Antisense strand to SEQ ID NO: 1833557
acacuggcaaugaucucac

SEQ ID NO: 1833559 - RNA, 19 nt, Artificial Sequence
  Description of Artificial Sequence: Synthetic oligonucleotide
  Sense strand starting at position 2347 of SEQ ID NO: 1563809
gaucauugccaguguguac

SEQ ID NO: 1833560 - RNA, 19 nt, Artificial Sequence
  Description of Artificial Sequence: Synthetic oligonucleotide
  Antisense strand to SEQ ID NO: 1833559
guacacacuggcaaugauc

SEQ ID NO: 1833561 - RNA, 19 nt, Artificial Sequence
  Description of Artificial Sequence: Synthetic oligonucleotide
  Sense strand starting at position 2420 of SEQ ID NO: 1563809
gguggauccucaguccuca

SEQ ID NO: 1833562 - RNA, 19 nt, Artificial Sequence
  Description of Artificial Sequence: Synthetic oligonucleotide
  Antisense strand to SEQ ID NO: 1833561
ugaggacugaggauccacc

SEQ ID NO: 1833563 - RNA, 19 nt, Artificial Sequence
  Description of Artificial Sequence: Synthetic oligonucleotide
  Sense strand starting at position 2594 of SEQ ID NO: 1563809
aggagcucccgcgaugaua

SEQ ID NO: 1833564 - RNA, 19 nt, Artificial Sequence
  Description of Artificial Sequence: Synthetic oligonucleotide
  Antisense strand to SEQ ID NO: 1833563
uaucaucgcgggagcuccu

SEQ ID NO: 1833565 - RNA, 19 nt, Artificial Sequence
  Description of Artificial Sequence: Synthetic oligonucleotide
  Sense strand starting at position 2609 of SEQ ID NO: 1563809
gauagugaccucugggaga

SEQ ID NO: 1833566 - RNA, 19 nt, Artificial Sequence
  Description of Artificial Sequence: Synthetic oligonucleotide
  Antisense strand to SEQ ID NO: 1833565
ucucccagaggucacuauc

SEQ ID NO: 1833567 - RNA, 19 nt, Artificial Sequence
  Description of Artificial Sequence: Synthetic oligonucleotide
  Sense strand starting at position 2723 of SEQ ID NO: 1563809
cgguuuacauaucuucuaa

SEQ ID NO: 1833568 - RNA, 19 nt, Artificial Sequence
  Description of Artificial Sequence: Synthetic oligonucleotide
  Antisense strand to SEQ ID NO: 1833567
uuagaagauauguaaaccg

SEQ ID NO: 1833569 - RNA, 19 nt, Artificial Sequence
  Description of Artificial Sequence: Synthetic oligonucleotide
  Sense strand starting at position 2725 of SEQ ID NO: 1563809
guuuacauaucuucuaagu

SEQ ID NO: 1833570 - RNA, 19 nt, Artificial Sequence
  Description of Artificial Sequence: Synthetic oligonucleotide
  Antisense strand to SEQ ID NO: 1833569
acuuagaagauauguaaac

SEQ ID NO: 1833571 - RNA, 19 nt, Artificial Sequence
  Description of Artificial Sequence: Synthetic oligonucleotide
  Sense strand starting at position 2738 of SEQ ID NO: 1563809
cuaaguauauauguaggua

SEQ ID NO: 1833572 - RNA, 19 nt, Artificial Sequence
  Description of Artificial Sequence: Synthetic oligonucleotide
  Antisense strand to SEQ ID NO: 1833571
uaccuacauauauacuuag

SEQ ID NO: 1833573 - RNA, 19 nt, Artificial Sequence
  Description of Artificial Sequence: Synthetic oligonucleotide
  Sense strand starting at position 2742 of SEQ ID NO: 1563809
guauauauguagguagcaa

SEQ ID NO: 1833574 - RNA, 19 nt, Artificial Sequence
  Description of Artificial Sequence: Synthetic oligonucleotide
  Antisense strand to SEQ ID NO: 1833573
uugcuaccuacauauauac

SEQ ID NO: 1833575 - RNA, 19 nt, Artificial Sequence
  Description of Artificial Sequence: Synthetic oligonucleotide
  Sense strand starting at position 2815 of SEQ ID NO: 1563809
cugauauccuagucuacuu

SEQ ID NO: 1833576 - RNA, 19 nt, Artificial Sequence
  Description of Artificial Sequence: Synthetic oligonucleotide
  Antisense strand to SEQ ID NO: 1833575
aaguagacuaggauaucag

SEQ ID NO: 1833577 - RNA, 19 nt, Artificial Sequence
  Description of Artificial Sequence: Synthetic oligonucleotide
  Sense strand starting at position 3393 of SEQ ID NO: 1563809
cgugaaugaauauguuaua

SEQ ID NO: 1833578 - RNA, 19 nt, Artificial Sequence
  Description of Artificial Sequence: Synthetic oligonucleotide
  Antisense strand to SEQ ID NO: 1833577
uauaacauauucauucacg

SEQ ID NO: 1833579 - RNA, 19 nt, Artificial Sequence
  Description of Artificial Sequence: Synthetic oligonucleotide
  Sense strand starting at position 3406 of SEQ ID NO: 1563809
guuauacuccucuauggau

SEQ ID NO: 1833580 - RNA, 19 nt, Artificial Sequence
  Description of Artificial Sequence: Synthetic oligonucleotide
  Antisense strand to SEQ ID NO: 1833579
auccauagaggaguauaac

SEQ ID NO: 1833581 - RNA, 19 nt, Artificial Sequence
  Description of Artificial Sequence: Synthetic oligonucleotide
  Sense strand starting at position 3447 of SEQ ID NO: 1563809
augucaguauacuucggua

SEQ ID NO: 1833582 - RNA, 19 nt, Artificial Sequence
  Description of Artificial Sequence: Synthetic oligonucleotide
  Antisense strand to SEQ ID NO: 1833581
uaccgaaguauacugacau

SEQ ID NO: 1833583 - RNA, 19 nt, Artificial Sequence
  Description of Artificial Sequence: Synthetic oligonucleotide
  Sense strand starting at position 3449 of SEQ ID NO: 1563809
gucaguauacuucgguagu

SEQ ID NO: 1833584 - RNA, 19 nt, Artificial Sequence
  Description of Artificial Sequence: Synthetic oligonucleotide
  Antisense strand to SEQ ID NO: 1833583
acuaccgaaguauacugac

SEQ ID NO: 1833585 - RNA, 19 nt, Artificial Sequence
  Description of Artificial Sequence: Synthetic oligonucleotide
  Sense strand starting at position 3459 of SEQ ID NO: 1563809
uucgguaguugccucuaua

SEQ ID NO: 1833586 - RNA, 19 nt, Artificial Sequence
  Description of Artificial Sequence: Synthetic oligonucleotide
  Antisense strand to SEQ ID NO: 1833585
uauagaggcaacuaccgaa

SEQ ID NO: 1833587 - RNA, 19 nt, Artificial Sequence
  Description of Artificial Sequence: Synthetic oligonucleotide
  Sense strand starting at position 3462 of SEQ ID NO: 1563809
gguaguugccucuauaaac

SEQ ID NO: 1833588 - RNA, 19 nt, Artificial Sequence
  Description of Artificial Sequence: Synthetic oligonucleotide
  Antisense strand to SEQ ID NO: 1833587
guuuauagaggcaacuacc

SEQ ID NO: 1833589 - RNA, 19 nt, Artificial Sequence
  Description of Artificial Sequence: Synthetic oligonucleotide
  Sense strand starting at position 3531 of SEQ ID NO: 1563809
ugcuauugcaaguggcaua

SEQ ID NO: 1833590 - RNA, 19 nt, Artificial Sequence
  Description of Artificial Sequence: Synthetic oligonucleotide
  Antisense strand to SEQ ID NO: 1833589
uaugccacuugcaauagca

SEQ ID NO: 1833591 - RNA, 19 nt, Artificial Sequence
  Description of Artificial Sequence: Synthetic oligonucleotide
  Sense strand starting at position 3541 of SEQ ID NO: 1563809
aguggcauauugucuauca

SEQ ID NO: 1833592 - RNA, 19 nt, Artificial Sequence
  Description of Artificial Sequence: Synthetic oligonucleotide
  Antisense strand to SEQ ID NO: 1833591
ugauagacaauaugccacu

SEQ ID NO: 1833593 - RNA, 19 nt, Artificial Sequence
  Description of Artificial Sequence: Synthetic oligonucleotide
  Sense strand starting at position 3542 of SEQ ID NO: 1563809
guggcauauugucuaucaa

SEQ ID NO: 1833594 - RNA, 19 nt, Artificial Sequence
  Description of Artificial Sequence: Synthetic oligonucleotide
  Antisense strand to SEQ ID NO: 1833593
uugauagacaauaugccac

SEQ ID NO: 1833595 - RNA, 19 nt, Artificial Sequence
  Description of Artificial Sequence: Synthetic oligonucleotide
  Sense strand starting at position 3543 of SEQ ID NO: 1563809
uggcauauugucuaucaau

SEQ ID NO: 1833596 - RNA, 19 nt, Artificial Sequence
  Description of Artificial Sequence: Synthetic oligonucleotide
  Antisense strand to SEQ ID NO: 1833595
auugauagacaauaugcca

SEQ ID NO: 1833597 - RNA, 19 nt, Artificial Sequence
  Description of Artificial Sequence: Synthetic oligonucleotide
  Sense strand starting at position 3552 of SEQ ID NO: 1563809
gucuaucaauuguuguagu

SEQ ID NO: 1833598 - RNA, 19 nt, Artificial Sequence
  Description of Artificial Sequence: Synthetic oligonucleotide
  Antisense strand to SEQ ID NO: 1833597
acuacaacaauugauagac

SEQ ID NO: 1833599 - RNA, 19 nt, Artificial Sequence
  Description of Artificial Sequence: Synthetic oligonucleotide
  Sense strand starting at position 3621 of SEQ ID NO: 1563809
uugcauaccucguucugaa

SEQ ID NO: 1833600 - RNA, 19 nt, Artificial Sequence
  Description of Artificial Sequence: Synthetic oligonucleotide
  Antisense strand to SEQ ID NO: 1833599
uucagaacgagguaugcaa

SEQ ID NO: 1833601 - RNA, 19 nt, Artificial Sequence
  Description of Artificial Sequence: Synthetic oligonucleotide
  Sense strand starting at position 3647 of SEQ ID NO: 1563809
gcacuugaauauuccgcau

SEQ ID NO: 1833602 - RNA, 19 nt, Artificial Sequence
  Description of Artificial Sequence: Synthetic oligonucleotide
  Antisense strand to SEQ ID NO: 1833601
augcggaauauucaagugc

SEQ ID NO: 1833603 - RNA, 19 nt, Artificial Sequence
  Description of Artificial Sequence: Synthetic oligonucleotide
  Sense strand starting at position 3651 of SEQ ID NO: 1563809
uugaauauuccgcauaccu

SEQ ID NO: 1833604 - RNA, 19 nt, Artificial Sequence
  Description of Artificial Sequence: Synthetic oligonucleotide
  Antisense strand to SEQ ID NO: 1833603
agguaugcggaauauucaa

SEQ ID NO: 1833605 - RNA, 19 nt, Artificial Sequence
  Description of Artificial Sequence: Synthetic oligonucleotide
  Sense strand starting at position 3819 of SEQ ID NO: 1563809
ucucguuccugacuugaau

SEQ ID NO: 1833606 - RNA, 19 nt, Artificial Sequence
  Description of Artificial Sequence: Synthetic oligonucleotide
  Antisense strand to SEQ ID NO: 1833605
auucaagucaggaacgaga

SEQ ID NO: 1833607 - RNA, 19 nt, Artificial Sequence
  Description of Artificial Sequence: Synthetic oligonucleotide
  Sense strand starting at position 3821 of SEQ ID NO: 1563809
ucguuccugacuugaauga

SEQ ID NO: 1833608 - RNA, 19 nt, Artificial Sequence
  Description of Artificial Sequence: Synthetic oligonucleotide
  Antisense strand to SEQ ID NO: 1833607
ucauucaagucaggaacga

SEQ ID NO: 1833609 - RNA, 19 nt, Artificial Sequence
  Description of Artificial Sequence: Synthetic oligonucleotide
  Sense strand starting at position 3822 of SEQ ID NO: 1563809
cguuccugacuugaaugau

SEQ ID NO: 1833610 - RNA, 19 nt, Artificial Sequence
  Description of Artificial Sequence: Synthetic oligonucleotide
  Antisense strand to SEQ ID NO: 1833609
aucauucaagucaggaacg

SEQ ID NO: 1833611 - RNA, 19 nt, Artificial Sequence
  Description of Artificial Sequence: Synthetic oligonucleotide
  Sense strand starting at position 3828 of SEQ ID NO: 1563809
ugacuugaaugauaauucu

SEQ ID NO: 1833612 - RNA, 19 nt, Artificial Sequence
  Description of Artificial Sequence: Synthetic oligonucleotide
  Antisense strand to SEQ ID NO: 1833611
agaauuaucauucaaguca

SEQ ID NO: 1833613 - RNA, 19 nt, Artificial Sequence
  Description of Artificial Sequence: Synthetic oligonucleotide
  Sense strand starting at position 3836 of SEQ ID NO: 1563809
augauaauucuucgaacau

SEQ ID NO: 1833614 - RNA, 19 nt, Artificial Sequence
  Description of Artificial Sequence: Synthetic oligonucleotide
  Antisense strand to SEQ ID NO: 1833613
auguucgaagaauuaucau

SEQ ID NO: 1833615 - RNA, 19 nt, Artificial Sequence
  Description of Artificial Sequence: Synthetic oligonucleotide
  Sense strand starting at position 3837 of SEQ ID NO: 1563809
ugauaauucuucgaacauu

SEQ ID NO: 1833616 - RNA, 19 nt, Artificial Sequence
  Description of Artificial Sequence: Synthetic oligonucleotide
  Antisense strand to SEQ ID NO: 1833615
aauguucgaagaauuauca

SEQ ID NO: 1833617 - RNA, 19 nt, Artificial Sequence
  Description of Artificial Sequence: Synthetic oligonucleotide
  Sense strand starting at position 3906 of SEQ ID NO: 1563809
caguauagguugccuaaau

SEQ ID NO: 1833618 - RNA, 19 nt, Artificial Sequence
  Description of Artificial Sequence: Synthetic oligonucleotide
  Antisense strand to SEQ ID NO: 1833617
auuuaggcaaccuauacug

SEQ ID NO: 1833619 - RNA, 19 nt, Artificial Sequence
  Description of Artificial Sequence: Synthetic oligonucleotide
  Sense strand starting at position 3907 of SEQ ID NO: 1563809
aguauagguugccuaaaua

SEQ ID NO: 1833620 - RNA, 19 nt, Artificial Sequence
  Description of Artificial Sequence: Synthetic oligonucleotide
  Antisense strand to SEQ ID NO: 1833619
uauuuaggcaaccuauacu

SEQ ID NO: 1833621 - RNA, 19 nt, Artificial Sequence
  Description of Artificial Sequence: Synthetic oligonucleotide
  Sense strand starting at position 3979 of SEQ ID NO: 1563809
acccguuggcaggaucaaa

SEQ ID NO: 1833622 - RNA, 19 nt, Artificial Sequence
  Description of Artificial Sequence: Synthetic oligonucleotide
  Antisense strand to SEQ ID NO: 1833621
uuugauccugccaacgggu

SEQ ID NO: 1833623 - RNA, 19 nt, Artificial Sequence
  Description of Artificial Sequence: Synthetic oligonucleotide
  Sense strand starting at position 123 of SEQ ID NO: 1563810
gcuugagaaucucucaugu

SEQ ID NO: 1833624 - RNA, 19 nt, Artificial Sequence
  Description of Artificial Sequence: Synthetic oligonucleotide
  Antisense strand to SEQ ID NO: 1833623
acaugagagauucucaagc

SEQ ID NO: 1833625 - RNA, 19 nt, Artificial Sequence
  Description of Artificial Sequence: Synthetic oligonucleotide
  Sense strand starting at position 611 of SEQ ID NO: 1563810
gucaucaacucccugagau

SEQ ID NO: 1833626 - RNA, 19 nt, Artificial Sequence
  Description of Artificial Sequence: Synthetic oligonucleotide
  Antisense strand to SEQ ID NO: 1833625
aucucagggaguugaugac

SEQ ID NO: 1833627 - RNA, 19 nt, Artificial Sequence
  Description of Artificial Sequence: Synthetic oligonucleotide
  Sense strand starting at position 704 of SEQ ID NO: 1563810
uagggugaacguuaugaug

SEQ ID NO: 1833628 - RNA, 19 nt, Artificial Sequence
  Description of Artificial Sequence: Synthetic oligonucleotide
  Antisense strand to SEQ ID NO: 1833627
caucauaacguucacccua

SEQ ID NO: 1833629 - RNA, 19 nt, Artificial Sequence
  Description of Artificial Sequence: Synthetic oligonucleotide
  Sense strand starting at position 730 of SEQ ID NO: 1563810
guggguuacucaucuuuac

SEQ ID NO: 1833630 - RNA, 19 nt, Artificial Sequence
  Description of Artificial Sequence: Synthetic oligonucleotide
  Antisense strand to SEQ ID NO: 1833629
guaaagaugaguaacccac

SEQ ID NO: 1833631 - RNA, 19 nt, Artificial Sequence
  Description of Artificial Sequence: Synthetic oligonucleotide
  Sense strand starting at position 820 of SEQ ID NO: 1563810
accuuaucucccugagggu

SEQ ID NO: 1833632 - RNA, 19 nt, Artificial Sequence
  Description of Artificial Sequence: Synthetic oligonucleotide
  Antisense strand to SEQ ID NO: 1833631
acccucagggagauaaggu

SEQ ID NO: 1833633 - RNA, 19 nt, Artificial Sequence
  Description of Artificial Sequence: Synthetic oligonucleotide
  Sense strand starting at position 821 of SEQ ID NO: 1563810
ccuuaucucccugaggguu

SEQ ID NO: 1833634 - RNA, 19 nt, Artificial Sequence
  Description of Artificial Sequence: Synthetic oligonucleotide
  Antisense strand to SEQ ID NO: 1833633
aacccucagggagauaagg

SEQ ID NO: 1833635 - RNA, 19 nt, Artificial Sequence
  Description of Artificial Sequence: Synthetic oligonucleotide
  Sense strand starting at position 1273 of SEQ ID NO: 1563810
gguggcucaguuugagaca

SEQ ID NO: 1833636 - RNA, 19 nt, Artificial Sequence
  Description of Artificial Sequence: Synthetic oligonucleotide
  Antisense strand to SEQ ID NO: 1833635
ugucucaaacugagccacc

SEQ ID NO: 1833637 - RNA, 19 nt, Artificial Sequence
  Description of Artificial Sequence: Synthetic oligonucleotide
  Sense strand starting at position 1600 of SEQ ID NO: 1563810
gggauugguagugagggua

SEQ ID NO: 1833638 - RNA, 19 nt, Artificial Sequence
  Description of Artificial Sequence: Synthetic oligonucleotide
  Antisense strand to SEQ ID NO: 1833637
uacccucacuaccaauccc

SEQ ID NO: 1833639 - RNA, 19 nt, Artificial Sequence
  Description of Artificial Sequence: Synthetic oligonucleotide
  Sense strand starting at position 1719 of SEQ ID NO: 1563810
aagcucuuacgccagaguu

SEQ ID NO: 1833640 - RNA, 19 nt, Artificial Sequence
  Description of Artificial Sequence: Synthetic oligonucleotide
  Antisense strand to SEQ ID NO: 1833639
aacucuggcguaagagcuu

SEQ ID NO: 1833641 - RNA, 19 nt, Artificial Sequence
  Description of Artificial Sequence: Synthetic oligonucleotide
  Sense strand starting at position 1780 of SEQ ID NO: 1563810
gcgacucagccugagaagu

SEQ ID NO: 1833642 - RNA, 19 nt, Artificial Sequence
  Description of Artificial Sequence: Synthetic oligonucleotide
  Antisense strand to SEQ ID NO: 1833641
acuucucaggcugagucgc

SEQ ID NO: 1833643 - RNA, 19 nt, Artificial Sequence
  Description of Artificial Sequence: Synthetic oligonucleotide
  Sense strand starting at position 1832 of SEQ ID NO: 1563810
gaggcagcgcuggauuauu

SEQ ID NO: 1833644 - RNA, 19 nt, Artificial Sequence
  Description of Artificial Sequence: Synthetic oligonucleotide
  Antisense strand to SEQ ID NO: 1833643
aauaauccagcgcugccuc

SEQ ID NO: 1833645 - RNA, 19 nt, Artificial Sequence
  Description of Artificial Sequence: Synthetic oligonucleotide
  Sense strand starting at position 2195 of SEQ ID NO: 1563810
ggccuuuggucaucccuca

SEQ ID NO: 1833646 - RNA, 19 nt, Artificial Sequence
  Description of Artificial Sequence: Synthetic oligonucleotide
  Antisense strand to SEQ ID NO: 1833645
ugagggaugaccaaaggcc

SEQ ID NO: 1833647 - RNA, 19 nt, Artificial Sequence
  Description of Artificial Sequence: Synthetic oligonucleotide
  Sense strand starting at position 2340 of SEQ ID NO: 1563810
gggugagaucauugccagu

SEQ ID NO: 1833648 - RNA, 19 nt, Artificial Sequence
  Description of Artificial Sequence: Synthetic oligonucleotide
  Antisense strand to SEQ ID NO: 1833647
acuggcaaugaucucaccc

SEQ ID NO: 1833649 - RNA, 19 nt, Artificial Sequence
  Description of Artificial Sequence: Synthetic oligonucleotide
  Sense strand starting at position 2342 of SEQ ID NO: 1563810
gugagaucauugccagugu

SEQ ID NO: 1833650 - RNA, 19 nt, Artificial Sequence
  Description of Artificial Sequence: Synthetic oligonucleotide
  Antisense strand to SEQ ID NO: 1833649
acacuggcaaugaucucac

SEQ ID NO: 1833651 - RNA, 19 nt, Artificial Sequence
  Description of Artificial Sequence: Synthetic oligonucleotide
  Sense strand starting at position 2419 of SEQ ID NO: 1563810
gguggauccucaguccuca

SEQ ID NO: 1833652 - RNA, 19 nt, Artificial Sequence
  Description of Artificial Sequence: Synthetic oligonucleotide
  Antisense strand to SEQ ID NO: 1833651
ugaggacugaggauccacc

SEQ ID NO: 1833653 - RNA, 19 nt, Artificial Sequence
  Description of Artificial Sequence: Synthetic oligonucleotide
  Sense strand starting at position 2593 of SEQ ID NO: 1563810
aggagcucccgcgaugaua

SEQ ID NO: 1833654 - RNA, 19 nt, Artificial Sequence
  Description of Artificial Sequence: Synthetic oligonucleotide
  Antisense strand to SEQ ID NO: 1833653
uaucaucgcgggagcuccu

SEQ ID NO: 1833655 - RNA, 19 nt, Artificial Sequence
  Description of Artificial Sequence: Synthetic oligonucleotide
  Sense strand starting at position 2608 of SEQ ID NO: 1563810
gauagugaccucugggaga

SEQ ID NO: 1833656 - RNA, 19 nt, Artificial Sequence
  Description of Artificial Sequence: Synthetic oligonucleotide
  Antisense strand to SEQ ID NO: 1833655
ucucccagaggucacuauc

SEQ ID NO: 1833657 - RNA, 19 nt, Artificial Sequence
  Description of Artificial Sequence: Synthetic oligonucleotide
  Sense strand starting at position 2737 of SEQ ID NO: 1563810
cuaaguauauauguaggua

SEQ ID NO: 1833658 - RNA, 19 nt, Artificial Sequence
  Description of Artificial Sequence: Synthetic oligonucleotide
  Antisense strand to SEQ ID NO: 1833657
uaccuacauauauacuuag

SEQ ID NO: 1833659 - RNA, 19 nt, Artificial Sequence
  Description of Artificial Sequence: Synthetic oligonucleotide
  Sense strand starting at position 2814 of SEQ ID NO: 1563810
cugauauccuagucuacuu

SEQ ID NO: 1833660 - RNA, 19 nt, Artificial Sequence
  Description of Artificial Sequence: Synthetic oligonucleotide
  Antisense strand to SEQ ID NO: 1833659
aaguagacuaggauaucag

SEQ ID NO: 1833661 - RNA, 19 nt, Artificial Sequence
  Description of Artificial Sequence: Synthetic oligonucleotide
  Sense strand starting at position 2838 of SEQ ID NO: 1563810
ccagucuuuguguucuguu

SEQ ID NO: 1833662 - RNA, 19 nt, Artificial Sequence
  Description of Artificial Sequence: Synthetic oligonucleotide
  Antisense strand to SEQ ID NO: 1833661
aacagaacacaaagacugg

SEQ ID NO: 1833663 - RNA, 19 nt, Artificial Sequence
  Description of Artificial Sequence: Synthetic oligonucleotide
  Sense strand starting at position 3012 of SEQ ID NO: 1563810
gccucagauugugcaauga

SEQ ID NO: 1833664 - RNA, 19 nt, Artificial Sequence
  Description of Artificial Sequence: Synthetic oligonucleotide
  Antisense strand to SEQ ID NO: 1833663
ucauugcacaaucugaggc

SEQ ID NO: 1833665 - RNA, 19 nt, Artificial Sequence
  Description of Artificial Sequence: Synthetic oligonucleotide
  Sense strand starting at position 3392 of SEQ ID NO: 1563810
cgugaaugaauauguuaua

SEQ ID NO: 1833666 - RNA, 19 nt, Artificial Sequence
  Description of Artificial Sequence: Synthetic oligonucleotide
  Antisense strand to SEQ ID NO: 1833665
uauaacauauucauucacg

SEQ ID NO: 1833667 - RNA, 19 nt, Artificial Sequence
  Description of Artificial Sequence: Synthetic oligonucleotide
  Sense strand starting at position 3405 of SEQ ID NO: 1563810
guuauacuccucuauggau

SEQ ID NO: 1833668 - RNA, 19 nt, Artificial Sequence
  Description of Artificial Sequence: Synthetic oligonucleotide
  Antisense strand to SEQ ID NO: 1833667
auccauagaggaguauaac

SEQ ID NO: 1833669 - RNA, 19 nt, Artificial Sequence
  Description of Artificial Sequence: Synthetic oligonucleotide
  Sense strand starting at position 3436 of SEQ ID NO: 1563810
uuuccugaauaugucagua

SEQ ID NO: 1833670 - RNA, 19 nt, Artificial Sequence
  Description of Artificial Sequence: Synthetic oligonucleotide
  Antisense strand to SEQ ID NO: 1833669
uacugacauauucaggaaa

SEQ ID NO: 1833671 - RNA, 19 nt, Artificial Sequence
  Description of Artificial Sequence: Synthetic oligonucleotide
  Sense strand starting at position 3446 of SEQ ID NO: 1563810
augucaguauacuucggua

SEQ ID NO: 1833672 - RNA, 19 nt, Artificial Sequence
  Description of Artificial Sequence: Synthetic oligonucleotide
  Antisense strand to SEQ ID NO: 1833671
uaccgaaguauacugacau

SEQ ID NO: 1833673 - RNA, 19 nt, Artificial Sequence
  Description of Artificial Sequence: Synthetic oligonucleotide
  Sense strand starting at position 3461 of SEQ ID NO: 1563810
gguaguugccucuauaaac

SEQ ID NO: 1833674 - RNA, 19 nt, Artificial Sequence
  Description of Artificial Sequence: Synthetic oligonucleotide
  Antisense strand to SEQ ID NO: 1833673
guuuauagaggcaacuacc

SEQ ID NO: 1833675 - RNA, 19 nt, Artificial Sequence
  Description of Artificial Sequence: Synthetic oligonucleotide
  Sense strand starting at position 3508 of SEQ ID NO: 1563810
ucagguaauucuuggauuu

SEQ ID NO: 1833676 - RNA, 19 nt, Artificial Sequence
  Description of Artificial Sequence: Synthetic oligonucleotide
  Antisense strand to SEQ ID NO: 1833675
aaauccaagaauuaccuga

SEQ ID NO: 1833677 - RNA, 19 nt, Artificial Sequence
  Description of Artificial Sequence: Synthetic oligonucleotide
  Sense strand starting at position 3540 of SEQ ID NO: 1563810
aguggcauauugucuauca

SEQ ID NO: 1833678 - RNA, 19 nt, Artificial Sequence
  Description of Artificial Sequence: Synthetic oligonucleotide
  Antisense strand to SEQ ID NO: 1833677
ugauagacaauaugccacu

SEQ ID NO: 1833679 - RNA, 19 nt, Artificial Sequence
  Description of Artificial Sequence: Synthetic oligonucleotide
  Sense strand starting at position 3541 of SEQ ID NO: 1563810
guggcauauugucuaucaa

SEQ ID NO: 1833680 - RNA, 19 nt, Artificial Sequence
  Description of Artificial Sequence: Synthetic oligonucleotide
  Antisense strand to SEQ ID NO: 1833679
uugauagacaauaugccac

SEQ ID NO: 1833681 - RNA, 19 nt, Artificial Sequence
  Description of Artificial Sequence: Synthetic oligonucleotide
  Sense strand starting at position 3542 of SEQ ID NO: 1563810
uggcauauugucuaucaau

SEQ ID NO: 1833682 - RNA, 19 nt, Artificial Sequence
  Description of Artificial Sequence: Synthetic oligonucleotide
  Antisense strand to SEQ ID NO: 1833681
auugauagacaauaugcca

SEQ ID NO: 1833683 - RNA, 19 nt, Artificial Sequence
  Description of Artificial Sequence: Synthetic oligonucleotide
  Sense strand starting at position 3646 of SEQ ID NO: 1563810
gcacuugaauauuccgcau

SEQ ID NO: 1833684 - RNA, 19 nt, Artificial Sequence
  Description of Artificial Sequence: Synthetic oligonucleotide
  Antisense strand to SEQ ID NO: 1833683
augcggaauauucaagugc

SEQ ID NO: 1833685 - RNA, 19 nt, Artificial Sequence
  Description of Artificial Sequence: Synthetic oligonucleotide
  Sense strand starting at position 3650 of SEQ ID NO: 1563810
uugaauauuccgcauaccu

SEQ ID NO: 1833686 - RNA, 19 nt, Artificial Sequence
  Description of Artificial Sequence: Synthetic oligonucleotide
  Antisense strand to SEQ ID NO: 1833685
agguaugcggaauauucaa

SEQ ID NO: 1833687 - RNA, 19 nt, Artificial Sequence
  Description of Artificial Sequence: Synthetic oligonucleotide
  Sense strand starting at position 3818 of SEQ ID NO: 1563810
ucucguuccugacuugaau

SEQ ID NO: 1833688 - RNA, 19 nt, Artificial Sequence
  Description of Artificial Sequence: Synthetic oligonucleotide
  Antisense strand to SEQ ID NO: 1833687
auucaagucaggaacgaga

SEQ ID NO: 1833689 - RNA, 19 nt, Artificial Sequence
  Description of Artificial Sequence: Synthetic oligonucleotide
  Sense strand starting at position 3820 of SEQ ID NO: 1563810
ucguuccugacuugaauga

SEQ ID NO: 1833690 - RNA, 19 nt, Artificial Sequence
  Description of Artificial Sequence: Synthetic oligonucleotide
  Antisense strand to SEQ ID NO: 1833689
ucauucaagucaggaacga

SEQ ID NO: 1833691 - RNA, 19 nt, Artificial Sequence
  Description of Artificial Sequence: Synthetic oligonucleotide
  Sense strand starting at position 3821 of SEQ ID NO: 1563810
cguuccugacuugaaugau

SEQ ID NO: 1833692 - RNA, 19 nt, Artificial Sequence
  Description of Artificial Sequence: Synthetic oligonucleotide
  Antisense strand to SEQ ID NO: 1833691
aucauucaagucaggaacg

SEQ ID NO: 1833693 - RNA, 19 nt, Artificial Sequence
  Description of Artificial Sequence: Synthetic oligonucleotide
  Sense strand starting at position 3824 of SEQ ID NO: 1563810
uccugacuugaaugauaau

SEQ ID NO: 1833694 - RNA, 19 nt, Artificial Sequence
  Description of Artificial Sequence: Synthetic oligonucleotide
  Antisense strand to SEQ ID NO: 1833693
auuaucauucaagucagga

SEQ ID NO: 1833695 - RNA, 19 nt, Artificial Sequence
  Description of Artificial Sequence: Synthetic oligonucleotide
  Sense strand starting at position 3835 of SEQ ID NO: 1563810
augauaauucuucgaacau

SEQ ID NO: 1833696 - RNA, 19 nt, Artificial Sequence
  Description of Artificial Sequence: Synthetic oligonucleotide
  Antisense strand to SEQ ID NO: 1833695
auguucgaagaauuaucau

SEQ ID NO: 1833697 - RNA, 19 nt, Artificial Sequence
  Description of Artificial Sequence: Synthetic oligonucleotide
  Sense strand starting at position 3905 of SEQ ID NO: 1563810
caguauagguugccuaaau

SEQ ID NO: 1833698 - RNA, 19 nt, Artificial Sequence
  Description of Artificial Sequence: Synthetic oligonucleotide
  Antisense strand to SEQ ID NO: 1833697
auuuaggcaaccuauacug

SEQ ID NO: 1833699 - RNA, 19 nt, Artificial Sequence
  Description of Artificial Sequence: Synthetic oligonucleotide
  Sense strand starting at position 3906 of SEQ ID NO: 1563810
aguauagguugccuaaaua

SEQ ID NO: 1833700 - RNA, 19 nt, Artificial Sequence
  Description of Artificial Sequence: Synthetic oligonucleotide
  Antisense strand to SEQ ID NO: 1833699
uauuuaggcaaccuauacu

SEQ ID NO: 1833701 - RNA, 19 nt, Artificial Sequence
  Description of Artificial Sequence: Synthetic oligonucleotide
  Sense strand starting at position 3978 of SEQ ID NO: 1563810
acccguuggcaggaucaaa

SEQ ID NO: 1833702 - RNA, 19 nt, Artificial Sequence
  Description of Artificial Sequence: Synthetic oligonucleotide
  Antisense strand to SEQ ID NO: 1833701
uuugauccugccaacgggu

SEQ ID NO: 1833703 - RNA, 19 nt, Artificial Sequence
  Description of Artificial Sequence: Synthetic oligonucleotide
  Sense strand starting at position 138 of SEQ ID NO: 1563811
gaggacuucucgccaccuu

SEQ ID NO: 1833704 - RNA, 19 nt, Artificial Sequence
  Description of Artificial Sequence: Synthetic oligonucleotide
  Antisense strand to SEQ ID NO: 1833703
aagguggcgagaaguccuc

SEQ ID NO: 1833705 - RNA, 19 nt, Artificial Sequence
  Description of Artificial Sequence: Synthetic oligonucleotide
  Sense strand starting at position 139 of SEQ ID NO: 1563811
aggacuucucgccaccuua

SEQ ID NO: 1833706 - RNA, 19 nt, Artificial Sequence
  Description of Artificial Sequence: Synthetic oligonucleotide
  Antisense strand to SEQ ID NO: 1833705
uaagguggcgagaaguccu

SEQ ID NO: 1833707 - RNA, 19 nt, Artificial Sequence
  Description of Artificial Sequence: Synthetic oligonucleotide
  Sense strand starting at position 205 of SEQ ID NO: 1563811
gagucuggcuuaccuuaga

SEQ ID NO: 1833708 - RNA, 19 nt, Artificial Sequence
  Description of Artificial Sequence: Synthetic oligonucleotide
  Antisense strand to SEQ ID NO: 1833707
ucuaagguaagccagacuc

SEQ ID NO: 1833709 - RNA, 19 nt, Artificial Sequence
  Description of Artificial Sequence: Synthetic oligonucleotide
  Sense strand starting at position 208 of SEQ ID NO: 1563811
ucuggcuuaccuuagaauc

SEQ ID NO: 1833710 - RNA, 19 nt, Artificial Sequence
  Description of Artificial Sequence: Synthetic oligonucleotide
  Antisense strand to SEQ ID NO: 1833709
gauucuaagguaagccaga

SEQ ID NO: 1833711 - RNA, 19 nt, Artificial Sequence
  Description of Artificial Sequence: Synthetic oligonucleotide
  Sense strand starting at position 259 of SEQ ID NO: 1563811
ugcugagugaaugguaaag

SEQ ID NO: 1833712 - RNA, 19 nt, Artificial Sequence
  Description of Artificial Sequence: Synthetic oligonucleotide
  Antisense strand to SEQ ID NO: 1833711
cuuuaccauucacucagca

SEQ ID NO: 1833713 - RNA, 19 nt, Artificial Sequence
  Description of Artificial Sequence: Synthetic oligonucleotide
  Sense strand starting at position 261 of SEQ ID NO: 1563811
cugagugaaugguaaagaa

SEQ ID NO: 1833714 - RNA, 19 nt, Artificial Sequence
  Description of Artificial Sequence: Synthetic oligonucleotide
  Antisense strand to SEQ ID NO: 1833713
uucuuuaccauucacucag

SEQ ID NO: 1833715 - RNA, 19 nt, Artificial Sequence
  Description of Artificial Sequence: Synthetic oligonucleotide
  Sense strand starting at position 1880 of SEQ ID NO: 1563811
ggccuuaggugagaacuga

SEQ ID NO: 1833716 - RNA, 19 nt, Artificial Sequence
  Description of Artificial Sequence: Synthetic oligonucleotide
  Antisense strand to SEQ ID NO: 1833715
ucaguucucaccuaaggcc

SEQ ID NO: 1833717 - RNA, 19 nt, Artificial Sequence
  Description of Artificial Sequence: Synthetic oligonucleotide
  Sense strand starting at position 2297 of SEQ ID NO: 1563811
cacggauucccagaagucu

SEQ ID NO: 1833718 - RNA, 19 nt, Artificial Sequence
  Description of Artificial Sequence: Synthetic oligonucleotide
  Antisense strand to SEQ ID NO: 1833717
agacuucugggaauccgug

SEQ ID NO: 1833719 - RNA, 19 nt, Artificial Sequence
  Description of Artificial Sequence: Synthetic oligonucleotide
  Sense strand starting at position 2433 of SEQ ID NO: 1563811
gcuugagaaucucucaugu

SEQ ID NO: 1833720 - RNA, 19 nt, Artificial Sequence
  Description of Artificial Sequence: Synthetic oligonucleotide
  Antisense strand to SEQ ID NO: 1833719
acaugagagauucucaagc

SEQ ID NO: 1833721 - RNA, 19 nt, Artificial Sequence
  Description of Artificial Sequence: Synthetic oligonucleotide
  Sense strand starting at position 2459 of SEQ ID NO: 1563811
ucacaucccugauauggua

SEQ ID NO: 1833722 - RNA, 19 nt, Artificial Sequence
  Description of Artificial Sequence: Synthetic oligonucleotide
  Antisense strand to SEQ ID NO: 1833721
uaccauaucagggauguga

SEQ ID NO: 1833723 - RNA, 19 nt, Artificial Sequence
  Description of Artificial Sequence: Synthetic oligonucleotide
  Sense strand starting at position 2983 of SEQ ID NO: 1563811
gugcguuguccagggcuga

SEQ ID NO: 1833724 - RNA, 19 nt, Artificial Sequence
  Description of Artificial Sequence: Synthetic oligonucleotide
  Antisense strand to SEQ ID NO: 1833723
ucagcccuggacaacgcac

SEQ ID NO: 1833725 - RNA, 19 nt, Artificial Sequence
  Description of Artificial Sequence: Synthetic oligonucleotide
  Sense strand starting at position 3014 of SEQ ID NO: 1563811
uagggugaacguuaugaug

SEQ ID NO: 1833726 - RNA, 19 nt, Artificial Sequence
  Description of Artificial Sequence: Synthetic oligonucleotide
  Antisense strand to SEQ ID NO: 1833725
caucauaacguucacccua

SEQ ID NO: 1833727 - RNA, 19 nt, Artificial Sequence
  Description of Artificial Sequence: Synthetic oligonucleotide
  Sense strand starting at position 3173 of SEQ ID NO: 1563811
aaaugagauugucacuuag

SEQ ID NO: 1833728 - RNA, 19 nt, Artificial Sequence
  Description of Artificial Sequence: Synthetic oligonucleotide
  Antisense strand to SEQ ID NO: 1833727
cuaagugacaaucucauuu

SEQ ID NO: 1833729 - RNA, 19 nt, Artificial Sequence
  Description of Artificial Sequence: Synthetic oligonucleotide
  Sense strand starting at position 3557 of SEQ ID NO: 1563811
cuaggauucccgcggcuga

SEQ ID NO: 1833730 - RNA, 19 nt, Artificial Sequence
  Description of Artificial Sequence: Synthetic oligonucleotide
  Antisense strand to SEQ ID NO: 1833729
ucagccgcgggaauccuag

SEQ ID NO: 1833731 - RNA, 19 nt, Artificial Sequence
  Description of Artificial Sequence: Synthetic oligonucleotide
  Sense strand starting at position 3558 of SEQ ID NO: 1563811
uaggauucccgcggcugaa

SEQ ID NO: 1833732 - RNA, 19 nt, Artificial Sequence
  Description of Artificial Sequence: Synthetic oligonucleotide
  Antisense strand to SEQ ID NO: 1833731
uucagccgcgggaauccua

SEQ ID NO: 1833733 - RNA, 19 nt, Artificial Sequence
  Description of Artificial Sequence: Synthetic oligonucleotide
  Sense strand starting at position 3810 of SEQ ID NO: 1563811
cccggauucugccaggaug

SEQ ID NO: 1833734 - RNA, 19 nt, Artificial Sequence
  Description of Artificial Sequence: Synthetic oligonucleotide
  Antisense strand to SEQ ID NO: 1833733
cauccuggcagaauccggg

SEQ ID NO: 1833735 - RNA, 19 nt, Artificial Sequence
  Description of Artificial Sequence: Synthetic oligonucleotide
  Sense strand starting at position 3866 of SEQ ID NO: 1563811
ggguugguguuugagggau

SEQ ID NO: 1833736 - RNA, 19 nt, Artificial Sequence
  Description of Artificial Sequence: Synthetic oligonucleotide
  Antisense strand to SEQ ID NO: 1833735
aucccucaaacaccaaccc

SEQ ID NO: 1833737 - RNA, 19 nt, Artificial Sequence
  Description of Artificial Sequence: Synthetic oligonucleotide
  Sense strand starting at position 3910 of SEQ ID NO: 1563811
gggauugguagugagggua

SEQ ID NO: 1833738 - RNA, 19 nt, Artificial Sequence
  Description of Artificial Sequence: Synthetic oligonucleotide
  Antisense strand to SEQ ID NO: 1833737
uacccucacuaccaauccc

SEQ ID NO: 1833739 - RNA, 19 nt, Artificial Sequence
  Description of Artificial Sequence: Synthetic oligonucleotide
  Sense strand starting at position 137 of SEQ ID NO: 1563812
gaggacuucucgccaccuu

SEQ ID NO: 1833740 - RNA, 19 nt, Artificial Sequence
  Description of Artificial Sequence: Synthetic oligonucleotide
  Antisense strand to SEQ ID NO: 1833739
aagguggcgagaaguccuc

SEQ ID NO: 1833741 - RNA, 19 nt, Artificial Sequence
  Description of Artificial Sequence: Synthetic oligonucleotide
  Sense strand starting at position 138 of SEQ ID NO: 1563812
aggacuucucgccaccuua

SEQ ID NO: 1833742 - RNA, 19 nt, Artificial Sequence
  Description of Artificial Sequence: Synthetic oligonucleotide
  Antisense strand to SEQ ID NO: 1833741
uaagguggcgagaaguccu

SEQ ID NO: 1833743 - RNA, 19 nt, Artificial Sequence
  Description of Artificial Sequence: Synthetic oligonucleotide
  Sense strand starting at position 204 of SEQ ID NO: 1563812
gagucuggcuuaccuuaga

SEQ ID NO: 1833744 - RNA, 19 nt, Artificial Sequence
  Description of Artificial Sequence: Synthetic oligonucleotide
  Antisense strand to SEQ ID NO: 1833743
ucuaagguaagccagacuc

SEQ ID NO: 1833745 - RNA, 19 nt, Artificial Sequence
  Description of Artificial Sequence: Synthetic oligonucleotide
  Sense strand starting at position 207 of SEQ ID NO: 1563812
ucuggcuuaccuuagaauc

SEQ ID NO: 1833746 - RNA, 19 nt, Artificial Sequence
  Description of Artificial Sequence: Synthetic oligonucleotide
  Antisense strand to SEQ ID NO: 1833745
gauucuaagguaagccaga

SEQ ID NO: 1833747 - RNA, 19 nt, Artificial Sequence
  Description of Artificial Sequence: Synthetic oligonucleotide
  Sense strand starting at position 252 of SEQ ID NO: 1563812
agcagaugcugagugaaug

SEQ ID NO: 1833748 - RNA, 19 nt, Artificial Sequence
  Description of Artificial Sequence: Synthetic oligonucleotide
  Antisense strand to SEQ ID NO: 1833747
cauucacucagcaucugcu

SEQ ID NO: 1833749 - RNA, 19 nt, Artificial Sequence
  Description of Artificial Sequence: Synthetic oligonucleotide
  Sense strand starting at position 260 of SEQ ID NO: 1563812
cugagugaaugguaaagaa

SEQ ID NO: 1833750 - RNA, 19 nt, Artificial Sequence
  Description of Artificial Sequence: Synthetic oligonucleotide
  Antisense strand to SEQ ID NO: 1833749
uucuuuaccauucacucag

SEQ ID NO: 1833751 - RNA, 19 nt, Artificial Sequence
  Description of Artificial Sequence: Synthetic oligonucleotide
  Sense strand starting at position 371 of SEQ ID NO: 1563812
auaauagacugagguauaa

SEQ ID NO: 1833752 - RNA, 19 nt, Artificial Sequence
  Description of Artificial Sequence: Synthetic oligonucleotide
  Antisense strand to SEQ ID NO: 1833751
uuauaccucagucuauuau

SEQ ID NO: 1833753 - RNA, 19 nt, Artificial Sequence
  Description of Artificial Sequence: Synthetic oligonucleotide
  Sense strand starting at position 475 of SEQ ID NO: 1563812
ugcuguuauuaugugacaa

SEQ ID NO: 1833754 - RNA, 19 nt, Artificial Sequence
  Description of Artificial Sequence: Synthetic oligonucleotide
  Antisense strand to SEQ ID NO: 1833753
uugucacauaauaacagca

SEQ ID NO: 1833755 - RNA, 19 nt, Artificial Sequence
  Description of Artificial Sequence: Synthetic oligonucleotide
  Sense strand starting at position 687 of SEQ ID NO: 1563812
acagaaacucacugcuaag

SEQ ID NO: 1833756 - RNA, 19 nt, Artificial Sequence
  Description of Artificial Sequence: Synthetic oligonucleotide
  Antisense strand to SEQ ID NO: 1833755
cuuagcagugaguuucugu

SEQ ID NO: 1833757 - RNA, 19 nt, Artificial Sequence
  Description of Artificial Sequence: Synthetic oligonucleotide
  Sense strand starting at position 897 of SEQ ID NO: 1563812
gagguucuccaccgaucuu

SEQ ID NO: 1833758 - RNA, 19 nt, Artificial Sequence
  Description of Artificial Sequence: Synthetic oligonucleotide
  Antisense strand to SEQ ID NO: 1833757
aagaucgguggagaaccuc

SEQ ID NO: 1833759 - RNA, 19 nt, Artificial Sequence
  Description of Artificial Sequence: Synthetic oligonucleotide
  Sense strand starting at position 906 of SEQ ID NO: 1563812
caccgaucuuuaguguaug

SEQ ID NO: 1833760 - RNA, 19 nt, Artificial Sequence
  Description of Artificial Sequence: Synthetic oligonucleotide
  Antisense strand to SEQ ID NO: 1833759
cauacacuaaagaucggug

SEQ ID NO: 1833761 - RNA, 19 nt, Artificial Sequence
  Description of Artificial Sequence: Synthetic oligonucleotide
  Sense strand starting at position 1141 of SEQ ID NO: 1563812
ggcacagucgcccucuauu

SEQ ID NO: 1833762 - RNA, 19 nt, Artificial Sequence
  Description of Artificial Sequence: Synthetic oligonucleotide
  Antisense strand to SEQ ID NO: 1833761
aauagagggcgacugugcc

SEQ ID NO: 1833763 - RNA, 19 nt, Artificial Sequence
  Description of Artificial Sequence: Synthetic oligonucleotide
  Sense strand starting at position 1161 of SEQ ID NO: 1563812
cgauuauggccaggacgau

SEQ ID NO: 1833764 - RNA, 19 nt, Artificial Sequence
  Description of Artificial Sequence: Synthetic oligonucleotide
  Antisense strand to SEQ ID NO: 1833763
aucguccuggccauaaucg

SEQ ID NO: 1833765 - RNA, 19 nt, Artificial Sequence
  Description of Artificial Sequence: Synthetic oligonucleotide
  Sense strand starting at position 1250 of SEQ ID NO: 1563812
gugacaaggauguacaagu

SEQ ID NO: 1833766 - RNA, 19 nt, Artificial Sequence
  Description of Artificial Sequence: Synthetic oligonucleotide
  Antisense strand to SEQ ID NO: 1833765
acuuguacauccuugucac

SEQ ID NO: 1833767 - RNA, 19 nt, Artificial Sequence
  Description of Artificial Sequence: Synthetic oligonucleotide
  Sense strand starting at position 1324 of SEQ ID NO: 1563812
ggaggcuuugcugaagauc

SEQ ID NO: 1833768 - RNA, 19 nt, Artificial Sequence
  Description of Artificial Sequence: Synthetic oligonucleotide
  Antisense strand to SEQ ID NO: 1833767
gaucuucagcaaagccucc

SEQ ID NO: 1833769 - RNA, 19 nt, Artificial Sequence
  Description of Artificial Sequence: Synthetic oligonucleotide
  Sense strand starting at position 1347 of SEQ ID NO: 1563812
gaaagaaguccuggcaauu

SEQ ID NO: 1833770 - RNA, 19 nt, Artificial Sequence
  Description of Artificial Sequence: Synthetic oligonucleotide
  Antisense strand to SEQ ID NO: 1833769
aauugccaggacuucuuuc

SEQ ID NO: 1833771 - RNA, 19 nt, Artificial Sequence
  Description of Artificial Sequence: Synthetic oligonucleotide
  Sense strand starting at position 1359 of SEQ ID NO: 1563812
ggcaauuucugaggacacu

SEQ ID NO: 1833772 - RNA, 19 nt, Artificial Sequence
  Description of Artificial Sequence: Synthetic oligonucleotide
  Antisense strand to SEQ ID NO: 1833771
aguguccucagaaauugcc

SEQ ID NO: 1833773 - RNA, 19 nt, Artificial Sequence
  Description of Artificial Sequence: Synthetic oligonucleotide
  Sense strand starting at position 1369 of SEQ ID NO: 1563812
gaggacacucuccagcauu

SEQ ID NO: 1833774 - RNA, 19 nt, Artificial Sequence
  Description of Artificial Sequence: Synthetic oligonucleotide
  Antisense strand to SEQ ID NO: 1833773
aaugcuggagaguguccuc

SEQ ID NO: 1833775 - RNA, 19 nt, Artificial Sequence
  Description of Artificial Sequence: Synthetic oligonucleotide
  Sense strand starting at position 1460 of SEQ ID NO: 1563812
cugauugcugcuuggaacu

SEQ ID NO: 1833776 - RNA, 19 nt, Artificial Sequence
  Description of Artificial Sequence: Synthetic oligonucleotide
  Antisense strand to SEQ ID NO: 1833775
aguuccaagcagcaaucag

SEQ ID NO: 1833777 - RNA, 19 nt, Artificial Sequence
  Description of Artificial Sequence: Synthetic oligonucleotide
  Sense strand starting at position 1537 of SEQ ID NO: 1563812
aucggauugucuccaaaga

SEQ ID NO: 1833778 - RNA, 19 nt, Artificial Sequence
  Description of Artificial Sequence: Synthetic oligonucleotide
  Antisense strand to SEQ ID NO: 1833777
ucuuuggagacaauccgau

SEQ ID NO: 1833779 - RNA, 19 nt, Artificial Sequence
  Description of Artificial Sequence: Synthetic oligonucleotide
  Sense strand starting at position 1538 of SEQ ID NO: 1563812
ucggauugucuccaaagag

SEQ ID NO: 1833780 - RNA, 19 nt, Artificial Sequence
  Description of Artificial Sequence: Synthetic oligonucleotide
  Antisense strand to SEQ ID NO: 1833779
cucuuuggagacaauccga

SEQ ID NO: 1833781 - RNA, 19 nt, Artificial Sequence
  Description of Artificial Sequence: Synthetic oligonucleotide
  Sense strand starting at position 1542 of SEQ ID NO: 1563812
auugucuccaaagagugua

SEQ ID NO: 1833782 - RNA, 19 nt, Artificial Sequence
  Description of Artificial Sequence: Synthetic oligonucleotide
  Antisense strand to SEQ ID NO: 1833781
uacacucuuuggagacaau

SEQ ID NO: 1833783 - RNA, 19 nt, Artificial Sequence
  Description of Artificial Sequence: Synthetic oligonucleotide
  Sense strand starting at position 1552 of SEQ ID NO: 1563812
aagaguguaguugauggua

SEQ ID NO: 1833784 - RNA, 19 nt, Artificial Sequence
  Description of Artificial Sequence: Synthetic oligonucleotide
  Antisense strand to SEQ ID NO: 1833783
uaccaucaacuacacucuu

SEQ ID NO: 1833785 - RNA, 19 nt, Artificial Sequence
  Description of Artificial Sequence: Synthetic oligonucleotide
  Sense strand starting at position 1560 of SEQ ID NO: 1563812
aguugaugguagucgagaa

SEQ ID NO: 1833786 - RNA, 19 nt, Artificial Sequence
  Description of Artificial Sequence: Synthetic oligonucleotide
  Antisense strand to SEQ ID NO: 1833785
uucucgacuaccaucaacu

SEQ ID NO: 1833787 - RNA, 19 nt, Artificial Sequence
  Description of Artificial Sequence: Synthetic oligonucleotide
  Sense strand starting at position 1639 of SEQ ID NO: 1563812
caggguaacuuccacuaga

SEQ ID NO: 1833788 - RNA, 19 nt, Artificial Sequence
  Description of Artificial Sequence: Synthetic oligonucleotide
  Antisense strand to SEQ ID NO: 1833787
ucuaguggaaguuacccug

SEQ ID NO: 1833789 - RNA, 19 nt, Artificial Sequence
  Description of Artificial Sequence: Synthetic oligonucleotide
  Sense strand starting at position 1642 of SEQ ID NO: 1563812
gguaacuuccacuagagua

SEQ ID NO: 1833790 - RNA, 19 nt, Artificial Sequence
  Description of Artificial Sequence: Synthetic oligonucleotide
  Antisense strand to SEQ ID NO: 1833789
uacucuaguggaaguuacc

SEQ ID NO: 1833791 - RNA, 19 nt, Artificial Sequence
  Description of Artificial Sequence: Synthetic oligonucleotide
  Sense strand starting at position 2054 of SEQ ID NO: 1563812
ggcugcaggacugagaaua

SEQ ID NO: 1833792 - RNA, 19 nt, Artificial Sequence
  Description of Artificial Sequence: Synthetic oligonucleotide
  Antisense strand to SEQ ID NO: 1833791
uauucucaguccugcagcc

SEQ ID NO: 1833793 - RNA, 19 nt, Artificial Sequence
  Description of Artificial Sequence: Synthetic oligonucleotide
  Sense strand starting at position 2296 of SEQ ID NO: 1563812
cacggauucccagaagucu

SEQ ID NO: 1833794 - RNA, 19 nt, Artificial Sequence
  Description of Artificial Sequence: Synthetic oligonucleotide
  Antisense strand to SEQ ID NO: 1833793
agacuucugggaauccgug

SEQ ID NO: 1833795 - RNA, 19 nt, Artificial Sequence
  Description of Artificial Sequence: Synthetic oligonucleotide
  Sense strand starting at position 2432 of SEQ ID NO: 1563812
gcuugagaaucucucaugu

SEQ ID NO: 1833796 - RNA, 19 nt, Artificial Sequence
  Description of Artificial Sequence: Synthetic oligonucleotide
  Antisense strand to SEQ ID NO: 1833795
acaugagagauucucaagc

SEQ ID NO: 1833797 - RNA, 19 nt, Artificial Sequence
  Description of Artificial Sequence: Synthetic oligonucleotide
  Sense strand starting at position 2920 of SEQ ID NO: 1563812
gucaucaacucccugagau

SEQ ID NO: 1833798 - RNA, 19 nt, Artificial Sequence
  Description of Artificial Sequence: Synthetic oligonucleotide
  Antisense strand to SEQ ID NO: 1833797
aucucagggaguugaugac

SEQ ID NO: 1833799 - RNA, 19 nt, Artificial Sequence
  Description of Artificial Sequence: Synthetic oligonucleotide
  Sense strand starting at position 3013 of SEQ ID NO: 1563812
uagggugaacguuaugaug

SEQ ID NO: 1833800 - RNA, 19 nt, Artificial Sequence
  Description of Artificial Sequence: Synthetic oligonucleotide
  Antisense strand to SEQ ID NO: 1833799
caucauaacguucacccua

SEQ ID NO: 1833801 - RNA, 19 nt, Artificial Sequence
  Description of Artificial Sequence: Synthetic oligonucleotide
  Sense strand starting at position 3039 of SEQ ID NO: 1563812
guggguuacucaucuuuac

SEQ ID NO: 1833802 - RNA, 19 nt, Artificial Sequence
  Description of Artificial Sequence: Synthetic oligonucleotide
  Antisense strand to SEQ ID NO: 1833801
guaaagaugaguaacccac

SEQ ID NO: 1833803 - RNA, 19 nt, Artificial Sequence
  Description of Artificial Sequence: Synthetic oligonucleotide
  Sense strand starting at position 3129 of SEQ ID NO: 1563812
accuuaucucccugagggu

SEQ ID NO: 1833804 - RNA, 19 nt, Artificial Sequence
  Description of Artificial Sequence: Synthetic oligonucleotide
  Antisense strand to SEQ ID NO: 1833803
acccucagggagauaaggu

SEQ ID NO: 1833805 - RNA, 19 nt, Artificial Sequence
  Description of Artificial Sequence: Synthetic oligonucleotide
  Sense strand starting at position 3130 of SEQ ID NO: 1563812
ccuuaucucccugaggguu

SEQ ID NO: 1833806 - RNA, 19 nt, Artificial Sequence
  Description of Artificial Sequence: Synthetic oligonucleotide
  Antisense strand to SEQ ID NO: 1833805
aacccucagggagauaagg

SEQ ID NO: 1833807 - RNA, 19 nt, Artificial Sequence
  Description of Artificial Sequence: Synthetic oligonucleotide
  Sense strand starting at position 3172 of SEQ ID NO: 1563812
aaaugagauugucacuuag

SEQ ID NO: 1833808 - RNA, 19 nt, Artificial Sequence
  Description of Artificial Sequence: Synthetic oligonucleotide
  Antisense strand to SEQ ID NO: 1833807
cuaagugacaaucucauuu

SEQ ID NO: 1833809 - RNA, 19 nt, Artificial Sequence
  Description of Artificial Sequence: Synthetic oligonucleotide
  Sense strand starting at position 3557 of SEQ ID NO: 1563812
uaggauucccgcggcugaa

SEQ ID NO: 1833810 - RNA, 19 nt, Artificial Sequence
  Description of Artificial Sequence: Synthetic oligonucleotide
  Antisense strand to SEQ ID NO: 1833809
uucagccgcgggaauccua

SEQ ID NO: 1833811 - RNA, 19 nt, Artificial Sequence
  Description of Artificial Sequence: Synthetic oligonucleotide
  Sense strand starting at position 3582 of SEQ ID NO: 1563812
gguggcucaguuugagaca

SEQ ID NO: 1833812 - RNA, 19 nt, Artificial Sequence
  Description of Artificial Sequence: Synthetic oligonucleotide
  Antisense strand to SEQ ID NO: 1833811
ugucucaaacugagccacc

SEQ ID NO: 1833813 - RNA, 19 nt, Artificial Sequence
  Description of Artificial Sequence: Synthetic oligonucleotide
  Sense strand starting at position 3777 of SEQ ID NO: 1563812
ggagcuuccguggguugau

SEQ ID NO: 1833814 - RNA, 19 nt, Artificial Sequence
  Description of Artificial Sequence: Synthetic oligonucleotide
  Antisense strand to SEQ ID NO: 1833813
aucaacccacggaagcucc

SEQ ID NO: 1833815 - RNA, 19 nt, Artificial Sequence
  Description of Artificial Sequence: Synthetic oligonucleotide
  Sense strand starting at position 3778 of SEQ ID NO: 1563812
gagcuuccguggguugauu

SEQ ID NO: 1833816 - RNA, 19 nt, Artificial Sequence
  Description of Artificial Sequence: Synthetic oligonucleotide
  Antisense strand to SEQ ID NO: 1833815
aaucaacccacggaagcuc

SEQ ID NO: 1833817 - RNA, 19 nt, Artificial Sequence
  Description of Artificial Sequence: Synthetic oligonucleotide
  Sense strand starting at position 3909 of SEQ ID NO: 1563812
gggauugguagugagggua

SEQ ID NO: 1833818 - RNA, 19 nt, Artificial Sequence
  Description of Artificial Sequence: Synthetic oligonucleotide
  Antisense strand to SEQ ID NO: 1833817
uacccucacuaccaauccc

SEQ ID NO: 1833819 - RNA, 19 nt, Artificial Sequence
  Description of Artificial Sequence: Synthetic oligonucleotide
  Sense strand starting at position 263 of SEQ ID NO: 1563813
guuugaauccaaggcaaac

SEQ ID NO: 1833820 - RNA, 19 nt, Artificial Sequence
  Description of Artificial Sequence: Synthetic oligonucleotide
  Antisense strand to SEQ ID NO: 1833819
guuugccuuggauucaaac

SEQ ID NO: 1833821 - RNA, 19 nt, Artificial Sequence
  Description of Artificial Sequence: Synthetic oligonucleotide
  Sense strand starting at position 428 of SEQ ID NO: 1563813
cacggauucccagaacugu

SEQ ID NO: 1833822 - RNA, 19 nt, Artificial Sequence
  Description of Artificial Sequence: Synthetic oligonucleotide
  Antisense strand to SEQ ID NO: 1833821
acaguucugggaauccgug

SEQ ID NO: 1833823 - RNA, 19 nt, Artificial Sequence
  Description of Artificial Sequence: Synthetic oligonucleotide
  Sense strand starting at position 564 of SEQ ID NO: 1563813
gccugagaaucucucaugu

SEQ ID NO: 1833824 - RNA, 19 nt, Artificial Sequence
  Description of Artificial Sequence: Synthetic oligonucleotide
  Antisense strand to SEQ ID NO: 1833823
acaugagagauucucaggc

SEQ ID NO: 1833825 - RNA, 19 nt, Artificial Sequence
  Description of Artificial Sequence: Synthetic oligonucleotide
  Sense strand starting at position 679 of SEQ ID NO: 1563813
guccaaauuuauugaaguc

SEQ ID NO: 1833826 - RNA, 19 nt, Artificial Sequence
  Description of Artificial Sequence: Synthetic oligonucleotide
  Antisense strand to SEQ ID NO: 1833825
gacuucaauaaauuuggac

SEQ ID NO: 1833827 - RNA, 19 nt, Artificial Sequence
  Description of Artificial Sequence: Synthetic oligonucleotide
  Sense strand starting at position 809 of SEQ ID NO: 1563813
cccugacaucagugauccu

SEQ ID NO: 1833828 - RNA, 19 nt, Artificial Sequence
  Description of Artificial Sequence: Synthetic oligonucleotide
  Antisense strand to SEQ ID NO: 1833827
aggaucacugaugucaggg

SEQ ID NO: 1833829 - RNA, 19 nt, Artificial Sequence
  Description of Artificial Sequence: Synthetic oligonucleotide
  Sense strand starting at position 1287 of SEQ ID NO: 1563813
cuaggauucccguagccga

SEQ ID NO: 1833830 - RNA, 19 nt, Artificial Sequence
  Description of Artificial Sequence: Synthetic oligonucleotide
  Antisense strand to SEQ ID NO: 1833829
ucggcuacgggaauccuag

SEQ ID NO: 1833831 - RNA, 19 nt, Artificial Sequence
  Description of Artificial Sequence: Synthetic oligonucleotide
  Sense strand starting at position 1313 of SEQ ID NO: 1563813
ggugccucgguuugagaca

SEQ ID NO: 1833832 - RNA, 19 nt, Artificial Sequence
  Description of Artificial Sequence: Synthetic oligonucleotide
  Antisense strand to SEQ ID NO: 1833831
ugucucaaaccgaggcacc

SEQ ID NO: 1833833 - RNA, 19 nt, Artificial Sequence
  Description of Artificial Sequence: Synthetic oligonucleotide
  Sense strand starting at position 1507 of SEQ ID NO: 1563813
cggagcuuccgugacuuga

SEQ ID NO: 1833834 - RNA, 19 nt, Artificial Sequence
  Description of Artificial Sequence: Synthetic oligonucleotide
  Antisense strand to SEQ ID NO: 1833833
ucaagucacggaagcuccg

SEQ ID NO: 1833835 - RNA, 19 nt, Artificial Sequence
  Description of Artificial Sequence: Synthetic oligonucleotide
  Sense strand starting at position 1509 of SEQ ID NO: 1563813
gagcuuccgugacuugaua

SEQ ID NO: 1833836 - RNA, 19 nt, Artificial Sequence
  Description of Artificial Sequence: Synthetic oligonucleotide
  Antisense strand to SEQ ID NO: 1833835
uaucaagucacggaagcuc

SEQ ID NO: 1833837 - RNA, 19 nt, Artificial Sequence
  Description of Artificial Sequence: Synthetic oligonucleotide
  Sense strand starting at position 2002 of SEQ ID NO: 1563813
gcggucuucugaccuccaa

SEQ ID NO: 1833838 - RNA, 19 nt, Artificial Sequence
  Description of Artificial Sequence: Synthetic oligonucleotide
  Antisense strand to SEQ ID NO: 1833837
uuggaggucagaagaccgc

SEQ ID NO: 1833839 - RNA, 19 nt, Artificial Sequence
  Description of Artificial Sequence: Synthetic oligonucleotide
  Sense strand starting at position 2084 of SEQ ID NO: 1563813
acuggauucugccuggaug

SEQ ID NO: 1833840 - RNA, 19 nt, Artificial Sequence
  Description of Artificial Sequence: Synthetic oligonucleotide
  Antisense strand to SEQ ID NO: 1833839
cauccaggcagaauccagu

SEQ ID NO: 1833841 - RNA, 19 nt, Artificial Sequence
  Description of Artificial Sequence: Synthetic oligonucleotide
  Sense strand starting at position 2251 of SEQ ID NO: 1563813
gaaguugaugccuggcuga

SEQ ID NO: 1833842 - RNA, 19 nt, Artificial Sequence
  Description of Artificial Sequence: Synthetic oligonucleotide
  Antisense strand to SEQ ID NO: 1833841
ucagccaggcaucaacuuc

SEQ ID NO: 1833843 - RNA, 19 nt, Artificial Sequence
  Description of Artificial Sequence: Synthetic oligonucleotide
  Sense strand starting at position 2359 of SEQ ID NO: 1563813
ggguguggucugggugaca

SEQ ID NO: 1833844 - RNA, 19 nt, Artificial Sequence
  Description of Artificial Sequence: Synthetic oligonucleotide
  Antisense strand to SEQ ID NO: 1833843
ugucacccagaccacaccc

SEQ ID NO: 1833845 - RNA, 19 nt, Artificial Sequence
  Description of Artificial Sequence: Synthetic oligonucleotide
  Sense strand starting at position 2360 of SEQ ID NO: 1563813
gguguggucugggugacau

SEQ ID NO: 1833846 - RNA, 19 nt, Artificial Sequence
  Description of Artificial Sequence: Synthetic oligonucleotide
  Antisense strand to SEQ ID NO: 1833845
augucacccagaccacacc

SEQ ID NO: 1833847 - RNA, 19 nt, Artificial Sequence
  Description of Artificial Sequence: Synthetic oligonucleotide
  Sense strand starting at position 2545 of SEQ ID NO: 1563813
uucugucaccugugagcau

SEQ ID NO: 1833848 - RNA, 19 nt, Artificial Sequence
  Description of Artificial Sequence: Synthetic oligonucleotide
  Antisense strand to SEQ ID NO: 1833847
augcucacaggugacagaa

SEQ ID NO: 1833849 - RNA, 19 nt, Artificial Sequence
  Description of Artificial Sequence: Synthetic oligonucleotide
  Sense strand starting at position 2665 of SEQ ID NO: 1563813
ucagucuuuguguucuguu

SEQ ID NO: 1833850 - RNA, 19 nt, Artificial Sequence
  Description of Artificial Sequence: Synthetic oligonucleotide
  Antisense strand to SEQ ID NO: 1833849
aacagaacacaaagacuga

SEQ ID NO: 1833851 - RNA, 19 nt, Artificial Sequence
  Description of Artificial Sequence: Synthetic oligonucleotide
  Sense strand starting at position 2748 of SEQ ID NO: 1563813
agcagaacucuggagucau

SEQ ID NO: 1833852 - RNA, 19 nt, Artificial Sequence
  Description of Artificial Sequence: Synthetic oligonucleotide
  Antisense strand to SEQ ID NO: 1833851
augacuccagaguucugcu

SEQ ID NO: 1833853 - RNA, 19 nt, Artificial Sequence
  Description of Artificial Sequence: Synthetic oligonucleotide
  Sense strand starting at position 2841 of SEQ ID NO: 1563813
gccucagauugugcaaaga

SEQ ID NO: 1833854 - RNA, 19 nt, Artificial Sequence
  Description of Artificial Sequence: Synthetic oligonucleotide
  Antisense strand to SEQ ID NO: 1833853
ucuuugcacaaucugaggc

SEQ ID NO: 1833855 - RNA, 19 nt, Artificial Sequence
  Description of Artificial Sequence: Synthetic oligonucleotide
  Sense strand starting at position 3076 of SEQ ID NO: 1563813
uguuuccauucuguaauuu

SEQ ID NO: 1833856 - RNA, 19 nt, Artificial Sequence
  Description of Artificial Sequence: Synthetic oligonucleotide
  Antisense strand to SEQ ID NO: 1833855
aaauuacagaauggaaaca

SEQ ID NO: 1833857 - RNA, 19 nt, Artificial Sequence
  Description of Artificial Sequence: Synthetic oligonucleotide
  Sense strand starting at position 3098 of SEQ ID NO: 1563813
agguuugauuugggaagca

SEQ ID NO: 1833858 - RNA, 19 nt, Artificial Sequence
  Description of Artificial Sequence: Synthetic oligonucleotide
  Antisense strand to SEQ ID NO: 1833857
ugcuucccaaaucaaaccu

SEQ ID NO: 1833859 - RNA, 19 nt, Artificial Sequence
  Description of Artificial Sequence: Synthetic oligonucleotide
  Sense strand starting at position 3265 of SEQ ID NO: 1563813
uuaccugaauaugucagua

SEQ ID NO: 1833860 - RNA, 19 nt, Artificial Sequence
  Description of Artificial Sequence: Synthetic oligonucleotide
  Antisense strand to SEQ ID NO: 1833859
uacugacauauucagguaa

SEQ ID NO: 1833861 - RNA, 19 nt, Artificial Sequence
  Description of Artificial Sequence: Synthetic oligonucleotide
  Sense strand starting at position 3275 of SEQ ID NO: 1563813
augucaguauacuucgaca

SEQ ID NO: 1833862 - RNA, 19 nt, Artificial Sequence
  Description of Artificial Sequence: Synthetic oligonucleotide
  Antisense strand to SEQ ID NO: 1833861
ugucgaaguauacugacau

SEQ ID NO: 1833863 - RNA, 19 nt, Artificial Sequence
  Description of Artificial Sequence: Synthetic oligonucleotide
  Sense strand starting at position 3277 of SEQ ID NO: 1563813
gucaguauacuucgacagu

SEQ ID NO: 1833864 - RNA, 19 nt, Artificial Sequence
  Description of Artificial Sequence: Synthetic oligonucleotide
  Antisense strand to SEQ ID NO: 1833863
acugucgaaguauacugac

SEQ ID NO: 1833865 - RNA, 19 nt, Artificial Sequence
  Description of Artificial Sequence: Synthetic oligonucleotide
  Sense strand starting at position 3280 of SEQ ID NO: 1563813
aguauacuucgacaguugu

SEQ ID NO: 1833866 - RNA, 19 nt, Artificial Sequence
  Description of Artificial Sequence: Synthetic oligonucleotide
  Antisense strand to SEQ ID NO: 1833865
acaacugucgaaguauacu

SEQ ID NO: 1833867 - RNA, 19 nt, Artificial Sequence
  Description of Artificial Sequence: Synthetic oligonucleotide
  Sense strand starting at position 3286 of SEQ ID NO: 1563813
cuucgacaguugucucuau

SEQ ID NO: 1833868 - RNA, 19 nt, Artificial Sequence
  Description of Artificial Sequence: Synthetic oligonucleotide
  Antisense strand to SEQ ID NO: 1833867
auagagacaacugucgaag

SEQ ID NO: 1833869 - RNA, 19 nt, Artificial Sequence
  Description of Artificial Sequence: Synthetic oligonucleotide
  Sense strand starting at position 3287 of SEQ ID NO: 1563813
uucgacaguugucucuaua

SEQ ID NO: 1833870 - RNA, 19 nt, Artificial Sequence
  Description of Artificial Sequence: Synthetic oligonucleotide
  Antisense strand to SEQ ID NO: 1833869
uauagagacaacugucgaa

SEQ ID NO: 1833871 - RNA, 19 nt, Artificial Sequence
  Description of Artificial Sequence: Synthetic oligonucleotide
  Sense strand starting at position 3290 of SEQ ID NO: 1563813
gacaguugucucuauaaag

SEQ ID NO: 1833872 - RNA, 19 nt, Artificial Sequence
  Description of Artificial Sequence: Synthetic oligonucleotide
  Antisense strand to SEQ ID NO: 1833871
cuuuauagagacaacuguc

SEQ ID NO: 1833873 - RNA, 19 nt, Artificial Sequence
  Description of Artificial Sequence: Synthetic oligonucleotide
  Sense strand starting at position 3380 of SEQ ID NO: 1563813
gucuauuaauuguuguagu

SEQ ID NO: 1833874 - RNA, 19 nt, Artificial Sequence
  Description of Artificial Sequence: Synthetic oligonucleotide
  Antisense strand to SEQ ID NO: 1833873
acuacaacaauuaauagac

SEQ ID NO: 1833875 - RNA, 19 nt, Artificial Sequence
  Description of Artificial Sequence: Synthetic oligonucleotide
  Sense strand starting at position 3649 of SEQ ID NO: 1563813
ucguuccugacgugaauga

SEQ ID NO: 1833876 - RNA, 19 nt, Artificial Sequence
  Description of Artificial Sequence: Synthetic oligonucleotide
  Antisense strand to SEQ ID NO: 1833875
ucauucacgucaggaacga

SEQ ID NO: 1833877 - RNA, 19 nt, Artificial Sequence
  Description of Artificial Sequence: Synthetic oligonucleotide
  Sense strand starting at position 3650 of SEQ ID NO: 1563813
cguuccugacgugaaugau

SEQ ID NO: 1833878 - RNA, 19 nt, Artificial Sequence
  Description of Artificial Sequence: Synthetic oligonucleotide
  Antisense strand to SEQ ID NO: 1833877
aucauucacgucaggaacg

SEQ ID NO: 1833879 - RNA, 19 nt, Artificial Sequence
  Description of Artificial Sequence: Synthetic oligonucleotide
  Sense strand starting at position 3653 of SEQ ID NO: 1563813
uccugacgugaaugauaau

SEQ ID NO: 1833880 - RNA, 19 nt, Artificial Sequence
  Description of Artificial Sequence: Synthetic oligonucleotide
  Antisense strand to SEQ ID NO: 1833879
auuaucauucacgucagga

SEQ ID NO: 1833881 - RNA, 19 nt, Artificial Sequence
  Description of Artificial Sequence: Synthetic oligonucleotide
  Sense strand starting at position 3654 of SEQ ID NO: 1563813
ccugacgugaaugauaauu

SEQ ID NO: 1833882 - RNA, 19 nt, Artificial Sequence
  Description of Artificial Sequence: Synthetic oligonucleotide
  Antisense strand to SEQ ID NO: 1833881
aauuaucauucacgucagg

SEQ ID NO: 1833883 - RNA, 19 nt, Artificial Sequence
  Description of Artificial Sequence: Synthetic oligonucleotide
  Sense strand starting at position 3664 of SEQ ID NO: 1563813
augauaauuauucgaacgu

SEQ ID NO: 1833884 - RNA, 19 nt, Artificial Sequence
  Description of Artificial Sequence: Synthetic oligonucleotide
  Antisense strand to SEQ ID NO: 1833883
acguucgaauaauuaucau

SEQ ID NO: 1833885 - RNA, 19 nt, Artificial Sequence
  Description of Artificial Sequence: Synthetic oligonucleotide
  Sense strand starting at position 3800 of SEQ ID NO: 1563813
uucuguacccguugacaca

SEQ ID NO: 1833886 - RNA, 19 nt, Artificial Sequence
  Description of Artificial Sequence: Synthetic oligonucleotide
  Antisense strand to SEQ ID NO: 1833885
ugugucaacggguacagaa

SEQ ID NO: 1833887 - RNA, 19 nt, Artificial Sequence
  Description of Artificial Sequence: Synthetic oligonucleotide
  Sense strand starting at position 3887 of SEQ ID NO: 1563813
aauguuaaaccguauguua

SEQ ID NO: 1833888 - RNA, 19 nt, Artificial Sequence
  Description of Artificial Sequence: Synthetic oligonucleotide
  Antisense strand to SEQ ID NO: 1833887
uaacauacgguuuaacauu

SEQ ID NO: 1833889 - RNA, 19 nt, Artificial Sequence
  Description of Artificial Sequence: Synthetic oligonucleotide
  Sense strand starting at position 3889 of SEQ ID NO: 1563813
uguuaaaccguauguuauu

SEQ ID NO: 1833890 - RNA, 19 nt, Artificial Sequence
  Description of Artificial Sequence: Synthetic oligonucleotide
  Antisense strand to SEQ ID NO: 1833889
aauaacauacgguuuaaca

SEQ ID NO: 1833891 - RNA, 19 nt, Artificial Sequence
  Description of Artificial Sequence: Synthetic oligonucleotide
  Sense strand starting at position 3890 of SEQ ID NO: 1563813
guuaaaccguauguuauuu

SEQ ID NO: 1833892 - RNA, 19 nt, Artificial Sequence
  Description of Artificial Sequence: Synthetic oligonucleotide
  Antisense strand to SEQ ID NO: 1833891
aaauaacauacgguuuaac

SEQ ID NO: 1833893 - RNA, 19 nt, Artificial Sequence
  Description of Artificial Sequence: Synthetic oligonucleotide
  Sense strand starting at position 3914 of SEQ ID NO: 1563813
ggcagagccuguuuauuua

SEQ ID NO: 1833894 - RNA, 19 nt, Artificial Sequence
  Description of Artificial Sequence: Synthetic oligonucleotide
  Antisense strand to SEQ ID NO: 1833893
uaaauaaacaggcucugcc

SEQ ID NO: 1833895 - RNA, 19 nt, Artificial Sequence
  Description of Artificial Sequence: Synthetic oligonucleotide
  Sense strand starting at position 3950 of SEQ ID NO: 1563813
guaggauauuugcugcuau

SEQ ID NO: 1833896 - RNA, 19 nt, Artificial Sequence
  Description of Artificial Sequence: Synthetic oligonucleotide
  Antisense strand to SEQ ID NO: 1833895
auagcagcaaauauccuac

SEQ ID NO: 1833897 - RNA, 19 nt, Artificial Sequence
  Description of Artificial Sequence: Synthetic oligonucleotide
  Sense strand starting at position 3971 of SEQ ID NO: 1563813
aagggagcuuacuuaaugu

SEQ ID NO: 1833898 - RNA, 19 nt, Artificial Sequence
  Description of Artificial Sequence: Synthetic oligonucleotide
  Antisense strand to SEQ ID NO: 1833897
acauuaaguaagcucccuu

SEQ ID NO: 1833899 - RNA, 19 nt, Artificial Sequence
  Description of Artificial Sequence: Synthetic oligonucleotide
  Sense strand starting at position 51 of SEQ ID NO: 1563814
ggacuuucuuggguugaaa

SEQ ID NO: 1833900 - RNA, 19 nt, Artificial Sequence
  Description of Artificial Sequence: Synthetic oligonucleotide
  Antisense strand to SEQ ID NO: 1833899
uuucaacccaagaaagucc

SEQ ID NO: 1833901 - RNA, 19 nt, Artificial Sequence
  Description of Artificial Sequence: Synthetic oligonucleotide
  Sense strand starting at position 232 of SEQ ID NO: 1563814
gggagauggcggugugaga

SEQ ID NO: 1833902 - RNA, 19 nt, Artificial Sequence
  Description of Artificial Sequence: Synthetic oligonucleotide
  Antisense strand to SEQ ID NO: 1833901
ucucacaccgccaucuccc

SEQ ID NO: 1833903 - RNA, 19 nt, Artificial Sequence
  Description of Artificial Sequence: Synthetic oligonucleotide
  Sense strand starting at position 300 of SEQ ID NO: 1563814
uggguuugggagugcaaau

SEQ ID NO: 1833904 - RNA, 19 nt, Artificial Sequence
  Description of Artificial Sequence: Synthetic oligonucleotide
  Antisense strand to SEQ ID NO: 1833903
auuugcacucccaaaccca

SEQ ID NO: 1833905 - RNA, 19 nt, Artificial Sequence
  Description of Artificial Sequence: Synthetic oligonucleotide
  Sense strand starting at position 851 of SEQ ID NO: 1563814
gaacgugauucagugugga

SEQ ID NO: 1833906 - RNA, 19 nt, Artificial Sequence
  Description of Artificial Sequence: Synthetic oligonucleotide
  Antisense strand to SEQ ID NO: 1833905
uccacacugaaucacguuc

SEQ ID NO: 1833907 - RNA, 19 nt, Artificial Sequence
  Description of Artificial Sequence: Synthetic oligonucleotide
  Sense strand starting at position 918 of SEQ ID NO: 1563814
gggagauggcgguaugaga

SEQ ID NO: 1833908 - RNA, 19 nt, Artificial Sequence
  Description of Artificial Sequence: Synthetic oligonucleotide
  Antisense strand to SEQ ID NO: 1833907
ucucauaccgccaucuccc

SEQ ID NO: 1833909 - RNA, 19 nt, Artificial Sequence
  Description of Artificial Sequence: Synthetic oligonucleotide
  Sense strand starting at position 988 of SEQ ID NO: 1563814
augguuugggagugcaaau

SEQ ID NO: 1833910 - RNA, 19 nt, Artificial Sequence
  Description of Artificial Sequence: Synthetic oligonucleotide
  Antisense strand to SEQ ID NO: 1833909
auuugcacucccaaaccau

SEQ ID NO: 1833911 - RNA, 19 nt, Artificial Sequence
  Description of Artificial Sequence: Synthetic oligonucleotide
  Sense strand starting at position 1000 of SEQ ID NO: 1563814
ugcaaaugguaaucggaaa

SEQ ID NO: 1833912 - RNA, 19 nt, Artificial Sequence
  Description of Artificial Sequence: Synthetic oligonucleotide
  Antisense strand to SEQ ID NO: 1833911
uuuccgauuaccauuugca

SEQ ID NO: 1833913 - RNA, 19 nt, Artificial Sequence
  Description of Artificial Sequence: Synthetic oligonucleotide
  Sense strand starting at position 1101 of SEQ ID NO: 1563814
ugcccucacuagucuuaca

SEQ ID NO: 1833914 - RNA, 19 nt, Artificial Sequence
  Description of Artificial Sequence: Synthetic oligonucleotide
  Antisense strand to SEQ ID NO: 1833913
uguaagacuagugagggca

SEQ ID NO: 1833915 - RNA, 19 nt, Artificial Sequence
  Description of Artificial Sequence: Synthetic oligonucleotide
  Sense strand starting at position 1229 of SEQ ID NO: 1563814
aggaguggugcgggauuau

SEQ ID NO: 1833916 - RNA, 19 nt, Artificial Sequence
  Description of Artificial Sequence: Synthetic oligonucleotide
  Antisense strand to SEQ ID NO: 1833915
auaaucccgcaccacuccu

SEQ ID NO: 1833917 - RNA, 19 nt, Artificial Sequence
  Description of Artificial Sequence: Synthetic oligonucleotide
  Sense strand starting at position 1230 of SEQ ID NO: 1563814
ggaguggugcgggauuauu

SEQ ID NO: 1833918 - RNA, 19 nt, Artificial Sequence
  Description of Artificial Sequence: Synthetic oligonucleotide
  Antisense strand to SEQ ID NO: 1833917
aauaaucccgcaccacucc

SEQ ID NO: 1833919 - RNA, 19 nt, Artificial Sequence
  Description of Artificial Sequence: Synthetic oligonucleotide
  Sense strand starting at position 1425 of SEQ ID NO: 1563814
gggcuuucuuggguugaaa

SEQ ID NO: 1833920 - RNA, 19 nt, Artificial Sequence
  Description of Artificial Sequence: Synthetic oligonucleotide
  Antisense strand to SEQ ID NO: 1833919
uuucaacccaagaaagccc

SEQ ID NO: 1833921 - RNA, 19 nt, Artificial Sequence
  Description of Artificial Sequence: Synthetic oligonucleotide
  Sense strand starting at position 1520 of SEQ ID NO: 1563814
gggagauggcgguaugaag

SEQ ID NO: 1833922 - RNA, 19 nt, Artificial Sequence
  Description of Artificial Sequence: Synthetic oligonucleotide
  Antisense strand to SEQ ID NO: 1833921
cuucauaccgccaucuccc

SEQ ID NO: 1833923 - RNA, 19 nt, Artificial Sequence
  Description of Artificial Sequence: Synthetic oligonucleotide
  Sense strand starting at position 1572 of SEQ ID NO: 1563814
ggaggaugggaguguagau

SEQ ID NO: 1833924 - RNA, 19 nt, Artificial Sequence
  Description of Artificial Sequence: Synthetic oligonucleotide
  Antisense strand to SEQ ID NO: 1833923
aucuacacucccauccucc

SEQ ID NO: 1833925 - RNA, 19 nt, Artificial Sequence
  Description of Artificial Sequence: Synthetic oligonucleotide
  Sense strand starting at position 1584 of SEQ ID NO: 1563814
uguagauggguuugugagu

SEQ ID NO: 1833926 - RNA, 19 nt, Artificial Sequence
  Description of Artificial Sequence: Synthetic oligonucleotide
  Antisense strand to SEQ ID NO: 1833925
acucacaaacccaucuaca

SEQ ID NO: 1833927 - RNA, 19 nt, Artificial Sequence
  Description of Artificial Sequence: Synthetic oligonucleotide
  Sense strand starting at position 1651 of SEQ ID NO: 1563814
ugggaauagcgguguggua

SEQ ID NO: 1833928 - RNA, 19 nt, Artificial Sequence
  Description of Artificial Sequence: Synthetic oligonucleotide
  Antisense strand to SEQ ID NO: 1833927
uaccacaccgcuauuccca

SEQ ID NO: 1833929 - RNA, 19 nt, Artificial Sequence
  Description of Artificial Sequence: Synthetic oligonucleotide
  Sense strand starting at position 1694 of SEQ ID NO: 1563814
gagguugaugccuggcaga

SEQ ID NO: 1833930 - RNA, 19 nt, Artificial Sequence
  Description of Artificial Sequence: Synthetic oligonucleotide
  Antisense strand to SEQ ID NO: 1833929
ucugccaggcaucaaccuc

SEQ ID NO: 1833931 - RNA, 19 nt, Artificial Sequence
  Description of Artificial Sequence: Synthetic oligonucleotide
  Sense strand starting at position 2046 of SEQ ID NO: 1563814
ggcuuuccuugguugaaag

SEQ ID NO: 1833932 - RNA, 19 nt, Artificial Sequence
  Description of Artificial Sequence: Synthetic oligonucleotide
  Antisense strand to SEQ ID NO: 1833931
cuuucaaccaaggaaagcc

SEQ ID NO: 1833933 - RNA, 19 nt, Artificial Sequence
  Description of Artificial Sequence: Synthetic oligonucleotide
  Sense strand starting at position 2226 of SEQ ID NO: 1563814
uguggauuggguuaggagu

SEQ ID NO: 1833934 - RNA, 19 nt, Artificial Sequence
  Description of Artificial Sequence: Synthetic oligonucleotide
  Antisense strand to SEQ ID NO: 1833933
acuccuaacccaauccaca

SEQ ID NO: 1833935 - RNA, 19 nt, Artificial Sequence
  Description of Artificial Sequence: Synthetic oligonucleotide
  Sense strand starting at position 2232 of SEQ ID NO: 1563814
uuggguuaggaguguggaa

SEQ ID NO: 1833936 - RNA, 19 nt, Artificial Sequence
  Description of Artificial Sequence: Synthetic oligonucleotide
  Antisense strand to SEQ ID NO: 1833935
uuccacacuccuaacccaa

SEQ ID NO: 1833937 - RNA, 19 nt, Artificial Sequence
  Description of Artificial Sequence: Synthetic oligonucleotide
  Sense strand starting at position 2415 of SEQ ID NO: 1563814
gcaagucagggaugucaca

SEQ ID NO: 1833938 - RNA, 19 nt, Artificial Sequence
  Description of Artificial Sequence: Synthetic oligonucleotide
  Antisense strand to SEQ ID NO: 1833937
ugugacaucccugacuugc

SEQ ID NO: 1833939 - RNA, 19 nt, Artificial Sequence
  Description of Artificial Sequence: Synthetic oligonucleotide
  Sense strand starting at position 2550 of SEQ ID NO: 1563814
guccuuugauuccuggcau

SEQ ID NO: 1833940 - RNA, 19 nt, Artificial Sequence
  Description of Artificial Sequence: Synthetic oligonucleotide
  Antisense strand to SEQ ID NO: 1833939
augccaggaaucaaaggac

SEQ ID NO: 1833941 - RNA, 19 nt, Artificial Sequence
  Description of Artificial Sequence: Synthetic oligonucleotide
  Sense strand starting at position 2659 of SEQ ID NO: 1563814
gguguccuugggcgacaaa

SEQ ID NO: 1833942 - RNA, 19 nt, Artificial Sequence
  Description of Artificial Sequence: Synthetic oligonucleotide
  Antisense strand to SEQ ID NO: 1833941
uuugucgcccaaggacacc

SEQ ID NO: 1833943 - RNA, 19 nt, Artificial Sequence
  Description of Artificial Sequence: Synthetic oligonucleotide
  Sense strand starting at position 2790 of SEQ ID NO: 1563814
uggcucuuuguugaaguga

SEQ ID NO: 1833944 - RNA, 19 nt, Artificial Sequence
  Description of Artificial Sequence: Synthetic oligonucleotide
  Antisense strand to SEQ ID NO: 1833943
ucacuucaacaaagagcca

SEQ ID NO: 1833945 - RNA, 19 nt, Artificial Sequence
  Description of Artificial Sequence: Synthetic oligonucleotide
  Sense strand starting at position 2803 of SEQ ID NO: 1563814
aagugauggguuggagaug

SEQ ID NO: 1833946 - RNA, 19 nt, Artificial Sequence
  Description of Artificial Sequence: Synthetic oligonucleotide
  Antisense strand to SEQ ID NO: 1833945
caucuccaacccaucacuu

SEQ ID NO: 1833947 - RNA, 19 nt, Artificial Sequence
  Description of Artificial Sequence: Synthetic oligonucleotide
  Sense strand starting at position 2926 of SEQ ID NO: 1563814
uguagugaccucugugaga

SEQ ID NO: 1833948 - RNA, 19 nt, Artificial Sequence
  Description of Artificial Sequence: Synthetic oligonucleotide
  Antisense strand to SEQ ID NO: 1833947
ucucacagaggucacuaca

SEQ ID NO: 1833949 - RNA, 19 nt, Artificial Sequence
  Description of Artificial Sequence: Synthetic oligonucleotide
  Sense strand starting at position 2928 of SEQ ID NO: 1563814
uagugaccucugugagaag

SEQ ID NO: 1833950 - RNA, 19 nt, Artificial Sequence
  Description of Artificial Sequence: Synthetic oligonucleotide
  Antisense strand to SEQ ID NO: 1833949
cuucucacagaggucacua

SEQ ID NO: 1833951 - RNA, 19 nt, Artificial Sequence
  Description of Artificial Sequence: Synthetic oligonucleotide
  Sense strand starting at position 3137 of SEQ ID NO: 1563814
cauuguuuauguucuguua

SEQ ID NO: 1833952 - RNA, 19 nt, Artificial Sequence
  Description of Artificial Sequence: Synthetic oligonucleotide
  Antisense strand to SEQ ID NO: 1833951
uaacagaacauaaacaaug

SEQ ID NO: 1833953 - RNA, 19 nt, Artificial Sequence
  Description of Artificial Sequence: Synthetic oligonucleotide
  Sense strand starting at position 3442 of SEQ ID NO: 1563814
ucagguuguaauuagcaga

SEQ ID NO: 1833954 - RNA, 19 nt, Artificial Sequence
  Description of Artificial Sequence: Synthetic oligonucleotide
  Antisense strand to SEQ ID NO: 1833953
ucugcuaauuacaaccuga

SEQ ID NO: 1833955 - RNA, 19 nt, Artificial Sequence
  Description of Artificial Sequence: Synthetic oligonucleotide
  Sense strand starting at position 3455 of SEQ ID NO: 1563814
agcagaucuccggaaccau

SEQ ID NO: 1833956 - RNA, 19 nt, Artificial Sequence
  Description of Artificial Sequence: Synthetic oligonucleotide
  Antisense strand to SEQ ID NO: 1833955
augguuccggagaucugcu

SEQ ID NO: 1833957 - RNA, 19 nt, Artificial Sequence
  Description of Artificial Sequence: Synthetic oligonucleotide
  Sense strand starting at position 3506 of SEQ ID NO: 1563814
cugcuauuacccuaggguu

SEQ ID NO: 1833958 - RNA, 19 nt, Artificial Sequence
  Description of Artificial Sequence: Synthetic oligonucleotide
  Antisense strand to SEQ ID NO: 1833957
aacccuaggguaauagcag

SEQ ID NO: 1833959 - RNA, 19 nt, Artificial Sequence
  Description of Artificial Sequence: Synthetic oligonucleotide
  Sense strand starting at position 3805 of SEQ ID NO: 1563814
agaguugauuugggaacca

SEQ ID NO: 1833960 - RNA, 19 nt, Artificial Sequence
  Description of Artificial Sequence: Synthetic oligonucleotide
  Antisense strand to SEQ ID NO: 1833959
ugguucccaaaucaacucu

SEQ ID NO: 1833961 - RNA, 19 nt, Artificial Sequence
  Description of Artificial Sequence: Synthetic oligonucleotide
  Sense strand starting at position 3834 of SEQ ID NO: 1563814
gccuaagugugacuguaau

SEQ ID NO: 1833962 - RNA, 19 nt, Artificial Sequence
  Description of Artificial Sequence: Synthetic oligonucleotide
  Antisense strand to SEQ ID NO: 1833961
auuacagucacacuuaggc

SEQ ID NO: 1833963 - RNA, 19 nt, Artificial Sequence
  Description of Artificial Sequence: Synthetic oligonucleotide
  Sense strand starting at position 3917 of SEQ ID NO: 1563814
uguucugcuccugaucaau

SEQ ID NO: 1833964 - RNA, 19 nt, Artificial Sequence
  Description of Artificial Sequence: Synthetic oligonucleotide
  Antisense strand to SEQ ID NO: 1833963
auugaucaggagcagaaca

SEQ ID NO: 1833965 - RNA, 19 nt, Artificial Sequence
  Description of Artificial Sequence: Synthetic oligonucleotide
  Sense strand starting at position 3919 of SEQ ID NO: 1563814
uucugcuccugaucaauga

SEQ ID NO: 1833966 - RNA, 19 nt, Artificial Sequence
  Description of Artificial Sequence: Synthetic oligonucleotide
  Antisense strand to SEQ ID NO: 1833965
ucauugaucaggagcagaa

SEQ ID NO: 1833967 - RNA, 19 nt, Artificial Sequence
  Description of Artificial Sequence: Synthetic oligonucleotide
  Sense strand starting at position 3920 of SEQ ID NO: 1563814
ucugcuccugaucaaugaa

SEQ ID NO: 1833968 - RNA, 19 nt, Artificial Sequence
  Description of Artificial Sequence: Synthetic oligonucleotide
  Antisense strand to SEQ ID NO: 1833967
uucauugaucaggagcaga

SEQ ID NO: 1833969 - RNA, 19 nt, Artificial Sequence
  Description of Artificial Sequence: Synthetic oligonucleotide
  Sense strand starting at position 3923 of SEQ ID NO: 1563814
gcuccugaucaaugaauag

SEQ ID NO: 1833970 - RNA, 19 nt, Artificial Sequence
  Description of Artificial Sequence: Synthetic oligonucleotide
  Antisense strand to SEQ ID NO: 1833969
cuauucauugaucaggagc

SEQ ID NO: 1833971 - RNA, 19 nt, Artificial Sequence
  Description of Artificial Sequence: Synthetic oligonucleotide
  Sense strand starting at position 3940 of SEQ ID NO: 1563814
agguuaugcuccuuuacuu

SEQ ID NO: 1833972 - RNA, 19 nt, Artificial Sequence
  Description of Artificial Sequence: Synthetic oligonucleotide
  Antisense strand to SEQ ID NO: 1833971
aaguaaaggagcauaaccu

SEQ ID NO: 1833973 - RNA, 19 nt, Artificial Sequence
  Description of Artificial Sequence: Synthetic oligonucleotide
  Sense strand starting at position 3973 of SEQ ID NO: 1563814
uuaccugaaucugucagua

SEQ ID NO: 1833974 - RNA, 19 nt, Artificial Sequence
  Description of Artificial Sequence: Synthetic oligonucleotide
  Antisense strand to SEQ ID NO: 1833973
uacugacagauucagguaa

SEQ ID NO: 1833975 - RNA, 19 nt, Artificial Sequence
  Description of Artificial Sequence: Synthetic oligonucleotide
  Sense strand starting at position 3977 of SEQ ID NO: 1563814
cugaaucugucaguauacu

SEQ ID NO: 1833976 - RNA, 19 nt, Artificial Sequence
  Description of Artificial Sequence: Synthetic oligonucleotide
  Antisense strand to SEQ ID NO: 1833975
aguauacugacagauucag

SEQ ID NO: 1833977 - RNA, 19 nt, Artificial Sequence
  Description of Artificial Sequence: Synthetic oligonucleotide
  Sense strand starting at position 3978 of SEQ ID NO: 1563814
ugaaucugucaguauacuu

SEQ ID NO: 1833978 - RNA, 19 nt, Artificial Sequence
  Description of Artificial Sequence: Synthetic oligonucleotide
  Antisense strand to SEQ ID NO: 1833977
aaguauacugacagauuca

SEQ ID NO: 1833979 - RNA, 19 nt, Artificial Sequence
  Description of Artificial Sequence: Synthetic oligonucleotide
  Sense strand starting at position 1013 of SEQ ID NO: 1563815
cucuuaggguccugagauu

SEQ ID NO: 1833980 - RNA, 19 nt, Artificial Sequence
  Description of Artificial Sequence: Synthetic oligonucleotide
  Antisense strand to SEQ ID NO: 1833979
aaucucaggacccuaagag

SEQ ID NO: 1833981 - RNA, 19 nt, Artificial Sequence
  Description of Artificial Sequence: Synthetic oligonucleotide
  Sense strand starting at position 1026 of SEQ ID NO: 1563815
gagauugaugcccggcaga

SEQ ID NO: 1833982 - RNA, 19 nt, Artificial Sequence
  Description of Artificial Sequence: Synthetic oligonucleotide
  Antisense strand to SEQ ID NO: 1833981
ucugccgggcaucaaucuc

SEQ ID NO: 1833983 - RNA, 19 nt, Artificial Sequence
  Description of Artificial Sequence: Synthetic oligonucleotide
  Sense strand starting at position 1171 of SEQ ID NO: 1563815
guaggaguggugcgggauu

SEQ ID NO: 1833984 - RNA, 19 nt, Artificial Sequence
  Description of Artificial Sequence: Synthetic oligonucleotide
  Antisense strand to SEQ ID NO: 1833983
aaucccgcaccacuccuac

SEQ ID NO: 1833985 - RNA, 19 nt, Artificial Sequence
  Description of Artificial Sequence: Synthetic oligonucleotide
  Sense strand starting at position 1364 of SEQ ID NO: 1563815
ugaggcuuucuuggguuga

SEQ ID NO: 1833986 - RNA, 19 nt, Artificial Sequence
  Description of Artificial Sequence: Synthetic oligonucleotide
  Antisense strand to SEQ ID NO: 1833985
ucaacccaagaaagccuca

SEQ ID NO: 1833987 - RNA, 19 nt, Artificial Sequence
  Description of Artificial Sequence: Synthetic oligonucleotide
  Sense strand starting at position 1365 of SEQ ID NO: 1563815
gaggcuuucuuggguugaa

SEQ ID NO: 1833988 - RNA, 19 nt, Artificial Sequence
  Description of Artificial Sequence: Synthetic oligonucleotide
  Antisense strand to SEQ ID NO: 1833987
uucaacccaagaaagccuc

SEQ ID NO: 1833989 - RNA, 19 nt, Artificial Sequence
  Description of Artificial Sequence: Synthetic oligonucleotide
  Sense strand starting at position 1366 of SEQ ID NO: 1563815
aggcuuucuuggguugaaa

SEQ ID NO: 1833990 - RNA, 19 nt, Artificial Sequence
  Description of Artificial Sequence: Synthetic oligonucleotide
  Antisense strand to SEQ ID NO: 1833989
uuucaacccaagaaagccu

SEQ ID NO: 1833991 - RNA, 19 nt, Artificial Sequence
  Description of Artificial Sequence: Synthetic oligonucleotide
  Sense strand starting at position 1544 of SEQ ID NO: 1563815
ggcagauggcgguaugaca

SEQ ID NO: 1833992 - RNA, 19 nt, Artificial Sequence
  Description of Artificial Sequence: Synthetic oligonucleotide
  Antisense strand to SEQ ID NO: 1833991
ugucauaccgccaucugcc

SEQ ID NO: 1833993 - RNA, 19 nt, Artificial Sequence
  Description of Artificial Sequence: Synthetic oligonucleotide
  Sense strand starting at position 1604 of SEQ ID NO: 1563815
cgcggauggguuuaggagu

SEQ ID NO: 1833994 - RNA, 19 nt, Artificial Sequence
  Description of Artificial Sequence: Synthetic oligonucleotide
  Antisense strand to SEQ ID NO: 1833993
acuccuaaacccauccgcg

SEQ ID NO: 1833995 - RNA, 19 nt, Artificial Sequence
  Description of Artificial Sequence: Synthetic oligonucleotide
  Sense strand starting at position 1610 of SEQ ID NO: 1563815
uggguuuaggagugcaaau

SEQ ID NO: 1833996 - RNA, 19 nt, Artificial Sequence
  Description of Artificial Sequence: Synthetic oligonucleotide
  Antisense strand to SEQ ID NO: 1833995
auuugcacuccuaaaccca

SEQ ID NO: 1833997 - RNA, 19 nt, Artificial Sequence
  Description of Artificial Sequence: Synthetic oligonucleotide
  Sense strand starting at position 1622 of SEQ ID NO: 1563815
ugcaaaugguaaugggaaa

SEQ ID NO: 1833998 - RNA, 19 nt, Artificial Sequence
  Description of Artificial Sequence: Synthetic oligonucleotide
  Antisense strand to SEQ ID NO: 1833997
uuucccauuaccauuugca

SEQ ID NO: 1833999 - RNA, 19 nt, Artificial Sequence
  Description of Artificial Sequence: Synthetic oligonucleotide
  Sense strand starting at position 1688 of SEQ ID NO: 1563815
cucuuacgguccugagauu

SEQ ID NO: 1834000 - RNA, 19 nt, Artificial Sequence
  Description of Artificial Sequence: Synthetic oligonucleotide
  Antisense strand to SEQ ID NO: 1833999
aaucucaggaccguaagag

SEQ ID NO: 1834001 - RNA, 19 nt, Artificial Sequence
  Description of Artificial Sequence: Synthetic oligonucleotide
  Sense strand starting at position 1701 of SEQ ID NO: 1563815
gagauugaugccuggcaga

SEQ ID NO: 1834002 - RNA, 19 nt, Artificial Sequence
  Description of Artificial Sequence: Synthetic oligonucleotide
  Antisense strand to SEQ ID NO: 1834001
ucugccaggcaucaaucuc

SEQ ID NO: 1834003 - RNA, 19 nt, Artificial Sequence
  Description of Artificial Sequence: Synthetic oligonucleotide
  Sense strand starting at position 1723 of SEQ ID NO: 1563815
uggccucacuagucuuaca

SEQ ID NO: 1834004 - RNA, 19 nt, Artificial Sequence
  Description of Artificial Sequence: Synthetic oligonucleotide
  Antisense strand to SEQ ID NO: 1834003
uguaagacuagugaggcca

SEQ ID NO: 1834005 - RNA, 19 nt, Artificial Sequence
  Description of Artificial Sequence: Synthetic oligonucleotide
  Sense strand starting at position 1763 of SEQ ID NO: 1563815
uccagaguccucugcgacu

SEQ ID NO: 1834006 - RNA, 19 nt, Artificial Sequence
  Description of Artificial Sequence: Synthetic oligonucleotide
  Antisense strand to SEQ ID NO: 1834005
agucgcagaggacucugga

SEQ ID NO: 1834007 - RNA, 19 nt, Artificial Sequence
  Description of Artificial Sequence: Synthetic oligonucleotide
  Sense strand starting at position 3215 of SEQ ID NO: 1563815
guaggaguggugcaggauu

SEQ ID NO: 1834008 - RNA, 19 nt, Artificial Sequence
  Description of Artificial Sequence: Synthetic oligonucleotide
  Antisense strand to SEQ ID NO: 1834007
aauccugcaccacuccuac

SEQ ID NO: 1834009 - RNA, 19 nt, Artificial Sequence
  Description of Artificial Sequence: Synthetic oligonucleotide
  Sense strand starting at position 3217 of SEQ ID NO: 1563815
aggaguggugcaggauuau

SEQ ID NO: 1834010 - RNA, 19 nt, Artificial Sequence
  Description of Artificial Sequence: Synthetic oligonucleotide
  Antisense strand to SEQ ID NO: 1834009
auaauccugcaccacuccu

SEQ ID NO: 1834011 - RNA, 19 nt, Artificial Sequence
  Description of Artificial Sequence: Synthetic oligonucleotide
  Sense strand starting at position 55 of SEQ ID NO: 1563816
cugucagacugagaagcua

SEQ ID NO: 1834012 - RNA, 19 nt, Artificial Sequence
  Description of Artificial Sequence: Synthetic oligonucleotide
  Antisense strand to SEQ ID NO: 1834011
uagcuucucagucugacag

SEQ ID NO: 1834013 - RNA, 19 nt, Artificial Sequence
  Description of Artificial Sequence: Synthetic oligonucleotide
  Sense strand starting at position 126 of SEQ ID NO: 1563816
ggagcuucccuggguugaa

SEQ ID NO: 1834014 - RNA, 19 nt, Artificial Sequence
  Description of Artificial Sequence: Synthetic oligonucleotide
  Antisense strand to SEQ ID NO: 1834013
uucaacccagggaagcucc

SEQ ID NO: 1834015 - RNA, 19 nt, Artificial Sequence
  Description of Artificial Sequence: Synthetic oligonucleotide
  Sense strand starting at position 127 of SEQ ID NO: 1563816
gagcuucccuggguugaaa

SEQ ID NO: 1834016 - RNA, 19 nt, Artificial Sequence
  Description of Artificial Sequence: Synthetic oligonucleotide
  Antisense strand to SEQ ID NO: 1834015
uuucaacccagggaagcuc

SEQ ID NO: 1834017 - RNA, 19 nt, Artificial Sequence
  Description of Artificial Sequence: Synthetic oligonucleotide
  Sense strand starting at position 331 of SEQ ID NO: 1563816
cucuuacaguccugagguu

SEQ ID NO: 1834018 - RNA, 19 nt, Artificial Sequence
  Description of Artificial Sequence: Synthetic oligonucleotide
  Antisense strand to SEQ ID NO: 1834017
aaccucaggacuguaagag

SEQ ID NO: 1834019 - RNA, 19 nt, Artificial Sequence
  Description of Artificial Sequence: Synthetic oligonucleotide
  Sense strand starting at position 371 of SEQ ID NO: 1563816
ucaccagucuugcacugau

SEQ ID NO: 1834020 - RNA, 19 nt, Artificial Sequence
  Description of Artificial Sequence: Synthetic oligonucleotide
  Antisense strand to SEQ ID NO: 1834019
aucagugcaagacugguga

SEQ ID NO: 1834021 - RNA, 19 nt, Artificial Sequence
  Description of Artificial Sequence: Synthetic oligonucleotide
  Sense strand starting at position 492 of SEQ ID NO: 1563816
gcaugagugguucgggauu

SEQ ID NO: 1834022 - RNA, 19 nt, Artificial Sequence
  Description of Artificial Sequence: Synthetic oligonucleotide
  Antisense strand to SEQ ID NO: 1834021
aaucccgaaccacucaugc

SEQ ID NO: 1834023 - RNA, 19 nt, Artificial Sequence
  Description of Artificial Sequence: Synthetic oligonucleotide
  Sense strand starting at position 494 of SEQ ID NO: 1563816
augagugguucgggauuau

SEQ ID NO: 1834024 - RNA, 19 nt, Artificial Sequence
  Description of Artificial Sequence: Synthetic oligonucleotide
  Antisense strand to SEQ ID NO: 1834023
auaaucccgaaccacucau

SEQ ID NO: 1834025 - RNA, 19 nt, Artificial Sequence
  Description of Artificial Sequence: Synthetic oligonucleotide
  Sense strand starting at position 504 of SEQ ID NO: 1563816
cgggauuauuugggauugu

SEQ ID NO: 1834026 - RNA, 19 nt, Artificial Sequence
  Description of Artificial Sequence: Synthetic oligonucleotide
  Antisense strand to SEQ ID NO: 1834025
acaaucccaaauaaucccg

SEQ ID NO: 1834027 - RNA, 19 nt, Artificial Sequence
  Description of Artificial Sequence: Synthetic oligonucleotide
  Sense strand starting at position 505 of SEQ ID NO: 1563816
gggauuauuugggauuguc

SEQ ID NO: 1834028 - RNA, 19 nt, Artificial Sequence
  Description of Artificial Sequence: Synthetic oligonucleotide
  Antisense strand to SEQ ID NO: 1834027
gacaaucccaaauaauccc

SEQ ID NO: 1834029 - RNA, 19 nt, Artificial Sequence
  Description of Artificial Sequence: Synthetic oligonucleotide
  Sense strand starting at position 689 of SEQ ID NO: 1563816
gcggcuuucuuggguugaa

SEQ ID NO: 1834030 - RNA, 19 nt, Artificial Sequence
  Description of Artificial Sequence: Synthetic oligonucleotide
  Antisense strand to SEQ ID NO: 1834029
uucaacccaagaaagccgc

SEQ ID NO: 1834031 - RNA, 19 nt, Artificial Sequence
  Description of Artificial Sequence: Synthetic oligonucleotide
  Sense strand starting at position 690 of SEQ ID NO: 1563816
cggcuuucuuggguugaaa

SEQ ID NO: 1834032 - RNA, 19 nt, Artificial Sequence
  Description of Artificial Sequence: Synthetic oligonucleotide
  Antisense strand to SEQ ID NO: 1834031
uuucaacccaagaaagccg

SEQ ID NO: 1834033 - RNA, 19 nt, Artificial Sequence
  Description of Artificial Sequence: Synthetic oligonucleotide
  Sense strand starting at position 868 of SEQ ID NO: 1563816
gggagaugguggugugaga

SEQ ID NO: 1834034 - RNA, 19 nt, Artificial Sequence
  Description of Artificial Sequence: Synthetic oligonucleotide
  Antisense strand to SEQ ID NO: 1834033
ucucacaccaccaucuccc

SEQ ID NO: 1834035 - RNA, 19 nt, Artificial Sequence
  Description of Artificial Sequence: Synthetic oligonucleotide
  Sense strand starting at position 1091 of SEQ ID NO: 1563816
uccagagucccaugugacu

SEQ ID NO: 1834036 - RNA, 19 nt, Artificial Sequence
  Description of Artificial Sequence: Synthetic oligonucleotide
  Antisense strand to SEQ ID NO: 1834035
agucacaugggacucugga

SEQ ID NO: 1834037 - RNA, 19 nt, Artificial Sequence
  Description of Artificial Sequence: Synthetic oligonucleotide
  Sense strand starting at position 1859 of SEQ ID NO: 1563816
guaggaguggugcgggauu

SEQ ID NO: 1834038 - RNA, 19 nt, Artificial Sequence
  Description of Artificial Sequence: Synthetic oligonucleotide
  Antisense strand to SEQ ID NO: 1834037
aaucccgcaccacuccuac

SEQ ID NO: 1834039 - RNA, 19 nt, Artificial Sequence
  Description of Artificial Sequence: Synthetic oligonucleotide
  Sense strand starting at position 483 of SEQ ID NO: 1563817
guaggaguggugcgggauu

SEQ ID NO: 1834040 - RNA, 19 nt, Artificial Sequence
  Description of Artificial Sequence: Synthetic oligonucleotide
  Antisense strand to SEQ ID NO: 1834039
aaucccgcaccacuccuac

SEQ ID NO: 1834041 - RNA, 19 nt, Artificial Sequence
  Description of Artificial Sequence: Synthetic oligonucleotide
  Sense strand starting at position 1000 of SEQ ID NO: 1563817
cucuuacgguccugagauu

SEQ ID NO: 1834042 - RNA, 19 nt, Artificial Sequence
  Description of Artificial Sequence: Synthetic oligonucleotide
  Antisense strand to SEQ ID NO: 1834041
aaucucaggaccguaagag

SEQ ID NO: 1834043 - RNA, 19 nt, Artificial Sequence
  Description of Artificial Sequence: Synthetic oligonucleotide
  Sense strand starting at position 1013 of SEQ ID NO: 1563817
gagauugaugccuggcaga

SEQ ID NO: 1834044 - RNA, 19 nt, Artificial Sequence
  Description of Artificial Sequence: Synthetic oligonucleotide
  Antisense strand to SEQ ID NO: 1834043
ucugccaggcaucaaucuc

SEQ ID NO: 1834045 - RNA, 19 nt, Artificial Sequence
  Description of Artificial Sequence: Synthetic oligonucleotide
  Sense strand starting at position 1075 of SEQ ID NO: 1563817
uccagaguccucugcgacu

SEQ ID NO: 1834046 - RNA, 19 nt, Artificial Sequence
  Description of Artificial Sequence: Synthetic oligonucleotide
  Antisense strand to SEQ ID NO: 1834045
agucgcagaggacucugga

SEQ ID NO: 1834047 - RNA, 19 nt, Artificial Sequence
  Description of Artificial Sequence: Synthetic oligonucleotide
  Sense strand starting at position 1354 of SEQ ID NO: 1563817
gggacuuucuuggguugaa

SEQ ID NO: 1834048 - RNA, 19 nt, Artificial Sequence
  Description of Artificial Sequence: Synthetic oligonucleotide
  Antisense strand to SEQ ID NO: 1834047
uucaacccaagaaaguccc

SEQ ID NO: 1834049 - RNA, 19 nt, Artificial Sequence
  Description of Artificial Sequence: Synthetic oligonucleotide
  Sense strand starting at position 1355 of SEQ ID NO: 1563817
ggacuuucuuggguugaaa

SEQ ID NO: 1834050 - RNA, 19 nt, Artificial Sequence
  Description of Artificial Sequence: Synthetic oligonucleotide
  Antisense strand to SEQ ID NO: 1834049
uuucaacccaagaaagucc

SEQ ID NO: 1834051 - RNA, 19 nt, Artificial Sequence
  Description of Artificial Sequence: Synthetic oligonucleotide
  Sense strand starting at position 1536 of SEQ ID NO: 1563817
gggagauggcggugugaga

SEQ ID NO: 1834052 - RNA, 19 nt, Artificial Sequence
  Description of Artificial Sequence: Synthetic oligonucleotide
  Antisense strand to SEQ ID NO: 1834051
ucucacaccgccaucuccc

SEQ ID NO: 1834053 - RNA, 19 nt, Artificial Sequence
  Description of Artificial Sequence: Synthetic oligonucleotide
  Sense strand starting at position 1604 of SEQ ID NO: 1563817
uggguuugggagugcaaau

SEQ ID NO: 1834054 - RNA, 19 nt, Artificial Sequence
  Description of Artificial Sequence: Synthetic oligonucleotide
  Antisense strand to SEQ ID NO: 1834053
auuugcacucccaaaccca

SEQ ID NO: 1834055 - RNA, 19 nt, Artificial Sequence
  Description of Artificial Sequence: Synthetic oligonucleotide
  Sense strand starting at position 1616 of SEQ ID NO: 1563817
ugcaaauaguaaugggaaa

SEQ ID NO: 1834056 - RNA, 19 nt, Artificial Sequence
  Description of Artificial Sequence: Synthetic oligonucleotide
  Antisense strand to SEQ ID NO: 1834055
uuucccauuacuauuugca

SEQ ID NO: 1834057 - RNA, 19 nt, Artificial Sequence
  Description of Artificial Sequence: Synthetic oligonucleotide
  Sense strand starting at position 1682 of SEQ ID NO: 1563817
cucuuaggguccugagguu

SEQ ID NO: 1834058 - RNA, 19 nt, Artificial Sequence
  Description of Artificial Sequence: Synthetic oligonucleotide
  Antisense strand to SEQ ID NO: 1834057
aaccucaggacccuaagag

SEQ ID NO: 1834059 - RNA, 19 nt, Artificial Sequence
  Description of Artificial Sequence: Synthetic oligonucleotide
  Sense strand starting at position 2303 of SEQ ID NO: 1563817
ugcaaaugguaaugggaaa

SEQ ID NO: 1834060 - RNA, 19 nt, Artificial Sequence
  Description of Artificial Sequence: Synthetic oligonucleotide
  Antisense strand to SEQ ID NO: 1834059
uuucccauuaccauuugca

SEQ ID NO: 1834061 - RNA, 19 nt, Artificial Sequence
  Description of Artificial Sequence: Synthetic oligonucleotide
  Sense strand starting at position 2369 of SEQ ID NO: 1563817
cucuuaggguccugagauu

SEQ ID NO: 1834062 - RNA, 19 nt, Artificial Sequence
  Description of Artificial Sequence: Synthetic oligonucleotide
  Antisense strand to SEQ ID NO: 1834061
aaucucaggacccuaagag

SEQ ID NO: 1834063 - RNA, 19 nt, Artificial Sequence
  Description of Artificial Sequence: Synthetic oligonucleotide
  Sense strand starting at position 2382 of SEQ ID NO: 1563817
gagauugaugcccggcaga

SEQ ID NO: 1834064 - RNA, 19 nt, Artificial Sequence
  Description of Artificial Sequence: Synthetic oligonucleotide
  Antisense strand to SEQ ID NO: 1834063
ucugccgggcaucaaucuc

SEQ ID NO: 1834065 - RNA, 19 nt, Artificial Sequence
  Description of Artificial Sequence: Synthetic oligonucleotide
  Sense strand starting at position 2404 of SEQ ID NO: 1563817
uggccucacuagucuuaca

SEQ ID NO: 1834066 - RNA, 19 nt, Artificial Sequence
  Description of Artificial Sequence: Synthetic oligonucleotide
  Antisense strand to SEQ ID NO: 1834065
uguaagacuagugaggcca

SEQ ID NO: 1834067 - RNA, 19 nt, Artificial Sequence
  Description of Artificial Sequence: Synthetic oligonucleotide
  Sense strand starting at position 2527 of SEQ ID NO: 1563817
guaggaguggugcaggauu

SEQ ID NO: 1834068 - RNA, 19 nt, Artificial Sequence
  Description of Artificial Sequence: Synthetic oligonucleotide
  Antisense strand to SEQ ID NO: 1834067
aauccugcaccacuccuac

SEQ ID NO: 1834069 - RNA, 19 nt, Artificial Sequence
  Description of Artificial Sequence: Synthetic oligonucleotide
  Sense strand starting at position 2529 of SEQ ID NO: 1563817
aggaguggugcaggauuau

SEQ ID NO: 1834070 - RNA, 19 nt, Artificial Sequence
  Description of Artificial Sequence: Synthetic oligonucleotide
  Antisense strand to SEQ ID NO: 1834069
auaauccugcaccacuccu

SEQ ID NO: 1834071 - RNA, 19 nt, Artificial Sequence
  Description of Artificial Sequence: Synthetic oligonucleotide
  Sense strand starting at position 2720 of SEQ ID NO: 1563817
ugaggcuuucuuggguuga

SEQ ID NO: 1834072 - RNA, 19 nt, Artificial Sequence
  Description of Artificial Sequence: Synthetic oligonucleotide
  Antisense strand to SEQ ID NO: 1834071
ucaacccaagaaagccuca

SEQ ID NO: 1834073 - RNA, 19 nt, Artificial Sequence
  Description of Artificial Sequence: Synthetic oligonucleotide
  Sense strand starting at position 2721 of SEQ ID NO: 1563817
gaggcuuucuuggguugaa

SEQ ID NO: 1834074 - RNA, 19 nt, Artificial Sequence
  Description of Artificial Sequence: Synthetic oligonucleotide
  Antisense strand to SEQ ID NO: 1834073
uucaacccaagaaagccuc

SEQ ID NO: 1834075 - RNA, 19 nt, Artificial Sequence
  Description of Artificial Sequence: Synthetic oligonucleotide
  Sense strand starting at position 2722 of SEQ ID NO: 1563817
aggcuuucuuggguugaaa

SEQ ID NO: 1834076 - RNA, 19 nt, Artificial Sequence
  Description of Artificial Sequence: Synthetic oligonucleotide
  Antisense strand to SEQ ID NO: 1834075
uuucaacccaagaaagccu

SEQ ID NO: 1834077 - RNA, 19 nt, Artificial Sequence
  Description of Artificial Sequence: Synthetic oligonucleotide
  Sense strand starting at position 2900 of SEQ ID NO: 1563817
ggcagauggcgguaugaca

SEQ ID NO: 1834078 - RNA, 19 nt, Artificial Sequence
  Description of Artificial Sequence: Synthetic oligonucleotide
  Antisense strand to SEQ ID NO: 1834077
ugucauaccgccaucugcc

SEQ ID NO: 1834079 - RNA, 19 nt, Artificial Sequence
  Description of Artificial Sequence: Synthetic oligonucleotide
  Sense strand starting at position 2960 of SEQ ID NO: 1563817
cgcggauggguuuaggagu

SEQ ID NO: 1834080 - RNA, 19 nt, Artificial Sequence
  Description of Artificial Sequence: Synthetic oligonucleotide
  Antisense strand to SEQ ID NO: 1834079
acuccuaaacccauccgcg

SEQ ID NO: 1834081 - RNA, 19 nt, Artificial Sequence
  Description of Artificial Sequence: Synthetic oligonucleotide
  Sense strand starting at position 2966 of SEQ ID NO: 1563817
uggguuuaggagugcaaau

SEQ ID NO: 1834082 - RNA, 19 nt, Artificial Sequence
  Description of Artificial Sequence: Synthetic oligonucleotide
  Antisense strand to SEQ ID NO: 1834081
auuugcacuccuaaaccca

SEQ ID NO: 1834083 - RNA, 19 nt, Artificial Sequence
  Description of Artificial Sequence: Synthetic oligonucleotide
  Sense strand starting at position 283 of SEQ ID NO: 1563818
ucacaucccugauagggaa

SEQ ID NO: 1834084 - RNA, 19 nt, Artificial Sequence
  Description of Artificial Sequence: Synthetic oligonucleotide
  Antisense strand to SEQ ID NO: 1834083
uucccuaucagggauguga

SEQ ID NO: 1834085 - RNA, 19 nt, Artificial Sequence
  Description of Artificial Sequence: Synthetic oligonucleotide
  Sense strand starting at position 389 of SEQ ID NO: 1563818
auguguccugggugaggaa

SEQ ID NO: 1834086 - RNA, 19 nt, Artificial Sequence
  Description of Artificial Sequence: Synthetic oligonucleotide
  Antisense strand to SEQ ID NO: 1834085
uuccucacccaggacacau

SEQ ID NO: 1834087 - RNA, 19 nt, Artificial Sequence
  Description of Artificial Sequence: Synthetic oligonucleotide
  Sense strand starting at position 504 of SEQ ID NO: 1563818
caccaaugaucccagggua

SEQ ID NO: 1834088 - RNA, 19 nt, Artificial Sequence
  Description of Artificial Sequence: Synthetic oligonucleotide
  Antisense strand to SEQ ID NO: 1834087
uacccugggaucauuggug

SEQ ID NO: 1834089 - RNA, 19 nt, Artificial Sequence
  Description of Artificial Sequence: Synthetic oligonucleotide
  Sense strand starting at position 507 of SEQ ID NO: 1563818
caaugaucccaggguaagu

SEQ ID NO: 1834090 - RNA, 19 nt, Artificial Sequence
  Description of Artificial Sequence: Synthetic oligonucleotide
  Antisense strand to SEQ ID NO: 1834089
acuuacccugggaucauug

SEQ ID NO: 1834091 - RNA, 19 nt, Artificial Sequence
  Description of Artificial Sequence: Synthetic oligonucleotide
  Sense strand starting at position 582 of SEQ ID NO: 1563818
gggcagauuuccgugaggu

SEQ ID NO: 1834092 - RNA, 19 nt, Artificial Sequence
  Description of Artificial Sequence: Synthetic oligonucleotide
  Antisense strand to SEQ ID NO: 1834091
accucacggaaaucugccc

SEQ ID NO: 1834093 - RNA, 19 nt, Artificial Sequence
  Description of Artificial Sequence: Synthetic oligonucleotide
  Sense strand starting at position 583 of SEQ ID NO: 1563818
ggcagauuuccgugagguc

SEQ ID NO: 1834094 - RNA, 19 nt, Artificial Sequence
  Description of Artificial Sequence: Synthetic oligonucleotide
  Antisense strand to SEQ ID NO: 1834093
gaccucacggaaaucugcc

SEQ ID NO: 1834095 - RNA, 19 nt, Artificial Sequence
  Description of Artificial Sequence: Synthetic oligonucleotide
  Sense strand starting at position 592 of SEQ ID NO: 1563818
ccgugagguccucaucugu

SEQ ID NO: 1834096 - RNA, 19 nt, Artificial Sequence
  Description of Artificial Sequence: Synthetic oligonucleotide
  Antisense strand to SEQ ID NO: 1834095
acagaugaggaccucacgg

SEQ ID NO: 1834097 - RNA, 19 nt, Artificial Sequence
  Description of Artificial Sequence: Synthetic oligonucleotide
  Sense strand starting at position 665 of SEQ ID NO: 1563818
gacagauccugggaccacu

SEQ ID NO: 1834098 - RNA, 19 nt, Artificial Sequence
  Description of Artificial Sequence: Synthetic oligonucleotide
  Antisense strand to SEQ ID NO: 1834097
aguggucccaggaucuguc

SEQ ID NO: 1834099 - RNA, 19 nt, Artificial Sequence
  Description of Artificial Sequence: Synthetic oligonucleotide
  Sense strand starting at position 673 of SEQ ID NO: 1563818
cugggaccacucugucuau

SEQ ID NO: 1834100 - RNA, 19 nt, Artificial Sequence
  Description of Artificial Sequence: Synthetic oligonucleotide
  Antisense strand to SEQ ID NO: 1834099
auagacagaguggucccag

SEQ ID NO: 1834101 - RNA, 19 nt, Artificial Sequence
  Description of Artificial Sequence: Synthetic oligonucleotide
  Sense strand starting at position 709 of SEQ ID NO: 1563818
cuguguugaccugagucau

SEQ ID NO: 1834102 - RNA, 19 nt, Artificial Sequence
  Description of Artificial Sequence: Synthetic oligonucleotide
  Antisense strand to SEQ ID NO: 1834101
augacucaggucaacacag

SEQ ID NO: 1834103 - RNA, 19 nt, Artificial Sequence
  Description of Artificial Sequence: Synthetic oligonucleotide
  Sense strand starting at position 719 of SEQ ID NO: 1563818
cugagucauccucggagaa

SEQ ID NO: 1834104 - RNA, 19 nt, Artificial Sequence
  Description of Artificial Sequence: Synthetic oligonucleotide
  Antisense strand to SEQ ID NO: 1834103
uucuccgaggaugacucag

SEQ ID NO: 1834105 - RNA, 19 nt, Artificial Sequence
  Description of Artificial Sequence: Synthetic oligonucleotide
  Sense strand starting at position 720 of SEQ ID NO: 1563818
ugagucauccucggagaac

SEQ ID NO: 1834106 - RNA, 19 nt, Artificial Sequence
  Description of Artificial Sequence: Synthetic oligonucleotide
  Antisense strand to SEQ ID NO: 1834105
guucuccgaggaugacuca

SEQ ID NO: 1834107 - RNA, 19 nt, Artificial Sequence
  Description of Artificial Sequence: Synthetic oligonucleotide
  Sense strand starting at position 721 of SEQ ID NO: 1563818
gagucauccucggagaaca

SEQ ID NO: 1834108 - RNA, 19 nt, Artificial Sequence
  Description of Artificial Sequence: Synthetic oligonucleotide
  Antisense strand to SEQ ID NO: 1834107
uguucuccgaggaugacuc

SEQ ID NO: 1834109 - RNA, 19 nt, Artificial Sequence
  Description of Artificial Sequence: Synthetic oligonucleotide
  Sense strand starting at position 861 of SEQ ID NO: 1563818
guggguuacucuucaucgu

SEQ ID NO: 1834110 - RNA, 19 nt, Artificial Sequence
  Description of Artificial Sequence: Synthetic oligonucleotide
  Antisense strand to SEQ ID NO: 1834109
acgaugaagaguaacccac

SEQ ID NO: 1834111 - RNA, 19 nt, Artificial Sequence
  Description of Artificial Sequence: Synthetic oligonucleotide
  Sense strand starting at position 972 of SEQ ID NO: 1563818
acuucuuuccuguggcaca

SEQ ID NO: 1834112 - RNA, 19 nt, Artificial Sequence
  Description of Artificial Sequence: Synthetic oligonucleotide
  Antisense strand to SEQ ID NO: 1834111
ugugccacaggaaagaagu

SEQ ID NO: 1834113 - RNA, 19 nt, Artificial Sequence
  Description of Artificial Sequence: Synthetic oligonucleotide
  Sense strand starting at position 1269 of SEQ ID NO: 1563818
cccauuguucuggacucaa

SEQ ID NO: 1834114 - RNA, 19 nt, Artificial Sequence
  Description of Artificial Sequence: Synthetic oligonucleotide
  Antisense strand to SEQ ID NO: 1834113
uugaguccagaacaauggg

SEQ ID NO: 1834115 - RNA, 19 nt, Artificial Sequence
  Description of Artificial Sequence: Synthetic oligonucleotide
  Sense strand starting at position 1373 of SEQ ID NO: 1563818
ucugauucccgaggaugaa

SEQ ID NO: 1834116 - RNA, 19 nt, Artificial Sequence
  Description of Artificial Sequence: Synthetic oligonucleotide
  Antisense strand to SEQ ID NO: 1834115
uucauccucgggaaucaga

SEQ ID NO: 1834117 - RNA, 19 nt, Artificial Sequence
  Description of Artificial Sequence: Synthetic oligonucleotide
  Sense strand starting at position 1508 of SEQ ID NO: 1563818
ggcccugcucaugauacua

SEQ ID NO: 1834118 - RNA, 19 nt, Artificial Sequence
  Description of Artificial Sequence: Synthetic oligonucleotide
  Antisense strand to SEQ ID NO: 1834117
uaguaucaugagcagggcc

SEQ ID NO: 1834119 - RNA, 19 nt, Artificial Sequence
  Description of Artificial Sequence: Synthetic oligonucleotide
  Sense strand starting at position 1550 of SEQ ID NO: 1563818
ggauguggacgucagaaug

SEQ ID NO: 1834120 - RNA, 19 nt, Artificial Sequence
  Description of Artificial Sequence: Synthetic oligonucleotide
  Antisense strand to SEQ ID NO: 1834119
cauucugacguccacaucc

SEQ ID NO: 1834121 - RNA, 19 nt, Artificial Sequence
  Description of Artificial Sequence: Synthetic oligonucleotide
  Sense strand starting at position 1601 of SEQ ID NO: 1563818
uggguugacugcagggaaa

SEQ ID NO: 1834122 - RNA, 19 nt, Artificial Sequence
  Description of Artificial Sequence: Synthetic oligonucleotide
  Antisense strand to SEQ ID NO: 1834121
uuucccugcagucaaccca

SEQ ID NO: 1834123 - RNA, 19 nt, Artificial Sequence
  Description of Artificial Sequence: Synthetic oligonucleotide
  Sense strand starting at position 1930 of SEQ ID NO: 1563818
ggguucucuaucuggguga

SEQ ID NO: 1834124 - RNA, 19 nt, Artificial Sequence
  Description of Artificial Sequence: Synthetic oligonucleotide
  Antisense strand to SEQ ID NO: 1834123
ucacccagauagagaaccc

SEQ ID NO: 1834125 - RNA, 19 nt, Artificial Sequence
  Description of Artificial Sequence: Synthetic oligonucleotide
  Sense strand starting at position 2104 of SEQ ID NO: 1563818
agggcuucccuggguugaa

SEQ ID NO: 1834126 - RNA, 19 nt, Artificial Sequence
  Description of Artificial Sequence: Synthetic oligonucleotide
  Antisense strand to SEQ ID NO: 1834125
uucaacccagggaagcccu

SEQ ID NO: 1834127 - RNA, 19 nt, Artificial Sequence
  Description of Artificial Sequence: Synthetic oligonucleotide
  Sense strand starting at position 2105 of SEQ ID NO: 1563818
gggcuucccuggguugaaa

SEQ ID NO: 1834128 - RNA, 19 nt, Artificial Sequence
  Description of Artificial Sequence: Synthetic oligonucleotide
  Antisense strand to SEQ ID NO: 1834127
uuucaacccagggaagccc

SEQ ID NO: 1834129 - RNA, 19 nt, Artificial Sequence
  Description of Artificial Sequence: Synthetic oligonucleotide
  Sense strand starting at position 2328 of SEQ ID NO: 1563818
caguccugcccuggucaua

SEQ ID NO: 1834130 - RNA, 19 nt, Artificial Sequence
  Description of Artificial Sequence: Synthetic oligonucleotide
  Antisense strand to SEQ ID NO: 1834129
uaugaccagggcaggacug

SEQ ID NO: 1834131 - RNA, 19 nt, Artificial Sequence
  Description of Artificial Sequence: Synthetic oligonucleotide
  Sense strand starting at position 2449 of SEQ ID NO: 1563818
agagguggcacuggauuau

SEQ ID NO: 1834132 - RNA, 19 nt, Artificial Sequence
  Description of Artificial Sequence: Synthetic oligonucleotide
  Antisense strand to SEQ ID NO: 1834131
auaauccagugccaccucu

SEQ ID NO: 1834133 - RNA, 19 nt, Artificial Sequence
  Description of Artificial Sequence: Synthetic oligonucleotide
  Sense strand starting at position 2488 of SEQ ID NO: 1563818
ugggauacuccuuaguccu

SEQ ID NO: 1834134 - RNA, 19 nt, Artificial Sequence
  Description of Artificial Sequence: Synthetic oligonucleotide
  Antisense strand to SEQ ID NO: 1834133
aggacuaaggaguauccca

SEQ ID NO: 1834135 - RNA, 19 nt, Artificial Sequence
  Description of Artificial Sequence: Synthetic oligonucleotide
  Sense strand starting at position 2604 of SEQ ID NO: 1563818
accucaaaugugcaagaca

SEQ ID NO: 1834136 - RNA, 19 nt, Artificial Sequence
  Description of Artificial Sequence: Synthetic oligonucleotide
  Antisense strand to SEQ ID NO: 1834135
ugucuugcacauuugaggu

SEQ ID NO: 1834137 - RNA, 19 nt, Artificial Sequence
  Description of Artificial Sequence: Synthetic oligonucleotide
  Sense strand starting at position 2644 of SEQ ID NO: 1563818
cagggauucccuggguuga

SEQ ID NO: 1834138 - RNA, 19 nt, Artificial Sequence
  Description of Artificial Sequence: Synthetic oligonucleotide
  Antisense strand to SEQ ID NO: 1834137
ucaacccagggaaucccug

SEQ ID NO: 1834139 - RNA, 19 nt, Artificial Sequence
  Description of Artificial Sequence: Synthetic oligonucleotide
  Sense strand starting at position 2645 of SEQ ID NO: 1563818
agggauucccuggguugaa

SEQ ID NO: 1834140 - RNA, 19 nt, Artificial Sequence
  Description of Artificial Sequence: Synthetic oligonucleotide
  Antisense strand to SEQ ID NO: 1834139
uucaacccagggaaucccu

SEQ ID NO: 1834141 - RNA, 19 nt, Artificial Sequence
  Description of Artificial Sequence: Synthetic oligonucleotide
  Sense strand starting at position 2646 of SEQ ID NO: 1563818
gggauucccuggguugaaa

SEQ ID NO: 1834142 - RNA, 19 nt, Artificial Sequence
  Description of Artificial Sequence: Synthetic oligonucleotide
  Antisense strand to SEQ ID NO: 1834141
uuucaacccagggaauccc

SEQ ID NO: 1834143 - RNA, 19 nt, Artificial Sequence
  Description of Artificial Sequence: Synthetic oligonucleotide
  Sense strand starting at position 2908 of SEQ ID NO: 1563818
gauguugaugccuggcaga

SEQ ID NO: 1834144 - RNA, 19 nt, Artificial Sequence
  Description of Artificial Sequence: Synthetic oligonucleotide
  Antisense strand to SEQ ID NO: 1834143
ucugccaggcaucaacauc

SEQ ID NO: 1834145 - RNA, 19 nt, Artificial Sequence
  Description of Artificial Sequence: Synthetic oligonucleotide
  Sense strand starting at position 3079 of SEQ ID NO: 1563818
aggaguagugcuggauuau

SEQ ID NO: 1834146 - RNA, 19 nt, Artificial Sequence
  Description of Artificial Sequence: Synthetic oligonucleotide
  Antisense strand to SEQ ID NO: 1834145
auaauccagcacuacuccu

SEQ ID NO: 1834147 - RNA, 19 nt, Artificial Sequence
  Description of Artificial Sequence: Synthetic oligonucleotide
  Sense strand starting at position 3080 of SEQ ID NO: 1563818
ggaguagugcuggauuauu

SEQ ID NO: 1834148 - RNA, 19 nt, Artificial Sequence
  Description of Artificial Sequence: Synthetic oligonucleotide
  Antisense strand to SEQ ID NO: 1834147
aauaauccagcacuacucc

SEQ ID NO: 1834149 - RNA, 19 nt, Artificial Sequence
  Description of Artificial Sequence: Synthetic oligonucleotide
  Sense strand starting at position 3124 of SEQ ID NO: 1563818
ccuccugaguccucccuua

SEQ ID NO: 1834150 - RNA, 19 nt, Artificial Sequence
  Description of Artificial Sequence: Synthetic oligonucleotide
  Antisense strand to SEQ ID NO: 1834149
uaagggaggacucaggagg

SEQ ID NO: 1834151 - RNA, 19 nt, Artificial Sequence
  Description of Artificial Sequence: Synthetic oligonucleotide
  Sense strand starting at position 3212 of SEQ ID NO: 1563818
gcgagaacuucgcuucucu

SEQ ID NO: 1834152 - RNA, 19 nt, Artificial Sequence
  Description of Artificial Sequence: Synthetic oligonucleotide
  Antisense strand to SEQ ID NO: 1834151
agagaagcgaaguucucgc

SEQ ID NO: 1834153 - RNA, 19 nt, Artificial Sequence
  Description of Artificial Sequence: Synthetic oligonucleotide
  Sense strand starting at position 3275 of SEQ ID NO: 1563818
gggauucccucgguugaaa

SEQ ID NO: 1834154 - RNA, 19 nt, Artificial Sequence
  Description of Artificial Sequence: Synthetic oligonucleotide
  Antisense strand to SEQ ID NO: 1834153
uuucaaccgagggaauccc

SEQ ID NO: 1834155 - RNA, 19 nt, Artificial Sequence
  Description of Artificial Sequence: Synthetic oligonucleotide
  Sense strand starting at position 3305 of SEQ ID NO: 1563818
accggauucuaccagaaug

SEQ ID NO: 1834156 - RNA, 19 nt, Artificial Sequence
  Description of Artificial Sequence: Synthetic oligonucleotide
  Antisense strand to SEQ ID NO: 1834155
cauucugguagaauccggu

SEQ ID NO: 1834157 - RNA, 19 nt, Artificial Sequence
  Description of Artificial Sequence: Synthetic oligonucleotide
  Sense strand starting at position 3307 of SEQ ID NO: 1563818
cggauucuaccagaaugua

SEQ ID NO: 1834158 - RNA, 19 nt, Artificial Sequence
  Description of Artificial Sequence: Synthetic oligonucleotide
  Antisense strand to SEQ ID NO: 1834157
uacauucugguagaauccg

SEQ ID NO: 1834159 - RNA, 19 nt, Artificial Sequence
  Description of Artificial Sequence: Synthetic oligonucleotide
  Sense strand starting at position 3504 of SEQ ID NO: 1563818
gacguugaugccuggcaga

SEQ ID NO: 1834160 - RNA, 19 nt, Artificial Sequence
  Description of Artificial Sequence: Synthetic oligonucleotide
  Antisense strand to SEQ ID NO: 1834159
ucugccaggcaucaacguc

SEQ ID NO: 1834161 - RNA, 19 nt, Artificial Sequence
  Description of Artificial Sequence: Synthetic oligonucleotide
  Sense strand starting at position 3885 of SEQ ID NO: 1563818
cagauucugccaggaugga

SEQ ID NO: 1834162 - RNA, 19 nt, Artificial Sequence
  Description of Artificial Sequence: Synthetic oligonucleotide
  Antisense strand to SEQ ID NO: 1834161
uccauccuggcagaaucug

SEQ ID NO: 1834163 - RNA, 19 nt, Artificial Sequence
  Description of Artificial Sequence: Synthetic oligonucleotide
  Sense strand starting at position 277 of SEQ ID NO: 1563819
guuugaauccaaggcaaac

SEQ ID NO: 1834164 - RNA, 19 nt, Artificial Sequence
  Description of Artificial Sequence: Synthetic oligonucleotide
  Antisense strand to SEQ ID NO: 1834163
guuugccuuggauucaaac

SEQ ID NO: 1834165 - RNA, 19 nt, Artificial Sequence
  Description of Artificial Sequence: Synthetic oligonucleotide
  Sense strand starting at position 442 of SEQ ID NO: 1563819
cacggauucccagaacugu

SEQ ID NO: 1834166 - RNA, 19 nt, Artificial Sequence
  Description of Artificial Sequence: Synthetic oligonucleotide
  Antisense strand to SEQ ID NO: 1834165
acaguucugggaauccgug

SEQ ID NO: 1834167 - RNA, 19 nt, Artificial Sequence
  Description of Artificial Sequence: Synthetic oligonucleotide
  Sense strand starting at position 578 of SEQ ID NO: 1563819
gccugagaaucucucaugu

SEQ ID NO: 1834168 - RNA, 19 nt, Artificial Sequence
  Description of Artificial Sequence: Synthetic oligonucleotide
  Antisense strand to SEQ ID NO: 1834167
acaugagagauucucaggc

SEQ ID NO: 1834169 - RNA, 19 nt, Artificial Sequence
  Description of Artificial Sequence: Synthetic oligonucleotide
  Sense strand starting at position 693 of SEQ ID NO: 1563819
guccaaauuuauugaaguc

SEQ ID NO: 1834170 - RNA, 19 nt, Artificial Sequence
  Description of Artificial Sequence: Synthetic oligonucleotide
  Antisense strand to SEQ ID NO: 1834169
gacuucaauaaauuuggac

SEQ ID NO: 1834171 - RNA, 19 nt, Artificial Sequence
  Description of Artificial Sequence: Synthetic oligonucleotide
  Sense strand starting at position 823 of SEQ ID NO: 1563819
cccugacaucagugauccu

SEQ ID NO: 1834172 - RNA, 19 nt, Artificial Sequence
  Description of Artificial Sequence: Synthetic oligonucleotide
  Antisense strand to SEQ ID NO: 1834171
aggaucacugaugucaggg

SEQ ID NO: 1834173 - RNA, 19 nt, Artificial Sequence
  Description of Artificial Sequence: Synthetic oligonucleotide
  Sense strand starting at position 1301 of SEQ ID NO: 1563819
cuaggauucccguagccga

SEQ ID NO: 1834174 - RNA, 19 nt, Artificial Sequence
  Description of Artificial Sequence: Synthetic oligonucleotide
  Antisense strand to SEQ ID NO: 1834173
ucggcuacgggaauccuag

SEQ ID NO: 1834175 - RNA, 19 nt, Artificial Sequence
  Description of Artificial Sequence: Synthetic oligonucleotide
  Sense strand starting at position 1327 of SEQ ID NO: 1563819
ggugccucgguuugagaca

SEQ ID NO: 1834176 - RNA, 19 nt, Artificial Sequence
  Description of Artificial Sequence: Synthetic oligonucleotide
  Antisense strand to SEQ ID NO: 1834175
ugucucaaaccgaggcacc

SEQ ID NO: 1834177 - RNA, 19 nt, Artificial Sequence
  Description of Artificial Sequence: Synthetic oligonucleotide
  Sense strand starting at position 1521 of SEQ ID NO: 1563819
cggagcuuccgugacuuga

SEQ ID NO: 1834178 - RNA, 19 nt, Artificial Sequence
  Description of Artificial Sequence: Synthetic oligonucleotide
  Antisense strand to SEQ ID NO: 1834177
ucaagucacggaagcuccg

SEQ ID NO: 1834179 - RNA, 19 nt, Artificial Sequence
  Description of Artificial Sequence: Synthetic oligonucleotide
  Sense strand starting at position 1523 of SEQ ID NO: 1563819
gagcuuccgugacuugaua

SEQ ID NO: 1834180 - RNA, 19 nt, Artificial Sequence
  Description of Artificial Sequence: Synthetic oligonucleotide
  Antisense strand to SEQ ID NO: 1834179
uaucaagucacggaagcuc

SEQ ID NO: 1834181 - RNA, 19 nt, Artificial Sequence
  Description of Artificial Sequence: Synthetic oligonucleotide
  Sense strand starting at position 1866 of SEQ ID NO: 1563819
gaggcagcacuggauuauu

SEQ ID NO: 1834182 - RNA, 19 nt, Artificial Sequence
  Description of Artificial Sequence: Synthetic oligonucleotide
  Antisense strand to SEQ ID NO: 1834181
aauaauccagugcugccuc

SEQ ID NO: 1834183 - RNA, 19 nt, Artificial Sequence
  Description of Artificial Sequence: Synthetic oligonucleotide
  Sense strand starting at position 2016 of SEQ ID NO: 1563819
gcggucuucugaccuccaa

SEQ ID NO: 1834184 - RNA, 19 nt, Artificial Sequence
  Description of Artificial Sequence: Synthetic oligonucleotide
  Antisense strand to SEQ ID NO: 1834183
uuggaggucagaagaccgc

SEQ ID NO: 1834185 - RNA, 19 nt, Artificial Sequence
  Description of Artificial Sequence: Synthetic oligonucleotide
  Sense strand starting at position 2265 of SEQ ID NO: 1563819
gaaguugaugccuggcuga

SEQ ID NO: 1834186 - RNA, 19 nt, Artificial Sequence
  Description of Artificial Sequence: Synthetic oligonucleotide
  Antisense strand to SEQ ID NO: 1834185
ucagccaggcaucaacuuc

SEQ ID NO: 1834187 - RNA, 19 nt, Artificial Sequence
  Description of Artificial Sequence: Synthetic oligonucleotide
  Sense strand starting at position 2373 of SEQ ID NO: 1563819
ggguguggucugggugaca

SEQ ID NO: 1834188 - RNA, 19 nt, Artificial Sequence
  Description of Artificial Sequence: Synthetic oligonucleotide
  Antisense strand to SEQ ID NO: 1834187
ugucacccagaccacaccc

SEQ ID NO: 1834189 - RNA, 19 nt, Artificial Sequence
  Description of Artificial Sequence: Synthetic oligonucleotide
  Sense strand starting at position 2374 of SEQ ID NO: 1563819
gguguggucugggugacau

SEQ ID NO: 1834190 - RNA, 19 nt, Artificial Sequence
  Description of Artificial Sequence: Synthetic oligonucleotide
  Antisense strand to SEQ ID NO: 1834189
augucacccagaccacacc

SEQ ID NO: 1834191 - RNA, 19 nt, Artificial Sequence
  Description of Artificial Sequence: Synthetic oligonucleotide
  Sense strand starting at position 2679 of SEQ ID NO: 1563819
ucagucuuuguguucuguu

SEQ ID NO: 1834192 - RNA, 19 nt, Artificial Sequence
  Description of Artificial Sequence: Synthetic oligonucleotide
  Antisense strand to SEQ ID NO: 1834191
aacagaacacaaagacuga

SEQ ID NO: 1834193 - RNA, 19 nt, Artificial Sequence
  Description of Artificial Sequence: Synthetic oligonucleotide
  Sense strand starting at position 2762 of SEQ ID NO: 1563819
agcagaacucuggagucau

SEQ ID NO: 1834194 - RNA, 19 nt, Artificial Sequence
  Description of Artificial Sequence: Synthetic oligonucleotide
  Antisense strand to SEQ ID NO: 1834193
augacuccagaguucugcu

SEQ ID NO: 1834195 - RNA, 19 nt, Artificial Sequence
  Description of Artificial Sequence: Synthetic oligonucleotide
  Sense strand starting at position 2855 of SEQ ID NO: 1563819
gccucagauugugcaaaga

SEQ ID NO: 1834196 - RNA, 19 nt, Artificial Sequence
  Description of Artificial Sequence: Synthetic oligonucleotide
  Antisense strand to SEQ ID NO: 1834195
ucuuugcacaaucugaggc

SEQ ID NO: 1834197 - RNA, 19 nt, Artificial Sequence
  Description of Artificial Sequence: Synthetic oligonucleotide
  Sense strand starting at position 3076 of SEQ ID NO: 1563819
uguuuccauucuguaauuu

SEQ ID NO: 1834198 - RNA, 19 nt, Artificial Sequence
  Description of Artificial Sequence: Synthetic oligonucleotide
  Antisense strand to SEQ ID NO: 1834197
aaauuacagaauggaaaca

SEQ ID NO: 1834199 - RNA, 19 nt, Artificial Sequence
  Description of Artificial Sequence: Synthetic oligonucleotide
  Sense strand starting at position 3265 of SEQ ID NO: 1563819
uuaccugaauaugucagua

SEQ ID NO: 1834200 - RNA, 19 nt, Artificial Sequence
  Description of Artificial Sequence: Synthetic oligonucleotide
  Antisense strand to SEQ ID NO: 1834199
uacugacauauucagguaa

SEQ ID NO: 1834201 - RNA, 19 nt, Artificial Sequence
  Description of Artificial Sequence: Synthetic oligonucleotide
  Sense strand starting at position 3275 of SEQ ID NO: 1563819
augucaguauacuucgaca

SEQ ID NO: 1834202 - RNA, 19 nt, Artificial Sequence
  Description of Artificial Sequence: Synthetic oligonucleotide
  Antisense strand to SEQ ID NO: 1834201
ugucgaaguauacugacau

SEQ ID NO: 1834203 - RNA, 19 nt, Artificial Sequence
  Description of Artificial Sequence: Synthetic oligonucleotide
  Sense strand starting at position 3277 of SEQ ID NO: 1563819
gucaguauacuucgacagu

SEQ ID NO: 1834204 - RNA, 19 nt, Artificial Sequence
  Description of Artificial Sequence: Synthetic oligonucleotide
  Antisense strand to SEQ ID NO: 1834203
acugucgaaguauacugac

SEQ ID NO: 1834205 - RNA, 19 nt, Artificial Sequence
  Description of Artificial Sequence: Synthetic oligonucleotide
  Sense strand starting at position 3280 of SEQ ID NO: 1563819
aguauacuucgacaguugu

SEQ ID NO: 1834206 - RNA, 19 nt, Artificial Sequence
  Description of Artificial Sequence: Synthetic oligonucleotide
  Antisense strand to SEQ ID NO: 1834205
acaacugucgaaguauacu

SEQ ID NO: 1834207 - RNA, 19 nt, Artificial Sequence
  Description of Artificial Sequence: Synthetic oligonucleotide
  Sense strand starting at position 3286 of SEQ ID NO: 1563819
cuucgacaguugucucuau

SEQ ID NO: 1834208 - RNA, 19 nt, Artificial Sequence
  Description of Artificial Sequence: Synthetic oligonucleotide
  Antisense strand to SEQ ID NO: 1834207
auagagacaacugucgaag

SEQ ID NO: 1834209 - RNA, 19 nt, Artificial Sequence
  Description of Artificial Sequence: Synthetic oligonucleotide
  Sense strand starting at position 3287 of SEQ ID NO: 1563819
uucgacaguugucucuaua

SEQ ID NO: 1834210 - RNA, 19 nt, Artificial Sequence
  Description of Artificial Sequence: Synthetic oligonucleotide
  Antisense strand to SEQ ID NO: 1834209
uauagagacaacugucgaa

SEQ ID NO: 1834211 - RNA, 19 nt, Artificial Sequence
  Description of Artificial Sequence: Synthetic oligonucleotide
  Sense strand starting at position 3290 of SEQ ID NO: 1563819
gacaguugucucuauaaag

SEQ ID NO: 1834212 - RNA, 19 nt, Artificial Sequence
  Description of Artificial Sequence: Synthetic oligonucleotide
  Antisense strand to SEQ ID NO: 1834211
cuuuauagagacaacuguc

SEQ ID NO: 1834213 - RNA, 19 nt, Artificial Sequence
  Description of Artificial Sequence: Synthetic oligonucleotide
  Sense strand starting at position 3370 of SEQ ID NO: 1563819
auggcauauugucuauuaa

SEQ ID NO: 1834214 - RNA, 19 nt, Artificial Sequence
  Description of Artificial Sequence: Synthetic oligonucleotide
  Antisense strand to SEQ ID NO: 1834213
uuaauagacaauaugccau

SEQ ID NO: 1834215 - RNA, 19 nt, Artificial Sequence
  Description of Artificial Sequence: Synthetic oligonucleotide
  Sense strand starting at position 3371 of SEQ ID NO: 1563819
uggcauauugucuauuaau

SEQ ID NO: 1834216 - RNA, 19 nt, Artificial Sequence
  Description of Artificial Sequence: Synthetic oligonucleotide
  Antisense strand to SEQ ID NO: 1834215
auuaauagacaauaugcca

SEQ ID NO: 1834217 - RNA, 19 nt, Artificial Sequence
  Description of Artificial Sequence: Synthetic oligonucleotide
  Sense strand starting at position 3380 of SEQ ID NO: 1563819
gucuauuaauuguuguagu

SEQ ID NO: 1834218 - RNA, 19 nt, Artificial Sequence
  Description of Artificial Sequence: Synthetic oligonucleotide
  Antisense strand to SEQ ID NO: 1834217
acuacaacaauuaauagac

SEQ ID NO: 1834219 - RNA, 19 nt, Artificial Sequence
  Description of Artificial Sequence: Synthetic oligonucleotide
  Sense strand starting at position 3649 of SEQ ID NO: 1563819
ucguuccugacgugaauga

SEQ ID NO: 1834220 - RNA, 19 nt, Artificial Sequence
  Description of Artificial Sequence: Synthetic oligonucleotide
  Antisense strand to SEQ ID NO: 1834219
ucauucacgucaggaacga

SEQ ID NO: 1834221 - RNA, 19 nt, Artificial Sequence
  Description of Artificial Sequence: Synthetic oligonucleotide
  Sense strand starting at position 3650 of SEQ ID NO: 1563819
cguuccugacgugaaugau

SEQ ID NO: 1834222 - RNA, 19 nt, Artificial Sequence
  Description of Artificial Sequence: Synthetic oligonucleotide
  Antisense strand to SEQ ID NO: 1834221
aucauucacgucaggaacg

SEQ ID NO: 1834223 - RNA, 19 nt, Artificial Sequence
  Description of Artificial Sequence: Synthetic oligonucleotide
  Sense strand starting at position 3653 of SEQ ID NO: 1563819
uccugacgugaaugauaau

SEQ ID NO: 1834224 - RNA, 19 nt, Artificial Sequence
  Description of Artificial Sequence: Synthetic oligonucleotide
  Antisense strand to SEQ ID NO: 1834223
auuaucauucacgucagga

SEQ ID NO: 1834225 - RNA, 19 nt, Artificial Sequence
  Description of Artificial Sequence: Synthetic oligonucleotide
  Sense strand starting at position 3654 of SEQ ID NO: 1563819
ccugacgugaaugauaauu

SEQ ID NO: 1834226 - RNA, 19 nt, Artificial Sequence
  Description of Artificial Sequence: Synthetic oligonucleotide
  Antisense strand to SEQ ID NO: 1834225
aauuaucauucacgucagg

SEQ ID NO: 1834227 - RNA, 19 nt, Artificial Sequence
  Description of Artificial Sequence: Synthetic oligonucleotide
  Sense strand starting at position 3664 of SEQ ID NO: 1563819
augauaauuauucgaacgu

SEQ ID NO: 1834228 - RNA, 19 nt, Artificial Sequence
  Description of Artificial Sequence: Synthetic oligonucleotide
  Antisense strand to SEQ ID NO: 1834227
acguucgaauaauuaucau

SEQ ID NO: 1834229 - RNA, 19 nt, Artificial Sequence
  Description of Artificial Sequence: Synthetic oligonucleotide
  Sense strand starting at position 3889 of SEQ ID NO: 1563819
aauguuaaaccguauguua

SEQ ID NO: 1834230 - RNA, 19 nt, Artificial Sequence
  Description of Artificial Sequence: Synthetic oligonucleotide
  Antisense strand to SEQ ID NO: 1834229
uaacauacgguuuaacauu

SEQ ID NO: 1834231 - RNA, 19 nt, Artificial Sequence
  Description of Artificial Sequence: Synthetic oligonucleotide
  Sense strand starting at position 3891 of SEQ ID NO: 1563819
uguuaaaccguauguuauu

SEQ ID NO: 1834232 - RNA, 19 nt, Artificial Sequence
  Description of Artificial Sequence: Synthetic oligonucleotide
  Antisense strand to SEQ ID NO: 1834231
aauaacauacgguuuaaca

SEQ ID NO: 1834233 - RNA, 19 nt, Artificial Sequence
  Description of Artificial Sequence: Synthetic oligonucleotide
  Sense strand starting at position 3892 of SEQ ID NO: 1563819
guuaaaccguauguuauuu

SEQ ID NO: 1834234 - RNA, 19 nt, Artificial Sequence
  Description of Artificial Sequence: Synthetic oligonucleotide
  Antisense strand to SEQ ID NO: 1834233
aaauaacauacgguuuaac

SEQ ID NO: 1834235 - RNA, 19 nt, Artificial Sequence
  Description of Artificial Sequence: Synthetic oligonucleotide
  Sense strand starting at position 3901 of SEQ ID NO: 1563819
uauguuauuuccuugggca

SEQ ID NO: 1834236 - RNA, 19 nt, Artificial Sequence
  Description of Artificial Sequence: Synthetic oligonucleotide
  Antisense strand to SEQ ID NO: 1834235
ugcccaaggaaauaacaua

SEQ ID NO: 1834237 - RNA, 19 nt, Artificial Sequence
  Description of Artificial Sequence: Synthetic oligonucleotide
  Sense strand starting at position 3916 of SEQ ID NO: 1563819
ggcagagccuguuuauuua

SEQ ID NO: 1834238 - RNA, 19 nt, Artificial Sequence
  Description of Artificial Sequence: Synthetic oligonucleotide
  Antisense strand to SEQ ID NO: 1834237
uaaauaaacaggcucugcc

SEQ ID NO: 1834239 - RNA, 19 nt, Artificial Sequence
  Description of Artificial Sequence: Synthetic oligonucleotide
  Sense strand starting at position 3952 of SEQ ID NO: 1563819
guaggauauuugcugcuau

SEQ ID NO: 1834240 - RNA, 19 nt, Artificial Sequence
  Description of Artificial Sequence: Synthetic oligonucleotide
  Antisense strand to SEQ ID NO: 1834239
auagcagcaaauauccuac

SEQ ID NO: 1834241 - RNA, 19 nt, Artificial Sequence
  Description of Artificial Sequence: Synthetic oligonucleotide
  Sense strand starting at position 3973 of SEQ ID NO: 1563819
aagggagcuuacuuaaugu

SEQ ID NO: 1834242 - RNA, 19 nt, Artificial Sequence
  Description of Artificial Sequence: Synthetic oligonucleotide
  Antisense strand to SEQ ID NO: 1834241
acauuaaguaagcucccuu

SEQ ID NO: 1834243 - RNA, 19 nt, Artificial Sequence
  Description of Artificial Sequence: Synthetic oligonucleotide
  Sense strand starting at position 96 of SEQ ID NO: 1563820
ucaaucuucccucaguguu

SEQ ID NO: 1834244 - RNA, 19 nt, Artificial Sequence
  Description of Artificial Sequence: Synthetic oligonucleotide
  Antisense strand to SEQ ID NO: 1834243
aacacugagggaagauuga

SEQ ID NO: 1834245 - RNA, 19 nt, Artificial Sequence
  Description of Artificial Sequence: Synthetic oligonucleotide
  Sense strand starting at position 109 of SEQ ID NO: 1563820
aguguugucaccuagacuc

SEQ ID NO: 1834246 - RNA, 19 nt, Artificial Sequence
  Description of Artificial Sequence: Synthetic oligonucleotide
  Antisense strand to SEQ ID NO: 1834245
gagucuaggugacaacacu

SEQ ID NO: 1834247 - RNA, 19 nt, Artificial Sequence
  Description of Artificial Sequence: Synthetic oligonucleotide
  Sense strand starting at position 111 of SEQ ID NO: 1563820
uguugucaccuagacucuu

SEQ ID NO: 1834248 - RNA, 19 nt, Artificial Sequence
  Description of Artificial Sequence: Synthetic oligonucleotide
  Antisense strand to SEQ ID NO: 1834247
aagagucuaggugacaaca

SEQ ID NO: 1834249 - RNA, 19 nt, Artificial Sequence
  Description of Artificial Sequence: Synthetic oligonucleotide
  Sense strand starting at position 119 of SEQ ID NO: 1563820
ccuagacucuugguagauu

SEQ ID NO: 1834250 - RNA, 19 nt, Artificial Sequence
  Description of Artificial Sequence: Synthetic oligonucleotide
  Antisense strand to SEQ ID NO: 1834249
aaucuaccaagagucuagg

SEQ ID NO: 1834251 - RNA, 19 nt, Artificial Sequence
  Description of Artificial Sequence: Synthetic oligonucleotide
  Sense strand starting at position 185 of SEQ ID NO: 1563820
ugaguugcccucugagaac

SEQ ID NO: 1834252 - RNA, 19 nt, Artificial Sequence
  Description of Artificial Sequence: Synthetic oligonucleotide
  Antisense strand to SEQ ID NO: 1834251
guucucagagggcaacuca

SEQ ID NO: 1834253 - RNA, 19 nt, Artificial Sequence
  Description of Artificial Sequence: Synthetic oligonucleotide
  Sense strand starting at position 206 of SEQ ID NO: 1563820
gguccucacuucccugaga

SEQ ID NO: 1834254 - RNA, 19 nt, Artificial Sequence
  Description of Artificial Sequence: Synthetic oligonucleotide
  Antisense strand to SEQ ID NO: 1834253
ucucagggaagugaggacc

SEQ ID NO: 1834255 - RNA, 19 nt, Artificial Sequence
  Description of Artificial Sequence: Synthetic oligonucleotide
  Sense strand starting at position 207 of SEQ ID NO: 1563820
guccucacuucccugagau

SEQ ID NO: 1834256 - RNA, 19 nt, Artificial Sequence
  Description of Artificial Sequence: Synthetic oligonucleotide
  Antisense strand to SEQ ID NO: 1834255
aucucagggaagugaggac

SEQ ID NO: 1834257 - RNA, 19 nt, Artificial Sequence
  Description of Artificial Sequence: Synthetic oligonucleotide
  Sense strand starting at position 303 of SEQ ID NO: 1563820
cuacuuguucuugaguggu

SEQ ID NO: 1834258 - RNA, 19 nt, Artificial Sequence
  Description of Artificial Sequence: Synthetic oligonucleotide
  Antisense strand to SEQ ID NO: 1834257
accacucaagaacaaguag

SEQ ID NO: 1834259 - RNA, 19 nt, Artificial Sequence
  Description of Artificial Sequence: Synthetic oligonucleotide
  Sense strand starting at position 311 of SEQ ID NO: 1563820
ucuugagugguggguucua

SEQ ID NO: 1834260 - RNA, 19 nt, Artificial Sequence
  Description of Artificial Sequence: Synthetic oligonucleotide
  Antisense strand to SEQ ID NO: 1834259
uagaacccaccacucaaga

SEQ ID NO: 1834261 - RNA, 19 nt, Artificial Sequence
  Description of Artificial Sequence: Synthetic oligonucleotide
  Sense strand starting at position 748 of SEQ ID NO: 1563820
augggauucccacggcuga

SEQ ID NO: 1834262 - RNA, 19 nt, Artificial Sequence
  Description of Artificial Sequence: Synthetic oligonucleotide
  Antisense strand to SEQ ID NO: 1834261
ucagccgugggaaucccau

SEQ ID NO: 1834263 - RNA, 19 nt, Artificial Sequence
  Description of Artificial Sequence: Synthetic oligonucleotide
  Sense strand starting at position 803 of SEQ ID NO: 1563820
gggugucauccagguauuc

SEQ ID NO: 1834264 - RNA, 19 nt, Artificial Sequence
  Description of Artificial Sequence: Synthetic oligonucleotide
  Antisense strand to SEQ ID NO: 1834263
gaauaccuggaugacaccc

SEQ ID NO: 1834265 - RNA, 19 nt, Artificial Sequence
  Description of Artificial Sequence: Synthetic oligonucleotide
  Sense strand starting at position 867 of SEQ ID NO: 1563820
cguggaugugucuugcaug

SEQ ID NO: 1834266 - RNA, 19 nt, Artificial Sequence
  Description of Artificial Sequence: Synthetic oligonucleotide
  Antisense strand to SEQ ID NO: 1834265
caugcaagacacauccacg

SEQ ID NO: 1834267 - RNA, 19 nt, Artificial Sequence
  Description of Artificial Sequence: Synthetic oligonucleotide
  Sense strand starting at position 985 of SEQ ID NO: 1563820
cagguuuccuaggccauga

SEQ ID NO: 1834268 - RNA, 19 nt, Artificial Sequence
  Description of Artificial Sequence: Synthetic oligonucleotide
  Antisense strand to SEQ ID NO: 1834267
ucauggccuaggaaaccug

SEQ ID NO: 1834269 - RNA, 19 nt, Artificial Sequence
  Description of Artificial Sequence: Synthetic oligonucleotide
  Sense strand starting at position 1011 of SEQ ID NO: 1563820
ucugcugaguccuccuuaa

SEQ ID NO: 1834270 - RNA, 19 nt, Artificial Sequence
  Description of Artificial Sequence: Synthetic oligonucleotide
  Antisense strand to SEQ ID NO: 1834269
uuaaggaggacucagcaga

SEQ ID NO: 1834271 - RNA, 19 nt, Artificial Sequence
  Description of Artificial Sequence: Synthetic oligonucleotide
  Sense strand starting at position 1039 of SEQ ID NO: 1563820
ggcaccucucuccagugau

SEQ ID NO: 1834272 - RNA, 19 nt, Artificial Sequence
  Description of Artificial Sequence: Synthetic oligonucleotide
  Antisense strand to SEQ ID NO: 1834271
aucacuggagagaggugcc

SEQ ID NO: 1834273 - RNA, 19 nt, Artificial Sequence
  Description of Artificial Sequence: Synthetic oligonucleotide
  Sense strand starting at position 1045 of SEQ ID NO: 1563820
ucucuccagugaucugaga

SEQ ID NO: 1834274 - RNA, 19 nt, Artificial Sequence
  Description of Artificial Sequence: Synthetic oligonucleotide
  Antisense strand to SEQ ID NO: 1834273
ucucagaucacuggagaga

SEQ ID NO: 1834275 - RNA, 19 nt, Artificial Sequence
  Description of Artificial Sequence: Synthetic oligonucleotide
  Sense strand starting at position 1080 of SEQ ID NO: 1563820
acagcugucuccuuucuga

SEQ ID NO: 1834276 - RNA, 19 nt, Artificial Sequence
  Description of Artificial Sequence: Synthetic oligonucleotide
  Antisense strand to SEQ ID NO: 1834275
ucagaaaggagacagcugu

SEQ ID NO: 1834277 - RNA, 19 nt, Artificial Sequence
  Description of Artificial Sequence: Synthetic oligonucleotide
  Sense strand starting at position 1134 of SEQ ID NO: 1563820
gccacagauccugggacuu

SEQ ID NO: 1834278 - RNA, 19 nt, Artificial Sequence
  Description of Artificial Sequence: Synthetic oligonucleotide
  Antisense strand to SEQ ID NO: 1834277
aagucccaggaucuguggc

SEQ ID NO: 1834279 - RNA, 19 nt, Artificial Sequence
  Description of Artificial Sequence: Synthetic oligonucleotide
  Sense strand starting at position 1158 of SEQ ID NO: 1563820
ggcugagaucuccacugau

SEQ ID NO: 1834280 - RNA, 19 nt, Artificial Sequence
  Description of Artificial Sequence: Synthetic oligonucleotide
  Antisense strand to SEQ ID NO: 1834279
aucaguggagaucucagcc

SEQ ID NO: 1834281 - RNA, 19 nt, Artificial Sequence
  Description of Artificial Sequence: Synthetic oligonucleotide
  Sense strand starting at position 1161 of SEQ ID NO: 1563820
ugagaucuccacugaucug

SEQ ID NO: 1834282 - RNA, 19 nt, Artificial Sequence
  Description of Artificial Sequence: Synthetic oligonucleotide
  Antisense strand to SEQ ID NO: 1834281
cagaucaguggagaucuca

SEQ ID NO: 1834283 - RNA, 19 nt, Artificial Sequence
  Description of Artificial Sequence: Synthetic oligonucleotide
  Sense strand starting at position 1580 of SEQ ID NO: 1563820
agagaugugcucuguggag

SEQ ID NO: 1834284 - RNA, 19 nt, Artificial Sequence
  Description of Artificial Sequence: Synthetic oligonucleotide
  Antisense strand to SEQ ID NO: 1834283
cuccacagagcacaucucu

SEQ ID NO: 1834285 - RNA, 19 nt, Artificial Sequence
  Description of Artificial Sequence: Synthetic oligonucleotide
  Sense strand starting at position 2039 of SEQ ID NO: 1563820
ggaggagcgguucagucau

SEQ ID NO: 1834286 - RNA, 19 nt, Artificial Sequence
  Description of Artificial Sequence: Synthetic oligonucleotide
  Antisense strand to SEQ ID NO: 1834285
augacugaaccgcuccucc

SEQ ID NO: 1834287 - RNA, 19 nt, Artificial Sequence
  Description of Artificial Sequence: Synthetic oligonucleotide
  Sense strand starting at position 2050 of SEQ ID NO: 1563820
ucagucaucccucaagguu

SEQ ID NO: 1834288 - RNA, 19 nt, Artificial Sequence
  Description of Artificial Sequence: Synthetic oligonucleotide
  Antisense strand to SEQ ID NO: 1834287
aaccuugagggaugacuga

SEQ ID NO: 1834289 - RNA, 19 nt, Artificial Sequence
  Description of Artificial Sequence: Synthetic oligonucleotide
  Sense strand starting at position 2064 of SEQ ID NO: 1563820
agguucucacuuugagauc

SEQ ID NO: 1834290 - RNA, 19 nt, Artificial Sequence
  Description of Artificial Sequence: Synthetic oligonucleotide
  Antisense strand to SEQ ID NO: 1834289
gaucucaaagugagaaccu

SEQ ID NO: 1834291 - RNA, 19 nt, Artificial Sequence
  Description of Artificial Sequence: Synthetic oligonucleotide
  Sense strand starting at position 2225 of SEQ ID NO: 1563820
gagggucugagcugaauua

SEQ ID NO: 1834292 - RNA, 19 nt, Artificial Sequence
  Description of Artificial Sequence: Synthetic oligonucleotide
  Antisense strand to SEQ ID NO: 1834291
uaauucagcucagacccuc

SEQ ID NO: 1834293 - RNA, 19 nt, Artificial Sequence
  Description of Artificial Sequence: Synthetic oligonucleotide
  Sense strand starting at position 2226 of SEQ ID NO: 1563820
agggucugagcugaauuau

SEQ ID NO: 1834294 - RNA, 19 nt, Artificial Sequence
  Description of Artificial Sequence: Synthetic oligonucleotide
  Antisense strand to SEQ ID NO: 1834293
auaauucagcucagacccu

SEQ ID NO: 1834295 - RNA, 19 nt, Artificial Sequence
  Description of Artificial Sequence: Synthetic oligonucleotide
  Sense strand starting at position 2323 of SEQ ID NO: 1563820
gagauacucuguuucuguc

SEQ ID NO: 1834296 - RNA, 19 nt, Artificial Sequence
  Description of Artificial Sequence: Synthetic oligonucleotide
  Antisense strand to SEQ ID NO: 1834295
gacagaaacagaguaucuc

SEQ ID NO: 1834297 - RNA, 19 nt, Artificial Sequence
  Description of Artificial Sequence: Synthetic oligonucleotide
  Sense strand starting at position 2555 of SEQ ID NO: 1563820
caauaaauuuguggaaguc

SEQ ID NO: 1834298 - RNA, 19 nt, Artificial Sequence
  Description of Artificial Sequence: Synthetic oligonucleotide
  Antisense strand to SEQ ID NO: 1834297
gacuuccacaaauuuauug

SEQ ID NO: 1834299 - RNA, 19 nt, Artificial Sequence
  Description of Artificial Sequence: Synthetic oligonucleotide
  Sense strand starting at position 2600 of SEQ ID NO: 1563820
ccuauuccacuuuagugau

SEQ ID NO: 1834300 - RNA, 19 nt, Artificial Sequence
  Description of Artificial Sequence: Synthetic oligonucleotide
  Antisense strand to SEQ ID NO: 1834299
aucacuaaaguggaauagg

SEQ ID NO: 1834301 - RNA, 19 nt, Artificial Sequence
  Description of Artificial Sequence: Synthetic oligonucleotide
  Sense strand starting at position 2632 of SEQ ID NO: 1563820
uucgcauucguauaguaag

SEQ ID NO: 1834302 - RNA, 19 nt, Artificial Sequence
  Description of Artificial Sequence: Synthetic oligonucleotide
  Antisense strand to SEQ ID NO: 1834301
cuuacuauacgaaugcgaa

SEQ ID NO: 1834303 - RNA, 19 nt, Artificial Sequence
  Description of Artificial Sequence: Synthetic oligonucleotide
  Sense strand starting at position 2671 of SEQ ID NO: 1563820
ccaauuguauaugugcauu

SEQ ID NO: 1834304 - RNA, 19 nt, Artificial Sequence
  Description of Artificial Sequence: Synthetic oligonucleotide
  Antisense strand to SEQ ID NO: 1834303
aaugcacauauacaauugg

SEQ ID NO: 1834305 - RNA, 19 nt, Artificial Sequence
  Description of Artificial Sequence: Synthetic oligonucleotide
  Sense strand starting at position 2797 of SEQ ID NO: 1563820
auguaugucgacuauacgu

SEQ ID NO: 1834306 - RNA, 19 nt, Artificial Sequence
  Description of Artificial Sequence: Synthetic oligonucleotide
  Antisense strand to SEQ ID NO: 1834305
acguauagucgacauacau

SEQ ID NO: 1834307 - RNA, 19 nt, Artificial Sequence
  Description of Artificial Sequence: Synthetic oligonucleotide
  Sense strand starting at position 2802 of SEQ ID NO: 1563820
ugucgacuauacguacuua

SEQ ID NO: 1834308 - RNA, 19 nt, Artificial Sequence
  Description of Artificial Sequence: Synthetic oligonucleotide
  Antisense strand to SEQ ID NO: 1834307
uaaguacguauagucgaca

SEQ ID NO: 1834309 - RNA, 19 nt, Artificial Sequence
  Description of Artificial Sequence: Synthetic oligonucleotide
  Sense strand starting at position 2803 of SEQ ID NO: 1563820
gucgacuauacguacuuau

SEQ ID NO: 1834310 - RNA, 19 nt, Artificial Sequence
  Description of Artificial Sequence: Synthetic oligonucleotide
  Antisense strand to SEQ ID NO: 1834309
auaaguacguauagucgac

SEQ ID NO: 1834311 - RNA, 19 nt, Artificial Sequence
  Description of Artificial Sequence: Synthetic oligonucleotide
  Sense strand starting at position 2837 of SEQ ID NO: 1563820
cuacucauacaauguguga

SEQ ID NO: 1834312 - RNA, 19 nt, Artificial Sequence
  Description of Artificial Sequence: Synthetic oligonucleotide
  Antisense strand to SEQ ID NO: 1834311
ucacacauuguaugaguag

SEQ ID NO: 1834313 - RNA, 19 nt, Artificial Sequence
  Description of Artificial Sequence: Synthetic oligonucleotide
  Sense strand starting at position 2950 of SEQ ID NO: 1563820
uuguuauuagcagaauucu

SEQ ID NO: 1834314 - RNA, 19 nt, Artificial Sequence
  Description of Artificial Sequence: Synthetic oligonucleotide
  Antisense strand to SEQ ID NO: 1834313
agaauucugcuaauaacaa

SEQ ID NO: 1834315 - RNA, 19 nt, Artificial Sequence
  Description of Artificial Sequence: Synthetic oligonucleotide
  Sense strand starting at position 2958 of SEQ ID NO: 1563820
agcagaauucuggagccau

SEQ ID NO: 1834316 - RNA, 19 nt, Artificial Sequence
  Description of Artificial Sequence: Synthetic oligonucleotide
  Antisense strand to SEQ ID NO: 1834315
auggcuccagaauucugcu

SEQ ID NO: 1834317 - RNA, 19 nt, Artificial Sequence
  Description of Artificial Sequence: Synthetic oligonucleotide
  Sense strand starting at position 2970 of SEQ ID NO: 1563820
gagccauggugucucaauc

SEQ ID NO: 1834318 - RNA, 19 nt, Artificial Sequence
  Description of Artificial Sequence: Synthetic oligonucleotide
  Antisense strand to SEQ ID NO: 1834317
gauugagacaccauggcuc

SEQ ID NO: 1834319 - RNA, 19 nt, Artificial Sequence
  Description of Artificial Sequence: Synthetic oligonucleotide
  Sense strand starting at position 3828 of SEQ ID NO: 1563820
ugacuugcuccugacgaga

SEQ ID NO: 1834320 - RNA, 19 nt, Artificial Sequence
  Description of Artificial Sequence: Synthetic oligonucleotide
  Antisense strand to SEQ ID NO: 1834319
ucucgucaggagcaaguca

SEQ ID NO: 1834321 - RNA, 19 nt, Artificial Sequence
  Description of Artificial Sequence: Synthetic oligonucleotide
  Sense strand starting at position 3873 of SEQ ID NO: 1563820
ucaaguauguuuccuguca

SEQ ID NO: 1834322 - RNA, 19 nt, Artificial Sequence
  Description of Artificial Sequence: Synthetic oligonucleotide
  Antisense strand to SEQ ID NO: 1834321
ugacaggaaacauacuuga

SEQ ID NO: 1834323 - RNA, 19 nt, Artificial Sequence
  Description of Artificial Sequence: Synthetic oligonucleotide
  Sense strand starting at position 1 of SEQ ID NO: 1563821
uuagacccucuuugagaaa

SEQ ID NO: 1834324 - RNA, 19 nt, Artificial Sequence
  Description of Artificial Sequence: Synthetic oligonucleotide
  Antisense strand to SEQ ID NO: 1834323
uuucucaaagagggucuaa

SEQ ID NO: 1834325 - RNA, 19 nt, Artificial Sequence
  Description of Artificial Sequence: Synthetic oligonucleotide
  Sense strand starting at position 113 of SEQ ID NO: 1563821
ggaugagaggucuggugaa

SEQ ID NO: 1834326 - RNA, 19 nt, Artificial Sequence
  Description of Artificial Sequence: Synthetic oligonucleotide
  Antisense strand to SEQ ID NO: 1834325
uucaccagaccucucaucc

SEQ ID NO: 1834327 - RNA, 19 nt, Artificial Sequence
  Description of Artificial Sequence: Synthetic oligonucleotide
  Sense strand starting at position 123 of SEQ ID NO: 1563821
ucuggugaauccuuccuca

SEQ ID NO: 1834328 - RNA, 19 nt, Artificial Sequence
  Description of Artificial Sequence: Synthetic oligonucleotide
  Antisense strand to SEQ ID NO: 1834327
ugaggaaggauucaccaga

SEQ ID NO: 1834329 - RNA, 19 nt, Artificial Sequence
  Description of Artificial Sequence: Synthetic oligonucleotide
  Sense strand starting at position 371 of SEQ ID NO: 1563821
gagucucuaucugucggau

SEQ ID NO: 1834330 - RNA, 19 nt, Artificial Sequence
  Description of Artificial Sequence: Synthetic oligonucleotide
  Antisense strand to SEQ ID NO: 1834329
auccgacagauagagacuc

SEQ ID NO: 1834331 - RNA, 19 nt, Artificial Sequence
  Description of Artificial Sequence: Synthetic oligonucleotide
  Sense strand starting at position 383 of SEQ ID NO: 1563821
gucggauucccgaggcuga

SEQ ID NO: 1834332 - RNA, 19 nt, Artificial Sequence
  Description of Artificial Sequence: Synthetic oligonucleotide
  Antisense strand to SEQ ID NO: 1834331
ucagccucgggaauccgac

SEQ ID NO: 1834333 - RNA, 19 nt, Artificial Sequence
  Description of Artificial Sequence: Synthetic oligonucleotide
  Sense strand starting at position 384 of SEQ ID NO: 1563821
ucggauucccgaggcugaa

SEQ ID NO: 1834334 - RNA, 19 nt, Artificial Sequence
  Description of Artificial Sequence: Synthetic oligonucleotide
  Antisense strand to SEQ ID NO: 1834333
uucagccucgggaauccga

SEQ ID NO: 1834335 - RNA, 19 nt, Artificial Sequence
  Description of Artificial Sequence: Synthetic oligonucleotide
  Sense strand starting at position 1035 of SEQ ID NO: 1563821
gagcuucccuggguugaca

SEQ ID NO: 1834336 - RNA, 19 nt, Artificial Sequence
  Description of Artificial Sequence: Synthetic oligonucleotide
  Antisense strand to SEQ ID NO: 1834335
ugucaacccagggaagcuc

SEQ ID NO: 1834337 - RNA, 19 nt, Artificial Sequence
  Description of Artificial Sequence: Synthetic oligonucleotide
  Sense strand starting at position 1067 of SEQ ID NO: 1563821
cggauucugccacgggaga

SEQ ID NO: 1834338 - RNA, 19 nt, Artificial Sequence
  Description of Artificial Sequence: Synthetic oligonucleotide
  Antisense strand to SEQ ID NO: 1834337
ucucccguggcagaauccg

SEQ ID NO: 1834339 - RNA, 19 nt, Artificial Sequence
  Description of Artificial Sequence: Synthetic oligonucleotide
  Sense strand starting at position 1323 of SEQ ID NO: 1563821
ggucuugaguccucccuca

SEQ ID NO: 1834340 - RNA, 19 nt, Artificial Sequence
  Description of Artificial Sequence: Synthetic oligonucleotide
  Antisense strand to SEQ ID NO: 1834339
ugagggaggacucaagacc

SEQ ID NO: 1834341 - RNA, 19 nt, Artificial Sequence
  Description of Artificial Sequence: Synthetic oligonucleotide
  Sense strand starting at position 2383 of SEQ ID NO: 1563821
gaugaagugauguguggga

SEQ ID NO: 1834342 - RNA, 19 nt, Artificial Sequence
  Description of Artificial Sequence: Synthetic oligonucleotide
  Antisense strand to SEQ ID NO: 1834341
ucccacacaucacuucauc

SEQ ID NO: 1834343 - RNA, 19 nt, Artificial Sequence
  Description of Artificial Sequence: Synthetic oligonucleotide
  Sense strand starting at position 2385 of SEQ ID NO: 1563821
ugaagugaugugugggaga

SEQ ID NO: 1834344 - RNA, 19 nt, Artificial Sequence
  Description of Artificial Sequence: Synthetic oligonucleotide
  Antisense strand to SEQ ID NO: 1834343
ucucccacacaucacuuca

SEQ ID NO: 1834345 - RNA, 19 nt, Artificial Sequence
  Description of Artificial Sequence: Synthetic oligonucleotide
  Sense strand starting at position 2387 of SEQ ID NO: 1563821
aagugaugugugggagaug

SEQ ID NO: 1834346 - RNA, 19 nt, Artificial Sequence
  Description of Artificial Sequence: Synthetic oligonucleotide
  Antisense strand to SEQ ID NO: 1834345
caucucccacacaucacuu

SEQ ID NO: 1834347 - RNA, 19 nt, Artificial Sequence
  Description of Artificial Sequence: Synthetic oligonucleotide
  Sense strand starting at position 2398 of SEQ ID NO: 1563821
gggagaugaucuguuuaug

SEQ ID NO: 1834348 - RNA, 19 nt, Artificial Sequence
  Description of Artificial Sequence: Synthetic oligonucleotide
  Antisense strand to SEQ ID NO: 1834347
cauaaacagaucaucuccc

SEQ ID NO: 1834349 - RNA, 19 nt, Artificial Sequence
  Description of Artificial Sequence: Synthetic oligonucleotide
  Sense strand starting at position 2401 of SEQ ID NO: 1563821
agaugaucuguuuauguca

SEQ ID NO: 1834350 - RNA, 19 nt, Artificial Sequence
  Description of Artificial Sequence: Synthetic oligonucleotide
  Antisense strand to SEQ ID NO: 1834349
ugacauaaacagaucaucu

SEQ ID NO: 1834351 - RNA, 19 nt, Artificial Sequence
  Description of Artificial Sequence: Synthetic oligonucleotide
  Sense strand starting at position 2408 of SEQ ID NO: 1563821
cuguuuaugucaccuuuga

SEQ ID NO: 1834352 - RNA, 19 nt, Artificial Sequence
  Description of Artificial Sequence: Synthetic oligonucleotide
  Antisense strand to SEQ ID NO: 1834351
ucaaaggugacauaaacag

SEQ ID NO: 1834353 - RNA, 19 nt, Artificial Sequence
  Description of Artificial Sequence: Synthetic oligonucleotide
  Sense strand starting at position 2412 of SEQ ID NO: 1563821
uuaugucaccuuugagcau

SEQ ID NO: 1834354 - RNA, 19 nt, Artificial Sequence
  Description of Artificial Sequence: Synthetic oligonucleotide
  Antisense strand to SEQ ID NO: 1834353
augcucaaaggugacauaa

SEQ ID NO: 1834355 - RNA, 19 nt, Artificial Sequence
  Description of Artificial Sequence: Synthetic oligonucleotide
  Sense strand starting at position 2507 of SEQ ID NO: 1563821
gauuguaggaccugugaga

SEQ ID NO: 1834356 - RNA, 19 nt, Artificial Sequence
  Description of Artificial Sequence: Synthetic oligonucleotide
  Antisense strand to SEQ ID NO: 1834355
ucucacagguccuacaauc

SEQ ID NO: 1834357 - RNA, 19 nt, Artificial Sequence
  Description of Artificial Sequence: Synthetic oligonucleotide
  Sense strand starting at position 2659 of SEQ ID NO: 1563821
gaagguaucgaacacagca

SEQ ID NO: 1834358 - RNA, 19 nt, Artificial Sequence
  Description of Artificial Sequence: Synthetic oligonucleotide
  Antisense strand to SEQ ID NO: 1834357
ugcuguguucgauaccuuc

SEQ ID NO: 1834359 - RNA, 19 nt, Artificial Sequence
  Description of Artificial Sequence: Synthetic oligonucleotide
  Sense strand starting at position 2736 of SEQ ID NO: 1563821
acuguauguguacauuaua

SEQ ID NO: 1834360 - RNA, 19 nt, Artificial Sequence
  Description of Artificial Sequence: Synthetic oligonucleotide
  Antisense strand to SEQ ID NO: 1834359
uauaauguacacauacagu

SEQ ID NO: 1834361 - RNA, 19 nt, Artificial Sequence
  Description of Artificial Sequence: Synthetic oligonucleotide
  Sense strand starting at position 2743 of SEQ ID NO: 1563821
guguacauuauauauggua

SEQ ID NO: 1834362 - RNA, 19 nt, Artificial Sequence
  Description of Artificial Sequence: Synthetic oligonucleotide
  Antisense strand to SEQ ID NO: 1834361
uaccauauauaauguacac

SEQ ID NO: 1834363 - RNA, 19 nt, Artificial Sequence
  Description of Artificial Sequence: Synthetic oligonucleotide
  Sense strand starting at position 2821 of SEQ ID NO: 1563821
cuaugcuuauauguauaca

SEQ ID NO: 1834364 - RNA, 19 nt, Artificial Sequence
  Description of Artificial Sequence: Synthetic oligonucleotide
  Antisense strand to SEQ ID NO: 1834363
uguauacauauaagcauag

SEQ ID NO: 1834365 - RNA, 19 nt, Artificial Sequence
  Description of Artificial Sequence: Synthetic oligonucleotide
  Sense strand starting at position 2824 of SEQ ID NO: 1563821
ugcuuauauguauacauac

SEQ ID NO: 1834366 - RNA, 19 nt, Artificial Sequence
  Description of Artificial Sequence: Synthetic oligonucleotide
  Antisense strand to SEQ ID NO: 1834365
guauguauacauauaagca

SEQ ID NO: 1834367 - RNA, 19 nt, Artificial Sequence
  Description of Artificial Sequence: Synthetic oligonucleotide
  Sense strand starting at position 2879 of SEQ ID NO: 1563821
uguauauaucuuuagcuac

SEQ ID NO: 1834368 - RNA, 19 nt, Artificial Sequence
  Description of Artificial Sequence: Synthetic oligonucleotide
  Antisense strand to SEQ ID NO: 1834367
guagcuaaagauauauaca

SEQ ID NO: 1834369 - RNA, 19 nt, Artificial Sequence
  Description of Artificial Sequence: Synthetic oligonucleotide
  Sense strand starting at position 2900 of SEQ ID NO: 1563821
auucguuuguauuucuaga

SEQ ID NO: 1834370 - RNA, 19 nt, Artificial Sequence
  Description of Artificial Sequence: Synthetic oligonucleotide
  Antisense strand to SEQ ID NO: 1834369
ucuagaaauacaaacgaau

SEQ ID NO: 1834371 - RNA, 19 nt, Artificial Sequence
  Description of Artificial Sequence: Synthetic oligonucleotide
  Sense strand starting at position 2902 of SEQ ID NO: 1563821
ucguuuguauuucuagacu

SEQ ID NO: 1834372 - RNA, 19 nt, Artificial Sequence
  Description of Artificial Sequence: Synthetic oligonucleotide
  Antisense strand to SEQ ID NO: 1834371
agucuagaaauacaaacga

SEQ ID NO: 1834373 - RNA, 19 nt, Artificial Sequence
  Description of Artificial Sequence: Synthetic oligonucleotide
  Sense strand starting at position 3042 of SEQ ID NO: 1563821
gaaggcuggucuucuccua

SEQ ID NO: 1834374 - RNA, 19 nt, Artificial Sequence
  Description of Artificial Sequence: Synthetic oligonucleotide
  Antisense strand to SEQ ID NO: 1834373
uaggagaagaccagccuuc

SEQ ID NO: 1834375 - RNA, 19 nt, Artificial Sequence
  Description of Artificial Sequence: Synthetic oligonucleotide
  Sense strand starting at position 3097 of SEQ ID NO: 1563821
gagccauagugucucaauc

SEQ ID NO: 1834376 - RNA, 19 nt, Artificial Sequence
  Description of Artificial Sequence: Synthetic oligonucleotide
  Antisense strand to SEQ ID NO: 1834375
gauugagacacuauggcuc

SEQ ID NO: 1834377 - RNA, 19 nt, Artificial Sequence
  Description of Artificial Sequence: Synthetic oligonucleotide
  Sense strand starting at position 3181 of SEQ ID NO: 1563821
cucagauugcgcgaugaug

SEQ ID NO: 1834378 - RNA, 19 nt, Artificial Sequence
  Description of Artificial Sequence: Synthetic oligonucleotide
  Antisense strand to SEQ ID NO: 1834377
caucaucgcgcaaucugag

SEQ ID NO: 1834379 - RNA, 19 nt, Artificial Sequence
  Description of Artificial Sequence: Synthetic oligonucleotide
  Sense strand starting at position 3438 of SEQ ID NO: 1563821
guugucacuuuggcaauga

SEQ ID NO: 1834380 - RNA, 19 nt, Artificial Sequence
  Description of Artificial Sequence: Synthetic oligonucleotide
  Antisense strand to SEQ ID NO: 1834379
ucauugccaaagugacaac

SEQ ID NO: 1834381 - RNA, 19 nt, Artificial Sequence
  Description of Artificial Sequence: Synthetic oligonucleotide
  Sense strand starting at position 3442 of SEQ ID NO: 1563821
ucacuuuggcaaugacagu

SEQ ID NO: 1834382 - RNA, 19 nt, Artificial Sequence
  Description of Artificial Sequence: Synthetic oligonucleotide
  Antisense strand to SEQ ID NO: 1834381
acugucauugccaaaguga

SEQ ID NO: 1834383 - RNA, 19 nt, Artificial Sequence
  Description of Artificial Sequence: Synthetic oligonucleotide
  Sense strand starting at position 3464 of SEQ ID NO: 1563821
ggcacucacucuguauuua

SEQ ID NO: 1834384 - RNA, 19 nt, Artificial Sequence
  Description of Artificial Sequence: Synthetic oligonucleotide
  Antisense strand to SEQ ID NO: 1834383
uaaauacagagugagugcc

SEQ ID NO: 1834385 - RNA, 19 nt, Artificial Sequence
  Description of Artificial Sequence: Synthetic oligonucleotide
  Sense strand starting at position 3556 of SEQ ID NO: 1563821
gagauuauuuccugagucu

SEQ ID NO: 1834386 - RNA, 19 nt, Artificial Sequence
  Description of Artificial Sequence: Synthetic oligonucleotide
  Antisense strand to SEQ ID NO: 1834385
agacucaggaaauaaucuc

SEQ ID NO: 1834387 - RNA, 19 nt, Artificial Sequence
  Description of Artificial Sequence: Synthetic oligonucleotide
  Sense strand starting at position 3567 of SEQ ID NO: 1563821
cugagucuaucagcaacuu

SEQ ID NO: 1834388 - RNA, 19 nt, Artificial Sequence
  Description of Artificial Sequence: Synthetic oligonucleotide
  Antisense strand to SEQ ID NO: 1834387
aaguugcugauagacucag

SEQ ID NO: 1834389 - RNA, 19 nt, Artificial Sequence
  Description of Artificial Sequence: Synthetic oligonucleotide
  Sense strand starting at position 3568 of SEQ ID NO: 1563821
ugagucuaucagcaacuuu

SEQ ID NO: 1834390 - RNA, 19 nt, Artificial Sequence
  Description of Artificial Sequence: Synthetic oligonucleotide
  Antisense strand to SEQ ID NO: 1834389
aaaguugcugauagacuca

SEQ ID NO: 1834391 - RNA, 19 nt, Artificial Sequence
  Description of Artificial Sequence: Synthetic oligonucleotide
  Sense strand starting at position 3610 of SEQ ID NO: 1563821
uugucaggcucuucuuauu

SEQ ID NO: 1834392 - RNA, 19 nt, Artificial Sequence
  Description of Artificial Sequence: Synthetic oligonucleotide
  Antisense strand to SEQ ID NO: 1834391
aauaagaagagccugacaa

SEQ ID NO: 1834393 - RNA, 19 nt, Artificial Sequence
  Description of Artificial Sequence: Synthetic oligonucleotide
  Sense strand starting at position 3730 of SEQ ID NO: 1563821
ugaccuucuguaugauguu

SEQ ID NO: 1834394 - RNA, 19 nt, Artificial Sequence
  Description of Artificial Sequence: Synthetic oligonucleotide
  Antisense strand to SEQ ID NO: 1834393
aacaucauacagaagguca

SEQ ID NO: 1834395 - RNA, 19 nt, Artificial Sequence
  Description of Artificial Sequence: Synthetic oligonucleotide
  Sense strand starting at position 3780 of SEQ ID NO: 1563821
augugucuauuccuuugaa

SEQ ID NO: 1834396 - RNA, 19 nt, Artificial Sequence
  Description of Artificial Sequence: Synthetic oligonucleotide
  Antisense strand to SEQ ID NO: 1834395
uucaaaggaauagacacau

SEQ ID NO: 1834397 - RNA, 19 nt, Artificial Sequence
  Description of Artificial Sequence: Synthetic oligonucleotide
  Sense strand starting at position 3781 of SEQ ID NO: 1563821
ugugucuauuccuuugaau

SEQ ID NO: 1834398 - RNA, 19 nt, Artificial Sequence
  Description of Artificial Sequence: Synthetic oligonucleotide
  Antisense strand to SEQ ID NO: 1834397
auucaaaggaauagacaca

SEQ ID NO: 1834399 - RNA, 19 nt, Artificial Sequence
  Description of Artificial Sequence: Synthetic oligonucleotide
  Sense strand starting at position 3949 of SEQ ID NO: 1563821
cgacuugucacugccguga

SEQ ID NO: 1834400 - RNA, 19 nt, Artificial Sequence
  Description of Artificial Sequence: Synthetic oligonucleotide
  Antisense strand to SEQ ID NO: 1834399
ucacggcagugacaagucg

SEQ ID NO: 1834401 - RNA, 19 nt, Artificial Sequence
  Description of Artificial Sequence: Synthetic oligonucleotide
  Sense strand starting at position 3970 of SEQ ID NO: 1563821
ggcagagcuucugacauuu

SEQ ID NO: 1834402 - RNA, 19 nt, Artificial Sequence
  Description of Artificial Sequence: Synthetic oligonucleotide
  Antisense strand to SEQ ID NO: 1834401
aaaugucagaagcucugcc

SEQ ID NO: 1834403 - RNA, 19 nt, Artificial Sequence
  Description of Artificial Sequence: Synthetic oligonucleotide
  Sense strand starting at position 1 of SEQ ID NO: 1563822
uuagacccucuuugagaaa

SEQ ID NO: 1834404 - RNA, 19 nt, Artificial Sequence
  Description of Artificial Sequence: Synthetic oligonucleotide
  Antisense strand to SEQ ID NO: 1834403
uuucucaaagagggucuaa

SEQ ID NO: 1834405 - RNA, 19 nt, Artificial Sequence
  Description of Artificial Sequence: Synthetic oligonucleotide
  Sense strand starting at position 113 of SEQ ID NO: 1563822
ggaugagaggucuggugaa

SEQ ID NO: 1834406 - RNA, 19 nt, Artificial Sequence
  Description of Artificial Sequence: Synthetic oligonucleotide
  Antisense strand to SEQ ID NO: 1834405
uucaccagaccucucaucc

SEQ ID NO: 1834407 - RNA, 19 nt, Artificial Sequence
  Description of Artificial Sequence: Synthetic oligonucleotide
  Sense strand starting at position 123 of SEQ ID NO: 1563822
ucuggugaauccuuccuca

SEQ ID NO: 1834408 - RNA, 19 nt, Artificial Sequence
  Description of Artificial Sequence: Synthetic oligonucleotide
  Antisense strand to SEQ ID NO: 1834407
ugaggaaggauucaccaga

SEQ ID NO: 1834409 - RNA, 19 nt, Artificial Sequence
  Description of Artificial Sequence: Synthetic oligonucleotide
  Sense strand starting at position 383 of SEQ ID NO: 1563822
gucggauucccgaggcuga

SEQ ID NO: 1834410 - RNA, 19 nt, Artificial Sequence
  Description of Artificial Sequence: Synthetic oligonucleotide
  Antisense strand to SEQ ID NO: 1834409
ucagccucgggaauccgac

SEQ ID NO: 1834411 - RNA, 19 nt, Artificial Sequence
  Description of Artificial Sequence: Synthetic oligonucleotide
  Sense strand starting at position 384 of SEQ ID NO: 1563822
ucggauucccgaggcugaa

SEQ ID NO: 1834412 - RNA, 19 nt, Artificial Sequence
  Description of Artificial Sequence: Synthetic oligonucleotide
  Antisense strand to SEQ ID NO: 1834411
uucagccucgggaauccga

SEQ ID NO: 1834413 - RNA, 19 nt, Artificial Sequence
  Description of Artificial Sequence: Synthetic oligonucleotide
  Sense strand starting at position 1035 of SEQ ID NO: 1563822
gagcuucccuggguugaca

SEQ ID NO: 1834414 - RNA, 19 nt, Artificial Sequence
  Description of Artificial Sequence: Synthetic oligonucleotide
  Antisense strand to SEQ ID NO: 1834413
ugucaacccagggaagcuc

SEQ ID NO: 1834415 - RNA, 19 nt, Artificial Sequence
  Description of Artificial Sequence: Synthetic oligonucleotide
  Sense strand starting at position 1067 of SEQ ID NO: 1563822
cggauucugccacgggaga

SEQ ID NO: 1834416 - RNA, 19 nt, Artificial Sequence
  Description of Artificial Sequence: Synthetic oligonucleotide
  Antisense strand to SEQ ID NO: 1834415
ucucccguggcagaauccg

SEQ ID NO: 1834417 - RNA, 19 nt, Artificial Sequence
  Description of Artificial Sequence: Synthetic oligonucleotide
  Sense strand starting at position 1324 of SEQ ID NO: 1563822
ggucuugaguccucccuca

SEQ ID NO: 1834418 - RNA, 19 nt, Artificial Sequence
  Description of Artificial Sequence: Synthetic oligonucleotide
  Antisense strand to SEQ ID NO: 1834417
ugagggaggacucaagacc

SEQ ID NO: 1834419 - RNA, 19 nt, Artificial Sequence
  Description of Artificial Sequence: Synthetic oligonucleotide
  Sense strand starting at position 2384 of SEQ ID NO: 1563822
gaugaagugauguguggga

SEQ ID NO: 1834420 - RNA, 19 nt, Artificial Sequence
  Description of Artificial Sequence: Synthetic oligonucleotide
  Antisense strand to SEQ ID NO: 1834419
ucccacacaucacuucauc

SEQ ID NO: 1834421 - RNA, 19 nt, Artificial Sequence
  Description of Artificial Sequence: Synthetic oligonucleotide
  Sense strand starting at position 2386 of SEQ ID NO: 1563822
ugaagugaugugugggaga

SEQ ID NO: 1834422 - RNA, 19 nt, Artificial Sequence
  Description of Artificial Sequence: Synthetic oligonucleotide
  Antisense strand to SEQ ID NO: 1834421
ucucccacacaucacuuca

SEQ ID NO: 1834423 - RNA, 19 nt, Artificial Sequence
  Description of Artificial Sequence: Synthetic oligonucleotide
  Sense strand starting at position 2388 of SEQ ID NO: 1563822
aagugaugugugggagaug

SEQ ID NO: 1834424 - RNA, 19 nt, Artificial Sequence
  Description of Artificial Sequence: Synthetic oligonucleotide
  Antisense strand to SEQ ID NO: 1834423
caucucccacacaucacuu

SEQ ID NO: 1834425 - RNA, 19 nt, Artificial Sequence
  Description of Artificial Sequence: Synthetic oligonucleotide
  Sense strand starting at position 2399 of SEQ ID NO: 1563822
gggagaugaucuguuuaug

SEQ ID NO: 1834426 - RNA, 19 nt, Artificial Sequence
  Description of Artificial Sequence: Synthetic oligonucleotide
  Antisense strand to SEQ ID NO: 1834425
cauaaacagaucaucuccc

SEQ ID NO: 1834427 - RNA, 19 nt, Artificial Sequence
  Description of Artificial Sequence: Synthetic oligonucleotide
  Sense strand starting at position 2402 of SEQ ID NO: 1563822
agaugaucuguuuauguca

SEQ ID NO: 1834428 - RNA, 19 nt, Artificial Sequence
  Description of Artificial Sequence: Synthetic oligonucleotide
  Antisense strand to SEQ ID NO: 1834427
ugacauaaacagaucaucu

SEQ ID NO: 1834429 - RNA, 19 nt, Artificial Sequence
  Description of Artificial Sequence: Synthetic oligonucleotide
  Sense strand starting at position 2409 of SEQ ID NO: 1563822
cuguuuaugucaccuuuga

SEQ ID NO: 1834430 - RNA, 19 nt, Artificial Sequence
  Description of Artificial Sequence: Synthetic oligonucleotide
  Antisense strand to SEQ ID NO: 1834429
ucaaaggugacauaaacag

SEQ ID NO: 1834431 - RNA, 19 nt, Artificial Sequence
  Description of Artificial Sequence: Synthetic oligonucleotide
  Sense strand starting at position 2413 of SEQ ID NO: 1563822
uuaugucaccuuugagcau

SEQ ID NO: 1834432 - RNA, 19 nt, Artificial Sequence
  Description of Artificial Sequence: Synthetic oligonucleotide
  Antisense strand to SEQ ID NO: 1834431
augcucaaaggugacauaa

SEQ ID NO: 1834433 - RNA, 19 nt, Artificial Sequence
  Description of Artificial Sequence: Synthetic oligonucleotide
  Sense strand starting at position 2508 of SEQ ID NO: 1563822
gauuguaggaccugugaga

SEQ ID NO: 1834434 - RNA, 19 nt, Artificial Sequence
  Description of Artificial Sequence: Synthetic oligonucleotide
  Antisense strand to SEQ ID NO: 1834433
ucucacagguccuacaauc

SEQ ID NO: 1834435 - RNA, 19 nt, Artificial Sequence
  Description of Artificial Sequence: Synthetic oligonucleotide
  Sense strand starting at position 2660 of SEQ ID NO: 1563822
gaagguaucgaacacagca

SEQ ID NO: 1834436 - RNA, 19 nt, Artificial Sequence
  Description of Artificial Sequence: Synthetic oligonucleotide
  Antisense strand to SEQ ID NO: 1834435
ugcuguguucgauaccuuc

SEQ ID NO: 1834437 - RNA, 19 nt, Artificial Sequence
  Description of Artificial Sequence: Synthetic oligonucleotide
  Sense strand starting at position 2822 of SEQ ID NO: 1563822
cuaugcuuauauguauaca

SEQ ID NO: 1834438 - RNA, 19 nt, Artificial Sequence
  Description of Artificial Sequence: Synthetic oligonucleotide
  Antisense strand to SEQ ID NO: 1834437
uguauacauauaagcauag

SEQ ID NO: 1834439 - RNA, 19 nt, Artificial Sequence
  Description of Artificial Sequence: Synthetic oligonucleotide
  Sense strand starting at position 2825 of SEQ ID NO: 1563822
ugcuuauauguauacauac

SEQ ID NO: 1834440 - RNA, 19 nt, Artificial Sequence
  Description of Artificial Sequence: Synthetic oligonucleotide
  Antisense strand to SEQ ID NO: 1834439
guauguauacauauaagca

SEQ ID NO: 1834441 - RNA, 19 nt, Artificial Sequence
  Description of Artificial Sequence: Synthetic oligonucleotide
  Sense strand starting at position 2880 of SEQ ID NO: 1563822
uguauauaucuuuagcuac

SEQ ID NO: 1834442 - RNA, 19 nt, Artificial Sequence
  Description of Artificial Sequence: Synthetic oligonucleotide
  Antisense strand to SEQ ID NO: 1834441
guagcuaaagauauauaca

SEQ ID NO: 1834443 - RNA, 19 nt, Artificial Sequence
  Description of Artificial Sequence: Synthetic oligonucleotide
  Sense strand starting at position 2893 of SEQ ID NO: 1563822
agcuacauauucguuugua

SEQ ID NO: 1834444 - RNA, 19 nt, Artificial Sequence
  Description of Artificial Sequence: Synthetic oligonucleotide
  Antisense strand to SEQ ID NO: 1834443
uacaaacgaauauguagcu

SEQ ID NO: 1834445 - RNA, 19 nt, Artificial Sequence
  Description of Artificial Sequence: Synthetic oligonucleotide
  Sense strand starting at position 2894 of SEQ ID NO: 1563822
gcuacauauucguuuguau

SEQ ID NO: 1834446 - RNA, 19 nt, Artificial Sequence
  Description of Artificial Sequence: Synthetic oligonucleotide
  Antisense strand to SEQ ID NO: 1834445
auacaaacgaauauguagc

SEQ ID NO: 1834447 - RNA, 19 nt, Artificial Sequence
  Description of Artificial Sequence: Synthetic oligonucleotide
  Sense strand starting at position 2901 of SEQ ID NO: 1563822
auucguuuguauuucuaga

SEQ ID NO: 1834448 - RNA, 19 nt, Artificial Sequence
  Description of Artificial Sequence: Synthetic oligonucleotide
  Antisense strand to SEQ ID NO: 1834447
ucuagaaauacaaacgaau

SEQ ID NO: 1834449 - RNA, 19 nt, Artificial Sequence
  Description of Artificial Sequence: Synthetic oligonucleotide
  Sense strand starting at position 2903 of SEQ ID NO: 1563822
ucguuuguauuucuagacu

SEQ ID NO: 1834450 - RNA, 19 nt, Artificial Sequence
  Description of Artificial Sequence: Synthetic oligonucleotide
  Antisense strand to SEQ ID NO: 1834449
agucuagaaauacaaacga

SEQ ID NO: 1834451 - RNA, 19 nt, Artificial Sequence
  Description of Artificial Sequence: Synthetic oligonucleotide
  Sense strand starting at position 3043 of SEQ ID NO: 1563822
gaaggcuggucuucuccua

SEQ ID NO: 1834452 - RNA, 19 nt, Artificial Sequence
  Description of Artificial Sequence: Synthetic oligonucleotide
  Antisense strand to SEQ ID NO: 1834451
uaggagaagaccagccuuc

SEQ ID NO: 1834453 - RNA, 19 nt, Artificial Sequence
  Description of Artificial Sequence: Synthetic oligonucleotide
  Sense strand starting at position 3098 of SEQ ID NO: 1563822
gagccauagugucucaauc

SEQ ID NO: 1834454 - RNA, 19 nt, Artificial Sequence
  Description of Artificial Sequence: Synthetic oligonucleotide
  Antisense strand to SEQ ID NO: 1834453
gauugagacacuauggcuc

SEQ ID NO: 1834455 - RNA, 19 nt, Artificial Sequence
  Description of Artificial Sequence: Synthetic oligonucleotide
  Sense strand starting at position 3182 of SEQ ID NO: 1563822
cucagauugcgcgaugaug

SEQ ID NO: 1834456 - RNA, 19 nt, Artificial Sequence
  Description of Artificial Sequence: Synthetic oligonucleotide
  Antisense strand to SEQ ID NO: 1834455
caucaucgcgcaaucugag

SEQ ID NO: 1834457 - RNA, 19 nt, Artificial Sequence
  Description of Artificial Sequence: Synthetic oligonucleotide
  Sense strand starting at position 3431 of SEQ ID NO: 1563822
ugagcuugguugucacuuu

SEQ ID NO: 1834458 - RNA, 19 nt, Artificial Sequence
  Description of Artificial Sequence: Synthetic oligonucleotide
  Antisense strand to SEQ ID NO: 1834457
aaagugacaaccaagcuca

SEQ ID NO: 1834459 - RNA, 19 nt, Artificial Sequence
  Description of Artificial Sequence: Synthetic oligonucleotide
  Sense strand starting at position 3439 of SEQ ID NO: 1563822
guugucacuuuggcaauga

SEQ ID NO: 1834460 - RNA, 19 nt, Artificial Sequence
  Description of Artificial Sequence: Synthetic oligonucleotide
  Antisense strand to SEQ ID NO: 1834459
ucauugccaaagugacaac

SEQ ID NO: 1834461 - RNA, 19 nt, Artificial Sequence
  Description of Artificial Sequence: Synthetic oligonucleotide
  Sense strand starting at position 3443 of SEQ ID NO: 1563822
ucacuuuggcaaugacagu

SEQ ID NO: 1834462 - RNA, 19 nt, Artificial Sequence
  Description of Artificial Sequence: Synthetic oligonucleotide
  Antisense strand to SEQ ID NO: 1834461
acugucauugccaaaguga

SEQ ID NO: 1834463 - RNA, 19 nt, Artificial Sequence
  Description of Artificial Sequence: Synthetic oligonucleotide
  Sense strand starting at position 3465 of SEQ ID NO: 1563822
ggcacucacucuguauuua

SEQ ID NO: 1834464 - RNA, 19 nt, Artificial Sequence
  Description of Artificial Sequence: Synthetic oligonucleotide
  Antisense strand to SEQ ID NO: 1834463
uaaauacagagugagugcc

SEQ ID NO: 1834465 - RNA, 19 nt, Artificial Sequence
  Description of Artificial Sequence: Synthetic oligonucleotide
  Sense strand starting at position 3568 of SEQ ID NO: 1563822
cugagucuaucagcaacuu

SEQ ID NO: 1834466 - RNA, 19 nt, Artificial Sequence
  Description of Artificial Sequence: Synthetic oligonucleotide
  Antisense strand to SEQ ID NO: 1834465
aaguugcugauagacucag

SEQ ID NO: 1834467 - RNA, 19 nt, Artificial Sequence
  Description of Artificial Sequence: Synthetic oligonucleotide
  Sense strand starting at position 3569 of SEQ ID NO: 1563822
ugagucuaucagcaacuuu

SEQ ID NO: 1834468 - RNA, 19 nt, Artificial Sequence
  Description of Artificial Sequence: Synthetic oligonucleotide
  Antisense strand to SEQ ID NO: 1834467
aaaguugcugauagacuca

SEQ ID NO: 1834469 - RNA, 19 nt, Artificial Sequence
  Description of Artificial Sequence: Synthetic oligonucleotide
  Sense strand starting at position 3586 of SEQ ID NO: 1563822
uugcacaguugcuuccaua

SEQ ID NO: 1834470 - RNA, 19 nt, Artificial Sequence
  Description of Artificial Sequence: Synthetic oligonucleotide
  Antisense strand to SEQ ID NO: 1834469
uauggaagcaacugugcaa

SEQ ID NO: 1834471 - RNA, 19 nt, Artificial Sequence
  Description of Artificial Sequence: Synthetic oligonucleotide
  Sense strand starting at position 3611 of SEQ ID NO: 1563822
uugucaggcucuucuuauu

SEQ ID NO: 1834472 - RNA, 19 nt, Artificial Sequence
  Description of Artificial Sequence: Synthetic oligonucleotide
  Antisense strand to SEQ ID NO: 1834471
aauaagaagagccugacaa

SEQ ID NO: 1834473 - RNA, 19 nt, Artificial Sequence
  Description of Artificial Sequence: Synthetic oligonucleotide
  Sense strand starting at position 3731 of SEQ ID NO: 1563822
ugaccuucuguaugauguu

SEQ ID NO: 1834474 - RNA, 19 nt, Artificial Sequence
  Description of Artificial Sequence: Synthetic oligonucleotide
  Antisense strand to SEQ ID NO: 1834473
aacaucauacagaagguca

SEQ ID NO: 1834475 - RNA, 19 nt, Artificial Sequence
  Description of Artificial Sequence: Synthetic oligonucleotide
  Sense strand starting at position 3938 of SEQ ID NO: 1563822
agcauaugucaacgacuug

SEQ ID NO: 1834476 - RNA, 19 nt, Artificial Sequence
  Description of Artificial Sequence: Synthetic oligonucleotide
  Antisense strand to SEQ ID NO: 1834475
caagucguugacauaugcu

SEQ ID NO: 1834477 - RNA, 19 nt, Artificial Sequence
  Description of Artificial Sequence: Synthetic oligonucleotide
  Sense strand starting at position 3939 of SEQ ID NO: 1563822
gcauaugucaacgacuugu

SEQ ID NO: 1834478 - RNA, 19 nt, Artificial Sequence
  Description of Artificial Sequence: Synthetic oligonucleotide
  Antisense strand to SEQ ID NO: 1834477
acaagucguugacauaugc

SEQ ID NO: 1834479 - RNA, 19 nt, Artificial Sequence
  Description of Artificial Sequence: Synthetic oligonucleotide
  Sense strand starting at position 3950 of SEQ ID NO: 1563822
cgacuugucacugccguga

SEQ ID NO: 1834480 - RNA, 19 nt, Artificial Sequence
  Description of Artificial Sequence: Synthetic oligonucleotide
  Antisense strand to SEQ ID NO: 1834479
ucacggcagugacaagucg

SEQ ID NO: 1834481 - RNA, 19 nt, Artificial Sequence
  Description of Artificial Sequence: Synthetic oligonucleotide
  Sense strand starting at position 3971 of SEQ ID NO: 1563822
ggcagagcuucugacauuu

SEQ ID NO: 1834482 - RNA, 19 nt, Artificial Sequence
  Description of Artificial Sequence: Synthetic oligonucleotide
  Antisense strand to SEQ ID NO: 1834481
aaaugucagaagcucugcc

SEQ ID NO: 1834483 - RNA, 19 nt, Artificial Sequence
  Description of Artificial Sequence: Synthetic oligonucleotide
  Sense strand starting at position 106 of SEQ ID NO: 1563823
ggaugagaggucuggugaa

SEQ ID NO: 1834484 - RNA, 19 nt, Artificial Sequence
  Description of Artificial Sequence: Synthetic oligonucleotide
  Antisense strand to SEQ ID NO: 1834483
uucaccagaccucucaucc

SEQ ID NO: 1834485 - RNA, 19 nt, Artificial Sequence
  Description of Artificial Sequence: Synthetic oligonucleotide
  Sense strand starting at position 116 of SEQ ID NO: 1563823
ucuggugaauccuuccuca

SEQ ID NO: 1834486 - RNA, 19 nt, Artificial Sequence
  Description of Artificial Sequence: Synthetic oligonucleotide
  Antisense strand to SEQ ID NO: 1834485
ugaggaaggauucaccaga

SEQ ID NO: 1834487 - RNA, 19 nt, Artificial Sequence
  Description of Artificial Sequence: Synthetic oligonucleotide
  Sense strand starting at position 364 of SEQ ID NO: 1563823
gagucucuaucugucggau

SEQ ID NO: 1834488 - RNA, 19 nt, Artificial Sequence
  Description of Artificial Sequence: Synthetic oligonucleotide
  Antisense strand to SEQ ID NO: 1834487
auccgacagauagagacuc

SEQ ID NO: 1834489 - RNA, 19 nt, Artificial Sequence
  Description of Artificial Sequence: Synthetic oligonucleotide
  Sense strand starting at position 376 of SEQ ID NO: 1563823
gucggauucccgaggcuga

SEQ ID NO: 1834490 - RNA, 19 nt, Artificial Sequence
  Description of Artificial Sequence: Synthetic oligonucleotide
  Antisense strand to SEQ ID NO: 1834489
ucagccucgggaauccgac

SEQ ID NO: 1834491 - RNA, 19 nt, Artificial Sequence
  Description of Artificial Sequence: Synthetic oligonucleotide
  Sense strand starting at position 377 of SEQ ID NO: 1563823
ucggauucccgaggcugaa

SEQ ID NO: 1834492 - RNA, 19 nt, Artificial Sequence
  Description of Artificial Sequence: Synthetic oligonucleotide
  Antisense strand to SEQ ID NO: 1834491
uucagccucgggaauccga

SEQ ID NO: 1834493 - RNA, 19 nt, Artificial Sequence
  Description of Artificial Sequence: Synthetic oligonucleotide
  Sense strand starting at position 1028 of SEQ ID NO: 1563823
gagcuucccuggguugaca

SEQ ID NO: 1834494 - RNA, 19 nt, Artificial Sequence
  Description of Artificial Sequence: Synthetic oligonucleotide
  Antisense strand to SEQ ID NO: 1834493
ugucaacccagggaagcuc

SEQ ID NO: 1834495 - RNA, 19 nt, Artificial Sequence
  Description of Artificial Sequence: Synthetic oligonucleotide
  Sense strand starting at position 1060 of SEQ ID NO: 1563823
cggauucugccacgggaga

SEQ ID NO: 1834496 - RNA, 19 nt, Artificial Sequence
  Description of Artificial Sequence: Synthetic oligonucleotide
  Antisense strand to SEQ ID NO: 1834495
ucucccguggcagaauccg

SEQ ID NO: 1834497 - RNA, 19 nt, Artificial Sequence
  Description of Artificial Sequence: Synthetic oligonucleotide
  Sense strand starting at position 1316 of SEQ ID NO: 1563823
ggucuugaguccucccuca

SEQ ID NO: 1834498 - RNA, 19 nt, Artificial Sequence
  Description of Artificial Sequence: Synthetic oligonucleotide
  Antisense strand to SEQ ID NO: 1834497
ugagggaggacucaagacc

SEQ ID NO: 1834499 - RNA, 19 nt, Artificial Sequence
  Description of Artificial Sequence: Synthetic oligonucleotide
  Sense strand starting at position 2376 of SEQ ID NO: 1563823
gaugaagugauguguggga

SEQ ID NO: 1834500 - RNA, 19 nt, Artificial Sequence
  Description of Artificial Sequence: Synthetic oligonucleotide
  Antisense strand to SEQ ID NO: 1834499
ucccacacaucacuucauc

SEQ ID NO: 1834501 - RNA, 19 nt, Artificial Sequence
  Description of Artificial Sequence: Synthetic oligonucleotide
  Sense strand starting at position 2378 of SEQ ID NO: 1563823
ugaagugaugugugggaga

SEQ ID NO: 1834502 - RNA, 19 nt, Artificial Sequence
  Description of Artificial Sequence: Synthetic oligonucleotide
  Antisense strand to SEQ ID NO: 1834501
ucucccacacaucacuuca

SEQ ID NO: 1834503 - RNA, 19 nt, Artificial Sequence
  Description of Artificial Sequence: Synthetic oligonucleotide
  Sense strand starting at position 2380 of SEQ ID NO: 1563823
aagugaugugugggagaug

SEQ ID NO: 1834504 - RNA, 19 nt, Artificial Sequence
  Description of Artificial Sequence: Synthetic oligonucleotide
  Antisense strand to SEQ ID NO: 1834503
caucucccacacaucacuu

SEQ ID NO: 1834505 - RNA, 19 nt, Artificial Sequence
  Description of Artificial Sequence: Synthetic oligonucleotide
  Sense strand starting at position 2391 of SEQ ID NO: 1563823
gggagaugaucuguuuaug

SEQ ID NO: 1834506 - RNA, 19 nt, Artificial Sequence
  Description of Artificial Sequence: Synthetic oligonucleotide
  Antisense strand to SEQ ID NO: 1834505
cauaaacagaucaucuccc

SEQ ID NO: 1834507 - RNA, 19 nt, Artificial Sequence
  Description of Artificial Sequence: Synthetic oligonucleotide
  Sense strand starting at position 2394 of SEQ ID NO: 1563823
agaugaucuguuuauguca

SEQ ID NO: 1834508 - RNA, 19 nt, Artificial Sequence
  Description of Artificial Sequence: Synthetic oligonucleotide
  Antisense strand to SEQ ID NO: 1834507
ugacauaaacagaucaucu

SEQ ID NO: 1834509 - RNA, 19 nt, Artificial Sequence
  Description of Artificial Sequence: Synthetic oligonucleotide
  Sense strand starting at position 2401 of SEQ ID NO: 1563823
cuguuuaugucaccuuuga

SEQ ID NO: 1834510 - RNA, 19 nt, Artificial Sequence
  Description of Artificial Sequence: Synthetic oligonucleotide
  Antisense strand to SEQ ID NO: 1834509
ucaaaggugacauaaacag

SEQ ID NO: 1834511 - RNA, 19 nt, Artificial Sequence
  Description of Artificial Sequence: Synthetic oligonucleotide
  Sense strand starting at position 2405 of SEQ ID NO: 1563823
uuaugucaccuuugagcau

SEQ ID NO: 1834512 - RNA, 19 nt, Artificial Sequence
  Description of Artificial Sequence: Synthetic oligonucleotide
  Antisense strand to SEQ ID NO: 1834511
augcucaaaggugacauaa

SEQ ID NO: 1834513 - RNA, 19 nt, Artificial Sequence
  Description of Artificial Sequence: Synthetic oligonucleotide
  Sense strand starting at position 2500 of SEQ ID NO: 1563823
gauuguaggaccugugaga

SEQ ID NO: 1834514 - RNA, 19 nt, Artificial Sequence
  Description of Artificial Sequence: Synthetic oligonucleotide
  Antisense strand to SEQ ID NO: 1834513
ucucacagguccuacaauc

SEQ ID NO: 1834515 - RNA, 19 nt, Artificial Sequence
  Description of Artificial Sequence: Synthetic oligonucleotide
  Sense strand starting at position 2652 of SEQ ID NO: 1563823
gaagguaucgaacacagca

SEQ ID NO: 1834516 - RNA, 19 nt, Artificial Sequence
  Description of Artificial Sequence: Synthetic oligonucleotide
  Antisense strand to SEQ ID NO: 1834515
ugcuguguucgauaccuuc

SEQ ID NO: 1834517 - RNA, 19 nt, Artificial Sequence
  Description of Artificial Sequence: Synthetic oligonucleotide
  Sense strand starting at position 2729 of SEQ ID NO: 1563823
acuguauguguacauuaua

SEQ ID NO: 1834518 - RNA, 19 nt, Artificial Sequence
  Description of Artificial Sequence: Synthetic oligonucleotide
  Antisense strand to SEQ ID NO: 1834517
uauaauguacacauacagu

SEQ ID NO: 1834519 - RNA, 19 nt, Artificial Sequence
  Description of Artificial Sequence: Synthetic oligonucleotide
  Sense strand starting at position 2736 of SEQ ID NO: 1563823
guguacauuauauauggua

SEQ ID NO: 1834520 - RNA, 19 nt, Artificial Sequence
  Description of Artificial Sequence: Synthetic oligonucleotide
  Antisense strand to SEQ ID NO: 1834519
uaccauauauaauguacac

SEQ ID NO: 1834521 - RNA, 19 nt, Artificial Sequence
  Description of Artificial Sequence: Synthetic oligonucleotide
  Sense strand starting at position 2814 of SEQ ID NO: 1563823
cuaugcuuauauguauaca

SEQ ID NO: 1834522 - RNA, 19 nt, Artificial Sequence
  Description of Artificial Sequence: Synthetic oligonucleotide
  Antisense strand to SEQ ID NO: 1834521
uguauacauauaagcauag

SEQ ID NO: 1834523 - RNA, 19 nt, Artificial Sequence
  Description of Artificial Sequence: Synthetic oligonucleotide
  Sense strand starting at position 2817 of SEQ ID NO: 1563823
ugcuuauauguauacauac

SEQ ID NO: 1834524 - RNA, 19 nt, Artificial Sequence
  Description of Artificial Sequence: Synthetic oligonucleotide
  Antisense strand to SEQ ID NO: 1834523
guauguauacauauaagca

SEQ ID NO: 1834525 - RNA, 19 nt, Artificial Sequence
  Description of Artificial Sequence: Synthetic oligonucleotide
  Sense strand starting at position 2872 of SEQ ID NO: 1563823
uguauauaucuuuagcuac

SEQ ID NO: 1834526 - RNA, 19 nt, Artificial Sequence
  Description of Artificial Sequence: Synthetic oligonucleotide
  Antisense strand to SEQ ID NO: 1834525
guagcuaaagauauauaca

SEQ ID NO: 1834527 - RNA, 19 nt, Artificial Sequence
  Description of Artificial Sequence: Synthetic oligonucleotide
  Sense strand starting at position 2893 of SEQ ID NO: 1563823
auucguuuguauuucuaga

SEQ ID NO: 1834528 - RNA, 19 nt, Artificial Sequence
  Description of Artificial Sequence: Synthetic oligonucleotide
  Antisense strand to SEQ ID NO: 1834527
ucuagaaauacaaacgaau

SEQ ID NO: 1834529 - RNA, 19 nt, Artificial Sequence
  Description of Artificial Sequence: Synthetic oligonucleotide
  Sense strand starting at position 2895 of SEQ ID NO: 1563823
ucguuuguauuucuagacu

SEQ ID NO: 1834530 - RNA, 19 nt, Artificial Sequence
  Description of Artificial Sequence: Synthetic oligonucleotide
  Antisense strand to SEQ ID NO: 1834529
agucuagaaauacaaacga

SEQ ID NO: 1834531 - RNA, 19 nt, Artificial Sequence
  Description of Artificial Sequence: Synthetic oligonucleotide
  Sense strand starting at position 3035 of SEQ ID NO: 1563823
gaaggcuggucuucuccua

SEQ ID NO: 1834532 - RNA, 19 nt, Artificial Sequence
  Description of Artificial Sequence: Synthetic oligonucleotide
  Antisense strand to SEQ ID NO: 1834531
uaggagaagaccagccuuc

SEQ ID NO: 1834533 - RNA, 19 nt, Artificial Sequence
  Description of Artificial Sequence: Synthetic oligonucleotide
  Sense strand starting at position 3090 of SEQ ID NO: 1563823
gagccauagugucucaauc

SEQ ID NO: 1834534 - RNA, 19 nt, Artificial Sequence
  Description of Artificial Sequence: Synthetic oligonucleotide
  Antisense strand to SEQ ID NO: 1834533
gauugagacacuauggcuc

SEQ ID NO: 1834535 - RNA, 19 nt, Artificial Sequence
  Description of Artificial Sequence: Synthetic oligonucleotide
  Sense strand starting at position 3174 of SEQ ID NO: 1563823
cucagauugcgcgaugaug

SEQ ID NO: 1834536 - RNA, 19 nt, Artificial Sequence
  Description of Artificial Sequence: Synthetic oligonucleotide
  Antisense strand to SEQ ID NO: 1834535
caucaucgcgcaaucugag

SEQ ID NO: 1834537 - RNA, 19 nt, Artificial Sequence
  Description of Artificial Sequence: Synthetic oligonucleotide
  Sense strand starting at position 3423 of SEQ ID NO: 1563823
ugagcuugguugucacuuu

SEQ ID NO: 1834538 - RNA, 19 nt, Artificial Sequence
  Description of Artificial Sequence: Synthetic oligonucleotide
  Antisense strand to SEQ ID NO: 1834537
aaagugacaaccaagcuca

SEQ ID NO: 1834539 - RNA, 19 nt, Artificial Sequence
  Description of Artificial Sequence: Synthetic oligonucleotide
  Sense strand starting at position 3431 of SEQ ID NO: 1563823
guugucacuuuggcaauga

SEQ ID NO: 1834540 - RNA, 19 nt, Artificial Sequence
  Description of Artificial Sequence: Synthetic oligonucleotide
  Antisense strand to SEQ ID NO: 1834539
ucauugccaaagugacaac

SEQ ID NO: 1834541 - RNA, 19 nt, Artificial Sequence
  Description of Artificial Sequence: Synthetic oligonucleotide
  Sense strand starting at position 3435 of SEQ ID NO: 1563823
ucacuuuggcaaugacagu

SEQ ID NO: 1834542 - RNA, 19 nt, Artificial Sequence
  Description of Artificial Sequence: Synthetic oligonucleotide
  Antisense strand to SEQ ID NO: 1834541
acugucauugccaaaguga

SEQ ID NO: 1834543 - RNA, 19 nt, Artificial Sequence
  Description of Artificial Sequence: Synthetic oligonucleotide
  Sense strand starting at position 3457 of SEQ ID NO: 1563823
ggcacucacucuguauuua

SEQ ID NO: 1834544 - RNA, 19 nt, Artificial Sequence
  Description of Artificial Sequence: Synthetic oligonucleotide
  Antisense strand to SEQ ID NO: 1834543
uaaauacagagugagugcc

SEQ ID NO: 1834545 - RNA, 19 nt, Artificial Sequence
  Description of Artificial Sequence: Synthetic oligonucleotide
  Sense strand starting at position 3549 of SEQ ID NO: 1563823
gagauuauuuccugagucu

SEQ ID NO: 1834546 - RNA, 19 nt, Artificial Sequence
  Description of Artificial Sequence: Synthetic oligonucleotide
  Antisense strand to SEQ ID NO: 1834545
agacucaggaaauaaucuc

SEQ ID NO: 1834547 - RNA, 19 nt, Artificial Sequence
  Description of Artificial Sequence: Synthetic oligonucleotide
  Sense strand starting at position 3560 of SEQ ID NO: 1563823
cugagucuaucagcaacuu

SEQ ID NO: 1834548 - RNA, 19 nt, Artificial Sequence
  Description of Artificial Sequence: Synthetic oligonucleotide
  Antisense strand to SEQ ID NO: 1834547
aaguugcugauagacucag

SEQ ID NO: 1834549 - RNA, 19 nt, Artificial Sequence
  Description of Artificial Sequence: Synthetic oligonucleotide
  Sense strand starting at position 3561 of SEQ ID NO: 1563823
ugagucuaucagcaacuuu

SEQ ID NO: 1834550 - RNA, 19 nt, Artificial Sequence
  Description of Artificial Sequence: Synthetic oligonucleotide
  Antisense strand to SEQ ID NO: 1834549
aaaguugcugauagacuca

SEQ ID NO: 1834551 - RNA, 19 nt, Artificial Sequence
  Description of Artificial Sequence: Synthetic oligonucleotide
  Sense strand starting at position 3603 of SEQ ID NO: 1563823
uugucaggcucuucuuauu

SEQ ID NO: 1834552 - RNA, 19 nt, Artificial Sequence
  Description of Artificial Sequence: Synthetic oligonucleotide
  Antisense strand to SEQ ID NO: 1834551
aauaagaagagccugacaa

SEQ ID NO: 1834553 - RNA, 19 nt, Artificial Sequence
  Description of Artificial Sequence: Synthetic oligonucleotide
  Sense strand starting at position 3723 of SEQ ID NO: 1563823
ugaccuucuguaugauguu

SEQ ID NO: 1834554 - RNA, 19 nt, Artificial Sequence
  Description of Artificial Sequence: Synthetic oligonucleotide
  Antisense strand to SEQ ID NO: 1834553
aacaucauacagaagguca

SEQ ID NO: 1834555 - RNA, 19 nt, Artificial Sequence
  Description of Artificial Sequence: Synthetic oligonucleotide
  Sense strand starting at position 3773 of SEQ ID NO: 1563823
augugucuauuccuuugaa

SEQ ID NO: 1834556 - RNA, 19 nt, Artificial Sequence
  Description of Artificial Sequence: Synthetic oligonucleotide
  Antisense strand to SEQ ID NO: 1834555
uucaaaggaauagacacau

SEQ ID NO: 1834557 - RNA, 19 nt, Artificial Sequence
  Description of Artificial Sequence: Synthetic oligonucleotide
  Sense strand starting at position 3774 of SEQ ID NO: 1563823
ugugucuauuccuuugaau

SEQ ID NO: 1834558 - RNA, 19 nt, Artificial Sequence
  Description of Artificial Sequence: Synthetic oligonucleotide
  Antisense strand to SEQ ID NO: 1834557
auucaaaggaauagacaca

SEQ ID NO: 1834559 - RNA, 19 nt, Artificial Sequence
  Description of Artificial Sequence: Synthetic oligonucleotide
  Sense strand starting at position 3942 of SEQ ID NO: 1563823
cgacuugucacugccguga

SEQ ID NO: 1834560 - RNA, 19 nt, Artificial Sequence
  Description of Artificial Sequence: Synthetic oligonucleotide
  Antisense strand to SEQ ID NO: 1834559
ucacggcagugacaagucg

SEQ ID NO: 1834561 - RNA, 19 nt, Artificial Sequence
  Description of Artificial Sequence: Synthetic oligonucleotide
  Sense strand starting at position 3963 of SEQ ID NO: 1563823
ggcagagcuucugacauuu

SEQ ID NO: 1834562 - RNA, 19 nt, Artificial Sequence
  Description of Artificial Sequence: Synthetic oligonucleotide
  Antisense strand to SEQ ID NO: 1834561
aaaugucagaagcucugcc

SEQ ID NO: 1834563 - RNA, 19 nt, Artificial Sequence
  Description of Artificial Sequence: Synthetic oligonucleotide
  Sense strand starting at position 106 of SEQ ID NO: 1563824
ggaugagaggucuggugaa

SEQ ID NO: 1834564 - RNA, 19 nt, Artificial Sequence
  Description of Artificial Sequence: Synthetic oligonucleotide
  Antisense strand to SEQ ID NO: 1834563
uucaccagaccucucaucc

SEQ ID NO: 1834565 - RNA, 19 nt, Artificial Sequence
  Description of Artificial Sequence: Synthetic oligonucleotide
  Sense strand starting at position 116 of SEQ ID NO: 1563824
ucuggugaauccuuccuca

SEQ ID NO: 1834566 - RNA, 19 nt, Artificial Sequence
  Description of Artificial Sequence: Synthetic oligonucleotide
  Antisense strand to SEQ ID NO: 1834565
ugaggaaggauucaccaga

SEQ ID NO: 1834567 - RNA, 19 nt, Artificial Sequence
  Description of Artificial Sequence: Synthetic oligonucleotide
  Sense strand starting at position 376 of SEQ ID NO: 1563824
gucggauucccgaggcuga

SEQ ID NO: 1834568 - RNA, 19 nt, Artificial Sequence
  Description of Artificial Sequence: Synthetic oligonucleotide
  Antisense strand to SEQ ID NO: 1834567
ucagccucgggaauccgac

SEQ ID NO: 1834569 - RNA, 19 nt, Artificial Sequence
  Description of Artificial Sequence: Synthetic oligonucleotide
  Sense strand starting at position 377 of SEQ ID NO: 1563824
ucggauucccgaggcugaa

SEQ ID NO: 1834570 - RNA, 19 nt, Artificial Sequence
  Description of Artificial Sequence: Synthetic oligonucleotide
  Antisense strand to SEQ ID NO: 1834569
uucagccucgggaauccga

SEQ ID NO: 1834571 - RNA, 19 nt, Artificial Sequence
  Description of Artificial Sequence: Synthetic oligonucleotide
  Sense strand starting at position 995 of SEQ ID NO: 1563824
gcgcaagucagaggccuua

SEQ ID NO: 1834572 - RNA, 19 nt, Artificial Sequence
  Description of Artificial Sequence: Synthetic oligonucleotide
  Antisense strand to SEQ ID NO: 1834571
uaaggccucugacuugcgc

SEQ ID NO: 1834573 - RNA, 19 nt, Artificial Sequence
  Description of Artificial Sequence: Synthetic oligonucleotide
  Sense strand starting at position 1028 of SEQ ID NO: 1563824
gagcuucccuggguugaca

SEQ ID NO: 1834574 - RNA, 19 nt, Artificial Sequence
  Description of Artificial Sequence: Synthetic oligonucleotide
  Antisense strand to SEQ ID NO: 1834573
ugucaacccagggaagcuc

SEQ ID NO: 1834575 - RNA, 19 nt, Artificial Sequence
  Description of Artificial Sequence: Synthetic oligonucleotide
  Sense strand starting at position 1060 of SEQ ID NO: 1563824
cggauucugccacgggaga

SEQ ID NO: 1834576 - RNA, 19 nt, Artificial Sequence
  Description of Artificial Sequence: Synthetic oligonucleotide
  Antisense strand to SEQ ID NO: 1834575
ucucccguggcagaauccg

SEQ ID NO: 1834577 - RNA, 19 nt, Artificial Sequence
  Description of Artificial Sequence: Synthetic oligonucleotide
  Sense strand starting at position 1317 of SEQ ID NO: 1563824
ggucuugaguccucccuca

SEQ ID NO: 1834578 - RNA, 19 nt, Artificial Sequence
  Description of Artificial Sequence: Synthetic oligonucleotide
  Antisense strand to SEQ ID NO: 1834577
ugagggaggacucaagacc

SEQ ID NO: 1834579 - RNA, 19 nt, Artificial Sequence
  Description of Artificial Sequence: Synthetic oligonucleotide
  Sense strand starting at position 2377 of SEQ ID NO: 1563824
gaugaagugauguguggga

SEQ ID NO: 1834580 - RNA, 19 nt, Artificial Sequence
  Description of Artificial Sequence: Synthetic oligonucleotide
  Antisense strand to SEQ ID NO: 1834579
ucccacacaucacuucauc

SEQ ID NO: 1834581 - RNA, 19 nt, Artificial Sequence
  Description of Artificial Sequence: Synthetic oligonucleotide
  Sense strand starting at position 2379 of SEQ ID NO: 1563824
ugaagugaugugugggaga

SEQ ID NO: 1834582 - RNA, 19 nt, Artificial Sequence
  Description of Artificial Sequence: Synthetic oligonucleotide
  Antisense strand to SEQ ID NO: 1834581
ucucccacacaucacuuca

SEQ ID NO: 1834583 - RNA, 19 nt, Artificial Sequence
  Description of Artificial Sequence: Synthetic oligonucleotide
  Sense strand starting at position 2381 of SEQ ID NO: 1563824
aagugaugugugggagaug

SEQ ID NO: 1834584 - RNA, 19 nt, Artificial Sequence
  Description of Artificial Sequence: Synthetic oligonucleotide
  Antisense strand to SEQ ID NO: 1834583
caucucccacacaucacuu

SEQ ID NO: 1834585 - RNA, 19 nt, Artificial Sequence
  Description of Artificial Sequence: Synthetic oligonucleotide
  Sense strand starting at position 2392 of SEQ ID NO: 1563824
gggagaugaucuguuuaug

SEQ ID NO: 1834586 - RNA, 19 nt, Artificial Sequence
  Description of Artificial Sequence: Synthetic oligonucleotide
  Antisense strand to SEQ ID NO: 1834585
cauaaacagaucaucuccc

SEQ ID NO: 1834587 - RNA, 19 nt, Artificial Sequence
  Description of Artificial Sequence: Synthetic oligonucleotide
  Sense strand starting at position 2395 of SEQ ID NO: 1563824
agaugaucuguuuauguca

SEQ ID NO: 1834588 - RNA, 19 nt, Artificial Sequence
  Description of Artificial Sequence: Synthetic oligonucleotide
  Antisense strand to SEQ ID NO: 1834587
ugacauaaacagaucaucu

SEQ ID NO: 1834589 - RNA, 19 nt, Artificial Sequence
  Description of Artificial Sequence: Synthetic oligonucleotide
  Sense strand starting at position 2402 of SEQ ID NO: 1563824
cuguuuaugucaccuuuga

SEQ ID NO: 1834590 - RNA, 19 nt, Artificial Sequence
  Description of Artificial Sequence: Synthetic oligonucleotide
  Antisense strand to SEQ ID NO: 1834589
ucaaaggugacauaaacag

SEQ ID NO: 1834591 - RNA, 19 nt, Artificial Sequence
  Description of Artificial Sequence: Synthetic oligonucleotide
  Sense strand starting at position 2406 of SEQ ID NO: 1563824
uuaugucaccuuugagcau

SEQ ID NO: 1834592 - RNA, 19 nt, Artificial Sequence
  Description of Artificial Sequence: Synthetic oligonucleotide
  Antisense strand to SEQ ID NO: 1834591
augcucaaaggugacauaa

SEQ ID NO: 1834593 - RNA, 19 nt, Artificial Sequence
  Description of Artificial Sequence: Synthetic oligonucleotide
  Sense strand starting at position 2501 of SEQ ID NO: 1563824
gauuguaggaccugugaga

SEQ ID NO: 1834594 - RNA, 19 nt, Artificial Sequence
  Description of Artificial Sequence: Synthetic oligonucleotide
  Antisense strand to SEQ ID NO: 1834593
ucucacagguccuacaauc

SEQ ID NO: 1834595 - RNA, 19 nt, Artificial Sequence
  Description of Artificial Sequence: Synthetic oligonucleotide
  Sense strand starting at position 2653 of SEQ ID NO: 1563824
gaagguaucgaacacagca

SEQ ID NO: 1834596 - RNA, 19 nt, Artificial Sequence
  Description of Artificial Sequence: Synthetic oligonucleotide
  Antisense strand to SEQ ID NO: 1834595
ugcuguguucgauaccuuc

SEQ ID NO: 1834597 - RNA, 19 nt, Artificial Sequence
  Description of Artificial Sequence: Synthetic oligonucleotide
  Sense strand starting at position 2815 of SEQ ID NO: 1563824
cuaugcuuauauguauaca

SEQ ID NO: 1834598 - RNA, 19 nt, Artificial Sequence
  Description of Artificial Sequence: Synthetic oligonucleotide
  Antisense strand to SEQ ID NO: 1834597
uguauacauauaagcauag

SEQ ID NO: 1834599 - RNA, 19 nt, Artificial Sequence
  Description of Artificial Sequence: Synthetic oligonucleotide
  Sense strand starting at position 2818 of SEQ ID NO: 1563824
ugcuuauauguauacauac

SEQ ID NO: 1834600 - RNA, 19 nt, Artificial Sequence
  Description of Artificial Sequence: Synthetic oligonucleotide
  Antisense strand to SEQ ID NO: 1834599
guauguauacauauaagca

SEQ ID NO: 1834601 - RNA, 19 nt, Artificial Sequence
  Description of Artificial Sequence: Synthetic oligonucleotide
  Sense strand starting at position 2873 of SEQ ID NO: 1563824
uguauauaucuuuagcuac

SEQ ID NO: 1834602 - RNA, 19 nt, Artificial Sequence
  Description of Artificial Sequence: Synthetic oligonucleotide
  Antisense strand to SEQ ID NO: 1834601
guagcuaaagauauauaca

SEQ ID NO: 1834603 - RNA, 19 nt, Artificial Sequence
  Description of Artificial Sequence: Synthetic oligonucleotide
  Sense strand starting at position 2886 of SEQ ID NO: 1563824
agcuacauauucguuugua

SEQ ID NO: 1834604 - RNA, 19 nt, Artificial Sequence
  Description of Artificial Sequence: Synthetic oligonucleotide
  Antisense strand to SEQ ID NO: 1834603
uacaaacgaauauguagcu

SEQ ID NO: 1834605 - RNA, 19 nt, Artificial Sequence
  Description of Artificial Sequence: Synthetic oligonucleotide
  Sense strand starting at position 2887 of SEQ ID NO: 1563824
gcuacauauucguuuguau

SEQ ID NO: 1834606 - RNA, 19 nt, Artificial Sequence
  Description of Artificial Sequence: Synthetic oligonucleotide
  Antisense strand to SEQ ID NO: 1834605
auacaaacgaauauguagc

SEQ ID NO: 1834607 - RNA, 19 nt, Artificial Sequence
  Description of Artificial Sequence: Synthetic oligonucleotide
  Sense strand starting at position 2894 of SEQ ID NO: 1563824
auucguuuguauuucuaga

SEQ ID NO: 1834608 - RNA, 19 nt, Artificial Sequence
  Description of Artificial Sequence: Synthetic oligonucleotide
  Antisense strand to SEQ ID NO: 1834607
ucuagaaauacaaacgaau

SEQ ID NO: 1834609 - RNA, 19 nt, Artificial Sequence
  Description of Artificial Sequence: Synthetic oligonucleotide
  Sense strand starting at position 2896 of SEQ ID NO: 1563824
ucguuuguauuucuagacu

SEQ ID NO: 1834610 - RNA, 19 nt, Artificial Sequence
  Description of Artificial Sequence: Synthetic oligonucleotide
  Antisense strand to SEQ ID NO: 1834609
agucuagaaauacaaacga

SEQ ID NO: 1834611 - RNA, 19 nt, Artificial Sequence
  Description of Artificial Sequence: Synthetic oligonucleotide
  Sense strand starting at position 3036 of SEQ ID NO: 1563824
gaaggcuggucuucuccua

SEQ ID NO: 1834612 - RNA, 19 nt, Artificial Sequence
  Description of Artificial Sequence: Synthetic oligonucleotide
  Antisense strand to SEQ ID NO: 1834611
uaggagaagaccagccuuc

SEQ ID NO: 1834613 - RNA, 19 nt, Artificial Sequence
  Description of Artificial Sequence: Synthetic oligonucleotide
  Sense strand starting at position 3091 of SEQ ID NO: 1563824
gagccauagugucucaauc

SEQ ID NO: 1834614 - RNA, 19 nt, Artificial Sequence
  Description of Artificial Sequence: Synthetic oligonucleotide
  Antisense strand to SEQ ID NO: 1834613
gauugagacacuauggcuc

SEQ ID NO: 1834615 - RNA, 19 nt, Artificial Sequence
  Description of Artificial Sequence: Synthetic oligonucleotide
  Sense strand starting at position 3175 of SEQ ID NO: 1563824
cucagauugcgcgaugaug

SEQ ID NO: 1834616 - RNA, 19 nt, Artificial Sequence
  Description of Artificial Sequence: Synthetic oligonucleotide
  Antisense strand to SEQ ID NO: 1834615
caucaucgcgcaaucugag

SEQ ID NO: 1834617 - RNA, 19 nt, Artificial Sequence
  Description of Artificial Sequence: Synthetic oligonucleotide
  Sense strand starting at position 3424 of SEQ ID NO: 1563824
ugagcuugguugucacuuu

SEQ ID NO: 1834618 - RNA, 19 nt, Artificial Sequence
  Description of Artificial Sequence: Synthetic oligonucleotide
  Antisense strand to SEQ ID NO: 1834617
aaagugacaaccaagcuca

SEQ ID NO: 1834619 - RNA, 19 nt, Artificial Sequence
  Description of Artificial Sequence: Synthetic oligonucleotide
  Sense strand starting at position 3432 of SEQ ID NO: 1563824
guugucacuuuggcaauga

SEQ ID NO: 1834620 - RNA, 19 nt, Artificial Sequence
  Description of Artificial Sequence: Synthetic oligonucleotide
  Antisense strand to SEQ ID NO: 1834619
ucauugccaaagugacaac

SEQ ID NO: 1834621 - RNA, 19 nt, Artificial Sequence
  Description of Artificial Sequence: Synthetic oligonucleotide
  Sense strand starting at position 3436 of SEQ ID NO: 1563824
ucacuuuggcaaugacagu

SEQ ID NO: 1834622 - RNA, 19 nt, Artificial Sequence
  Description of Artificial Sequence: Synthetic oligonucleotide
  Antisense strand to SEQ ID NO: 1834621
acugucauugccaaaguga

SEQ ID NO: 1834623 - RNA, 19 nt, Artificial Sequence
  Description of Artificial Sequence: Synthetic oligonucleotide
  Sense strand starting at position 3458 of SEQ ID NO: 1563824
ggcacucacucuguauuua

SEQ ID NO: 1834624 - RNA, 19 nt, Artificial Sequence
  Description of Artificial Sequence: Synthetic oligonucleotide
  Antisense strand to SEQ ID NO: 1834623
uaaauacagagugagugcc

SEQ ID NO: 1834625 - RNA, 19 nt, Artificial Sequence
  Description of Artificial Sequence: Synthetic oligonucleotide
  Sense strand starting at position 3561 of SEQ ID NO: 1563824
cugagucuaucagcaacuu

SEQ ID NO: 1834626 - RNA, 19 nt, Artificial Sequence
  Description of Artificial Sequence: Synthetic oligonucleotide
  Antisense strand to SEQ ID NO: 1834625
aaguugcugauagacucag

SEQ ID NO: 1834627 - RNA, 19 nt, Artificial Sequence
  Description of Artificial Sequence: Synthetic oligonucleotide
  Sense strand starting at position 3562 of SEQ ID NO: 1563824
ugagucuaucagcaacuuu

SEQ ID NO: 1834628 - RNA, 19 nt, Artificial Sequence
  Description of Artificial Sequence: Synthetic oligonucleotide
  Antisense strand to SEQ ID NO: 1834627
aaaguugcugauagacuca

SEQ ID NO: 1834629 - RNA, 19 nt, Artificial Sequence
  Description of Artificial Sequence: Synthetic oligonucleotide
  Sense strand starting at position 3579 of SEQ ID NO: 1563824
uugcacaguugcuuccaua

SEQ ID NO: 1834630 - RNA, 19 nt, Artificial Sequence
  Description of Artificial Sequence: Synthetic oligonucleotide
  Antisense strand to SEQ ID NO: 1834629
uauggaagcaacugugcaa

SEQ ID NO: 1834631 - RNA, 19 nt, Artificial Sequence
  Description of Artificial Sequence: Synthetic oligonucleotide
  Sense strand starting at position 3604 of SEQ ID NO: 1563824
uugucaggcucuucuuauu

SEQ ID NO: 1834632 - RNA, 19 nt, Artificial Sequence
  Description of Artificial Sequence: Synthetic oligonucleotide
  Antisense strand to SEQ ID NO: 1834631
aauaagaagagccugacaa

SEQ ID NO: 1834633 - RNA, 19 nt, Artificial Sequence
  Description of Artificial Sequence: Synthetic oligonucleotide
  Sense strand starting at position 3724 of SEQ ID NO: 1563824
ugaccuucuguaugauguu

SEQ ID NO: 1834634 - RNA, 19 nt, Artificial Sequence
  Description of Artificial Sequence: Synthetic oligonucleotide
  Antisense strand to SEQ ID NO: 1834633
aacaucauacagaagguca

SEQ ID NO: 1834635 - RNA, 19 nt, Artificial Sequence
  Description of Artificial Sequence: Synthetic oligonucleotide
  Sense strand starting at position 3931 of SEQ ID NO: 1563824
agcauaugucaacgacuug

SEQ ID NO: 1834636 - RNA, 19 nt, Artificial Sequence
  Description of Artificial Sequence: Synthetic oligonucleotide
  Antisense strand to SEQ ID NO: 1834635
caagucguugacauaugcu

SEQ ID NO: 1834637 - RNA, 19 nt, Artificial Sequence
  Description of Artificial Sequence: Synthetic oligonucleotide
  Sense strand starting at position 3932 of SEQ ID NO: 1563824
gcauaugucaacgacuugu

SEQ ID NO: 1834638 - RNA, 19 nt, Artificial Sequence
  Description of Artificial Sequence: Synthetic oligonucleotide
  Antisense strand to SEQ ID NO: 1834637
acaagucguugacauaugc

SEQ ID NO: 1834639 - RNA, 19 nt, Artificial Sequence
  Description of Artificial Sequence: Synthetic oligonucleotide
  Sense strand starting at position 3943 of SEQ ID NO: 1563824
cgacuugucacugccguga

SEQ ID NO: 1834640 - RNA, 19 nt, Artificial Sequence
  Description of Artificial Sequence: Synthetic oligonucleotide
  Antisense strand to SEQ ID NO: 1834639
ucacggcagugacaagucg

SEQ ID NO: 1834641 - RNA, 19 nt, Artificial Sequence
  Description of Artificial Sequence: Synthetic oligonucleotide
  Sense strand starting at position 3964 of SEQ ID NO: 1563824
ggcagagcuucugacauuu

SEQ ID NO: 1834642 - RNA, 19 nt, Artificial Sequence
  Description of Artificial Sequence: Synthetic oligonucleotide
  Antisense strand to SEQ ID NO: 1834641
aaaugucagaagcucugcc

SEQ ID NO: 1834643 - RNA, 19 nt, Artificial Sequence
  Description of Artificial Sequence: Synthetic oligonucleotide
  Sense strand starting at position 42 of SEQ ID NO: 1563825
uucuucuugcucugguuau

SEQ ID NO: 1834644 - RNA, 19 nt, Artificial Sequence
  Description of Artificial Sequence: Synthetic oligonucleotide
  Antisense strand to SEQ ID NO: 1834643
auaaccagagcaagaagaa

SEQ ID NO: 1834645 - RNA, 19 nt, Artificial Sequence
  Description of Artificial Sequence: Synthetic oligonucleotide
  Sense strand starting at position 53 of SEQ ID NO: 1563825
cugguuauguauuccaauc

SEQ ID NO: 1834646 - RNA, 19 nt, Artificial Sequence
  Description of Artificial Sequence: Synthetic oligonucleotide
  Antisense strand to SEQ ID NO: 1834645
gauuggaauacauaaccag

SEQ ID NO: 1834647 - RNA, 19 nt, Artificial Sequence
  Description of Artificial Sequence: Synthetic oligonucleotide
  Sense strand starting at position 246 of SEQ ID NO: 1563825
ugugaacuugggcacauua

SEQ ID NO: 1834648 - RNA, 19 nt, Artificial Sequence
  Description of Artificial Sequence: Synthetic oligonucleotide
  Antisense strand to SEQ ID NO: 1834647
uaaugugcccaaguucaca

SEQ ID NO: 1834649 - RNA, 19 nt, Artificial Sequence
  Description of Artificial Sequence: Synthetic oligonucleotide
  Sense strand starting at position 284 of SEQ ID NO: 1563825
ggcucuacaucugugaaau

SEQ ID NO: 1834650 - RNA, 19 nt, Artificial Sequence
  Description of Artificial Sequence: Synthetic oligonucleotide
  Antisense strand to SEQ ID NO: 1834649
auuucacagauguagagcc

SEQ ID NO: 1834651 - RNA, 19 nt, Artificial Sequence
  Description of Artificial Sequence: Synthetic oligonucleotide
  Sense strand starting at position 285 of SEQ ID NO: 1563825
gcucuacaucugugaaaug

SEQ ID NO: 1834652 - RNA, 19 nt, Artificial Sequence
  Description of Artificial Sequence: Synthetic oligonucleotide
  Antisense strand to SEQ ID NO: 1834651
cauuucacagauguagagc

SEQ ID NO: 1834653 - RNA, 19 nt, Artificial Sequence
  Description of Artificial Sequence: Synthetic oligonucleotide
  Sense strand starting at position 296 of SEQ ID NO: 1563825
gugaaaugagcuugauaag

SEQ ID NO: 1834654 - RNA, 19 nt, Artificial Sequence
  Description of Artificial Sequence: Synthetic oligonucleotide
  Antisense strand to SEQ ID NO: 1834653
cuuaucaagcucauuucac

SEQ ID NO: 1834655 - RNA, 19 nt, Artificial Sequence
  Description of Artificial Sequence: Synthetic oligonucleotide
  Sense strand starting at position 308 of SEQ ID NO: 1563825
ugauaagccuugucuugua

SEQ ID NO: 1834656 - RNA, 19 nt, Artificial Sequence
  Description of Artificial Sequence: Synthetic oligonucleotide
  Antisense strand to SEQ ID NO: 1834655
uacaagacaaggcuuauca

SEQ ID NO: 1834657 - RNA, 19 nt, Artificial Sequence
  Description of Artificial Sequence: Synthetic oligonucleotide
  Sense strand starting at position 320 of SEQ ID NO: 1563825
ucuuguaggacugguggaa

SEQ ID NO: 1834658 - RNA, 19 nt, Artificial Sequence
  Description of Artificial Sequence: Synthetic oligonucleotide
  Antisense strand to SEQ ID NO: 1834657
uuccaccaguccuacaaga

SEQ ID NO: 1834659 - RNA, 19 nt, Artificial Sequence
  Description of Artificial Sequence: Synthetic oligonucleotide
  Sense strand starting at position 360 of SEQ ID NO: 1563825
ccuggugugcauugagacu

SEQ ID NO: 1834660 - RNA, 19 nt, Artificial Sequence
  Description of Artificial Sequence: Synthetic oligonucleotide
  Antisense strand to SEQ ID NO: 1834659
agucucaaugcacaccagg

SEQ ID NO: 1834661 - RNA, 19 nt, Artificial Sequence
  Description of Artificial Sequence: Synthetic oligonucleotide
  Sense strand starting at position 572 of SEQ ID NO: 1563825
ggaguugucuuucucagcu

SEQ ID NO: 1834662 - RNA, 19 nt, Artificial Sequence
  Description of Artificial Sequence: Synthetic oligonucleotide
  Antisense strand to SEQ ID NO: 1834661
agcugagaaagacaacucc

SEQ ID NO: 1834663 - RNA, 19 nt, Artificial Sequence
  Description of Artificial Sequence: Synthetic oligonucleotide
  Sense strand starting at position 576 of SEQ ID NO: 1563825
uugucuuucucagcugaaa

SEQ ID NO: 1834664 - RNA, 19 nt, Artificial Sequence
  Description of Artificial Sequence: Synthetic oligonucleotide
  Antisense strand to SEQ ID NO: 1834663
uuucagcugagaaagacaa

SEQ ID NO: 1834665 - RNA, 19 nt, Artificial Sequence
  Description of Artificial Sequence: Synthetic oligonucleotide
  Sense strand starting at position 779 of SEQ ID NO: 1563825
guauuagcccaguggcuua

SEQ ID NO: 1834666 - RNA, 19 nt, Artificial Sequence
  Description of Artificial Sequence: Synthetic oligonucleotide
  Antisense strand to SEQ ID NO: 1834665
uaagccacugggcuaauac

SEQ ID NO: 1834667 - RNA, 19 nt, Artificial Sequence
  Description of Artificial Sequence: Synthetic oligonucleotide
  Sense strand starting at position 784 of SEQ ID NO: 1563825
agcccaguggcuuaugagu

SEQ ID NO: 1834668 - RNA, 19 nt, Artificial Sequence
  Description of Artificial Sequence: Synthetic oligonucleotide
  Antisense strand to SEQ ID NO: 1834667
acucauaagccacugggcu

SEQ ID NO: 1834669 - RNA, 19 nt, Artificial Sequence
  Description of Artificial Sequence: Synthetic oligonucleotide
  Sense strand starting at position 793 of SEQ ID NO: 1563825
gcuuaugaguuuccagucu

SEQ ID NO: 1834670 - RNA, 19 nt, Artificial Sequence
  Description of Artificial Sequence: Synthetic oligonucleotide
  Antisense strand to SEQ ID NO: 1834669
agacuggaaacucauaagc

SEQ ID NO: 1834671 - RNA, 19 nt, Artificial Sequence
  Description of Artificial Sequence: Synthetic oligonucleotide
  Sense strand starting at position 800 of SEQ ID NO: 1563825
aguuuccagucuuaaagga

SEQ ID NO: 1834672 - RNA, 19 nt, Artificial Sequence
  Description of Artificial Sequence: Synthetic oligonucleotide
  Antisense strand to SEQ ID NO: 1834671
uccuuuaagacuggaaacu

SEQ ID NO: 1834673 - RNA, 19 nt, Artificial Sequence
  Description of Artificial Sequence: Synthetic oligonucleotide
  Sense strand starting at position 1073 of SEQ ID NO: 1563825
ggcacuaugccaggacaua

SEQ ID NO: 1834674 - RNA, 19 nt, Artificial Sequence
  Description of Artificial Sequence: Synthetic oligonucleotide
  Antisense strand to SEQ ID NO: 1834673
uauguccuggcauagugcc

SEQ ID NO: 1834675 - RNA, 19 nt, Artificial Sequence
  Description of Artificial Sequence: Synthetic oligonucleotide
  Sense strand starting at position 1074 of SEQ ID NO: 1563825
gcacuaugccaggacauaa

SEQ ID NO: 1834676 - RNA, 19 nt, Artificial Sequence
  Description of Artificial Sequence: Synthetic oligonucleotide
  Antisense strand to SEQ ID NO: 1834675
uuauguccuggcauagugc

SEQ ID NO: 1834677 - RNA, 19 nt, Artificial Sequence
  Description of Artificial Sequence: Synthetic oligonucleotide
  Sense strand starting at position 1132 of SEQ ID NO: 1563825
ucaguuaccuugcuuagga

SEQ ID NO: 1834678 - RNA, 19 nt, Artificial Sequence
  Description of Artificial Sequence: Synthetic oligonucleotide
  Antisense strand to SEQ ID NO: 1834677
uccuaagcaagguaacuga

SEQ ID NO: 1834679 - RNA, 19 nt, Artificial Sequence
  Description of Artificial Sequence: Synthetic oligonucleotide
  Sense strand starting at position 1145 of SEQ ID NO: 1563825
uuaggacauuuacacuaga

SEQ ID NO: 1834680 - RNA, 19 nt, Artificial Sequence
  Description of Artificial Sequence: Synthetic oligonucleotide
  Antisense strand to SEQ ID NO: 1834679
ucuaguguaaauguccuaa

SEQ ID NO: 1834681 - RNA, 19 nt, Artificial Sequence
  Description of Artificial Sequence: Synthetic oligonucleotide
  Sense strand starting at position 1162 of SEQ ID NO: 1563825
gauuccacugcugguaaua

SEQ ID NO: 1834682 - RNA, 19 nt, Artificial Sequence
  Description of Artificial Sequence: Synthetic oligonucleotide
  Antisense strand to SEQ ID NO: 1834681
uauuaccagcaguggaauc

SEQ ID NO: 1834683 - RNA, 19 nt, Artificial Sequence
  Description of Artificial Sequence: Synthetic oligonucleotide
  Sense strand starting at position 1209 of SEQ ID NO: 1563825
accugucuuuaggucuuaa

SEQ ID NO: 1834684 - RNA, 19 nt, Artificial Sequence
  Description of Artificial Sequence: Synthetic oligonucleotide
  Antisense strand to SEQ ID NO: 1834683
uuaagaccuaaagacaggu

SEQ ID NO: 1834685 - RNA, 19 nt, Artificial Sequence
  Description of Artificial Sequence: Synthetic oligonucleotide
  Sense strand starting at position 1213 of SEQ ID NO: 1563825
gucuuuaggucuuaaggag

SEQ ID NO: 1834686 - RNA, 19 nt, Artificial Sequence
  Description of Artificial Sequence: Synthetic oligonucleotide
  Antisense strand to SEQ ID NO: 1834685
cuccuuaagaccuaaagac

SEQ ID NO: 1834687 - RNA, 19 nt, Artificial Sequence
  Description of Artificial Sequence: Synthetic oligonucleotide
  Sense strand starting at position 1220 of SEQ ID NO: 1563825
ggucuuaaggaguaucuca

SEQ ID NO: 1834688 - RNA, 19 nt, Artificial Sequence
  Description of Artificial Sequence: Synthetic oligonucleotide
  Antisense strand to SEQ ID NO: 1834687
ugagauacuccuuaagacc

SEQ ID NO: 1834689 - RNA, 19 nt, Artificial Sequence
  Description of Artificial Sequence: Synthetic oligonucleotide
  Sense strand starting at position 1227 of SEQ ID NO: 1563825
aggaguaucucauuaccuu

SEQ ID NO: 1834690 - RNA, 19 nt, Artificial Sequence
  Description of Artificial Sequence: Synthetic oligonucleotide
  Antisense strand to SEQ ID NO: 1834689
aagguaaugagauacuccu

SEQ ID NO: 1834691 - RNA, 19 nt, Artificial Sequence
  Description of Artificial Sequence: Synthetic oligonucleotide
  Sense strand starting at position 1228 of SEQ ID NO: 1563825
ggaguaucucauuaccuuc

SEQ ID NO: 1834692 - RNA, 19 nt, Artificial Sequence
  Description of Artificial Sequence: Synthetic oligonucleotide
  Antisense strand to SEQ ID NO: 1834691
gaagguaaugagauacucc

SEQ ID NO: 1834693 - RNA, 19 nt, Artificial Sequence
  Description of Artificial Sequence: Synthetic oligonucleotide
  Sense strand starting at position 1234 of SEQ ID NO: 1563825
ucucauuaccuucguuaua

SEQ ID NO: 1834694 - RNA, 19 nt, Artificial Sequence
  Description of Artificial Sequence: Synthetic oligonucleotide
  Antisense strand to SEQ ID NO: 1834693
uauaacgaagguaaugaga

SEQ ID NO: 1834695 - RNA, 19 nt, Artificial Sequence
  Description of Artificial Sequence: Synthetic oligonucleotide
  Sense strand starting at position 1235 of SEQ ID NO: 1563825
cucauuaccuucguuauau

SEQ ID NO: 1834696 - RNA, 19 nt, Artificial Sequence
  Description of Artificial Sequence: Synthetic oligonucleotide
  Antisense strand to SEQ ID NO: 1834695
auauaacgaagguaaugag

SEQ ID NO: 1834697 - RNA, 19 nt, Artificial Sequence
  Description of Artificial Sequence: Synthetic oligonucleotide
  Sense strand starting at position 1236 of SEQ ID NO: 1563825
ucauuaccuucguuauaug

SEQ ID NO: 1834698 - RNA, 19 nt, Artificial Sequence
  Description of Artificial Sequence: Synthetic oligonucleotide
  Antisense strand to SEQ ID NO: 1834697
cauauaacgaagguaauga

SEQ ID NO: 1834699 - RNA, 19 nt, Artificial Sequence
  Description of Artificial Sequence: Synthetic oligonucleotide
  Sense strand starting at position 1349 of SEQ ID NO: 1563825
ccaggagcccuccaaagua

SEQ ID NO: 1834700 - RNA, 19 nt, Artificial Sequence
  Description of Artificial Sequence: Synthetic oligonucleotide
  Antisense strand to SEQ ID NO: 1834699
uacuuuggagggcuccugg

SEQ ID NO: 1834701 - RNA, 19 nt, Artificial Sequence
  Description of Artificial Sequence: Synthetic oligonucleotide
  Sense strand starting at position 1364 of SEQ ID NO: 1563825
aguacagcugcucaauuaa

SEQ ID NO: 1834702 - RNA, 19 nt, Artificial Sequence
  Description of Artificial Sequence: Synthetic oligonucleotide
  Antisense strand to SEQ ID NO: 1834701
uuaauugagcagcuguacu

SEQ ID NO: 1834703 - RNA, 19 nt, Artificial Sequence
  Description of Artificial Sequence: Synthetic oligonucleotide
  Sense strand starting at position 1388 of SEQ ID NO: 1563825
ggacaauugaaguguaagu

SEQ ID NO: 1834704 - RNA, 19 nt, Artificial Sequence
  Description of Artificial Sequence: Synthetic oligonucleotide
  Antisense strand to SEQ ID NO: 1834703
acuuacacuucaauugucc

SEQ ID NO: 1834705 - RNA, 19 nt, Artificial Sequence
  Description of Artificial Sequence: Synthetic oligonucleotide
  Sense strand starting at position 1397 of SEQ ID NO: 1563825
aaguguaagugaccaggaa

SEQ ID NO: 1834706 - RNA, 19 nt, Artificial Sequence
  Description of Artificial Sequence: Synthetic oligonucleotide
  Antisense strand to SEQ ID NO: 1834705
uuccuggucacuuacacuu

SEQ ID NO: 1834707 - RNA, 19 nt, Artificial Sequence
  Description of Artificial Sequence: Synthetic oligonucleotide
  Sense strand starting at position 1401 of SEQ ID NO: 1563825
guaagugaccaggaaguca

SEQ ID NO: 1834708 - RNA, 19 nt, Artificial Sequence
  Description of Artificial Sequence: Synthetic oligonucleotide
  Antisense strand to SEQ ID NO: 1834707
ugacuuccuggucacuuac

SEQ ID NO: 1834709 - RNA, 19 nt, Artificial Sequence
  Description of Artificial Sequence: Synthetic oligonucleotide
  Sense strand starting at position 1461 of SEQ ID NO: 1563825
uaagcagauccggguacau

SEQ ID NO: 1834710 - RNA, 19 nt, Artificial Sequence
  Description of Artificial Sequence: Synthetic oligonucleotide
  Antisense strand to SEQ ID NO: 1834709
auguacccggaucugcuua

SEQ ID NO: 1834711 - RNA, 19 nt, Artificial Sequence
  Description of Artificial Sequence: Synthetic oligonucleotide
  Sense strand starting at position 1463 of SEQ ID NO: 1563825
agcagauccggguacauau

SEQ ID NO: 1834712 - RNA, 19 nt, Artificial Sequence
  Description of Artificial Sequence: Synthetic oligonucleotide
  Antisense strand to SEQ ID NO: 1834711
auauguacccggaucugcu

SEQ ID NO: 1834713 - RNA, 19 nt, Artificial Sequence
  Description of Artificial Sequence: Synthetic oligonucleotide
  Sense strand starting at position 3899 of SEQ ID NO: 1563825
uguguucuggcuuggagag

SEQ ID NO: 1834714 - RNA, 19 nt, Artificial Sequence
  Description of Artificial Sequence: Synthetic oligonucleotide
  Antisense strand to SEQ ID NO: 1834713
cucuccaagccagaacaca

SEQ ID NO: 1834715 - RNA, 19 nt, Artificial Sequence
  Description of Artificial Sequence: Synthetic oligonucleotide
  Sense strand starting at position 3915 of SEQ ID NO: 1563825
gaggauccacucugauuac

SEQ ID NO: 1834716 - RNA, 19 nt, Artificial Sequence
  Description of Artificial Sequence: Synthetic oligonucleotide
  Antisense strand to SEQ ID NO: 1834715
guaaucagaguggauccuc

SEQ ID NO: 1834717 - RNA, 19 nt, Artificial Sequence
  Description of Artificial Sequence: Synthetic oligonucleotide
  Sense strand starting at position 3927 of SEQ ID NO: 1563825
ugauuaccuuuagaauugu

SEQ ID NO: 1834718 - RNA, 19 nt, Artificial Sequence
  Description of Artificial Sequence: Synthetic oligonucleotide
  Antisense strand to SEQ ID NO: 1834717
acaauucuaaagguaauca

SEQ ID NO: 1834719 - RNA, 19 nt, Artificial Sequence
  Description of Artificial Sequence: Synthetic oligonucleotide
  Sense strand starting at position 3933 of SEQ ID NO: 1563825
ccuuuagaauugucauguc

SEQ ID NO: 1834720 - RNA, 19 nt, Artificial Sequence
  Description of Artificial Sequence: Synthetic oligonucleotide
  Antisense strand to SEQ ID NO: 1834719
gacaugacaauucuaaagg

SEQ ID NO: 1834721 - RNA, 19 nt, Artificial Sequence
  Description of Artificial Sequence: Synthetic oligonucleotide
  Sense strand starting at position 3965 of SEQ ID NO: 1563825
gccugagccucccucuauu

SEQ ID NO: 1834722 - RNA, 19 nt, Artificial Sequence
  Description of Artificial Sequence: Synthetic oligonucleotide
  Antisense strand to SEQ ID NO: 1834721
aauagagggaggcucaggc

SEQ ID NO: 1834723 - RNA, 19 nt, Artificial Sequence
  Description of Artificial Sequence: Synthetic oligonucleotide
  Sense strand starting at position 12 of SEQ ID NO: 1563826
uugauucuuccaggcucau

SEQ ID NO: 1834724 - RNA, 19 nt, Artificial Sequence
  Description of Artificial Sequence: Synthetic oligonucleotide
  Antisense strand to SEQ ID NO: 1834723
augagccuggaagaaucaa

SEQ ID NO: 1834725 - RNA, 19 nt, Artificial Sequence
  Description of Artificial Sequence: Synthetic oligonucleotide
  Sense strand starting at position 77 of SEQ ID NO: 1563826
augacacaucuggguacuu

SEQ ID NO: 1834726 - RNA, 19 nt, Artificial Sequence
  Description of Artificial Sequence: Synthetic oligonucleotide
  Antisense strand to SEQ ID NO: 1834725
aaguacccagaugugucau

SEQ ID NO: 1834727 - RNA, 19 nt, Artificial Sequence
  Description of Artificial Sequence: Synthetic oligonucleotide
  Sense strand starting at position 154 of SEQ ID NO: 1563826
gguaaaugcucaucucauu

SEQ ID NO: 1834728 - RNA, 19 nt, Artificial Sequence
  Description of Artificial Sequence: Synthetic oligonucleotide
  Antisense strand to SEQ ID NO: 1834727
aaugagaugagcauuuacc

SEQ ID NO: 1834729 - RNA, 19 nt, Artificial Sequence
  Description of Artificial Sequence: Synthetic oligonucleotide
  Sense strand starting at position 232 of SEQ ID NO: 1563826
ccgacaacucccugaggaa

SEQ ID NO: 1834730 - RNA, 19 nt, Artificial Sequence
  Description of Artificial Sequence: Synthetic oligonucleotide
  Antisense strand to SEQ ID NO: 1834729
uuccucagggaguugucgg

SEQ ID NO: 1834731 - RNA, 19 nt, Artificial Sequence
  Description of Artificial Sequence: Synthetic oligonucleotide
  Sense strand starting at position 272 of SEQ ID NO: 1563826
ggcuacaauuguccaucau

SEQ ID NO: 1834732 - RNA, 19 nt, Artificial Sequence
  Description of Artificial Sequence: Synthetic oligonucleotide
  Antisense strand to SEQ ID NO: 1834731
augauggacaauuguagcc

SEQ ID NO: 1834733 - RNA, 19 nt, Artificial Sequence
  Description of Artificial Sequence: Synthetic oligonucleotide
  Sense strand starting at position 398 of SEQ ID NO: 1563826
ggaauccucuagcugcuaa

SEQ ID NO: 1834734 - RNA, 19 nt, Artificial Sequence
  Description of Artificial Sequence: Synthetic oligonucleotide
  Antisense strand to SEQ ID NO: 1834733
uuagcagcuagaggauucc

SEQ ID NO: 1834735 - RNA, 19 nt, Artificial Sequence
  Description of Artificial Sequence: Synthetic oligonucleotide
  Sense strand starting at position 474 of SEQ ID NO: 1563826
gugagugagacucaucaug

SEQ ID NO: 1834736 - RNA, 19 nt, Artificial Sequence
  Description of Artificial Sequence: Synthetic oligonucleotide
  Antisense strand to SEQ ID NO: 1834735
caugaugagucucacucac

SEQ ID NO: 1834737 - RNA, 19 nt, Artificial Sequence
  Description of Artificial Sequence: Synthetic oligonucleotide
  Sense strand starting at position 476 of SEQ ID NO: 1563826
gagugagacucaucauguc

SEQ ID NO: 1834738 - RNA, 19 nt, Artificial Sequence
  Description of Artificial Sequence: Synthetic oligonucleotide
  Antisense strand to SEQ ID NO: 1834737
gacaugaugagucucacuc

SEQ ID NO: 1834739 - RNA, 19 nt, Artificial Sequence
  Description of Artificial Sequence: Synthetic oligonucleotide
  Sense strand starting at position 650 of SEQ ID NO: 1563826
gccauuauguaccugaaac

SEQ ID NO: 1834740 - RNA, 19 nt, Artificial Sequence
  Description of Artificial Sequence: Synthetic oligonucleotide
  Antisense strand to SEQ ID NO: 1834739
guuucagguacauaauggc

SEQ ID NO: 1834741 - RNA, 19 nt, Artificial Sequence
  Description of Artificial Sequence: Synthetic oligonucleotide
  Sense strand starting at position 689 of SEQ ID NO: 1563826
ggcaucucaacuugagagu

SEQ ID NO: 1834742 - RNA, 19 nt, Artificial Sequence
  Description of Artificial Sequence: Synthetic oligonucleotide
  Antisense strand to SEQ ID NO: 1834741
acucucaaguugagaugcc

SEQ ID NO: 1834743 - RNA, 19 nt, Artificial Sequence
  Description of Artificial Sequence: Synthetic oligonucleotide
  Sense strand starting at position 690 of SEQ ID NO: 1563826
gcaucucaacuugagaguu

SEQ ID NO: 1834744 - RNA, 19 nt, Artificial Sequence
  Description of Artificial Sequence: Synthetic oligonucleotide
  Antisense strand to SEQ ID NO: 1834743
aacucucaaguugagaugc

SEQ ID NO: 1834745 - RNA, 19 nt, Artificial Sequence
  Description of Artificial Sequence: Synthetic oligonucleotide
  Sense strand starting at position 738 of SEQ ID NO: 1563826
aagguaagacuguguuccu

SEQ ID NO: 1834746 - RNA, 19 nt, Artificial Sequence
  Description of Artificial Sequence: Synthetic oligonucleotide
  Antisense strand to SEQ ID NO: 1834745
aggaacacagucuuaccuu

SEQ ID NO: 1834747 - RNA, 19 nt, Artificial Sequence
  Description of Artificial Sequence: Synthetic oligonucleotide
  Sense strand starting at position 755 of SEQ ID NO: 1563826
cugccuguucuggacuaga

SEQ ID NO: 1834748 - RNA, 19 nt, Artificial Sequence
  Description of Artificial Sequence: Synthetic oligonucleotide
  Antisense strand to SEQ ID NO: 1834747
ucuaguccagaacaggcag

SEQ ID NO: 1834749 - RNA, 19 nt, Artificial Sequence
  Description of Artificial Sequence: Synthetic oligonucleotide
  Sense strand starting at position 1494 of SEQ ID NO: 1563826
cucuauugaccugagucua

SEQ ID NO: 1834750 - RNA, 19 nt, Artificial Sequence
  Description of Artificial Sequence: Synthetic oligonucleotide
  Antisense strand to SEQ ID NO: 1834749
uagacucaggucaauagag

SEQ ID NO: 1834751 - RNA, 19 nt, Artificial Sequence
  Description of Artificial Sequence: Synthetic oligonucleotide
  Sense strand starting at position 1539 of SEQ ID NO: 1563826
cccugagucgcugaagaga

SEQ ID NO: 1834752 - RNA, 19 nt, Artificial Sequence
  Description of Artificial Sequence: Synthetic oligonucleotide
  Antisense strand to SEQ ID NO: 1834751
ucucuucagcgacucaggg

SEQ ID NO: 1834753 - RNA, 19 nt, Artificial Sequence
  Description of Artificial Sequence: Synthetic oligonucleotide
  Sense strand starting at position 2406 of SEQ ID NO: 1563826
agaccuuccaggcggaaau

SEQ ID NO: 1834754 - RNA, 19 nt, Artificial Sequence
  Description of Artificial Sequence: Synthetic oligonucleotide
  Antisense strand to SEQ ID NO: 1834753
auuuccgccuggaaggucu

SEQ ID NO: 1834755 - RNA, 19 nt, Artificial Sequence
  Description of Artificial Sequence: Synthetic oligonucleotide
  Sense strand starting at position 2530 of SEQ ID NO: 1563826
cauugauucuuguuagggu

SEQ ID NO: 1834756 - RNA, 19 nt, Artificial Sequence
  Description of Artificial Sequence: Synthetic oligonucleotide
  Antisense strand to SEQ ID NO: 1834755
acccuaacaagaaucaaug

SEQ ID NO: 1834757 - RNA, 19 nt, Artificial Sequence
  Description of Artificial Sequence: Synthetic oligonucleotide
  Sense strand starting at position 2551 of SEQ ID NO: 1563826
cggccucuucgcucuguaa

SEQ ID NO: 1834758 - RNA, 19 nt, Artificial Sequence
  Description of Artificial Sequence: Synthetic oligonucleotide
  Antisense strand to SEQ ID NO: 1834757
uuacagagcgaagaggccg

SEQ ID NO: 1834759 - RNA, 19 nt, Artificial Sequence
  Description of Artificial Sequence: Synthetic oligonucleotide
  Sense strand starting at position 2552 of SEQ ID NO: 1563826
ggccucuucgcucuguaaa

SEQ ID NO: 1834760 - RNA, 19 nt, Artificial Sequence
  Description of Artificial Sequence: Synthetic oligonucleotide
  Antisense strand to SEQ ID NO: 1834759
uuuacagagcgaagaggcc

SEQ ID NO: 1834761 - RNA, 19 nt, Artificial Sequence
  Description of Artificial Sequence: Synthetic oligonucleotide
  Sense strand starting at position 2597 of SEQ ID NO: 1563826
ccagucaucucccugagac

SEQ ID NO: 1834762 - RNA, 19 nt, Artificial Sequence
  Description of Artificial Sequence: Synthetic oligonucleotide
  Antisense strand to SEQ ID NO: 1834761
gucucagggagaugacugg

SEQ ID NO: 1834763 - RNA, 19 nt, Artificial Sequence
  Description of Artificial Sequence: Synthetic oligonucleotide
  Sense strand starting at position 2599 of SEQ ID NO: 1563826
agucaucucccugagacuu

SEQ ID NO: 1834764 - RNA, 19 nt, Artificial Sequence
  Description of Artificial Sequence: Synthetic oligonucleotide
  Antisense strand to SEQ ID NO: 1834763
aagucucagggagaugacu

SEQ ID NO: 1834765 - RNA, 19 nt, Artificial Sequence
  Description of Artificial Sequence: Synthetic oligonucleotide
  Sense strand starting at position 2610 of SEQ ID NO: 1563826
ugagacuuuccaggcagaa

SEQ ID NO: 1834766 - RNA, 19 nt, Artificial Sequence
  Description of Artificial Sequence: Synthetic oligonucleotide
  Antisense strand to SEQ ID NO: 1834765
uucugccuggaaagucuca

SEQ ID NO: 1834767 - RNA, 19 nt, Artificial Sequence
  Description of Artificial Sequence: Synthetic oligonucleotide
  Sense strand starting at position 2724 of SEQ ID NO: 1563826
gguccucaccuugacaagu

SEQ ID NO: 1834768 - RNA, 19 nt, Artificial Sequence
  Description of Artificial Sequence: Synthetic oligonucleotide
  Antisense strand to SEQ ID NO: 1834767
acuugucaaggugaggacc

SEQ ID NO: 1834769 - RNA, 19 nt, Artificial Sequence
  Description of Artificial Sequence: Synthetic oligonucleotide
  Sense strand starting at position 2742 of SEQ ID NO: 1563826
ugagcaaaccuguaacuua

SEQ ID NO: 1834770 - RNA, 19 nt, Artificial Sequence
  Description of Artificial Sequence: Synthetic oligonucleotide
  Antisense strand to SEQ ID NO: 1834769
uaaguuacagguuugcuca

SEQ ID NO: 1834771 - RNA, 19 nt, Artificial Sequence
  Description of Artificial Sequence: Synthetic oligonucleotide
  Sense strand starting at position 2973 of SEQ ID NO: 1563826
cugggacuccucuaucuac

SEQ ID NO: 1834772 - RNA, 19 nt, Artificial Sequence
  Description of Artificial Sequence: Synthetic oligonucleotide
  Antisense strand to SEQ ID NO: 1834771
guagauagaggagucccag

SEQ ID NO: 1834773 - RNA, 19 nt, Artificial Sequence
  Description of Artificial Sequence: Synthetic oligonucleotide
  Sense strand starting at position 3065 of SEQ ID NO: 1563826
ucaugaggguucucauguu

SEQ ID NO: 1834774 - RNA, 19 nt, Artificial Sequence
  Description of Artificial Sequence: Synthetic oligonucleotide
  Antisense strand to SEQ ID NO: 1834773
aacaugagaacccucauga

SEQ ID NO: 1834775 - RNA, 19 nt, Artificial Sequence
  Description of Artificial Sequence: Synthetic oligonucleotide
  Sense strand starting at position 3170 of SEQ ID NO: 1563826
agaagaggucccuguccca

SEQ ID NO: 1834776 - RNA, 19 nt, Artificial Sequence
  Description of Artificial Sequence: Synthetic oligonucleotide
  Antisense strand to SEQ ID NO: 1834775
ugggacagggaccucuucu

SEQ ID NO: 1834777 - RNA, 19 nt, Artificial Sequence
  Description of Artificial Sequence: Synthetic oligonucleotide
  Sense strand starting at position 3177 of SEQ ID NO: 1563826
gucccugucccagaaguga

SEQ ID NO: 1834778 - RNA, 19 nt, Artificial Sequence
  Description of Artificial Sequence: Synthetic oligonucleotide
  Antisense strand to SEQ ID NO: 1834777
ucacuucugggacagggac

SEQ ID NO: 1834779 - RNA, 19 nt, Artificial Sequence
  Description of Artificial Sequence: Synthetic oligonucleotide
  Sense strand starting at position 3186 of SEQ ID NO: 1563826
ccagaagugaugugauguu

SEQ ID NO: 1834780 - RNA, 19 nt, Artificial Sequence
  Description of Artificial Sequence: Synthetic oligonucleotide
  Antisense strand to SEQ ID NO: 1834779
aacaucacaucacuucugg

SEQ ID NO: 1834781 - RNA, 19 nt, Artificial Sequence
  Description of Artificial Sequence: Synthetic oligonucleotide
  Sense strand starting at position 3193 of SEQ ID NO: 1563826
ugaugugauguugggaaac

SEQ ID NO: 1834782 - RNA, 19 nt, Artificial Sequence
  Description of Artificial Sequence: Synthetic oligonucleotide
  Antisense strand to SEQ ID NO: 1834781
guuucccaacaucacauca

SEQ ID NO: 1834783 - RNA, 19 nt, Artificial Sequence
  Description of Artificial Sequence: Synthetic oligonucleotide
  Sense strand starting at position 3293 of SEQ ID NO: 1563826
accaaaggguaguucuaaa

SEQ ID NO: 1834784 - RNA, 19 nt, Artificial Sequence
  Description of Artificial Sequence: Synthetic oligonucleotide
  Antisense strand to SEQ ID NO: 1834783
uuuagaacuacccuuuggu

SEQ ID NO: 1834785 - RNA, 19 nt, Artificial Sequence
  Description of Artificial Sequence: Synthetic oligonucleotide
  Sense strand starting at position 3398 of SEQ ID NO: 1563826
gugaucauauugucaccga

SEQ ID NO: 1834786 - RNA, 19 nt, Artificial Sequence
  Description of Artificial Sequence: Synthetic oligonucleotide
  Antisense strand to SEQ ID NO: 1834785
ucggugacaauaugaucac

SEQ ID NO: 1834787 - RNA, 19 nt, Artificial Sequence
  Description of Artificial Sequence: Synthetic oligonucleotide
  Sense strand starting at position 3401 of SEQ ID NO: 1563826
aucauauugucaccgagua

SEQ ID NO: 1834788 - RNA, 19 nt, Artificial Sequence
  Description of Artificial Sequence: Synthetic oligonucleotide
  Antisense strand to SEQ ID NO: 1834787
uacucggugacaauaugau

SEQ ID NO: 1834789 - RNA, 19 nt, Artificial Sequence
  Description of Artificial Sequence: Synthetic oligonucleotide
  Sense strand starting at position 3406 of SEQ ID NO: 1563826
auugucaccgaguauuauu

SEQ ID NO: 1834790 - RNA, 19 nt, Artificial Sequence
  Description of Artificial Sequence: Synthetic oligonucleotide
  Antisense strand to SEQ ID NO: 1834789
aauaauacucggugacaau

SEQ ID NO: 1834791 - RNA, 19 nt, Artificial Sequence
  Description of Artificial Sequence: Synthetic oligonucleotide
  Sense strand starting at position 3476 of SEQ ID NO: 1563826
cugguuauguauuccaauc

SEQ ID NO: 1834792 - RNA, 19 nt, Artificial Sequence
  Description of Artificial Sequence: Synthetic oligonucleotide
  Antisense strand to SEQ ID NO: 1834791
gauuggaauacauaaccag

SEQ ID NO: 1834793 - RNA, 19 nt, Artificial Sequence
  Description of Artificial Sequence: Synthetic oligonucleotide
  Sense strand starting at position 3669 of SEQ ID NO: 1563826
ugugaacuugggcacauua

SEQ ID NO: 1834794 - RNA, 19 nt, Artificial Sequence
  Description of Artificial Sequence: Synthetic oligonucleotide
  Antisense strand to SEQ ID NO: 1834793
uaaugugcccaaguucaca

SEQ ID NO: 1834795 - RNA, 19 nt, Artificial Sequence
  Description of Artificial Sequence: Synthetic oligonucleotide
  Sense strand starting at position 3707 of SEQ ID NO: 1563826
ggcucuacaucugugaaau

SEQ ID NO: 1834796 - RNA, 19 nt, Artificial Sequence
  Description of Artificial Sequence: Synthetic oligonucleotide
  Antisense strand to SEQ ID NO: 1834795
auuucacagauguagagcc

SEQ ID NO: 1834797 - RNA, 19 nt, Artificial Sequence
  Description of Artificial Sequence: Synthetic oligonucleotide
  Sense strand starting at position 3708 of SEQ ID NO: 1563826
gcucuacaucugugaaaug

SEQ ID NO: 1834798 - RNA, 19 nt, Artificial Sequence
  Description of Artificial Sequence: Synthetic oligonucleotide
  Antisense strand to SEQ ID NO: 1834797
cauuucacagauguagagc

SEQ ID NO: 1834799 - RNA, 19 nt, Artificial Sequence
  Description of Artificial Sequence: Synthetic oligonucleotide
  Sense strand starting at position 3719 of SEQ ID NO: 1563826
gugaaaugagcuugauaag

SEQ ID NO: 1834800 - RNA, 19 nt, Artificial Sequence
  Description of Artificial Sequence: Synthetic oligonucleotide
  Antisense strand to SEQ ID NO: 1834799
cuuaucaagcucauuucac

SEQ ID NO: 1834801 - RNA, 19 nt, Artificial Sequence
  Description of Artificial Sequence: Synthetic oligonucleotide
  Sense strand starting at position 3743 of SEQ ID NO: 1563826
ucuuguaggacugguggaa

SEQ ID NO: 1834802 - RNA, 19 nt, Artificial Sequence
  Description of Artificial Sequence: Synthetic oligonucleotide
  Antisense strand to SEQ ID NO: 1834801
uuccaccaguccuacaaga

SEQ ID NO: 1834803 - RNA, 19 nt, Artificial Sequence
  Description of Artificial Sequence: Synthetic oligonucleotide
  Sense strand starting at position 46 of SEQ ID NO: 1563827
acacaaggguucuccaaau

SEQ ID NO: 1834804 - RNA, 19 nt, Artificial Sequence
  Description of Artificial Sequence: Synthetic oligonucleotide
  Antisense strand to SEQ ID NO: 1834803
auuuggagaacccuugugu

SEQ ID NO: 1834805 - RNA, 19 nt, Artificial Sequence
  Description of Artificial Sequence: Synthetic oligonucleotide
  Sense strand starting at position 1083 of SEQ ID NO: 1563827
ccucaucuccuugagaggu

SEQ ID NO: 1834806 - RNA, 19 nt, Artificial Sequence
  Description of Artificial Sequence: Synthetic oligonucleotide
  Antisense strand to SEQ ID NO: 1834805
accucucaaggagaugagg

SEQ ID NO: 1834807 - RNA, 19 nt, Artificial Sequence
  Description of Artificial Sequence: Synthetic oligonucleotide
  Sense strand starting at position 1097 of SEQ ID NO: 1563827
gagguuaaagguggaaauu

SEQ ID NO: 1834808 - RNA, 19 nt, Artificial Sequence
  Description of Artificial Sequence: Synthetic oligonucleotide
  Antisense strand to SEQ ID NO: 1834807
aauuuccaccuuuaaccuc

SEQ ID NO: 1834809 - RNA, 19 nt, Artificial Sequence
  Description of Artificial Sequence: Synthetic oligonucleotide
  Sense strand starting at position 1219 of SEQ ID NO: 1563827
uauugacuccuggaggguu

SEQ ID NO: 1834810 - RNA, 19 nt, Artificial Sequence
  Description of Artificial Sequence: Synthetic oligonucleotide
  Antisense strand to SEQ ID NO: 1834809
aacccuccaggagucaaua

SEQ ID NO: 1834811 - RNA, 19 nt, Artificial Sequence
  Description of Artificial Sequence: Synthetic oligonucleotide
  Sense strand starting at position 1259 of SEQ ID NO: 1563827
gcuugaugccaacaccuua

SEQ ID NO: 1834812 - RNA, 19 nt, Artificial Sequence
  Description of Artificial Sequence: Synthetic oligonucleotide
  Antisense strand to SEQ ID NO: 1834811
uaagguguuggcaucaagc

SEQ ID NO: 1834813 - RNA, 19 nt, Artificial Sequence
  Description of Artificial Sequence: Synthetic oligonucleotide
  Sense strand starting at position 1619 of SEQ ID NO: 1563827
cccuuuguuauggaguagu

SEQ ID NO: 1834814 - RNA, 19 nt, Artificial Sequence
  Description of Artificial Sequence: Synthetic oligonucleotide
  Antisense strand to SEQ ID NO: 1834813
acuacuccauaacaaaggg

SEQ ID NO: 1834815 - RNA, 19 nt, Artificial Sequence
  Description of Artificial Sequence: Synthetic oligonucleotide
  Sense strand starting at position 1622 of SEQ ID NO: 1563827
uuuguuauggaguaguagu

SEQ ID NO: 1834816 - RNA, 19 nt, Artificial Sequence
  Description of Artificial Sequence: Synthetic oligonucleotide
  Antisense strand to SEQ ID NO: 1834815
acuacuacuccauaacaaa

SEQ ID NO: 1834817 - RNA, 19 nt, Artificial Sequence
  Description of Artificial Sequence: Synthetic oligonucleotide
  Sense strand starting at position 1648 of SEQ ID NO: 1563827
aguccuccucuaggaagua

SEQ ID NO: 1834818 - RNA, 19 nt, Artificial Sequence
  Description of Artificial Sequence: Synthetic oligonucleotide
  Antisense strand to SEQ ID NO: 1834817
uacuuccuagaggaggacu

SEQ ID NO: 1834819 - RNA, 19 nt, Artificial Sequence
  Description of Artificial Sequence: Synthetic oligonucleotide
  Sense strand starting at position 1658 of SEQ ID NO: 1563827
uaggaaguauauccauguu

SEQ ID NO: 1834820 - RNA, 19 nt, Artificial Sequence
  Description of Artificial Sequence: Synthetic oligonucleotide
  Antisense strand to SEQ ID NO: 1834819
aacauggauauacuuccua

SEQ ID NO: 1834821 - RNA, 19 nt, Artificial Sequence
  Description of Artificial Sequence: Synthetic oligonucleotide
  Sense strand starting at position 1820 of SEQ ID NO: 1563827
aauaaugcagagugcgaua

SEQ ID NO: 1834822 - RNA, 19 nt, Artificial Sequence
  Description of Artificial Sequence: Synthetic oligonucleotide
  Antisense strand to SEQ ID NO: 1834821
uaucgcacucugcauuauu

SEQ ID NO: 1834823 - RNA, 19 nt, Artificial Sequence
  Description of Artificial Sequence: Synthetic oligonucleotide
  Sense strand starting at position 1825 of SEQ ID NO: 1563827
ugcagagugcgauaccuaa

SEQ ID NO: 1834824 - RNA, 19 nt, Artificial Sequence
  Description of Artificial Sequence: Synthetic oligonucleotide
  Antisense strand to SEQ ID NO: 1834823
uuagguaucgcacucugca

SEQ ID NO: 1834825 - RNA, 19 nt, Artificial Sequence
  Description of Artificial Sequence: Synthetic oligonucleotide
  Sense strand starting at position 2130 of SEQ ID NO: 1563827
uuuguuauggaguaauagu

SEQ ID NO: 1834826 - RNA, 19 nt, Artificial Sequence
  Description of Artificial Sequence: Synthetic oligonucleotide
  Antisense strand to SEQ ID NO: 1834825
acuauuacuccauaacaaa

SEQ ID NO: 1834827 - RNA, 19 nt, Artificial Sequence
  Description of Artificial Sequence: Synthetic oligonucleotide
  Sense strand starting at position 2153 of SEQ ID NO: 1563827
uuaaguccucucggaagua

SEQ ID NO: 1834828 - RNA, 19 nt, Artificial Sequence
  Description of Artificial Sequence: Synthetic oligonucleotide
  Antisense strand to SEQ ID NO: 1834827
uacuuccgagaggacuuaa

SEQ ID NO: 1834829 - RNA, 19 nt, Artificial Sequence
  Description of Artificial Sequence: Synthetic oligonucleotide
  Sense strand starting at position 2200 of SEQ ID NO: 1563827
auuacaggcuccuuagaga

SEQ ID NO: 1834830 - RNA, 19 nt, Artificial Sequence
  Description of Artificial Sequence: Synthetic oligonucleotide
  Antisense strand to SEQ ID NO: 1834829
ucucuaaggagccuguaau

SEQ ID NO: 1834831 - RNA, 19 nt, Artificial Sequence
  Description of Artificial Sequence: Synthetic oligonucleotide
  Sense strand starting at position 2232 of SEQ ID NO: 1563827
caauaagcucuggacaguu

SEQ ID NO: 1834832 - RNA, 19 nt, Artificial Sequence
  Description of Artificial Sequence: Synthetic oligonucleotide
  Antisense strand to SEQ ID NO: 1834831
aacuguccagagcuuauug

SEQ ID NO: 1834833 - RNA, 19 nt, Artificial Sequence
  Description of Artificial Sequence: Synthetic oligonucleotide
  Sense strand starting at position 2255 of SEQ ID NO: 1563827
aacauaaaccguuacggau

SEQ ID NO: 1834834 - RNA, 19 nt, Artificial Sequence
  Description of Artificial Sequence: Synthetic oligonucleotide
  Antisense strand to SEQ ID NO: 1834833
auccguaacgguuuauguu

SEQ ID NO: 1834835 - RNA, 19 nt, Artificial Sequence
  Description of Artificial Sequence: Synthetic oligonucleotide
  Sense strand starting at position 2344 of SEQ ID NO: 1563827
uucugagauguuggaguaa

SEQ ID NO: 1834836 - RNA, 19 nt, Artificial Sequence
  Description of Artificial Sequence: Synthetic oligonucleotide
  Antisense strand to SEQ ID NO: 1834835
uuacuccaacaucucagaa

SEQ ID NO: 1834837 - RNA, 19 nt, Artificial Sequence
  Description of Artificial Sequence: Synthetic oligonucleotide
  Sense strand starting at position 2357 of SEQ ID NO: 1563827
gaguaagugcauuauaacu

SEQ ID NO: 1834838 - RNA, 19 nt, Artificial Sequence
  Description of Artificial Sequence: Synthetic oligonucleotide
  Antisense strand to SEQ ID NO: 1834837
aguuauaaugcacuuacuc

SEQ ID NO: 1834839 - RNA, 19 nt, Artificial Sequence
  Description of Artificial Sequence: Synthetic oligonucleotide
  Sense strand starting at position 2449 of SEQ ID NO: 1563827
gccauagauguacacaauu

SEQ ID NO: 1834840 - RNA, 19 nt, Artificial Sequence
  Description of Artificial Sequence: Synthetic oligonucleotide
  Antisense strand to SEQ ID NO: 1834839
aauuguguacaucuauggc

SEQ ID NO: 1834841 - RNA, 19 nt, Artificial Sequence
  Description of Artificial Sequence: Synthetic oligonucleotide
  Sense strand starting at position 2505 of SEQ ID NO: 1563827
cauuguauugugcagugaa

SEQ ID NO: 1834842 - RNA, 19 nt, Artificial Sequence
  Description of Artificial Sequence: Synthetic oligonucleotide
  Antisense strand to SEQ ID NO: 1834841
uucacugcacaauacaaug

SEQ ID NO: 1834843 - RNA, 19 nt, Artificial Sequence
  Description of Artificial Sequence: Synthetic oligonucleotide
  Sense strand starting at position 2539 of SEQ ID NO: 1563827
ggucuuauuuguuccacca

SEQ ID NO: 1834844 - RNA, 19 nt, Artificial Sequence
  Description of Artificial Sequence: Synthetic oligonucleotide
  Antisense strand to SEQ ID NO: 1834843
ugguggaacaaauaagacc

SEQ ID NO: 1834845 - RNA, 19 nt, Artificial Sequence
  Description of Artificial Sequence: Synthetic oligonucleotide
  Sense strand starting at position 2853 of SEQ ID NO: 1563827
auuuaaguuuguuugccau

SEQ ID NO: 1834846 - RNA, 19 nt, Artificial Sequence
  Description of Artificial Sequence: Synthetic oligonucleotide
  Antisense strand to SEQ ID NO: 1834845
auggcaaacaaacuuaaau

SEQ ID NO: 1834847 - RNA, 19 nt, Artificial Sequence
  Description of Artificial Sequence: Synthetic oligonucleotide
  Sense strand starting at position 2899 of SEQ ID NO: 1563827
ugauguuaguuuguggaau

SEQ ID NO: 1834848 - RNA, 19 nt, Artificial Sequence
  Description of Artificial Sequence: Synthetic oligonucleotide
  Antisense strand to SEQ ID NO: 1834847
auuccacaaacuaacauca

SEQ ID NO: 1834849 - RNA, 19 nt, Artificial Sequence
  Description of Artificial Sequence: Synthetic oligonucleotide
  Sense strand starting at position 2910 of SEQ ID NO: 1563827
uguggaauguuaucaagca

SEQ ID NO: 1834850 - RNA, 19 nt, Artificial Sequence
  Description of Artificial Sequence: Synthetic oligonucleotide
  Antisense strand to SEQ ID NO: 1834849
ugcuugauaacauuccaca

SEQ ID NO: 1834851 - RNA, 19 nt, Artificial Sequence
  Description of Artificial Sequence: Synthetic oligonucleotide
  Sense strand starting at position 2922 of SEQ ID NO: 1563827
ucaagcauuuguguugaau

SEQ ID NO: 1834852 - RNA, 19 nt, Artificial Sequence
  Description of Artificial Sequence: Synthetic oligonucleotide
  Antisense strand to SEQ ID NO: 1834851
auucaacacaaaugcuuga

SEQ ID NO: 1834853 - RNA, 19 nt, Artificial Sequence
  Description of Artificial Sequence: Synthetic oligonucleotide
  Sense strand starting at position 2924 of SEQ ID NO: 1563827
aagcauuuguguugaauuu

SEQ ID NO: 1834854 - RNA, 19 nt, Artificial Sequence
  Description of Artificial Sequence: Synthetic oligonucleotide
  Antisense strand to SEQ ID NO: 1834853
aaauucaacacaaaugcuu

SEQ ID NO: 1834855 - RNA, 19 nt, Artificial Sequence
  Description of Artificial Sequence: Synthetic oligonucleotide
  Sense strand starting at position 3025 of SEQ ID NO: 1563827
gaggcugacacaugacgau

SEQ ID NO: 1834856 - RNA, 19 nt, Artificial Sequence
  Description of Artificial Sequence: Synthetic oligonucleotide
  Antisense strand to SEQ ID NO: 1834855
aucgucaugugucagccuc

SEQ ID NO: 1834857 - RNA, 19 nt, Artificial Sequence
  Description of Artificial Sequence: Synthetic oligonucleotide
  Sense strand starting at position 3063 of SEQ ID NO: 1563827
gacaccaguccgcaacaua

SEQ ID NO: 1834858 - RNA, 19 nt, Artificial Sequence
  Description of Artificial Sequence: Synthetic oligonucleotide
  Antisense strand to SEQ ID NO: 1834857
uauguugcggacugguguc

SEQ ID NO: 1834859 - RNA, 19 nt, Artificial Sequence
  Description of Artificial Sequence: Synthetic oligonucleotide
  Sense strand starting at position 3373 of SEQ ID NO: 1563827
cugcuauguguuuauugag

SEQ ID NO: 1834860 - RNA, 19 nt, Artificial Sequence
  Description of Artificial Sequence: Synthetic oligonucleotide
  Antisense strand to SEQ ID NO: 1834859
cucaauaaacacauagcag

SEQ ID NO: 1834861 - RNA, 19 nt, Artificial Sequence
  Description of Artificial Sequence: Synthetic oligonucleotide
  Sense strand starting at position 3380 of SEQ ID NO: 1563827
guguuuauugaggaucuuu

SEQ ID NO: 1834862 - RNA, 19 nt, Artificial Sequence
  Description of Artificial Sequence: Synthetic oligonucleotide
  Antisense strand to SEQ ID NO: 1834861
aaagauccucaauaaacac

SEQ ID NO: 1834863 - RNA, 19 nt, Artificial Sequence
  Description of Artificial Sequence: Synthetic oligonucleotide
  Sense strand starting at position 3444 of SEQ ID NO: 1563827
cuagguuauccucagcugu

SEQ ID NO: 1834864 - RNA, 19 nt, Artificial Sequence
  Description of Artificial Sequence: Synthetic oligonucleotide
  Antisense strand to SEQ ID NO: 1834863
acagcugaggauaaccuag

SEQ ID NO: 1834865 - RNA, 19 nt, Artificial Sequence
  Description of Artificial Sequence: Synthetic oligonucleotide
  Sense strand starting at position 3511 of SEQ ID NO: 1563827
aaagcuagccugggaaagu

SEQ ID NO: 1834866 - RNA, 19 nt, Artificial Sequence
  Description of Artificial Sequence: Synthetic oligonucleotide
  Antisense strand to SEQ ID NO: 1834865
acuuucccaggcuagcuuu

SEQ ID NO: 1834867 - RNA, 19 nt, Artificial Sequence
  Description of Artificial Sequence: Synthetic oligonucleotide
  Sense strand starting at position 3522 of SEQ ID NO: 1563827
gggaaagugaguugaacau

SEQ ID NO: 1834868 - RNA, 19 nt, Artificial Sequence
  Description of Artificial Sequence: Synthetic oligonucleotide
  Antisense strand to SEQ ID NO: 1834867
auguucaacucacuuuccc

SEQ ID NO: 1834869 - RNA, 19 nt, Artificial Sequence
  Description of Artificial Sequence: Synthetic oligonucleotide
  Sense strand starting at position 3540 of SEQ ID NO: 1563827
ucauaagauggugguuauu

SEQ ID NO: 1834870 - RNA, 19 nt, Artificial Sequence
  Description of Artificial Sequence: Synthetic oligonucleotide
  Antisense strand to SEQ ID NO: 1834869
aauaaccaccaucuuauga

SEQ ID NO: 1834871 - RNA, 19 nt, Artificial Sequence
  Description of Artificial Sequence: Synthetic oligonucleotide
  Sense strand starting at position 3567 of SEQ ID NO: 1563827
uacauaagauggucagcuu

SEQ ID NO: 1834872 - RNA, 19 nt, Artificial Sequence
  Description of Artificial Sequence: Synthetic oligonucleotide
  Antisense strand to SEQ ID NO: 1834871
aagcugaccaucuuaugua

SEQ ID NO: 1834873 - RNA, 19 nt, Artificial Sequence
  Description of Artificial Sequence: Synthetic oligonucleotide
  Sense strand starting at position 3568 of SEQ ID NO: 1563827
acauaagauggucagcuuu

SEQ ID NO: 1834874 - RNA, 19 nt, Artificial Sequence
  Description of Artificial Sequence: Synthetic oligonucleotide
  Antisense strand to SEQ ID NO: 1834873
aaagcugaccaucuuaugu

SEQ ID NO: 1834875 - RNA, 19 nt, Artificial Sequence
  Description of Artificial Sequence: Synthetic oligonucleotide
  Sense strand starting at position 3671 of SEQ ID NO: 1563827
ugcguuucgcaauuacaga

SEQ ID NO: 1834876 - RNA, 19 nt, Artificial Sequence
  Description of Artificial Sequence: Synthetic oligonucleotide
  Antisense strand to SEQ ID NO: 1834875
ucuguaauugcgaaacgca

SEQ ID NO: 1834877 - RNA, 19 nt, Artificial Sequence
  Description of Artificial Sequence: Synthetic oligonucleotide
  Sense strand starting at position 3730 of SEQ ID NO: 1563827
ccuaaauaauggucuguuu

SEQ ID NO: 1834878 - RNA, 19 nt, Artificial Sequence
  Description of Artificial Sequence: Synthetic oligonucleotide
  Antisense strand to SEQ ID NO: 1834877
aaacagaccauuauuuagg

SEQ ID NO: 1834879 - RNA, 19 nt, Artificial Sequence
  Description of Artificial Sequence: Synthetic oligonucleotide
  Sense strand starting at position 3896 of SEQ ID NO: 1563827
caugucugccaguggaaua

SEQ ID NO: 1834880 - RNA, 19 nt, Artificial Sequence
  Description of Artificial Sequence: Synthetic oligonucleotide
  Antisense strand to SEQ ID NO: 1834879
uauuccacuggcagacaug

SEQ ID NO: 1834881 - RNA, 19 nt, Artificial Sequence
  Description of Artificial Sequence: Synthetic oligonucleotide
  Sense strand starting at position 3897 of SEQ ID NO: 1563827
augucugccaguggaauaa

SEQ ID NO: 1834882 - RNA, 19 nt, Artificial Sequence
  Description of Artificial Sequence: Synthetic oligonucleotide
  Antisense strand to SEQ ID NO: 1834881
uuauuccacuggcagacau

SEQ ID NO: 1834883 - RNA, 19 nt, Artificial Sequence
  Description of Artificial Sequence: Synthetic oligonucleotide
  Sense strand starting at position 371 of SEQ ID NO: 1563828
ccgggaaucuucccucuga

SEQ ID NO: 1834884 - RNA, 19 nt, Artificial Sequence
  Description of Artificial Sequence: Synthetic oligonucleotide
  Antisense strand to SEQ ID NO: 1834883
ucagagggaagauucccgg

SEQ ID NO: 1834885 - RNA, 19 nt, Artificial Sequence
  Description of Artificial Sequence: Synthetic oligonucleotide
  Sense strand starting at position 372 of SEQ ID NO: 1563828
cgggaaucuucccucugau

SEQ ID NO: 1834886 - RNA, 19 nt, Artificial Sequence
  Description of Artificial Sequence: Synthetic oligonucleotide
  Antisense strand to SEQ ID NO: 1834885
aucagagggaagauucccg

SEQ ID NO: 1834887 - RNA, 19 nt, Artificial Sequence
  Description of Artificial Sequence: Synthetic oligonucleotide
  Sense strand starting at position 445 of SEQ ID NO: 1563828
augacaugaaguugucuga

SEQ ID NO: 1834888 - RNA, 19 nt, Artificial Sequence
  Description of Artificial Sequence: Synthetic oligonucleotide
  Antisense strand to SEQ ID NO: 1834887
ucagacaacuucaugucau

SEQ ID NO: 1834889 - RNA, 19 nt, Artificial Sequence
  Description of Artificial Sequence: Synthetic oligonucleotide
  Sense strand starting at position 527 of SEQ ID NO: 1563828
guaacacccuguuccagaa

SEQ ID NO: 1834890 - RNA, 19 nt, Artificial Sequence
  Description of Artificial Sequence: Synthetic oligonucleotide
  Antisense strand to SEQ ID NO: 1834889
uucuggaacaggguguuac

SEQ ID NO: 1834891 - RNA, 19 nt, Artificial Sequence
  Description of Artificial Sequence: Synthetic oligonucleotide
  Sense strand starting at position 541 of SEQ ID NO: 1563828
cagaauauguggcccagau

SEQ ID NO: 1834892 - RNA, 19 nt, Artificial Sequence
  Description of Artificial Sequence: Synthetic oligonucleotide
  Antisense strand to SEQ ID NO: 1834891
aucugggccacauauucug

SEQ ID NO: 1834893 - RNA, 19 nt, Artificial Sequence
  Description of Artificial Sequence: Synthetic oligonucleotide
  Sense strand starting at position 543 of SEQ ID NO: 1563828
gaauauguggcccagaucu

SEQ ID NO: 1834894 - RNA, 19 nt, Artificial Sequence
  Description of Artificial Sequence: Synthetic oligonucleotide
  Antisense strand to SEQ ID NO: 1834893
agaucugggccacauauuc

SEQ ID NO: 1834895 - RNA, 19 nt, Artificial Sequence
  Description of Artificial Sequence: Synthetic oligonucleotide
  Sense strand starting at position 545 of SEQ ID NO: 1563828
auauguggcccagaucuuu

SEQ ID NO: 1834896 - RNA, 19 nt, Artificial Sequence
  Description of Artificial Sequence: Synthetic oligonucleotide
  Antisense strand to SEQ ID NO: 1834895
aaagaucugggccacauau

SEQ ID NO: 1834897 - RNA, 19 nt, Artificial Sequence
  Description of Artificial Sequence: Synthetic oligonucleotide
  Sense strand starting at position 782 of SEQ ID NO: 1563828
gcuggccugauguaauaua

SEQ ID NO: 1834898 - RNA, 19 nt, Artificial Sequence
  Description of Artificial Sequence: Synthetic oligonucleotide
  Antisense strand to SEQ ID NO: 1834897
uauauuacaucaggccagc

SEQ ID NO: 1834899 - RNA, 19 nt, Artificial Sequence
  Description of Artificial Sequence: Synthetic oligonucleotide
  Sense strand starting at position 904 of SEQ ID NO: 1563828
ggauccuucucugucauca

SEQ ID NO: 1834900 - RNA, 19 nt, Artificial Sequence
  Description of Artificial Sequence: Synthetic oligonucleotide
  Antisense strand to SEQ ID NO: 1834899
ugaugacagagaaggaucc

SEQ ID NO: 1834901 - RNA, 19 nt, Artificial Sequence
  Description of Artificial Sequence: Synthetic oligonucleotide
  Sense strand starting at position 960 of SEQ ID NO: 1563828
auuggaaacuaguugguaa

SEQ ID NO: 1834902 - RNA, 19 nt, Artificial Sequence
  Description of Artificial Sequence: Synthetic oligonucleotide
  Antisense strand to SEQ ID NO: 1834901
uuaccaacuaguuuccaau

SEQ ID NO: 1834903 - RNA, 19 nt, Artificial Sequence
  Description of Artificial Sequence: Synthetic oligonucleotide
  Sense strand starting at position 961 of SEQ ID NO: 1563828
uuggaaacuaguugguaau

SEQ ID NO: 1834904 - RNA, 19 nt, Artificial Sequence
  Description of Artificial Sequence: Synthetic oligonucleotide
  Antisense strand to SEQ ID NO: 1834903
auuaccaacuaguuuccaa

SEQ ID NO: 1834905 - RNA, 19 nt, Artificial Sequence
  Description of Artificial Sequence: Synthetic oligonucleotide
  Sense strand starting at position 963 of SEQ ID NO: 1563828
ggaaacuaguugguaaugu

SEQ ID NO: 1834906 - RNA, 19 nt, Artificial Sequence
  Description of Artificial Sequence: Synthetic oligonucleotide
  Antisense strand to SEQ ID NO: 1834905
acauuaccaacuaguuucc

SEQ ID NO: 1834907 - RNA, 19 nt, Artificial Sequence
  Description of Artificial Sequence: Synthetic oligonucleotide
  Sense strand starting at position 1532 of SEQ ID NO: 1563828
cgacacugccuauaucaga

SEQ ID NO: 1834908 - RNA, 19 nt, Artificial Sequence
  Description of Artificial Sequence: Synthetic oligonucleotide
  Antisense strand to SEQ ID NO: 1834907
ucugauauaggcagugucg

SEQ ID NO: 1834909 - RNA, 19 nt, Artificial Sequence
  Description of Artificial Sequence: Synthetic oligonucleotide
  Sense strand starting at position 1580 of SEQ ID NO: 1563828
ggcggaagucaguaagcaa

SEQ ID NO: 1834910 - RNA, 19 nt, Artificial Sequence
  Description of Artificial Sequence: Synthetic oligonucleotide
  Antisense strand to SEQ ID NO: 1834909
uugcuuacugacuuccgcc

SEQ ID NO: 1834911 - RNA, 19 nt, Artificial Sequence
  Description of Artificial Sequence: Synthetic oligonucleotide
  Sense strand starting at position 1695 of SEQ ID NO: 1563828
uggugaucgacucagcacu

SEQ ID NO: 1834912 - RNA, 19 nt, Artificial Sequence
  Description of Artificial Sequence: Synthetic oligonucleotide
  Antisense strand to SEQ ID NO: 1834911
agugcugagucgaucacca

SEQ ID NO: 1834913 - RNA, 19 nt, Artificial Sequence
  Description of Artificial Sequence: Synthetic oligonucleotide
  Sense strand starting at position 1735 of SEQ ID NO: 1563828
uuuaacucucggcaaaucu

SEQ ID NO: 1834914 - RNA, 19 nt, Artificial Sequence
  Description of Artificial Sequence: Synthetic oligonucleotide
  Antisense strand to SEQ ID NO: 1834913
agauuugccgagaguuaaa

SEQ ID NO: 1834915 - RNA, 19 nt, Artificial Sequence
  Description of Artificial Sequence: Synthetic oligonucleotide
  Sense strand starting at position 2127 of SEQ ID NO: 1563828
gauauugaauaugcuguua

SEQ ID NO: 1834916 - RNA, 19 nt, Artificial Sequence
  Description of Artificial Sequence: Synthetic oligonucleotide
  Antisense strand to SEQ ID NO: 1834915
uaacagcauauucaauauc

SEQ ID NO: 1834917 - RNA, 19 nt, Artificial Sequence
  Description of Artificial Sequence: Synthetic oligonucleotide
  Sense strand starting at position 2152 of SEQ ID NO: 1563828
uuaggauauugucuaauug

SEQ ID NO: 1834918 - RNA, 19 nt, Artificial Sequence
  Description of Artificial Sequence: Synthetic oligonucleotide
  Antisense strand to SEQ ID NO: 1834917
caauuagacaauauccuaa

SEQ ID NO: 1834919 - RNA, 19 nt, Artificial Sequence
  Description of Artificial Sequence: Synthetic oligonucleotide
  Sense strand starting at position 2153 of SEQ ID NO: 1563828
uaggauauugucuaauugu

SEQ ID NO: 1834920 - RNA, 19 nt, Artificial Sequence
  Description of Artificial Sequence: Synthetic oligonucleotide
  Antisense strand to SEQ ID NO: 1834919
acaauuagacaauauccua

SEQ ID NO: 1834921 - RNA, 19 nt, Artificial Sequence
  Description of Artificial Sequence: Synthetic oligonucleotide
  Sense strand starting at position 2156 of SEQ ID NO: 1563828
gauauugucuaauugugaa

SEQ ID NO: 1834922 - RNA, 19 nt, Artificial Sequence
  Description of Artificial Sequence: Synthetic oligonucleotide
  Antisense strand to SEQ ID NO: 1834921
uucacaauuagacaauauc

SEQ ID NO: 1834923 - RNA, 19 nt, Artificial Sequence
  Description of Artificial Sequence: Synthetic oligonucleotide
  Sense strand starting at position 2284 of SEQ ID NO: 1563828
uuggaugaguuuccauaag

SEQ ID NO: 1834924 - RNA, 19 nt, Artificial Sequence
  Description of Artificial Sequence: Synthetic oligonucleotide
  Antisense strand to SEQ ID NO: 1834923
cuuauggaaacucauccaa

SEQ ID NO: 1834925 - RNA, 19 nt, Artificial Sequence
  Description of Artificial Sequence: Synthetic oligonucleotide
  Sense strand starting at position 2578 of SEQ ID NO: 1563828
agacgugacccguacacua

SEQ ID NO: 1834926 - RNA, 19 nt, Artificial Sequence
  Description of Artificial Sequence: Synthetic oligonucleotide
  Antisense strand to SEQ ID NO: 1834925
uaguguacgggucacgucu

SEQ ID NO: 1834927 - RNA, 19 nt, Artificial Sequence
  Description of Artificial Sequence: Synthetic oligonucleotide
  Sense strand starting at position 2659 of SEQ ID NO: 1563828
ugaggauggcuugaucuuu

SEQ ID NO: 1834928 - RNA, 19 nt, Artificial Sequence
  Description of Artificial Sequence: Synthetic oligonucleotide
  Antisense strand to SEQ ID NO: 1834927
aaagaucaagccauccuca

SEQ ID NO: 1834929 - RNA, 19 nt, Artificial Sequence
  Description of Artificial Sequence: Synthetic oligonucleotide
  Sense strand starting at position 2664 of SEQ ID NO: 1563828
auggcuugaucuuugacua

SEQ ID NO: 1834930 - RNA, 19 nt, Artificial Sequence
  Description of Artificial Sequence: Synthetic oligonucleotide
  Antisense strand to SEQ ID NO: 1834929
uagucaaagaucaagccau

SEQ ID NO: 1834931 - RNA, 19 nt, Artificial Sequence
  Description of Artificial Sequence: Synthetic oligonucleotide
  Sense strand starting at position 2668 of SEQ ID NO: 1563828
cuugaucuuugacuacagu

SEQ ID NO: 1834932 - RNA, 19 nt, Artificial Sequence
  Description of Artificial Sequence: Synthetic oligonucleotide
  Antisense strand to SEQ ID NO: 1834931
acuguagucaaagaucaag

SEQ ID NO: 1834933 - RNA, 19 nt, Artificial Sequence
  Description of Artificial Sequence: Synthetic oligonucleotide
  Sense strand starting at position 2669 of SEQ ID NO: 1563828
uugaucuuugacuacaguu

SEQ ID NO: 1834934 - RNA, 19 nt, Artificial Sequence
  Description of Artificial Sequence: Synthetic oligonucleotide
  Antisense strand to SEQ ID NO: 1834933
aacuguagucaaagaucaa

SEQ ID NO: 1834935 - RNA, 19 nt, Artificial Sequence
  Description of Artificial Sequence: Synthetic oligonucleotide
  Sense strand starting at position 2891 of SEQ ID NO: 1563828
ccaugucaucaguaguuaa

SEQ ID NO: 1834936 - RNA, 19 nt, Artificial Sequence
  Description of Artificial Sequence: Synthetic oligonucleotide
  Antisense strand to SEQ ID NO: 1834935
uuaacuacugaugacaugg

SEQ ID NO: 1834937 - RNA, 19 nt, Artificial Sequence
  Description of Artificial Sequence: Synthetic oligonucleotide
  Sense strand starting at position 3167 of SEQ ID NO: 1563828
ccaguugguuauucugaga

SEQ ID NO: 1834938 - RNA, 19 nt, Artificial Sequence
  Description of Artificial Sequence: Synthetic oligonucleotide
  Antisense strand to SEQ ID NO: 1834937
ucucagaauaaccaacugg

SEQ ID NO: 1834939 - RNA, 19 nt, Artificial Sequence
  Description of Artificial Sequence: Synthetic oligonucleotide
  Sense strand starting at position 3174 of SEQ ID NO: 1563828
guuauucugagauaauggu

SEQ ID NO: 1834940 - RNA, 19 nt, Artificial Sequence
  Description of Artificial Sequence: Synthetic oligonucleotide
  Antisense strand to SEQ ID NO: 1834939
accauuaucucagaauaac

SEQ ID NO: 1834941 - RNA, 19 nt, Artificial Sequence
  Description of Artificial Sequence: Synthetic oligonucleotide
  Sense strand starting at position 3347 of SEQ ID NO: 1563828
cuccgauuucuguguacuc

SEQ ID NO: 1834942 - RNA, 19 nt, Artificial Sequence
  Description of Artificial Sequence: Synthetic oligonucleotide
  Antisense strand to SEQ ID NO: 1834941
gaguacacagaaaucggag

SEQ ID NO: 1834943 - RNA, 19 nt, Artificial Sequence
  Description of Artificial Sequence: Synthetic oligonucleotide
  Sense strand starting at position 3348 of SEQ ID NO: 1563828
uccgauuucuguguacucu

SEQ ID NO: 1834944 - RNA, 19 nt, Artificial Sequence
  Description of Artificial Sequence: Synthetic oligonucleotide
  Antisense strand to SEQ ID NO: 1834943
agaguacacagaaaucgga

SEQ ID NO: 1834945 - RNA, 19 nt, Artificial Sequence
  Description of Artificial Sequence: Synthetic oligonucleotide
  Sense strand starting at position 3435 of SEQ ID NO: 1563828
agaggcucuguauaguaga

SEQ ID NO: 1834946 - RNA, 19 nt, Artificial Sequence
  Description of Artificial Sequence: Synthetic oligonucleotide
  Antisense strand to SEQ ID NO: 1834945
ucuacuauacagagccucu

SEQ ID NO: 1834947 - RNA, 19 nt, Artificial Sequence
  Description of Artificial Sequence: Synthetic oligonucleotide
  Sense strand starting at position 3474 of SEQ ID NO: 1563828
aagaauggaucugagacaa

SEQ ID NO: 1834948 - RNA, 19 nt, Artificial Sequence
  Description of Artificial Sequence: Synthetic oligonucleotide
  Antisense strand to SEQ ID NO: 1834947
uugucucagauccauucuu

SEQ ID NO: 1834949 - RNA, 19 nt, Artificial Sequence
  Description of Artificial Sequence: Synthetic oligonucleotide
  Sense strand starting at position 3499 of SEQ ID NO: 1563828
ucaguauuggcauaccacu

SEQ ID NO: 1834950 - RNA, 19 nt, Artificial Sequence
  Description of Artificial Sequence: Synthetic oligonucleotide
  Antisense strand to SEQ ID NO: 1834949
agugguaugccaauacuga

SEQ ID NO: 1834951 - RNA, 19 nt, Artificial Sequence
  Description of Artificial Sequence: Synthetic oligonucleotide
  Sense strand starting at position 3707 of SEQ ID NO: 1563828
aggcaaagauuccuguuau

SEQ ID NO: 1834952 - RNA, 19 nt, Artificial Sequence
  Description of Artificial Sequence: Synthetic oligonucleotide
  Antisense strand to SEQ ID NO: 1834951
auaacaggaaucuuugccu

SEQ ID NO: 1834953 - RNA, 19 nt, Artificial Sequence
  Description of Artificial Sequence: Synthetic oligonucleotide
  Sense strand starting at position 3713 of SEQ ID NO: 1563828
agauuccuguuaucaccau

SEQ ID NO: 1834954 - RNA, 19 nt, Artificial Sequence
  Description of Artificial Sequence: Synthetic oligonucleotide
  Antisense strand to SEQ ID NO: 1834953
auggugauaacaggaaucu

SEQ ID NO: 1834955 - RNA, 19 nt, Artificial Sequence
  Description of Artificial Sequence: Synthetic oligonucleotide
  Sense strand starting at position 3784 of SEQ ID NO: 1563828
caaagagauugggauugga

SEQ ID NO: 1834956 - RNA, 19 nt, Artificial Sequence
  Description of Artificial Sequence: Synthetic oligonucleotide
  Antisense strand to SEQ ID NO: 1834955
uccaaucccaaucucuuug

SEQ ID NO: 1834957 - RNA, 19 nt, Artificial Sequence
  Description of Artificial Sequence: Synthetic oligonucleotide
  Sense strand starting at position 3816 of SEQ ID NO: 1563828
uguuucugucauuaaacau

SEQ ID NO: 1834958 - RNA, 19 nt, Artificial Sequence
  Description of Artificial Sequence: Synthetic oligonucleotide
  Antisense strand to SEQ ID NO: 1834957
auguuuaaugacagaaaca

SEQ ID NO: 1834959 - RNA, 19 nt, Artificial Sequence
  Description of Artificial Sequence: Synthetic oligonucleotide
  Sense strand starting at position 3898 of SEQ ID NO: 1563828
aaagguuccuggguauaau

SEQ ID NO: 1834960 - RNA, 19 nt, Artificial Sequence
  Description of Artificial Sequence: Synthetic oligonucleotide
  Antisense strand to SEQ ID NO: 1834959
auuauacccaggaaccuuu

SEQ ID NO: 1834961 - RNA, 19 nt, Artificial Sequence
  Description of Artificial Sequence: Synthetic oligonucleotide
  Sense strand starting at position 3901 of SEQ ID NO: 1563828
gguuccuggguauaauauu

SEQ ID NO: 1834962 - RNA, 19 nt, Artificial Sequence
  Description of Artificial Sequence: Synthetic oligonucleotide
  Antisense strand to SEQ ID NO: 1834961
aauauuauacccaggaacc

SEQ ID NO: 1834963 - RNA, 19 nt, Artificial Sequence
  Description of Artificial Sequence: Synthetic oligonucleotide
  Sense strand starting at position 283 of SEQ ID NO: 1563829
ccuacuucucccugggaag

SEQ ID NO: 1834964 - RNA, 19 nt, Artificial Sequence
  Description of Artificial Sequence: Synthetic oligonucleotide
  Antisense strand to SEQ ID NO: 1834963
cuucccagggagaaguagg

SEQ ID NO: 1834965 - RNA, 19 nt, Artificial Sequence
  Description of Artificial Sequence: Synthetic oligonucleotide
  Sense strand starting at position 779 of SEQ ID NO: 1563829
gaccucagauuuggacauu

SEQ ID NO: 1834966 - RNA, 19 nt, Artificial Sequence
  Description of Artificial Sequence: Synthetic oligonucleotide
  Antisense strand to SEQ ID NO: 1834965
aauguccaaaucugagguc

SEQ ID NO: 1834967 - RNA, 19 nt, Artificial Sequence
  Description of Artificial Sequence: Synthetic oligonucleotide
  Sense strand starting at position 1329 of SEQ ID NO: 1563829
uacucagacuggucuggaa

SEQ ID NO: 1834968 - RNA, 19 nt, Artificial Sequence
  Description of Artificial Sequence: Synthetic oligonucleotide
  Antisense strand to SEQ ID NO: 1834967
uuccagaccagucugagua

SEQ ID NO: 1834969 - RNA, 19 nt, Artificial Sequence
  Description of Artificial Sequence: Synthetic oligonucleotide
  Sense strand starting at position 1435 of SEQ ID NO: 1563829
ccauguuugggagaggucu

SEQ ID NO: 1834970 - RNA, 19 nt, Artificial Sequence
  Description of Artificial Sequence: Synthetic oligonucleotide
  Antisense strand to SEQ ID NO: 1834969
agaccucucccaaacaugg

SEQ ID NO: 1834971 - RNA, 19 nt, Artificial Sequence
  Description of Artificial Sequence: Synthetic oligonucleotide
  Sense strand starting at position 1447 of SEQ ID NO: 1563829
gaggucuccucaucagcau

SEQ ID NO: 1834972 - RNA, 19 nt, Artificial Sequence
  Description of Artificial Sequence: Synthetic oligonucleotide
  Antisense strand to SEQ ID NO: 1834971
augcugaugaggagaccuc

SEQ ID NO: 1834973 - RNA, 19 nt, Artificial Sequence
  Description of Artificial Sequence: Synthetic oligonucleotide
  Sense strand starting at position 1479 of SEQ ID NO: 1563829
ucgauuagggccuaggagu

SEQ ID NO: 1834974 - RNA, 19 nt, Artificial Sequence
  Description of Artificial Sequence: Synthetic oligonucleotide
  Antisense strand to SEQ ID NO: 1834973
acuccuaggcccuaaucga

SEQ ID NO: 1834975 - RNA, 19 nt, Artificial Sequence
  Description of Artificial Sequence: Synthetic oligonucleotide
  Sense strand starting at position 1495 of SEQ ID NO: 1563829
aguccaucccucugcagaa

SEQ ID NO: 1834976 - RNA, 19 nt, Artificial Sequence
  Description of Artificial Sequence: Synthetic oligonucleotide
  Antisense strand to SEQ ID NO: 1834975
uucugcagagggauggacu

SEQ ID NO: 1834977 - RNA, 19 nt, Artificial Sequence
  Description of Artificial Sequence: Synthetic oligonucleotide
  Sense strand starting at position 1559 of SEQ ID NO: 1563829
cucagaagucagugccaca

SEQ ID NO: 1834978 - RNA, 19 nt, Artificial Sequence
  Description of Artificial Sequence: Synthetic oligonucleotide
  Antisense strand to SEQ ID NO: 1834977
uguggcacugacuucugag

SEQ ID NO: 1834979 - RNA, 19 nt, Artificial Sequence
  Description of Artificial Sequence: Synthetic oligonucleotide
  Sense strand starting at position 1687 of SEQ ID NO: 1563829
caggguccuuaccuugaua

SEQ ID NO: 1834980 - RNA, 19 nt, Artificial Sequence
  Description of Artificial Sequence: Synthetic oligonucleotide
  Antisense strand to SEQ ID NO: 1834979
uaucaagguaaggacccug

SEQ ID NO: 1834981 - RNA, 19 nt, Artificial Sequence
  Description of Artificial Sequence: Synthetic oligonucleotide
  Sense strand starting at position 2035 of SEQ ID NO: 1563829
uuugcuauggcugacaaga

SEQ ID NO: 1834982 - RNA, 19 nt, Artificial Sequence
  Description of Artificial Sequence: Synthetic oligonucleotide
  Antisense strand to SEQ ID NO: 1834981
ucuugucagccauagcaaa

SEQ ID NO: 1834983 - RNA, 19 nt, Artificial Sequence
  Description of Artificial Sequence: Synthetic oligonucleotide
  Sense strand starting at position 2043 of SEQ ID NO: 1563829
ggcugacaagauuaagcau

SEQ ID NO: 1834984 - RNA, 19 nt, Artificial Sequence
  Description of Artificial Sequence: Synthetic oligonucleotide
  Antisense strand to SEQ ID NO: 1834983
augcuuaaucuugucagcc

SEQ ID NO: 1834985 - RNA, 19 nt, Artificial Sequence
  Description of Artificial Sequence: Synthetic oligonucleotide
  Sense strand starting at position 2514 of SEQ ID NO: 1563829
ggacuacagaguuguaauc

SEQ ID NO: 1834986 - RNA, 19 nt, Artificial Sequence
  Description of Artificial Sequence: Synthetic oligonucleotide
  Antisense strand to SEQ ID NO: 1834985
gauuacaacucuguagucc

SEQ ID NO: 1834987 - RNA, 19 nt, Artificial Sequence
  Description of Artificial Sequence: Synthetic oligonucleotide
  Sense strand starting at position 2646 of SEQ ID NO: 1563829
gggucaucaccuugguauc

SEQ ID NO: 1834988 - RNA, 19 nt, Artificial Sequence
  Description of Artificial Sequence: Synthetic oligonucleotide
  Antisense strand to SEQ ID NO: 1834987
gauaccaaggugaugaccc

SEQ ID NO: 1834989 - RNA, 19 nt, Artificial Sequence
  Description of Artificial Sequence: Synthetic oligonucleotide
  Sense strand starting at position 2648 of SEQ ID NO: 1563829
gucaucaccuugguaucua

SEQ ID NO: 1834990 - RNA, 19 nt, Artificial Sequence
  Description of Artificial Sequence: Synthetic oligonucleotide
  Antisense strand to SEQ ID NO: 1834989
uagauaccaaggugaugac

SEQ ID NO: 1834991 - RNA, 19 nt, Artificial Sequence
  Description of Artificial Sequence: Synthetic oligonucleotide
  Sense strand starting at position 2697 of SEQ ID NO: 1563829
cugaguuugucuuccugaa

SEQ ID NO: 1834992 - RNA, 19 nt, Artificial Sequence
  Description of Artificial Sequence: Synthetic oligonucleotide
  Antisense strand to SEQ ID NO: 1834991
uucaggaagacaaacucag

SEQ ID NO: 1834993 - RNA, 19 nt, Artificial Sequence
  Description of Artificial Sequence: Synthetic oligonucleotide
  Sense strand starting at position 2699 of SEQ ID NO: 1563829
gaguuugucuuccugaaau

SEQ ID NO: 1834994 - RNA, 19 nt, Artificial Sequence
  Description of Artificial Sequence: Synthetic oligonucleotide
  Antisense strand to SEQ ID NO: 1834993
auuucaggaagacaaacuc

SEQ ID NO: 1834995 - RNA, 19 nt, Artificial Sequence
  Description of Artificial Sequence: Synthetic oligonucleotide
  Sense strand starting at position 2701 of SEQ ID NO: 1563829
guuugucuuccugaaaucu

SEQ ID NO: 1834996 - RNA, 19 nt, Artificial Sequence
  Description of Artificial Sequence: Synthetic oligonucleotide
  Antisense strand to SEQ ID NO: 1834995
agauuucaggaagacaaac

SEQ ID NO: 1834997 - RNA, 19 nt, Artificial Sequence
  Description of Artificial Sequence: Synthetic oligonucleotide
  Sense strand starting at position 2827 of SEQ ID NO: 1563829
uccaauauucugggaugac

SEQ ID NO: 1834998 - RNA, 19 nt, Artificial Sequence
  Description of Artificial Sequence: Synthetic oligonucleotide
  Antisense strand to SEQ ID NO: 1834997
gucaucccagaauauugga

SEQ ID NO: 1834999 - RNA, 19 nt, Artificial Sequence
  Description of Artificial Sequence: Synthetic oligonucleotide
  Sense strand starting at position 2902 of SEQ ID NO: 1563829
caaggcuuccugggaaaug

SEQ ID NO: 1835000 - RNA, 19 nt, Artificial Sequence
  Description of Artificial Sequence: Synthetic oligonucleotide
  Antisense strand to SEQ ID NO: 1834999
cauuucccaggaagccuug

SEQ ID NO: 1835001 - RNA, 19 nt, Artificial Sequence
  Description of Artificial Sequence: Synthetic oligonucleotide
  Sense strand starting at position 2957 of SEQ ID NO: 1563829
gcaaacuuugcagagaaug

SEQ ID NO: 1835002 - RNA, 19 nt, Artificial Sequence
  Description of Artificial Sequence: Synthetic oligonucleotide
  Antisense strand to SEQ ID NO: 1835001
cauucucugcaaaguuugc

SEQ ID NO: 1835003 - RNA, 19 nt, Artificial Sequence
  Description of Artificial Sequence: Synthetic oligonucleotide
  Sense strand starting at position 2976 of SEQ ID NO: 1563829
gcuccuugcccugaaguga

SEQ ID NO: 1835004 - RNA, 19 nt, Artificial Sequence
  Description of Artificial Sequence: Synthetic oligonucleotide
  Antisense strand to SEQ ID NO: 1835003
ucacuucagggcaaggagc

SEQ ID NO: 1835005 - RNA, 19 nt, Artificial Sequence
  Description of Artificial Sequence: Synthetic oligonucleotide
  Sense strand starting at position 3006 of SEQ ID NO: 1563829
gaaguuguagcucaaggca

SEQ ID NO: 1835006 - RNA, 19 nt, Artificial Sequence
  Description of Artificial Sequence: Synthetic oligonucleotide
  Antisense strand to SEQ ID NO: 1835005
ugccuugagcuacaacuuc

SEQ ID NO: 1835007 - RNA, 19 nt, Artificial Sequence
  Description of Artificial Sequence: Synthetic oligonucleotide
  Sense strand starting at position 3107 of SEQ ID NO: 1563829
cuguaacuuugguucuaau

SEQ ID NO: 1835008 - RNA, 19 nt, Artificial Sequence
  Description of Artificial Sequence: Synthetic oligonucleotide
  Antisense strand to SEQ ID NO: 1835007
auuagaaccaaaguuacag

SEQ ID NO: 1835009 - RNA, 19 nt, Artificial Sequence
  Description of Artificial Sequence: Synthetic oligonucleotide
  Sense strand starting at position 3118 of SEQ ID NO: 1563829
guucuaauagauuggcuuu

SEQ ID NO: 1835010 - RNA, 19 nt, Artificial Sequence
  Description of Artificial Sequence: Synthetic oligonucleotide
  Antisense strand to SEQ ID NO: 1835009
aaagccaaucuauuagaac

SEQ ID NO: 1835011 - RNA, 19 nt, Artificial Sequence
  Description of Artificial Sequence: Synthetic oligonucleotide
  Sense strand starting at position 3128 of SEQ ID NO: 1563829
auuggcuuucuccaaggaa

SEQ ID NO: 1835012 - RNA, 19 nt, Artificial Sequence
  Description of Artificial Sequence: Synthetic oligonucleotide
  Antisense strand to SEQ ID NO: 1835011
uuccuuggagaaagccaau

SEQ ID NO: 1835013 - RNA, 19 nt, Artificial Sequence
  Description of Artificial Sequence: Synthetic oligonucleotide
  Sense strand starting at position 3146 of SEQ ID NO: 1563829
aggguagggccacaugauu

SEQ ID NO: 1835014 - RNA, 19 nt, Artificial Sequence
  Description of Artificial Sequence: Synthetic oligonucleotide
  Antisense strand to SEQ ID NO: 1835013
aaucauguggcccuacccu

SEQ ID NO: 1835015 - RNA, 19 nt, Artificial Sequence
  Description of Artificial Sequence: Synthetic oligonucleotide
  Sense strand starting at position 3211 of SEQ ID NO: 1563829
augaucauguggucacuga

SEQ ID NO: 1835016 - RNA, 19 nt, Artificial Sequence
  Description of Artificial Sequence: Synthetic oligonucleotide
  Antisense strand to SEQ ID NO: 1835015
ucagugaccacaugaucau

SEQ ID NO: 1835017 - RNA, 19 nt, Artificial Sequence
  Description of Artificial Sequence: Synthetic oligonucleotide
  Sense strand starting at position 3289 of SEQ ID NO: 1563829
cuggcuauguauuccaaac

SEQ ID NO: 1835018 - RNA, 19 nt, Artificial Sequence
  Description of Artificial Sequence: Synthetic oligonucleotide
  Antisense strand to SEQ ID NO: 1835017
guuuggaauacauagccag

SEQ ID NO: 1835019 - RNA, 19 nt, Artificial Sequence
  Description of Artificial Sequence: Synthetic oligonucleotide
  Sense strand starting at position 3404 of SEQ ID NO: 1563829
ggcugagaugagugugaca

SEQ ID NO: 1835020 - RNA, 19 nt, Artificial Sequence
  Description of Artificial Sequence: Synthetic oligonucleotide
  Antisense strand to SEQ ID NO: 1835019
ugucacacucaucucagcc

SEQ ID NO: 1835021 - RNA, 19 nt, Artificial Sequence
  Description of Artificial Sequence: Synthetic oligonucleotide
  Sense strand starting at position 3406 of SEQ ID NO: 1563829
cugagaugagugugacagu

SEQ ID NO: 1835022 - RNA, 19 nt, Artificial Sequence
  Description of Artificial Sequence: Synthetic oligonucleotide
  Antisense strand to SEQ ID NO: 1835021
acugucacacucaucucag

SEQ ID NO: 1835023 - RNA, 19 nt, Artificial Sequence
  Description of Artificial Sequence: Synthetic oligonucleotide
  Sense strand starting at position 3757 of SEQ ID NO: 1563829
gcaauacuugcagaugguu

SEQ ID NO: 1835024 - RNA, 19 nt, Artificial Sequence
  Description of Artificial Sequence: Synthetic oligonucleotide
  Antisense strand to SEQ ID NO: 1835023
aaccaucugcaaguauugc

SEQ ID NO: 1835025 - RNA, 19 nt, Artificial Sequence
  Description of Artificial Sequence: Synthetic oligonucleotide
  Sense strand starting at position 3765 of SEQ ID NO: 1563829
ugcagaugguuagcaagaa

SEQ ID NO: 1835026 - RNA, 19 nt, Artificial Sequence
  Description of Artificial Sequence: Synthetic oligonucleotide
  Antisense strand to SEQ ID NO: 1835025
uucuugcuaaccaucugca

SEQ ID NO: 1835027 - RNA, 19 nt, Artificial Sequence
  Description of Artificial Sequence: Synthetic oligonucleotide
  Sense strand starting at position 3769 of SEQ ID NO: 1563829
gaugguuagcaagaaaguu

SEQ ID NO: 1835028 - RNA, 19 nt, Artificial Sequence
  Description of Artificial Sequence: Synthetic oligonucleotide
  Antisense strand to SEQ ID NO: 1835027
aacuuucuugcuaaccauc

SEQ ID NO: 1835029 - RNA, 19 nt, Artificial Sequence
  Description of Artificial Sequence: Synthetic oligonucleotide
  Sense strand starting at position 3852 of SEQ ID NO: 1563829
ugacaaguuugaccacuca

SEQ ID NO: 1835030 - RNA, 19 nt, Artificial Sequence
  Description of Artificial Sequence: Synthetic oligonucleotide
  Antisense strand to SEQ ID NO: 1835029
ugaguggucaaacuuguca

SEQ ID NO: 1835031 - RNA, 19 nt, Artificial Sequence
  Description of Artificial Sequence: Synthetic oligonucleotide
  Sense strand starting at position 3862 of SEQ ID NO: 1563829
gaccacucacagugaugua

SEQ ID NO: 1835032 - RNA, 19 nt, Artificial Sequence
  Description of Artificial Sequence: Synthetic oligonucleotide
  Antisense strand to SEQ ID NO: 1835031
uacaucacugugagugguc

SEQ ID NO: 1835033 - RNA, 19 nt, Artificial Sequence
  Description of Artificial Sequence: Synthetic oligonucleotide
  Sense strand starting at position 3867 of SEQ ID NO: 1563829
cucacagugauguauguua

SEQ ID NO: 1835034 - RNA, 19 nt, Artificial Sequence
  Description of Artificial Sequence: Synthetic oligonucleotide
  Antisense strand to SEQ ID NO: 1835033
uaacauacaucacugugag

SEQ ID NO: 1835035 - RNA, 19 nt, Artificial Sequence
  Description of Artificial Sequence: Synthetic oligonucleotide
  Sense strand starting at position 3869 of SEQ ID NO: 1563829
cacagugauguauguuaaa

SEQ ID NO: 1835036 - RNA, 19 nt, Artificial Sequence
  Description of Artificial Sequence: Synthetic oligonucleotide
  Antisense strand to SEQ ID NO: 1835035
uuuaacauacaucacugug

SEQ ID NO: 1835037 - RNA, 19 nt, Artificial Sequence
  Description of Artificial Sequence: Synthetic oligonucleotide
  Sense strand starting at position 3921 of SEQ ID NO: 1563829
aggccagagagucaugguu

SEQ ID NO: 1835038 - RNA, 19 nt, Artificial Sequence
  Description of Artificial Sequence: Synthetic oligonucleotide
  Antisense strand to SEQ ID NO: 1835037
aaccaugacucucuggccu

SEQ ID NO: 1835039 - RNA, 19 nt, Artificial Sequence
  Description of Artificial Sequence: Synthetic oligonucleotide
  Sense strand starting at position 3929 of SEQ ID NO: 1563829
gagucaugguuccuuuacu

SEQ ID NO: 1835040 - RNA, 19 nt, Artificial Sequence
  Description of Artificial Sequence: Synthetic oligonucleotide
  Antisense strand to SEQ ID NO: 1835039
aguaaaggaaccaugacuc

SEQ ID NO: 1835041 - RNA, 19 nt, Artificial Sequence
  Description of Artificial Sequence: Synthetic oligonucleotide
  Sense strand starting at position 3980 of SEQ ID NO: 1563829
ggugaauuaagucaguguu

SEQ ID NO: 1835042 - RNA, 19 nt, Artificial Sequence
  Description of Artificial Sequence: Synthetic oligonucleotide
  Antisense strand to SEQ ID NO: 1835041
aacacugacuuaauucacc

SEQ ID NO: 1835043 - RNA, 19 nt, Artificial Sequence
  Description of Artificial Sequence: Synthetic oligonucleotide
  Sense strand starting at position 268 of SEQ ID NO: 1563830
ccacuauuagaauguugac

SEQ ID NO: 1835044 - RNA, 19 nt, Artificial Sequence
  Description of Artificial Sequence: Synthetic oligonucleotide
  Antisense strand to SEQ ID NO: 1835043
gucaacauucuaauagugg

SEQ ID NO: 1835045 - RNA, 19 nt, Artificial Sequence
  Description of Artificial Sequence: Synthetic oligonucleotide
  Sense strand starting at position 1461 of SEQ ID NO: 1563830
gggagauucuaccuugguc

SEQ ID NO: 1835046 - RNA, 19 nt, Artificial Sequence
  Description of Artificial Sequence: Synthetic oligonucleotide
  Antisense strand to SEQ ID NO: 1835045
gaccaagguagaaucuccc

SEQ ID NO: 1835047 - RNA, 19 nt, Artificial Sequence
  Description of Artificial Sequence: Synthetic oligonucleotide
  Sense strand starting at position 1463 of SEQ ID NO: 1563830
gagauucuaccuuggucua

SEQ ID NO: 1835048 - RNA, 19 nt, Artificial Sequence
  Description of Artificial Sequence: Synthetic oligonucleotide
  Antisense strand to SEQ ID NO: 1835047
uagaccaagguagaaucuc

SEQ ID NO: 1835049 - RNA, 19 nt, Artificial Sequence
  Description of Artificial Sequence: Synthetic oligonucleotide
  Sense strand starting at position 1464 of SEQ ID NO: 1563830
agauucuaccuuggucuaa

SEQ ID NO: 1835050 - RNA, 19 nt, Artificial Sequence
  Description of Artificial Sequence: Synthetic oligonucleotide
  Antisense strand to SEQ ID NO: 1835049
uuagaccaagguagaaucu

SEQ ID NO: 1835051 - RNA, 19 nt, Artificial Sequence
  Description of Artificial Sequence: Synthetic oligonucleotide
  Sense strand starting at position 1466 of SEQ ID NO: 1563830
auucuaccuuggucuaaga

SEQ ID NO: 1835052 - RNA, 19 nt, Artificial Sequence
  Description of Artificial Sequence: Synthetic oligonucleotide
  Antisense strand to SEQ ID NO: 1835051
ucuuagaccaagguagaau

SEQ ID NO: 1835053 - RNA, 19 nt, Artificial Sequence
  Description of Artificial Sequence: Synthetic oligonucleotide
  Sense strand starting at position 1468 of SEQ ID NO: 1563830
ucuaccuuggucuaagaau

SEQ ID NO: 1835054 - RNA, 19 nt, Artificial Sequence
  Description of Artificial Sequence: Synthetic oligonucleotide
  Antisense strand to SEQ ID NO: 1835053
auucuuagaccaagguaga

SEQ ID NO: 1835055 - RNA, 19 nt, Artificial Sequence
  Description of Artificial Sequence: Synthetic oligonucleotide
  Sense strand starting at position 1497 of SEQ ID NO: 1563830
ccugguucucuugagggua

SEQ ID NO: 1835056 - RNA, 19 nt, Artificial Sequence
  Description of Artificial Sequence: Synthetic oligonucleotide
  Antisense strand to SEQ ID NO: 1835055
uacccucaagagaaccagg

SEQ ID NO: 1835057 - RNA, 19 nt, Artificial Sequence
  Description of Artificial Sequence: Synthetic oligonucleotide
  Sense strand starting at position 1510 of SEQ ID NO: 1563830
aggguauugcuuuaggaac

SEQ ID NO: 1835058 - RNA, 19 nt, Artificial Sequence
  Description of Artificial Sequence: Synthetic oligonucleotide
  Antisense strand to SEQ ID NO: 1835057
guuccuaaagcaauacccu

SEQ ID NO: 1835059 - RNA, 19 nt, Artificial Sequence
  Description of Artificial Sequence: Synthetic oligonucleotide
  Sense strand starting at position 1825 of SEQ ID NO: 1563830
gccucuguucugggaagag

SEQ ID NO: 1835060 - RNA, 19 nt, Artificial Sequence
  Description of Artificial Sequence: Synthetic oligonucleotide
  Antisense strand to SEQ ID NO: 1835059
cucuucccagaacagaggc

SEQ ID NO: 1835061 - RNA, 19 nt, Artificial Sequence
  Description of Artificial Sequence: Synthetic oligonucleotide
  Sense strand starting at position 1837 of SEQ ID NO: 1563830
ggaagagugugucuugaag

SEQ ID NO: 1835062 - RNA, 19 nt, Artificial Sequence
  Description of Artificial Sequence: Synthetic oligonucleotide
  Antisense strand to SEQ ID NO: 1835061
cuucaagacacacucuucc

SEQ ID NO: 1835063 - RNA, 19 nt, Artificial Sequence
  Description of Artificial Sequence: Synthetic oligonucleotide
  Sense strand starting at position 1846 of SEQ ID NO: 1563830
ugucuugaaggucauaaca

SEQ ID NO: 1835064 - RNA, 19 nt, Artificial Sequence
  Description of Artificial Sequence: Synthetic oligonucleotide
  Antisense strand to SEQ ID NO: 1835063
uguuaugaccuucaagaca

SEQ ID NO: 1835065 - RNA, 19 nt, Artificial Sequence
  Description of Artificial Sequence: Synthetic oligonucleotide
  Sense strand starting at position 2017 of SEQ ID NO: 1563830
cggcaaaugguucugcguu

SEQ ID NO: 1835066 - RNA, 19 nt, Artificial Sequence
  Description of Artificial Sequence: Synthetic oligonucleotide
  Antisense strand to SEQ ID NO: 1835065
aacgcagaaccauuugccg

SEQ ID NO: 1835067 - RNA, 19 nt, Artificial Sequence
  Description of Artificial Sequence: Synthetic oligonucleotide
  Sense strand starting at position 2097 of SEQ ID NO: 1563830
ggacuucucucuuugcuaa

SEQ ID NO: 1835068 - RNA, 19 nt, Artificial Sequence
  Description of Artificial Sequence: Synthetic oligonucleotide
  Antisense strand to SEQ ID NO: 1835067
uuagcaaagagagaagucc

SEQ ID NO: 1835069 - RNA, 19 nt, Artificial Sequence
  Description of Artificial Sequence: Synthetic oligonucleotide
  Sense strand starting at position 2247 of SEQ ID NO: 1563830
cccucuucuuggguaggua

SEQ ID NO: 1835070 - RNA, 19 nt, Artificial Sequence
  Description of Artificial Sequence: Synthetic oligonucleotide
  Antisense strand to SEQ ID NO: 1835069
uaccuacccaagaagaggg

SEQ ID NO: 1835071 - RNA, 19 nt, Artificial Sequence
  Description of Artificial Sequence: Synthetic oligonucleotide
  Sense strand starting at position 2248 of SEQ ID NO: 1563830
ccucuucuuggguagguaa

SEQ ID NO: 1835072 - RNA, 19 nt, Artificial Sequence
  Description of Artificial Sequence: Synthetic oligonucleotide
  Antisense strand to SEQ ID NO: 1835071
uuaccuacccaagaagagg

SEQ ID NO: 1835073 - RNA, 19 nt, Artificial Sequence
  Description of Artificial Sequence: Synthetic oligonucleotide
  Sense strand starting at position 2351 of SEQ ID NO: 1563830
ggcacuaaaucuguaaaua

SEQ ID NO: 1835074 - RNA, 19 nt, Artificial Sequence
  Description of Artificial Sequence: Synthetic oligonucleotide
  Antisense strand to SEQ ID NO: 1835073
uauuuacagauuuagugcc

SEQ ID NO: 1835075 - RNA, 19 nt, Artificial Sequence
  Description of Artificial Sequence: Synthetic oligonucleotide
  Sense strand starting at position 2417 of SEQ ID NO: 1563830
auuguauugcuguacuuag

SEQ ID NO: 1835076 - RNA, 19 nt, Artificial Sequence
  Description of Artificial Sequence: Synthetic oligonucleotide
  Antisense strand to SEQ ID NO: 1835075
cuaaguacagcaauacaau

SEQ ID NO: 1835077 - RNA, 19 nt, Artificial Sequence
  Description of Artificial Sequence: Synthetic oligonucleotide
  Sense strand starting at position 2847 of SEQ ID NO: 1563830
guaagauccuaauccaguu

SEQ ID NO: 1835078 - RNA, 19 nt, Artificial Sequence
  Description of Artificial Sequence: Synthetic oligonucleotide
  Antisense strand to SEQ ID NO: 1835077
aacuggauuaggaucuuac

SEQ ID NO: 1835079 - RNA, 19 nt, Artificial Sequence
  Description of Artificial Sequence: Synthetic oligonucleotide
  Sense strand starting at position 2914 of SEQ ID NO: 1563830
acaagauuccuugaggcuu

SEQ ID NO: 1835080 - RNA, 19 nt, Artificial Sequence
  Description of Artificial Sequence: Synthetic oligonucleotide
  Antisense strand to SEQ ID NO: 1835079
aagccucaaggaaucuugu

SEQ ID NO: 1835081 - RNA, 19 nt, Artificial Sequence
  Description of Artificial Sequence: Synthetic oligonucleotide
  Sense strand starting at position 2961 of SEQ ID NO: 1563830
aggaguauauguguagguu

SEQ ID NO: 1835082 - RNA, 19 nt, Artificial Sequence
  Description of Artificial Sequence: Synthetic oligonucleotide
  Antisense strand to SEQ ID NO: 1835081
aaccuacacauauacuccu

SEQ ID NO: 1835083 - RNA, 19 nt, Artificial Sequence
  Description of Artificial Sequence: Synthetic oligonucleotide
  Sense strand starting at position 3128 of SEQ ID NO: 1563830
ccgcuauauguguccaugu

SEQ ID NO: 1835084 - RNA, 19 nt, Artificial Sequence
  Description of Artificial Sequence: Synthetic oligonucleotide
  Antisense strand to SEQ ID NO: 1835083
acauggacacauauagcgg

SEQ ID NO: 1835085 - RNA, 19 nt, Artificial Sequence
  Description of Artificial Sequence: Synthetic oligonucleotide
  Sense strand starting at position 3366 of SEQ ID NO: 1563830
ugcucucuugaauaguaau

SEQ ID NO: 1835086 - RNA, 19 nt, Artificial Sequence
  Description of Artificial Sequence: Synthetic oligonucleotide
  Antisense strand to SEQ ID NO: 1835085
auuacuauucaagagagca

SEQ ID NO: 1835087 - RNA, 19 nt, Artificial Sequence
  Description of Artificial Sequence: Synthetic oligonucleotide
  Sense strand starting at position 3389 of SEQ ID NO: 1563830
ugaacacaugugugaaugu

SEQ ID NO: 1835088 - RNA, 19 nt, Artificial Sequence
  Description of Artificial Sequence: Synthetic oligonucleotide
  Antisense strand to SEQ ID NO: 1835087
acauucacacauguguuca

SEQ ID NO: 1835089 - RNA, 19 nt, Artificial Sequence
  Description of Artificial Sequence: Synthetic oligonucleotide
  Sense strand starting at position 3398 of SEQ ID NO: 1563830
gugugaauguaccuuuaug

SEQ ID NO: 1835090 - RNA, 19 nt, Artificial Sequence
  Description of Artificial Sequence: Synthetic oligonucleotide
  Antisense strand to SEQ ID NO: 1835089
cauaaagguacauucacac

SEQ ID NO: 1835091 - RNA, 19 nt, Artificial Sequence
  Description of Artificial Sequence: Synthetic oligonucleotide
  Sense strand starting at position 3615 of SEQ ID NO: 1563830
ugguaauagucauucuauu

SEQ ID NO: 1835092 - RNA, 19 nt, Artificial Sequence
  Description of Artificial Sequence: Synthetic oligonucleotide
  Antisense strand to SEQ ID NO: 1835091
aauagaaugacuauuacca

SEQ ID NO: 1835093 - RNA, 19 nt, Artificial Sequence
  Description of Artificial Sequence: Synthetic oligonucleotide
  Sense strand starting at position 3695 of SEQ ID NO: 1563830
ugauuugcguuucucauca

SEQ ID NO: 1835094 - RNA, 19 nt, Artificial Sequence
  Description of Artificial Sequence: Synthetic oligonucleotide
  Antisense strand to SEQ ID NO: 1835093
ugaugagaaacgcaaauca

SEQ ID NO: 1835095 - RNA, 19 nt, Artificial Sequence
  Description of Artificial Sequence: Synthetic oligonucleotide
  Sense strand starting at position 3700 of SEQ ID NO: 1563830
ugcguuucucaucaaugau

SEQ ID NO: 1835096 - RNA, 19 nt, Artificial Sequence
  Description of Artificial Sequence: Synthetic oligonucleotide
  Antisense strand to SEQ ID NO: 1835095
aucauugaugagaaacgca

SEQ ID NO: 1835097 - RNA, 19 nt, Artificial Sequence
  Description of Artificial Sequence: Synthetic oligonucleotide
  Sense strand starting at position 3710 of SEQ ID NO: 1563830
aucaaugaucaaugauguu

SEQ ID NO: 1835098 - RNA, 19 nt, Artificial Sequence
  Description of Artificial Sequence: Synthetic oligonucleotide
  Antisense strand to SEQ ID NO: 1835097
aacaucauugaucauugau

SEQ ID NO: 1835099 - RNA, 19 nt, Artificial Sequence
  Description of Artificial Sequence: Synthetic oligonucleotide
  Sense strand starting at position 3790 of SEQ ID NO: 1563830
guccuuugcccacauaaug

SEQ ID NO: 1835100 - RNA, 19 nt, Artificial Sequence
  Description of Artificial Sequence: Synthetic oligonucleotide
  Antisense strand to SEQ ID NO: 1835099
cauuaugugggcaaaggac

SEQ ID NO: 1835101 - RNA, 19 nt, Artificial Sequence
  Description of Artificial Sequence: Synthetic oligonucleotide
  Sense strand starting at position 3801 of SEQ ID NO: 1563830
acauaaugggauuguuauu

SEQ ID NO: 1835102 - RNA, 19 nt, Artificial Sequence
  Description of Artificial Sequence: Synthetic oligonucleotide
  Antisense strand to SEQ ID NO: 1835101
aauaacaaucccauuaugu

SEQ ID NO: 1835103 - RNA, 19 nt, Artificial Sequence
  Description of Artificial Sequence: Synthetic oligonucleotide
  Sense strand starting at position 3806 of SEQ ID NO: 1563830
augggauuguuauuacauu

SEQ ID NO: 1835104 - RNA, 19 nt, Artificial Sequence
  Description of Artificial Sequence: Synthetic oligonucleotide
  Antisense strand to SEQ ID NO: 1835103
aauguaauaacaaucccau

SEQ ID NO: 1835105 - RNA, 19 nt, Artificial Sequence
  Description of Artificial Sequence: Synthetic oligonucleotide
  Sense strand starting at position 3807 of SEQ ID NO: 1563830
ugggauuguuauuacauuu

SEQ ID NO: 1835106 - RNA, 19 nt, Artificial Sequence
  Description of Artificial Sequence: Synthetic oligonucleotide
  Antisense strand to SEQ ID NO: 1835105
aaauguaauaacaauccca

SEQ ID NO: 1835107 - RNA, 19 nt, Artificial Sequence
  Description of Artificial Sequence: Synthetic oligonucleotide
  Sense strand starting at position 3868 of SEQ ID NO: 1563830
agguuugucacauauguaa

SEQ ID NO: 1835108 - RNA, 19 nt, Artificial Sequence
  Description of Artificial Sequence: Synthetic oligonucleotide
  Antisense strand to SEQ ID NO: 1835107
uuacauaugugacaaaccu

SEQ ID NO: 1835109 - RNA, 19 nt, Artificial Sequence
  Description of Artificial Sequence: Synthetic oligonucleotide
  Sense strand starting at position 3902 of SEQ ID NO: 1563830
guuugugucacauagguaa

SEQ ID NO: 1835110 - RNA, 19 nt, Artificial Sequence
  Description of Artificial Sequence: Synthetic oligonucleotide
  Antisense strand to SEQ ID NO: 1835109
uuaccuaugugacacaaac

SEQ ID NO: 1835111 - RNA, 19 nt, Artificial Sequence
  Description of Artificial Sequence: Synthetic oligonucleotide
  Sense strand starting at position 3904 of SEQ ID NO: 1563830
uugugucacauagguaaac

SEQ ID NO: 1835112 - RNA, 19 nt, Artificial Sequence
  Description of Artificial Sequence: Synthetic oligonucleotide
  Antisense strand to SEQ ID NO: 1835111
guuuaccuaugugacacaa

SEQ ID NO: 1835113 - RNA, 19 nt, Artificial Sequence
  Description of Artificial Sequence: Synthetic oligonucleotide
  Sense strand starting at position 3921 of SEQ ID NO: 1563830
acacgugucacauagguaa

SEQ ID NO: 1835114 - RNA, 19 nt, Artificial Sequence
  Description of Artificial Sequence: Synthetic oligonucleotide
  Antisense strand to SEQ ID NO: 1835113
uuaccuaugugacacgugu

SEQ ID NO: 1835115 - RNA, 19 nt, Artificial Sequence
  Description of Artificial Sequence: Synthetic oligonucleotide
  Sense strand starting at position 3923 of SEQ ID NO: 1563830
acgugucacauagguaaac

SEQ ID NO: 1835116 - RNA, 19 nt, Artificial Sequence
  Description of Artificial Sequence: Synthetic oligonucleotide
  Antisense strand to SEQ ID NO: 1835115
guuuaccuaugugacacgu

SEQ ID NO: 1835117 - RNA, 19 nt, Artificial Sequence
  Description of Artificial Sequence: Synthetic oligonucleotide
  Sense strand starting at position 3924 of SEQ ID NO: 1563830
cgugucacauagguaaaca

SEQ ID NO: 1835118 - RNA, 19 nt, Artificial Sequence
  Description of Artificial Sequence: Synthetic oligonucleotide
  Antisense strand to SEQ ID NO: 1835117
uguuuaccuaugugacacg

SEQ ID NO: 1835119 - RNA, 19 nt, Artificial Sequence
  Description of Artificial Sequence: Synthetic oligonucleotide
  Sense strand starting at position 3925 of SEQ ID NO: 1563830
gugucacauagguaaacau

SEQ ID NO: 1835120 - RNA, 19 nt, Artificial Sequence
  Description of Artificial Sequence: Synthetic oligonucleotide
  Antisense strand to SEQ ID NO: 1835119
auguuuaccuaugugacac

SEQ ID NO: 1835121 - RNA, 19 nt, Artificial Sequence
  Description of Artificial Sequence: Synthetic oligonucleotide
  Sense strand starting at position 3955 of SEQ ID NO: 1563830
guuugcuucccagaucauc

SEQ ID NO: 1835122 - RNA, 19 nt, Artificial Sequence
  Description of Artificial Sequence: Synthetic oligonucleotide
  Antisense strand to SEQ ID NO: 1835121
gaugaucugggaagcaaac

SEQ ID NO: 1835123 - RNA, 19 nt, Artificial Sequence
  Description of Artificial Sequence: Synthetic oligonucleotide
  Sense strand starting at position 17 of SEQ ID NO: 1563831
ggaucuguauccucaccaa

SEQ ID NO: 1835124 - RNA, 19 nt, Artificial Sequence
  Description of Artificial Sequence: Synthetic oligonucleotide
  Antisense strand to SEQ ID NO: 1835123
uuggugaggauacagaucc

SEQ ID NO: 1835125 - RNA, 19 nt, Artificial Sequence
  Description of Artificial Sequence: Synthetic oligonucleotide
  Sense strand starting at position 412 of SEQ ID NO: 1563831
auuacuucuguugacaagu

SEQ ID NO: 1835126 - RNA, 19 nt, Artificial Sequence
  Description of Artificial Sequence: Synthetic oligonucleotide
  Antisense strand to SEQ ID NO: 1835125
acuugucaacagaaguaau

SEQ ID NO: 1835127 - RNA, 19 nt, Artificial Sequence
  Description of Artificial Sequence: Synthetic oligonucleotide
  Sense strand starting at position 519 of SEQ ID NO: 1563831
gucucucagagcugacagu

SEQ ID NO: 1835128 - RNA, 19 nt, Artificial Sequence
  Description of Artificial Sequence: Synthetic oligonucleotide
  Antisense strand to SEQ ID NO: 1835127
acugucagcucugagagac

SEQ ID NO: 1835129 - RNA, 19 nt, Artificial Sequence
  Description of Artificial Sequence: Synthetic oligonucleotide
  Sense strand starting at position 529 of SEQ ID NO: 1563831
gcugacaguacugaggauu

SEQ ID NO: 1835130 - RNA, 19 nt, Artificial Sequence
  Description of Artificial Sequence: Synthetic oligonucleotide
  Antisense strand to SEQ ID NO: 1835129
aauccucaguacugucagc

SEQ ID NO: 1835131 - RNA, 19 nt, Artificial Sequence
  Description of Artificial Sequence: Synthetic oligonucleotide
  Sense strand starting at position 1040 of SEQ ID NO: 1563831
aggucucccuggucugaca

SEQ ID NO: 1835132 - RNA, 19 nt, Artificial Sequence
  Description of Artificial Sequence: Synthetic oligonucleotide
  Antisense strand to SEQ ID NO: 1835131
ugucagaccagggagaccu

SEQ ID NO: 1835133 - RNA, 19 nt, Artificial Sequence
  Description of Artificial Sequence: Synthetic oligonucleotide
  Sense strand starting at position 1057 of SEQ ID NO: 1563831
caacaagagugggcucuau

SEQ ID NO: 1835134 - RNA, 19 nt, Artificial Sequence
  Description of Artificial Sequence: Synthetic oligonucleotide
  Antisense strand to SEQ ID NO: 1835133
auagagcccacucuuguug

SEQ ID NO: 1835135 - RNA, 19 nt, Artificial Sequence
  Description of Artificial Sequence: Synthetic oligonucleotide
  Sense strand starting at position 1081 of SEQ ID NO: 1563831
acuucuuucugguuggagu

SEQ ID NO: 1835136 - RNA, 19 nt, Artificial Sequence
  Description of Artificial Sequence: Synthetic oligonucleotide
  Antisense strand to SEQ ID NO: 1835135
acuccaaccagaaagaagu

SEQ ID NO: 1835137 - RNA, 19 nt, Artificial Sequence
  Description of Artificial Sequence: Synthetic oligonucleotide
  Sense strand starting at position 1106 of SEQ ID NO: 1563831
cucaucacucagugucaca

SEQ ID NO: 1835138 - RNA, 19 nt, Artificial Sequence
  Description of Artificial Sequence: Synthetic oligonucleotide
  Antisense strand to SEQ ID NO: 1835137
ugugacacugagugaugag

SEQ ID NO: 1835139 - RNA, 19 nt, Artificial Sequence
  Description of Artificial Sequence: Synthetic oligonucleotide
  Sense strand starting at position 1424 of SEQ ID NO: 1563831
gagguccgcucauuaauac

SEQ ID NO: 1835140 - RNA, 19 nt, Artificial Sequence
  Description of Artificial Sequence: Synthetic oligonucleotide
  Antisense strand to SEQ ID NO: 1835139
guauuaaugagcggaccuc

SEQ ID NO: 1835141 - RNA, 19 nt, Artificial Sequence
  Description of Artificial Sequence: Synthetic oligonucleotide
  Sense strand starting at position 1431 of SEQ ID NO: 1563831
gcucauuaauacucagagu

SEQ ID NO: 1835142 - RNA, 19 nt, Artificial Sequence
  Description of Artificial Sequence: Synthetic oligonucleotide
  Antisense strand to SEQ ID NO: 1835141
acucugaguauuaaugagc

SEQ ID NO: 1835143 - RNA, 19 nt, Artificial Sequence
  Description of Artificial Sequence: Synthetic oligonucleotide
  Sense strand starting at position 1769 of SEQ ID NO: 1563831
uggaacuuuccagguggaa

SEQ ID NO: 1835144 - RNA, 19 nt, Artificial Sequence
  Description of Artificial Sequence: Synthetic oligonucleotide
  Antisense strand to SEQ ID NO: 1835143
uuccaccuggaaaguucca

SEQ ID NO: 1835145 - RNA, 19 nt, Artificial Sequence
  Description of Artificial Sequence: Synthetic oligonucleotide
  Sense strand starting at position 2147 of SEQ ID NO: 1563831
guccucaccucaguaucua

SEQ ID NO: 1835146 - RNA, 19 nt, Artificial Sequence
  Description of Artificial Sequence: Synthetic oligonucleotide
  Antisense strand to SEQ ID NO: 1835145
uagauacugaggugaggac

SEQ ID NO: 1835147 - RNA, 19 nt, Artificial Sequence
  Description of Artificial Sequence: Synthetic oligonucleotide
  Sense strand starting at position 2247 of SEQ ID NO: 1563831
gaaaucuaagcgugccaaa

SEQ ID NO: 1835148 - RNA, 19 nt, Artificial Sequence
  Description of Artificial Sequence: Synthetic oligonucleotide
  Antisense strand to SEQ ID NO: 1835147
uuuggcacgcuuagauuuc

SEQ ID NO: 1835149 - RNA, 19 nt, Artificial Sequence
  Description of Artificial Sequence: Synthetic oligonucleotide
  Sense strand starting at position 2355 of SEQ ID NO: 1563831
cccucagaguccucaccuu

SEQ ID NO: 1835150 - RNA, 19 nt, Artificial Sequence
  Description of Artificial Sequence: Synthetic oligonucleotide
  Antisense strand to SEQ ID NO: 1835149
aaggugaggacucugaggg

SEQ ID NO: 1835151 - RNA, 19 nt, Artificial Sequence
  Description of Artificial Sequence: Synthetic oligonucleotide
  Sense strand starting at position 2367 of SEQ ID NO: 1563831
ucaccuugauucccgugaa

SEQ ID NO: 1835152 - RNA, 19 nt, Artificial Sequence
  Description of Artificial Sequence: Synthetic oligonucleotide
  Antisense strand to SEQ ID NO: 1835151
uucacgggaaucaagguga

SEQ ID NO: 1835153 - RNA, 19 nt, Artificial Sequence
  Description of Artificial Sequence: Synthetic oligonucleotide
  Sense strand starting at position 2448 of SEQ ID NO: 1563831
cgagacuauacagguggaa

SEQ ID NO: 1835154 - RNA, 19 nt, Artificial Sequence
  Description of Artificial Sequence: Synthetic oligonucleotide
  Antisense strand to SEQ ID NO: 1835153
uuccaccuguauagucucg

SEQ ID NO: 1835155 - RNA, 19 nt, Artificial Sequence
  Description of Artificial Sequence: Synthetic oligonucleotide
  Sense strand starting at position 2579 of SEQ ID NO: 1563831
uuaggauccucaccuugau

SEQ ID NO: 1835156 - RNA, 19 nt, Artificial Sequence
  Description of Artificial Sequence: Synthetic oligonucleotide
  Antisense strand to SEQ ID NO: 1835155
aucaaggugaggauccuaa

SEQ ID NO: 1835157 - RNA, 19 nt, Artificial Sequence
  Description of Artificial Sequence: Synthetic oligonucleotide
  Sense strand starting at position 2681 of SEQ ID NO: 1563831
gcauauugaugggauuucu

SEQ ID NO: 1835158 - RNA, 19 nt, Artificial Sequence
  Description of Artificial Sequence: Synthetic oligonucleotide
  Antisense strand to SEQ ID NO: 1835157
agaaaucccaucaauaugc

SEQ ID NO: 1835159 - RNA, 19 nt, Artificial Sequence
  Description of Artificial Sequence: Synthetic oligonucleotide
  Sense strand starting at position 2733 of SEQ ID NO: 1563831
gugacagcauugguggaau

SEQ ID NO: 1835160 - RNA, 19 nt, Artificial Sequence
  Description of Artificial Sequence: Synthetic oligonucleotide
  Antisense strand to SEQ ID NO: 1835159
auuccaccaaugcugucac

SEQ ID NO: 1835161 - RNA, 19 nt, Artificial Sequence
  Description of Artificial Sequence: Synthetic oligonucleotide
  Sense strand starting at position 2917 of SEQ ID NO: 1563831
uaguuuggugccuauuauc

SEQ ID NO: 1835162 - RNA, 19 nt, Artificial Sequence
  Description of Artificial Sequence: Synthetic oligonucleotide
  Antisense strand to SEQ ID NO: 1835161
gauaauaggcaccaaacua

SEQ ID NO: 1835163 - RNA, 19 nt, Artificial Sequence
  Description of Artificial Sequence: Synthetic oligonucleotide
  Sense strand starting at position 2923 of SEQ ID NO: 1563831
ggugccuauuaucccagaa

SEQ ID NO: 1835164 - RNA, 19 nt, Artificial Sequence
  Description of Artificial Sequence: Synthetic oligonucleotide
  Antisense strand to SEQ ID NO: 1835163
uucugggauaauaggcacc

SEQ ID NO: 1835165 - RNA, 19 nt, Artificial Sequence
  Description of Artificial Sequence: Synthetic oligonucleotide
  Sense strand starting at position 2953 of SEQ ID NO: 1563831
cuguuacuagauuauaguu

SEQ ID NO: 1835166 - RNA, 19 nt, Artificial Sequence
  Description of Artificial Sequence: Synthetic oligonucleotide
  Antisense strand to SEQ ID NO: 1835165
aacuauaaucuaguaacag

SEQ ID NO: 1835167 - RNA, 19 nt, Artificial Sequence
  Description of Artificial Sequence: Synthetic oligonucleotide
  Sense strand starting at position 2961 of SEQ ID NO: 1563831
agauuauaguugcccuuaa

SEQ ID NO: 1835168 - RNA, 19 nt, Artificial Sequence
  Description of Artificial Sequence: Synthetic oligonucleotide
  Antisense strand to SEQ ID NO: 1835167
uuaagggcaacuauaaucu

SEQ ID NO: 1835169 - RNA, 19 nt, Artificial Sequence
  Description of Artificial Sequence: Synthetic oligonucleotide
  Sense strand starting at position 2972 of SEQ ID NO: 1563831
gcccuuaauugcucuauag

SEQ ID NO: 1835170 - RNA, 19 nt, Artificial Sequence
  Description of Artificial Sequence: Synthetic oligonucleotide
  Antisense strand to SEQ ID NO: 1835169
cuauagagcaauuaagggc

SEQ ID NO: 1835171 - RNA, 19 nt, Artificial Sequence
  Description of Artificial Sequence: Synthetic oligonucleotide
  Sense strand starting at position 3044 of SEQ ID NO: 1563831
cugcauacugaugauucua

SEQ ID NO: 1835172 - RNA, 19 nt, Artificial Sequence
  Description of Artificial Sequence: Synthetic oligonucleotide
  Antisense strand to SEQ ID NO: 1835171
uagaaucaucaguaugcag

SEQ ID NO: 1835173 - RNA, 19 nt, Artificial Sequence
  Description of Artificial Sequence: Synthetic oligonucleotide
  Sense strand starting at position 3046 of SEQ ID NO: 1563831
gcauacugaugauucuaau

SEQ ID NO: 1835174 - RNA, 19 nt, Artificial Sequence
  Description of Artificial Sequence: Synthetic oligonucleotide
  Antisense strand to SEQ ID NO: 1835173
auuagaaucaucaguaugc

SEQ ID NO: 1835175 - RNA, 19 nt, Artificial Sequence
  Description of Artificial Sequence: Synthetic oligonucleotide
  Sense strand starting at position 3298 of SEQ ID NO: 1563831
uugagagucucuucucauc

SEQ ID NO: 1835176 - RNA, 19 nt, Artificial Sequence
  Description of Artificial Sequence: Synthetic oligonucleotide
  Antisense strand to SEQ ID NO: 1835175
gaugagaagagacucucaa

SEQ ID NO: 1835177 - RNA, 19 nt, Artificial Sequence
  Description of Artificial Sequence: Synthetic oligonucleotide
  Sense strand starting at position 3374 of SEQ ID NO: 1563831
uauagugggucuguuacuu

SEQ ID NO: 1835178 - RNA, 19 nt, Artificial Sequence
  Description of Artificial Sequence: Synthetic oligonucleotide
  Antisense strand to SEQ ID NO: 1835177
aaguaacagacccacuaua

SEQ ID NO: 1835179 - RNA, 19 nt, Artificial Sequence
  Description of Artificial Sequence: Synthetic oligonucleotide
  Sense strand starting at position 3404 of SEQ ID NO: 1563831
cagaaacucguugguccua

SEQ ID NO: 1835180 - RNA, 19 nt, Artificial Sequence
  Description of Artificial Sequence: Synthetic oligonucleotide
  Antisense strand to SEQ ID NO: 1835179
uaggaccaacgaguuucug

SEQ ID NO: 1835181 - RNA, 19 nt, Artificial Sequence
  Description of Artificial Sequence: Synthetic oligonucleotide
  Sense strand starting at position 3406 of SEQ ID NO: 1563831
gaaacucguugguccuaua

SEQ ID NO: 1835182 - RNA, 19 nt, Artificial Sequence
  Description of Artificial Sequence: Synthetic oligonucleotide
  Antisense strand to SEQ ID NO: 1835181
uauaggaccaacgaguuuc

SEQ ID NO: 1835183 - RNA, 19 nt, Artificial Sequence
  Description of Artificial Sequence: Synthetic oligonucleotide
  Sense strand starting at position 3504 of SEQ ID NO: 1563831
ggcuguucccaucagauca

SEQ ID NO: 1835184 - RNA, 19 nt, Artificial Sequence
  Description of Artificial Sequence: Synthetic oligonucleotide
  Antisense strand to SEQ ID NO: 1835183
ugaucugaugggaacagcc

SEQ ID NO: 1835185 - RNA, 19 nt, Artificial Sequence
  Description of Artificial Sequence: Synthetic oligonucleotide
  Sense strand starting at position 3737 of SEQ ID NO: 1563831
ggccauguccaugagaggu

SEQ ID NO: 1835186 - RNA, 19 nt, Artificial Sequence
  Description of Artificial Sequence: Synthetic oligonucleotide
  Antisense strand to SEQ ID NO: 1835185
accucucauggacauggcc

SEQ ID NO: 1835187 - RNA, 19 nt, Artificial Sequence
  Description of Artificial Sequence: Synthetic oligonucleotide
  Sense strand starting at position 3819 of SEQ ID NO: 1563831
gcagaugagagucagucua

SEQ ID NO: 1835188 - RNA, 19 nt, Artificial Sequence
  Description of Artificial Sequence: Synthetic oligonucleotide
  Antisense strand to SEQ ID NO: 1835187
uagacugacucucaucugc

SEQ ID NO: 1835189 - RNA, 19 nt, Artificial Sequence
  Description of Artificial Sequence: Synthetic oligonucleotide
  Sense strand starting at position 3821 of SEQ ID NO: 1563831
agaugagagucagucuaug

SEQ ID NO: 1835190 - RNA, 19 nt, Artificial Sequence
  Description of Artificial Sequence: Synthetic oligonucleotide
  Antisense strand to SEQ ID NO: 1835189
cauagacugacucucaucu

SEQ ID NO: 1835191 - RNA, 19 nt, Artificial Sequence
  Description of Artificial Sequence: Synthetic oligonucleotide
  Sense strand starting at position 3826 of SEQ ID NO: 1563831
agagucagucuaugcauaa

SEQ ID NO: 1835192 - RNA, 19 nt, Artificial Sequence
  Description of Artificial Sequence: Synthetic oligonucleotide
  Antisense strand to SEQ ID NO: 1835191
uuaugcauagacugacucu

SEQ ID NO: 1835193 - RNA, 19 nt, Artificial Sequence
  Description of Artificial Sequence: Synthetic oligonucleotide
  Sense strand starting at position 3827 of SEQ ID NO: 1563831
gagucagucuaugcauaac

SEQ ID NO: 1835194 - RNA, 19 nt, Artificial Sequence
  Description of Artificial Sequence: Synthetic oligonucleotide
  Antisense strand to SEQ ID NO: 1835193
guuaugcauagacugacuc

SEQ ID NO: 1835195 - RNA, 19 nt, Artificial Sequence
  Description of Artificial Sequence: Synthetic oligonucleotide
  Sense strand starting at position 3856 of SEQ ID NO: 1563831
cugagauauugguuuccca

SEQ ID NO: 1835196 - RNA, 19 nt, Artificial Sequence
  Description of Artificial Sequence: Synthetic oligonucleotide
  Antisense strand to SEQ ID NO: 1835195
ugggaaaccaauaucucag

SEQ ID NO: 1835197 - RNA, 19 nt, Artificial Sequence
  Description of Artificial Sequence: Synthetic oligonucleotide
  Sense strand starting at position 3902 of SEQ ID NO: 1563831
auuaaaggcuuucugggaa

SEQ ID NO: 1835198 - RNA, 19 nt, Artificial Sequence
  Description of Artificial Sequence: Synthetic oligonucleotide
  Antisense strand to SEQ ID NO: 1835197
uucccagaaagccuuuaau

SEQ ID NO: 1835199 - RNA, 19 nt, Artificial Sequence
  Description of Artificial Sequence: Synthetic oligonucleotide
  Sense strand starting at position 3905 of SEQ ID NO: 1563831
aaaggcuuucugggaaaug

SEQ ID NO: 1835200 - RNA, 19 nt, Artificial Sequence
  Description of Artificial Sequence: Synthetic oligonucleotide
  Antisense strand to SEQ ID NO: 1835199
cauuucccagaaagccuuu

SEQ ID NO: 1835201 - RNA, 19 nt, Artificial Sequence
  Description of Artificial Sequence: Synthetic oligonucleotide
  Sense strand starting at position 3979 of SEQ ID NO: 1563831
ccguguuccgggagugaug

SEQ ID NO: 1835202 - RNA, 19 nt, Artificial Sequence
  Description of Artificial Sequence: Synthetic oligonucleotide
  Antisense strand to SEQ ID NO: 1835201
caucacucccggaacacgg

SEQ ID NO: 1835203 - RNA, 19 nt, Artificial Sequence
  Description of Artificial Sequence: Synthetic oligonucleotide
  Sense strand starting at position 283 of SEQ ID NO: 1563832
gaggguucuuaccuuuacu

SEQ ID NO: 1835204 - RNA, 19 nt, Artificial Sequence
  Description of Artificial Sequence: Synthetic oligonucleotide
  Antisense strand to SEQ ID NO: 1835203
aguaaagguaagaacccuc

SEQ ID NO: 1835205 - RNA, 19 nt, Artificial Sequence
  Description of Artificial Sequence: Synthetic oligonucleotide
  Sense strand starting at position 291 of SEQ ID NO: 1563832
uuaccuuuacuccggauca

SEQ ID NO: 1835206 - RNA, 19 nt, Artificial Sequence
  Description of Artificial Sequence: Synthetic oligonucleotide
  Antisense strand to SEQ ID NO: 1835205
ugauccggaguaaagguaa

SEQ ID NO: 1835207 - RNA, 19 nt, Artificial Sequence
  Description of Artificial Sequence: Synthetic oligonucleotide
  Sense strand starting at position 293 of SEQ ID NO: 1563832
accuuuacuccggaucagu

SEQ ID NO: 1835208 - RNA, 19 nt, Artificial Sequence
  Description of Artificial Sequence: Synthetic oligonucleotide
  Antisense strand to SEQ ID NO: 1835207
acugauccggaguaaaggu

SEQ ID NO: 1835209 - RNA, 19 nt, Artificial Sequence
  Description of Artificial Sequence: Synthetic oligonucleotide
  Sense strand starting at position 497 of SEQ ID NO: 1563832
ggguucucaccuugauacu

SEQ ID NO: 1835210 - RNA, 19 nt, Artificial Sequence
  Description of Artificial Sequence: Synthetic oligonucleotide
  Antisense strand to SEQ ID NO: 1835209
aguaucaaggugagaaccc

SEQ ID NO: 1835211 - RNA, 19 nt, Artificial Sequence
  Description of Artificial Sequence: Synthetic oligonucleotide
  Sense strand starting at position 498 of SEQ ID NO: 1563832
gguucucaccuugauacua

SEQ ID NO: 1835212 - RNA, 19 nt, Artificial Sequence
  Description of Artificial Sequence: Synthetic oligonucleotide
  Antisense strand to SEQ ID NO: 1835211
uaguaucaaggugagaacc

SEQ ID NO: 1835213 - RNA, 19 nt, Artificial Sequence
  Description of Artificial Sequence: Synthetic oligonucleotide
  Sense strand starting at position 594 of SEQ ID NO: 1563832
gaagucuaggcauguuauc

SEQ ID NO: 1835214 - RNA, 19 nt, Artificial Sequence
  Description of Artificial Sequence: Synthetic oligonucleotide
  Antisense strand to SEQ ID NO: 1835213
gauaacaugccuagacuuc

SEQ ID NO: 1835215 - RNA, 19 nt, Artificial Sequence
  Description of Artificial Sequence: Synthetic oligonucleotide
  Sense strand starting at position 601 of SEQ ID NO: 1563832
aggcauguuaucggaccau

SEQ ID NO: 1835216 - RNA, 19 nt, Artificial Sequence
  Description of Artificial Sequence: Synthetic oligonucleotide
  Antisense strand to SEQ ID NO: 1835215
augguccgauaacaugccu

SEQ ID NO: 1835217 - RNA, 19 nt, Artificial Sequence
  Description of Artificial Sequence: Synthetic oligonucleotide
  Sense strand starting at position 678 of SEQ ID NO: 1563832
gagagagguucccugguua

SEQ ID NO: 1835218 - RNA, 19 nt, Artificial Sequence
  Description of Artificial Sequence: Synthetic oligonucleotide
  Antisense strand to SEQ ID NO: 1835217
uaaccagggaaccucucuc

SEQ ID NO: 1835219 - RNA, 19 nt, Artificial Sequence
  Description of Artificial Sequence: Synthetic oligonucleotide
  Sense strand starting at position 1537 of SEQ ID NO: 1563832
uagggcuuuccaggguuaa

SEQ ID NO: 1835220 - RNA, 19 nt, Artificial Sequence
  Description of Artificial Sequence: Synthetic oligonucleotide
  Antisense strand to SEQ ID NO: 1835219
uuaacccuggaaagcccua

SEQ ID NO: 1835221 - RNA, 19 nt, Artificial Sequence
  Description of Artificial Sequence: Synthetic oligonucleotide
  Sense strand starting at position 1538 of SEQ ID NO: 1563832
agggcuuuccaggguuaaa

SEQ ID NO: 1835222 - RNA, 19 nt, Artificial Sequence
  Description of Artificial Sequence: Synthetic oligonucleotide
  Antisense strand to SEQ ID NO: 1835221
uuuaacccuggaaagcccu

SEQ ID NO: 1835223 - RNA, 19 nt, Artificial Sequence
  Description of Artificial Sequence: Synthetic oligonucleotide
  Sense strand starting at position 1561 of SEQ ID NO: 1563832
uggauugggcuccgagaag

SEQ ID NO: 1835224 - RNA, 19 nt, Artificial Sequence
  Description of Artificial Sequence: Synthetic oligonucleotide
  Antisense strand to SEQ ID NO: 1835223
cuucucggagcccaaucca

SEQ ID NO: 1835225 - RNA, 19 nt, Artificial Sequence
  Description of Artificial Sequence: Synthetic oligonucleotide
  Sense strand starting at position 1582 of SEQ ID NO: 1563832
cccuuauuuguggguuuag

SEQ ID NO: 1835226 - RNA, 19 nt, Artificial Sequence
  Description of Artificial Sequence: Synthetic oligonucleotide
  Antisense strand to SEQ ID NO: 1835225
cuaaacccacaaauaaggg

SEQ ID NO: 1835227 - RNA, 19 nt, Artificial Sequence
  Description of Artificial Sequence: Synthetic oligonucleotide
  Sense strand starting at position 1583 of SEQ ID NO: 1563832
ccuuauuuguggguuuagu

SEQ ID NO: 1835228 - RNA, 19 nt, Artificial Sequence
  Description of Artificial Sequence: Synthetic oligonucleotide
  Antisense strand to SEQ ID NO: 1835227
acuaaacccacaaauaagg

SEQ ID NO: 1835229 - RNA, 19 nt, Artificial Sequence
  Description of Artificial Sequence: Synthetic oligonucleotide
  Sense strand starting at position 2069 of SEQ ID NO: 1563832
aauaaaggcuuccugggaa

SEQ ID NO: 1835230 - RNA, 19 nt, Artificial Sequence
  Description of Artificial Sequence: Synthetic oligonucleotide
  Antisense strand to SEQ ID NO: 1835229
uucccaggaagccuuuauu

SEQ ID NO: 1835231 - RNA, 19 nt, Artificial Sequence
  Description of Artificial Sequence: Synthetic oligonucleotide
  Sense strand starting at position 2203 of SEQ ID NO: 1563832
gcugguggguugucagaga

SEQ ID NO: 1835232 - RNA, 19 nt, Artificial Sequence
  Description of Artificial Sequence: Synthetic oligonucleotide
  Antisense strand to SEQ ID NO: 1835231
ucucugacaacccaccagc

SEQ ID NO: 1835233 - RNA, 19 nt, Artificial Sequence
  Description of Artificial Sequence: Synthetic oligonucleotide
  Sense strand starting at position 2308 of SEQ ID NO: 1563832
ggagcuguucaagaugauu

SEQ ID NO: 1835234 - RNA, 19 nt, Artificial Sequence
  Description of Artificial Sequence: Synthetic oligonucleotide
  Antisense strand to SEQ ID NO: 1835233
aaucaucuugaacagcucc

SEQ ID NO: 1835235 - RNA, 19 nt, Artificial Sequence
  Description of Artificial Sequence: Synthetic oligonucleotide
  Sense strand starting at position 2321 of SEQ ID NO: 1563832
augauuguguggucccuga

SEQ ID NO: 1835236 - RNA, 19 nt, Artificial Sequence
  Description of Artificial Sequence: Synthetic oligonucleotide
  Antisense strand to SEQ ID NO: 1835235
ucagggaccacacaaucau

SEQ ID NO: 1835237 - RNA, 19 nt, Artificial Sequence
  Description of Artificial Sequence: Synthetic oligonucleotide
  Sense strand starting at position 2344 of SEQ ID NO: 1563832
gagguuaucugacugugca

SEQ ID NO: 1835238 - RNA, 19 nt, Artificial Sequence
  Description of Artificial Sequence: Synthetic oligonucleotide
  Antisense strand to SEQ ID NO: 1835237
ugcacagucagauaaccuc

SEQ ID NO: 1835239 - RNA, 19 nt, Artificial Sequence
  Description of Artificial Sequence: Synthetic oligonucleotide
  Sense strand starting at position 2345 of SEQ ID NO: 1563832
agguuaucugacugugcau

SEQ ID NO: 1835240 - RNA, 19 nt, Artificial Sequence
  Description of Artificial Sequence: Synthetic oligonucleotide
  Antisense strand to SEQ ID NO: 1835239
augcacagucagauaaccu

SEQ ID NO: 1835241 - RNA, 19 nt, Artificial Sequence
  Description of Artificial Sequence: Synthetic oligonucleotide
  Sense strand starting at position 2370 of SEQ ID NO: 1563832
augaucauauugucacuga

SEQ ID NO: 1835242 - RNA, 19 nt, Artificial Sequence
  Description of Artificial Sequence: Synthetic oligonucleotide
  Antisense strand to SEQ ID NO: 1835241
ucagugacaauaugaucau

SEQ ID NO: 1835243 - RNA, 19 nt, Artificial Sequence
  Description of Artificial Sequence: Synthetic oligonucleotide
  Sense strand starting at position 2442 of SEQ ID NO: 1563832
uauugcuuuggcuauguau

SEQ ID NO: 1835244 - RNA, 19 nt, Artificial Sequence
  Description of Artificial Sequence: Synthetic oligonucleotide
  Antisense strand to SEQ ID NO: 1835243
auacauagccaaagcaaua

SEQ ID NO: 1835245 - RNA, 19 nt, Artificial Sequence
  Description of Artificial Sequence: Synthetic oligonucleotide
  Sense strand starting at position 2467 of SEQ ID NO: 1563832
ccaauucuuugggcacaga

SEQ ID NO: 1835246 - RNA, 19 nt, Artificial Sequence
  Description of Artificial Sequence: Synthetic oligonucleotide
  Antisense strand to SEQ ID NO: 1835245
ucugugcccaaagaauugg

SEQ ID NO: 1835247 - RNA, 19 nt, Artificial Sequence
  Description of Artificial Sequence: Synthetic oligonucleotide
  Sense strand starting at position 2505 of SEQ ID NO: 1563832
gagauauauuuggaaguau

SEQ ID NO: 1835248 - RNA, 19 nt, Artificial Sequence
  Description of Artificial Sequence: Synthetic oligonucleotide
  Antisense strand to SEQ ID NO: 1835247
auacuuccaaauauaucuc

SEQ ID NO: 1835249 - RNA, 19 nt, Artificial Sequence
  Description of Artificial Sequence: Synthetic oligonucleotide
  Sense strand starting at position 2585 of SEQ ID NO: 1563832
gagugugggcucuagaaga

SEQ ID NO: 1835250 - RNA, 19 nt, Artificial Sequence
  Description of Artificial Sequence: Synthetic oligonucleotide
  Antisense strand to SEQ ID NO: 1835249
ucuucuagagcccacacuc

SEQ ID NO: 1835251 - RNA, 19 nt, Artificial Sequence
  Description of Artificial Sequence: Synthetic oligonucleotide
  Sense strand starting at position 2645 of SEQ ID NO: 1563832
cccugugaacuugagcaua

SEQ ID NO: 1835252 - RNA, 19 nt, Artificial Sequence
  Description of Artificial Sequence: Synthetic oligonucleotide
  Antisense strand to SEQ ID NO: 1835251
uaugcucaaguucacaggg

SEQ ID NO: 1835253 - RNA, 19 nt, Artificial Sequence
  Description of Artificial Sequence: Synthetic oligonucleotide
  Sense strand starting at position 2647 of SEQ ID NO: 1563832
cugugaacuugagcauauu

SEQ ID NO: 1835254 - RNA, 19 nt, Artificial Sequence
  Description of Artificial Sequence: Synthetic oligonucleotide
  Antisense strand to SEQ ID NO: 1835253
aauaugcucaaguucacag

SEQ ID NO: 1835255 - RNA, 19 nt, Artificial Sequence
  Description of Artificial Sequence: Synthetic oligonucleotide
  Sense strand starting at position 2732 of SEQ ID NO: 1563832
uauaaaguguuuguggaag

SEQ ID NO: 1835256 - RNA, 19 nt, Artificial Sequence
  Description of Artificial Sequence: Synthetic oligonucleotide
  Antisense strand to SEQ ID NO: 1835255
cuuccacaaacacuuuaua

SEQ ID NO: 1835257 - RNA, 19 nt, Artificial Sequence
  Description of Artificial Sequence: Synthetic oligonucleotide
  Sense strand starting at position 2746 of SEQ ID NO: 1563832
ggaagagccuucuccaauu

SEQ ID NO: 1835258 - RNA, 19 nt, Artificial Sequence
  Description of Artificial Sequence: Synthetic oligonucleotide
  Antisense strand to SEQ ID NO: 1835257
aauuggagaaggcucuucc

SEQ ID NO: 1835259 - RNA, 19 nt, Artificial Sequence
  Description of Artificial Sequence: Synthetic oligonucleotide
  Sense strand starting at position 3238 of SEQ ID NO: 1563832
guggcuucugggcaucuua

SEQ ID NO: 1835260 - RNA, 19 nt, Artificial Sequence
  Description of Artificial Sequence: Synthetic oligonucleotide
  Antisense strand to SEQ ID NO: 1835259
uaagaugcccagaagccac

SEQ ID NO: 1835261 - RNA, 19 nt, Artificial Sequence
  Description of Artificial Sequence: Synthetic oligonucleotide
  Sense strand starting at position 3268 of SEQ ID NO: 1563832
gcugucaucucccuuauuu

SEQ ID NO: 1835262 - RNA, 19 nt, Artificial Sequence
  Description of Artificial Sequence: Synthetic oligonucleotide
  Antisense strand to SEQ ID NO: 1835261
aaauaagggagaugacagc

SEQ ID NO: 1835263 - RNA, 19 nt, Artificial Sequence
  Description of Artificial Sequence: Synthetic oligonucleotide
  Sense strand starting at position 3326 of SEQ ID NO: 1563832
gguugugcacuguauuaga

SEQ ID NO: 1835264 - RNA, 19 nt, Artificial Sequence
  Description of Artificial Sequence: Synthetic oligonucleotide
  Antisense strand to SEQ ID NO: 1835263
ucuaauacagugcacaacc

SEQ ID NO: 1835265 - RNA, 19 nt, Artificial Sequence
  Description of Artificial Sequence: Synthetic oligonucleotide
  Sense strand starting at position 3334 of SEQ ID NO: 1563832
acuguauuagacugugcua

SEQ ID NO: 1835266 - RNA, 19 nt, Artificial Sequence
  Description of Artificial Sequence: Synthetic oligonucleotide
  Antisense strand to SEQ ID NO: 1835265
uagcacagucuaauacagu

SEQ ID NO: 1835267 - RNA, 19 nt, Artificial Sequence
  Description of Artificial Sequence: Synthetic oligonucleotide
  Sense strand starting at position 3337 of SEQ ID NO: 1563832
guauuagacugugcuagga

SEQ ID NO: 1835268 - RNA, 19 nt, Artificial Sequence
  Description of Artificial Sequence: Synthetic oligonucleotide
  Antisense strand to SEQ ID NO: 1835267
uccuagcacagucuaauac

SEQ ID NO: 1835269 - RNA, 19 nt, Artificial Sequence
  Description of Artificial Sequence: Synthetic oligonucleotide
  Sense strand starting at position 3425 of SEQ ID NO: 1563832
guaaauguuagggauaguu

SEQ ID NO: 1835270 - RNA, 19 nt, Artificial Sequence
  Description of Artificial Sequence: Synthetic oligonucleotide
  Antisense strand to SEQ ID NO: 1835269
aacuaucccuaacauuuac

SEQ ID NO: 1835271 - RNA, 19 nt, Artificial Sequence
  Description of Artificial Sequence: Synthetic oligonucleotide
  Sense strand starting at position 3433 of SEQ ID NO: 1563832
uagggauaguuucccauuc

SEQ ID NO: 1835272 - RNA, 19 nt, Artificial Sequence
  Description of Artificial Sequence: Synthetic oligonucleotide
  Antisense strand to SEQ ID NO: 1835271
gaaugggaaacuaucccua

SEQ ID NO: 1835273 - RNA, 19 nt, Artificial Sequence
  Description of Artificial Sequence: Synthetic oligonucleotide
  Sense strand starting at position 3460 of SEQ ID NO: 1563832
gucucucaacacugaaaug

SEQ ID NO: 1835274 - RNA, 19 nt, Artificial Sequence
  Description of Artificial Sequence: Synthetic oligonucleotide
  Antisense strand to SEQ ID NO: 1835273
cauuucaguguugagagac

SEQ ID NO: 1835275 - RNA, 19 nt, Artificial Sequence
  Description of Artificial Sequence: Synthetic oligonucleotide
  Sense strand starting at position 3573 of SEQ ID NO: 1563832
gcagauucucucugguuua

SEQ ID NO: 1835276 - RNA, 19 nt, Artificial Sequence
  Description of Artificial Sequence: Synthetic oligonucleotide
  Antisense strand to SEQ ID NO: 1835275
uaaaccagagagaaucugc

SEQ ID NO: 1835277 - RNA, 19 nt, Artificial Sequence
  Description of Artificial Sequence: Synthetic oligonucleotide
  Sense strand starting at position 3585 of SEQ ID NO: 1563832
ugguuuauccgugagcaca

SEQ ID NO: 1835278 - RNA, 19 nt, Artificial Sequence
  Description of Artificial Sequence: Synthetic oligonucleotide
  Antisense strand to SEQ ID NO: 1835277
ugugcucacggauaaacca

SEQ ID NO: 1835279 - RNA, 19 nt, Artificial Sequence
  Description of Artificial Sequence: Synthetic oligonucleotide
  Sense strand starting at position 3704 of SEQ ID NO: 1563832
ccauguaguuucccuuaaa

SEQ ID NO: 1835280 - RNA, 19 nt, Artificial Sequence
  Description of Artificial Sequence: Synthetic oligonucleotide
  Antisense strand to SEQ ID NO: 1835279
uuuaagggaaacuacaugg

SEQ ID NO: 1835281 - RNA, 19 nt, Artificial Sequence
  Description of Artificial Sequence: Synthetic oligonucleotide
  Sense strand starting at position 3979 of SEQ ID NO: 1563832
agagcugaugcucaauuaa

SEQ ID NO: 1835282 - RNA, 19 nt, Artificial Sequence
  Description of Artificial Sequence: Synthetic oligonucleotide
  Antisense strand to SEQ ID NO: 1835281
uuaauugagcaucagcucu

SEQ ID NO: 1835283 - RNA, 19 nt, Artificial Sequence
  Description of Artificial Sequence: Synthetic oligonucleotide
  Sense strand starting at position 2108 of SEQ ID NO: 1563833
uguguucuggcuuggagag

SEQ ID NO: 1835284 - RNA, 19 nt, Artificial Sequence
  Description of Artificial Sequence: Synthetic oligonucleotide
  Antisense strand to SEQ ID NO: 1835283
cucuccaagccagaacaca

SEQ ID NO: 1835285 - RNA, 19 nt, Artificial Sequence
  Description of Artificial Sequence: Synthetic oligonucleotide
  Sense strand starting at position 2124 of SEQ ID NO: 1563833
gaggauccacucugauuac

SEQ ID NO: 1835286 - RNA, 19 nt, Artificial Sequence
  Description of Artificial Sequence: Synthetic oligonucleotide
  Antisense strand to SEQ ID NO: 1835285
guaaucagaguggauccuc

SEQ ID NO: 1835287 - RNA, 19 nt, Artificial Sequence
  Description of Artificial Sequence: Synthetic oligonucleotide
  Sense strand starting at position 2136 of SEQ ID NO: 1563833
ugauuaccuuuagaauugu

SEQ ID NO: 1835288 - RNA, 19 nt, Artificial Sequence
  Description of Artificial Sequence: Synthetic oligonucleotide
  Antisense strand to SEQ ID NO: 1835287
acaauucuaaagguaauca

SEQ ID NO: 1835289 - RNA, 19 nt, Artificial Sequence
  Description of Artificial Sequence: Synthetic oligonucleotide
  Sense strand starting at position 2142 of SEQ ID NO: 1563833
ccuuuagaauugucauguc

SEQ ID NO: 1835290 - RNA, 19 nt, Artificial Sequence
  Description of Artificial Sequence: Synthetic oligonucleotide
  Antisense strand to SEQ ID NO: 1835289
gacaugacaauucuaaagg

SEQ ID NO: 1835291 - RNA, 19 nt, Artificial Sequence
  Description of Artificial Sequence: Synthetic oligonucleotide
  Sense strand starting at position 2174 of SEQ ID NO: 1563833
gccugagccucccucuauu

SEQ ID NO: 1835292 - RNA, 19 nt, Artificial Sequence
  Description of Artificial Sequence: Synthetic oligonucleotide
  Antisense strand to SEQ ID NO: 1835291
aauagagggaggcucaggc

SEQ ID NO: 1835293 - RNA, 19 nt, Artificial Sequence
  Description of Artificial Sequence: Synthetic oligonucleotide
  Sense strand starting at position 2197 of SEQ ID NO: 1563833
uugugaaauugacucuuua

SEQ ID NO: 1835294 - RNA, 19 nt, Artificial Sequence
  Description of Artificial Sequence: Synthetic oligonucleotide
  Antisense strand to SEQ ID NO: 1835293
uaaagagucaauuucacaa

SEQ ID NO: 1835295 - RNA, 19 nt, Artificial Sequence
  Description of Artificial Sequence: Synthetic oligonucleotide
  Sense strand starting at position 2368 of SEQ ID NO: 1563833
cucuucugcugacugauaa

SEQ ID NO: 1835296 - RNA, 19 nt, Artificial Sequence
  Description of Artificial Sequence: Synthetic oligonucleotide
  Antisense strand to SEQ ID NO: 1835295
uuaucagucagcagaagag

SEQ ID NO: 1835297 - RNA, 19 nt, Artificial Sequence
  Description of Artificial Sequence: Synthetic oligonucleotide
  Sense strand starting at position 2432 of SEQ ID NO: 1563833
aaaugugaugggcaucuau

SEQ ID NO: 1835298 - RNA, 19 nt, Artificial Sequence
  Description of Artificial Sequence: Synthetic oligonucleotide
  Antisense strand to SEQ ID NO: 1835297
auagaugcccaucacauuu

SEQ ID NO: 1835299 - RNA, 19 nt, Artificial Sequence
  Description of Artificial Sequence: Synthetic oligonucleotide
  Sense strand starting at position 2439 of SEQ ID NO: 1563833
augggcaucuaugaaagaa

SEQ ID NO: 1835300 - RNA, 19 nt, Artificial Sequence
  Description of Artificial Sequence: Synthetic oligonucleotide
  Antisense strand to SEQ ID NO: 1835299
uucuuucauagaugcccau

SEQ ID NO: 1835301 - RNA, 19 nt, Artificial Sequence
  Description of Artificial Sequence: Synthetic oligonucleotide
  Sense strand starting at position 2470 of SEQ ID NO: 1563833
ucuggacuucgcuaaauua

SEQ ID NO: 1835302 - RNA, 19 nt, Artificial Sequence
  Description of Artificial Sequence: Synthetic oligonucleotide
  Antisense strand to SEQ ID NO: 1835301
uaauuuagcgaaguccaga

SEQ ID NO: 1835303 - RNA, 19 nt, Artificial Sequence
  Description of Artificial Sequence: Synthetic oligonucleotide
  Sense strand starting at position 2570 of SEQ ID NO: 1563833
cugauaagggacuguuaac

SEQ ID NO: 1835304 - RNA, 19 nt, Artificial Sequence
  Description of Artificial Sequence: Synthetic oligonucleotide
  Antisense strand to SEQ ID NO: 1835303
guuaacagucccuuaucag

SEQ ID NO: 1835305 - RNA, 19 nt, Artificial Sequence
  Description of Artificial Sequence: Synthetic oligonucleotide
  Sense strand starting at position 2695 of SEQ ID NO: 1563833
ggcaaauacguacaugaaa

SEQ ID NO: 1835306 - RNA, 19 nt, Artificial Sequence
  Description of Artificial Sequence: Synthetic oligonucleotide
  Antisense strand to SEQ ID NO: 1835305
uuucauguacguauuugcc

SEQ ID NO: 1835307 - RNA, 19 nt, Artificial Sequence
  Description of Artificial Sequence: Synthetic oligonucleotide
  Sense strand starting at position 2816 of SEQ ID NO: 1563833
cccaaauacugaugaggau

SEQ ID NO: 1835308 - RNA, 19 nt, Artificial Sequence
  Description of Artificial Sequence: Synthetic oligonucleotide
  Antisense strand to SEQ ID NO: 1835307
auccucaucaguauuuggg

SEQ ID NO: 1835309 - RNA, 19 nt, Artificial Sequence
  Description of Artificial Sequence: Synthetic oligonucleotide
  Sense strand starting at position 2843 of SEQ ID NO: 1563833
acaggagcacacugucauu

SEQ ID NO: 1835310 - RNA, 19 nt, Artificial Sequence
  Description of Artificial Sequence: Synthetic oligonucleotide
  Antisense strand to SEQ ID NO: 1835309
aaugacagugugcuccugu

SEQ ID NO: 1835311 - RNA, 19 nt, Artificial Sequence
  Description of Artificial Sequence: Synthetic oligonucleotide
  Sense strand starting at position 2849 of SEQ ID NO: 1563833
gcacacugucauugcugau

SEQ ID NO: 1835312 - RNA, 19 nt, Artificial Sequence
  Description of Artificial Sequence: Synthetic oligonucleotide
  Antisense strand to SEQ ID NO: 1835311
aucagcaaugacagugugc

SEQ ID NO: 1835313 - RNA, 19 nt, Artificial Sequence
  Description of Artificial Sequence: Synthetic oligonucleotide
  Sense strand starting at position 2895 of SEQ ID NO: 1563833
ugaagacaguuuguaaguu

SEQ ID NO: 1835314 - RNA, 19 nt, Artificial Sequence
  Description of Artificial Sequence: Synthetic oligonucleotide
  Antisense strand to SEQ ID NO: 1835313
aacuuacaaacugucuuca

SEQ ID NO: 1835315 - RNA, 19 nt, Artificial Sequence
  Description of Artificial Sequence: Synthetic oligonucleotide
  Sense strand starting at position 2899 of SEQ ID NO: 1563833
gacaguuuguaaguuucuu

SEQ ID NO: 1835316 - RNA, 19 nt, Artificial Sequence
  Description of Artificial Sequence: Synthetic oligonucleotide
  Antisense strand to SEQ ID NO: 1835315
aagaaacuuacaaacuguc

SEQ ID NO: 1835317 - RNA, 19 nt, Artificial Sequence
  Description of Artificial Sequence: Synthetic oligonucleotide
  Sense strand starting at position 2903 of SEQ ID NO: 1563833
guuuguaaguuucuuacaa

SEQ ID NO: 1835318 - RNA, 19 nt, Artificial Sequence
  Description of Artificial Sequence: Synthetic oligonucleotide
  Antisense strand to SEQ ID NO: 1835317
uuguaagaaacuuacaaac

SEQ ID NO: 1835319 - RNA, 19 nt, Artificial Sequence
  Description of Artificial Sequence: Synthetic oligonucleotide
  Sense strand starting at position 2951 of SEQ ID NO: 1563833
gcaagugcgcuccuuguua

SEQ ID NO: 1835320 - RNA, 19 nt, Artificial Sequence
  Description of Artificial Sequence: Synthetic oligonucleotide
  Antisense strand to SEQ ID NO: 1835319
uaacaaggagcgcacuugc

SEQ ID NO: 1835321 - RNA, 19 nt, Artificial Sequence
  Description of Artificial Sequence: Synthetic oligonucleotide
  Sense strand starting at position 2955 of SEQ ID NO: 1563833
gugcgcuccuuguuauuua

SEQ ID NO: 1835322 - RNA, 19 nt, Artificial Sequence
  Description of Artificial Sequence: Synthetic oligonucleotide
  Antisense strand to SEQ ID NO: 1835321
uaaauaacaaggagcgcac

SEQ ID NO: 1835323 - RNA, 19 nt, Artificial Sequence
  Description of Artificial Sequence: Synthetic oligonucleotide
  Sense strand starting at position 2959 of SEQ ID NO: 1563833
gcuccuuguuauuuagcca

SEQ ID NO: 1835324 - RNA, 19 nt, Artificial Sequence
  Description of Artificial Sequence: Synthetic oligonucleotide
  Antisense strand to SEQ ID NO: 1835323
uggcuaaauaacaaggagc

SEQ ID NO: 1835325 - RNA, 19 nt, Artificial Sequence
  Description of Artificial Sequence: Synthetic oligonucleotide
  Sense strand starting at position 2962 of SEQ ID NO: 1563833
ccuuguuauuuagccagau

SEQ ID NO: 1835326 - RNA, 19 nt, Artificial Sequence
  Description of Artificial Sequence: Synthetic oligonucleotide
  Antisense strand to SEQ ID NO: 1835325
aucuggcuaaauaacaagg

SEQ ID NO: 1835327 - RNA, 19 nt, Artificial Sequence
  Description of Artificial Sequence: Synthetic oligonucleotide
  Sense strand starting at position 3162 of SEQ ID NO: 1563833
ggaugaaacuuagauacau

SEQ ID NO: 1835328 - RNA, 19 nt, Artificial Sequence
  Description of Artificial Sequence: Synthetic oligonucleotide
  Antisense strand to SEQ ID NO: 1835327
auguaucuaaguuucaucc

SEQ ID NO: 1835329 - RNA, 19 nt, Artificial Sequence
  Description of Artificial Sequence: Synthetic oligonucleotide
  Sense strand starting at position 3272 of SEQ ID NO: 1563833
guacaaaguucagugguuu

SEQ ID NO: 1835330 - RNA, 19 nt, Artificial Sequence
  Description of Artificial Sequence: Synthetic oligonucleotide
  Antisense strand to SEQ ID NO: 1835329
aaaccacugaacuuuguac

SEQ ID NO: 1835331 - RNA, 19 nt, Artificial Sequence
  Description of Artificial Sequence: Synthetic oligonucleotide
  Sense strand starting at position 3364 of SEQ ID NO: 1563833
ugauucuauggugguaaac

SEQ ID NO: 1835332 - RNA, 19 nt, Artificial Sequence
  Description of Artificial Sequence: Synthetic oligonucleotide
  Antisense strand to SEQ ID NO: 1835331
guuuaccaccauagaauca

SEQ ID NO: 1835333 - RNA, 19 nt, Artificial Sequence
  Description of Artificial Sequence: Synthetic oligonucleotide
  Sense strand starting at position 3366 of SEQ ID NO: 1563833
auucuauggugguaaacau

SEQ ID NO: 1835334 - RNA, 19 nt, Artificial Sequence
  Description of Artificial Sequence: Synthetic oligonucleotide
  Antisense strand to SEQ ID NO: 1835333
auguuuaccaccauagaau

SEQ ID NO: 1835335 - RNA, 19 nt, Artificial Sequence
  Description of Artificial Sequence: Synthetic oligonucleotide
  Sense strand starting at position 3374 of SEQ ID NO: 1563833
gugguaaacauaugucauu

SEQ ID NO: 1835336 - RNA, 19 nt, Artificial Sequence
  Description of Artificial Sequence: Synthetic oligonucleotide
  Antisense strand to SEQ ID NO: 1835335
aaugacauauguuuaccac

SEQ ID NO: 1835337 - RNA, 19 nt, Artificial Sequence
  Description of Artificial Sequence: Synthetic oligonucleotide
  Sense strand starting at position 3375 of SEQ ID NO: 1563833
ugguaaacauaugucauua

SEQ ID NO: 1835338 - RNA, 19 nt, Artificial Sequence
  Description of Artificial Sequence: Synthetic oligonucleotide
  Antisense strand to SEQ ID NO: 1835337
uaaugacauauguuuacca

SEQ ID NO: 1835339 - RNA, 19 nt, Artificial Sequence
  Description of Artificial Sequence: Synthetic oligonucleotide
  Sense strand starting at position 3433 of SEQ ID NO: 1563833
aggaaugaauccuaaacua

SEQ ID NO: 1835340 - RNA, 19 nt, Artificial Sequence
  Description of Artificial Sequence: Synthetic oligonucleotide
  Antisense strand to SEQ ID NO: 1835339
uaguuuaggauucauuccu

SEQ ID NO: 1835341 - RNA, 19 nt, Artificial Sequence
  Description of Artificial Sequence: Synthetic oligonucleotide
  Sense strand starting at position 3451 of SEQ ID NO: 1563833
acggacauugggugauaau

SEQ ID NO: 1835342 - RNA, 19 nt, Artificial Sequence
  Description of Artificial Sequence: Synthetic oligonucleotide
  Antisense strand to SEQ ID NO: 1835341
auuaucacccaauguccgu

SEQ ID NO: 1835343 - RNA, 19 nt, Artificial Sequence
  Description of Artificial Sequence: Synthetic oligonucleotide
  Sense strand starting at position 3475 of SEQ ID NO: 1563833
guccauguauucucaauug

SEQ ID NO: 1835344 - RNA, 19 nt, Artificial Sequence
  Description of Artificial Sequence: Synthetic oligonucleotide
  Antisense strand to SEQ ID NO: 1835343
caauugagaauacauggac

SEQ ID NO: 1835345 - RNA, 19 nt, Artificial Sequence
  Description of Artificial Sequence: Synthetic oligonucleotide
  Sense strand starting at position 3515 of SEQ ID NO: 1563833
uugggagguugauaugaag

SEQ ID NO: 1835346 - RNA, 19 nt, Artificial Sequence
  Description of Artificial Sequence: Synthetic oligonucleotide
  Antisense strand to SEQ ID NO: 1835345
cuucauaucaaccucccaa

SEQ ID NO: 1835347 - RNA, 19 nt, Artificial Sequence
  Description of Artificial Sequence: Synthetic oligonucleotide
  Sense strand starting at position 3521 of SEQ ID NO: 1563833
gguugauaugaaggaggcu

SEQ ID NO: 1835348 - RNA, 19 nt, Artificial Sequence
  Description of Artificial Sequence: Synthetic oligonucleotide
  Antisense strand to SEQ ID NO: 1835347
agccuccuucauaucaacc

SEQ ID NO: 1835349 - RNA, 19 nt, Artificial Sequence
  Description of Artificial Sequence: Synthetic oligonucleotide
  Sense strand starting at position 3554 of SEQ ID NO: 1563833
acaggaugccugugagacu

SEQ ID NO: 1835350 - RNA, 19 nt, Artificial Sequence
  Description of Artificial Sequence: Synthetic oligonucleotide
  Antisense strand to SEQ ID NO: 1835349
agucucacaggcauccugu

SEQ ID NO: 1835351 - RNA, 19 nt, Artificial Sequence
  Description of Artificial Sequence: Synthetic oligonucleotide
  Sense strand starting at position 3667 of SEQ ID NO: 1563833
acauguugcccuggcaauu

SEQ ID NO: 1835352 - RNA, 19 nt, Artificial Sequence
  Description of Artificial Sequence: Synthetic oligonucleotide
  Antisense strand to SEQ ID NO: 1835351
aauugccagggcaacaugu

SEQ ID NO: 1835353 - RNA, 19 nt, Artificial Sequence
  Description of Artificial Sequence: Synthetic oligonucleotide
  Sense strand starting at position 3677 of SEQ ID NO: 1563833
cuggcaauuuaagaguuau

SEQ ID NO: 1835354 - RNA, 19 nt, Artificial Sequence
  Description of Artificial Sequence: Synthetic oligonucleotide
  Antisense strand to SEQ ID NO: 1835353
auaacucuuaaauugccag

SEQ ID NO: 1835355 - RNA, 19 nt, Artificial Sequence
  Description of Artificial Sequence: Synthetic oligonucleotide
  Sense strand starting at position 3767 of SEQ ID NO: 1563833
ugauuuggcuccuagcaga

SEQ ID NO: 1835356 - RNA, 19 nt, Artificial Sequence
  Description of Artificial Sequence: Synthetic oligonucleotide
  Antisense strand to SEQ ID NO: 1835355
ucugcuaggagccaaauca

SEQ ID NO: 1835357 - RNA, 19 nt, Artificial Sequence
  Description of Artificial Sequence: Synthetic oligonucleotide
  Sense strand starting at position 3838 of SEQ ID NO: 1563833
gcaccucccugagaucaga

SEQ ID NO: 1835358 - RNA, 19 nt, Artificial Sequence
  Description of Artificial Sequence: Synthetic oligonucleotide
  Antisense strand to SEQ ID NO: 1835357
ucugaucucagggaggugc

SEQ ID NO: 1835359 - RNA, 19 nt, Artificial Sequence
  Description of Artificial Sequence: Synthetic oligonucleotide
  Sense strand starting at position 3891 of SEQ ID NO: 1563833
ugaccauggucucccaaga

SEQ ID NO: 1835360 - RNA, 19 nt, Artificial Sequence
  Description of Artificial Sequence: Synthetic oligonucleotide
  Antisense strand to SEQ ID NO: 1835359
ucuugggagaccaugguca

SEQ ID NO: 1835361 - RNA, 19 nt, Artificial Sequence
  Description of Artificial Sequence: Synthetic oligonucleotide
  Sense strand starting at position 3962 of SEQ ID NO: 1563833
guccuaacucaggauccua

SEQ ID NO: 1835362 - RNA, 19 nt, Artificial Sequence
  Description of Artificial Sequence: Synthetic oligonucleotide
  Antisense strand to SEQ ID NO: 1835361
uaggauccugaguuaggac

SEQ ID NO: 1835363 - RNA, 19 nt, Artificial Sequence
  Description of Artificial Sequence: Synthetic oligonucleotide
  Sense strand starting at position 1072 of SEQ ID NO: 1563834
gagacauguugacucugau

SEQ ID NO: 1835364 - RNA, 19 nt, Artificial Sequence
  Description of Artificial Sequence: Synthetic oligonucleotide
  Antisense strand to SEQ ID NO: 1835363
aucagagucaacaugucuc

SEQ ID NO: 1835365 - RNA, 19 nt, Artificial Sequence
  Description of Artificial Sequence: Synthetic oligonucleotide
  Sense strand starting at position 1075 of SEQ ID NO: 1563834
acauguugacucugauaaa

SEQ ID NO: 1835366 - RNA, 19 nt, Artificial Sequence
  Description of Artificial Sequence: Synthetic oligonucleotide
  Antisense strand to SEQ ID NO: 1835365
uuuaucagagucaacaugu

SEQ ID NO: 1835367 - RNA, 19 nt, Artificial Sequence
  Description of Artificial Sequence: Synthetic oligonucleotide
  Sense strand starting at position 1255 of SEQ ID NO: 1563834
gggauucuguucuccugau

SEQ ID NO: 1835368 - RNA, 19 nt, Artificial Sequence
  Description of Artificial Sequence: Synthetic oligonucleotide
  Antisense strand to SEQ ID NO: 1835367
aucaggagaacagaauccc

SEQ ID NO: 1835369 - RNA, 19 nt, Artificial Sequence
  Description of Artificial Sequence: Synthetic oligonucleotide
  Sense strand starting at position 1347 of SEQ ID NO: 1563834
ggcauauuaaggugacaua

SEQ ID NO: 1835370 - RNA, 19 nt, Artificial Sequence
  Description of Artificial Sequence: Synthetic oligonucleotide
  Antisense strand to SEQ ID NO: 1835369
uaugucaccuuaauaugcc

SEQ ID NO: 1835371 - RNA, 19 nt, Artificial Sequence
  Description of Artificial Sequence: Synthetic oligonucleotide
  Sense strand starting at position 1369 of SEQ ID NO: 1563834
gcugccagucuucugaguu

SEQ ID NO: 1835372 - RNA, 19 nt, Artificial Sequence
  Description of Artificial Sequence: Synthetic oligonucleotide
  Antisense strand to SEQ ID NO: 1835371
aacucagaagacuggcagc

SEQ ID NO: 1835373 - RNA, 19 nt, Artificial Sequence
  Description of Artificial Sequence: Synthetic oligonucleotide
  Sense strand starting at position 1547 of SEQ ID NO: 1563834
cugacugcugaguagauua

SEQ ID NO: 1835374 - RNA, 19 nt, Artificial Sequence
  Description of Artificial Sequence: Synthetic oligonucleotide
  Antisense strand to SEQ ID NO: 1835373
uaaucuacucagcagucag

SEQ ID NO: 1835375 - RNA, 19 nt, Artificial Sequence
  Description of Artificial Sequence: Synthetic oligonucleotide
  Sense strand starting at position 1549 of SEQ ID NO: 1563834
gacugcugaguagauuauu

SEQ ID NO: 1835376 - RNA, 19 nt, Artificial Sequence
  Description of Artificial Sequence: Synthetic oligonucleotide
  Antisense strand to SEQ ID NO: 1835375
aauaaucuacucagcaguc

SEQ ID NO: 1835377 - RNA, 19 nt, Artificial Sequence
  Description of Artificial Sequence: Synthetic oligonucleotide
  Sense strand starting at position 1584 of SEQ ID NO: 1563834
cugggauccucaguccuca

SEQ ID NO: 1835378 - RNA, 19 nt, Artificial Sequence
  Description of Artificial Sequence: Synthetic oligonucleotide
  Antisense strand to SEQ ID NO: 1835377
ugaggacugaggaucccag

SEQ ID NO: 1835379 - RNA, 19 nt, Artificial Sequence
  Description of Artificial Sequence: Synthetic oligonucleotide
  Sense strand starting at position 1607 of SEQ ID NO: 1563834
ggguccuuacauuggcaua

SEQ ID NO: 1835380 - RNA, 19 nt, Artificial Sequence
  Description of Artificial Sequence: Synthetic oligonucleotide
  Antisense strand to SEQ ID NO: 1835379
uaugccaauguaaggaccc

SEQ ID NO: 1835381 - RNA, 19 nt, Artificial Sequence
  Description of Artificial Sequence: Synthetic oligonucleotide
  Sense strand starting at position 2064 of SEQ ID NO: 1563834
uacuguggccucuggagaa

SEQ ID NO: 1835382 - RNA, 19 nt, Artificial Sequence
  Description of Artificial Sequence: Synthetic oligonucleotide
  Antisense strand to SEQ ID NO: 1835381
uucuccagaggccacagua

SEQ ID NO: 1835383 - RNA, 19 nt, Artificial Sequence
  Description of Artificial Sequence: Synthetic oligonucleotide
  Sense strand starting at position 2143 of SEQ ID NO: 1563834
ugugacaucauacgaggaa

SEQ ID NO: 1835384 - RNA, 19 nt, Artificial Sequence
  Description of Artificial Sequence: Synthetic oligonucleotide
  Antisense strand to SEQ ID NO: 1835383
uuccucguaugaugucaca

SEQ ID NO: 1835385 - RNA, 19 nt, Artificial Sequence
  Description of Artificial Sequence: Synthetic oligonucleotide
  Sense strand starting at position 2146 of SEQ ID NO: 1563834
gacaucauacgaggaagua

SEQ ID NO: 1835386 - RNA, 19 nt, Artificial Sequence
  Description of Artificial Sequence: Synthetic oligonucleotide
  Antisense strand to SEQ ID NO: 1835385
uacuuccucguaugauguc

SEQ ID NO: 1835387 - RNA, 19 nt, Artificial Sequence
  Description of Artificial Sequence: Synthetic oligonucleotide
  Sense strand starting at position 2176 of SEQ ID NO: 1563834
gucaacaaugcccauguau

SEQ ID NO: 1835388 - RNA, 19 nt, Artificial Sequence
  Description of Artificial Sequence: Synthetic oligonucleotide
  Antisense strand to SEQ ID NO: 1835387
auacaugggcauuguugac

SEQ ID NO: 1835389 - RNA, 19 nt, Artificial Sequence
  Description of Artificial Sequence: Synthetic oligonucleotide
  Sense strand starting at position 2234 of SEQ ID NO: 1563834
cuuaguucugaggguagag

SEQ ID NO: 1835390 - RNA, 19 nt, Artificial Sequence
  Description of Artificial Sequence: Synthetic oligonucleotide
  Antisense strand to SEQ ID NO: 1835389
cucuacccucagaacuaag

SEQ ID NO: 1835391 - RNA, 19 nt, Artificial Sequence
  Description of Artificial Sequence: Synthetic oligonucleotide
  Sense strand starting at position 2246 of SEQ ID NO: 1563834
gguagaggguuuccuaagu

SEQ ID NO: 1835392 - RNA, 19 nt, Artificial Sequence
  Description of Artificial Sequence: Synthetic oligonucleotide
  Antisense strand to SEQ ID NO: 1835391
acuuaggaaacccucuacc

SEQ ID NO: 1835393 - RNA, 19 nt, Artificial Sequence
  Description of Artificial Sequence: Synthetic oligonucleotide
  Sense strand starting at position 2251 of SEQ ID NO: 1563834
aggguuuccuaaguccuaa

SEQ ID NO: 1835394 - RNA, 19 nt, Artificial Sequence
  Description of Artificial Sequence: Synthetic oligonucleotide
  Antisense strand to SEQ ID NO: 1835393
uuaggacuuaggaaacccu

SEQ ID NO: 1835395 - RNA, 19 nt, Artificial Sequence
  Description of Artificial Sequence: Synthetic oligonucleotide
  Sense strand starting at position 2356 of SEQ ID NO: 1563834
cugaaacccuucuugcaga

SEQ ID NO: 1835396 - RNA, 19 nt, Artificial Sequence
  Description of Artificial Sequence: Synthetic oligonucleotide
  Antisense strand to SEQ ID NO: 1835395
ucugcaagaaggguuucag

SEQ ID NO: 1835397 - RNA, 19 nt, Artificial Sequence
  Description of Artificial Sequence: Synthetic oligonucleotide
  Sense strand starting at position 2361 of SEQ ID NO: 1563834
acccuucuugcagaaguca

SEQ ID NO: 1835398 - RNA, 19 nt, Artificial Sequence
  Description of Artificial Sequence: Synthetic oligonucleotide
  Antisense strand to SEQ ID NO: 1835397
ugacuucugcaagaagggu

SEQ ID NO: 1835399 - RNA, 19 nt, Artificial Sequence
  Description of Artificial Sequence: Synthetic oligonucleotide
  Sense strand starting at position 2432 of SEQ ID NO: 1563834
gugccaccucccuacuaua

SEQ ID NO: 1835400 - RNA, 19 nt, Artificial Sequence
  Description of Artificial Sequence: Synthetic oligonucleotide
  Antisense strand to SEQ ID NO: 1835399
uauaguagggagguggcac

SEQ ID NO: 1835401 - RNA, 19 nt, Artificial Sequence
  Description of Artificial Sequence: Synthetic oligonucleotide
  Sense strand starting at position 2640 of SEQ ID NO: 1563834
gcuaucucuguggagggua

SEQ ID NO: 1835402 - RNA, 19 nt, Artificial Sequence
  Description of Artificial Sequence: Synthetic oligonucleotide
  Antisense strand to SEQ ID NO: 1835401
uacccuccacagagauagc

SEQ ID NO: 1835403 - RNA, 19 nt, Artificial Sequence
  Description of Artificial Sequence: Synthetic oligonucleotide
  Sense strand starting at position 2708 of SEQ ID NO: 1563834
ggacuugaguuucuucuuu

SEQ ID NO: 1835404 - RNA, 19 nt, Artificial Sequence
  Description of Artificial Sequence: Synthetic oligonucleotide
  Antisense strand to SEQ ID NO: 1835403
aaagaagaaacucaagucc

SEQ ID NO: 1835405 - RNA, 19 nt, Artificial Sequence
  Description of Artificial Sequence: Synthetic oligonucleotide
  Sense strand starting at position 2757 of SEQ ID NO: 1563834
ucuuauguuccugagaaca

SEQ ID NO: 1835406 - RNA, 19 nt, Artificial Sequence
  Description of Artificial Sequence: Synthetic oligonucleotide
  Antisense strand to SEQ ID NO: 1835405
uguucucaggaacauaaga

SEQ ID NO: 1835407 - RNA, 19 nt, Artificial Sequence
  Description of Artificial Sequence: Synthetic oligonucleotide
  Sense strand starting at position 2989 of SEQ ID NO: 1563834
gcaaacguugcagagaaua

SEQ ID NO: 1835408 - RNA, 19 nt, Artificial Sequence
  Description of Artificial Sequence: Synthetic oligonucleotide
  Antisense strand to SEQ ID NO: 1835407
uauucucugcaacguuugc

SEQ ID NO: 1835409 - RNA, 19 nt, Artificial Sequence
  Description of Artificial Sequence: Synthetic oligonucleotide
  Sense strand starting at position 3001 of SEQ ID NO: 1563834
gagaauaggauguguccua

SEQ ID NO: 1835410 - RNA, 19 nt, Artificial Sequence
  Description of Artificial Sequence: Synthetic oligonucleotide
  Antisense strand to SEQ ID NO: 1835409
uaggacacauccuauucuc

SEQ ID NO: 1835411 - RNA, 19 nt, Artificial Sequence
  Description of Artificial Sequence: Synthetic oligonucleotide
  Sense strand starting at position 3002 of SEQ ID NO: 1563834
agaauaggauguguccuaa

SEQ ID NO: 1835412 - RNA, 19 nt, Artificial Sequence
  Description of Artificial Sequence: Synthetic oligonucleotide
  Antisense strand to SEQ ID NO: 1835411
uuaggacacauccuauucu

SEQ ID NO: 1835413 - RNA, 19 nt, Artificial Sequence
  Description of Artificial Sequence: Synthetic oligonucleotide
  Sense strand starting at position 3141 of SEQ ID NO: 1563834
agacuuagcuucuuaugua

SEQ ID NO: 1835414 - RNA, 19 nt, Artificial Sequence
  Description of Artificial Sequence: Synthetic oligonucleotide
  Antisense strand to SEQ ID NO: 1835413
uacauaagaagcuaagucu

SEQ ID NO: 1835415 - RNA, 19 nt, Artificial Sequence
  Description of Artificial Sequence: Synthetic oligonucleotide
  Sense strand starting at position 3236 of SEQ ID NO: 1563834
gguuucugacauugacuuu

SEQ ID NO: 1835416 - RNA, 19 nt, Artificial Sequence
  Description of Artificial Sequence: Synthetic oligonucleotide
  Antisense strand to SEQ ID NO: 1835415
aaagucaaugucagaaacc

SEQ ID NO: 1835417 - RNA, 19 nt, Artificial Sequence
  Description of Artificial Sequence: Synthetic oligonucleotide
  Sense strand starting at position 3242 of SEQ ID NO: 1563834
ugacauugacuuugcagau

SEQ ID NO: 1835418 - RNA, 19 nt, Artificial Sequence
  Description of Artificial Sequence: Synthetic oligonucleotide
  Antisense strand to SEQ ID NO: 1835417
aucugcaaagucaauguca

SEQ ID NO: 1835419 - RNA, 19 nt, Artificial Sequence
  Description of Artificial Sequence: Synthetic oligonucleotide
  Sense strand starting at position 3243 of SEQ ID NO: 1563834
gacauugacuuugcagaua

SEQ ID NO: 1835420 - RNA, 19 nt, Artificial Sequence
  Description of Artificial Sequence: Synthetic oligonucleotide
  Antisense strand to SEQ ID NO: 1835419
uaucugcaaagucaauguc

SEQ ID NO: 1835421 - RNA, 19 nt, Artificial Sequence
  Description of Artificial Sequence: Synthetic oligonucleotide
  Sense strand starting at position 3380 of SEQ ID NO: 1563834
uuuguaucaccugagauau

SEQ ID NO: 1835422 - RNA, 19 nt, Artificial Sequence
  Description of Artificial Sequence: Synthetic oligonucleotide
  Antisense strand to SEQ ID NO: 1835421
auaucucaggugauacaaa

SEQ ID NO: 1835423 - RNA, 19 nt, Artificial Sequence
  Description of Artificial Sequence: Synthetic oligonucleotide
  Sense strand starting at position 3463 of SEQ ID NO: 1563834
agcuguggacucuagauaa

SEQ ID NO: 1835424 - RNA, 19 nt, Artificial Sequence
  Description of Artificial Sequence: Synthetic oligonucleotide
  Antisense strand to SEQ ID NO: 1835423
uuaucuagaguccacagcu

SEQ ID NO: 1835425 - RNA, 19 nt, Artificial Sequence
  Description of Artificial Sequence: Synthetic oligonucleotide
  Sense strand starting at position 3635 of SEQ ID NO: 1563834
gguaaacuuugggucuuua

SEQ ID NO: 1835426 - RNA, 19 nt, Artificial Sequence
  Description of Artificial Sequence: Synthetic oligonucleotide
  Antisense strand to SEQ ID NO: 1835425
uaaagacccaaaguuuacc

SEQ ID NO: 1835427 - RNA, 19 nt, Artificial Sequence
  Description of Artificial Sequence: Synthetic oligonucleotide
  Sense strand starting at position 3639 of SEQ ID NO: 1563834
aacuuugggucuuuaauga

SEQ ID NO: 1835428 - RNA, 19 nt, Artificial Sequence
  Description of Artificial Sequence: Synthetic oligonucleotide
  Antisense strand to SEQ ID NO: 1835427
ucauuaaagacccaaaguu

SEQ ID NO: 1835429 - RNA, 19 nt, Artificial Sequence
  Description of Artificial Sequence: Synthetic oligonucleotide
  Sense strand starting at position 3647 of SEQ ID NO: 1563834
gucuuuaaugaaugguaau

SEQ ID NO: 1835430 - RNA, 19 nt, Artificial Sequence
  Description of Artificial Sequence: Synthetic oligonucleotide
  Antisense strand to SEQ ID NO: 1835429
auuaccauucauuaaagac

SEQ ID NO: 1835431 - RNA, 19 nt, Artificial Sequence
  Description of Artificial Sequence: Synthetic oligonucleotide
  Sense strand starting at position 3805 of SEQ ID NO: 1563834
guguuuccucauuaaagca

SEQ ID NO: 1835432 - RNA, 19 nt, Artificial Sequence
  Description of Artificial Sequence: Synthetic oligonucleotide
  Antisense strand to SEQ ID NO: 1835431
ugcuuuaaugaggaaacac

SEQ ID NO: 1835433 - RNA, 19 nt, Artificial Sequence
  Description of Artificial Sequence: Synthetic oligonucleotide
  Sense strand starting at position 3824 of SEQ ID NO: 1563834
ucuguuauuuggcugugga

SEQ ID NO: 1835434 - RNA, 19 nt, Artificial Sequence
  Description of Artificial Sequence: Synthetic oligonucleotide
  Antisense strand to SEQ ID NO: 1835433
uccacagccaaauaacaga

SEQ ID NO: 1835435 - RNA, 19 nt, Artificial Sequence
  Description of Artificial Sequence: Synthetic oligonucleotide
  Sense strand starting at position 3825 of SEQ ID NO: 1563834
cuguuauuuggcuguggag

SEQ ID NO: 1835436 - RNA, 19 nt, Artificial Sequence
  Description of Artificial Sequence: Synthetic oligonucleotide
  Antisense strand to SEQ ID NO: 1835435
cuccacagccaaauaacag

SEQ ID NO: 1835437 - RNA, 19 nt, Artificial Sequence
  Description of Artificial Sequence: Synthetic oligonucleotide
  Sense strand starting at position 3827 of SEQ ID NO: 1563834
guuauuuggcuguggaguu

SEQ ID NO: 1835438 - RNA, 19 nt, Artificial Sequence
  Description of Artificial Sequence: Synthetic oligonucleotide
  Antisense strand to SEQ ID NO: 1835437
aacuccacagccaaauaac

SEQ ID NO: 1835439 - RNA, 19 nt, Artificial Sequence
  Description of Artificial Sequence: Synthetic oligonucleotide
  Sense strand starting at position 3880 of SEQ ID NO: 1563834
uuucguguuagggaccgaa

SEQ ID NO: 1835440 - RNA, 19 nt, Artificial Sequence
  Description of Artificial Sequence: Synthetic oligonucleotide
  Antisense strand to SEQ ID NO: 1835439
uucggucccuaacacgaaa

SEQ ID NO: 1835441 - RNA, 19 nt, Artificial Sequence
  Description of Artificial Sequence: Synthetic oligonucleotide
  Sense strand starting at position 3972 of SEQ ID NO: 1563834
ucccuuagaguuugacaaa

SEQ ID NO: 1835442 - RNA, 19 nt, Artificial Sequence
  Description of Artificial Sequence: Synthetic oligonucleotide
  Antisense strand to SEQ ID NO: 1835441
uuugucaaacucuaaggga

SEQ ID NO: 1835443 - RNA, 19 nt, Artificial Sequence
  Description of Artificial Sequence: Synthetic oligonucleotide
  Sense strand starting at position 1009 of SEQ ID NO: 1563835
cacucauaggugggaaguu

SEQ ID NO: 1835444 - RNA, 19 nt, Artificial Sequence
  Description of Artificial Sequence: Synthetic oligonucleotide
  Antisense strand to SEQ ID NO: 1835443
aacuucccaccuaugagug

SEQ ID NO: 1835445 - RNA, 19 nt, Artificial Sequence
  Description of Artificial Sequence: Synthetic oligonucleotide
  Sense strand starting at position 1386 of SEQ ID NO: 1563835
gaggcauuugagugcucuu

SEQ ID NO: 1835446 - RNA, 19 nt, Artificial Sequence
  Description of Artificial Sequence: Synthetic oligonucleotide
  Antisense strand to SEQ ID NO: 1835445
aagagcacucaaaugccuc

SEQ ID NO: 1835447 - RNA, 19 nt, Artificial Sequence
  Description of Artificial Sequence: Synthetic oligonucleotide
  Sense strand starting at position 1389 of SEQ ID NO: 1563835
gcauuugagugcucuucca

SEQ ID NO: 1835448 - RNA, 19 nt, Artificial Sequence
  Description of Artificial Sequence: Synthetic oligonucleotide
  Antisense strand to SEQ ID NO: 1835447
uggaagagcacucaaaugc

SEQ ID NO: 1835449 - RNA, 19 nt, Artificial Sequence
  Description of Artificial Sequence: Synthetic oligonucleotide
  Sense strand starting at position 1415 of SEQ ID NO: 1563835
ugagaaugcuccucacagu

SEQ ID NO: 1835450 - RNA, 19 nt, Artificial Sequence
  Description of Artificial Sequence: Synthetic oligonucleotide
  Antisense strand to SEQ ID NO: 1835449
acugugaggagcauucuca

SEQ ID NO: 1835451 - RNA, 19 nt, Artificial Sequence
  Description of Artificial Sequence: Synthetic oligonucleotide
  Sense strand starting at position 1416 of SEQ ID NO: 1563835
gagaaugcuccucacagua

SEQ ID NO: 1835452 - RNA, 19 nt, Artificial Sequence
  Description of Artificial Sequence: Synthetic oligonucleotide
  Antisense strand to SEQ ID NO: 1835451
uacugugaggagcauucuc

SEQ ID NO: 1835453 - RNA, 19 nt, Artificial Sequence
  Description of Artificial Sequence: Synthetic oligonucleotide
  Sense strand starting at position 1552 of SEQ ID NO: 1563835
gcaccucagucucuagaga

SEQ ID NO: 1835454 - RNA, 19 nt, Artificial Sequence
  Description of Artificial Sequence: Synthetic oligonucleotide
  Antisense strand to SEQ ID NO: 1835453
ucucuagagacugaggugc

SEQ ID NO: 1835455 - RNA, 19 nt, Artificial Sequence
  Description of Artificial Sequence: Synthetic oligonucleotide
  Sense strand starting at position 1652 of SEQ ID NO: 1563835
uaaggaggguccucuuaac

SEQ ID NO: 1835456 - RNA, 19 nt, Artificial Sequence
  Description of Artificial Sequence: Synthetic oligonucleotide
  Antisense strand to SEQ ID NO: 1835455
guuaagaggacccuccuua

SEQ ID NO: 1835457 - RNA, 19 nt, Artificial Sequence
  Description of Artificial Sequence: Synthetic oligonucleotide
  Sense strand starting at position 1658 of SEQ ID NO: 1563835
ggguccucuuaacuaugua

SEQ ID NO: 1835458 - RNA, 19 nt, Artificial Sequence
  Description of Artificial Sequence: Synthetic oligonucleotide
  Antisense strand to SEQ ID NO: 1835457
uacauaguuaagaggaccc

SEQ ID NO: 1835459 - RNA, 19 nt, Artificial Sequence
  Description of Artificial Sequence: Synthetic oligonucleotide
  Sense strand starting at position 1670 of SEQ ID NO: 1563835
cuauguagggccugagauu

SEQ ID NO: 1835460 - RNA, 19 nt, Artificial Sequence
  Description of Artificial Sequence: Synthetic oligonucleotide
  Antisense strand to SEQ ID NO: 1835459
aaucucaggcccuacauag

SEQ ID NO: 1835461 - RNA, 19 nt, Artificial Sequence
  Description of Artificial Sequence: Synthetic oligonucleotide
  Sense strand starting at position 1679 of SEQ ID NO: 1563835
gccugagauuucucccucu

SEQ ID NO: 1835462 - RNA, 19 nt, Artificial Sequence
  Description of Artificial Sequence: Synthetic oligonucleotide
  Antisense strand to SEQ ID NO: 1835461
agagggagaaaucucaggc

SEQ ID NO: 1835463 - RNA, 19 nt, Artificial Sequence
  Description of Artificial Sequence: Synthetic oligonucleotide
  Sense strand starting at position 1890 of SEQ ID NO: 1563835
cccguucuaggucaggaua

SEQ ID NO: 1835464 - RNA, 19 nt, Artificial Sequence
  Description of Artificial Sequence: Synthetic oligonucleotide
  Antisense strand to SEQ ID NO: 1835463
uauccugaccuagaacggg

SEQ ID NO: 1835465 - RNA, 19 nt, Artificial Sequence
  Description of Artificial Sequence: Synthetic oligonucleotide
  Sense strand starting at position 1993 of SEQ ID NO: 1563835
cccuuuauuagguggaagu

SEQ ID NO: 1835466 - RNA, 19 nt, Artificial Sequence
  Description of Artificial Sequence: Synthetic oligonucleotide
  Antisense strand to SEQ ID NO: 1835465
acuuccaccuaauaaaggg

SEQ ID NO: 1835467 - RNA, 19 nt, Artificial Sequence
  Description of Artificial Sequence: Synthetic oligonucleotide
  Sense strand starting at position 1995 of SEQ ID NO: 1563835
cuuuauuagguggaaguca

SEQ ID NO: 1835468 - RNA, 19 nt, Artificial Sequence
  Description of Artificial Sequence: Synthetic oligonucleotide
  Antisense strand to SEQ ID NO: 1835467
ugacuuccaccuaauaaag

SEQ ID NO: 1835469 - RNA, 19 nt, Artificial Sequence
  Description of Artificial Sequence: Synthetic oligonucleotide
  Sense strand starting at position 2115 of SEQ ID NO: 1563835
agggaacucacguaaaguu

SEQ ID NO: 1835470 - RNA, 19 nt, Artificial Sequence
  Description of Artificial Sequence: Synthetic oligonucleotide
  Antisense strand to SEQ ID NO: 1835469
aacuuuacgugaguucccu

SEQ ID NO: 1835471 - RNA, 19 nt, Artificial Sequence
  Description of Artificial Sequence: Synthetic oligonucleotide
  Sense strand starting at position 2157 of SEQ ID NO: 1563835
cuuggacuucucuaucugu

SEQ ID NO: 1835472 - RNA, 19 nt, Artificial Sequence
  Description of Artificial Sequence: Synthetic oligonucleotide
  Antisense strand to SEQ ID NO: 1835471
acagauagagaaguccaag

SEQ ID NO: 1835473 - RNA, 19 nt, Artificial Sequence
  Description of Artificial Sequence: Synthetic oligonucleotide
  Sense strand starting at position 2160 of SEQ ID NO: 1563835
ggacuucucuaucuguuga

SEQ ID NO: 1835474 - RNA, 19 nt, Artificial Sequence
  Description of Artificial Sequence: Synthetic oligonucleotide
  Antisense strand to SEQ ID NO: 1835473
ucaacagauagagaagucc

SEQ ID NO: 1835475 - RNA, 19 nt, Artificial Sequence
  Description of Artificial Sequence: Synthetic oligonucleotide
  Sense strand starting at position 2167 of SEQ ID NO: 1563835
ucuaucuguugagcugaau

SEQ ID NO: 1835476 - RNA, 19 nt, Artificial Sequence
  Description of Artificial Sequence: Synthetic oligonucleotide
  Antisense strand to SEQ ID NO: 1835475
auucagcucaacagauaga

SEQ ID NO: 1835477 - RNA, 19 nt, Artificial Sequence
  Description of Artificial Sequence: Synthetic oligonucleotide
  Sense strand starting at position 2203 of SEQ ID NO: 1563835
aggcucucauucccugaga

SEQ ID NO: 1835478 - RNA, 19 nt, Artificial Sequence
  Description of Artificial Sequence: Synthetic oligonucleotide
  Antisense strand to SEQ ID NO: 1835477
ucucagggaaugagagccu

SEQ ID NO: 1835479 - RNA, 19 nt, Artificial Sequence
  Description of Artificial Sequence: Synthetic oligonucleotide
  Sense strand starting at position 2206 of SEQ ID NO: 1563835
cucucauucccugagaguc

SEQ ID NO: 1835480 - RNA, 19 nt, Artificial Sequence
  Description of Artificial Sequence: Synthetic oligonucleotide
  Antisense strand to SEQ ID NO: 1835479
gacucucagggaaugagag

SEQ ID NO: 1835481 - RNA, 19 nt, Artificial Sequence
  Description of Artificial Sequence: Synthetic oligonucleotide
  Sense strand starting at position 2696 of SEQ ID NO: 1563835
ugagaagacuucuuagccu

SEQ ID NO: 1835482 - RNA, 19 nt, Artificial Sequence
  Description of Artificial Sequence: Synthetic oligonucleotide
  Antisense strand to SEQ ID NO: 1835481
aggcuaagaagucuucuca

SEQ ID NO: 1835483 - RNA, 19 nt, Artificial Sequence
  Description of Artificial Sequence: Synthetic oligonucleotide
  Sense strand starting at position 2703 of SEQ ID NO: 1563835
acuucuuagccugauagcu

SEQ ID NO: 1835484 - RNA, 19 nt, Artificial Sequence
  Description of Artificial Sequence: Synthetic oligonucleotide
  Antisense strand to SEQ ID NO: 1835483
agcuaucaggcuaagaagu

SEQ ID NO: 1835485 - RNA, 19 nt, Artificial Sequence
  Description of Artificial Sequence: Synthetic oligonucleotide
  Sense strand starting at position 2715 of SEQ ID NO: 1563835
gauagcuaugucugggacu

SEQ ID NO: 1835486 - RNA, 19 nt, Artificial Sequence
  Description of Artificial Sequence: Synthetic oligonucleotide
  Antisense strand to SEQ ID NO: 1835485
agucccagacauagcuauc

SEQ ID NO: 1835487 - RNA, 19 nt, Artificial Sequence
  Description of Artificial Sequence: Synthetic oligonucleotide
  Sense strand starting at position 2717 of SEQ ID NO: 1563835
uagcuaugucugggacuuc

SEQ ID NO: 1835488 - RNA, 19 nt, Artificial Sequence
  Description of Artificial Sequence: Synthetic oligonucleotide
  Antisense strand to SEQ ID NO: 1835487
gaagucccagacauagcua

SEQ ID NO: 1835489 - RNA, 19 nt, Artificial Sequence
  Description of Artificial Sequence: Synthetic oligonucleotide
  Sense strand starting at position 2800 of SEQ ID NO: 1563835
ugugacucacugcaauauu

SEQ ID NO: 1835490 - RNA, 19 nt, Artificial Sequence
  Description of Artificial Sequence: Synthetic oligonucleotide
  Antisense strand to SEQ ID NO: 1835489
aauauugcagugagucaca

SEQ ID NO: 1835491 - RNA, 19 nt, Artificial Sequence
  Description of Artificial Sequence: Synthetic oligonucleotide
  Sense strand starting at position 2989 of SEQ ID NO: 1563835
gcacauaggguccaaguuu

SEQ ID NO: 1835492 - RNA, 19 nt, Artificial Sequence
  Description of Artificial Sequence: Synthetic oligonucleotide
  Antisense strand to SEQ ID NO: 1835491
aaacuuggacccuaugugc

SEQ ID NO: 1835493 - RNA, 19 nt, Artificial Sequence
  Description of Artificial Sequence: Synthetic oligonucleotide
  Sense strand starting at position 3000 of SEQ ID NO: 1563835
ccaaguuucugacugaauu

SEQ ID NO: 1835494 - RNA, 19 nt, Artificial Sequence
  Description of Artificial Sequence: Synthetic oligonucleotide
  Antisense strand to SEQ ID NO: 1835493
aauucagucagaaacuugg

SEQ ID NO: 1835495 - RNA, 19 nt, Artificial Sequence
  Description of Artificial Sequence: Synthetic oligonucleotide
  Sense strand starting at position 3298 of SEQ ID NO: 1563835
gaguuuggucaugggaaag

SEQ ID NO: 1835496 - RNA, 19 nt, Artificial Sequence
  Description of Artificial Sequence: Synthetic oligonucleotide
  Antisense strand to SEQ ID NO: 1835495
cuuucccaugaccaaacuc

SEQ ID NO: 1835497 - RNA, 19 nt, Artificial Sequence
  Description of Artificial Sequence: Synthetic oligonucleotide
  Sense strand starting at position 3431 of SEQ ID NO: 1563835
uacacugcuuuauuggaga

SEQ ID NO: 1835498 - RNA, 19 nt, Artificial Sequence
  Description of Artificial Sequence: Synthetic oligonucleotide
  Antisense strand to SEQ ID NO: 1835497
ucuccaauaaagcagugua

SEQ ID NO: 1835499 - RNA, 19 nt, Artificial Sequence
  Description of Artificial Sequence: Synthetic oligonucleotide
  Sense strand starting at position 3434 of SEQ ID NO: 1563835
acugcuuuauuggagauuu

SEQ ID NO: 1835500 - RNA, 19 nt, Artificial Sequence
  Description of Artificial Sequence: Synthetic oligonucleotide
  Antisense strand to SEQ ID NO: 1835499
aaaucuccaauaaagcagu

SEQ ID NO: 1835501 - RNA, 19 nt, Artificial Sequence
  Description of Artificial Sequence: Synthetic oligonucleotide
  Sense strand starting at position 3482 of SEQ ID NO: 1563835
auagcugucuccuuaauga

SEQ ID NO: 1835502 - RNA, 19 nt, Artificial Sequence
  Description of Artificial Sequence: Synthetic oligonucleotide
  Antisense strand to SEQ ID NO: 1835501
ucauuaaggagacagcuau

SEQ ID NO: 1835503 - RNA, 19 nt, Artificial Sequence
  Description of Artificial Sequence: Synthetic oligonucleotide
  Sense strand starting at position 3618 of SEQ ID NO: 1563835
cugacuuaccuauggugau

SEQ ID NO: 1835504 - RNA, 19 nt, Artificial Sequence
  Description of Artificial Sequence: Synthetic oligonucleotide
  Antisense strand to SEQ ID NO: 1835503
aucaccauagguaagucag

SEQ ID NO: 1835505 - RNA, 19 nt, Artificial Sequence
  Description of Artificial Sequence: Synthetic oligonucleotide
  Sense strand starting at position 3785 of SEQ ID NO: 1563835
aguugugaacuauagaugu

SEQ ID NO: 1835506 - RNA, 19 nt, Artificial Sequence
  Description of Artificial Sequence: Synthetic oligonucleotide
  Antisense strand to SEQ ID NO: 1835505
acaucuauaguucacaacu

SEQ ID NO: 1835507 - RNA, 19 nt, Artificial Sequence
  Description of Artificial Sequence: Synthetic oligonucleotide
  Sense strand starting at position 3821 of SEQ ID NO: 1563835
agcaguaggguuuauacua

SEQ ID NO: 1835508 - RNA, 19 nt, Artificial Sequence
  Description of Artificial Sequence: Synthetic oligonucleotide
  Antisense strand to SEQ ID NO: 1835507
uaguauaaacccuacugcu

SEQ ID NO: 1835509 - RNA, 19 nt, Artificial Sequence
  Description of Artificial Sequence: Synthetic oligonucleotide
  Sense strand starting at position 3828 of SEQ ID NO: 1563835
ggguuuauacuauacaggu

SEQ ID NO: 1835510 - RNA, 19 nt, Artificial Sequence
  Description of Artificial Sequence: Synthetic oligonucleotide
  Antisense strand to SEQ ID NO: 1835509
accuguauaguauaaaccc

SEQ ID NO: 1835511 - RNA, 19 nt, Artificial Sequence
  Description of Artificial Sequence: Synthetic oligonucleotide
  Sense strand starting at position 3843 of SEQ ID NO: 1563835
agguguauauucuucugga

SEQ ID NO: 1835512 - RNA, 19 nt, Artificial Sequence
  Description of Artificial Sequence: Synthetic oligonucleotide
  Antisense strand to SEQ ID NO: 1835511
uccagaagaauauacaccu

SEQ ID NO: 1835513 - RNA, 19 nt, Artificial Sequence
  Description of Artificial Sequence: Synthetic oligonucleotide
  Sense strand starting at position 3844 of SEQ ID NO: 1563835
gguguauauucuucuggac

SEQ ID NO: 1835514 - RNA, 19 nt, Artificial Sequence
  Description of Artificial Sequence: Synthetic oligonucleotide
  Antisense strand to SEQ ID NO: 1835513
guccagaagaauauacacc

SEQ ID NO: 1835515 - RNA, 19 nt, Artificial Sequence
  Description of Artificial Sequence: Synthetic oligonucleotide
  Sense strand starting at position 3856 of SEQ ID NO: 1563835
ucuggacucuauucgggau

SEQ ID NO: 1835516 - RNA, 19 nt, Artificial Sequence
  Description of Artificial Sequence: Synthetic oligonucleotide
  Antisense strand to SEQ ID NO: 1835515
aucccgaauagaguccaga

SEQ ID NO: 1835517 - RNA, 19 nt, Artificial Sequence
  Description of Artificial Sequence: Synthetic oligonucleotide
  Sense strand starting at position 3860 of SEQ ID NO: 1563835
gacucuauucgggauguuu

SEQ ID NO: 1835518 - RNA, 19 nt, Artificial Sequence
  Description of Artificial Sequence: Synthetic oligonucleotide
  Antisense strand to SEQ ID NO: 1835517
aaacaucccgaauagaguc

SEQ ID NO: 1835519 - RNA, 19 nt, Artificial Sequence
  Description of Artificial Sequence: Synthetic oligonucleotide
  Sense strand starting at position 3922 of SEQ ID NO: 1563835
uggaaauucucuccuaaug

SEQ ID NO: 1835520 - RNA, 19 nt, Artificial Sequence
  Description of Artificial Sequence: Synthetic oligonucleotide
  Antisense strand to SEQ ID NO: 1835519
cauuaggagagaauuucca

SEQ ID NO: 1835521 - RNA, 19 nt, Artificial Sequence
  Description of Artificial Sequence: Synthetic oligonucleotide
  Sense strand starting at position 3958 of SEQ ID NO: 1563835
acuaucauacacugguauu

SEQ ID NO: 1835522 - RNA, 19 nt, Artificial Sequence
  Description of Artificial Sequence: Synthetic oligonucleotide
  Antisense strand to SEQ ID NO: 1835521
aauaccaguguaugauagu

SEQ ID NO: 1835523 - RNA, 19 nt, Artificial Sequence
  Description of Artificial Sequence: Synthetic oligonucleotide
  Sense strand starting at position 688 of SEQ ID NO: 1563836
cagguaaacgugugaacac

SEQ ID NO: 1835524 - RNA, 19 nt, Artificial Sequence
  Description of Artificial Sequence: Synthetic oligonucleotide
  Antisense strand to SEQ ID NO: 1835523
guguucacacguuuaccug

SEQ ID NO: 1835525 - RNA, 19 nt, Artificial Sequence
  Description of Artificial Sequence: Synthetic oligonucleotide
  Sense strand starting at position 698 of SEQ ID NO: 1563836
ugugaacacgaauagguau

SEQ ID NO: 1835526 - RNA, 19 nt, Artificial Sequence
  Description of Artificial Sequence: Synthetic oligonucleotide
  Antisense strand to SEQ ID NO: 1835525
auaccuauucguguucaca

SEQ ID NO: 1835527 - RNA, 19 nt, Artificial Sequence
  Description of Artificial Sequence: Synthetic oligonucleotide
  Sense strand starting at position 1289 of SEQ ID NO: 1563836
cucugcuggccugaggaaa

SEQ ID NO: 1835528 - RNA, 19 nt, Artificial Sequence
  Description of Artificial Sequence: Synthetic oligonucleotide
  Antisense strand to SEQ ID NO: 1835527
uuuccucaggccagcagag

SEQ ID NO: 1835529 - RNA, 19 nt, Artificial Sequence
  Description of Artificial Sequence: Synthetic oligonucleotide
  Sense strand starting at position 1636 of SEQ ID NO: 1563836
gugggaaucucugggaauc

SEQ ID NO: 1835530 - RNA, 19 nt, Artificial Sequence
  Description of Artificial Sequence: Synthetic oligonucleotide
  Antisense strand to SEQ ID NO: 1835529
gauucccagagauucccac

SEQ ID NO: 1835531 - RNA, 19 nt, Artificial Sequence
  Description of Artificial Sequence: Synthetic oligonucleotide
  Sense strand starting at position 1646 of SEQ ID NO: 1563836
cugggaaucuguccucuga

SEQ ID NO: 1835532 - RNA, 19 nt, Artificial Sequence
  Description of Artificial Sequence: Synthetic oligonucleotide
  Antisense strand to SEQ ID NO: 1835531
ucagaggacagauucccag

SEQ ID NO: 1835533 - RNA, 19 nt, Artificial Sequence
  Description of Artificial Sequence: Synthetic oligonucleotide
  Sense strand starting at position 1650 of SEQ ID NO: 1563836
gaaucuguccucugaggug

SEQ ID NO: 1835534 - RNA, 19 nt, Artificial Sequence
  Description of Artificial Sequence: Synthetic oligonucleotide
  Antisense strand to SEQ ID NO: 1835533
caccucagaggacagauuc

SEQ ID NO: 1835535 - RNA, 19 nt, Artificial Sequence
  Description of Artificial Sequence: Synthetic oligonucleotide
  Sense strand starting at position 1732 of SEQ ID NO: 1563836
cuucuucugccgugaggac

SEQ ID NO: 1835536 - RNA, 19 nt, Artificial Sequence
  Description of Artificial Sequence: Synthetic oligonucleotide
  Antisense strand to SEQ ID NO: 1835535
guccucacggcagaagaag

SEQ ID NO: 1835537 - RNA, 19 nt, Artificial Sequence
  Description of Artificial Sequence: Synthetic oligonucleotide
  Sense strand starting at position 2010 of SEQ ID NO: 1563836
gaacucugucaggguugau

SEQ ID NO: 1835538 - RNA, 19 nt, Artificial Sequence
  Description of Artificial Sequence: Synthetic oligonucleotide
  Antisense strand to SEQ ID NO: 1835537
aucaacccugacagaguuc

SEQ ID NO: 1835539 - RNA, 19 nt, Artificial Sequence
  Description of Artificial Sequence: Synthetic oligonucleotide
  Sense strand starting at position 2304 of SEQ ID NO: 1563836
ucgacagaguucucuucuu

SEQ ID NO: 1835540 - RNA, 19 nt, Artificial Sequence
  Description of Artificial Sequence: Synthetic oligonucleotide
  Antisense strand to SEQ ID NO: 1835539
aagaagagaacucugucga

SEQ ID NO: 1835541 - RNA, 19 nt, Artificial Sequence
  Description of Artificial Sequence: Synthetic oligonucleotide
  Sense strand starting at position 2342 of SEQ ID NO: 1563836
ggcuacucccucuguuuaa

SEQ ID NO: 1835542 - RNA, 19 nt, Artificial Sequence
  Description of Artificial Sequence: Synthetic oligonucleotide
  Antisense strand to SEQ ID NO: 1835541
uuaaacagagggaguagcc

SEQ ID NO: 1835543 - RNA, 19 nt, Artificial Sequence
  Description of Artificial Sequence: Synthetic oligonucleotide
  Sense strand starting at position 2416 of SEQ ID NO: 1563836
gucagaaauuuguaaaucu

SEQ ID NO: 1835544 - RNA, 19 nt, Artificial Sequence
  Description of Artificial Sequence: Synthetic oligonucleotide
  Antisense strand to SEQ ID NO: 1835543
agauuuacaaauuucugac

SEQ ID NO: 1835545 - RNA, 19 nt, Artificial Sequence
  Description of Artificial Sequence: Synthetic oligonucleotide
  Sense strand starting at position 2631 of SEQ ID NO: 1563836
gugcaagagagguagaauc

SEQ ID NO: 1835546 - RNA, 19 nt, Artificial Sequence
  Description of Artificial Sequence: Synthetic oligonucleotide
  Antisense strand to SEQ ID NO: 1835545
gauucuaccucucuugcac

SEQ ID NO: 1835547 - RNA, 19 nt, Artificial Sequence
  Description of Artificial Sequence: Synthetic oligonucleotide
  Sense strand starting at position 2639 of SEQ ID NO: 1563836
gagguagaaucacauccau

SEQ ID NO: 1835548 - RNA, 19 nt, Artificial Sequence
  Description of Artificial Sequence: Synthetic oligonucleotide
  Antisense strand to SEQ ID NO: 1835547
auggaugugauucuaccuc

SEQ ID NO: 1835549 - RNA, 19 nt, Artificial Sequence
  Description of Artificial Sequence: Synthetic oligonucleotide
  Sense strand starting at position 3275 of SEQ ID NO: 1563836
gugacuuuacccugaagaa

SEQ ID NO: 1835550 - RNA, 19 nt, Artificial Sequence
  Description of Artificial Sequence: Synthetic oligonucleotide
  Antisense strand to SEQ ID NO: 1835549
uucuucaggguaaagucac

SEQ ID NO: 1835551 - RNA, 19 nt, Artificial Sequence
  Description of Artificial Sequence: Synthetic oligonucleotide
  Sense strand starting at position 3311 of SEQ ID NO: 1563836
ucaccauggugaucaaagu

SEQ ID NO: 1835552 - RNA, 19 nt, Artificial Sequence
  Description of Artificial Sequence: Synthetic oligonucleotide
  Antisense strand to SEQ ID NO: 1835551
acuuugaucaccaugguga

SEQ ID NO: 1835553 - RNA, 19 nt, Artificial Sequence
  Description of Artificial Sequence: Synthetic oligonucleotide
  Sense strand starting at position 3328 of SEQ ID NO: 1563836
guaacaucaucagugacaa

SEQ ID NO: 1835554 - RNA, 19 nt, Artificial Sequence
  Description of Artificial Sequence: Synthetic oligonucleotide
  Antisense strand to SEQ ID NO: 1835553
uugucacugaugauguuac

SEQ ID NO: 1835555 - RNA, 19 nt, Artificial Sequence
  Description of Artificial Sequence: Synthetic oligonucleotide
  Sense strand starting at position 3340 of SEQ ID NO: 1563836
gugacaaauuguguuggua

SEQ ID NO: 1835556 - RNA, 19 nt, Artificial Sequence
  Description of Artificial Sequence: Synthetic oligonucleotide
  Antisense strand to SEQ ID NO: 1835555
uaccaacacaauuugucac

SEQ ID NO: 1835557 - RNA, 19 nt, Artificial Sequence
  Description of Artificial Sequence: Synthetic oligonucleotide
  Sense strand starting at position 3343 of SEQ ID NO: 1563836
acaaauuguguugguauua

SEQ ID NO: 1835558 - RNA, 19 nt, Artificial Sequence
  Description of Artificial Sequence: Synthetic oligonucleotide
  Antisense strand to SEQ ID NO: 1835557
uaauaccaacacaauuugu

SEQ ID NO: 1835559 - RNA, 19 nt, Artificial Sequence
  Description of Artificial Sequence: Synthetic oligonucleotide
  Sense strand starting at position 3344 of SEQ ID NO: 1563836
caaauuguguugguauuau

SEQ ID NO: 1835560 - RNA, 19 nt, Artificial Sequence
  Description of Artificial Sequence: Synthetic oligonucleotide
  Antisense strand to SEQ ID NO: 1835559
auaauaccaacacaauuug

SEQ ID NO: 1835561 - RNA, 19 nt, Artificial Sequence
  Description of Artificial Sequence: Synthetic oligonucleotide
  Sense strand starting at position 3356 of SEQ ID NO: 1563836
guauuaugugccgucggua

SEQ ID NO: 1835562 - RNA, 19 nt, Artificial Sequence
  Description of Artificial Sequence: Synthetic oligonucleotide
  Antisense strand to SEQ ID NO: 1835561
uaccgacggcacauaauac

SEQ ID NO: 1835563 - RNA, 19 nt, Artificial Sequence
  Description of Artificial Sequence: Synthetic oligonucleotide
  Sense strand starting at position 3357 of SEQ ID NO: 1563836
uauuaugugccgucgguau

SEQ ID NO: 1835564 - RNA, 19 nt, Artificial Sequence
  Description of Artificial Sequence: Synthetic oligonucleotide
  Antisense strand to SEQ ID NO: 1835563
auaccgacggcacauaaua

SEQ ID NO: 1835565 - RNA, 19 nt, Artificial Sequence
  Description of Artificial Sequence: Synthetic oligonucleotide
  Sense strand starting at position 3359 of SEQ ID NO: 1563836
uuaugugccgucgguauga

SEQ ID NO: 1835566 - RNA, 19 nt, Artificial Sequence
  Description of Artificial Sequence: Synthetic oligonucleotide
  Antisense strand to SEQ ID NO: 1835565
ucauaccgacggcacauaa

SEQ ID NO: 1835567 - RNA, 19 nt, Artificial Sequence
  Description of Artificial Sequence: Synthetic oligonucleotide
  Sense strand starting at position 3361 of SEQ ID NO: 1563836
augugccgucgguaugaua

SEQ ID NO: 1835568 - RNA, 19 nt, Artificial Sequence
  Description of Artificial Sequence: Synthetic oligonucleotide
  Antisense strand to SEQ ID NO: 1835567
uaucauaccgacggcacau

SEQ ID NO: 1835569 - RNA, 19 nt, Artificial Sequence
  Description of Artificial Sequence: Synthetic oligonucleotide
  Sense strand starting at position 3368 of SEQ ID NO: 1563836
gucgguaugauaugauaag

SEQ ID NO: 1835570 - RNA, 19 nt, Artificial Sequence
  Description of Artificial Sequence: Synthetic oligonucleotide
  Antisense strand to SEQ ID NO: 1835569
cuuaucauaucauaccgac

SEQ ID NO: 1835571 - RNA, 19 nt, Artificial Sequence
  Description of Artificial Sequence: Synthetic oligonucleotide
  Sense strand starting at position 3369 of SEQ ID NO: 1563836
ucgguaugauaugauaaga

SEQ ID NO: 1835572 - RNA, 19 nt, Artificial Sequence
  Description of Artificial Sequence: Synthetic oligonucleotide
  Antisense strand to SEQ ID NO: 1835571
ucuuaucauaucauaccga

SEQ ID NO: 1835573 - RNA, 19 nt, Artificial Sequence
  Description of Artificial Sequence: Synthetic oligonucleotide
  Sense strand starting at position 3531 of SEQ ID NO: 1563836
agagaagucucagugaacu

SEQ ID NO: 1835574 - RNA, 19 nt, Artificial Sequence
  Description of Artificial Sequence: Synthetic oligonucleotide
  Antisense strand to SEQ ID NO: 1835573
aguucacugagacuucucu

SEQ ID NO: 1835575 - RNA, 19 nt, Artificial Sequence
  Description of Artificial Sequence: Synthetic oligonucleotide
  Sense strand starting at position 3606 of SEQ ID NO: 1563836
caggguaucuugggacaga

SEQ ID NO: 1835576 - RNA, 19 nt, Artificial Sequence
  Description of Artificial Sequence: Synthetic oligonucleotide
  Antisense strand to SEQ ID NO: 1835575
ucugucccaagauacccug

SEQ ID NO: 1835577 - RNA, 19 nt, Artificial Sequence
  Description of Artificial Sequence: Synthetic oligonucleotide
  Sense strand starting at position 3607 of SEQ ID NO: 1563836
aggguaucuugggacagaa

SEQ ID NO: 1835578 - RNA, 19 nt, Artificial Sequence
  Description of Artificial Sequence: Synthetic oligonucleotide
  Antisense strand to SEQ ID NO: 1835577
uucugucccaagauacccu

SEQ ID NO: 1835579 - RNA, 19 nt, Artificial Sequence
  Description of Artificial Sequence: Synthetic oligonucleotide
  Sense strand starting at position 3626 of SEQ ID NO: 1563836
aauagacuuucgugacaag

SEQ ID NO: 1835580 - RNA, 19 nt, Artificial Sequence
  Description of Artificial Sequence: Synthetic oligonucleotide
  Antisense strand to SEQ ID NO: 1835579
cuugucacgaaagucuauu

SEQ ID NO: 1835581 - RNA, 19 nt, Artificial Sequence
  Description of Artificial Sequence: Synthetic oligonucleotide
  Sense strand starting at position 3629 of SEQ ID NO: 1563836
agacuuucgugacaaggaa

SEQ ID NO: 1835582 - RNA, 19 nt, Artificial Sequence
  Description of Artificial Sequence: Synthetic oligonucleotide
  Antisense strand to SEQ ID NO: 1835581
uuccuugucacgaaagucu

SEQ ID NO: 1835583 - RNA, 19 nt, Artificial Sequence
  Description of Artificial Sequence: Synthetic oligonucleotide
  Sense strand starting at position 3678 of SEQ ID NO: 1563836
aacaaaggauguuugcaua

SEQ ID NO: 1835584 - RNA, 19 nt, Artificial Sequence
  Description of Artificial Sequence: Synthetic oligonucleotide
  Antisense strand to SEQ ID NO: 1835583
uaugcaaacauccuuuguu

SEQ ID NO: 1835585 - RNA, 19 nt, Artificial Sequence
  Description of Artificial Sequence: Synthetic oligonucleotide
  Sense strand starting at position 3681 of SEQ ID NO: 1563836
aaaggauguuugcauagga

SEQ ID NO: 1835586 - RNA, 19 nt, Artificial Sequence
  Description of Artificial Sequence: Synthetic oligonucleotide
  Antisense strand to SEQ ID NO: 1835585
uccuaugcaaacauccuuu

SEQ ID NO: 1835587 - RNA, 19 nt, Artificial Sequence
  Description of Artificial Sequence: Synthetic oligonucleotide
  Sense strand starting at position 3686 of SEQ ID NO: 1563836
auguuugcauaggaauagu

SEQ ID NO: 1835588 - RNA, 19 nt, Artificial Sequence
  Description of Artificial Sequence: Synthetic oligonucleotide
  Antisense strand to SEQ ID NO: 1835587
acuauuccuaugcaaacau

SEQ ID NO: 1835589 - RNA, 19 nt, Artificial Sequence
  Description of Artificial Sequence: Synthetic oligonucleotide
  Sense strand starting at position 3735 of SEQ ID NO: 1563836
cuuccuugccucugagaua

SEQ ID NO: 1835590 - RNA, 19 nt, Artificial Sequence
  Description of Artificial Sequence: Synthetic oligonucleotide
  Antisense strand to SEQ ID NO: 1835589
uaucucagaggcaaggaag

SEQ ID NO: 1835591 - RNA, 19 nt, Artificial Sequence
  Description of Artificial Sequence: Synthetic oligonucleotide
  Sense strand starting at position 3736 of SEQ ID NO: 1563836
uuccuugccucugagauaa

SEQ ID NO: 1835592 - RNA, 19 nt, Artificial Sequence
  Description of Artificial Sequence: Synthetic oligonucleotide
  Antisense strand to SEQ ID NO: 1835591
uuaucucagaggcaaggaa

SEQ ID NO: 1835593 - RNA, 19 nt, Artificial Sequence
  Description of Artificial Sequence: Synthetic oligonucleotide
  Sense strand starting at position 3738 of SEQ ID NO: 1563836
ccuugccucugagauaauc

SEQ ID NO: 1835594 - RNA, 19 nt, Artificial Sequence
  Description of Artificial Sequence: Synthetic oligonucleotide
  Antisense strand to SEQ ID NO: 1835593
gauuaucucagaggcaagg

SEQ ID NO: 1835595 - RNA, 19 nt, Artificial Sequence
  Description of Artificial Sequence: Synthetic oligonucleotide
  Sense strand starting at position 3840 of SEQ ID NO: 1563836
guggcagaccuauauguau

SEQ ID NO: 1835596 - RNA, 19 nt, Artificial Sequence
  Description of Artificial Sequence: Synthetic oligonucleotide
  Antisense strand to SEQ ID NO: 1835595
auacauauaggucugccac

SEQ ID NO: 1835597 - RNA, 19 nt, Artificial Sequence
  Description of Artificial Sequence: Synthetic oligonucleotide
  Sense strand starting at position 3843 of SEQ ID NO: 1563836
gcagaccuauauguauauu

SEQ ID NO: 1835598 - RNA, 19 nt, Artificial Sequence
  Description of Artificial Sequence: Synthetic oligonucleotide
  Antisense strand to SEQ ID NO: 1835597
aauauacauauaggucugc

SEQ ID NO: 1835599 - RNA, 19 nt, Artificial Sequence
  Description of Artificial Sequence: Synthetic oligonucleotide
  Sense strand starting at position 3865 of SEQ ID NO: 1563836
acccauguguaguuauaaa

SEQ ID NO: 1835600 - RNA, 19 nt, Artificial Sequence
  Description of Artificial Sequence: Synthetic oligonucleotide
  Antisense strand to SEQ ID NO: 1835599
uuuauaacuacacaugggu

SEQ ID NO: 1835601 - RNA, 19 nt, Artificial Sequence
  Description of Artificial Sequence: Synthetic oligonucleotide
  Sense strand starting at position 3978 of SEQ ID NO: 1563836
cgguuaauuguggaaacuu

SEQ ID NO: 1835602 - RNA, 19 nt, Artificial Sequence
  Description of Artificial Sequence: Synthetic oligonucleotide
  Antisense strand to SEQ ID NO: 1835601
aaguuuccacaauuaaccg

SEQ ID NO: 1835603 - RNA, 19 nt, Artificial Sequence
  Description of Artificial Sequence: Synthetic oligonucleotide
  Sense strand starting at position 143 of SEQ ID NO: 1563837
ggcucucuugaguaucaca

SEQ ID NO: 1835604 - RNA, 19 nt, Artificial Sequence
  Description of Artificial Sequence: Synthetic oligonucleotide
  Antisense strand to SEQ ID NO: 1835603
ugugauacucaagagagcc

SEQ ID NO: 1835605 - RNA, 19 nt, Artificial Sequence
  Description of Artificial Sequence: Synthetic oligonucleotide
  Sense strand starting at position 150 of SEQ ID NO: 1563837
uugaguaucacaggaaagu

SEQ ID NO: 1835606 - RNA, 19 nt, Artificial Sequence
  Description of Artificial Sequence: Synthetic oligonucleotide
  Antisense strand to SEQ ID NO: 1835605
acuuuccugugauacucaa

SEQ ID NO: 1835607 - RNA, 19 nt, Artificial Sequence
  Description of Artificial Sequence: Synthetic oligonucleotide
  Sense strand starting at position 170 of SEQ ID NO: 1563837
aucuuuguacuugaugaca

SEQ ID NO: 1835608 - RNA, 19 nt, Artificial Sequence
  Description of Artificial Sequence: Synthetic oligonucleotide
  Antisense strand to SEQ ID NO: 1835607
ugucaucaaguacaaagau

SEQ ID NO: 1835609 - RNA, 19 nt, Artificial Sequence
  Description of Artificial Sequence: Synthetic oligonucleotide
  Sense strand starting at position 181 of SEQ ID NO: 1563837
ugaugacaaucaucagcau

SEQ ID NO: 1835610 - RNA, 19 nt, Artificial Sequence
  Description of Artificial Sequence: Synthetic oligonucleotide
  Antisense strand to SEQ ID NO: 1835609
augcugaugauugucauca

SEQ ID NO: 1835611 - RNA, 19 nt, Artificial Sequence
  Description of Artificial Sequence: Synthetic oligonucleotide
  Sense strand starting at position 222 of SEQ ID NO: 1563837
ucugcuucguauuugagga

SEQ ID NO: 1835612 - RNA, 19 nt, Artificial Sequence
  Description of Artificial Sequence: Synthetic oligonucleotide
  Antisense strand to SEQ ID NO: 1835611
uccucaaauacgaagcaga

SEQ ID NO: 1835613 - RNA, 19 nt, Artificial Sequence
  Description of Artificial Sequence: Synthetic oligonucleotide
  Sense strand starting at position 349 of SEQ ID NO: 1563837
uggacuccucacugaauga

SEQ ID NO: 1835614 - RNA, 19 nt, Artificial Sequence
  Description of Artificial Sequence: Synthetic oligonucleotide
  Antisense strand to SEQ ID NO: 1835613
ucauucagugaggagucca

SEQ ID NO: 1835615 - RNA, 19 nt, Artificial Sequence
  Description of Artificial Sequence: Synthetic oligonucleotide
  Sense strand starting at position 446 of SEQ ID NO: 1563837
gggaaugcucucgguaaga

SEQ ID NO: 1835616 - RNA, 19 nt, Artificial Sequence
  Description of Artificial Sequence: Synthetic oligonucleotide
  Antisense strand to SEQ ID NO: 1835615
ucuuaccgagagcauuccc

SEQ ID NO: 1835617 - RNA, 19 nt, Artificial Sequence
  Description of Artificial Sequence: Synthetic oligonucleotide
  Sense strand starting at position 448 of SEQ ID NO: 1563837
gaaugcucucgguaagauu

SEQ ID NO: 1835618 - RNA, 19 nt, Artificial Sequence
  Description of Artificial Sequence: Synthetic oligonucleotide
  Antisense strand to SEQ ID NO: 1835617
aaucuuaccgagagcauuc

SEQ ID NO: 1835619 - RNA, 19 nt, Artificial Sequence
  Description of Artificial Sequence: Synthetic oligonucleotide
  Sense strand starting at position 455 of SEQ ID NO: 1563837
cucgguaagauuugguauc

SEQ ID NO: 1835620 - RNA, 19 nt, Artificial Sequence
  Description of Artificial Sequence: Synthetic oligonucleotide
  Antisense strand to SEQ ID NO: 1835619
gauaccaaaucuuaccgag

SEQ ID NO: 1835621 - RNA, 19 nt, Artificial Sequence
  Description of Artificial Sequence: Synthetic oligonucleotide
  Sense strand starting at position 1254 of SEQ ID NO: 1563837
aucccagagccucauaguu

SEQ ID NO: 1835622 - RNA, 19 nt, Artificial Sequence
  Description of Artificial Sequence: Synthetic oligonucleotide
  Antisense strand to SEQ ID NO: 1835621
aacuaugaggcucugggau

SEQ ID NO: 1835623 - RNA, 19 nt, Artificial Sequence
  Description of Artificial Sequence: Synthetic oligonucleotide
  Sense strand starting at position 1457 of SEQ ID NO: 1563837
gccucacguccguucugau

SEQ ID NO: 1835624 - RNA, 19 nt, Artificial Sequence
  Description of Artificial Sequence: Synthetic oligonucleotide
  Antisense strand to SEQ ID NO: 1835623
aucagaacggacgugaggc

SEQ ID NO: 1835625 - RNA, 19 nt, Artificial Sequence
  Description of Artificial Sequence: Synthetic oligonucleotide
  Sense strand starting at position 1478 of SEQ ID NO: 1563837
acaugugacuccucagucu

SEQ ID NO: 1835626 - RNA, 19 nt, Artificial Sequence
  Description of Artificial Sequence: Synthetic oligonucleotide
  Antisense strand to SEQ ID NO: 1835625
agacugaggagucacaugu

SEQ ID NO: 1835627 - RNA, 19 nt, Artificial Sequence
  Description of Artificial Sequence: Synthetic oligonucleotide
  Sense strand starting at position 1599 of SEQ ID NO: 1563837
gccacucacccaggaauaa

SEQ ID NO: 1835628 - RNA, 19 nt, Artificial Sequence
  Description of Artificial Sequence: Synthetic oligonucleotide
  Antisense strand to SEQ ID NO: 1835627
uuauuccugggugaguggc

SEQ ID NO: 1835629 - RNA, 19 nt, Artificial Sequence
  Description of Artificial Sequence: Synthetic oligonucleotide
  Sense strand starting at position 1692 of SEQ ID NO: 1563837
cugggaaucugcccucuga

SEQ ID NO: 1835630 - RNA, 19 nt, Artificial Sequence
  Description of Artificial Sequence: Synthetic oligonucleotide
  Antisense strand to SEQ ID NO: 1835629
ucagagggcagauucccag

SEQ ID NO: 1835631 - RNA, 19 nt, Artificial Sequence
  Description of Artificial Sequence: Synthetic oligonucleotide
  Sense strand starting at position 1733 of SEQ ID NO: 1563837
cucagugucuuccuauuua

SEQ ID NO: 1835632 - RNA, 19 nt, Artificial Sequence
  Description of Artificial Sequence: Synthetic oligonucleotide
  Antisense strand to SEQ ID NO: 1835631
uaaauaggaagacacugag

SEQ ID NO: 1835633 - RNA, 19 nt, Artificial Sequence
  Description of Artificial Sequence: Synthetic oligonucleotide
  Sense strand starting at position 1898 of SEQ ID NO: 1563837
gaggacuggccaggucuaa

SEQ ID NO: 1835634 - RNA, 19 nt, Artificial Sequence
  Description of Artificial Sequence: Synthetic oligonucleotide
  Antisense strand to SEQ ID NO: 1835633
uuagaccuggccaguccuc

SEQ ID NO: 1835635 - RNA, 19 nt, Artificial Sequence
  Description of Artificial Sequence: Synthetic oligonucleotide
  Sense strand starting at position 1967 of SEQ ID NO: 1563837
uccgucagauucccaagau

SEQ ID NO: 1835636 - RNA, 19 nt, Artificial Sequence
  Description of Artificial Sequence: Synthetic oligonucleotide
  Antisense strand to SEQ ID NO: 1835635
aucuugggaaucugacgga

SEQ ID NO: 1835637 - RNA, 19 nt, Artificial Sequence
  Description of Artificial Sequence: Synthetic oligonucleotide
  Sense strand starting at position 1980 of SEQ ID NO: 1563837
caagauggccgucgggaaa

SEQ ID NO: 1835638 - RNA, 19 nt, Artificial Sequence
  Description of Artificial Sequence: Synthetic oligonucleotide
  Antisense strand to SEQ ID NO: 1835637
uuucccgacggccaucuug

SEQ ID NO: 1835639 - RNA, 19 nt, Artificial Sequence
  Description of Artificial Sequence: Synthetic oligonucleotide
  Sense strand starting at position 2629 of SEQ ID NO: 1563837
auccauccacagugggaua

SEQ ID NO: 1835640 - RNA, 19 nt, Artificial Sequence
  Description of Artificial Sequence: Synthetic oligonucleotide
  Antisense strand to SEQ ID NO: 1835639
uaucccacuguggauggau

SEQ ID NO: 1835641 - RNA, 19 nt, Artificial Sequence
  Description of Artificial Sequence: Synthetic oligonucleotide
  Sense strand starting at position 2673 of SEQ ID NO: 1563837
uccacugcccucugaaaug

SEQ ID NO: 1835642 - RNA, 19 nt, Artificial Sequence
  Description of Artificial Sequence: Synthetic oligonucleotide
  Antisense strand to SEQ ID NO: 1835641
cauuucagagggcagugga

SEQ ID NO: 1835643 - RNA, 19 nt, Artificial Sequence
  Description of Artificial Sequence: Synthetic oligonucleotide
  Sense strand starting at position 2709 of SEQ ID NO: 1563837
ugucuuucucaagguauga

SEQ ID NO: 1835644 - RNA, 19 nt, Artificial Sequence
  Description of Artificial Sequence: Synthetic oligonucleotide
  Antisense strand to SEQ ID NO: 1835643
ucauaccuugagaaagaca

SEQ ID NO: 1835645 - RNA, 19 nt, Artificial Sequence
  Description of Artificial Sequence: Synthetic oligonucleotide
  Sense strand starting at position 2821 of SEQ ID NO: 1563837
acugcugugagugaaauua

SEQ ID NO: 1835646 - RNA, 19 nt, Artificial Sequence
  Description of Artificial Sequence: Synthetic oligonucleotide
  Antisense strand to SEQ ID NO: 1835645
uaauuucacucacagcagu

SEQ ID NO: 1835647 - RNA, 19 nt, Artificial Sequence
  Description of Artificial Sequence: Synthetic oligonucleotide
  Sense strand starting at position 2850 of SEQ ID NO: 1563837
ucccauacccuguguuaaa

SEQ ID NO: 1835648 - RNA, 19 nt, Artificial Sequence
  Description of Artificial Sequence: Synthetic oligonucleotide
  Antisense strand to SEQ ID NO: 1835647
uuuaacacaggguauggga

SEQ ID NO: 1835649 - RNA, 19 nt, Artificial Sequence
  Description of Artificial Sequence: Synthetic oligonucleotide
  Sense strand starting at position 2851 of SEQ ID NO: 1563837
cccauacccuguguuaaag

SEQ ID NO: 1835650 - RNA, 19 nt, Artificial Sequence
  Description of Artificial Sequence: Synthetic oligonucleotide
  Antisense strand to SEQ ID NO: 1835649
cuuuaacacaggguauggg

SEQ ID NO: 1835651 - RNA, 19 nt, Artificial Sequence
  Description of Artificial Sequence: Synthetic oligonucleotide
  Sense strand starting at position 2863 of SEQ ID NO: 1563837
guuaaaggcuuccuuauug

SEQ ID NO: 1835652 - RNA, 19 nt, Artificial Sequence
  Description of Artificial Sequence: Synthetic oligonucleotide
  Antisense strand to SEQ ID NO: 1835651
caauaaggaagccuuuaac

SEQ ID NO: 1835653 - RNA, 19 nt, Artificial Sequence
  Description of Artificial Sequence: Synthetic oligonucleotide
  Sense strand starting at position 2952 of SEQ ID NO: 1563837
accaauacgugauuaaagu

SEQ ID NO: 1835654 - RNA, 19 nt, Artificial Sequence
  Description of Artificial Sequence: Synthetic oligonucleotide
  Antisense strand to SEQ ID NO: 1835653
acuuuaaucacguauuggu

SEQ ID NO: 1835655 - RNA, 19 nt, Artificial Sequence
  Description of Artificial Sequence: Synthetic oligonucleotide
  Sense strand starting at position 2953 of SEQ ID NO: 1563837
ccaauacgugauuaaaguu

SEQ ID NO: 1835656 - RNA, 19 nt, Artificial Sequence
  Description of Artificial Sequence: Synthetic oligonucleotide
  Antisense strand to SEQ ID NO: 1835655
aacuuuaaucacguauugg

SEQ ID NO: 1835657 - RNA, 19 nt, Artificial Sequence
  Description of Artificial Sequence: Synthetic oligonucleotide
  Sense strand starting at position 3285 of SEQ ID NO: 1563837
ccucucuuacauugaguau

SEQ ID NO: 1835658 - RNA, 19 nt, Artificial Sequence
  Description of Artificial Sequence: Synthetic oligonucleotide
  Antisense strand to SEQ ID NO: 1835657
auacucaauguaagagagg

SEQ ID NO: 1835659 - RNA, 19 nt, Artificial Sequence
  Description of Artificial Sequence: Synthetic oligonucleotide
  Sense strand starting at position 3381 of SEQ ID NO: 1563837
gacauaugacauuggucau

SEQ ID NO: 1835660 - RNA, 19 nt, Artificial Sequence
  Description of Artificial Sequence: Synthetic oligonucleotide
  Antisense strand to SEQ ID NO: 1835659
augaccaaugucauauguc

SEQ ID NO: 1835661 - RNA, 19 nt, Artificial Sequence
  Description of Artificial Sequence: Synthetic oligonucleotide
  Sense strand starting at position 3384 of SEQ ID NO: 1563837
auaugacauuggucaucuu

SEQ ID NO: 1835662 - RNA, 19 nt, Artificial Sequence
  Description of Artificial Sequence: Synthetic oligonucleotide
  Antisense strand to SEQ ID NO: 1835661
aagaugaccaaugucauau

SEQ ID NO: 1835663 - RNA, 19 nt, Artificial Sequence
  Description of Artificial Sequence: Synthetic oligonucleotide
  Sense strand starting at position 3632 of SEQ ID NO: 1563837
uuaugacauguuugcuaca

SEQ ID NO: 1835664 - RNA, 19 nt, Artificial Sequence
  Description of Artificial Sequence: Synthetic oligonucleotide
  Antisense strand to SEQ ID NO: 1835663
uguagcaaacaugucauaa

SEQ ID NO: 1835665 - RNA, 19 nt, Artificial Sequence
  Description of Artificial Sequence: Synthetic oligonucleotide
  Sense strand starting at position 3634 of SEQ ID NO: 1563837
augacauguuugcuacaac

SEQ ID NO: 1835666 - RNA, 19 nt, Artificial Sequence
  Description of Artificial Sequence: Synthetic oligonucleotide
  Antisense strand to SEQ ID NO: 1835665
guuguagcaaacaugucau

SEQ ID NO: 1835667 - RNA, 19 nt, Artificial Sequence
  Description of Artificial Sequence: Synthetic oligonucleotide
  Sense strand starting at position 3637 of SEQ ID NO: 1563837
acauguuugcuacaacuga

SEQ ID NO: 1835668 - RNA, 19 nt, Artificial Sequence
  Description of Artificial Sequence: Synthetic oligonucleotide
  Antisense strand to SEQ ID NO: 1835667
ucaguuguagcaaacaugu

SEQ ID NO: 1835669 - RNA, 19 nt, Artificial Sequence
  Description of Artificial Sequence: Synthetic oligonucleotide
  Sense strand starting at position 3733 of SEQ ID NO: 1563837
uuucgauaaggguguaaug

SEQ ID NO: 1835670 - RNA, 19 nt, Artificial Sequence
  Description of Artificial Sequence: Synthetic oligonucleotide
  Antisense strand to SEQ ID NO: 1835669
cauuacacccuuaucgaaa

SEQ ID NO: 1835671 - RNA, 19 nt, Artificial Sequence
  Description of Artificial Sequence: Synthetic oligonucleotide
  Sense strand starting at position 3767 of SEQ ID NO: 1563837
uguauugucccacagaauu

SEQ ID NO: 1835672 - RNA, 19 nt, Artificial Sequence
  Description of Artificial Sequence: Synthetic oligonucleotide
  Antisense strand to SEQ ID NO: 1835671
aauucugugggacaauaca

SEQ ID NO: 1835673 - RNA, 19 nt, Artificial Sequence
  Description of Artificial Sequence: Synthetic oligonucleotide
  Sense strand starting at position 3892 of SEQ ID NO: 1563837
aucauugcauguuccagaa

SEQ ID NO: 1835674 - RNA, 19 nt, Artificial Sequence
  Description of Artificial Sequence: Synthetic oligonucleotide
  Antisense strand to SEQ ID NO: 1835673
uucuggaacaugcaaugau

SEQ ID NO: 1835675 - RNA, 19 nt, Artificial Sequence
  Description of Artificial Sequence: Synthetic oligonucleotide
  Sense strand starting at position 3896 of SEQ ID NO: 1563837
uugcauguuccagaaugug

SEQ ID NO: 1835676 - RNA, 19 nt, Artificial Sequence
  Description of Artificial Sequence: Synthetic oligonucleotide
  Antisense strand to SEQ ID NO: 1835675
cacauucuggaacaugcaa

SEQ ID NO: 1835677 - RNA, 19 nt, Artificial Sequence
  Description of Artificial Sequence: Synthetic oligonucleotide
  Sense strand starting at position 3899 of SEQ ID NO: 1563837
cauguuccagaauguggua

SEQ ID NO: 1835678 - RNA, 19 nt, Artificial Sequence
  Description of Artificial Sequence: Synthetic oligonucleotide
  Antisense strand to SEQ ID NO: 1835677
uaccacauucuggaacaug

SEQ ID NO: 1835679 - RNA, 19 nt, Artificial Sequence
  Description of Artificial Sequence: Synthetic oligonucleotide
  Sense strand starting at position 3966 of SEQ ID NO: 1563837
ucaugauuccuccaggucu

SEQ ID NO: 1835680 - RNA, 19 nt, Artificial Sequence
  Description of Artificial Sequence: Synthetic oligonucleotide
  Antisense strand to SEQ ID NO: 1835679
agaccuggaggaaucauga

SEQ ID NO: 1835681 - RNA, 19 nt, Artificial Sequence
  Description of Artificial Sequence: Synthetic oligonucleotide
  Sense strand starting at position 3968 of SEQ ID NO: 1563837
augauuccuccaggucuau

SEQ ID NO: 1835682 - RNA, 19 nt, Artificial Sequence
  Description of Artificial Sequence: Synthetic oligonucleotide
  Antisense strand to SEQ ID NO: 1835681
auagaccuggaggaaucau

SEQ ID NO: 1835683 - RNA, 19 nt, Artificial Sequence
  Description of Artificial Sequence: Synthetic oligonucleotide
  Sense strand starting at position 124 of SEQ ID NO: 1563838
uggguauuuccuggcuguu

SEQ ID NO: 1835684 - RNA, 19 nt, Artificial Sequence
  Description of Artificial Sequence: Synthetic oligonucleotide
  Antisense strand to SEQ ID NO: 1835683
aacagccaggaaauaccca

SEQ ID NO: 1835685 - RNA, 19 nt, Artificial Sequence
  Description of Artificial Sequence: Synthetic oligonucleotide
  Sense strand starting at position 126 of SEQ ID NO: 1563838
gguauuuccuggcuguuaa

SEQ ID NO: 1835686 - RNA, 19 nt, Artificial Sequence
  Description of Artificial Sequence: Synthetic oligonucleotide
  Antisense strand to SEQ ID NO: 1835685
uuaacagccaggaaauacc

SEQ ID NO: 1835687 - RNA, 19 nt, Artificial Sequence
  Description of Artificial Sequence: Synthetic oligonucleotide
  Sense strand starting at position 127 of SEQ ID NO: 1563838
guauuuccuggcuguuaaa

SEQ ID NO: 1835688 - RNA, 19 nt, Artificial Sequence
  Description of Artificial Sequence: Synthetic oligonucleotide
  Antisense strand to SEQ ID NO: 1835687
uuuaacagccaggaaauac

SEQ ID NO: 1835689 - RNA, 19 nt, Artificial Sequence
  Description of Artificial Sequence: Synthetic oligonucleotide
  Sense strand starting at position 258 of SEQ ID NO: 1563838
ugcacauucugaccagaag

SEQ ID NO: 1835690 - RNA, 19 nt, Artificial Sequence
  Description of Artificial Sequence: Synthetic oligonucleotide
  Antisense strand to SEQ ID NO: 1835689
cuucuggucagaaugugca

SEQ ID NO: 1835691 - RNA, 19 nt, Artificial Sequence
  Description of Artificial Sequence: Synthetic oligonucleotide
  Sense strand starting at position 322 of SEQ ID NO: 1563838
ugagcaaauuauguuaaac

SEQ ID NO: 1835692 - RNA, 19 nt, Artificial Sequence
  Description of Artificial Sequence: Synthetic oligonucleotide
  Antisense strand to SEQ ID NO: 1835691
guuuaacauaauuugcuca

SEQ ID NO: 1835693 - RNA, 19 nt, Artificial Sequence
  Description of Artificial Sequence: Synthetic oligonucleotide
  Sense strand starting at position 333 of SEQ ID NO: 1563838
uguuaaacucaggguuucu

SEQ ID NO: 1835694 - RNA, 19 nt, Artificial Sequence
  Description of Artificial Sequence: Synthetic oligonucleotide
  Antisense strand to SEQ ID NO: 1835693
agaaacccugaguuuaaca

SEQ ID NO: 1835695 - RNA, 19 nt, Artificial Sequence
  Description of Artificial Sequence: Synthetic oligonucleotide
  Sense strand starting at position 395 of SEQ ID NO: 1563838
gugugaggucguccuuugu

SEQ ID NO: 1835696 - RNA, 19 nt, Artificial Sequence
  Description of Artificial Sequence: Synthetic oligonucleotide
  Antisense strand to SEQ ID NO: 1835695
acaaaggacgaccucacac

SEQ ID NO: 1835697 - RNA, 19 nt, Artificial Sequence
  Description of Artificial Sequence: Synthetic oligonucleotide
  Sense strand starting at position 619 of SEQ ID NO: 1563838
aguaaagcauuugacauau

SEQ ID NO: 1835698 - RNA, 19 nt, Artificial Sequence
  Description of Artificial Sequence: Synthetic oligonucleotide
  Antisense strand to SEQ ID NO: 1835697
auaugucaaaugcuuuacu

SEQ ID NO: 1835699 - RNA, 19 nt, Artificial Sequence
  Description of Artificial Sequence: Synthetic oligonucleotide
  Sense strand starting at position 1029 of SEQ ID NO: 1563838
gugagucgauaaucacacu

SEQ ID NO: 1835700 - RNA, 19 nt, Artificial Sequence
  Description of Artificial Sequence: Synthetic oligonucleotide
  Antisense strand to SEQ ID NO: 1835699
agugugauuaucgacucac

SEQ ID NO: 1835701 - RNA, 19 nt, Artificial Sequence
  Description of Artificial Sequence: Synthetic oligonucleotide
  Sense strand starting at position 1195 of SEQ ID NO: 1563838
gugagagagccucaguagu

SEQ ID NO: 1835702 - RNA, 19 nt, Artificial Sequence
  Description of Artificial Sequence: Synthetic oligonucleotide
  Antisense strand to SEQ ID NO: 1835701
acuacugaggcucucucac

SEQ ID NO: 1835703 - RNA, 19 nt, Artificial Sequence
  Description of Artificial Sequence: Synthetic oligonucleotide
  Sense strand starting at position 1197 of SEQ ID NO: 1563838
gagagagccucaguaguuu

SEQ ID NO: 1835704 - RNA, 19 nt, Artificial Sequence
  Description of Artificial Sequence: Synthetic oligonucleotide
  Antisense strand to SEQ ID NO: 1835703
aaacuacugaggcucucuc

SEQ ID NO: 1835705 - RNA, 19 nt, Artificial Sequence
  Description of Artificial Sequence: Synthetic oligonucleotide
  Sense strand starting at position 1491 of SEQ ID NO: 1563838
aggcaucagugacuacaga

SEQ ID NO: 1835706 - RNA, 19 nt, Artificial Sequence
  Description of Artificial Sequence: Synthetic oligonucleotide
  Antisense strand to SEQ ID NO: 1835705
ucuguagucacugaugccu

SEQ ID NO: 1835707 - RNA, 19 nt, Artificial Sequence
  Description of Artificial Sequence: Synthetic oligonucleotide
  Sense strand starting at position 1662 of SEQ ID NO: 1563838
ucugauguuucccuggaga

SEQ ID NO: 1835708 - RNA, 19 nt, Artificial Sequence
  Description of Artificial Sequence: Synthetic oligonucleotide
  Antisense strand to SEQ ID NO: 1835707
ucuccagggaaacaucaga

SEQ ID NO: 1835709 - RNA, 19 nt, Artificial Sequence
  Description of Artificial Sequence: Synthetic oligonucleotide
  Sense strand starting at position 1664 of SEQ ID NO: 1563838
ugauguuucccuggagauu

SEQ ID NO: 1835710 - RNA, 19 nt, Artificial Sequence
  Description of Artificial Sequence: Synthetic oligonucleotide
  Antisense strand to SEQ ID NO: 1835709
aaucuccagggaaacauca

SEQ ID NO: 1835711 - RNA, 19 nt, Artificial Sequence
  Description of Artificial Sequence: Synthetic oligonucleotide
  Sense strand starting at position 1665 of SEQ ID NO: 1563838
gauguuucccuggagauuc

SEQ ID NO: 1835712 - RNA, 19 nt, Artificial Sequence
  Description of Artificial Sequence: Synthetic oligonucleotide
  Antisense strand to SEQ ID NO: 1835711
gaaucuccagggaaacauc

SEQ ID NO: 1835713 - RNA, 19 nt, Artificial Sequence
  Description of Artificial Sequence: Synthetic oligonucleotide
  Sense strand starting at position 1823 of SEQ ID NO: 1563838
agaagagcuggcuguuaac

SEQ ID NO: 1835714 - RNA, 19 nt, Artificial Sequence
  Description of Artificial Sequence: Synthetic oligonucleotide
  Antisense strand to SEQ ID NO: 1835713
guuaacagccagcucuucu

SEQ ID NO: 1835715 - RNA, 19 nt, Artificial Sequence
  Description of Artificial Sequence: Synthetic oligonucleotide
  Sense strand starting at position 1845 of SEQ ID NO: 1563838
gggcuuagacaugagcauu

SEQ ID NO: 1835716 - RNA, 19 nt, Artificial Sequence
  Description of Artificial Sequence: Synthetic oligonucleotide
  Antisense strand to SEQ ID NO: 1835715
aaugcucaugucuaagccc

SEQ ID NO: 1835717 - RNA, 19 nt, Artificial Sequence
  Description of Artificial Sequence: Synthetic oligonucleotide
  Sense strand starting at position 2179 of SEQ ID NO: 1563838
uugaaauaacgcugucaga

SEQ ID NO: 1835718 - RNA, 19 nt, Artificial Sequence
  Description of Artificial Sequence: Synthetic oligonucleotide
  Antisense strand to SEQ ID NO: 1835717
ucugacagcguuauuucaa

SEQ ID NO: 1835719 - RNA, 19 nt, Artificial Sequence
  Description of Artificial Sequence: Synthetic oligonucleotide
  Sense strand starting at position 2351 of SEQ ID NO: 1563838
uccuaagucgagcaagaca

SEQ ID NO: 1835720 - RNA, 19 nt, Artificial Sequence
  Description of Artificial Sequence: Synthetic oligonucleotide
  Antisense strand to SEQ ID NO: 1835719
ugucuugcucgacuuagga

SEQ ID NO: 1835721 - RNA, 19 nt, Artificial Sequence
  Description of Artificial Sequence: Synthetic oligonucleotide
  Sense strand starting at position 2425 of SEQ ID NO: 1563838
aggucucuuccauagcaca

SEQ ID NO: 1835722 - RNA, 19 nt, Artificial Sequence
  Description of Artificial Sequence: Synthetic oligonucleotide
  Antisense strand to SEQ ID NO: 1835721
ugugcuauggaagagaccu

SEQ ID NO: 1835723 - RNA, 19 nt, Artificial Sequence
  Description of Artificial Sequence: Synthetic oligonucleotide
  Sense strand starting at position 2491 of SEQ ID NO: 1563838
gcagauuggaagcauuaua

SEQ ID NO: 1835724 - RNA, 19 nt, Artificial Sequence
  Description of Artificial Sequence: Synthetic oligonucleotide
  Antisense strand to SEQ ID NO: 1835723
uauaaugcuuccaaucugc

SEQ ID NO: 1835725 - RNA, 19 nt, Artificial Sequence
  Description of Artificial Sequence: Synthetic oligonucleotide
  Sense strand starting at position 2698 of SEQ ID NO: 1563838
agggauagauugcugucau

SEQ ID NO: 1835726 - RNA, 19 nt, Artificial Sequence
  Description of Artificial Sequence: Synthetic oligonucleotide
  Antisense strand to SEQ ID NO: 1835725
augacagcaaucuaucccu

SEQ ID NO: 1835727 - RNA, 19 nt, Artificial Sequence
  Description of Artificial Sequence: Synthetic oligonucleotide
  Sense strand starting at position 2705 of SEQ ID NO: 1563838
gauugcugucaugacauau

SEQ ID NO: 1835728 - RNA, 19 nt, Artificial Sequence
  Description of Artificial Sequence: Synthetic oligonucleotide
  Antisense strand to SEQ ID NO: 1835727
auaugucaugacagcaauc

SEQ ID NO: 1835729 - RNA, 19 nt, Artificial Sequence
  Description of Artificial Sequence: Synthetic oligonucleotide
  Sense strand starting at position 2777 of SEQ ID NO: 1563838
cucagcucuagaggugauu

SEQ ID NO: 1835730 - RNA, 19 nt, Artificial Sequence
  Description of Artificial Sequence: Synthetic oligonucleotide
  Antisense strand to SEQ ID NO: 1835729
aaucaccucuagagcugag

SEQ ID NO: 1835731 - RNA, 19 nt, Artificial Sequence
  Description of Artificial Sequence: Synthetic oligonucleotide
  Sense strand starting at position 2909 of SEQ ID NO: 1563838
guugcagaagucuaacuca

SEQ ID NO: 1835732 - RNA, 19 nt, Artificial Sequence
  Description of Artificial Sequence: Synthetic oligonucleotide
  Antisense strand to SEQ ID NO: 1835731
ugaguuagacuucugcaac

SEQ ID NO: 1835733 - RNA, 19 nt, Artificial Sequence
  Description of Artificial Sequence: Synthetic oligonucleotide
  Sense strand starting at position 2932 of SEQ ID NO: 1563838
gcagucacaguuugagaga

SEQ ID NO: 1835734 - RNA, 19 nt, Artificial Sequence
  Description of Artificial Sequence: Synthetic oligonucleotide
  Antisense strand to SEQ ID NO: 1835733
ucucucaaacugugacugc

SEQ ID NO: 1835735 - RNA, 19 nt, Artificial Sequence
  Description of Artificial Sequence: Synthetic oligonucleotide
  Sense strand starting at position 2961 of SEQ ID NO: 1563838
ugggauuugugauauaauc

SEQ ID NO: 1835736 - RNA, 19 nt, Artificial Sequence
  Description of Artificial Sequence: Synthetic oligonucleotide
  Antisense strand to SEQ ID NO: 1835735
gauuauaucacaaauccca

SEQ ID NO: 1835737 - RNA, 19 nt, Artificial Sequence
  Description of Artificial Sequence: Synthetic oligonucleotide
  Sense strand starting at position 2969 of SEQ ID NO: 1563838
gugauauaauccuuaguaa

SEQ ID NO: 1835738 - RNA, 19 nt, Artificial Sequence
  Description of Artificial Sequence: Synthetic oligonucleotide
  Antisense strand to SEQ ID NO: 1835737
uuacuaaggauuauaucac

SEQ ID NO: 1835739 - RNA, 19 nt, Artificial Sequence
  Description of Artificial Sequence: Synthetic oligonucleotide
  Sense strand starting at position 2995 of SEQ ID NO: 1563838
gcugauuggccagaaccga

SEQ ID NO: 1835740 - RNA, 19 nt, Artificial Sequence
  Description of Artificial Sequence: Synthetic oligonucleotide
  Antisense strand to SEQ ID NO: 1835739
ucgguucuggccaaucagc

SEQ ID NO: 1835741 - RNA, 19 nt, Artificial Sequence
  Description of Artificial Sequence: Synthetic oligonucleotide
  Sense strand starting at position 3086 of SEQ ID NO: 1563838
aaggaugcagccugaaaga

SEQ ID NO: 1835742 - RNA, 19 nt, Artificial Sequence
  Description of Artificial Sequence: Synthetic oligonucleotide
  Antisense strand to SEQ ID NO: 1835741
ucuuucaggcugcauccuu

SEQ ID NO: 1835743 - RNA, 19 nt, Artificial Sequence
  Description of Artificial Sequence: Synthetic oligonucleotide
  Sense strand starting at position 3095 of SEQ ID NO: 1563838
gccugaaagauaugguuuc

SEQ ID NO: 1835744 - RNA, 19 nt, Artificial Sequence
  Description of Artificial Sequence: Synthetic oligonucleotide
  Antisense strand to SEQ ID NO: 1835743
gaaaccauaucuuucaggc

SEQ ID NO: 1835745 - RNA, 19 nt, Artificial Sequence
  Description of Artificial Sequence: Synthetic oligonucleotide
  Sense strand starting at position 3198 of SEQ ID NO: 1563838
agcagaacacuguggguau

SEQ ID NO: 1835746 - RNA, 19 nt, Artificial Sequence
  Description of Artificial Sequence: Synthetic oligonucleotide
  Antisense strand to SEQ ID NO: 1835745
auacccacaguguucugcu

SEQ ID NO: 1835747 - RNA, 19 nt, Artificial Sequence
  Description of Artificial Sequence: Synthetic oligonucleotide
  Sense strand starting at position 3201 of SEQ ID NO: 1563838
agaacacuguggguaugaa

SEQ ID NO: 1835748 - RNA, 19 nt, Artificial Sequence
  Description of Artificial Sequence: Synthetic oligonucleotide
  Antisense strand to SEQ ID NO: 1835747
uucauacccacaguguucu

SEQ ID NO: 1835749 - RNA, 19 nt, Artificial Sequence
  Description of Artificial Sequence: Synthetic oligonucleotide
  Sense strand starting at position 3316 of SEQ ID NO: 1563838
uguuccugccuggaacauu

SEQ ID NO: 1835750 - RNA, 19 nt, Artificial Sequence
  Description of Artificial Sequence: Synthetic oligonucleotide
  Antisense strand to SEQ ID NO: 1835749
aauguuccaggcaggaaca

SEQ ID NO: 1835751 - RNA, 19 nt, Artificial Sequence
  Description of Artificial Sequence: Synthetic oligonucleotide
  Sense strand starting at position 3489 of SEQ ID NO: 1563838
cuaacaagucccugaggua

SEQ ID NO: 1835752 - RNA, 19 nt, Artificial Sequence
  Description of Artificial Sequence: Synthetic oligonucleotide
  Antisense strand to SEQ ID NO: 1835751
uaccucagggacuuguuag

SEQ ID NO: 1835753 - RNA, 19 nt, Artificial Sequence
  Description of Artificial Sequence: Synthetic oligonucleotide
  Sense strand starting at position 3490 of SEQ ID NO: 1563838
uaacaagucccugagguau

SEQ ID NO: 1835754 - RNA, 19 nt, Artificial Sequence
  Description of Artificial Sequence: Synthetic oligonucleotide
  Antisense strand to SEQ ID NO: 1835753
auaccucagggacuuguua

SEQ ID NO: 1835755 - RNA, 19 nt, Artificial Sequence
  Description of Artificial Sequence: Synthetic oligonucleotide
  Sense strand starting at position 3597 of SEQ ID NO: 1563838
ucuucccuuggcugagaaa

SEQ ID NO: 1835756 - RNA, 19 nt, Artificial Sequence
  Description of Artificial Sequence: Synthetic oligonucleotide
  Antisense strand to SEQ ID NO: 1835755
uuucucagccaagggaaga

SEQ ID NO: 1835757 - RNA, 19 nt, Artificial Sequence
  Description of Artificial Sequence: Synthetic oligonucleotide
  Sense strand starting at position 3598 of SEQ ID NO: 1563838
cuucccuuggcugagaaau

SEQ ID NO: 1835758 - RNA, 19 nt, Artificial Sequence
  Description of Artificial Sequence: Synthetic oligonucleotide
  Antisense strand to SEQ ID NO: 1835757
auuucucagccaagggaag

SEQ ID NO: 1835759 - RNA, 19 nt, Artificial Sequence
  Description of Artificial Sequence: Synthetic oligonucleotide
  Sense strand starting at position 3619 of SEQ ID NO: 1563838
guuuccggucuugagaaca

SEQ ID NO: 1835760 - RNA, 19 nt, Artificial Sequence
  Description of Artificial Sequence: Synthetic oligonucleotide
  Antisense strand to SEQ ID NO: 1835759
uguucucaagaccggaaac

SEQ ID NO: 1835761 - RNA, 19 nt, Artificial Sequence
  Description of Artificial Sequence: Synthetic oligonucleotide
  Sense strand starting at position 3899 of SEQ ID NO: 1563838
cucaguagugcucagauug

SEQ ID NO: 1835762 - RNA, 19 nt, Artificial Sequence
  Description of Artificial Sequence: Synthetic oligonucleotide
  Antisense strand to SEQ ID NO: 1835761
caaucugagcacuacugag

SEQ ID NO: 1835763 - RNA, 19 nt, Artificial Sequence
  Description of Artificial Sequence: Synthetic oligonucleotide
  Sense strand starting at position 104 of SEQ ID NO: 1563839
ugaguagcuucagcugaga

SEQ ID NO: 1835764 - RNA, 19 nt, Artificial Sequence
  Description of Artificial Sequence: Synthetic oligonucleotide
  Antisense strand to SEQ ID NO: 1835763
ucucagcugaagcuacuca

SEQ ID NO: 1835765 - RNA, 19 nt, Artificial Sequence
  Description of Artificial Sequence: Synthetic oligonucleotide
  Sense strand starting at position 121 of SEQ ID NO: 1563839
gaaacucaccuaugauggu

SEQ ID NO: 1835766 - RNA, 19 nt, Artificial Sequence
  Description of Artificial Sequence: Synthetic oligonucleotide
  Antisense strand to SEQ ID NO: 1835765
accaucauaggugaguuuc

SEQ ID NO: 1835767 - RNA, 19 nt, Artificial Sequence
  Description of Artificial Sequence: Synthetic oligonucleotide
  Sense strand starting at position 131 of SEQ ID NO: 1563839
uaugaugguucugacaaag

SEQ ID NO: 1835768 - RNA, 19 nt, Artificial Sequence
  Description of Artificial Sequence: Synthetic oligonucleotide
  Antisense strand to SEQ ID NO: 1835767
cuuugucagaaccaucaua

SEQ ID NO: 1835769 - RNA, 19 nt, Artificial Sequence
  Description of Artificial Sequence: Synthetic oligonucleotide
  Sense strand starting at position 769 of SEQ ID NO: 1563839
gccucacgucuguucugau

SEQ ID NO: 1835770 - RNA, 19 nt, Artificial Sequence
  Description of Artificial Sequence: Synthetic oligonucleotide
  Antisense strand to SEQ ID NO: 1835769
aucagaacagacgugaggc

SEQ ID NO: 1835771 - RNA, 19 nt, Artificial Sequence
  Description of Artificial Sequence: Synthetic oligonucleotide
  Sense strand starting at position 868 of SEQ ID NO: 1563839
ccugcugacuugucaugga

SEQ ID NO: 1835772 - RNA, 19 nt, Artificial Sequence
  Description of Artificial Sequence: Synthetic oligonucleotide
  Antisense strand to SEQ ID NO: 1835771
uccaugacaagucagcagg

SEQ ID NO: 1835773 - RNA, 19 nt, Artificial Sequence
  Description of Artificial Sequence: Synthetic oligonucleotide
  Sense strand starting at position 1020 of SEQ ID NO: 1563839
ugggaaucucugggaagcu

SEQ ID NO: 1835774 - RNA, 19 nt, Artificial Sequence
  Description of Artificial Sequence: Synthetic oligonucleotide
  Antisense strand to SEQ ID NO: 1835773
agcuucccagagauuccca

SEQ ID NO: 1835775 - RNA, 19 nt, Artificial Sequence
  Description of Artificial Sequence: Synthetic oligonucleotide
  Sense strand starting at position 1029 of SEQ ID NO: 1563839
cugggaagcuguccucuga

SEQ ID NO: 1835776 - RNA, 19 nt, Artificial Sequence
  Description of Artificial Sequence: Synthetic oligonucleotide
  Antisense strand to SEQ ID NO: 1835775
ucagaggacagcuucccag

SEQ ID NO: 1835777 - RNA, 19 nt, Artificial Sequence
  Description of Artificial Sequence: Synthetic oligonucleotide
  Sense strand starting at position 1224 of SEQ ID NO: 1563839
gugcgaagucccucaguuc

SEQ ID NO: 1835778 - RNA, 19 nt, Artificial Sequence
  Description of Artificial Sequence: Synthetic oligonucleotide
  Antisense strand to SEQ ID NO: 1835777
gaacugagggacuucgcac

SEQ ID NO: 1835779 - RNA, 19 nt, Artificial Sequence
  Description of Artificial Sequence: Synthetic oligonucleotide
  Sense strand starting at position 1251 of SEQ ID NO: 1563839
ggcccuuaccuugaggauu

SEQ ID NO: 1835780 - RNA, 19 nt, Artificial Sequence
  Description of Artificial Sequence: Synthetic oligonucleotide
  Antisense strand to SEQ ID NO: 1835779
aauccucaagguaagggcc

SEQ ID NO: 1835781 - RNA, 19 nt, Artificial Sequence
  Description of Artificial Sequence: Synthetic oligonucleotide
  Sense strand starting at position 2050 of SEQ ID NO: 1563839
cucagucuuccucaagguu

SEQ ID NO: 1835782 - RNA, 19 nt, Artificial Sequence
  Description of Artificial Sequence: Synthetic oligonucleotide
  Antisense strand to SEQ ID NO: 1835781
aaccuugaggaagacugag

SEQ ID NO: 1835783 - RNA, 19 nt, Artificial Sequence
  Description of Artificial Sequence: Synthetic oligonucleotide
  Sense strand starting at position 2166 of SEQ ID NO: 1563839
aguacuaccgugugugaag

SEQ ID NO: 1835784 - RNA, 19 nt, Artificial Sequence
  Description of Artificial Sequence: Synthetic oligonucleotide
  Antisense strand to SEQ ID NO: 1835783
cuucacacacgguaguacu

SEQ ID NO: 1835785 - RNA, 19 nt, Artificial Sequence
  Description of Artificial Sequence: Synthetic oligonucleotide
  Sense strand starting at position 2211 of SEQ ID NO: 1563839
gucaaaggcucccuuaguu

SEQ ID NO: 1835786 - RNA, 19 nt, Artificial Sequence
  Description of Artificial Sequence: Synthetic oligonucleotide
  Antisense strand to SEQ ID NO: 1835785
aacuaagggagccuuugac

SEQ ID NO: 1835787 - RNA, 19 nt, Artificial Sequence
  Description of Artificial Sequence: Synthetic oligonucleotide
  Sense strand starting at position 2238 of SEQ ID NO: 1563839
ucccuauccuugucccaga

SEQ ID NO: 1835788 - RNA, 19 nt, Artificial Sequence
  Description of Artificial Sequence: Synthetic oligonucleotide
  Antisense strand to SEQ ID NO: 1835787
ucugggacaaggauaggga

SEQ ID NO: 1835789 - RNA, 19 nt, Artificial Sequence
  Description of Artificial Sequence: Synthetic oligonucleotide
  Sense strand starting at position 2422 of SEQ ID NO: 1563839
cguggaguuccauaucuac

SEQ ID NO: 1835790 - RNA, 19 nt, Artificial Sequence
  Description of Artificial Sequence: Synthetic oligonucleotide
  Antisense strand to SEQ ID NO: 1835789
guagauauggaacuccacg

SEQ ID NO: 1835791 - RNA, 19 nt, Artificial Sequence
  Description of Artificial Sequence: Synthetic oligonucleotide
  Sense strand starting at position 2425 of SEQ ID NO: 1563839
ggaguuccauaucuacgaa

SEQ ID NO: 1835792 - RNA, 19 nt, Artificial Sequence
  Description of Artificial Sequence: Synthetic oligonucleotide
  Antisense strand to SEQ ID NO: 1835791
uucguagauauggaacucc

SEQ ID NO: 1835793 - RNA, 19 nt, Artificial Sequence
  Description of Artificial Sequence: Synthetic oligonucleotide
  Sense strand starting at position 2428 of SEQ ID NO: 1563839
guuccauaucuacgaacca

SEQ ID NO: 1835794 - RNA, 19 nt, Artificial Sequence
  Description of Artificial Sequence: Synthetic oligonucleotide
  Antisense strand to SEQ ID NO: 1835793
ugguucguagauauggaac

SEQ ID NO: 1835795 - RNA, 19 nt, Artificial Sequence
  Description of Artificial Sequence: Synthetic oligonucleotide
  Sense strand starting at position 2460 of SEQ ID NO: 1563839
ccaguuccaucacccgaaa

SEQ ID NO: 1835796 - RNA, 19 nt, Artificial Sequence
  Description of Artificial Sequence: Synthetic oligonucleotide
  Antisense strand to SEQ ID NO: 1835795
uuucgggugauggaacugg

SEQ ID NO: 1835797 - RNA, 19 nt, Artificial Sequence
  Description of Artificial Sequence: Synthetic oligonucleotide
  Sense strand starting at position 2614 of SEQ ID NO: 1563839
aaagucuggcugcaucauu

SEQ ID NO: 1835798 - RNA, 19 nt, Artificial Sequence
  Description of Artificial Sequence: Synthetic oligonucleotide
  Antisense strand to SEQ ID NO: 1835797
aaugaugcagccagacuuu

SEQ ID NO: 1835799 - RNA, 19 nt, Artificial Sequence
  Description of Artificial Sequence: Synthetic oligonucleotide
  Sense strand starting at position 2652 of SEQ ID NO: 1563839
gaaugagaauuccucuugu

SEQ ID NO: 1835800 - RNA, 19 nt, Artificial Sequence
  Description of Artificial Sequence: Synthetic oligonucleotide
  Antisense strand to SEQ ID NO: 1835799
acaagaggaauucucauuc

SEQ ID NO: 1835801 - RNA, 19 nt, Artificial Sequence
  Description of Artificial Sequence: Synthetic oligonucleotide
  Sense strand starting at position 2757 of SEQ ID NO: 1563839
guuugcaucuuccuaauga

SEQ ID NO: 1835802 - RNA, 19 nt, Artificial Sequence
  Description of Artificial Sequence: Synthetic oligonucleotide
  Antisense strand to SEQ ID NO: 1835801
ucauuaggaagaugcaaac

SEQ ID NO: 1835803 - RNA, 19 nt, Artificial Sequence
  Description of Artificial Sequence: Synthetic oligonucleotide
  Sense strand starting at position 2774 of SEQ ID NO: 1563839
gacaaaugacguuggucau

SEQ ID NO: 1835804 - RNA, 19 nt, Artificial Sequence
  Description of Artificial Sequence: Synthetic oligonucleotide
  Antisense strand to SEQ ID NO: 1835803
augaccaacgucauuuguc

SEQ ID NO: 1835805 - RNA, 19 nt, Artificial Sequence
  Description of Artificial Sequence: Synthetic oligonucleotide
  Sense strand starting at position 2777 of SEQ ID NO: 1563839
aaaugacguuggucaucuu

SEQ ID NO: 1835806 - RNA, 19 nt, Artificial Sequence
  Description of Artificial Sequence: Synthetic oligonucleotide
  Antisense strand to SEQ ID NO: 1835805
aagaugaccaacgucauuu

SEQ ID NO: 1835807 - RNA, 19 nt, Artificial Sequence
  Description of Artificial Sequence: Synthetic oligonucleotide
  Sense strand starting at position 3024 of SEQ ID NO: 1563839
agugucuccuauuauuuau

SEQ ID NO: 1835808 - RNA, 19 nt, Artificial Sequence
  Description of Artificial Sequence: Synthetic oligonucleotide
  Antisense strand to SEQ ID NO: 1835807
auaaauaauaggagacacu

SEQ ID NO: 1835809 - RNA, 19 nt, Artificial Sequence
  Description of Artificial Sequence: Synthetic oligonucleotide
  Sense strand starting at position 3059 of SEQ ID NO: 1563839
gcauguuugcaacaacuga

SEQ ID NO: 1835810 - RNA, 19 nt, Artificial Sequence
  Description of Artificial Sequence: Synthetic oligonucleotide
  Antisense strand to SEQ ID NO: 1835809
ucaguuguugcaaacaugc

SEQ ID NO: 1835811 - RNA, 19 nt, Artificial Sequence
  Description of Artificial Sequence: Synthetic oligonucleotide
  Sense strand starting at position 3083 of SEQ ID NO: 1563839
cuguauugauaccucauua

SEQ ID NO: 1835812 - RNA, 19 nt, Artificial Sequence
  Description of Artificial Sequence: Synthetic oligonucleotide
  Antisense strand to SEQ ID NO: 1835811
uaaugagguaucaauacag

SEQ ID NO: 1835813 - RNA, 19 nt, Artificial Sequence
  Description of Artificial Sequence: Synthetic oligonucleotide
  Sense strand starting at position 3094 of SEQ ID NO: 1563839
ccucauuauuaggucaagu

SEQ ID NO: 1835814 - RNA, 19 nt, Artificial Sequence
  Description of Artificial Sequence: Synthetic oligonucleotide
  Antisense strand to SEQ ID NO: 1835813
acuugaccuaauaaugagg

SEQ ID NO: 1835815 - RNA, 19 nt, Artificial Sequence
  Description of Artificial Sequence: Synthetic oligonucleotide
  Sense strand starting at position 3104 of SEQ ID NO: 1563839
aggucaaguccacaguuua

SEQ ID NO: 1835816 - RNA, 19 nt, Artificial Sequence
  Description of Artificial Sequence: Synthetic oligonucleotide
  Antisense strand to SEQ ID NO: 1835815
uaaacuguggacuugaccu

SEQ ID NO: 1835817 - RNA, 19 nt, Artificial Sequence
  Description of Artificial Sequence: Synthetic oligonucleotide
  Sense strand starting at position 3160 of SEQ ID NO: 1563839
uugauaaguguguaauggu

SEQ ID NO: 1835818 - RNA, 19 nt, Artificial Sequence
  Description of Artificial Sequence: Synthetic oligonucleotide
  Antisense strand to SEQ ID NO: 1835817
accauuacacacuuaucaa

SEQ ID NO: 1835819 - RNA, 19 nt, Artificial Sequence
  Description of Artificial Sequence: Synthetic oligonucleotide
  Sense strand starting at position 3167 of SEQ ID NO: 1563839
guguguaauggugaguauu

SEQ ID NO: 1835820 - RNA, 19 nt, Artificial Sequence
  Description of Artificial Sequence: Synthetic oligonucleotide
  Antisense strand to SEQ ID NO: 1835819
aauacucaccauuacacac

SEQ ID NO: 1835821 - RNA, 19 nt, Artificial Sequence
  Description of Artificial Sequence: Synthetic oligonucleotide
  Sense strand starting at position 3169 of SEQ ID NO: 1563839
guguaauggugaguauuca

SEQ ID NO: 1835822 - RNA, 19 nt, Artificial Sequence
  Description of Artificial Sequence: Synthetic oligonucleotide
  Antisense strand to SEQ ID NO: 1835821
ugaauacucaccauuacac

SEQ ID NO: 1835823 - RNA, 19 nt, Artificial Sequence
  Description of Artificial Sequence: Synthetic oligonucleotide
  Sense strand starting at position 3229 of SEQ ID NO: 1563839
ucuugugugcuccaccuau

SEQ ID NO: 1835824 - RNA, 19 nt, Artificial Sequence
  Description of Artificial Sequence: Synthetic oligonucleotide
  Antisense strand to SEQ ID NO: 1835823
auagguggagcacacaaga

SEQ ID NO: 1835825 - RNA, 19 nt, Artificial Sequence
  Description of Artificial Sequence: Synthetic oligonucleotide
  Sense strand starting at position 3282 of SEQ ID NO: 1563839
uccggaaaccacugauauu

SEQ ID NO: 1835826 - RNA, 19 nt, Artificial Sequence
  Description of Artificial Sequence: Synthetic oligonucleotide
  Antisense strand to SEQ ID NO: 1835825
aauaucagugguuuccgga

SEQ ID NO: 1835827 - RNA, 19 nt, Artificial Sequence
  Description of Artificial Sequence: Synthetic oligonucleotide
  Sense strand starting at position 3401 of SEQ ID NO: 1563839
uuaugauuccuccaggucu

SEQ ID NO: 1835828 - RNA, 19 nt, Artificial Sequence
  Description of Artificial Sequence: Synthetic oligonucleotide
  Antisense strand to SEQ ID NO: 1835827
agaccuggaggaaucauaa

SEQ ID NO: 1835829 - RNA, 19 nt, Artificial Sequence
  Description of Artificial Sequence: Synthetic oligonucleotide
  Sense strand starting at position 3442 of SEQ ID NO: 1563839
gcuccuguugcucaacaua

SEQ ID NO: 1835830 - RNA, 19 nt, Artificial Sequence
  Description of Artificial Sequence: Synthetic oligonucleotide
  Antisense strand to SEQ ID NO: 1835829
uauguugagcaacaggagc

SEQ ID NO: 1835831 - RNA, 19 nt, Artificial Sequence
  Description of Artificial Sequence: Synthetic oligonucleotide
  Sense strand starting at position 3497 of SEQ ID NO: 1563839
agccauucuccugggugua

SEQ ID NO: 1835832 - RNA, 19 nt, Artificial Sequence
  Description of Artificial Sequence: Synthetic oligonucleotide
  Antisense strand to SEQ ID NO: 1835831
uacacccaggagaauggcu

SEQ ID NO: 1835833 - RNA, 19 nt, Artificial Sequence
  Description of Artificial Sequence: Synthetic oligonucleotide
  Sense strand starting at position 3499 of SEQ ID NO: 1563839
ccauucuccuggguguaga

SEQ ID NO: 1835834 - RNA, 19 nt, Artificial Sequence
  Description of Artificial Sequence: Synthetic oligonucleotide
  Antisense strand to SEQ ID NO: 1835833
ucuacacccaggagaaugg

SEQ ID NO: 1835835 - RNA, 19 nt, Artificial Sequence
  Description of Artificial Sequence: Synthetic oligonucleotide
  Sense strand starting at position 3524 of SEQ ID NO: 1563839
ucuccuaggugcuuuaauu

SEQ ID NO: 1835836 - RNA, 19 nt, Artificial Sequence
  Description of Artificial Sequence: Synthetic oligonucleotide
  Antisense strand to SEQ ID NO: 1835835
aauuaaagcaccuaggaga

SEQ ID NO: 1835837 - RNA, 19 nt, Artificial Sequence
  Description of Artificial Sequence: Synthetic oligonucleotide
  Sense strand starting at position 3559 of SEQ ID NO: 1563839
gccauaugacauugaacuc

SEQ ID NO: 1835838 - RNA, 19 nt, Artificial Sequence
  Description of Artificial Sequence: Synthetic oligonucleotide
  Antisense strand to SEQ ID NO: 1835837
gaguucaaugucauauggc

SEQ ID NO: 1835839 - RNA, 19 nt, Artificial Sequence
  Description of Artificial Sequence: Synthetic oligonucleotide
  Sense strand starting at position 3770 of SEQ ID NO: 1563839
agaucuuaacagugacuuu

SEQ ID NO: 1835840 - RNA, 19 nt, Artificial Sequence
  Description of Artificial Sequence: Synthetic oligonucleotide
  Antisense strand to SEQ ID NO: 1835839
aaagucacuguuaagaucu

SEQ ID NO: 1835841 - RNA, 19 nt, Artificial Sequence
  Description of Artificial Sequence: Synthetic oligonucleotide
  Sense strand starting at position 3901 of SEQ ID NO: 1563839
aggguuugcacccauaagu

SEQ ID NO: 1835842 - RNA, 19 nt, Artificial Sequence
  Description of Artificial Sequence: Synthetic oligonucleotide
  Antisense strand to SEQ ID NO: 1835841
acuuaugggugcaaacccu

SEQ ID NO: 1835843 - RNA, 19 nt, Artificial Sequence
  Description of Artificial Sequence: Synthetic oligonucleotide
  Sense strand starting at position 23 of SEQ ID NO: 1563840
ggaagagaauaugagaaau

SEQ ID NO: 1835844 - RNA, 19 nt, Artificial Sequence
  Description of Artificial Sequence: Synthetic oligonucleotide
  Antisense strand to SEQ ID NO: 1835843
auuucucauauucucuucc

SEQ ID NO: 1835845 - RNA, 19 nt, Artificial Sequence
  Description of Artificial Sequence: Synthetic oligonucleotide
  Sense strand starting at position 286 of SEQ ID NO: 1563840
guagaacccguccacauua

SEQ ID NO: 1835846 - RNA, 19 nt, Artificial Sequence
  Description of Artificial Sequence: Synthetic oligonucleotide
  Antisense strand to SEQ ID NO: 1835845
uaauguggacggguucuac

SEQ ID NO: 1835847 - RNA, 19 nt, Artificial Sequence
  Description of Artificial Sequence: Synthetic oligonucleotide
  Sense strand starting at position 494 of SEQ ID NO: 1563840
ugagaacacugucuggcaa

SEQ ID NO: 1835848 - RNA, 19 nt, Artificial Sequence
  Description of Artificial Sequence: Synthetic oligonucleotide
  Antisense strand to SEQ ID NO: 1835847
uugccagacaguguucuca

SEQ ID NO: 1835849 - RNA, 19 nt, Artificial Sequence
  Description of Artificial Sequence: Synthetic oligonucleotide
  Sense strand starting at position 495 of SEQ ID NO: 1563840
gagaacacugucuggcaaa

SEQ ID NO: 1835850 - RNA, 19 nt, Artificial Sequence
  Description of Artificial Sequence: Synthetic oligonucleotide
  Antisense strand to SEQ ID NO: 1835849
uuugccagacaguguucuc

SEQ ID NO: 1835851 - RNA, 19 nt, Artificial Sequence
  Description of Artificial Sequence: Synthetic oligonucleotide
  Sense strand starting at position 564 of SEQ ID NO: 1563840
gguugaaacaagugugaua

SEQ ID NO: 1835852 - RNA, 19 nt, Artificial Sequence
  Description of Artificial Sequence: Synthetic oligonucleotide
  Antisense strand to SEQ ID NO: 1835851
uaucacacuuguuucaacc

SEQ ID NO: 1835853 - RNA, 19 nt, Artificial Sequence
  Description of Artificial Sequence: Synthetic oligonucleotide
  Sense strand starting at position 566 of SEQ ID NO: 1563840
uugaaacaagugugauauu

SEQ ID NO: 1835854 - RNA, 19 nt, Artificial Sequence
  Description of Artificial Sequence: Synthetic oligonucleotide
  Antisense strand to SEQ ID NO: 1835853
aauaucacacuuguuucaa

SEQ ID NO: 1835855 - RNA, 19 nt, Artificial Sequence
  Description of Artificial Sequence: Synthetic oligonucleotide
  Sense strand starting at position 755 of SEQ ID NO: 1563840
gaaggaguccacugcuuau

SEQ ID NO: 1835856 - RNA, 19 nt, Artificial Sequence
  Description of Artificial Sequence: Synthetic oligonucleotide
  Antisense strand to SEQ ID NO: 1835855
auaagcaguggacuccuuc

SEQ ID NO: 1835857 - RNA, 19 nt, Artificial Sequence
  Description of Artificial Sequence: Synthetic oligonucleotide
  Sense strand starting at position 778 of SEQ ID NO: 1563840
agagaacuuugguuaaauu

SEQ ID NO: 1835858 - RNA, 19 nt, Artificial Sequence
  Description of Artificial Sequence: Synthetic oligonucleotide
  Antisense strand to SEQ ID NO: 1835857
aauuuaaccaaaguucucu

SEQ ID NO: 1835859 - RNA, 19 nt, Artificial Sequence
  Description of Artificial Sequence: Synthetic oligonucleotide
  Sense strand starting at position 799 of SEQ ID NO: 1563840
ucguuagauccugauagag

SEQ ID NO: 1835860 - RNA, 19 nt, Artificial Sequence
  Description of Artificial Sequence: Synthetic oligonucleotide
  Antisense strand to SEQ ID NO: 1835859
cucuaucaggaucuaacga

SEQ ID NO: 1835861 - RNA, 19 nt, Artificial Sequence
  Description of Artificial Sequence: Synthetic oligonucleotide
  Sense strand starting at position 850 of SEQ ID NO: 1563840
augaucauuucgguacugu

SEQ ID NO: 1835862 - RNA, 19 nt, Artificial Sequence
  Description of Artificial Sequence: Synthetic oligonucleotide
  Antisense strand to SEQ ID NO: 1835861
acaguaccgaaaugaucau

SEQ ID NO: 1835863 - RNA, 19 nt, Artificial Sequence
  Description of Artificial Sequence: Synthetic oligonucleotide
  Sense strand starting at position 899 of SEQ ID NO: 1563840
agauaaauuugacauggua

SEQ ID NO: 1835864 - RNA, 19 nt, Artificial Sequence
  Description of Artificial Sequence: Synthetic oligonucleotide
  Antisense strand to SEQ ID NO: 1835863
uaccaugucaaauuuaucu

SEQ ID NO: 1835865 - RNA, 19 nt, Artificial Sequence
  Description of Artificial Sequence: Synthetic oligonucleotide
  Sense strand starting at position 1027 of SEQ ID NO: 1563840
guugcuaucagagaccaga

SEQ ID NO: 1835866 - RNA, 19 nt, Artificial Sequence
  Description of Artificial Sequence: Synthetic oligonucleotide
  Antisense strand to SEQ ID NO: 1835865
ucuggucucugauagcaac

SEQ ID NO: 1835867 - RNA, 19 nt, Artificial Sequence
  Description of Artificial Sequence: Synthetic oligonucleotide
  Sense strand starting at position 1081 of SEQ ID NO: 1563840
uaauaaauuugugacugga

SEQ ID NO: 1835868 - RNA, 19 nt, Artificial Sequence
  Description of Artificial Sequence: Synthetic oligonucleotide
  Antisense strand to SEQ ID NO: 1835867
uccagucacaaauuuauua

SEQ ID NO: 1835869 - RNA, 19 nt, Artificial Sequence
  Description of Artificial Sequence: Synthetic oligonucleotide
  Sense strand starting at position 1184 of SEQ ID NO: 1563840
gguauaauccacuauguuu

SEQ ID NO: 1835870 - RNA, 19 nt, Artificial Sequence
  Description of Artificial Sequence: Synthetic oligonucleotide
  Antisense strand to SEQ ID NO: 1835869
aaacauaguggauuauacc

SEQ ID NO: 1835871 - RNA, 19 nt, Artificial Sequence
  Description of Artificial Sequence: Synthetic oligonucleotide
  Sense strand starting at position 1245 of SEQ ID NO: 1563840
aaauaaaugcaauguguag

SEQ ID NO: 1835872 - RNA, 19 nt, Artificial Sequence
  Description of Artificial Sequence: Synthetic oligonucleotide
  Antisense strand to SEQ ID NO: 1835871
cuacacauugcauuuauuu

SEQ ID NO: 1835873 - RNA, 19 nt, Artificial Sequence
  Description of Artificial Sequence: Synthetic oligonucleotide
  Sense strand starting at position 1251 of SEQ ID NO: 1563840
augcaauguguagaagacu

SEQ ID NO: 1835874 - RNA, 19 nt, Artificial Sequence
  Description of Artificial Sequence: Synthetic oligonucleotide
  Antisense strand to SEQ ID NO: 1835873
agucuucuacacauugcau

SEQ ID NO: 1835875 - RNA, 19 nt, Artificial Sequence
  Description of Artificial Sequence: Synthetic oligonucleotide
  Sense strand starting at position 1266 of SEQ ID NO: 1563840
gacugaaaccugugcaaua

SEQ ID NO: 1835876 - RNA, 19 nt, Artificial Sequence
  Description of Artificial Sequence: Synthetic oligonucleotide
  Antisense strand to SEQ ID NO: 1835875
uauugcacagguuucaguc

SEQ ID NO: 1835877 - RNA, 19 nt, Artificial Sequence
  Description of Artificial Sequence: Synthetic oligonucleotide
  Sense strand starting at position 1268 of SEQ ID NO: 1563840
cugaaaccugugcaauagu

SEQ ID NO: 1835878 - RNA, 19 nt, Artificial Sequence
  Description of Artificial Sequence: Synthetic oligonucleotide
  Antisense strand to SEQ ID NO: 1835877
acuauugcacagguuucag

SEQ ID NO: 1835879 - RNA, 19 nt, Artificial Sequence
  Description of Artificial Sequence: Synthetic oligonucleotide
  Sense strand starting at position 1336 of SEQ ID NO: 1563840
gaacaucauuuggacaagu

SEQ ID NO: 1835880 - RNA, 19 nt, Artificial Sequence
  Description of Artificial Sequence: Synthetic oligonucleotide
  Antisense strand to SEQ ID NO: 1835879
acuuguccaaaugauguuc

SEQ ID NO: 1835881 - RNA, 19 nt, Artificial Sequence
  Description of Artificial Sequence: Synthetic oligonucleotide
  Sense strand starting at position 1363 of SEQ ID NO: 1563840
cucuuagggcucuaagguu

SEQ ID NO: 1835882 - RNA, 19 nt, Artificial Sequence
  Description of Artificial Sequence: Synthetic oligonucleotide
  Antisense strand to SEQ ID NO: 1835881
aaccuuagagcccuaagag

SEQ ID NO: 1835883 - RNA, 19 nt, Artificial Sequence
  Description of Artificial Sequence: Synthetic oligonucleotide
  Sense strand starting at position 1459 of SEQ ID NO: 1563840
guugcaaaguacguaauuu

SEQ ID NO: 1835884 - RNA, 19 nt, Artificial Sequence
  Description of Artificial Sequence: Synthetic oligonucleotide
  Antisense strand to SEQ ID NO: 1835883
aaauuacguacuuugcaac

SEQ ID NO: 1835885 - RNA, 19 nt, Artificial Sequence
  Description of Artificial Sequence: Synthetic oligonucleotide
  Sense strand starting at position 1613 of SEQ ID NO: 1563840
aggagugaccugugguaga

SEQ ID NO: 1835886 - RNA, 19 nt, Artificial Sequence
  Description of Artificial Sequence: Synthetic oligonucleotide
  Antisense strand to SEQ ID NO: 1835885
ucuaccacaggucacuccu

SEQ ID NO: 1835887 - RNA, 19 nt, Artificial Sequence
  Description of Artificial Sequence: Synthetic oligonucleotide
  Sense strand starting at position 1686 of SEQ ID NO: 1563840
gaagcaugaccaggaguca

SEQ ID NO: 1835888 - RNA, 19 nt, Artificial Sequence
  Description of Artificial Sequence: Synthetic oligonucleotide
  Antisense strand to SEQ ID NO: 1835887
ugacuccuggucaugcuuc

SEQ ID NO: 1835889 - RNA, 19 nt, Artificial Sequence
  Description of Artificial Sequence: Synthetic oligonucleotide
  Sense strand starting at position 1877 of SEQ ID NO: 1563840
gagguuucccuggagugua

SEQ ID NO: 1835890 - RNA, 19 nt, Artificial Sequence
  Description of Artificial Sequence: Synthetic oligonucleotide
  Antisense strand to SEQ ID NO: 1835889
uacacuccagggaaaccuc

SEQ ID NO: 1835891 - RNA, 19 nt, Artificial Sequence
  Description of Artificial Sequence: Synthetic oligonucleotide
  Sense strand starting at position 2241 of SEQ ID NO: 1563840
guugauucgccuuagaaau

SEQ ID NO: 1835892 - RNA, 19 nt, Artificial Sequence
  Description of Artificial Sequence: Synthetic oligonucleotide
  Antisense strand to SEQ ID NO: 1835891
auuucuaaggcgaaucaac

SEQ ID NO: 1835893 - RNA, 19 nt, Artificial Sequence
  Description of Artificial Sequence: Synthetic oligonucleotide
  Sense strand starting at position 2375 of SEQ ID NO: 1563840
ucauuuguauuagcgguau

SEQ ID NO: 1835894 - RNA, 19 nt, Artificial Sequence
  Description of Artificial Sequence: Synthetic oligonucleotide
  Antisense strand to SEQ ID NO: 1835893
auaccgcuaauacaaauga

SEQ ID NO: 1835895 - RNA, 19 nt, Artificial Sequence
  Description of Artificial Sequence: Synthetic oligonucleotide
  Sense strand starting at position 2377 of SEQ ID NO: 1563840
auuuguauuagcgguauac

SEQ ID NO: 1835896 - RNA, 19 nt, Artificial Sequence
  Description of Artificial Sequence: Synthetic oligonucleotide
  Antisense strand to SEQ ID NO: 1835895
guauaccgcuaauacaaau

SEQ ID NO: 1835897 - RNA, 19 nt, Artificial Sequence
  Description of Artificial Sequence: Synthetic oligonucleotide
  Sense strand starting at position 2446 of SEQ ID NO: 1563840
ugagaucguauccagaguu

SEQ ID NO: 1835898 - RNA, 19 nt, Artificial Sequence
  Description of Artificial Sequence: Synthetic oligonucleotide
  Antisense strand to SEQ ID NO: 1835897
aacucuggauacgaucuca

SEQ ID NO: 1835899 - RNA, 19 nt, Artificial Sequence
  Description of Artificial Sequence: Synthetic oligonucleotide
  Sense strand starting at position 2487 of SEQ ID NO: 1563840
aagaauaaacguggacuca

SEQ ID NO: 1835900 - RNA, 19 nt, Artificial Sequence
  Description of Artificial Sequence: Synthetic oligonucleotide
  Antisense strand to SEQ ID NO: 1835899
ugaguccacguuuauucuu

SEQ ID NO: 1835901 - RNA, 19 nt, Artificial Sequence
  Description of Artificial Sequence: Synthetic oligonucleotide
  Sense strand starting at position 2498 of SEQ ID NO: 1563840
uggacucauuuagaaagca

SEQ ID NO: 1835902 - RNA, 19 nt, Artificial Sequence
  Description of Artificial Sequence: Synthetic oligonucleotide
  Antisense strand to SEQ ID NO: 1835901
ugcuuucuaaaugagucca

SEQ ID NO: 1835903 - RNA, 19 nt, Artificial Sequence
  Description of Artificial Sequence: Synthetic oligonucleotide
  Sense strand starting at position 2819 of SEQ ID NO: 1563840
agcuaaagaugacauuuaa

SEQ ID NO: 1835904 - RNA, 19 nt, Artificial Sequence
  Description of Artificial Sequence: Synthetic oligonucleotide
  Antisense strand to SEQ ID NO: 1835903
uuaaaugucaucuuuagcu

SEQ ID NO: 1835905 - RNA, 19 nt, Artificial Sequence
  Description of Artificial Sequence: Synthetic oligonucleotide
  Sense strand starting at position 3430 of SEQ ID NO: 1563840
acccauggguucuuuagaa

SEQ ID NO: 1835906 - RNA, 19 nt, Artificial Sequence
  Description of Artificial Sequence: Synthetic oligonucleotide
  Antisense strand to SEQ ID NO: 1835905
uucuaaagaacccaugggu

SEQ ID NO: 1835907 - RNA, 19 nt, Artificial Sequence
  Description of Artificial Sequence: Synthetic oligonucleotide
  Sense strand starting at position 3571 of SEQ ID NO: 1563840
uuugucuuaugacugaaga

SEQ ID NO: 1835908 - RNA, 19 nt, Artificial Sequence
  Description of Artificial Sequence: Synthetic oligonucleotide
  Antisense strand to SEQ ID NO: 1835907
ucuucagucauaagacaaa

SEQ ID NO: 1835909 - RNA, 19 nt, Artificial Sequence
  Description of Artificial Sequence: Synthetic oligonucleotide
  Sense strand starting at position 3572 of SEQ ID NO: 1563840
uugucuuaugacugaagau

SEQ ID NO: 1835910 - RNA, 19 nt, Artificial Sequence
  Description of Artificial Sequence: Synthetic oligonucleotide
  Antisense strand to SEQ ID NO: 1835909
aucuucagucauaagacaa

SEQ ID NO: 1835911 - RNA, 19 nt, Artificial Sequence
  Description of Artificial Sequence: Synthetic oligonucleotide
  Sense strand starting at position 3669 of SEQ ID NO: 1563840
cuauaaauaucagcuagag

SEQ ID NO: 1835912 - RNA, 19 nt, Artificial Sequence
  Description of Artificial Sequence: Synthetic oligonucleotide
  Antisense strand to SEQ ID NO: 1835911
cucuagcugauauuuauag

SEQ ID NO: 1835913 - RNA, 19 nt, Artificial Sequence
  Description of Artificial Sequence: Synthetic oligonucleotide
  Sense strand starting at position 3710 of SEQ ID NO: 1563840
ucuguauccuugguuauuu

SEQ ID NO: 1835914 - RNA, 19 nt, Artificial Sequence
  Description of Artificial Sequence: Synthetic oligonucleotide
  Antisense strand to SEQ ID NO: 1835913
aaauaaccaaggauacaga

SEQ ID NO: 1835915 - RNA, 19 nt, Artificial Sequence
  Description of Artificial Sequence: Synthetic oligonucleotide
  Sense strand starting at position 3711 of SEQ ID NO: 1563840
cuguauccuugguuauuua

SEQ ID NO: 1835916 - RNA, 19 nt, Artificial Sequence
  Description of Artificial Sequence: Synthetic oligonucleotide
  Antisense strand to SEQ ID NO: 1835915
uaaauaaccaaggauacag

SEQ ID NO: 1835917 - RNA, 19 nt, Artificial Sequence
  Description of Artificial Sequence: Synthetic oligonucleotide
  Sense strand starting at position 3754 of SEQ ID NO: 1563840
uugagagaggaguguuuau

SEQ ID NO: 1835918 - RNA, 19 nt, Artificial Sequence
  Description of Artificial Sequence: Synthetic oligonucleotide
  Antisense strand to SEQ ID NO: 1835917
auaaacacuccucucucaa

SEQ ID NO: 1835919 - RNA, 19 nt, Artificial Sequence
  Description of Artificial Sequence: Synthetic oligonucleotide
  Sense strand starting at position 3767 of SEQ ID NO: 1563840
guuuaugucccugauuaua

SEQ ID NO: 1835920 - RNA, 19 nt, Artificial Sequence
  Description of Artificial Sequence: Synthetic oligonucleotide
  Antisense strand to SEQ ID NO: 1835919
uauaaucagggacauaaac

SEQ ID NO: 1835921 - RNA, 19 nt, Artificial Sequence
  Description of Artificial Sequence: Synthetic oligonucleotide
  Sense strand starting at position 3922 of SEQ ID NO: 1563840
acacuaacauguccgaaca

SEQ ID NO: 1835922 - RNA, 19 nt, Artificial Sequence
  Description of Artificial Sequence: Synthetic oligonucleotide
  Antisense strand to SEQ ID NO: 1835921
uguucggacauguuagugu

SEQ ID NO: 1835923 - RNA, 19 nt, Artificial Sequence
  Description of Artificial Sequence: Synthetic oligonucleotide
  Sense strand starting at position 1022 of SEQ ID NO: 1563841
ggcagauugcccugacuac

SEQ ID NO: 1835924 - RNA, 19 nt, Artificial Sequence
  Description of Artificial Sequence: Synthetic oligonucleotide
  Antisense strand to SEQ ID NO: 1835923
guagucagggcaaucugcc

SEQ ID NO: 1835925 - RNA, 19 nt, Artificial Sequence
  Description of Artificial Sequence: Synthetic oligonucleotide
  Sense strand starting at position 1023 of SEQ ID NO: 1563841
gcagauugcccugacuacu

SEQ ID NO: 1835926 - RNA, 19 nt, Artificial Sequence
  Description of Artificial Sequence: Synthetic oligonucleotide
  Antisense strand to SEQ ID NO: 1835925
aguagucagggcaaucugc

SEQ ID NO: 1835927 - RNA, 19 nt, Artificial Sequence
  Description of Artificial Sequence: Synthetic oligonucleotide
  Sense strand starting at position 1104 of SEQ ID NO: 1563841
uucgauaaacgaugggaau

SEQ ID NO: 1835928 - RNA, 19 nt, Artificial Sequence
  Description of Artificial Sequence: Synthetic oligonucleotide
  Antisense strand to SEQ ID NO: 1835927
auucccaucguuuaucgaa

SEQ ID NO: 1835929 - RNA, 19 nt, Artificial Sequence
  Description of Artificial Sequence: Synthetic oligonucleotide
  Sense strand starting at position 1105 of SEQ ID NO: 1563841
ucgauaaacgaugggaauu

SEQ ID NO: 1835930 - RNA, 19 nt, Artificial Sequence
  Description of Artificial Sequence: Synthetic oligonucleotide
  Antisense strand to SEQ ID NO: 1835929
aauucccaucguuuaucga

SEQ ID NO: 1835931 - RNA, 19 nt, Artificial Sequence
  Description of Artificial Sequence: Synthetic oligonucleotide
  Sense strand starting at position 1133 of SEQ ID NO: 1563841
cacggagucuagucacuaa

SEQ ID NO: 1835932 - RNA, 19 nt, Artificial Sequence
  Description of Artificial Sequence: Synthetic oligonucleotide
  Antisense strand to SEQ ID NO: 1835931
uuagugacuagacuccgug

SEQ ID NO: 1835933 - RNA, 19 nt, Artificial Sequence
  Description of Artificial Sequence: Synthetic oligonucleotide
  Sense strand starting at position 1136 of SEQ ID NO: 1563841
ggagucuagucacuaaaua

SEQ ID NO: 1835934 - RNA, 19 nt, Artificial Sequence
  Description of Artificial Sequence: Synthetic oligonucleotide
  Antisense strand to SEQ ID NO: 1835933
uauuuagugacuagacucc

SEQ ID NO: 1835935 - RNA, 19 nt, Artificial Sequence
  Description of Artificial Sequence: Synthetic oligonucleotide
  Sense strand starting at position 1171 of SEQ ID NO: 1563841
cggcguuugggagaccaaa

SEQ ID NO: 1835936 - RNA, 19 nt, Artificial Sequence
  Description of Artificial Sequence: Synthetic oligonucleotide
  Antisense strand to SEQ ID NO: 1835935
uuuggucucccaaacgccg

SEQ ID NO: 1835937 - RNA, 19 nt, Artificial Sequence
  Description of Artificial Sequence: Synthetic oligonucleotide
  Sense strand starting at position 1243 of SEQ ID NO: 1563841
ggagaucucaccuggaagc

SEQ ID NO: 1835938 - RNA, 19 nt, Artificial Sequence
  Description of Artificial Sequence: Synthetic oligonucleotide
  Antisense strand to SEQ ID NO: 1835937
gcuuccaggugagaucucc

SEQ ID NO: 1835939 - RNA, 19 nt, Artificial Sequence
  Description of Artificial Sequence: Synthetic oligonucleotide
  Sense strand starting at position 1398 of SEQ ID NO: 1563841
gggugacuguggucugacu

SEQ ID NO: 1835940 - RNA, 19 nt, Artificial Sequence
  Description of Artificial Sequence: Synthetic oligonucleotide
  Antisense strand to SEQ ID NO: 1835939
agucagaccacagucaccc

SEQ ID NO: 1835941 - RNA, 19 nt, Artificial Sequence
  Description of Artificial Sequence: Synthetic oligonucleotide
  Sense strand starting at position 1447 of SEQ ID NO: 1563841
aacggaucggagcgguaaa

SEQ ID NO: 1835942 - RNA, 19 nt, Artificial Sequence
  Description of Artificial Sequence: Synthetic oligonucleotide
  Antisense strand to SEQ ID NO: 1835941
uuuaccgcuccgauccguu

SEQ ID NO: 1835943 - RNA, 19 nt, Artificial Sequence
  Description of Artificial Sequence: Synthetic oligonucleotide
  Sense strand starting at position 1656 of SEQ ID NO: 1563841
caaggaaucugaggauuuc

SEQ ID NO: 1835944 - RNA, 19 nt, Artificial Sequence
  Description of Artificial Sequence: Synthetic oligonucleotide
  Antisense strand to SEQ ID NO: 1835943
gaaauccucagauuccuug

SEQ ID NO: 1835945 - RNA, 19 nt, Artificial Sequence
  Description of Artificial Sequence: Synthetic oligonucleotide
  Sense strand starting at position 1662 of SEQ ID NO: 1563841
aucugaggauuucgaacga

SEQ ID NO: 1835946 - RNA, 19 nt, Artificial Sequence
  Description of Artificial Sequence: Synthetic oligonucleotide
  Antisense strand to SEQ ID NO: 1835945
ucguucgaaauccucagau

SEQ ID NO: 1835947 - RNA, 19 nt, Artificial Sequence
  Description of Artificial Sequence: Synthetic oligonucleotide
  Sense strand starting at position 1771 of SEQ ID NO: 1563841
gggugaagggaucgggaua

SEQ ID NO: 1835948 - RNA, 19 nt, Artificial Sequence
  Description of Artificial Sequence: Synthetic oligonucleotide
  Antisense strand to SEQ ID NO: 1835947
uaucccgaucccuucaccc

SEQ ID NO: 1835949 - RNA, 19 nt, Artificial Sequence
  Description of Artificial Sequence: Synthetic oligonucleotide
  Sense strand starting at position 1989 of SEQ ID NO: 1563841
ccgccucuucgccuaauau

SEQ ID NO: 1835950 - RNA, 19 nt, Artificial Sequence
  Description of Artificial Sequence: Synthetic oligonucleotide
  Antisense strand to SEQ ID NO: 1835949
auauuaggcgaagaggcgg

SEQ ID NO: 1835951 - RNA, 19 nt, Artificial Sequence
  Description of Artificial Sequence: Synthetic oligonucleotide
  Sense strand starting at position 2170 of SEQ ID NO: 1563841
ccaggucgacacuauacaa

SEQ ID NO: 1835952 - RNA, 19 nt, Artificial Sequence
  Description of Artificial Sequence: Synthetic oligonucleotide
  Antisense strand to SEQ ID NO: 1835951
uuguauagugucgaccugg

SEQ ID NO: 1835953 - RNA, 19 nt, Artificial Sequence
  Description of Artificial Sequence: Synthetic oligonucleotide
  Sense strand starting at position 2281 of SEQ ID NO: 1563841
uccgcaaugcgucucuauu

SEQ ID NO: 1835954 - RNA, 19 nt, Artificial Sequence
  Description of Artificial Sequence: Synthetic oligonucleotide
  Antisense strand to SEQ ID NO: 1835953
aauagagacgcauugcgga

SEQ ID NO: 1835955 - RNA, 19 nt, Artificial Sequence
  Description of Artificial Sequence: Synthetic oligonucleotide
  Sense strand starting at position 2388 of SEQ ID NO: 1563841
cucuaauugcaacaagugu

SEQ ID NO: 1835956 - RNA, 19 nt, Artificial Sequence
  Description of Artificial Sequence: Synthetic oligonucleotide
  Antisense strand to SEQ ID NO: 1835955
acacuuguugcaauuagag

SEQ ID NO: 1835957 - RNA, 19 nt, Artificial Sequence
  Description of Artificial Sequence: Synthetic oligonucleotide
  Sense strand starting at position 2403 of SEQ ID NO: 1563841
guguuagaccucugcugag

SEQ ID NO: 1835958 - RNA, 19 nt, Artificial Sequence
  Description of Artificial Sequence: Synthetic oligonucleotide
  Antisense strand to SEQ ID NO: 1835957
cucagcagaggucuaacac

SEQ ID NO: 1835959 - RNA, 19 nt, Artificial Sequence
  Description of Artificial Sequence: Synthetic oligonucleotide
  Sense strand starting at position 2549 of SEQ ID NO: 1563841
gaaagaacguuaguuucuu

SEQ ID NO: 1835960 - RNA, 19 nt, Artificial Sequence
  Description of Artificial Sequence: Synthetic oligonucleotide
  Antisense strand to SEQ ID NO: 1835959
aagaaacuaacguucuuuc

SEQ ID NO: 1835961 - RNA, 19 nt, Artificial Sequence
  Description of Artificial Sequence: Synthetic oligonucleotide
  Sense strand starting at position 2643 of SEQ ID NO: 1563841
uguacaucacagcaggauu

SEQ ID NO: 1835962 - RNA, 19 nt, Artificial Sequence
  Description of Artificial Sequence: Synthetic oligonucleotide
  Antisense strand to SEQ ID NO: 1835961
aauccugcugugauguaca

SEQ ID NO: 1835963 - RNA, 19 nt, Artificial Sequence
  Description of Artificial Sequence: Synthetic oligonucleotide
  Sense strand starting at position 2747 of SEQ ID NO: 1563841
agauacauugcaugaacua

SEQ ID NO: 1835964 - RNA, 19 nt, Artificial Sequence
  Description of Artificial Sequence: Synthetic oligonucleotide
  Antisense strand to SEQ ID NO: 1835963
uaguucaugcaauguaucu

SEQ ID NO: 1835965 - RNA, 19 nt, Artificial Sequence
  Description of Artificial Sequence: Synthetic oligonucleotide
  Sense strand starting at position 2810 of SEQ ID NO: 1563841
gggucuuccugacuccaaa

SEQ ID NO: 1835966 - RNA, 19 nt, Artificial Sequence
  Description of Artificial Sequence: Synthetic oligonucleotide
  Antisense strand to SEQ ID NO: 1835965
uuuggagucaggaagaccc

SEQ ID NO: 1835967 - RNA, 19 nt, Artificial Sequence
  Description of Artificial Sequence: Synthetic oligonucleotide
  Sense strand starting at position 2922 of SEQ ID NO: 1563841
agcaaaguuuguguucuag

SEQ ID NO: 1835968 - RNA, 19 nt, Artificial Sequence
  Description of Artificial Sequence: Synthetic oligonucleotide
  Antisense strand to SEQ ID NO: 1835967
cuagaacacaaacuuugcu

SEQ ID NO: 1835969 - RNA, 19 nt, Artificial Sequence
  Description of Artificial Sequence: Synthetic oligonucleotide
  Sense strand starting at position 2924 of SEQ ID NO: 1563841
caaaguuuguguucuagga

SEQ ID NO: 1835970 - RNA, 19 nt, Artificial Sequence
  Description of Artificial Sequence: Synthetic oligonucleotide
  Antisense strand to SEQ ID NO: 1835969
uccuagaacacaaacuuug

SEQ ID NO: 1835971 - RNA, 19 nt, Artificial Sequence
  Description of Artificial Sequence: Synthetic oligonucleotide
  Sense strand starting at position 3046 of SEQ ID NO: 1563841
ccacucugugcucagaaca

SEQ ID NO: 1835972 - RNA, 19 nt, Artificial Sequence
  Description of Artificial Sequence: Synthetic oligonucleotide
  Antisense strand to SEQ ID NO: 1835971
uguucugagcacagagugg

SEQ ID NO: 1835973 - RNA, 19 nt, Artificial Sequence
  Description of Artificial Sequence: Synthetic oligonucleotide
  Sense strand starting at position 3073 of SEQ ID NO: 1563841
cuuccuuaucagggauaca

SEQ ID NO: 1835974 - RNA, 19 nt, Artificial Sequence
  Description of Artificial Sequence: Synthetic oligonucleotide
  Antisense strand to SEQ ID NO: 1835973
uguaucccugauaaggaag

SEQ ID NO: 1835975 - RNA, 19 nt, Artificial Sequence
  Description of Artificial Sequence: Synthetic oligonucleotide
  Sense strand starting at position 3140 of SEQ ID NO: 1563841
caaucagaccugugugucu

SEQ ID NO: 1835976 - RNA, 19 nt, Artificial Sequence
  Description of Artificial Sequence: Synthetic oligonucleotide
  Antisense strand to SEQ ID NO: 1835975
agacacacaggucugauug

SEQ ID NO: 1835977 - RNA, 19 nt, Artificial Sequence
  Description of Artificial Sequence: Synthetic oligonucleotide
  Sense strand starting at position 3228 of SEQ ID NO: 1563841
ugggcugggcuucagaauu

SEQ ID NO: 1835978 - RNA, 19 nt, Artificial Sequence
  Description of Artificial Sequence: Synthetic oligonucleotide
  Antisense strand to SEQ ID NO: 1835977
aauucugaagcccagccca

SEQ ID NO: 1835979 - RNA, 19 nt, Artificial Sequence
  Description of Artificial Sequence: Synthetic oligonucleotide
  Sense strand starting at position 3318 of SEQ ID NO: 1563841
cugguuucucaaugugcaa

SEQ ID NO: 1835980 - RNA, 19 nt, Artificial Sequence
  Description of Artificial Sequence: Synthetic oligonucleotide
  Antisense strand to SEQ ID NO: 1835979
uugcacauugagaaaccag

SEQ ID NO: 1835981 - RNA, 19 nt, Artificial Sequence
  Description of Artificial Sequence: Synthetic oligonucleotide
  Sense strand starting at position 3522 of SEQ ID NO: 1563841
augccagaagccugaacau

SEQ ID NO: 1835982 - RNA, 19 nt, Artificial Sequence
  Description of Artificial Sequence: Synthetic oligonucleotide
  Antisense strand to SEQ ID NO: 1835981
auguucaggcuucuggcau

SEQ ID NO: 1835983 - RNA, 19 nt, Artificial Sequence
  Description of Artificial Sequence: Synthetic oligonucleotide
  Sense strand starting at position 3611 of SEQ ID NO: 1563841
ggaugacuuuccucaucug

SEQ ID NO: 1835984 - RNA, 19 nt, Artificial Sequence
  Description of Artificial Sequence: Synthetic oligonucleotide
  Antisense strand to SEQ ID NO: 1835983
cagaugaggaaagucaucc

SEQ ID NO: 1835985 - RNA, 19 nt, Artificial Sequence
  Description of Artificial Sequence: Synthetic oligonucleotide
  Sense strand starting at position 3670 of SEQ ID NO: 1563841
agcacuuccucuguaaagu

SEQ ID NO: 1835986 - RNA, 19 nt, Artificial Sequence
  Description of Artificial Sequence: Synthetic oligonucleotide
  Antisense strand to SEQ ID NO: 1835985
acuuuacagaggaagugcu

SEQ ID NO: 1835987 - RNA, 19 nt, Artificial Sequence
  Description of Artificial Sequence: Synthetic oligonucleotide
  Sense strand starting at position 3671 of SEQ ID NO: 1563841
gcacuuccucuguaaagug

SEQ ID NO: 1835988 - RNA, 19 nt, Artificial Sequence
  Description of Artificial Sequence: Synthetic oligonucleotide
  Antisense strand to SEQ ID NO: 1835987
cacuuuacagaggaagugc

SEQ ID NO: 1835989 - RNA, 19 nt, Artificial Sequence
  Description of Artificial Sequence: Synthetic oligonucleotide
  Sense strand starting at position 3753 of SEQ ID NO: 1563841
guuuccauaucuguaucuu

SEQ ID NO: 1835990 - RNA, 19 nt, Artificial Sequence
  Description of Artificial Sequence: Synthetic oligonucleotide
  Antisense strand to SEQ ID NO: 1835989
aagauacagauauggaaac

SEQ ID NO: 1835991 - RNA, 19 nt, Artificial Sequence
  Description of Artificial Sequence: Synthetic oligonucleotide
  Sense strand starting at position 3762 of SEQ ID NO: 1563841
ucuguaucuucggucauga

SEQ ID NO: 1835992 - RNA, 19 nt, Artificial Sequence
  Description of Artificial Sequence: Synthetic oligonucleotide
  Antisense strand to SEQ ID NO: 1835991
ucaugaccgaagauacaga

SEQ ID NO: 1835993 - RNA, 19 nt, Artificial Sequence
  Description of Artificial Sequence: Synthetic oligonucleotide
  Sense strand starting at position 3764 of SEQ ID NO: 1563841
uguaucuucggucaugacu

SEQ ID NO: 1835994 - RNA, 19 nt, Artificial Sequence
  Description of Artificial Sequence: Synthetic oligonucleotide
  Antisense strand to SEQ ID NO: 1835993
agucaugaccgaagauaca

SEQ ID NO: 1835995 - RNA, 19 nt, Artificial Sequence
  Description of Artificial Sequence: Synthetic oligonucleotide
  Sense strand starting at position 3772 of SEQ ID NO: 1563841
cggucaugacuuggccuau

SEQ ID NO: 1835996 - RNA, 19 nt, Artificial Sequence
  Description of Artificial Sequence: Synthetic oligonucleotide
  Antisense strand to SEQ ID NO: 1835995
auaggccaagucaugaccg

SEQ ID NO: 1835997 - RNA, 19 nt, Artificial Sequence
  Description of Artificial Sequence: Synthetic oligonucleotide
  Sense strand starting at position 3778 of SEQ ID NO: 1563841
ugacuuggccuaugaauuc

SEQ ID NO: 1835998 - RNA, 19 nt, Artificial Sequence
  Description of Artificial Sequence: Synthetic oligonucleotide
  Antisense strand to SEQ ID NO: 1835997
gaauucauaggccaaguca

SEQ ID NO: 1835999 - RNA, 19 nt, Artificial Sequence
  Description of Artificial Sequence: Synthetic oligonucleotide
  Sense strand starting at position 3834 of SEQ ID NO: 1563841
ggauaucucucaguauucu

SEQ ID NO: 1836000 - RNA, 19 nt, Artificial Sequence
  Description of Artificial Sequence: Synthetic oligonucleotide
  Antisense strand to SEQ ID NO: 1835999
agaauacugagagauaucc

SEQ ID NO: 1836001 - RNA, 19 nt, Artificial Sequence
  Description of Artificial Sequence: Synthetic oligonucleotide
  Sense strand starting at position 3911 of SEQ ID NO: 1563841
guguuucuccucuaguuau

SEQ ID NO: 1836002 - RNA, 19 nt, Artificial Sequence
  Description of Artificial Sequence: Synthetic oligonucleotide
  Antisense strand to SEQ ID NO: 1836001
auaacuagaggagaaacac

SEQ ID NO: 1836003 - RNA, 19 nt, Artificial Sequence
  Description of Artificial Sequence: Synthetic oligonucleotide
  Sense strand starting at position 40 of SEQ ID NO: 1563842
cagggaucuuucuaaaugu

SEQ ID NO: 1836004 - RNA, 19 nt, Artificial Sequence
  Description of Artificial Sequence: Synthetic oligonucleotide
  Antisense strand to SEQ ID NO: 1836003
acauuuagaaagaucccug

SEQ ID NO: 1836005 - RNA, 19 nt, Artificial Sequence
  Description of Artificial Sequence: Synthetic oligonucleotide
  Sense strand starting at position 47 of SEQ ID NO: 1563842
cuuucuaaauguuuguaga

SEQ ID NO: 1836006 - RNA, 19 nt, Artificial Sequence
  Description of Artificial Sequence: Synthetic oligonucleotide
  Antisense strand to SEQ ID NO: 1836005
ucuacaaacauuuagaaag

SEQ ID NO: 1836007 - RNA, 19 nt, Artificial Sequence
  Description of Artificial Sequence: Synthetic oligonucleotide
  Sense strand starting at position 49 of SEQ ID NO: 1563842
uucuaaauguuuguagaac

SEQ ID NO: 1836008 - RNA, 19 nt, Artificial Sequence
  Description of Artificial Sequence: Synthetic oligonucleotide
  Antisense strand to SEQ ID NO: 1836007
guucuacaaacauuuagaa

SEQ ID NO: 1836009 - RNA, 19 nt, Artificial Sequence
  Description of Artificial Sequence: Synthetic oligonucleotide
  Sense strand starting at position 50 of SEQ ID NO: 1563842
ucuaaauguuuguagaaca

SEQ ID NO: 1836010 - RNA, 19 nt, Artificial Sequence
  Description of Artificial Sequence: Synthetic oligonucleotide
  Antisense strand to SEQ ID NO: 1836009
uguucuacaaacauuuaga

SEQ ID NO: 1836011 - RNA, 19 nt, Artificial Sequence
  Description of Artificial Sequence: Synthetic oligonucleotide
  Sense strand starting at position 106 of SEQ ID NO: 1563842
ggugacugcagaggucuua

SEQ ID NO: 1836012 - RNA, 19 nt, Artificial Sequence
  Description of Artificial Sequence: Synthetic oligonucleotide
  Antisense strand to SEQ ID NO: 1836011
uaagaccucugcagucacc

SEQ ID NO: 1836013 - RNA, 19 nt, Artificial Sequence
  Description of Artificial Sequence: Synthetic oligonucleotide
  Sense strand starting at position 763 of SEQ ID NO: 1563842
ccuuuccucugagcaagaa

SEQ ID NO: 1836014 - RNA, 19 nt, Artificial Sequence
  Description of Artificial Sequence: Synthetic oligonucleotide
  Antisense strand to SEQ ID NO: 1836013
uucuugcucagaggaaagg

SEQ ID NO: 1836015 - RNA, 19 nt, Artificial Sequence
  Description of Artificial Sequence: Synthetic oligonucleotide
  Sense strand starting at position 775 of SEQ ID NO: 1563842
gcaagaacugauggcagaa

SEQ ID NO: 1836016 - RNA, 19 nt, Artificial Sequence
  Description of Artificial Sequence: Synthetic oligonucleotide
  Antisense strand to SEQ ID NO: 1836015
uucugccaucaguucuugc

SEQ ID NO: 1836017 - RNA, 19 nt, Artificial Sequence
  Description of Artificial Sequence: Synthetic oligonucleotide
  Sense strand starting at position 1043 of SEQ ID NO: 1563842
gggagaaggccugggucaa

SEQ ID NO: 1836018 - RNA, 19 nt, Artificial Sequence
  Description of Artificial Sequence: Synthetic oligonucleotide
  Antisense strand to SEQ ID NO: 1836017
uugacccaggccuucuccc

SEQ ID NO: 1836019 - RNA, 19 nt, Artificial Sequence
  Description of Artificial Sequence: Synthetic oligonucleotide
  Sense strand starting at position 2235 of SEQ ID NO: 1563842
ccgauucucuucucuggau

SEQ ID NO: 1836020 - RNA, 19 nt, Artificial Sequence
  Description of Artificial Sequence: Synthetic oligonucleotide
  Antisense strand to SEQ ID NO: 1836019
auccagagaagagaaucgg

SEQ ID NO: 1836021 - RNA, 19 nt, Artificial Sequence
  Description of Artificial Sequence: Synthetic oligonucleotide
  Sense strand starting at position 2725 of SEQ ID NO: 1563842
ccauguuuaugccacugua

SEQ ID NO: 1836022 - RNA, 19 nt, Artificial Sequence
  Description of Artificial Sequence: Synthetic oligonucleotide
  Antisense strand to SEQ ID NO: 1836021
uacaguggcauaaacaugg

SEQ ID NO: 1836023 - RNA, 19 nt, Artificial Sequence
  Description of Artificial Sequence: Synthetic oligonucleotide
  Sense strand starting at position 2728 of SEQ ID NO: 1563842
uguuuaugccacuguacca

SEQ ID NO: 1836024 - RNA, 19 nt, Artificial Sequence
  Description of Artificial Sequence: Synthetic oligonucleotide
  Antisense strand to SEQ ID NO: 1836023
ugguacaguggcauaaaca

SEQ ID NO: 1836025 - RNA, 19 nt, Artificial Sequence
  Description of Artificial Sequence: Synthetic oligonucleotide
  Sense strand starting at position 2753 of SEQ ID NO: 1563842
gucugaagcucuuccaacu

SEQ ID NO: 1836026 - RNA, 19 nt, Artificial Sequence
  Description of Artificial Sequence: Synthetic oligonucleotide
  Antisense strand to SEQ ID NO: 1836025
aguuggaagagcuucagac

SEQ ID NO: 1836027 - RNA, 19 nt, Artificial Sequence
  Description of Artificial Sequence: Synthetic oligonucleotide
  Sense strand starting at position 2839 of SEQ ID NO: 1563842
aagguaauauguuguucuu

SEQ ID NO: 1836028 - RNA, 19 nt, Artificial Sequence
  Description of Artificial Sequence: Synthetic oligonucleotide
  Antisense strand to SEQ ID NO: 1836027
aagaacaacauauuaccuu

SEQ ID NO: 1836029 - RNA, 19 nt, Artificial Sequence
  Description of Artificial Sequence: Synthetic oligonucleotide
  Sense strand starting at position 3067 of SEQ ID NO: 1563842
acaucuuuccguuagugca

SEQ ID NO: 1836030 - RNA, 19 nt, Artificial Sequence
  Description of Artificial Sequence: Synthetic oligonucleotide
  Antisense strand to SEQ ID NO: 1836029
ugcacuaacggaaagaugu

SEQ ID NO: 1836031 - RNA, 19 nt, Artificial Sequence
  Description of Artificial Sequence: Synthetic oligonucleotide
  Sense strand starting at position 3116 of SEQ ID NO: 1563842
uugcauagaugucccauaa

SEQ ID NO: 1836032 - RNA, 19 nt, Artificial Sequence
  Description of Artificial Sequence: Synthetic oligonucleotide
  Antisense strand to SEQ ID NO: 1836031
uuaugggacaucuaugcaa

SEQ ID NO: 1836033 - RNA, 19 nt, Artificial Sequence
  Description of Artificial Sequence: Synthetic oligonucleotide
  Sense strand starting at position 3307 of SEQ ID NO: 1563842
uccuguacaugucacauau

SEQ ID NO: 1836034 - RNA, 19 nt, Artificial Sequence
  Description of Artificial Sequence: Synthetic oligonucleotide
  Antisense strand to SEQ ID NO: 1836033
auaugugacauguacagga

SEQ ID NO: 1836035 - RNA, 19 nt, Artificial Sequence
  Description of Artificial Sequence: Synthetic oligonucleotide
  Sense strand starting at position 3309 of SEQ ID NO: 1563842
cuguacaugucacauauua

SEQ ID NO: 1836036 - RNA, 19 nt, Artificial Sequence
  Description of Artificial Sequence: Synthetic oligonucleotide
  Antisense strand to SEQ ID NO: 1836035
uaauaugugacauguacag

SEQ ID NO: 1836037 - RNA, 19 nt, Artificial Sequence
  Description of Artificial Sequence: Synthetic oligonucleotide
  Sense strand starting at position 3423 of SEQ ID NO: 1563842
ggauucugcugcuugcuua

SEQ ID NO: 1836038 - RNA, 19 nt, Artificial Sequence
  Description of Artificial Sequence: Synthetic oligonucleotide
  Antisense strand to SEQ ID NO: 1836037
uaagcaagcagcagaaucc

SEQ ID NO: 1836039 - RNA, 19 nt, Artificial Sequence
  Description of Artificial Sequence: Synthetic oligonucleotide
  Sense strand starting at position 3427 of SEQ ID NO: 1563842
ucugcugcuugcuuaaaga

SEQ ID NO: 1836040 - RNA, 19 nt, Artificial Sequence
  Description of Artificial Sequence: Synthetic oligonucleotide
  Antisense strand to SEQ ID NO: 1836039
ucuuuaagcaagcagcaga

SEQ ID NO: 1836041 - RNA, 19 nt, Artificial Sequence
  Description of Artificial Sequence: Synthetic oligonucleotide
  Sense strand starting at position 3496 of SEQ ID NO: 1563842
guggcuuuauuauuuacau

SEQ ID NO: 1836042 - RNA, 19 nt, Artificial Sequence
  Description of Artificial Sequence: Synthetic oligonucleotide
  Antisense strand to SEQ ID NO: 1836041
auguaaauaauaaagccac

SEQ ID NO: 1836043 - RNA, 19 nt, Artificial Sequence
  Description of Artificial Sequence: Synthetic oligonucleotide
  Sense strand starting at position 3624 of SEQ ID NO: 1563842
cccucucugcuuugaaaug

SEQ ID NO: 1836044 - RNA, 19 nt, Artificial Sequence
  Description of Artificial Sequence: Synthetic oligonucleotide
  Antisense strand to SEQ ID NO: 1836043
cauuucaaagcagagaggg

SEQ ID NO: 1836045 - RNA, 19 nt, Artificial Sequence
  Description of Artificial Sequence: Synthetic oligonucleotide
  Sense strand starting at position 3823 of SEQ ID NO: 1563842
aacuguuaguugcagaaau

SEQ ID NO: 1836046 - RNA, 19 nt, Artificial Sequence
  Description of Artificial Sequence: Synthetic oligonucleotide
  Antisense strand to SEQ ID NO: 1836045
auuucugcaacuaacaguu

SEQ ID NO: 1836047 - RNA, 19 nt, Artificial Sequence
  Description of Artificial Sequence: Synthetic oligonucleotide
  Sense strand starting at position 3825 of SEQ ID NO: 1563842
cuguuaguugcagaaauaa

SEQ ID NO: 1836048 - RNA, 19 nt, Artificial Sequence
  Description of Artificial Sequence: Synthetic oligonucleotide
  Antisense strand to SEQ ID NO: 1836047
uuauuucugcaacuaacag

SEQ ID NO: 1836049 - RNA, 19 nt, Artificial Sequence
  Description of Artificial Sequence: Synthetic oligonucleotide
  Sense strand starting at position 3881 of SEQ ID NO: 1563842
ggacacaagucuucugcuu

SEQ ID NO: 1836050 - RNA, 19 nt, Artificial Sequence
  Description of Artificial Sequence: Synthetic oligonucleotide
  Antisense strand to SEQ ID NO: 1836049
aagcagaagacuugugucc

SEQ ID NO: 1836051 - RNA, 19 nt, Artificial Sequence
  Description of Artificial Sequence: Synthetic oligonucleotide
  Sense strand starting at position 3895 of SEQ ID NO: 1563842
ugcuuuauguggucaccuu

SEQ ID NO: 1836052 - RNA, 19 nt, Artificial Sequence
  Description of Artificial Sequence: Synthetic oligonucleotide
  Antisense strand to SEQ ID NO: 1836051
aaggugaccacauaaagca

SEQ ID NO: 1836053 - RNA, 19 nt, Artificial Sequence
  Description of Artificial Sequence: Synthetic oligonucleotide
  Sense strand starting at position 3896 of SEQ ID NO: 1563842
gcuuuauguggucaccuuu

SEQ ID NO: 1836054 - RNA, 19 nt, Artificial Sequence
  Description of Artificial Sequence: Synthetic oligonucleotide
  Antisense strand to SEQ ID NO: 1836053
aaaggugaccacauaaagc

SEQ ID NO: 1836055 - RNA, 19 nt, Artificial Sequence
  Description of Artificial Sequence: Synthetic oligonucleotide
  Sense strand starting at position 3935 of SEQ ID NO: 1563842
augaaucccuguguuccau

SEQ ID NO: 1836056 - RNA, 19 nt, Artificial Sequence
  Description of Artificial Sequence: Synthetic oligonucleotide
  Antisense strand to SEQ ID NO: 1836055
auggaacacagggauucau

SEQ ID NO: 1836057 - RNA, 19 nt, Artificial Sequence
  Description of Artificial Sequence: Synthetic oligonucleotide
  Sense strand starting at position 3939 of SEQ ID NO: 1563842
aucccuguguuccauggau

SEQ ID NO: 1836058 - RNA, 19 nt, Artificial Sequence
  Description of Artificial Sequence: Synthetic oligonucleotide
  Antisense strand to SEQ ID NO: 1836057
auccauggaacacagggau

SEQ ID NO: 1836059 - RNA, 19 nt, Artificial Sequence
  Description of Artificial Sequence: Synthetic oligonucleotide
  Sense strand starting at position 3941 of SEQ ID NO: 1563842
cccuguguuccauggauaa

SEQ ID NO: 1836060 - RNA, 19 nt, Artificial Sequence
  Description of Artificial Sequence: Synthetic oligonucleotide
  Antisense strand to SEQ ID NO: 1836059
uuauccauggaacacaggg

SEQ ID NO: 1836061 - RNA, 19 nt, Artificial Sequence
  Description of Artificial Sequence: Synthetic oligonucleotide
  Sense strand starting at position 24 of SEQ ID NO: 1563843
ccuuuccucugagcaagaa

SEQ ID NO: 1836062 - RNA, 19 nt, Artificial Sequence
  Description of Artificial Sequence: Synthetic oligonucleotide
  Antisense strand to SEQ ID NO: 1836061
uucuugcucagaggaaagg

SEQ ID NO: 1836063 - RNA, 19 nt, Artificial Sequence
  Description of Artificial Sequence: Synthetic oligonucleotide
  Sense strand starting at position 36 of SEQ ID NO: 1563843
gcaagaacugauggcagaa

SEQ ID NO: 1836064 - RNA, 19 nt, Artificial Sequence
  Description of Artificial Sequence: Synthetic oligonucleotide
  Antisense strand to SEQ ID NO: 1836063
uucugccaucaguucuugc

SEQ ID NO: 1836065 - RNA, 19 nt, Artificial Sequence
  Description of Artificial Sequence: Synthetic oligonucleotide
  Sense strand starting at position 304 of SEQ ID NO: 1563843
gggagaaggccugggucaa

SEQ ID NO: 1836066 - RNA, 19 nt, Artificial Sequence
  Description of Artificial Sequence: Synthetic oligonucleotide
  Antisense strand to SEQ ID NO: 1836065
uugacccaggccuucuccc

SEQ ID NO: 1836067 - RNA, 19 nt, Artificial Sequence
  Description of Artificial Sequence: Synthetic oligonucleotide
  Sense strand starting at position 1496 of SEQ ID NO: 1563843
ccgauucucuucucuggau

SEQ ID NO: 1836068 - RNA, 19 nt, Artificial Sequence
  Description of Artificial Sequence: Synthetic oligonucleotide
  Antisense strand to SEQ ID NO: 1836067
auccagagaagagaaucgg

SEQ ID NO: 1836069 - RNA, 19 nt, Artificial Sequence
  Description of Artificial Sequence: Synthetic oligonucleotide
  Sense strand starting at position 1989 of SEQ ID NO: 1563843
uguuuaugccacuguacca

SEQ ID NO: 1836070 - RNA, 19 nt, Artificial Sequence
  Description of Artificial Sequence: Synthetic oligonucleotide
  Antisense strand to SEQ ID NO: 1836069
ugguacaguggcauaaaca

SEQ ID NO: 1836071 - RNA, 19 nt, Artificial Sequence
  Description of Artificial Sequence: Synthetic oligonucleotide
  Sense strand starting at position 2014 of SEQ ID NO: 1563843
gucugaagcucuuccaacu

SEQ ID NO: 1836072 - RNA, 19 nt, Artificial Sequence
  Description of Artificial Sequence: Synthetic oligonucleotide
  Antisense strand to SEQ ID NO: 1836071
aguuggaagagcuucagac

SEQ ID NO: 1836073 - RNA, 19 nt, Artificial Sequence
  Description of Artificial Sequence: Synthetic oligonucleotide
  Sense strand starting at position 2328 of SEQ ID NO: 1563843
acaucuuuccguuagugca

SEQ ID NO: 1836074 - RNA, 19 nt, Artificial Sequence
  Description of Artificial Sequence: Synthetic oligonucleotide
  Antisense strand to SEQ ID NO: 1836073
ugcacuaacggaaagaugu

SEQ ID NO: 1836075 - RNA, 19 nt, Artificial Sequence
  Description of Artificial Sequence: Synthetic oligonucleotide
  Sense strand starting at position 2377 of SEQ ID NO: 1563843
uugcauagaugucccauaa

SEQ ID NO: 1836076 - RNA, 19 nt, Artificial Sequence
  Description of Artificial Sequence: Synthetic oligonucleotide
  Antisense strand to SEQ ID NO: 1836075
uuaugggacaucuaugcaa

SEQ ID NO: 1836077 - RNA, 19 nt, Artificial Sequence
  Description of Artificial Sequence: Synthetic oligonucleotide
  Sense strand starting at position 2757 of SEQ ID NO: 1563843
guggcuuuauuauuuacau

SEQ ID NO: 1836078 - RNA, 19 nt, Artificial Sequence
  Description of Artificial Sequence: Synthetic oligonucleotide
  Antisense strand to SEQ ID NO: 1836077
auguaaauaauaaagccac

SEQ ID NO: 1836079 - RNA, 19 nt, Artificial Sequence
  Description of Artificial Sequence: Synthetic oligonucleotide
  Sense strand starting at position 2885 of SEQ ID NO: 1563843
cccucucugcuuugaaaug

SEQ ID NO: 1836080 - RNA, 19 nt, Artificial Sequence
  Description of Artificial Sequence: Synthetic oligonucleotide
  Antisense strand to SEQ ID NO: 1836079
cauuucaaagcagagaggg

SEQ ID NO: 1836081 - RNA, 19 nt, Artificial Sequence
  Description of Artificial Sequence: Synthetic oligonucleotide
  Sense strand starting at position 3086 of SEQ ID NO: 1563843
cuguuaguugcagaaauaa

SEQ ID NO: 1836082 - RNA, 19 nt, Artificial Sequence
  Description of Artificial Sequence: Synthetic oligonucleotide
  Antisense strand to SEQ ID NO: 1836081
uuauuucugcaacuaacag

SEQ ID NO: 1836083 - RNA, 19 nt, Artificial Sequence
  Description of Artificial Sequence: Synthetic oligonucleotide
  Sense strand starting at position 3142 of SEQ ID NO: 1563843
ggacacaagucuucugcuu

SEQ ID NO: 1836084 - RNA, 19 nt, Artificial Sequence
  Description of Artificial Sequence: Synthetic oligonucleotide
  Antisense strand to SEQ ID NO: 1836083
aagcagaagacuugugucc

SEQ ID NO: 1836085 - RNA, 19 nt, Artificial Sequence
  Description of Artificial Sequence: Synthetic oligonucleotide
  Sense strand starting at position 3157 of SEQ ID NO: 1563843
gcuuuauguggucaccuuu

SEQ ID NO: 1836086 - RNA, 19 nt, Artificial Sequence
  Description of Artificial Sequence: Synthetic oligonucleotide
  Antisense strand to SEQ ID NO: 1836085
aaaggugaccacauaaagc

SEQ ID NO: 1836087 - RNA, 19 nt, Artificial Sequence
  Description of Artificial Sequence: Synthetic oligonucleotide
  Sense strand starting at position 3196 of SEQ ID NO: 1563843
augaaucccuguguuccau

SEQ ID NO: 1836088 - RNA, 19 nt, Artificial Sequence
  Description of Artificial Sequence: Synthetic oligonucleotide
  Antisense strand to SEQ ID NO: 1836087
auggaacacagggauucau

SEQ ID NO: 1836089 - RNA, 19 nt, Artificial Sequence
  Description of Artificial Sequence: Synthetic oligonucleotide
  Sense strand starting at position 3202 of SEQ ID NO: 1563843
cccuguguuccauggauaa

SEQ ID NO: 1836090 - RNA, 19 nt, Artificial Sequence
  Description of Artificial Sequence: Synthetic oligonucleotide
  Antisense strand to SEQ ID NO: 1836089
uuauccauggaacacaggg

SEQ ID NO: 1836091 - RNA, 19 nt, Artificial Sequence
  Description of Artificial Sequence: Synthetic oligonucleotide
  Sense strand starting at position 3306 of SEQ ID NO: 1563843
uuucuccaagugugugaua

SEQ ID NO: 1836092 - RNA, 19 nt, Artificial Sequence
  Description of Artificial Sequence: Synthetic oligonucleotide
  Antisense strand to SEQ ID NO: 1836091
uaucacacacuuggagaaa

SEQ ID NO: 1836093 - RNA, 19 nt, Artificial Sequence
  Description of Artificial Sequence: Synthetic oligonucleotide
  Sense strand starting at position 3308 of SEQ ID NO: 1563843
ucuccaagugugugauauc

SEQ ID NO: 1836094 - RNA, 19 nt, Artificial Sequence
  Description of Artificial Sequence: Synthetic oligonucleotide
  Antisense strand to SEQ ID NO: 1836093
gauaucacacacuuggaga

SEQ ID NO: 1836095 - RNA, 19 nt, Artificial Sequence
  Description of Artificial Sequence: Synthetic oligonucleotide
  Sense strand starting at position 3424 of SEQ ID NO: 1563843
cuuccaaaucauggcaagu

SEQ ID NO: 1836096 - RNA, 19 nt, Artificial Sequence
  Description of Artificial Sequence: Synthetic oligonucleotide
  Antisense strand to SEQ ID NO: 1836095
acuugccaugauuuggaag

SEQ ID NO: 1836097 - RNA, 19 nt, Artificial Sequence
  Description of Artificial Sequence: Synthetic oligonucleotide
  Sense strand starting at position 3462 of SEQ ID NO: 1563843
agaugaggacuuugguguu

SEQ ID NO: 1836098 - RNA, 19 nt, Artificial Sequence
  Description of Artificial Sequence: Synthetic oligonucleotide
  Antisense strand to SEQ ID NO: 1836097
aacaccaaaguccucaucu

SEQ ID NO: 1836099 - RNA, 19 nt, Artificial Sequence
  Description of Artificial Sequence: Synthetic oligonucleotide
  Sense strand starting at position 3504 of SEQ ID NO: 1563843
acuaaagaauucuaggcaa

SEQ ID NO: 1836100 - RNA, 19 nt, Artificial Sequence
  Description of Artificial Sequence: Synthetic oligonucleotide
  Antisense strand to SEQ ID NO: 1836099
uugccuagaauucuuuagu

SEQ ID NO: 1836101 - RNA, 19 nt, Artificial Sequence
  Description of Artificial Sequence: Synthetic oligonucleotide
  Sense strand starting at position 3563 of SEQ ID NO: 1563843
ugcuauauggaguguggau

SEQ ID NO: 1836102 - RNA, 19 nt, Artificial Sequence
  Description of Artificial Sequence: Synthetic oligonucleotide
  Antisense strand to SEQ ID NO: 1836101
auccacacuccauauagca

SEQ ID NO: 1836103 - RNA, 19 nt, Artificial Sequence
  Description of Artificial Sequence: Synthetic oligonucleotide
  Sense strand starting at position 3565 of SEQ ID NO: 1563843
cuauauggaguguggauua

SEQ ID NO: 1836104 - RNA, 19 nt, Artificial Sequence
  Description of Artificial Sequence: Synthetic oligonucleotide
  Antisense strand to SEQ ID NO: 1836103
uaauccacacuccauauag

SEQ ID NO: 1836105 - RNA, 19 nt, Artificial Sequence
  Description of Artificial Sequence: Synthetic oligonucleotide
  Sense strand starting at position 3583 of SEQ ID NO: 1563843
agguguugucuuggaaaca

SEQ ID NO: 1836106 - RNA, 19 nt, Artificial Sequence
  Description of Artificial Sequence: Synthetic oligonucleotide
  Antisense strand to SEQ ID NO: 1836105
uguuuccaagacaacaccu

SEQ ID NO: 1836107 - RNA, 19 nt, Artificial Sequence
  Description of Artificial Sequence: Synthetic oligonucleotide
  Sense strand starting at position 3620 of SEQ ID NO: 1563843
uuuguagucaucuagguaa

SEQ ID NO: 1836108 - RNA, 19 nt, Artificial Sequence
  Description of Artificial Sequence: Synthetic oligonucleotide
  Antisense strand to SEQ ID NO: 1836107
uuaccuagaugacuacaaa

SEQ ID NO: 1836109 - RNA, 19 nt, Artificial Sequence
  Description of Artificial Sequence: Synthetic oligonucleotide
  Sense strand starting at position 3623 of SEQ ID NO: 1563843
guagucaucuagguaagca

SEQ ID NO: 1836110 - RNA, 19 nt, Artificial Sequence
  Description of Artificial Sequence: Synthetic oligonucleotide
  Antisense strand to SEQ ID NO: 1836109
ugcuuaccuagaugacuac

SEQ ID NO: 1836111 - RNA, 19 nt, Artificial Sequence
  Description of Artificial Sequence: Synthetic oligonucleotide
  Sense strand starting at position 3631 of SEQ ID NO: 1563843
cuagguaagcaaugauugu

SEQ ID NO: 1836112 - RNA, 19 nt, Artificial Sequence
  Description of Artificial Sequence: Synthetic oligonucleotide
  Antisense strand to SEQ ID NO: 1836111
acaaucauugcuuaccuag

SEQ ID NO: 1836113 - RNA, 19 nt, Artificial Sequence
  Description of Artificial Sequence: Synthetic oligonucleotide
  Sense strand starting at position 3644 of SEQ ID NO: 1563843
gauugugcuuuggccuaga

SEQ ID NO: 1836114 - RNA, 19 nt, Artificial Sequence
  Description of Artificial Sequence: Synthetic oligonucleotide
  Antisense strand to SEQ ID NO: 1836113
ucuaggccaaagcacaauc

SEQ ID NO: 1836115 - RNA, 19 nt, Artificial Sequence
  Description of Artificial Sequence: Synthetic oligonucleotide
  Sense strand starting at position 3681 of SEQ ID NO: 1563843
aagugauugaaucgaggag

SEQ ID NO: 1836116 - RNA, 19 nt, Artificial Sequence
  Description of Artificial Sequence: Synthetic oligonucleotide
  Antisense strand to SEQ ID NO: 1836115
cuccucgauucaaucacuu

SEQ ID NO: 1836117 - RNA, 19 nt, Artificial Sequence
  Description of Artificial Sequence: Synthetic oligonucleotide
  Sense strand starting at position 3683 of SEQ ID NO: 1563843
gugauugaaucgaggagau

SEQ ID NO: 1836118 - RNA, 19 nt, Artificial Sequence
  Description of Artificial Sequence: Synthetic oligonucleotide
  Antisense strand to SEQ ID NO: 1836117
aucuccucgauucaaucac

SEQ ID NO: 1836119 - RNA, 19 nt, Artificial Sequence
  Description of Artificial Sequence: Synthetic oligonucleotide
  Sense strand starting at position 3717 of SEQ ID NO: 1563843
aguaacuggacuugaguaa

SEQ ID NO: 1836120 - RNA, 19 nt, Artificial Sequence
  Description of Artificial Sequence: Synthetic oligonucleotide
  Antisense strand to SEQ ID NO: 1836119
uuacucaaguccaguuacu

SEQ ID NO: 1836121 - RNA, 19 nt, Artificial Sequence
  Description of Artificial Sequence: Synthetic oligonucleotide
  Sense strand starting at position 3724 of SEQ ID NO: 1563843
ggacuugaguaacuggauu

SEQ ID NO: 1836122 - RNA, 19 nt, Artificial Sequence
  Description of Artificial Sequence: Synthetic oligonucleotide
  Antisense strand to SEQ ID NO: 1836121
aauccaguuacucaagucc

SEQ ID NO: 1836123 - RNA, 19 nt, Artificial Sequence
  Description of Artificial Sequence: Synthetic oligonucleotide
  Sense strand starting at position 3726 of SEQ ID NO: 1563843
acuugaguaacuggauugu

SEQ ID NO: 1836124 - RNA, 19 nt, Artificial Sequence
  Description of Artificial Sequence: Synthetic oligonucleotide
  Antisense strand to SEQ ID NO: 1836123
acaauccaguuacucaagu

SEQ ID NO: 1836125 - RNA, 19 nt, Artificial Sequence
  Description of Artificial Sequence: Synthetic oligonucleotide
  Sense strand starting at position 3730 of SEQ ID NO: 1563843
gaguaacuggauugugaag

SEQ ID NO: 1836126 - RNA, 19 nt, Artificial Sequence
  Description of Artificial Sequence: Synthetic oligonucleotide
  Antisense strand to SEQ ID NO: 1836125
cuucacaauccaguuacuc

SEQ ID NO: 1836127 - RNA, 19 nt, Artificial Sequence
  Description of Artificial Sequence: Synthetic oligonucleotide
  Sense strand starting at position 3779 of SEQ ID NO: 1563843
ggaacucuuggcgaucuga

SEQ ID NO: 1836128 - RNA, 19 nt, Artificial Sequence
  Description of Artificial Sequence: Synthetic oligonucleotide
  Antisense strand to SEQ ID NO: 1836127
ucagaucgccaagaguucc

SEQ ID NO: 1836129 - RNA, 19 nt, Artificial Sequence
  Description of Artificial Sequence: Synthetic oligonucleotide
  Sense strand starting at position 3789 of SEQ ID NO: 1563843
gcgaucugauuugagagau

SEQ ID NO: 1836130 - RNA, 19 nt, Artificial Sequence
  Description of Artificial Sequence: Synthetic oligonucleotide
  Antisense strand to SEQ ID NO: 1836129
aucucucaaaucagaucgc

SEQ ID NO: 1836131 - RNA, 19 nt, Artificial Sequence
  Description of Artificial Sequence: Synthetic oligonucleotide
  Sense strand starting at position 3799 of SEQ ID NO: 1563843
uugagagauugugugaaug

SEQ ID NO: 1836132 - RNA, 19 nt, Artificial Sequence
  Description of Artificial Sequence: Synthetic oligonucleotide
  Antisense strand to SEQ ID NO: 1836131
cauucacacaaucucucaa

SEQ ID NO: 1836133 - RNA, 19 nt, Artificial Sequence
  Description of Artificial Sequence: Synthetic oligonucleotide
  Sense strand starting at position 3910 of SEQ ID NO: 1563843
guggcauguccagguggaa

SEQ ID NO: 1836134 - RNA, 19 nt, Artificial Sequence
  Description of Artificial Sequence: Synthetic oligonucleotide
  Antisense strand to SEQ ID NO: 1836133
uuccaccuggacaugccac

SEQ ID NO: 1836135 - RNA, 19 nt, Artificial Sequence
  Description of Artificial Sequence: Synthetic oligonucleotide
  Sense strand starting at position 3937 of SEQ ID NO: 1563843
caggcaguugaauauacau

SEQ ID NO: 1836136 - RNA, 19 nt, Artificial Sequence
  Description of Artificial Sequence: Synthetic oligonucleotide
  Antisense strand to SEQ ID NO: 1836135
auguauauucaacugccug

SEQ ID NO: 1836137 - RNA, 19 nt, Artificial Sequence
  Description of Artificial Sequence: Synthetic oligonucleotide
  Sense strand starting at position 3962 of SEQ ID NO: 1563843
agcucagagaaguggucua

SEQ ID NO: 1836138 - RNA, 19 nt, Artificial Sequence
  Description of Artificial Sequence: Synthetic oligonucleotide
  Antisense strand to SEQ ID NO: 1836137
uagaccacuucucugagcu

SEQ ID NO: 1836139 - RNA, 19 nt, Artificial Sequence
  Description of Artificial Sequence: Synthetic oligonucleotide
  Sense strand starting at position 3978 of SEQ ID NO: 1563843
cuaggcugagguuauagau

SEQ ID NO: 1836140 - RNA, 19 nt, Artificial Sequence
  Description of Artificial Sequence: Synthetic oligonucleotide
  Antisense strand to SEQ ID NO: 1836139
aucuauaaccucagccuag

SEQ ID NO: 1836141 - RNA, 19 nt, Artificial Sequence
  Description of Artificial Sequence: Synthetic oligonucleotide
  Sense strand starting at position 302 of SEQ ID NO: 1563844
cuaucucuuccaggaagca

SEQ ID NO: 1836142 - RNA, 19 nt, Artificial Sequence
  Description of Artificial Sequence: Synthetic oligonucleotide
  Antisense strand to SEQ ID NO: 1836141
ugcuuccuggaagagauag

SEQ ID NO: 1836143 - RNA, 19 nt, Artificial Sequence
  Description of Artificial Sequence: Synthetic oligonucleotide
  Sense strand starting at position 339 of SEQ ID NO: 1563844
guaguaacagccugacuca

SEQ ID NO: 1836144 - RNA, 19 nt, Artificial Sequence
  Description of Artificial Sequence: Synthetic oligonucleotide
  Antisense strand to SEQ ID NO: 1836143
ugagucaggcuguuacuac

SEQ ID NO: 1836145 - RNA, 19 nt, Artificial Sequence
  Description of Artificial Sequence: Synthetic oligonucleotide
  Sense strand starting at position 342 of SEQ ID NO: 1563844
guaacagccugacucaaua

SEQ ID NO: 1836146 - RNA, 19 nt, Artificial Sequence
  Description of Artificial Sequence: Synthetic oligonucleotide
  Antisense strand to SEQ ID NO: 1836145
uauugagucaggcuguuac

SEQ ID NO: 1836147 - RNA, 19 nt, Artificial Sequence
  Description of Artificial Sequence: Synthetic oligonucleotide
  Sense strand starting at position 360 of SEQ ID NO: 1563844
agauguuggccaugcugaa

SEQ ID NO: 1836148 - RNA, 19 nt, Artificial Sequence
  Description of Artificial Sequence: Synthetic oligonucleotide
  Antisense strand to SEQ ID NO: 1836147
uucagcauggccaacaucu

SEQ ID NO: 1836149 - RNA, 19 nt, Artificial Sequence
  Description of Artificial Sequence: Synthetic oligonucleotide
  Sense strand starting at position 383 of SEQ ID NO: 1563844
ggauuuguuucucacugac

SEQ ID NO: 1836150 - RNA, 19 nt, Artificial Sequence
  Description of Artificial Sequence: Synthetic oligonucleotide
  Antisense strand to SEQ ID NO: 1836149
gucagugagaaacaaaucc

SEQ ID NO: 1836151 - RNA, 19 nt, Artificial Sequence
  Description of Artificial Sequence: Synthetic oligonucleotide
  Sense strand starting at position 459 of SEQ ID NO: 1563844
ggcugagucuucuucucuu

SEQ ID NO: 1836152 - RNA, 19 nt, Artificial Sequence
  Description of Artificial Sequence: Synthetic oligonucleotide
  Antisense strand to SEQ ID NO: 1836151
aagagaagaagacucagcc

SEQ ID NO: 1836153 - RNA, 19 nt, Artificial Sequence
  Description of Artificial Sequence: Synthetic oligonucleotide
  Sense strand starting at position 595 of SEQ ID NO: 1563844
agauaaccugcauaaaugu

SEQ ID NO: 1836154 - RNA, 19 nt, Artificial Sequence
  Description of Artificial Sequence: Synthetic oligonucleotide
  Antisense strand to SEQ ID NO: 1836153
acauuuaugcagguuaucu

SEQ ID NO: 1836155 - RNA, 19 nt, Artificial Sequence
  Description of Artificial Sequence: Synthetic oligonucleotide
  Sense strand starting at position 604 of SEQ ID NO: 1563844
gcauaaaugugcuuagcuc

SEQ ID NO: 1836156 - RNA, 19 nt, Artificial Sequence
  Description of Artificial Sequence: Synthetic oligonucleotide
  Antisense strand to SEQ ID NO: 1836155
gagcuaagcacauuuaugc

SEQ ID NO: 1836157 - RNA, 19 nt, Artificial Sequence
  Description of Artificial Sequence: Synthetic oligonucleotide
  Sense strand starting at position 637 of SEQ ID NO: 1563844
ggcagcuacuauguaaaca

SEQ ID NO: 1836158 - RNA, 19 nt, Artificial Sequence
  Description of Artificial Sequence: Synthetic oligonucleotide
  Antisense strand to SEQ ID NO: 1836157
uguuuacauaguagcugcc

SEQ ID NO: 1836159 - RNA, 19 nt, Artificial Sequence
  Description of Artificial Sequence: Synthetic oligonucleotide
  Sense strand starting at position 693 of SEQ ID NO: 1563844
ucugcaagcucucugaaga

SEQ ID NO: 1836160 - RNA, 19 nt, Artificial Sequence
  Description of Artificial Sequence: Synthetic oligonucleotide
  Antisense strand to SEQ ID NO: 1836159
ucuucagagagcuugcaga

SEQ ID NO: 1836161 - RNA, 19 nt, Artificial Sequence
  Description of Artificial Sequence: Synthetic oligonucleotide
  Sense strand starting at position 694 of SEQ ID NO: 1563844
cugcaagcucucugaagac

SEQ ID NO: 1836162 - RNA, 19 nt, Artificial Sequence
  Description of Artificial Sequence: Synthetic oligonucleotide
  Antisense strand to SEQ ID NO: 1836161
gucuucagagagcuugcag

SEQ ID NO: 1836163 - RNA, 19 nt, Artificial Sequence
  Description of Artificial Sequence: Synthetic oligonucleotide
  Sense strand starting at position 762 of SEQ ID NO: 1563844
cagggaucuuucuaaaugu

SEQ ID NO: 1836164 - RNA, 19 nt, Artificial Sequence
  Description of Artificial Sequence: Synthetic oligonucleotide
  Antisense strand to SEQ ID NO: 1836163
acauuuagaaagaucccug

SEQ ID NO: 1836165 - RNA, 19 nt, Artificial Sequence
  Description of Artificial Sequence: Synthetic oligonucleotide
  Sense strand starting at position 769 of SEQ ID NO: 1563844
cuuucuaaauguuuguaga

SEQ ID NO: 1836166 - RNA, 19 nt, Artificial Sequence
  Description of Artificial Sequence: Synthetic oligonucleotide
  Antisense strand to SEQ ID NO: 1836165
ucuacaaacauuuagaaag

SEQ ID NO: 1836167 - RNA, 19 nt, Artificial Sequence
  Description of Artificial Sequence: Synthetic oligonucleotide
  Sense strand starting at position 771 of SEQ ID NO: 1563844
uucuaaauguuuguagaac

SEQ ID NO: 1836168 - RNA, 19 nt, Artificial Sequence
  Description of Artificial Sequence: Synthetic oligonucleotide
  Antisense strand to SEQ ID NO: 1836167
guucuacaaacauuuagaa

SEQ ID NO: 1836169 - RNA, 19 nt, Artificial Sequence
  Description of Artificial Sequence: Synthetic oligonucleotide
  Sense strand starting at position 772 of SEQ ID NO: 1563844
ucuaaauguuuguagaaca

SEQ ID NO: 1836170 - RNA, 19 nt, Artificial Sequence
  Description of Artificial Sequence: Synthetic oligonucleotide
  Antisense strand to SEQ ID NO: 1836169
uguucuacaaacauuuaga

SEQ ID NO: 1836171 - RNA, 19 nt, Artificial Sequence
  Description of Artificial Sequence: Synthetic oligonucleotide
  Sense strand starting at position 828 of SEQ ID NO: 1563844
ggugacugcagaggucuua

SEQ ID NO: 1836172 - RNA, 19 nt, Artificial Sequence
  Description of Artificial Sequence: Synthetic oligonucleotide
  Antisense strand to SEQ ID NO: 1836171
uaagaccucugcagucacc

SEQ ID NO: 1836173 - RNA, 19 nt, Artificial Sequence
  Description of Artificial Sequence: Synthetic oligonucleotide
  Sense strand starting at position 1485 of SEQ ID NO: 1563844
ccuuuccucugagcaagaa

SEQ ID NO: 1836174 - RNA, 19 nt, Artificial Sequence
  Description of Artificial Sequence: Synthetic oligonucleotide
  Antisense strand to SEQ ID NO: 1836173
uucuugcucagaggaaagg

SEQ ID NO: 1836175 - RNA, 19 nt, Artificial Sequence
  Description of Artificial Sequence: Synthetic oligonucleotide
  Sense strand starting at position 1497 of SEQ ID NO: 1563844
gcaagaacugauggcagaa

SEQ ID NO: 1836176 - RNA, 19 nt, Artificial Sequence
  Description of Artificial Sequence: Synthetic oligonucleotide
  Antisense strand to SEQ ID NO: 1836175
uucugccaucaguucuugc

SEQ ID NO: 1836177 - RNA, 19 nt, Artificial Sequence
  Description of Artificial Sequence: Synthetic oligonucleotide
  Sense strand starting at position 1765 of SEQ ID NO: 1563844
gggagaaggccugggucaa

SEQ ID NO: 1836178 - RNA, 19 nt, Artificial Sequence
  Description of Artificial Sequence: Synthetic oligonucleotide
  Antisense strand to SEQ ID NO: 1836177
uugacccaggccuucuccc

SEQ ID NO: 1836179 - RNA, 19 nt, Artificial Sequence
  Description of Artificial Sequence: Synthetic oligonucleotide
  Sense strand starting at position 2957 of SEQ ID NO: 1563844
ccgauucucuucucuggau

SEQ ID NO: 1836180 - RNA, 19 nt, Artificial Sequence
  Description of Artificial Sequence: Synthetic oligonucleotide
  Antisense strand to SEQ ID NO: 1836179
auccagagaagagaaucgg

SEQ ID NO: 1836181 - RNA, 19 nt, Artificial Sequence
  Description of Artificial Sequence: Synthetic oligonucleotide
  Sense strand starting at position 3447 of SEQ ID NO: 1563844
ccauguuuaugccacugua

SEQ ID NO: 1836182 - RNA, 19 nt, Artificial Sequence
  Description of Artificial Sequence: Synthetic oligonucleotide
  Antisense strand to SEQ ID NO: 1836181
uacaguggcauaaacaugg

SEQ ID NO: 1836183 - RNA, 19 nt, Artificial Sequence
  Description of Artificial Sequence: Synthetic oligonucleotide
  Sense strand starting at position 3450 of SEQ ID NO: 1563844
uguuuaugccacuguacca

SEQ ID NO: 1836184 - RNA, 19 nt, Artificial Sequence
  Description of Artificial Sequence: Synthetic oligonucleotide
  Antisense strand to SEQ ID NO: 1836183
ugguacaguggcauaaaca

SEQ ID NO: 1836185 - RNA, 19 nt, Artificial Sequence
  Description of Artificial Sequence: Synthetic oligonucleotide
  Sense strand starting at position 3475 of SEQ ID NO: 1563844
gucugaagcucuuccaacu

SEQ ID NO: 1836186 - RNA, 19 nt, Artificial Sequence
  Description of Artificial Sequence: Synthetic oligonucleotide
  Antisense strand to SEQ ID NO: 1836185
aguuggaagagcuucagac

SEQ ID NO: 1836187 - RNA, 19 nt, Artificial Sequence
  Description of Artificial Sequence: Synthetic oligonucleotide
  Sense strand starting at position 3561 of SEQ ID NO: 1563844
aagguaauauguuguucuu

SEQ ID NO: 1836188 - RNA, 19 nt, Artificial Sequence
  Description of Artificial Sequence: Synthetic oligonucleotide
  Antisense strand to SEQ ID NO: 1836187
aagaacaacauauuaccuu

SEQ ID NO: 1836189 - RNA, 19 nt, Artificial Sequence
  Description of Artificial Sequence: Synthetic oligonucleotide
  Sense strand starting at position 3789 of SEQ ID NO: 1563844
acaucuuuccguuagugca

SEQ ID NO: 1836190 - RNA, 19 nt, Artificial Sequence
  Description of Artificial Sequence: Synthetic oligonucleotide
  Antisense strand to SEQ ID NO: 1836189
ugcacuaacggaaagaugu

SEQ ID NO: 1836191 - RNA, 19 nt, Artificial Sequence
  Description of Artificial Sequence: Synthetic oligonucleotide
  Sense strand starting at position 3838 of SEQ ID NO: 1563844
uugcauagaugucccauaa

SEQ ID NO: 1836192 - RNA, 19 nt, Artificial Sequence
  Description of Artificial Sequence: Synthetic oligonucleotide
  Antisense strand to SEQ ID NO: 1836191
uuaugggacaucuaugcaa

SEQ ID NO: 1836193 - RNA, 19 nt, Artificial Sequence
  Description of Artificial Sequence: Synthetic oligonucleotide
  Sense strand starting at position 102 of SEQ ID NO: 1563845
ucuuacuggugacuaacau

SEQ ID NO: 1836194 - RNA, 19 nt, Artificial Sequence
  Description of Artificial Sequence: Synthetic oligonucleotide
  Antisense strand to SEQ ID NO: 1836193
auguuagucaccaguaaga

SEQ ID NO: 1836195 - RNA, 19 nt, Artificial Sequence
  Description of Artificial Sequence: Synthetic oligonucleotide
  Sense strand starting at position 121 of SEQ ID NO: 1563845
cugggaggucugcggagaa

SEQ ID NO: 1836196 - RNA, 19 nt, Artificial Sequence
  Description of Artificial Sequence: Synthetic oligonucleotide
  Antisense strand to SEQ ID NO: 1836195
uucuccgcagaccucccag

SEQ ID NO: 1836197 - RNA, 19 nt, Artificial Sequence
  Description of Artificial Sequence: Synthetic oligonucleotide
  Sense strand starting at position 194 of SEQ ID NO: 1563845
uggguauccucuccugaga

SEQ ID NO: 1836198 - RNA, 19 nt, Artificial Sequence
  Description of Artificial Sequence: Synthetic oligonucleotide
  Antisense strand to SEQ ID NO: 1836197
ucucaggagaggauaccca

SEQ ID NO: 1836199 - RNA, 19 nt, Artificial Sequence
  Description of Artificial Sequence: Synthetic oligonucleotide
  Sense strand starting at position 467 of SEQ ID NO: 1563845
cgacgacauacuuguguua

SEQ ID NO: 1836200 - RNA, 19 nt, Artificial Sequence
  Description of Artificial Sequence: Synthetic oligonucleotide
  Antisense strand to SEQ ID NO: 1836199
uaacacaaguaugucgucg

SEQ ID NO: 1836201 - RNA, 19 nt, Artificial Sequence
  Description of Artificial Sequence: Synthetic oligonucleotide
  Sense strand starting at position 591 of SEQ ID NO: 1563845
ggcaguccuuucccacaca

SEQ ID NO: 1836202 - RNA, 19 nt, Artificial Sequence
  Description of Artificial Sequence: Synthetic oligonucleotide
  Antisense strand to SEQ ID NO: 1836201
ugugugggaaaggacugcc

SEQ ID NO: 1836203 - RNA, 19 nt, Artificial Sequence
  Description of Artificial Sequence: Synthetic oligonucleotide
  Sense strand starting at position 682 of SEQ ID NO: 1563845
gggccucaccgauaagaug

SEQ ID NO: 1836204 - RNA, 19 nt, Artificial Sequence
  Description of Artificial Sequence: Synthetic oligonucleotide
  Antisense strand to SEQ ID NO: 1836203
caucuuaucggugaggccc

SEQ ID NO: 1836205 - RNA, 19 nt, Artificial Sequence
  Description of Artificial Sequence: Synthetic oligonucleotide
  Sense strand starting at position 720 of SEQ ID NO: 1563845
uuccgaaggcucugaggau

SEQ ID NO: 1836206 - RNA, 19 nt, Artificial Sequence
  Description of Artificial Sequence: Synthetic oligonucleotide
  Antisense strand to SEQ ID NO: 1836205
auccucagagccuucggaa

SEQ ID NO: 1836207 - RNA, 19 nt, Artificial Sequence
  Description of Artificial Sequence: Synthetic oligonucleotide
  Sense strand starting at position 1007 of SEQ ID NO: 1563845
gggcgacaaucaucagguu

SEQ ID NO: 1836208 - RNA, 19 nt, Artificial Sequence
  Description of Artificial Sequence: Synthetic oligonucleotide
  Antisense strand to SEQ ID NO: 1836207
aaccugaugauugucgccc

SEQ ID NO: 1836209 - RNA, 19 nt, Artificial Sequence
  Description of Artificial Sequence: Synthetic oligonucleotide
  Sense strand starting at position 1008 of SEQ ID NO: 1563845
ggcgacaaucaucagguua

SEQ ID NO: 1836210 - RNA, 19 nt, Artificial Sequence
  Description of Artificial Sequence: Synthetic oligonucleotide
  Antisense strand to SEQ ID NO: 1836209
uaaccugaugauugucgcc

SEQ ID NO: 1836211 - RNA, 19 nt, Artificial Sequence
  Description of Artificial Sequence: Synthetic oligonucleotide
  Sense strand starting at position 1019 of SEQ ID NO: 1563845
ucagguuacuaggcaauau

SEQ ID NO: 1836212 - RNA, 19 nt, Artificial Sequence
  Description of Artificial Sequence: Synthetic oligonucleotide
  Antisense strand to SEQ ID NO: 1836211
auauugccuaguaaccuga

SEQ ID NO: 1836213 - RNA, 19 nt, Artificial Sequence
  Description of Artificial Sequence: Synthetic oligonucleotide
  Sense strand starting at position 1282 of SEQ ID NO: 1563845
aacaaaggguuuggauuua

SEQ ID NO: 1836214 - RNA, 19 nt, Artificial Sequence
  Description of Artificial Sequence: Synthetic oligonucleotide
  Antisense strand to SEQ ID NO: 1836213
uaaauccaaacccuuuguu

SEQ ID NO: 1836215 - RNA, 19 nt, Artificial Sequence
  Description of Artificial Sequence: Synthetic oligonucleotide
  Sense strand starting at position 1555 of SEQ ID NO: 1563845
ggucagcucgguucgagua

SEQ ID NO: 1836216 - RNA, 19 nt, Artificial Sequence
  Description of Artificial Sequence: Synthetic oligonucleotide
  Antisense strand to SEQ ID NO: 1836215
uacucgaaccgagcugacc

SEQ ID NO: 1836217 - RNA, 19 nt, Artificial Sequence
  Description of Artificial Sequence: Synthetic oligonucleotide
  Sense strand starting at position 1563 of SEQ ID NO: 1563845
cgguucgaguaaucuagga

SEQ ID NO: 1836218 - RNA, 19 nt, Artificial Sequence
  Description of Artificial Sequence: Synthetic oligonucleotide
  Antisense strand to SEQ ID NO: 1836217
uccuagauuacucgaaccg

SEQ ID NO: 1836219 - RNA, 19 nt, Artificial Sequence
  Description of Artificial Sequence: Synthetic oligonucleotide
  Sense strand starting at position 1565 of SEQ ID NO: 1563845
guucgaguaaucuaggagu

SEQ ID NO: 1836220 - RNA, 19 nt, Artificial Sequence
  Description of Artificial Sequence: Synthetic oligonucleotide
  Antisense strand to SEQ ID NO: 1836219
acuccuagauuacucgaac

SEQ ID NO: 1836221 - RNA, 19 nt, Artificial Sequence
  Description of Artificial Sequence: Synthetic oligonucleotide
  Sense strand starting at position 1726 of SEQ ID NO: 1563845
ucuagaccuugggucuaau

SEQ ID NO: 1836222 - RNA, 19 nt, Artificial Sequence
  Description of Artificial Sequence: Synthetic oligonucleotide
  Antisense strand to SEQ ID NO: 1836221
auuagacccaaggucuaga

SEQ ID NO: 1836223 - RNA, 19 nt, Artificial Sequence
  Description of Artificial Sequence: Synthetic oligonucleotide
  Sense strand starting at position 1850 of SEQ ID NO: 1563845
auccuuaccuucucgggaa

SEQ ID NO: 1836224 - RNA, 19 nt, Artificial Sequence
  Description of Artificial Sequence: Synthetic oligonucleotide
  Antisense strand to SEQ ID NO: 1836223
uucccgagaagguaaggau

SEQ ID NO: 1836225 - RNA, 19 nt, Artificial Sequence
  Description of Artificial Sequence: Synthetic oligonucleotide
  Sense strand starting at position 2284 of SEQ ID NO: 1563845
cagccuggucugggauaca

SEQ ID NO: 1836226 - RNA, 19 nt, Artificial Sequence
  Description of Artificial Sequence: Synthetic oligonucleotide
  Antisense strand to SEQ ID NO: 1836225
uguaucccagaccaggcug

SEQ ID NO: 1836227 - RNA, 19 nt, Artificial Sequence
  Description of Artificial Sequence: Synthetic oligonucleotide
  Sense strand starting at position 2335 of SEQ ID NO: 1563845
gucacaauuagugaggucu

SEQ ID NO: 1836228 - RNA, 19 nt, Artificial Sequence
  Description of Artificial Sequence: Synthetic oligonucleotide
  Antisense strand to SEQ ID NO: 1836227
agaccucacuaauugugac

SEQ ID NO: 1836229 - RNA, 19 nt, Artificial Sequence
  Description of Artificial Sequence: Synthetic oligonucleotide
  Sense strand starting at position 2452 of SEQ ID NO: 1563845
gugcuucuccacuagccaa

SEQ ID NO: 1836230 - RNA, 19 nt, Artificial Sequence
  Description of Artificial Sequence: Synthetic oligonucleotide
  Antisense strand to SEQ ID NO: 1836229
uuggcuaguggagaagcac

SEQ ID NO: 1836231 - RNA, 19 nt, Artificial Sequence
  Description of Artificial Sequence: Synthetic oligonucleotide
  Sense strand starting at position 2493 of SEQ ID NO: 1563845
gggaacaucugcuuccuca

SEQ ID NO: 1836232 - RNA, 19 nt, Artificial Sequence
  Description of Artificial Sequence: Synthetic oligonucleotide
  Antisense strand to SEQ ID NO: 1836231
ugaggaagcagauguuccc

SEQ ID NO: 1836233 - RNA, 19 nt, Artificial Sequence
  Description of Artificial Sequence: Synthetic oligonucleotide
  Sense strand starting at position 2529 of SEQ ID NO: 1563845
uuguaugucacagagggau

SEQ ID NO: 1836234 - RNA, 19 nt, Artificial Sequence
  Description of Artificial Sequence: Synthetic oligonucleotide
  Antisense strand to SEQ ID NO: 1836233
aucccucugugacauacaa

SEQ ID NO: 1836235 - RNA, 19 nt, Artificial Sequence
  Description of Artificial Sequence: Synthetic oligonucleotide
  Sense strand starting at position 2531 of SEQ ID NO: 1563845
guaugucacagagggaucu

SEQ ID NO: 1836236 - RNA, 19 nt, Artificial Sequence
  Description of Artificial Sequence: Synthetic oligonucleotide
  Antisense strand to SEQ ID NO: 1836235
agaucccucugugacauac

SEQ ID NO: 1836237 - RNA, 19 nt, Artificial Sequence
  Description of Artificial Sequence: Synthetic oligonucleotide
  Sense strand starting at position 2634 of SEQ ID NO: 1563845
agacacauugcaugaacua

SEQ ID NO: 1836238 - RNA, 19 nt, Artificial Sequence
  Description of Artificial Sequence: Synthetic oligonucleotide
  Antisense strand to SEQ ID NO: 1836237
uaguucaugcaaugugucu

SEQ ID NO: 1836239 - RNA, 19 nt, Artificial Sequence
  Description of Artificial Sequence: Synthetic oligonucleotide
  Sense strand starting at position 2910 of SEQ ID NO: 1563845
gguccauccagguaugaga

SEQ ID NO: 1836240 - RNA, 19 nt, Artificial Sequence
  Description of Artificial Sequence: Synthetic oligonucleotide
  Antisense strand to SEQ ID NO: 1836239
ucucauaccuggauggacc

SEQ ID NO: 1836241 - RNA, 19 nt, Artificial Sequence
  Description of Artificial Sequence: Synthetic oligonucleotide
  Sense strand starting at position 2912 of SEQ ID NO: 1563845
uccauccagguaugagaau

SEQ ID NO: 1836242 - RNA, 19 nt, Artificial Sequence
  Description of Artificial Sequence: Synthetic oligonucleotide
  Antisense strand to SEQ ID NO: 1836241
auucucauaccuggaugga

SEQ ID NO: 1836243 - RNA, 19 nt, Artificial Sequence
  Description of Artificial Sequence: Synthetic oligonucleotide
  Sense strand starting at position 2971 of SEQ ID NO: 1563845
cuuccuuaucagcgauaca

SEQ ID NO: 1836244 - RNA, 19 nt, Artificial Sequence
  Description of Artificial Sequence: Synthetic oligonucleotide
  Antisense strand to SEQ ID NO: 1836243
uguaucgcugauaaggaag

SEQ ID NO: 1836245 - RNA, 19 nt, Artificial Sequence
  Description of Artificial Sequence: Synthetic oligonucleotide
  Sense strand starting at position 2974 of SEQ ID NO: 1563845
ccuuaucagcgauacaauc

SEQ ID NO: 1836246 - RNA, 19 nt, Artificial Sequence
  Description of Artificial Sequence: Synthetic oligonucleotide
  Antisense strand to SEQ ID NO: 1836245
gauuguaucgcugauaagg

SEQ ID NO: 1836247 - RNA, 19 nt, Artificial Sequence
  Description of Artificial Sequence: Synthetic oligonucleotide
  Sense strand starting at position 3042 of SEQ ID NO: 1563845
gugugucugagcuaauuac

SEQ ID NO: 1836248 - RNA, 19 nt, Artificial Sequence
  Description of Artificial Sequence: Synthetic oligonucleotide
  Antisense strand to SEQ ID NO: 1836247
guaauuagcucagacacac

SEQ ID NO: 1836249 - RNA, 19 nt, Artificial Sequence
  Description of Artificial Sequence: Synthetic oligonucleotide
  Sense strand starting at position 3261 of SEQ ID NO: 1563845
uguguaugaauggaaggua

SEQ ID NO: 1836250 - RNA, 19 nt, Artificial Sequence
  Description of Artificial Sequence: Synthetic oligonucleotide
  Antisense strand to SEQ ID NO: 1836249
uaccuuccauucauacaca

SEQ ID NO: 1836251 - RNA, 19 nt, Artificial Sequence
  Description of Artificial Sequence: Synthetic oligonucleotide
  Sense strand starting at position 3406 of SEQ ID NO: 1563845
uaacauauccucugcggga

SEQ ID NO: 1836252 - RNA, 19 nt, Artificial Sequence
  Description of Artificial Sequence: Synthetic oligonucleotide
  Antisense strand to SEQ ID NO: 1836251
ucccgcagaggauauguua

SEQ ID NO: 1836253 - RNA, 19 nt, Artificial Sequence
  Description of Artificial Sequence: Synthetic oligonucleotide
  Sense strand starting at position 3408 of SEQ ID NO: 1563845
acauauccucugcgggaga

SEQ ID NO: 1836254 - RNA, 19 nt, Artificial Sequence
  Description of Artificial Sequence: Synthetic oligonucleotide
  Antisense strand to SEQ ID NO: 1836253
ucucccgcagaggauaugu

SEQ ID NO: 1836255 - RNA, 19 nt, Artificial Sequence
  Description of Artificial Sequence: Synthetic oligonucleotide
  Sense strand starting at position 3465 of SEQ ID NO: 1563845
acgugcuaaucacuccaaa

SEQ ID NO: 1836256 - RNA, 19 nt, Artificial Sequence
  Description of Artificial Sequence: Synthetic oligonucleotide
  Antisense strand to SEQ ID NO: 1836255
uuuggagugauuagcacgu

SEQ ID NO: 1836257 - RNA, 19 nt, Artificial Sequence
  Description of Artificial Sequence: Synthetic oligonucleotide
  Sense strand starting at position 3549 of SEQ ID NO: 1563845
ggcaucuccacuuggaagu

SEQ ID NO: 1836258 - RNA, 19 nt, Artificial Sequence
  Description of Artificial Sequence: Synthetic oligonucleotide
  Antisense strand to SEQ ID NO: 1836257
acuuccaaguggagaugcc

SEQ ID NO: 1836259 - RNA, 19 nt, Artificial Sequence
  Description of Artificial Sequence: Synthetic oligonucleotide
  Sense strand starting at position 3690 of SEQ ID NO: 1563845
aguaaauggcgccauuauc

SEQ ID NO: 1836260 - RNA, 19 nt, Artificial Sequence
  Description of Artificial Sequence: Synthetic oligonucleotide
  Antisense strand to SEQ ID NO: 1836259
gauaauggcgccauuuacu

SEQ ID NO: 1836261 - RNA, 19 nt, Artificial Sequence
  Description of Artificial Sequence: Synthetic oligonucleotide
  Sense strand starting at position 3735 of SEQ ID NO: 1563845
ggagucaucgaucaccacu

SEQ ID NO: 1836262 - RNA, 19 nt, Artificial Sequence
  Description of Artificial Sequence: Synthetic oligonucleotide
  Antisense strand to SEQ ID NO: 1836261
aguggugaucgaugacucc

SEQ ID NO: 1836263 - RNA, 19 nt, Artificial Sequence
  Description of Artificial Sequence: Synthetic oligonucleotide
  Sense strand starting at position 3834 of SEQ ID NO: 1563845
uccauuacucccggcaaau

SEQ ID NO: 1836264 - RNA, 19 nt, Artificial Sequence
  Description of Artificial Sequence: Synthetic oligonucleotide
  Antisense strand to SEQ ID NO: 1836263
auuugccgggaguaaugga

SEQ ID NO: 1836265 - RNA, 19 nt, Artificial Sequence
  Description of Artificial Sequence: Synthetic oligonucleotide
  Sense strand starting at position 3846 of SEQ ID NO: 1563845
ggcaaauucugguccuaug

SEQ ID NO: 1836266 - RNA, 19 nt, Artificial Sequence
  Description of Artificial Sequence: Synthetic oligonucleotide
  Antisense strand to SEQ ID NO: 1836265
cauaggaccagaauuugcc

SEQ ID NO: 1836267 - RNA, 19 nt, Artificial Sequence
  Description of Artificial Sequence: Synthetic oligonucleotide
  Sense strand starting at position 3951 of SEQ ID NO: 1563845
aaacucuauccgggcaaga

SEQ ID NO: 1836268 - RNA, 19 nt, Artificial Sequence
  Description of Artificial Sequence: Synthetic oligonucleotide
  Antisense strand to SEQ ID NO: 1836267
ucuugcccggauagaguuu

SEQ ID NO: 1836269 - RNA, 19 nt, Artificial Sequence
  Description of Artificial Sequence: Synthetic oligonucleotide
  Sense strand starting at position 3953 of SEQ ID NO: 1563845
acucuauccgggcaagaag

SEQ ID NO: 1836270 - RNA, 19 nt, Artificial Sequence
  Description of Artificial Sequence: Synthetic oligonucleotide
  Antisense strand to SEQ ID NO: 1836269
cuucuugcccggauagagu

SEQ ID NO: 1836271 - RNA, 19 nt, Artificial Sequence
  Description of Artificial Sequence: Synthetic oligonucleotide
  Sense strand starting at position 3975 of SEQ ID NO: 1563845
guggaauugggcgaucaga

SEQ ID NO: 1836272 - RNA, 19 nt, Artificial Sequence
  Description of Artificial Sequence: Synthetic oligonucleotide
  Antisense strand to SEQ ID NO: 1836271
ucugaucgcccaauuccac

SEQ ID NO: 1836273 - RNA, 19 nt, Artificial Sequence
  Description of Artificial Sequence: Synthetic oligonucleotide
  Sense strand starting at position 468 of SEQ ID NO: 1563846
cgacgacauacuuguguua

SEQ ID NO: 1836274 - RNA, 19 nt, Artificial Sequence
  Description of Artificial Sequence: Synthetic oligonucleotide
  Antisense strand to SEQ ID NO: 1836273
uaacacaaguaugucgucg

SEQ ID NO: 1836275 - RNA, 19 nt, Artificial Sequence
  Description of Artificial Sequence: Synthetic oligonucleotide
  Sense strand starting at position 471 of SEQ ID NO: 1563846
cgacauacuuguguuagcu

SEQ ID NO: 1836276 - RNA, 19 nt, Artificial Sequence
  Description of Artificial Sequence: Synthetic oligonucleotide
  Antisense strand to SEQ ID NO: 1836275
agcuaacacaaguaugucg

SEQ ID NO: 1836277 - RNA, 19 nt, Artificial Sequence
  Description of Artificial Sequence: Synthetic oligonucleotide
  Sense strand starting at position 592 of SEQ ID NO: 1563846
ggcaguccuuucccacaca

SEQ ID NO: 1836278 - RNA, 19 nt, Artificial Sequence
  Description of Artificial Sequence: Synthetic oligonucleotide
  Antisense strand to SEQ ID NO: 1836277
ugugugggaaaggacugcc

SEQ ID NO: 1836279 - RNA, 19 nt, Artificial Sequence
  Description of Artificial Sequence: Synthetic oligonucleotide
  Sense strand starting at position 683 of SEQ ID NO: 1563846
gggccucaccgauaagaug

SEQ ID NO: 1836280 - RNA, 19 nt, Artificial Sequence
  Description of Artificial Sequence: Synthetic oligonucleotide
  Antisense strand to SEQ ID NO: 1836279
caucuuaucggugaggccc

SEQ ID NO: 1836281 - RNA, 19 nt, Artificial Sequence
  Description of Artificial Sequence: Synthetic oligonucleotide
  Sense strand starting at position 1008 of SEQ ID NO: 1563846
gggcgacaaucaucagguu

SEQ ID NO: 1836282 - RNA, 19 nt, Artificial Sequence
  Description of Artificial Sequence: Synthetic oligonucleotide
  Antisense strand to SEQ ID NO: 1836281
aaccugaugauugucgccc

SEQ ID NO: 1836283 - RNA, 19 nt, Artificial Sequence
  Description of Artificial Sequence: Synthetic oligonucleotide
  Sense strand starting at position 1009 of SEQ ID NO: 1563846
ggcgacaaucaucagguua

SEQ ID NO: 1836284 - RNA, 19 nt, Artificial Sequence
  Description of Artificial Sequence: Synthetic oligonucleotide
  Antisense strand to SEQ ID NO: 1836283
uaaccugaugauugucgcc

SEQ ID NO: 1836285 - RNA, 19 nt, Artificial Sequence
  Description of Artificial Sequence: Synthetic oligonucleotide
  Sense strand starting at position 1020 of SEQ ID NO: 1563846
ucagguuacuaggcaauau

SEQ ID NO: 1836286 - RNA, 19 nt, Artificial Sequence
  Description of Artificial Sequence: Synthetic oligonucleotide
  Antisense strand to SEQ ID NO: 1836285
auauugccuaguaaccuga

SEQ ID NO: 1836287 - RNA, 19 nt, Artificial Sequence
  Description of Artificial Sequence: Synthetic oligonucleotide
  Sense strand starting at position 1283 of SEQ ID NO: 1563846
aacaaaggguuuggauuua

SEQ ID NO: 1836288 - RNA, 19 nt, Artificial Sequence
  Description of Artificial Sequence: Synthetic oligonucleotide
  Antisense strand to SEQ ID NO: 1836287
uaaauccaaacccuuuguu

SEQ ID NO: 1836289 - RNA, 19 nt, Artificial Sequence
  Description of Artificial Sequence: Synthetic oligonucleotide
  Sense strand starting at position 1556 of SEQ ID NO: 1563846
ggucagcucgguucgagua

SEQ ID NO: 1836290 - RNA, 19 nt, Artificial Sequence
  Description of Artificial Sequence: Synthetic oligonucleotide
  Antisense strand to SEQ ID NO: 1836289
uacucgaaccgagcugacc

SEQ ID NO: 1836291 - RNA, 19 nt, Artificial Sequence
  Description of Artificial Sequence: Synthetic oligonucleotide
  Sense strand starting at position 1564 of SEQ ID NO: 1563846
cgguucgaguaaucuagga

SEQ ID NO: 1836292 - RNA, 19 nt, Artificial Sequence
  Description of Artificial Sequence: Synthetic oligonucleotide
  Antisense strand to SEQ ID NO: 1836291
uccuagauuacucgaaccg

SEQ ID NO: 1836293 - RNA, 19 nt, Artificial Sequence
  Description of Artificial Sequence: Synthetic oligonucleotide
  Sense strand starting at position 1727 of SEQ ID NO: 1563846
ucuagaccuugggucuaau

SEQ ID NO: 1836294 - RNA, 19 nt, Artificial Sequence
  Description of Artificial Sequence: Synthetic oligonucleotide
  Antisense strand to SEQ ID NO: 1836293
auuagacccaaggucuaga

SEQ ID NO: 1836295 - RNA, 19 nt, Artificial Sequence
  Description of Artificial Sequence: Synthetic oligonucleotide
  Sense strand starting at position 1851 of SEQ ID NO: 1563846
auccuuaccuucucgggaa

SEQ ID NO: 1836296 - RNA, 19 nt, Artificial Sequence
  Description of Artificial Sequence: Synthetic oligonucleotide
  Antisense strand to SEQ ID NO: 1836295
uucccgagaagguaaggau

SEQ ID NO: 1836297 - RNA, 19 nt, Artificial Sequence
  Description of Artificial Sequence: Synthetic oligonucleotide
  Sense strand starting at position 2285 of SEQ ID NO: 1563846
cagccuggucugggauaca

SEQ ID NO: 1836298 - RNA, 19 nt, Artificial Sequence
  Description of Artificial Sequence: Synthetic oligonucleotide
  Antisense strand to SEQ ID NO: 1836297
uguaucccagaccaggcug

SEQ ID NO: 1836299 - RNA, 19 nt, Artificial Sequence
  Description of Artificial Sequence: Synthetic oligonucleotide
  Sense strand starting at position 2336 of SEQ ID NO: 1563846
gucacaauuagugaggucu

SEQ ID NO: 1836300 - RNA, 19 nt, Artificial Sequence
  Description of Artificial Sequence: Synthetic oligonucleotide
  Antisense strand to SEQ ID NO: 1836299
agaccucacuaauugugac

SEQ ID NO: 1836301 - RNA, 19 nt, Artificial Sequence
  Description of Artificial Sequence: Synthetic oligonucleotide
  Sense strand starting at position 2453 of SEQ ID NO: 1563846
gugcuucuccacuagccaa

SEQ ID NO: 1836302 - RNA, 19 nt, Artificial Sequence
  Description of Artificial Sequence: Synthetic oligonucleotide
  Antisense strand to SEQ ID NO: 1836301
uuggcuaguggagaagcac

SEQ ID NO: 1836303 - RNA, 19 nt, Artificial Sequence
  Description of Artificial Sequence: Synthetic oligonucleotide
  Sense strand starting at position 2530 of SEQ ID NO: 1563846
uuguaugucacagagggau

SEQ ID NO: 1836304 - RNA, 19 nt, Artificial Sequence
  Description of Artificial Sequence: Synthetic oligonucleotide
  Antisense strand to SEQ ID NO: 1836303
aucccucugugacauacaa

SEQ ID NO: 1836305 - RNA, 19 nt, Artificial Sequence
  Description of Artificial Sequence: Synthetic oligonucleotide
  Sense strand starting at position 2532 of SEQ ID NO: 1563846
guaugucacagagggaucu

SEQ ID NO: 1836306 - RNA, 19 nt, Artificial Sequence
  Description of Artificial Sequence: Synthetic oligonucleotide
  Antisense strand to SEQ ID NO: 1836305
agaucccucugugacauac

SEQ ID NO: 1836307 - RNA, 19 nt, Artificial Sequence
  Description of Artificial Sequence: Synthetic oligonucleotide
  Sense strand starting at position 2635 of SEQ ID NO: 1563846
agacacauugcaugaacua

SEQ ID NO: 1836308 - RNA, 19 nt, Artificial Sequence
  Description of Artificial Sequence: Synthetic oligonucleotide
  Antisense strand to SEQ ID NO: 1836307
uaguucaugcaaugugucu

SEQ ID NO: 1836309 - RNA, 19 nt, Artificial Sequence
  Description of Artificial Sequence: Synthetic oligonucleotide
  Sense strand starting at position 2911 of SEQ ID NO: 1563846
gguccauccagguaugaga

SEQ ID NO: 1836310 - RNA, 19 nt, Artificial Sequence
  Description of Artificial Sequence: Synthetic oligonucleotide
  Antisense strand to SEQ ID NO: 1836309
ucucauaccuggauggacc

SEQ ID NO: 1836311 - RNA, 19 nt, Artificial Sequence
  Description of Artificial Sequence: Synthetic oligonucleotide
  Sense strand starting at position 2913 of SEQ ID NO: 1563846
uccauccagguaugagaau

SEQ ID NO: 1836312 - RNA, 19 nt, Artificial Sequence
  Description of Artificial Sequence: Synthetic oligonucleotide
  Antisense strand to SEQ ID NO: 1836311
auucucauaccuggaugga

SEQ ID NO: 1836313 - RNA, 19 nt, Artificial Sequence
  Description of Artificial Sequence: Synthetic oligonucleotide
  Sense strand starting at position 2914 of SEQ ID NO: 1563846
ccauccagguaugagaauu

SEQ ID NO: 1836314 - RNA, 19 nt, Artificial Sequence
  Description of Artificial Sequence: Synthetic oligonucleotide
  Antisense strand to SEQ ID NO: 1836313
aauucucauaccuggaugg

SEQ ID NO: 1836315 - RNA, 19 nt, Artificial Sequence
  Description of Artificial Sequence: Synthetic oligonucleotide
  Sense strand starting at position 2920 of SEQ ID NO: 1563846
agguaugagaauugcucca

SEQ ID NO: 1836316 - RNA, 19 nt, Artificial Sequence
  Description of Artificial Sequence: Synthetic oligonucleotide
  Antisense strand to SEQ ID NO: 1836315
uggagcaauucucauaccu

SEQ ID NO: 1836317 - RNA, 19 nt, Artificial Sequence
  Description of Artificial Sequence: Synthetic oligonucleotide
  Sense strand starting at position 2972 of SEQ ID NO: 1563846
cuuccuuaucagcgauaca

SEQ ID NO: 1836318 - RNA, 19 nt, Artificial Sequence
  Description of Artificial Sequence: Synthetic oligonucleotide
  Antisense strand to SEQ ID NO: 1836317
uguaucgcugauaaggaag

SEQ ID NO: 1836319 - RNA, 19 nt, Artificial Sequence
  Description of Artificial Sequence: Synthetic oligonucleotide
  Sense strand starting at position 2975 of SEQ ID NO: 1563846
ccuuaucagcgauacaauc

SEQ ID NO: 1836320 - RNA, 19 nt, Artificial Sequence
  Description of Artificial Sequence: Synthetic oligonucleotide
  Antisense strand to SEQ ID NO: 1836319
gauuguaucgcugauaagg

SEQ ID NO: 1836321 - RNA, 19 nt, Artificial Sequence
  Description of Artificial Sequence: Synthetic oligonucleotide
  Sense strand starting at position 3015 of SEQ ID NO: 1563846
ugguguccgccaggacaau

SEQ ID NO: 1836322 - RNA, 19 nt, Artificial Sequence
  Description of Artificial Sequence: Synthetic oligonucleotide
  Antisense strand to SEQ ID NO: 1836321
auuguccuggcggacacca

SEQ ID NO: 1836323 - RNA, 19 nt, Artificial Sequence
  Description of Artificial Sequence: Synthetic oligonucleotide
  Sense strand starting at position 3041 of SEQ ID NO: 1563846
cugugugucugagcuaauu

SEQ ID NO: 1836324 - RNA, 19 nt, Artificial Sequence
  Description of Artificial Sequence: Synthetic oligonucleotide
  Antisense strand to SEQ ID NO: 1836323
aauuagcucagacacacag

SEQ ID NO: 1836325 - RNA, 19 nt, Artificial Sequence
  Description of Artificial Sequence: Synthetic oligonucleotide
  Sense strand starting at position 3043 of SEQ ID NO: 1563846
gugugucugagcuaauuac

SEQ ID NO: 1836326 - RNA, 19 nt, Artificial Sequence
  Description of Artificial Sequence: Synthetic oligonucleotide
  Antisense strand to SEQ ID NO: 1836325
guaauuagcucagacacac

SEQ ID NO: 1836327 - RNA, 19 nt, Artificial Sequence
  Description of Artificial Sequence: Synthetic oligonucleotide
  Sense strand starting at position 3262 of SEQ ID NO: 1563846
uguguaugaauggaaggua

SEQ ID NO: 1836328 - RNA, 19 nt, Artificial Sequence
  Description of Artificial Sequence: Synthetic oligonucleotide
  Antisense strand to SEQ ID NO: 1836327
uaccuuccauucauacaca

SEQ ID NO: 1836329 - RNA, 19 nt, Artificial Sequence
  Description of Artificial Sequence: Synthetic oligonucleotide
  Sense strand starting at position 3407 of SEQ ID NO: 1563846
uaacauauccucugcggga

SEQ ID NO: 1836330 - RNA, 19 nt, Artificial Sequence
  Description of Artificial Sequence: Synthetic oligonucleotide
  Antisense strand to SEQ ID NO: 1836329
ucccgcagaggauauguua

SEQ ID NO: 1836331 - RNA, 19 nt, Artificial Sequence
  Description of Artificial Sequence: Synthetic oligonucleotide
  Sense strand starting at position 3409 of SEQ ID NO: 1563846
acauauccucugcgggaga

SEQ ID NO: 1836332 - RNA, 19 nt, Artificial Sequence
  Description of Artificial Sequence: Synthetic oligonucleotide
  Antisense strand to SEQ ID NO: 1836331
ucucccgcagaggauaugu

SEQ ID NO: 1836333 - RNA, 19 nt, Artificial Sequence
  Description of Artificial Sequence: Synthetic oligonucleotide
  Sense strand starting at position 3466 of SEQ ID NO: 1563846
acgugcuaaucacuccaaa

SEQ ID NO: 1836334 - RNA, 19 nt, Artificial Sequence
  Description of Artificial Sequence: Synthetic oligonucleotide
  Antisense strand to SEQ ID NO: 1836333
uuuggagugauuagcacgu

SEQ ID NO: 1836335 - RNA, 19 nt, Artificial Sequence
  Description of Artificial Sequence: Synthetic oligonucleotide
  Sense strand starting at position 3550 of SEQ ID NO: 1563846
ggcaucuccacuuggaagu

SEQ ID NO: 1836336 - RNA, 19 nt, Artificial Sequence
  Description of Artificial Sequence: Synthetic oligonucleotide
  Antisense strand to SEQ ID NO: 1836335
acuuccaaguggagaugcc

SEQ ID NO: 1836337 - RNA, 19 nt, Artificial Sequence
  Description of Artificial Sequence: Synthetic oligonucleotide
  Sense strand starting at position 3691 of SEQ ID NO: 1563846
aguaaauggcgccauuauc

SEQ ID NO: 1836338 - RNA, 19 nt, Artificial Sequence
  Description of Artificial Sequence: Synthetic oligonucleotide
  Antisense strand to SEQ ID NO: 1836337
gauaauggcgccauuuacu

SEQ ID NO: 1836339 - RNA, 19 nt, Artificial Sequence
  Description of Artificial Sequence: Synthetic oligonucleotide
  Sense strand starting at position 3725 of SEQ ID NO: 1563846
uccagaaacugggagucau

SEQ ID NO: 1836340 - RNA, 19 nt, Artificial Sequence
  Description of Artificial Sequence: Synthetic oligonucleotide
  Antisense strand to SEQ ID NO: 1836339
augacucccaguuucugga

SEQ ID NO: 1836341 - RNA, 19 nt, Artificial Sequence
  Description of Artificial Sequence: Synthetic oligonucleotide
  Sense strand starting at position 3736 of SEQ ID NO: 1563846
ggagucaucgaucaccacu

SEQ ID NO: 1836342 - RNA, 19 nt, Artificial Sequence
  Description of Artificial Sequence: Synthetic oligonucleotide
  Antisense strand to SEQ ID NO: 1836341
aguggugaucgaugacucc

SEQ ID NO: 1836343 - RNA, 19 nt, Artificial Sequence
  Description of Artificial Sequence: Synthetic oligonucleotide
  Sense strand starting at position 3835 of SEQ ID NO: 1563846
uccauuacucccggcaaau

SEQ ID NO: 1836344 - RNA, 19 nt, Artificial Sequence
  Description of Artificial Sequence: Synthetic oligonucleotide
  Antisense strand to SEQ ID NO: 1836343
auuugccgggaguaaugga

SEQ ID NO: 1836345 - RNA, 19 nt, Artificial Sequence
  Description of Artificial Sequence: Synthetic oligonucleotide
  Sense strand starting at position 3847 of SEQ ID NO: 1563846
ggcaaauucugguccuaug

SEQ ID NO: 1836346 - RNA, 19 nt, Artificial Sequence
  Description of Artificial Sequence: Synthetic oligonucleotide
  Antisense strand to SEQ ID NO: 1836345
cauaggaccagaauuugcc

SEQ ID NO: 1836347 - RNA, 19 nt, Artificial Sequence
  Description of Artificial Sequence: Synthetic oligonucleotide
  Sense strand starting at position 3952 of SEQ ID NO: 1563846
aaacucuauccgggcaaga

SEQ ID NO: 1836348 - RNA, 19 nt, Artificial Sequence
  Description of Artificial Sequence: Synthetic oligonucleotide
  Antisense strand to SEQ ID NO: 1836347
ucuugcccggauagaguuu

SEQ ID NO: 1836349 - RNA, 19 nt, Artificial Sequence
  Description of Artificial Sequence: Synthetic oligonucleotide
  Sense strand starting at position 3954 of SEQ ID NO: 1563846
acucuauccgggcaagaag

SEQ ID NO: 1836350 - RNA, 19 nt, Artificial Sequence
  Description of Artificial Sequence: Synthetic oligonucleotide
  Antisense strand to SEQ ID NO: 1836349
cuucuugcccggauagagu

SEQ ID NO: 1836351 - RNA, 19 nt, Artificial Sequence
  Description of Artificial Sequence: Synthetic oligonucleotide
  Sense strand starting at position 3976 of SEQ ID NO: 1563846
guggaauugggcgaucaga

SEQ ID NO: 1836352 - RNA, 19 nt, Artificial Sequence
  Description of Artificial Sequence: Synthetic oligonucleotide
  Antisense strand to SEQ ID NO: 1836351
ucugaucgcccaauuccac

SEQ ID NO: 1836353 - RNA, 19 nt, Artificial Sequence
  Description of Artificial Sequence: Synthetic oligonucleotide
  Sense strand starting at position 102 of SEQ ID NO: 1563847
ucuuacuggugacuaacau

SEQ ID NO: 1836354 - RNA, 19 nt, Artificial Sequence
  Description of Artificial Sequence: Synthetic oligonucleotide
  Antisense strand to SEQ ID NO: 1836353
auguuagucaccaguaaga

SEQ ID NO: 1836355 - RNA, 19 nt, Artificial Sequence
  Description of Artificial Sequence: Synthetic oligonucleotide
  Sense strand starting at position 121 of SEQ ID NO: 1563847
cugggaggucugcggagaa

SEQ ID NO: 1836356 - RNA, 19 nt, Artificial Sequence
  Description of Artificial Sequence: Synthetic oligonucleotide
  Antisense strand to SEQ ID NO: 1836355
uucuccgcagaccucccag

SEQ ID NO: 1836357 - RNA, 19 nt, Artificial Sequence
  Description of Artificial Sequence: Synthetic oligonucleotide
  Sense strand starting at position 194 of SEQ ID NO: 1563847
uggguauccucuccugaga

SEQ ID NO: 1836358 - RNA, 19 nt, Artificial Sequence
  Description of Artificial Sequence: Synthetic oligonucleotide
  Antisense strand to SEQ ID NO: 1836357
ucucaggagaggauaccca

SEQ ID NO: 1836359 - RNA, 19 nt, Artificial Sequence
  Description of Artificial Sequence: Synthetic oligonucleotide
  Sense strand starting at position 467 of SEQ ID NO: 1563847
cgacgacauacuuguguua

SEQ ID NO: 1836360 - RNA, 19 nt, Artificial Sequence
  Description of Artificial Sequence: Synthetic oligonucleotide
  Antisense strand to SEQ ID NO: 1836359
uaacacaaguaugucgucg

SEQ ID NO: 1836361 - RNA, 19 nt, Artificial Sequence
  Description of Artificial Sequence: Synthetic oligonucleotide
  Sense strand starting at position 591 of SEQ ID NO: 1563847
ggcaguccuuucccacaca

SEQ ID NO: 1836362 - RNA, 19 nt, Artificial Sequence
  Description of Artificial Sequence: Synthetic oligonucleotide
  Antisense strand to SEQ ID NO: 1836361
ugugugggaaaggacugcc

SEQ ID NO: 1836363 - RNA, 19 nt, Artificial Sequence
  Description of Artificial Sequence: Synthetic oligonucleotide
  Sense strand starting at position 682 of SEQ ID NO: 1563847
gggccucaccgauaagaug

SEQ ID NO: 1836364 - RNA, 19 nt, Artificial Sequence
  Description of Artificial Sequence: Synthetic oligonucleotide
  Antisense strand to SEQ ID NO: 1836363
caucuuaucggugaggccc

SEQ ID NO: 1836365 - RNA, 19 nt, Artificial Sequence
  Description of Artificial Sequence: Synthetic oligonucleotide
  Sense strand starting at position 720 of SEQ ID NO: 1563847
uuccgaaggcucugaggau

SEQ ID NO: 1836366 - RNA, 19 nt, Artificial Sequence
  Description of Artificial Sequence: Synthetic oligonucleotide
  Antisense strand to SEQ ID NO: 1836365
auccucagagccuucggaa

SEQ ID NO: 1836367 - RNA, 19 nt, Artificial Sequence
  Description of Artificial Sequence: Synthetic oligonucleotide
  Sense strand starting at position 1007 of SEQ ID NO: 1563847
gggcgacaaucaucagguu

SEQ ID NO: 1836368 - RNA, 19 nt, Artificial Sequence
  Description of Artificial Sequence: Synthetic oligonucleotide
  Antisense strand to SEQ ID NO: 1836367
aaccugaugauugucgccc

SEQ ID NO: 1836369 - RNA, 19 nt, Artificial Sequence
  Description of Artificial Sequence: Synthetic oligonucleotide
  Sense strand starting at position 1008 of SEQ ID NO: 1563847
ggcgacaaucaucagguua

SEQ ID NO: 1836370 - RNA, 19 nt, Artificial Sequence
  Description of Artificial Sequence: Synthetic oligonucleotide
  Antisense strand to SEQ ID NO: 1836369
uaaccugaugauugucgcc

SEQ ID NO: 1836371 - RNA, 19 nt, Artificial Sequence
  Description of Artificial Sequence: Synthetic oligonucleotide
  Sense strand starting at position 1019 of SEQ ID NO: 1563847
ucagguuacuaggcaauau

SEQ ID NO: 1836372 - RNA, 19 nt, Artificial Sequence
  Description of Artificial Sequence: Synthetic oligonucleotide
  Antisense strand to SEQ ID NO: 1836371
auauugccuaguaaccuga

SEQ ID NO: 1836373 - RNA, 19 nt, Artificial Sequence
  Description of Artificial Sequence: Synthetic oligonucleotide
  Sense strand starting at position 1282 of SEQ ID NO: 1563847
aacaaaggguuuggauuua

SEQ ID NO: 1836374 - RNA, 19 nt, Artificial Sequence
  Description of Artificial Sequence: Synthetic oligonucleotide
  Antisense strand to SEQ ID NO: 1836373
uaaauccaaacccuuuguu

SEQ ID NO: 1836375 - RNA, 19 nt, Artificial Sequence
  Description of Artificial Sequence: Synthetic oligonucleotide
  Sense strand starting at position 1555 of SEQ ID NO: 1563847
ggucagcucgguucgagua

SEQ ID NO: 1836376 - RNA, 19 nt, Artificial Sequence
  Description of Artificial Sequence: Synthetic oligonucleotide
  Antisense strand to SEQ ID NO: 1836375
uacucgaaccgagcugacc

SEQ ID NO: 1836377 - RNA, 19 nt, Artificial Sequence
  Description of Artificial Sequence: Synthetic oligonucleotide
  Sense strand starting at position 1563 of SEQ ID NO: 1563847
cgguucgaguaaucuagga

SEQ ID NO: 1836378 - RNA, 19 nt, Artificial Sequence
  Description of Artificial Sequence: Synthetic oligonucleotide
  Antisense strand to SEQ ID NO: 1836377
uccuagauuacucgaaccg

SEQ ID NO: 1836379 - RNA, 19 nt, Artificial Sequence
  Description of Artificial Sequence: Synthetic oligonucleotide
  Sense strand starting at position 1565 of SEQ ID NO: 1563847
guucgaguaaucuaggagu

SEQ ID NO: 1836380 - RNA, 19 nt, Artificial Sequence
  Description of Artificial Sequence: Synthetic oligonucleotide
  Antisense strand to SEQ ID NO: 1836379
acuccuagauuacucgaac

SEQ ID NO: 1836381 - RNA, 19 nt, Artificial Sequence
  Description of Artificial Sequence: Synthetic oligonucleotide
  Sense strand starting at position 1726 of SEQ ID NO: 1563847
ucuagaccuugggucuaau

SEQ ID NO: 1836382 - RNA, 19 nt, Artificial Sequence
  Description of Artificial Sequence: Synthetic oligonucleotide
  Antisense strand to SEQ ID NO: 1836381
auuagacccaaggucuaga

SEQ ID NO: 1836383 - RNA, 19 nt, Artificial Sequence
  Description of Artificial Sequence: Synthetic oligonucleotide
  Sense strand starting at position 1850 of SEQ ID NO: 1563847
auccuuaccuucucgggaa

SEQ ID NO: 1836384 - RNA, 19 nt, Artificial Sequence
  Description of Artificial Sequence: Synthetic oligonucleotide
  Antisense strand to SEQ ID NO: 1836383
uucccgagaagguaaggau

SEQ ID NO: 1836385 - RNA, 19 nt, Artificial Sequence
  Description of Artificial Sequence: Synthetic oligonucleotide
  Sense strand starting at position 2284 of SEQ ID NO: 1563847
cagccuggucugggauaca

SEQ ID NO: 1836386 - RNA, 19 nt, Artificial Sequence
  Description of Artificial Sequence: Synthetic oligonucleotide
  Antisense strand to SEQ ID NO: 1836385
uguaucccagaccaggcug

SEQ ID NO: 1836387 - RNA, 19 nt, Artificial Sequence
  Description of Artificial Sequence: Synthetic oligonucleotide
  Sense strand starting at position 2335 of SEQ ID NO: 1563847
gucacaauuagugaggucu

SEQ ID NO: 1836388 - RNA, 19 nt, Artificial Sequence
  Description of Artificial Sequence: Synthetic oligonucleotide
  Antisense strand to SEQ ID NO: 1836387
agaccucacuaauugugac

SEQ ID NO: 1836389 - RNA, 19 nt, Artificial Sequence
  Description of Artificial Sequence: Synthetic oligonucleotide
  Sense strand starting at position 2452 of SEQ ID NO: 1563847
gugcuucuccacuagccaa

SEQ ID NO: 1836390 - RNA, 19 nt, Artificial Sequence
  Description of Artificial Sequence: Synthetic oligonucleotide
  Antisense strand to SEQ ID NO: 1836389
uuggcuaguggagaagcac

SEQ ID NO: 1836391 - RNA, 19 nt, Artificial Sequence
  Description of Artificial Sequence: Synthetic oligonucleotide
  Sense strand starting at position 2493 of SEQ ID NO: 1563847
gggaacaucugcuuccuca

SEQ ID NO: 1836392 - RNA, 19 nt, Artificial Sequence
  Description of Artificial Sequence: Synthetic oligonucleotide
  Antisense strand to SEQ ID NO: 1836391
ugaggaagcagauguuccc

SEQ ID NO: 1836393 - RNA, 19 nt, Artificial Sequence
  Description of Artificial Sequence: Synthetic oligonucleotide
  Sense strand starting at position 2529 of SEQ ID NO: 1563847
uuguaugucacagagggau

SEQ ID NO: 1836394 - RNA, 19 nt, Artificial Sequence
  Description of Artificial Sequence: Synthetic oligonucleotide
  Antisense strand to SEQ ID NO: 1836393
aucccucugugacauacaa

SEQ ID NO: 1836395 - RNA, 19 nt, Artificial Sequence
  Description of Artificial Sequence: Synthetic oligonucleotide
  Sense strand starting at position 2531 of SEQ ID NO: 1563847
guaugucacagagggaucu

SEQ ID NO: 1836396 - RNA, 19 nt, Artificial Sequence
  Description of Artificial Sequence: Synthetic oligonucleotide
  Antisense strand to SEQ ID NO: 1836395
agaucccucugugacauac

SEQ ID NO: 1836397 - RNA, 19 nt, Artificial Sequence
  Description of Artificial Sequence: Synthetic oligonucleotide
  Sense strand starting at position 2634 of SEQ ID NO: 1563847
agacacauugcaugaacua

SEQ ID NO: 1836398 - RNA, 19 nt, Artificial Sequence
  Description of Artificial Sequence: Synthetic oligonucleotide
  Antisense strand to SEQ ID NO: 1836397
uaguucaugcaaugugucu

SEQ ID NO: 1836399 - RNA, 19 nt, Artificial Sequence
  Description of Artificial Sequence: Synthetic oligonucleotide
  Sense strand starting at position 2910 of SEQ ID NO: 1563847
gguccauccagguaugaga

SEQ ID NO: 1836400 - RNA, 19 nt, Artificial Sequence
  Description of Artificial Sequence: Synthetic oligonucleotide
  Antisense strand to SEQ ID NO: 1836399
ucucauaccuggauggacc

SEQ ID NO: 1836401 - RNA, 19 nt, Artificial Sequence
  Description of Artificial Sequence: Synthetic oligonucleotide
  Sense strand starting at position 2912 of SEQ ID NO: 1563847
uccauccagguaugagaau

SEQ ID NO: 1836402 - RNA, 19 nt, Artificial Sequence
  Description of Artificial Sequence: Synthetic oligonucleotide
  Antisense strand to SEQ ID NO: 1836401
auucucauaccuggaugga

SEQ ID NO: 1836403 - RNA, 19 nt, Artificial Sequence
  Description of Artificial Sequence: Synthetic oligonucleotide
  Sense strand starting at position 2971 of SEQ ID NO: 1563847
cuuccuuaucagcgauaca

SEQ ID NO: 1836404 - RNA, 19 nt, Artificial Sequence
  Description of Artificial Sequence: Synthetic oligonucleotide
  Antisense strand to SEQ ID NO: 1836403
uguaucgcugauaaggaag

SEQ ID NO: 1836405 - RNA, 19 nt, Artificial Sequence
  Description of Artificial Sequence: Synthetic oligonucleotide
  Sense strand starting at position 2974 of SEQ ID NO: 1563847
ccuuaucagcgauacaauc

SEQ ID NO: 1836406 - RNA, 19 nt, Artificial Sequence
  Description of Artificial Sequence: Synthetic oligonucleotide
  Antisense strand to SEQ ID NO: 1836405
gauuguaucgcugauaagg

SEQ ID NO: 1836407 - RNA, 19 nt, Artificial Sequence
  Description of Artificial Sequence: Synthetic oligonucleotide
  Sense strand starting at position 3042 of SEQ ID NO: 1563847
gugugucugagcuaauuac

SEQ ID NO: 1836408 - RNA, 19 nt, Artificial Sequence
  Description of Artificial Sequence: Synthetic oligonucleotide
  Antisense strand to SEQ ID NO: 1836407
guaauuagcucagacacac

SEQ ID NO: 1836409 - RNA, 19 nt, Artificial Sequence
  Description of Artificial Sequence: Synthetic oligonucleotide
  Sense strand starting at position 3261 of SEQ ID NO: 1563847
uguguaugaauggaaggua

SEQ ID NO: 1836410 - RNA, 19 nt, Artificial Sequence
  Description of Artificial Sequence: Synthetic oligonucleotide
  Antisense strand to SEQ ID NO: 1836409
uaccuuccauucauacaca

SEQ ID NO: 1836411 - RNA, 19 nt, Artificial Sequence
  Description of Artificial Sequence: Synthetic oligonucleotide
  Sense strand starting at position 3406 of SEQ ID NO: 1563847
uaacauauccucugcggga

SEQ ID NO: 1836412 - RNA, 19 nt, Artificial Sequence
  Description of Artificial Sequence: Synthetic oligonucleotide
  Antisense strand to SEQ ID NO: 1836411
ucccgcagaggauauguua

SEQ ID NO: 1836413 - RNA, 19 nt, Artificial Sequence
  Description of Artificial Sequence: Synthetic oligonucleotide
  Sense strand starting at position 3408 of SEQ ID NO: 1563847
acauauccucugcgggaga

SEQ ID NO: 1836414 - RNA, 19 nt, Artificial Sequence
  Description of Artificial Sequence: Synthetic oligonucleotide
  Antisense strand to SEQ ID NO: 1836413
ucucccgcagaggauaugu

SEQ ID NO: 1836415 - RNA, 19 nt, Artificial Sequence
  Description of Artificial Sequence: Synthetic oligonucleotide
  Sense strand starting at position 3465 of SEQ ID NO: 1563847
acgugcuaaucacuccaaa

SEQ ID NO: 1836416 - RNA, 19 nt, Artificial Sequence
  Description of Artificial Sequence: Synthetic oligonucleotide
  Antisense strand to SEQ ID NO: 1836415
uuuggagugauuagcacgu

SEQ ID NO: 1836417 - RNA, 19 nt, Artificial Sequence
  Description of Artificial Sequence: Synthetic oligonucleotide
  Sense strand starting at position 3549 of SEQ ID NO: 1563847
ggcaucuccacuuggaagu

SEQ ID NO: 1836418 - RNA, 19 nt, Artificial Sequence
  Description of Artificial Sequence: Synthetic oligonucleotide
  Antisense strand to SEQ ID NO: 1836417
acuuccaaguggagaugcc

SEQ ID NO: 1836419 - RNA, 19 nt, Artificial Sequence
  Description of Artificial Sequence: Synthetic oligonucleotide
  Sense strand starting at position 3690 of SEQ ID NO: 1563847
aguaaauggcgccauuauc

SEQ ID NO: 1836420 - RNA, 19 nt, Artificial Sequence
  Description of Artificial Sequence: Synthetic oligonucleotide
  Antisense strand to SEQ ID NO: 1836419
gauaauggcgccauuuacu

SEQ ID NO: 1836421 - RNA, 19 nt, Artificial Sequence
  Description of Artificial Sequence: Synthetic oligonucleotide
  Sense strand starting at position 3735 of SEQ ID NO: 1563847
ggagucaucgaucaccacu

SEQ ID NO: 1836422 - RNA, 19 nt, Artificial Sequence
  Description of Artificial Sequence: Synthetic oligonucleotide
  Antisense strand to SEQ ID NO: 1836421
aguggugaucgaugacucc

SEQ ID NO: 1836423 - RNA, 19 nt, Artificial Sequence
  Description of Artificial Sequence: Synthetic oligonucleotide
  Sense strand starting at position 3834 of SEQ ID NO: 1563847
uccauuacucccggcaaau

SEQ ID NO: 1836424 - RNA, 19 nt, Artificial Sequence
  Description of Artificial Sequence: Synthetic oligonucleotide
  Antisense strand to SEQ ID NO: 1836423
auuugccgggaguaaugga

SEQ ID NO: 1836425 - RNA, 19 nt, Artificial Sequence
  Description of Artificial Sequence: Synthetic oligonucleotide
  Sense strand starting at position 3846 of SEQ ID NO: 1563847
ggcaaauucugguccuaug

SEQ ID NO: 1836426 - RNA, 19 nt, Artificial Sequence
  Description of Artificial Sequence: Synthetic oligonucleotide
  Antisense strand to SEQ ID NO: 1836425
cauaggaccagaauuugcc

SEQ ID NO: 1836427 - RNA, 19 nt, Artificial Sequence
  Description of Artificial Sequence: Synthetic oligonucleotide
  Sense strand starting at position 3951 of SEQ ID NO: 1563847
aaacucuauccgggcaaga

SEQ ID NO: 1836428 - RNA, 19 nt, Artificial Sequence
  Description of Artificial Sequence: Synthetic oligonucleotide
  Antisense strand to SEQ ID NO: 1836427
ucuugcccggauagaguuu

SEQ ID NO: 1836429 - RNA, 19 nt, Artificial Sequence
  Description of Artificial Sequence: Synthetic oligonucleotide
  Sense strand starting at position 3953 of SEQ ID NO: 1563847
acucuauccgggcaagaag

SEQ ID NO: 1836430 - RNA, 19 nt, Artificial Sequence
  Description of Artificial Sequence: Synthetic oligonucleotide
  Antisense strand to SEQ ID NO: 1836429
cuucuugcccggauagagu

SEQ ID NO: 1836431 - RNA, 19 nt, Artificial Sequence
  Description of Artificial Sequence: Synthetic oligonucleotide
  Sense strand starting at position 3975 of SEQ ID NO: 1563847
guggaauugggcgaucaga

SEQ ID NO: 1836432 - RNA, 19 nt, Artificial Sequence
  Description of Artificial Sequence: Synthetic oligonucleotide
  Antisense strand to SEQ ID NO: 1836431
ucugaucgcccaauuccac

SEQ ID NO: 1836433 - RNA, 19 nt, Artificial Sequence
  Description of Artificial Sequence: Synthetic oligonucleotide
  Sense strand starting at position 468 of SEQ ID NO: 1563848
cgacgacauacuuguguua

SEQ ID NO: 1836434 - RNA, 19 nt, Artificial Sequence
  Description of Artificial Sequence: Synthetic oligonucleotide
  Antisense strand to SEQ ID NO: 1836433
uaacacaaguaugucgucg

SEQ ID NO: 1836435 - RNA, 19 nt, Artificial Sequence
  Description of Artificial Sequence: Synthetic oligonucleotide
  Sense strand starting at position 471 of SEQ ID NO: 1563848
cgacauacuuguguuagcu

SEQ ID NO: 1836436 - RNA, 19 nt, Artificial Sequence
  Description of Artificial Sequence: Synthetic oligonucleotide
  Antisense strand to SEQ ID NO: 1836435
agcuaacacaaguaugucg

SEQ ID NO: 1836437 - RNA, 19 nt, Artificial Sequence
  Description of Artificial Sequence: Synthetic oligonucleotide
  Sense strand starting at position 592 of SEQ ID NO: 1563848
ggcaguccuuucccacaca

SEQ ID NO: 1836438 - RNA, 19 nt, Artificial Sequence
  Description of Artificial Sequence: Synthetic oligonucleotide
  Antisense strand to SEQ ID NO: 1836437
ugugugggaaaggacugcc

SEQ ID NO: 1836439 - RNA, 19 nt, Artificial Sequence
  Description of Artificial Sequence: Synthetic oligonucleotide
  Sense strand starting at position 683 of SEQ ID NO: 1563848
gggccucaccgauaagaug

SEQ ID NO: 1836440 - RNA, 19 nt, Artificial Sequence
  Description of Artificial Sequence: Synthetic oligonucleotide
  Antisense strand to SEQ ID NO: 1836439
caucuuaucggugaggccc

SEQ ID NO: 1836441 - RNA, 19 nt, Artificial Sequence
  Description of Artificial Sequence: Synthetic oligonucleotide
  Sense strand starting at position 1008 of SEQ ID NO: 1563848
gggcgacaaucaucagguu

SEQ ID NO: 1836442 - RNA, 19 nt, Artificial Sequence
  Description of Artificial Sequence: Synthetic oligonucleotide
  Antisense strand to SEQ ID NO: 1836441
aaccugaugauugucgccc

SEQ ID NO: 1836443 - RNA, 19 nt, Artificial Sequence
  Description of Artificial Sequence: Synthetic oligonucleotide
  Sense strand starting at position 1009 of SEQ ID NO: 1563848
ggcgacaaucaucagguua

SEQ ID NO: 1836444 - RNA, 19 nt, Artificial Sequence
  Description of Artificial Sequence: Synthetic oligonucleotide
  Antisense strand to SEQ ID NO: 1836443
uaaccugaugauugucgcc

SEQ ID NO: 1836445 - RNA, 19 nt, Artificial Sequence
  Description of Artificial Sequence: Synthetic oligonucleotide
  Sense strand starting at position 1020 of SEQ ID NO: 1563848
ucagguuacuaggcaauau

SEQ ID NO: 1836446 - RNA, 19 nt, Artificial Sequence
  Description of Artificial Sequence: Synthetic oligonucleotide
  Antisense strand to SEQ ID NO: 1836445
auauugccuaguaaccuga

SEQ ID NO: 1836447 - RNA, 19 nt, Artificial Sequence
  Description of Artificial Sequence: Synthetic oligonucleotide
  Sense strand starting at position 1283 of SEQ ID NO: 1563848
aacaaaggguuuggauuua

SEQ ID NO: 1836448 - RNA, 19 nt, Artificial Sequence
  Description of Artificial Sequence: Synthetic oligonucleotide
  Antisense strand to SEQ ID NO: 1836447
uaaauccaaacccuuuguu

SEQ ID NO: 1836449 - RNA, 19 nt, Artificial Sequence
  Description of Artificial Sequence: Synthetic oligonucleotide
  Sense strand starting at position 1556 of SEQ ID NO: 1563848
ggucagcucgguucgagua

SEQ ID NO: 1836450 - RNA, 19 nt, Artificial Sequence
  Description of Artificial Sequence: Synthetic oligonucleotide
  Antisense strand to SEQ ID NO: 1836449
uacucgaaccgagcugacc

SEQ ID NO: 1836451 - RNA, 19 nt, Artificial Sequence
  Description of Artificial Sequence: Synthetic oligonucleotide
  Sense strand starting at position 1564 of SEQ ID NO: 1563848
cgguucgaguaaucuagga

SEQ ID NO: 1836452 - RNA, 19 nt, Artificial Sequence
  Description of Artificial Sequence: Synthetic oligonucleotide
  Antisense strand to SEQ ID NO: 1836451
uccuagauuacucgaaccg

SEQ ID NO: 1836453 - RNA, 19 nt, Artificial Sequence
  Description of Artificial Sequence: Synthetic oligonucleotide
  Sense strand starting at position 1727 of SEQ ID NO: 1563848
ucuagaccuugggucuaau

SEQ ID NO: 1836454 - RNA, 19 nt, Artificial Sequence
  Description of Artificial Sequence: Synthetic oligonucleotide
  Antisense strand to SEQ ID NO: 1836453
auuagacccaaggucuaga

SEQ ID NO: 1836455 - RNA, 19 nt, Artificial Sequence
  Description of Artificial Sequence: Synthetic oligonucleotide
  Sense strand starting at position 1851 of SEQ ID NO: 1563848
auccuuaccuucucgggaa

SEQ ID NO: 1836456 - RNA, 19 nt, Artificial Sequence
  Description of Artificial Sequence: Synthetic oligonucleotide
  Antisense strand to SEQ ID NO: 1836455
uucccgagaagguaaggau

SEQ ID NO: 1836457 - RNA, 19 nt, Artificial Sequence
  Description of Artificial Sequence: Synthetic oligonucleotide
  Sense strand starting at position 2285 of SEQ ID NO: 1563848
cagccuggucugggauaca

SEQ ID NO: 1836458 - RNA, 19 nt, Artificial Sequence
  Description of Artificial Sequence: Synthetic oligonucleotide
  Antisense strand to SEQ ID NO: 1836457
uguaucccagaccaggcug

SEQ ID NO: 1836459 - RNA, 19 nt, Artificial Sequence
  Description of Artificial Sequence: Synthetic oligonucleotide
  Sense strand starting at position 2336 of SEQ ID NO: 1563848
gucacaauuagugaggucu

SEQ ID NO: 1836460 - RNA, 19 nt, Artificial Sequence
  Description of Artificial Sequence: Synthetic oligonucleotide
  Antisense strand to SEQ ID NO: 1836459
agaccucacuaauugugac

SEQ ID NO: 1836461 - RNA, 19 nt, Artificial Sequence
  Description of Artificial Sequence: Synthetic oligonucleotide
  Sense strand starting at position 2453 of SEQ ID NO: 1563848
gugcuucuccacuagccaa

SEQ ID NO: 1836462 - RNA, 19 nt, Artificial Sequence
  Description of Artificial Sequence: Synthetic oligonucleotide
  Antisense strand to SEQ ID NO: 1836461
uuggcuaguggagaagcac

SEQ ID NO: 1836463 - RNA, 19 nt, Artificial Sequence
  Description of Artificial Sequence: Synthetic oligonucleotide
  Sense strand starting at position 2530 of SEQ ID NO: 1563848
uuguaugucacagagggau

SEQ ID NO: 1836464 - RNA, 19 nt, Artificial Sequence
  Description of Artificial Sequence: Synthetic oligonucleotide
  Antisense strand to SEQ ID NO: 1836463
aucccucugugacauacaa

SEQ ID NO: 1836465 - RNA, 19 nt, Artificial Sequence
  Description of Artificial Sequence: Synthetic oligonucleotide
  Sense strand starting at position 2532 of SEQ ID NO: 1563848
guaugucacagagggaucu

SEQ ID NO: 1836466 - RNA, 19 nt, Artificial Sequence
  Description of Artificial Sequence: Synthetic oligonucleotide
  Antisense strand to SEQ ID NO: 1836465
agaucccucugugacauac

SEQ ID NO: 1836467 - RNA, 19 nt, Artificial Sequence
  Description of Artificial Sequence: Synthetic oligonucleotide
  Sense strand starting at position 2635 of SEQ ID NO: 1563848
agacacauugcaugaacua

SEQ ID NO: 1836468 - RNA, 19 nt, Artificial Sequence
  Description of Artificial Sequence: Synthetic oligonucleotide
  Antisense strand to SEQ ID NO: 1836467
uaguucaugcaaugugucu

SEQ ID NO: 1836469 - RNA, 19 nt, Artificial Sequence
  Description of Artificial Sequence: Synthetic oligonucleotide
  Sense strand starting at position 2911 of SEQ ID NO: 1563848
gguccauccagguaugaga

SEQ ID NO: 1836470 - RNA, 19 nt, Artificial Sequence
  Description of Artificial Sequence: Synthetic oligonucleotide
  Antisense strand to SEQ ID NO: 1836469
ucucauaccuggauggacc

SEQ ID NO: 1836471 - RNA, 19 nt, Artificial Sequence
  Description of Artificial Sequence: Synthetic oligonucleotide
  Sense strand starting at position 2913 of SEQ ID NO: 1563848
uccauccagguaugagaau

SEQ ID NO: 1836472 - RNA, 19 nt, Artificial Sequence
  Description of Artificial Sequence: Synthetic oligonucleotide
  Antisense strand to SEQ ID NO: 1836471
auucucauaccuggaugga

SEQ ID NO: 1836473 - RNA, 19 nt, Artificial Sequence
  Description of Artificial Sequence: Synthetic oligonucleotide
  Sense strand starting at position 2914 of SEQ ID NO: 1563848
ccauccagguaugagaauu

SEQ ID NO: 1836474 - RNA, 19 nt, Artificial Sequence
  Description of Artificial Sequence: Synthetic oligonucleotide
  Antisense strand to SEQ ID NO: 1836473
aauucucauaccuggaugg

SEQ ID NO: 1836475 - RNA, 19 nt, Artificial Sequence
  Description of Artificial Sequence: Synthetic oligonucleotide
  Sense strand starting at position 2920 of SEQ ID NO: 1563848
agguaugagaauugcucca

SEQ ID NO: 1836476 - RNA, 19 nt, Artificial Sequence
  Description of Artificial Sequence: Synthetic oligonucleotide
  Antisense strand to SEQ ID NO: 1836475
uggagcaauucucauaccu

SEQ ID NO: 1836477 - RNA, 19 nt, Artificial Sequence
  Description of Artificial Sequence: Synthetic oligonucleotide
  Sense strand starting at position 2972 of SEQ ID NO: 1563848
cuuccuuaucagcgauaca

SEQ ID NO: 1836478 - RNA, 19 nt, Artificial Sequence
  Description of Artificial Sequence: Synthetic oligonucleotide
  Antisense strand to SEQ ID NO: 1836477
uguaucgcugauaaggaag

SEQ ID NO: 1836479 - RNA, 19 nt, Artificial Sequence
  Description of Artificial Sequence: Synthetic oligonucleotide
  Sense strand starting at position 2975 of SEQ ID NO: 1563848
ccuuaucagcgauacaauc

SEQ ID NO: 1836480 - RNA, 19 nt, Artificial Sequence
  Description of Artificial Sequence: Synthetic oligonucleotide
  Antisense strand to SEQ ID NO: 1836479
gauuguaucgcugauaagg

SEQ ID NO: 1836481 - RNA, 19 nt, Artificial Sequence
  Description of Artificial Sequence: Synthetic oligonucleotide
  Sense strand starting at position 3015 of SEQ ID NO: 1563848
ugguguccgccaggacaau

SEQ ID NO: 1836482 - RNA, 19 nt, Artificial Sequence
  Description of Artificial Sequence: Synthetic oligonucleotide
  Antisense strand to SEQ ID NO: 1836481
auuguccuggcggacacca

SEQ ID NO: 1836483 - RNA, 19 nt, Artificial Sequence
  Description of Artificial Sequence: Synthetic oligonucleotide
  Sense strand starting at position 3041 of SEQ ID NO: 1563848
cugugugucugagcuaauu

SEQ ID NO: 1836484 - RNA, 19 nt, Artificial Sequence
  Description of Artificial Sequence: Synthetic oligonucleotide
  Antisense strand to SEQ ID NO: 1836483
aauuagcucagacacacag

SEQ ID NO: 1836485 - RNA, 19 nt, Artificial Sequence
  Description of Artificial Sequence: Synthetic oligonucleotide
  Sense strand starting at position 3043 of SEQ ID NO: 1563848
gugugucugagcuaauuac

SEQ ID NO: 1836486 - RNA, 19 nt, Artificial Sequence
  Description of Artificial Sequence: Synthetic oligonucleotide
  Antisense strand to SEQ ID NO: 1836485
guaauuagcucagacacac

SEQ ID NO: 1836487 - RNA, 19 nt, Artificial Sequence
  Description of Artificial Sequence: Synthetic oligonucleotide
  Sense strand starting at position 3262 of SEQ ID NO: 1563848
uguguaugaauggaaggua

SEQ ID NO: 1836488 - RNA, 19 nt, Artificial Sequence
  Description of Artificial Sequence: Synthetic oligonucleotide
  Antisense strand to SEQ ID NO: 1836487
uaccuuccauucauacaca

SEQ ID NO: 1836489 - RNA, 19 nt, Artificial Sequence
  Description of Artificial Sequence: Synthetic oligonucleotide
  Sense strand starting at position 3407 of SEQ ID NO: 1563848
uaacauauccucugcggga

SEQ ID NO: 1836490 - RNA, 19 nt, Artificial Sequence
  Description of Artificial Sequence: Synthetic oligonucleotide
  Antisense strand to SEQ ID NO: 1836489
ucccgcagaggauauguua

SEQ ID NO: 1836491 - RNA, 19 nt, Artificial Sequence
  Description of Artificial Sequence: Synthetic oligonucleotide
  Sense strand starting at position 3409 of SEQ ID NO: 1563848
acauauccucugcgggaga

SEQ ID NO: 1836492 - RNA, 19 nt, Artificial Sequence
  Description of Artificial Sequence: Synthetic oligonucleotide
  Antisense strand to SEQ ID NO: 1836491
ucucccgcagaggauaugu

SEQ ID NO: 1836493 - RNA, 19 nt, Artificial Sequence
  Description of Artificial Sequence: Synthetic oligonucleotide
  Sense strand starting at position 3466 of SEQ ID NO: 1563848
acgugcuaaucacuccaaa

SEQ ID NO: 1836494 - RNA, 19 nt, Artificial Sequence
  Description of Artificial Sequence: Synthetic oligonucleotide
  Antisense strand to SEQ ID NO: 1836493
uuuggagugauuagcacgu

SEQ ID NO: 1836495 - RNA, 19 nt, Artificial Sequence
  Description of Artificial Sequence: Synthetic oligonucleotide
  Sense strand starting at position 3550 of SEQ ID NO: 1563848
ggcaucuccacuuggaagu

SEQ ID NO: 1836496 - RNA, 19 nt, Artificial Sequence
  Description of Artificial Sequence: Synthetic oligonucleotide
  Antisense strand to SEQ ID NO: 1836495
acuuccaaguggagaugcc

SEQ ID NO: 1836497 - RNA, 19 nt, Artificial Sequence
  Description of Artificial Sequence: Synthetic oligonucleotide
  Sense strand starting at position 3691 of SEQ ID NO: 1563848
aguaaauggcgccauuauc

SEQ ID NO: 1836498 - RNA, 19 nt, Artificial Sequence
  Description of Artificial Sequence: Synthetic oligonucleotide
  Antisense strand to SEQ ID NO: 1836497
gauaauggcgccauuuacu

SEQ ID NO: 1836499 - RNA, 19 nt, Artificial Sequence
  Description of Artificial Sequence: Synthetic oligonucleotide
  Sense strand starting at position 3725 of SEQ ID NO: 1563848
uccagaaacugggagucau

SEQ ID NO: 1836500 - RNA, 19 nt, Artificial Sequence
  Description of Artificial Sequence: Synthetic oligonucleotide
  Antisense strand to SEQ ID NO: 1836499
augacucccaguuucugga

SEQ ID NO: 1836501 - RNA, 19 nt, Artificial Sequence
  Description of Artificial Sequence: Synthetic oligonucleotide
  Sense strand starting at position 3736 of SEQ ID NO: 1563848
ggagucaucgaucaccacu

SEQ ID NO: 1836502 - RNA, 19 nt, Artificial Sequence
  Description of Artificial Sequence: Synthetic oligonucleotide
  Antisense strand to SEQ ID NO: 1836501
aguggugaucgaugacucc

SEQ ID NO: 1836503 - RNA, 19 nt, Artificial Sequence
  Description of Artificial Sequence: Synthetic oligonucleotide
  Sense strand starting at position 3835 of SEQ ID NO: 1563848
uccauuacucccggcaaau

SEQ ID NO: 1836504 - RNA, 19 nt, Artificial Sequence
  Description of Artificial Sequence: Synthetic oligonucleotide
  Antisense strand to SEQ ID NO: 1836503
auuugccgggaguaaugga

SEQ ID NO: 1836505 - RNA, 19 nt, Artificial Sequence
  Description of Artificial Sequence: Synthetic oligonucleotide
  Sense strand starting at position 3847 of SEQ ID NO: 1563848
ggcaaauucugguccuaug

SEQ ID NO: 1836506 - RNA, 19 nt, Artificial Sequence
  Description of Artificial Sequence: Synthetic oligonucleotide
  Antisense strand to SEQ ID NO: 1836505
cauaggaccagaauuugcc

SEQ ID NO: 1836507 - RNA, 19 nt, Artificial Sequence
  Description of Artificial Sequence: Synthetic oligonucleotide
  Sense strand starting at position 3952 of SEQ ID NO: 1563848
aaacucuauccgggcaaga

SEQ ID NO: 1836508 - RNA, 19 nt, Artificial Sequence
  Description of Artificial Sequence: Synthetic oligonucleotide
  Antisense strand to SEQ ID NO: 1836507
ucuugcccggauagaguuu

SEQ ID NO: 1836509 - RNA, 19 nt, Artificial Sequence
  Description of Artificial Sequence: Synthetic oligonucleotide
  Sense strand starting at position 3954 of SEQ ID NO: 1563848
acucuauccgggcaagaag

SEQ ID NO: 1836510 - RNA, 19 nt, Artificial Sequence
  Description of Artificial Sequence: Synthetic oligonucleotide
  Antisense strand to SEQ ID NO: 1836509
cuucuugcccggauagagu

SEQ ID NO: 1836511 - RNA, 19 nt, Artificial Sequence
  Description of Artificial Sequence: Synthetic oligonucleotide
  Sense strand starting at position 3976 of SEQ ID NO: 1563848
guggaauugggcgaucaga

SEQ ID NO: 1836512 - RNA, 19 nt, Artificial Sequence
  Description of Artificial Sequence: Synthetic oligonucleotide
  Antisense strand to SEQ ID NO: 1836511
ucugaucgcccaauuccac

SEQ ID NO: 1836513 - RNA, 19 nt, Artificial Sequence
  Description of Artificial Sequence: Synthetic oligonucleotide
  Sense strand starting at position 2060 of SEQ ID NO: 1563849
gugguucugcaccaaagga

SEQ ID NO: 1836514 - RNA, 19 nt, Artificial Sequence
  Description of Artificial Sequence: Synthetic oligonucleotide
  Antisense strand to SEQ ID NO: 1836513
uccuuuggugcagaaccac

SEQ ID NO: 1836515 - RNA, 19 nt, Artificial Sequence
  Description of Artificial Sequence: Synthetic oligonucleotide
  Sense strand starting at position 2095 of SEQ ID NO: 1563849
gaaacuuugguagggugaa

SEQ ID NO: 1836516 - RNA, 19 nt, Artificial Sequence
  Description of Artificial Sequence: Synthetic oligonucleotide
  Antisense strand to SEQ ID NO: 1836515
uucacccuaccaaaguuuc

SEQ ID NO: 1836517 - RNA, 19 nt, Artificial Sequence
  Description of Artificial Sequence: Synthetic oligonucleotide
  Sense strand starting at position 2112 of SEQ ID NO: 1563849
aagcaaggagcuuagagua

SEQ ID NO: 1836518 - RNA, 19 nt, Artificial Sequence
  Description of Artificial Sequence: Synthetic oligonucleotide
  Antisense strand to SEQ ID NO: 1836517
uacucuaagcuccuugcuu

SEQ ID NO: 1836519 - RNA, 19 nt, Artificial Sequence
  Description of Artificial Sequence: Synthetic oligonucleotide
  Sense strand starting at position 2119 of SEQ ID NO: 1563849
gagcuuagaguagaugcau

SEQ ID NO: 1836520 - RNA, 19 nt, Artificial Sequence
  Description of Artificial Sequence: Synthetic oligonucleotide
  Antisense strand to SEQ ID NO: 1836519
augcaucuacucuaagcuc

SEQ ID NO: 1836521 - RNA, 19 nt, Artificial Sequence
  Description of Artificial Sequence: Synthetic oligonucleotide
  Sense strand starting at position 2128 of SEQ ID NO: 1563849
guagaugcauuagggagua

SEQ ID NO: 1836522 - RNA, 19 nt, Artificial Sequence
  Description of Artificial Sequence: Synthetic oligonucleotide
  Antisense strand to SEQ ID NO: 1836521
uacucccuaaugcaucuac

SEQ ID NO: 1836523 - RNA, 19 nt, Artificial Sequence
  Description of Artificial Sequence: Synthetic oligonucleotide
  Sense strand starting at position 2210 of SEQ ID NO: 1563849
gugccaggcacuuaauaga

SEQ ID NO: 1836524 - RNA, 19 nt, Artificial Sequence
  Description of Artificial Sequence: Synthetic oligonucleotide
  Antisense strand to SEQ ID NO: 1836523
ucuauuaagugccuggcac

SEQ ID NO: 1836525 - RNA, 19 nt, Artificial Sequence
  Description of Artificial Sequence: Synthetic oligonucleotide
  Sense strand starting at position 2239 of SEQ ID NO: 1563849
ugguaaauaucauugagau

SEQ ID NO: 1836526 - RNA, 19 nt, Artificial Sequence
  Description of Artificial Sequence: Synthetic oligonucleotide
  Antisense strand to SEQ ID NO: 1836525
aucucaaugauauuuacca

SEQ ID NO: 1836527 - RNA, 19 nt, Artificial Sequence
  Description of Artificial Sequence: Synthetic oligonucleotide
  Sense strand starting at position 2240 of SEQ ID NO: 1563849
gguaaauaucauugagauu

SEQ ID NO: 1836528 - RNA, 19 nt, Artificial Sequence
  Description of Artificial Sequence: Synthetic oligonucleotide
  Antisense strand to SEQ ID NO: 1836527
aaucucaaugauauuuacc

SEQ ID NO: 1836529 - RNA, 19 nt, Artificial Sequence
  Description of Artificial Sequence: Synthetic oligonucleotide
  Sense strand starting at position 2290 of SEQ ID NO: 1563849
ugugcauugucucuggaag

SEQ ID NO: 1836530 - RNA, 19 nt, Artificial Sequence
  Description of Artificial Sequence: Synthetic oligonucleotide
  Antisense strand to SEQ ID NO: 1836529
cuuccagagacaaugcaca

SEQ ID NO: 1836531 - RNA, 19 nt, Artificial Sequence
  Description of Artificial Sequence: Synthetic oligonucleotide
  Sense strand starting at position 2325 of SEQ ID NO: 1563849
cugaccaugucucuucuau

SEQ ID NO: 1836532 - RNA, 19 nt, Artificial Sequence
  Description of Artificial Sequence: Synthetic oligonucleotide
  Antisense strand to SEQ ID NO: 1836531
auagaagagacauggucag

SEQ ID NO: 1836533 - RNA, 19 nt, Artificial Sequence
  Description of Artificial Sequence: Synthetic oligonucleotide
  Sense strand starting at position 2380 of SEQ ID NO: 1563849
uguugugagcuagaaagaa

SEQ ID NO: 1836534 - RNA, 19 nt, Artificial Sequence
  Description of Artificial Sequence: Synthetic oligonucleotide
  Antisense strand to SEQ ID NO: 1836533
uucuuucuagcucacaaca

SEQ ID NO: 1836535 - RNA, 19 nt, Artificial Sequence
  Description of Artificial Sequence: Synthetic oligonucleotide
  Sense strand starting at position 2411 of SEQ ID NO: 1563849
gggucugaaugccugaaau

SEQ ID NO: 1836536 - RNA, 19 nt, Artificial Sequence
  Description of Artificial Sequence: Synthetic oligonucleotide
  Antisense strand to SEQ ID NO: 1836535
auuucaggcauucagaccc

SEQ ID NO: 1836537 - RNA, 19 nt, Artificial Sequence
  Description of Artificial Sequence: Synthetic oligonucleotide
  Sense strand starting at position 2588 of SEQ ID NO: 1563849
uugugaaagucaguugaga

SEQ ID NO: 1836538 - RNA, 19 nt, Artificial Sequence
  Description of Artificial Sequence: Synthetic oligonucleotide
  Antisense strand to SEQ ID NO: 1836537
ucucaacugacuuucacaa

SEQ ID NO: 1836539 - RNA, 19 nt, Artificial Sequence
  Description of Artificial Sequence: Synthetic oligonucleotide
  Sense strand starting at position 2590 of SEQ ID NO: 1563849
gugaaagucaguugagaua

SEQ ID NO: 1836540 - RNA, 19 nt, Artificial Sequence
  Description of Artificial Sequence: Synthetic oligonucleotide
  Antisense strand to SEQ ID NO: 1836539
uaucucaacugacuuucac

SEQ ID NO: 1836541 - RNA, 19 nt, Artificial Sequence
  Description of Artificial Sequence: Synthetic oligonucleotide
  Sense strand starting at position 2599 of SEQ ID NO: 1563849
aguugagauaccgaguguu

SEQ ID NO: 1836542 - RNA, 19 nt, Artificial Sequence
  Description of Artificial Sequence: Synthetic oligonucleotide
  Antisense strand to SEQ ID NO: 1836541
aacacucgguaucucaacu

SEQ ID NO: 1836543 - RNA, 19 nt, Artificial Sequence
  Description of Artificial Sequence: Synthetic oligonucleotide
  Sense strand starting at position 2602 of SEQ ID NO: 1563849
ugagauaccgaguguuaag

SEQ ID NO: 1836544 - RNA, 19 nt, Artificial Sequence
  Description of Artificial Sequence: Synthetic oligonucleotide
  Antisense strand to SEQ ID NO: 1836543
cuuaacacucgguaucuca

SEQ ID NO: 1836545 - RNA, 19 nt, Artificial Sequence
  Description of Artificial Sequence: Synthetic oligonucleotide
  Sense strand starting at position 2612 of SEQ ID NO: 1563849
aguguuaagggauguguua

SEQ ID NO: 1836546 - RNA, 19 nt, Artificial Sequence
  Description of Artificial Sequence: Synthetic oligonucleotide
  Antisense strand to SEQ ID NO: 1836545
uaacacaucccuuaacacu

SEQ ID NO: 1836547 - RNA, 19 nt, Artificial Sequence
  Description of Artificial Sequence: Synthetic oligonucleotide
  Sense strand starting at position 2623 of SEQ ID NO: 1563849
auguguuaccugcucuguu

SEQ ID NO: 1836548 - RNA, 19 nt, Artificial Sequence
  Description of Artificial Sequence: Synthetic oligonucleotide
  Antisense strand to SEQ ID NO: 1836547
aacagagcagguaacacau

SEQ ID NO: 1836549 - RNA, 19 nt, Artificial Sequence
  Description of Artificial Sequence: Synthetic oligonucleotide
  Sense strand starting at position 2624 of SEQ ID NO: 1563849
uguguuaccugcucuguuu

SEQ ID NO: 1836550 - RNA, 19 nt, Artificial Sequence
  Description of Artificial Sequence: Synthetic oligonucleotide
  Antisense strand to SEQ ID NO: 1836549
aaacagagcagguaacaca

SEQ ID NO: 1836551 - RNA, 19 nt, Artificial Sequence
  Description of Artificial Sequence: Synthetic oligonucleotide
  Sense strand starting at position 2713 of SEQ ID NO: 1563849
ggucaucuaucccgaaguu

SEQ ID NO: 1836552 - RNA, 19 nt, Artificial Sequence
  Description of Artificial Sequence: Synthetic oligonucleotide
  Antisense strand to SEQ ID NO: 1836551
aacuucgggauagaugacc

SEQ ID NO: 1836553 - RNA, 19 nt, Artificial Sequence
  Description of Artificial Sequence: Synthetic oligonucleotide
  Sense strand starting at position 2714 of SEQ ID NO: 1563849
gucaucuaucccgaaguua

SEQ ID NO: 1836554 - RNA, 19 nt, Artificial Sequence
  Description of Artificial Sequence: Synthetic oligonucleotide
  Antisense strand to SEQ ID NO: 1836553
uaacuucgggauagaugac

SEQ ID NO: 1836555 - RNA, 19 nt, Artificial Sequence
  Description of Artificial Sequence: Synthetic oligonucleotide
  Sense strand starting at position 2734 of SEQ ID NO: 1563849
aguuaaucucuuugucauc

SEQ ID NO: 1836556 - RNA, 19 nt, Artificial Sequence
  Description of Artificial Sequence: Synthetic oligonucleotide
  Antisense strand to SEQ ID NO: 1836555
gaugacaaagagauuaacu

SEQ ID NO: 1836557 - RNA, 19 nt, Artificial Sequence
  Description of Artificial Sequence: Synthetic oligonucleotide
  Sense strand starting at position 2735 of SEQ ID NO: 1563849
guuaaucucuuugucauca

SEQ ID NO: 1836558 - RNA, 19 nt, Artificial Sequence
  Description of Artificial Sequence: Synthetic oligonucleotide
  Antisense strand to SEQ ID NO: 1836557
ugaugacaaagagauuaac

SEQ ID NO: 1836559 - RNA, 19 nt, Artificial Sequence
  Description of Artificial Sequence: Synthetic oligonucleotide
  Sense strand starting at position 2739 of SEQ ID NO: 1563849
aucucuuugucaucaagga

SEQ ID NO: 1836560 - RNA, 19 nt, Artificial Sequence
  Description of Artificial Sequence: Synthetic oligonucleotide
  Antisense strand to SEQ ID NO: 1836559
uccuugaugacaaagagau

SEQ ID NO: 1836561 - RNA, 19 nt, Artificial Sequence
  Description of Artificial Sequence: Synthetic oligonucleotide
  Sense strand starting at position 2803 of SEQ ID NO: 1563849
uuucuagaaguuuguaaag

SEQ ID NO: 1836562 - RNA, 19 nt, Artificial Sequence
  Description of Artificial Sequence: Synthetic oligonucleotide
  Antisense strand to SEQ ID NO: 1836561
cuuuacaaacuucuagaaa

SEQ ID NO: 1836563 - RNA, 19 nt, Artificial Sequence
  Description of Artificial Sequence: Synthetic oligonucleotide
  Sense strand starting at position 2805 of SEQ ID NO: 1563849
ucuagaaguuuguaaagaa

SEQ ID NO: 1836564 - RNA, 19 nt, Artificial Sequence
  Description of Artificial Sequence: Synthetic oligonucleotide
  Antisense strand to SEQ ID NO: 1836563
uucuuuacaaacuucuaga

SEQ ID NO: 1836565 - RNA, 19 nt, Artificial Sequence
  Description of Artificial Sequence: Synthetic oligonucleotide
  Sense strand starting at position 2840 of SEQ ID NO: 1563849
gucaguucuaccuguagau

SEQ ID NO: 1836566 - RNA, 19 nt, Artificial Sequence
  Description of Artificial Sequence: Synthetic oligonucleotide
  Antisense strand to SEQ ID NO: 1836565
aucuacagguagaacugac

SEQ ID NO: 1836567 - RNA, 19 nt, Artificial Sequence
  Description of Artificial Sequence: Synthetic oligonucleotide
  Sense strand starting at position 2961 of SEQ ID NO: 1563849
ggcagcagugaguaagaaa

SEQ ID NO: 1836568 - RNA, 19 nt, Artificial Sequence
  Description of Artificial Sequence: Synthetic oligonucleotide
  Antisense strand to SEQ ID NO: 1836567
uuucuuacucacugcugcc

SEQ ID NO: 1836569 - RNA, 19 nt, Artificial Sequence
  Description of Artificial Sequence: Synthetic oligonucleotide
  Sense strand starting at position 2964 of SEQ ID NO: 1563849
agcagugaguaagaaagaa

SEQ ID NO: 1836570 - RNA, 19 nt, Artificial Sequence
  Description of Artificial Sequence: Synthetic oligonucleotide
  Antisense strand to SEQ ID NO: 1836569
uucuuucuuacucacugcu

SEQ ID NO: 1836571 - RNA, 19 nt, Artificial Sequence
  Description of Artificial Sequence: Synthetic oligonucleotide
  Sense strand starting at position 3108 of SEQ ID NO: 1563849
acccuuuauugauauguuu

SEQ ID NO: 1836572 - RNA, 19 nt, Artificial Sequence
  Description of Artificial Sequence: Synthetic oligonucleotide
  Antisense strand to SEQ ID NO: 1836571
aaacauaucaauaaagggu

SEQ ID NO: 1836573 - RNA, 19 nt, Artificial Sequence
  Description of Artificial Sequence: Synthetic oligonucleotide
  Sense strand starting at position 3123 of SEQ ID NO: 1563849
guuuauaucuugcugcaaa

SEQ ID NO: 1836574 - RNA, 19 nt, Artificial Sequence
  Description of Artificial Sequence: Synthetic oligonucleotide
  Antisense strand to SEQ ID NO: 1836573
uuugcagcaagauauaaac

SEQ ID NO: 1836575 - RNA, 19 nt, Artificial Sequence
  Description of Artificial Sequence: Synthetic oligonucleotide
  Sense strand starting at position 3153 of SEQ ID NO: 1563849
uguugucuuucuuuauauc

SEQ ID NO: 1836576 - RNA, 19 nt, Artificial Sequence
  Description of Artificial Sequence: Synthetic oligonucleotide
  Antisense strand to SEQ ID NO: 1836575
gauauaaagaaagacaaca

SEQ ID NO: 1836577 - RNA, 19 nt, Artificial Sequence
  Description of Artificial Sequence: Synthetic oligonucleotide
  Sense strand starting at position 3154 of SEQ ID NO: 1563849
guugucuuucuuuauaucu

SEQ ID NO: 1836578 - RNA, 19 nt, Artificial Sequence
  Description of Artificial Sequence: Synthetic oligonucleotide
  Antisense strand to SEQ ID NO: 1836577
agauauaaagaaagacaac

SEQ ID NO: 1836579 - RNA, 19 nt, Artificial Sequence
  Description of Artificial Sequence: Synthetic oligonucleotide
  Sense strand starting at position 3397 of SEQ ID NO: 1563849
cuguguccauguguuguaa

SEQ ID NO: 1836580 - RNA, 19 nt, Artificial Sequence
  Description of Artificial Sequence: Synthetic oligonucleotide
  Antisense strand to SEQ ID NO: 1836579
uuacaacacauggacacag

SEQ ID NO: 1836581 - RNA, 19 nt, Artificial Sequence
  Description of Artificial Sequence: Synthetic oligonucleotide
  Sense strand starting at position 3401 of SEQ ID NO: 1563849
guccauguguuguaauugu

SEQ ID NO: 1836582 - RNA, 19 nt, Artificial Sequence
  Description of Artificial Sequence: Synthetic oligonucleotide
  Antisense strand to SEQ ID NO: 1836581
acaauuacaacacauggac

SEQ ID NO: 1836583 - RNA, 19 nt, Artificial Sequence
  Description of Artificial Sequence: Synthetic oligonucleotide
  Sense strand starting at position 3633 of SEQ ID NO: 1563849
uuuaauacgucuuuaggaa

SEQ ID NO: 1836584 - RNA, 19 nt, Artificial Sequence
  Description of Artificial Sequence: Synthetic oligonucleotide
  Antisense strand to SEQ ID NO: 1836583
uuccuaaagacguauuaaa

SEQ ID NO: 1836585 - RNA, 19 nt, Artificial Sequence
  Description of Artificial Sequence: Synthetic oligonucleotide
  Sense strand starting at position 3634 of SEQ ID NO: 1563849
uuaauacgucuuuaggaaa

SEQ ID NO: 1836586 - RNA, 19 nt, Artificial Sequence
  Description of Artificial Sequence: Synthetic oligonucleotide
  Antisense strand to SEQ ID NO: 1836585
uuuccuaaagacguauuaa

SEQ ID NO: 1836587 - RNA, 19 nt, Artificial Sequence
  Description of Artificial Sequence: Synthetic oligonucleotide
  Sense strand starting at position 3732 of SEQ ID NO: 1563849
aguuucgguucugugaagu

SEQ ID NO: 1836588 - RNA, 19 nt, Artificial Sequence
  Description of Artificial Sequence: Synthetic oligonucleotide
  Antisense strand to SEQ ID NO: 1836587
acuucacagaaccgaaacu

SEQ ID NO: 1836589 - RNA, 19 nt, Artificial Sequence
  Description of Artificial Sequence: Synthetic oligonucleotide
  Sense strand starting at position 3743 of SEQ ID NO: 1563849
ugugaaguccaaugcaguu

SEQ ID NO: 1836590 - RNA, 19 nt, Artificial Sequence
  Description of Artificial Sequence: Synthetic oligonucleotide
  Antisense strand to SEQ ID NO: 1836589
aacugcauuggacuucaca

SEQ ID NO: 1836591 - RNA, 19 nt, Artificial Sequence
  Description of Artificial Sequence: Synthetic oligonucleotide
  Sense strand starting at position 3980 of SEQ ID NO: 1563849
uuuguucuaguauaacaga

SEQ ID NO: 1836592 - RNA, 19 nt, Artificial Sequence
  Description of Artificial Sequence: Synthetic oligonucleotide
  Antisense strand to SEQ ID NO: 1836591
ucuguuauacuagaacaaa

SEQ ID NO: 1836593 - RNA, 19 nt, Artificial Sequence
  Description of Artificial Sequence: Synthetic oligonucleotide
  Sense strand starting at position 353 of SEQ ID NO: 1563850
ggccauguacuccaagacu

SEQ ID NO: 1836594 - RNA, 19 nt, Artificial Sequence
  Description of Artificial Sequence: Synthetic oligonucleotide
  Antisense strand to SEQ ID NO: 1836593
agucuuggaguacauggcc

SEQ ID NO: 1836595 - RNA, 19 nt, Artificial Sequence
  Description of Artificial Sequence: Synthetic oligonucleotide
  Sense strand starting at position 476 of SEQ ID NO: 1563850
aagcuuacgggugauggaa

SEQ ID NO: 1836596 - RNA, 19 nt, Artificial Sequence
  Description of Artificial Sequence: Synthetic oligonucleotide
  Antisense strand to SEQ ID NO: 1836595
uuccaucacccguaagcuu

SEQ ID NO: 1836597 - RNA, 19 nt, Artificial Sequence
  Description of Artificial Sequence: Synthetic oligonucleotide
  Sense strand starting at position 727 of SEQ ID NO: 1563850
caagaauuagaguagcucu

SEQ ID NO: 1836598 - RNA, 19 nt, Artificial Sequence
  Description of Artificial Sequence: Synthetic oligonucleotide
  Antisense strand to SEQ ID NO: 1836597
agagcuacucuaauucuug

SEQ ID NO: 1836599 - RNA, 19 nt, Artificial Sequence
  Description of Artificial Sequence: Synthetic oligonucleotide
  Sense strand starting at position 737 of SEQ ID NO: 1563850
aguagcucuauugaggaua

SEQ ID NO: 1836600 - RNA, 19 nt, Artificial Sequence
  Description of Artificial Sequence: Synthetic oligonucleotide
  Antisense strand to SEQ ID NO: 1836599
uauccucaauagagcuacu

SEQ ID NO: 1836601 - RNA, 19 nt, Artificial Sequence
  Description of Artificial Sequence: Synthetic oligonucleotide
  Sense strand starting at position 796 of SEQ ID NO: 1563850
auagcucauccugauguau

SEQ ID NO: 1836602 - RNA, 19 nt, Artificial Sequence
  Description of Artificial Sequence: Synthetic oligonucleotide
  Antisense strand to SEQ ID NO: 1836601
auacaucaggaugagcuau

SEQ ID NO: 1836603 - RNA, 19 nt, Artificial Sequence
  Description of Artificial Sequence: Synthetic oligonucleotide
  Sense strand starting at position 1011 of SEQ ID NO: 1563850
gcuuccaucuuugugauuu

SEQ ID NO: 1836604 - RNA, 19 nt, Artificial Sequence
  Description of Artificial Sequence: Synthetic oligonucleotide
  Antisense strand to SEQ ID NO: 1836603
aaaucacaaagauggaagc

SEQ ID NO: 1836605 - RNA, 19 nt, Artificial Sequence
  Description of Artificial Sequence: Synthetic oligonucleotide
  Sense strand starting at position 1088 of SEQ ID NO: 1563850
cggccaguacuccaagaau

SEQ ID NO: 1836606 - RNA, 19 nt, Artificial Sequence
  Description of Artificial Sequence: Synthetic oligonucleotide
  Antisense strand to SEQ ID NO: 1836605
auucuuggaguacuggccg

SEQ ID NO: 1836607 - RNA, 19 nt, Artificial Sequence
  Description of Artificial Sequence: Synthetic oligonucleotide
  Sense strand starting at position 1292 of SEQ ID NO: 1563850
cagggacuccgcuauccua

SEQ ID NO: 1836608 - RNA, 19 nt, Artificial Sequence
  Description of Artificial Sequence: Synthetic oligonucleotide
  Antisense strand to SEQ ID NO: 1836607
uaggauagcggagucccug

SEQ ID NO: 1836609 - RNA, 19 nt, Artificial Sequence
  Description of Artificial Sequence: Synthetic oligonucleotide
  Sense strand starting at position 1437 of SEQ ID NO: 1563850
ugaucugaguacucucuga

SEQ ID NO: 1836610 - RNA, 19 nt, Artificial Sequence
  Description of Artificial Sequence: Synthetic oligonucleotide
  Antisense strand to SEQ ID NO: 1836609
ucagagaguacucagauca

SEQ ID NO: 1836611 - RNA, 19 nt, Artificial Sequence
  Description of Artificial Sequence: Synthetic oligonucleotide
  Sense strand starting at position 1441 of SEQ ID NO: 1563850
cugaguacucucugagaaa

SEQ ID NO: 1836612 - RNA, 19 nt, Artificial Sequence
  Description of Artificial Sequence: Synthetic oligonucleotide
  Antisense strand to SEQ ID NO: 1836611
uuucucagagaguacucag

SEQ ID NO: 1836613 - RNA, 19 nt, Artificial Sequence
  Description of Artificial Sequence: Synthetic oligonucleotide
  Sense strand starting at position 1636 of SEQ ID NO: 1563850
uguugacacacugagaguu

SEQ ID NO: 1836614 - RNA, 19 nt, Artificial Sequence
  Description of Artificial Sequence: Synthetic oligonucleotide
  Antisense strand to SEQ ID NO: 1836613
aacucucagugugucaaca

SEQ ID NO: 1836615 - RNA, 19 nt, Artificial Sequence
  Description of Artificial Sequence: Synthetic oligonucleotide
  Sense strand starting at position 1715 of SEQ ID NO: 1563850
ggcguuaguagcuuguauu

SEQ ID NO: 1836616 - RNA, 19 nt, Artificial Sequence
  Description of Artificial Sequence: Synthetic oligonucleotide
  Antisense strand to SEQ ID NO: 1836615
aauacaagcuacuaacgcc

SEQ ID NO: 1836617 - RNA, 19 nt, Artificial Sequence
  Description of Artificial Sequence: Synthetic oligonucleotide
  Sense strand starting at position 1761 of SEQ ID NO: 1563850
gugaucucugcgcuacagu

SEQ ID NO: 1836618 - RNA, 19 nt, Artificial Sequence
  Description of Artificial Sequence: Synthetic oligonucleotide
  Antisense strand to SEQ ID NO: 1836617
acuguagcgcagagaucac

SEQ ID NO: 1836619 - RNA, 19 nt, Artificial Sequence
  Description of Artificial Sequence: Synthetic oligonucleotide
  Sense strand starting at position 1789 of SEQ ID NO: 1563850
ucuggcuuaccagagacau

SEQ ID NO: 1836620 - RNA, 19 nt, Artificial Sequence
  Description of Artificial Sequence: Synthetic oligonucleotide
  Antisense strand to SEQ ID NO: 1836619
augucucugguaagccaga

SEQ ID NO: 1836621 - RNA, 19 nt, Artificial Sequence
  Description of Artificial Sequence: Synthetic oligonucleotide
  Sense strand starting at position 1930 of SEQ ID NO: 1563850
ugaaaucuggugugaagag

SEQ ID NO: 1836622 - RNA, 19 nt, Artificial Sequence
  Description of Artificial Sequence: Synthetic oligonucleotide
  Antisense strand to SEQ ID NO: 1836621
cucuucacaccagauuuca

SEQ ID NO: 1836623 - RNA, 19 nt, Artificial Sequence
  Description of Artificial Sequence: Synthetic oligonucleotide
  Sense strand starting at position 2141 of SEQ ID NO: 1563850
ugaauucgaacuuguuaga

SEQ ID NO: 1836624 - RNA, 19 nt, Artificial Sequence
  Description of Artificial Sequence: Synthetic oligonucleotide
  Antisense strand to SEQ ID NO: 1836623
ucuaacaaguucgaauuca

SEQ ID NO: 1836625 - RNA, 19 nt, Artificial Sequence
  Description of Artificial Sequence: Synthetic oligonucleotide
  Sense strand starting at position 2431 of SEQ ID NO: 1563850
cacagugcuguacaucaga

SEQ ID NO: 1836626 - RNA, 19 nt, Artificial Sequence
  Description of Artificial Sequence: Synthetic oligonucleotide
  Antisense strand to SEQ ID NO: 1836625
ucugauguacagcacugug

SEQ ID NO: 1836627 - RNA, 19 nt, Artificial Sequence
  Description of Artificial Sequence: Synthetic oligonucleotide
  Sense strand starting at position 2434 of SEQ ID NO: 1563850
agugcuguacaucagaaua

SEQ ID NO: 1836628 - RNA, 19 nt, Artificial Sequence
  Description of Artificial Sequence: Synthetic oligonucleotide
  Antisense strand to SEQ ID NO: 1836627
uauucugauguacagcacu

SEQ ID NO: 1836629 - RNA, 19 nt, Artificial Sequence
  Description of Artificial Sequence: Synthetic oligonucleotide
  Sense strand starting at position 2660 of SEQ ID NO: 1563850
cugggucauggagguaaau

SEQ ID NO: 1836630 - RNA, 19 nt, Artificial Sequence
  Description of Artificial Sequence: Synthetic oligonucleotide
  Antisense strand to SEQ ID NO: 1836629
auuuaccuccaugacccag

SEQ ID NO: 1836631 - RNA, 19 nt, Artificial Sequence
  Description of Artificial Sequence: Synthetic oligonucleotide
  Sense strand starting at position 2662 of SEQ ID NO: 1563850
gggucauggagguaaaugu

SEQ ID NO: 1836632 - RNA, 19 nt, Artificial Sequence
  Description of Artificial Sequence: Synthetic oligonucleotide
  Antisense strand to SEQ ID NO: 1836631
acauuuaccuccaugaccc

SEQ ID NO: 1836633 - RNA, 19 nt, Artificial Sequence
  Description of Artificial Sequence: Synthetic oligonucleotide
  Sense strand starting at position 2820 of SEQ ID NO: 1563850
ucugauggagggugaauua

SEQ ID NO: 1836634 - RNA, 19 nt, Artificial Sequence
  Description of Artificial Sequence: Synthetic oligonucleotide
  Antisense strand to SEQ ID NO: 1836633
uaauucacccuccaucaga

SEQ ID NO: 1836635 - RNA, 19 nt, Artificial Sequence
  Description of Artificial Sequence: Synthetic oligonucleotide
  Sense strand starting at position 2830 of SEQ ID NO: 1563850
ggugaauuaacaugugaua

SEQ ID NO: 1836636 - RNA, 19 nt, Artificial Sequence
  Description of Artificial Sequence: Synthetic oligonucleotide
  Antisense strand to SEQ ID NO: 1836635
uaucacauguuaauucacc

SEQ ID NO: 1836637 - RNA, 19 nt, Artificial Sequence
  Description of Artificial Sequence: Synthetic oligonucleotide
  Sense strand starting at position 2930 of SEQ ID NO: 1563850
ggaguugagcucuaaguga

SEQ ID NO: 1836638 - RNA, 19 nt, Artificial Sequence
  Description of Artificial Sequence: Synthetic oligonucleotide
  Antisense strand to SEQ ID NO: 1836637
ucacuuagagcucaacucc

SEQ ID NO: 1836639 - RNA, 19 nt, Artificial Sequence
  Description of Artificial Sequence: Synthetic oligonucleotide
  Sense strand starting at position 2935 of SEQ ID NO: 1563850
ugagcucuaagugaugaau

SEQ ID NO: 1836640 - RNA, 19 nt, Artificial Sequence
  Description of Artificial Sequence: Synthetic oligonucleotide
  Antisense strand to SEQ ID NO: 1836639
auucaucacuuagagcuca

SEQ ID NO: 1836641 - RNA, 19 nt, Artificial Sequence
  Description of Artificial Sequence: Synthetic oligonucleotide
  Sense strand starting at position 2972 of SEQ ID NO: 1563850
guaguauucuaaccugaag

SEQ ID NO: 1836642 - RNA, 19 nt, Artificial Sequence
  Description of Artificial Sequence: Synthetic oligonucleotide
  Antisense strand to SEQ ID NO: 1836641
cuucagguuagaauacuac

SEQ ID NO: 1836643 - RNA, 19 nt, Artificial Sequence
  Description of Artificial Sequence: Synthetic oligonucleotide
  Sense strand starting at position 2975 of SEQ ID NO: 1563850
guauucuaaccugaaguaa

SEQ ID NO: 1836644 - RNA, 19 nt, Artificial Sequence
  Description of Artificial Sequence: Synthetic oligonucleotide
  Antisense strand to SEQ ID NO: 1836643
uuacuucagguuagaauac

SEQ ID NO: 1836645 - RNA, 19 nt, Artificial Sequence
  Description of Artificial Sequence: Synthetic oligonucleotide
  Sense strand starting at position 3064 of SEQ ID NO: 1563850
gccagagugcacuagaaug

SEQ ID NO: 1836646 - RNA, 19 nt, Artificial Sequence
  Description of Artificial Sequence: Synthetic oligonucleotide
  Antisense strand to SEQ ID NO: 1836645
cauucuagugcacucuggc

SEQ ID NO: 1836647 - RNA, 19 nt, Artificial Sequence
  Description of Artificial Sequence: Synthetic oligonucleotide
  Sense strand starting at position 3074 of SEQ ID NO: 1563850
acuagaaugggugguagau

SEQ ID NO: 1836648 - RNA, 19 nt, Artificial Sequence
  Description of Artificial Sequence: Synthetic oligonucleotide
  Antisense strand to SEQ ID NO: 1836647
aucuaccacccauucuagu

SEQ ID NO: 1836649 - RNA, 19 nt, Artificial Sequence
  Description of Artificial Sequence: Synthetic oligonucleotide
  Sense strand starting at position 3093 of SEQ ID NO: 1563850
gaggaugaagguugcuaga

SEQ ID NO: 1836650 - RNA, 19 nt, Artificial Sequence
  Description of Artificial Sequence: Synthetic oligonucleotide
  Antisense strand to SEQ ID NO: 1836649
ucuagcaaccuucauccuc

SEQ ID NO: 1836651 - RNA, 19 nt, Artificial Sequence
  Description of Artificial Sequence: Synthetic oligonucleotide
  Sense strand starting at position 3095 of SEQ ID NO: 1563850
ggaugaagguugcuagaca

SEQ ID NO: 1836652 - RNA, 19 nt, Artificial Sequence
  Description of Artificial Sequence: Synthetic oligonucleotide
  Antisense strand to SEQ ID NO: 1836651
ugucuagcaaccuucaucc

SEQ ID NO: 1836653 - RNA, 19 nt, Artificial Sequence
  Description of Artificial Sequence: Synthetic oligonucleotide
  Sense strand starting at position 3103 of SEQ ID NO: 1563850
guugcuagacaguaaggau

SEQ ID NO: 1836654 - RNA, 19 nt, Artificial Sequence
  Description of Artificial Sequence: Synthetic oligonucleotide
  Antisense strand to SEQ ID NO: 1836653
auccuuacugucuagcaac

SEQ ID NO: 1836655 - RNA, 19 nt, Artificial Sequence
  Description of Artificial Sequence: Synthetic oligonucleotide
  Sense strand starting at position 3291 of SEQ ID NO: 1563850
ugagucagcugcuuuauuu

SEQ ID NO: 1836656 - RNA, 19 nt, Artificial Sequence
  Description of Artificial Sequence: Synthetic oligonucleotide
  Antisense strand to SEQ ID NO: 1836655
aaauaaagcagcugacuca

SEQ ID NO: 1836657 - RNA, 19 nt, Artificial Sequence
  Description of Artificial Sequence: Synthetic oligonucleotide
  Sense strand starting at position 3309 of SEQ ID NO: 1563850
uucugagagcucuacuaaa

SEQ ID NO: 1836658 - RNA, 19 nt, Artificial Sequence
  Description of Artificial Sequence: Synthetic oligonucleotide
  Antisense strand to SEQ ID NO: 1836657
uuuaguagagcucucagaa

SEQ ID NO: 1836659 - RNA, 19 nt, Artificial Sequence
  Description of Artificial Sequence: Synthetic oligonucleotide
  Sense strand starting at position 3373 of SEQ ID NO: 1563850
aguugaagacuaugauggu

SEQ ID NO: 1836660 - RNA, 19 nt, Artificial Sequence
  Description of Artificial Sequence: Synthetic oligonucleotide
  Antisense strand to SEQ ID NO: 1836659
accaucauagucuucaacu

SEQ ID NO: 1836661 - RNA, 19 nt, Artificial Sequence
  Description of Artificial Sequence: Synthetic oligonucleotide
  Sense strand starting at position 3468 of SEQ ID NO: 1563850
ccuuaaauucuugauggua

SEQ ID NO: 1836662 - RNA, 19 nt, Artificial Sequence
  Description of Artificial Sequence: Synthetic oligonucleotide
  Antisense strand to SEQ ID NO: 1836661
uaccaucaagaauuuaagg

SEQ ID NO: 1836663 - RNA, 19 nt, Artificial Sequence
  Description of Artificial Sequence: Synthetic oligonucleotide
  Sense strand starting at position 3471 of SEQ ID NO: 1563850
uaaauucuugaugguaaug

SEQ ID NO: 1836664 - RNA, 19 nt, Artificial Sequence
  Description of Artificial Sequence: Synthetic oligonucleotide
  Antisense strand to SEQ ID NO: 1836663
cauuaccaucaagaauuua

SEQ ID NO: 1836665 - RNA, 19 nt, Artificial Sequence
  Description of Artificial Sequence: Synthetic oligonucleotide
  Sense strand starting at position 3616 of SEQ ID NO: 1563850
ucaguacugaaguagguaa

SEQ ID NO: 1836666 - RNA, 19 nt, Artificial Sequence
  Description of Artificial Sequence: Synthetic oligonucleotide
  Antisense strand to SEQ ID NO: 1836665
uuaccuacuucaguacuga

SEQ ID NO: 1836667 - RNA, 19 nt, Artificial Sequence
  Description of Artificial Sequence: Synthetic oligonucleotide
  Sense strand starting at position 3699 of SEQ ID NO: 1563850
uguucuagacgguagaaau

SEQ ID NO: 1836668 - RNA, 19 nt, Artificial Sequence
  Description of Artificial Sequence: Synthetic oligonucleotide
  Antisense strand to SEQ ID NO: 1836667
auuucuaccgucuagaaca

SEQ ID NO: 1836669 - RNA, 19 nt, Artificial Sequence
  Description of Artificial Sequence: Synthetic oligonucleotide
  Sense strand starting at position 3749 of SEQ ID NO: 1563850
gagaguguuguagaaacca

SEQ ID NO: 1836670 - RNA, 19 nt, Artificial Sequence
  Description of Artificial Sequence: Synthetic oligonucleotide
  Antisense strand to SEQ ID NO: 1836669
ugguuucuacaacacucuc

SEQ ID NO: 1836671 - RNA, 19 nt, Artificial Sequence
  Description of Artificial Sequence: Synthetic oligonucleotide
  Sense strand starting at position 3785 of SEQ ID NO: 1563850
gcuacaaagguaugauuaa

SEQ ID NO: 1836672 - RNA, 19 nt, Artificial Sequence
  Description of Artificial Sequence: Synthetic oligonucleotide
  Antisense strand to SEQ ID NO: 1836671
uuaaucauaccuuuguagc

SEQ ID NO: 1836673 - RNA, 19 nt, Artificial Sequence
  Description of Artificial Sequence: Synthetic oligonucleotide
  Sense strand starting at position 448 of SEQ ID NO: 1563851
ggauguguacuagggagua

SEQ ID NO: 1836674 - RNA, 19 nt, Artificial Sequence
  Description of Artificial Sequence: Synthetic oligonucleotide
  Antisense strand to SEQ ID NO: 1836673
uacucccuaguacacaucc

SEQ ID NO: 1836675 - RNA, 19 nt, Artificial Sequence
  Description of Artificial Sequence: Synthetic oligonucleotide
  Sense strand starting at position 458 of SEQ ID NO: 1563851
uagggaguaucccuagaau

SEQ ID NO: 1836676 - RNA, 19 nt, Artificial Sequence
  Description of Artificial Sequence: Synthetic oligonucleotide
  Antisense strand to SEQ ID NO: 1836675
auucuagggauacucccua

SEQ ID NO: 1836677 - RNA, 19 nt, Artificial Sequence
  Description of Artificial Sequence: Synthetic oligonucleotide
  Sense strand starting at position 493 of SEQ ID NO: 1563851
cauaacagguggucagaaa

SEQ ID NO: 1836678 - RNA, 19 nt, Artificial Sequence
  Description of Artificial Sequence: Synthetic oligonucleotide
  Antisense strand to SEQ ID NO: 1836677
uuucugaccaccuguuaug

SEQ ID NO: 1836679 - RNA, 19 nt, Artificial Sequence
  Description of Artificial Sequence: Synthetic oligonucleotide
  Sense strand starting at position 512 of SEQ ID NO: 1563851
augcgcaagauguacuauu

SEQ ID NO: 1836680 - RNA, 19 nt, Artificial Sequence
  Description of Artificial Sequence: Synthetic oligonucleotide
  Antisense strand to SEQ ID NO: 1836679
aauaguacaucuugcgcau

SEQ ID NO: 1836681 - RNA, 19 nt, Artificial Sequence
  Description of Artificial Sequence: Synthetic oligonucleotide
  Sense strand starting at position 2026 of SEQ ID NO: 1563851
agggacuuccgcuagcaga

SEQ ID NO: 1836682 - RNA, 19 nt, Artificial Sequence
  Description of Artificial Sequence: Synthetic oligonucleotide
  Antisense strand to SEQ ID NO: 1836681
ucugcuagcggaagucccu

SEQ ID NO: 1836683 - RNA, 19 nt, Artificial Sequence
  Description of Artificial Sequence: Synthetic oligonucleotide
  Sense strand starting at position 2276 of SEQ ID NO: 1563851
gggaggguguauucuugga

SEQ ID NO: 1836684 - RNA, 19 nt, Artificial Sequence
  Description of Artificial Sequence: Synthetic oligonucleotide
  Antisense strand to SEQ ID NO: 1836683
uccaagaauacacccuccc

SEQ ID NO: 1836685 - RNA, 19 nt, Artificial Sequence
  Description of Artificial Sequence: Synthetic oligonucleotide
  Sense strand starting at position 2278 of SEQ ID NO: 1563851
gaggguguauucuuggaag

SEQ ID NO: 1836686 - RNA, 19 nt, Artificial Sequence
  Description of Artificial Sequence: Synthetic oligonucleotide
  Antisense strand to SEQ ID NO: 1836685
cuuccaagaauacacccuc

SEQ ID NO: 1836687 - RNA, 19 nt, Artificial Sequence
  Description of Artificial Sequence: Synthetic oligonucleotide
  Sense strand starting at position 2280 of SEQ ID NO: 1563851
ggguguauucuuggaagga

SEQ ID NO: 1836688 - RNA, 19 nt, Artificial Sequence
  Description of Artificial Sequence: Synthetic oligonucleotide
  Antisense strand to SEQ ID NO: 1836687
uccuuccaagaauacaccc

SEQ ID NO: 1836689 - RNA, 19 nt, Artificial Sequence
  Description of Artificial Sequence: Synthetic oligonucleotide
  Sense strand starting at position 2284 of SEQ ID NO: 1563851
guauucuuggaaggaguca

SEQ ID NO: 1836690 - RNA, 19 nt, Artificial Sequence
  Description of Artificial Sequence: Synthetic oligonucleotide
  Antisense strand to SEQ ID NO: 1836689
ugacuccuuccaagaauac

SEQ ID NO: 1836691 - RNA, 19 nt, Artificial Sequence
  Description of Artificial Sequence: Synthetic oligonucleotide
  Sense strand starting at position 2369 of SEQ ID NO: 1563851
gaaggcauuuguguguaua

SEQ ID NO: 1836692 - RNA, 19 nt, Artificial Sequence
  Description of Artificial Sequence: Synthetic oligonucleotide
  Antisense strand to SEQ ID NO: 1836691
uauacacacaaaugccuuc

SEQ ID NO: 1836693 - RNA, 19 nt, Artificial Sequence
  Description of Artificial Sequence: Synthetic oligonucleotide
  Sense strand starting at position 2370 of SEQ ID NO: 1563851
aaggcauuuguguguauac

SEQ ID NO: 1836694 - RNA, 19 nt, Artificial Sequence
  Description of Artificial Sequence: Synthetic oligonucleotide
  Antisense strand to SEQ ID NO: 1836693
guauacacacaaaugccuu

SEQ ID NO: 1836695 - RNA, 19 nt, Artificial Sequence
  Description of Artificial Sequence: Synthetic oligonucleotide
  Sense strand starting at position 2371 of SEQ ID NO: 1563851
aggcauuuguguguauacu

SEQ ID NO: 1836696 - RNA, 19 nt, Artificial Sequence
  Description of Artificial Sequence: Synthetic oligonucleotide
  Antisense strand to SEQ ID NO: 1836695
aguauacacacaaaugccu

SEQ ID NO: 1836697 - RNA, 19 nt, Artificial Sequence
  Description of Artificial Sequence: Synthetic oligonucleotide
  Sense strand starting at position 2372 of SEQ ID NO: 1563851
ggcauuuguguguauacua

SEQ ID NO: 1836698 - RNA, 19 nt, Artificial Sequence
  Description of Artificial Sequence: Synthetic oligonucleotide
  Antisense strand to SEQ ID NO: 1836697
uaguauacacacaaaugcc

SEQ ID NO: 1836699 - RNA, 19 nt, Artificial Sequence
  Description of Artificial Sequence: Synthetic oligonucleotide
  Sense strand starting at position 2405 of SEQ ID NO: 1563851
ccauguaggacccggauaa

SEQ ID NO: 1836700 - RNA, 19 nt, Artificial Sequence
  Description of Artificial Sequence: Synthetic oligonucleotide
  Antisense strand to SEQ ID NO: 1836699
uuauccggguccuacaugg

SEQ ID NO: 1836701 - RNA, 19 nt, Artificial Sequence
  Description of Artificial Sequence: Synthetic oligonucleotide
  Sense strand starting at position 2406 of SEQ ID NO: 1563851
cauguaggacccggauaau

SEQ ID NO: 1836702 - RNA, 19 nt, Artificial Sequence
  Description of Artificial Sequence: Synthetic oligonucleotide
  Antisense strand to SEQ ID NO: 1836701
auuauccggguccuacaug

SEQ ID NO: 1836703 - RNA, 19 nt, Artificial Sequence
  Description of Artificial Sequence: Synthetic oligonucleotide
  Sense strand starting at position 2433 of SEQ ID NO: 1563851
ggcagaugugcuggaugau

SEQ ID NO: 1836704 - RNA, 19 nt, Artificial Sequence
  Description of Artificial Sequence: Synthetic oligonucleotide
  Antisense strand to SEQ ID NO: 1836703
aucauccagcacaucugcc

SEQ ID NO: 1836705 - RNA, 19 nt, Artificial Sequence
  Description of Artificial Sequence: Synthetic oligonucleotide
  Sense strand starting at position 2434 of SEQ ID NO: 1563851
gcagaugugcuggaugaug

SEQ ID NO: 1836706 - RNA, 19 nt, Artificial Sequence
  Description of Artificial Sequence: Synthetic oligonucleotide
  Antisense strand to SEQ ID NO: 1836705
caucauccagcacaucugc

SEQ ID NO: 1836707 - RNA, 19 nt, Artificial Sequence
  Description of Artificial Sequence: Synthetic oligonucleotide
  Sense strand starting at position 2512 of SEQ ID NO: 1563851
gguagauauaugcacgaua

SEQ ID NO: 1836708 - RNA, 19 nt, Artificial Sequence
  Description of Artificial Sequence: Synthetic oligonucleotide
  Antisense strand to SEQ ID NO: 1836707
uaucgugcauauaucuacc

SEQ ID NO: 1836709 - RNA, 19 nt, Artificial Sequence
  Description of Artificial Sequence: Synthetic oligonucleotide
  Sense strand starting at position 2514 of SEQ ID NO: 1563851
uagauauaugcacgauaua

SEQ ID NO: 1836710 - RNA, 19 nt, Artificial Sequence
  Description of Artificial Sequence: Synthetic oligonucleotide
  Antisense strand to SEQ ID NO: 1836709
uauaucgugcauauaucua

SEQ ID NO: 1836711 - RNA, 19 nt, Artificial Sequence
  Description of Artificial Sequence: Synthetic oligonucleotide
  Sense strand starting at position 2515 of SEQ ID NO: 1563851
agauauaugcacgauauau

SEQ ID NO: 1836712 - RNA, 19 nt, Artificial Sequence
  Description of Artificial Sequence: Synthetic oligonucleotide
  Antisense strand to SEQ ID NO: 1836711
auauaucgugcauauaucu

SEQ ID NO: 1836713 - RNA, 19 nt, Artificial Sequence
  Description of Artificial Sequence: Synthetic oligonucleotide
  Sense strand starting at position 2568 of SEQ ID NO: 1563851
accuauaucgugcauauau

SEQ ID NO: 1836714 - RNA, 19 nt, Artificial Sequence
  Description of Artificial Sequence: Synthetic oligonucleotide
  Antisense strand to SEQ ID NO: 1836713
auauaugcacgauauaggu

SEQ ID NO: 1836715 - RNA, 19 nt, Artificial Sequence
  Description of Artificial Sequence: Synthetic oligonucleotide
  Sense strand starting at position 2760 of SEQ ID NO: 1563851
ggaacuaaaguaugccuua

SEQ ID NO: 1836716 - RNA, 19 nt, Artificial Sequence
  Description of Artificial Sequence: Synthetic oligonucleotide
  Antisense strand to SEQ ID NO: 1836715
uaaggcauacuuuaguucc

SEQ ID NO: 1836717 - RNA, 19 nt, Artificial Sequence
  Description of Artificial Sequence: Synthetic oligonucleotide
  Sense strand starting at position 2765 of SEQ ID NO: 1563851
uaaaguaugccuuaaggcu

SEQ ID NO: 1836718 - RNA, 19 nt, Artificial Sequence
  Description of Artificial Sequence: Synthetic oligonucleotide
  Antisense strand to SEQ ID NO: 1836717
agccuuaaggcauacuuua

SEQ ID NO: 1836719 - RNA, 19 nt, Artificial Sequence
  Description of Artificial Sequence: Synthetic oligonucleotide
  Sense strand starting at position 2816 of SEQ ID NO: 1563851
uuuaaaggugaccguugaa

SEQ ID NO: 1836720 - RNA, 19 nt, Artificial Sequence
  Description of Artificial Sequence: Synthetic oligonucleotide
  Antisense strand to SEQ ID NO: 1836719
uucaacggucaccuuuaaa

SEQ ID NO: 1836721 - RNA, 19 nt, Artificial Sequence
  Description of Artificial Sequence: Synthetic oligonucleotide
  Sense strand starting at position 2835 of SEQ ID NO: 1563851
gggcuuugcagacagaaug

SEQ ID NO: 1836722 - RNA, 19 nt, Artificial Sequence
  Description of Artificial Sequence: Synthetic oligonucleotide
  Antisense strand to SEQ ID NO: 1836721
cauucugucugcaaagccc

SEQ ID NO: 1836723 - RNA, 19 nt, Artificial Sequence
  Description of Artificial Sequence: Synthetic oligonucleotide
  Sense strand starting at position 2888 of SEQ ID NO: 1563851
ucagauuggcuccaagguu

SEQ ID NO: 1836724 - RNA, 19 nt, Artificial Sequence
  Description of Artificial Sequence: Synthetic oligonucleotide
  Antisense strand to SEQ ID NO: 1836723
aaccuuggagccaaucuga

SEQ ID NO: 1836725 - RNA, 19 nt, Artificial Sequence
  Description of Artificial Sequence: Synthetic oligonucleotide
  Sense strand starting at position 3061 of SEQ ID NO: 1563851
agaccuguuucucccugaa

SEQ ID NO: 1836726 - RNA, 19 nt, Artificial Sequence
  Description of Artificial Sequence: Synthetic oligonucleotide
  Antisense strand to SEQ ID NO: 1836725
uucagggagaaacaggucu

SEQ ID NO: 1836727 - RNA, 19 nt, Artificial Sequence
  Description of Artificial Sequence: Synthetic oligonucleotide
  Sense strand starting at position 3065 of SEQ ID NO: 1563851
cuguuucucccugaagcuu

SEQ ID NO: 1836728 - RNA, 19 nt, Artificial Sequence
  Description of Artificial Sequence: Synthetic oligonucleotide
  Antisense strand to SEQ ID NO: 1836727
aagcuucagggagaaacag

SEQ ID NO: 1836729 - RNA, 19 nt, Artificial Sequence
  Description of Artificial Sequence: Synthetic oligonucleotide
  Sense strand starting at position 3175 of SEQ ID NO: 1563851
aagguauuaguuuaagcaa

SEQ ID NO: 1836730 - RNA, 19 nt, Artificial Sequence
  Description of Artificial Sequence: Synthetic oligonucleotide
  Antisense strand to SEQ ID NO: 1836729
uugcuuaaacuaauaccuu

SEQ ID NO: 1836731 - RNA, 19 nt, Artificial Sequence
  Description of Artificial Sequence: Synthetic oligonucleotide
  Sense strand starting at position 3247 of SEQ ID NO: 1563851
cccucauaggguugugaga

SEQ ID NO: 1836732 - RNA, 19 nt, Artificial Sequence
  Description of Artificial Sequence: Synthetic oligonucleotide
  Antisense strand to SEQ ID NO: 1836731
ucucacaacccuaugaggg

SEQ ID NO: 1836733 - RNA, 19 nt, Artificial Sequence
  Description of Artificial Sequence: Synthetic oligonucleotide
  Sense strand starting at position 3403 of SEQ ID NO: 1563851
agguguucuuaacugaacu

SEQ ID NO: 1836734 - RNA, 19 nt, Artificial Sequence
  Description of Artificial Sequence: Synthetic oligonucleotide
  Antisense strand to SEQ ID NO: 1836733
aguucaguuaagaacaccu

SEQ ID NO: 1836735 - RNA, 19 nt, Artificial Sequence
  Description of Artificial Sequence: Synthetic oligonucleotide
  Sense strand starting at position 3447 of SEQ ID NO: 1563851
gccugucuugcugaaauuu

SEQ ID NO: 1836736 - RNA, 19 nt, Artificial Sequence
  Description of Artificial Sequence: Synthetic oligonucleotide
  Antisense strand to SEQ ID NO: 1836735
aaauuucagcaagacaggc

SEQ ID NO: 1836737 - RNA, 19 nt, Artificial Sequence
  Description of Artificial Sequence: Synthetic oligonucleotide
  Sense strand starting at position 3491 of SEQ ID NO: 1563851
ccuccuguuggguaaguua

SEQ ID NO: 1836738 - RNA, 19 nt, Artificial Sequence
  Description of Artificial Sequence: Synthetic oligonucleotide
  Antisense strand to SEQ ID NO: 1836737
uaacuuacccaacaggagg

SEQ ID NO: 1836739 - RNA, 19 nt, Artificial Sequence
  Description of Artificial Sequence: Synthetic oligonucleotide
  Sense strand starting at position 3498 of SEQ ID NO: 1563851
uuggguaaguuagcaauaa

SEQ ID NO: 1836740 - RNA, 19 nt, Artificial Sequence
  Description of Artificial Sequence: Synthetic oligonucleotide
  Antisense strand to SEQ ID NO: 1836739
uuauugcuaacuuacccaa

SEQ ID NO: 1836741 - RNA, 19 nt, Artificial Sequence
  Description of Artificial Sequence: Synthetic oligonucleotide
  Sense strand starting at position 3502 of SEQ ID NO: 1563851
guaaguuagcaauaaauca

SEQ ID NO: 1836742 - RNA, 19 nt, Artificial Sequence
  Description of Artificial Sequence: Synthetic oligonucleotide
  Antisense strand to SEQ ID NO: 1836741
ugauuuauugcuaacuuac

SEQ ID NO: 1836743 - RNA, 19 nt, Artificial Sequence
  Description of Artificial Sequence: Synthetic oligonucleotide
  Sense strand starting at position 3577 of SEQ ID NO: 1563851
cuccguuugggauaaccuu

SEQ ID NO: 1836744 - RNA, 19 nt, Artificial Sequence
  Description of Artificial Sequence: Synthetic oligonucleotide
  Antisense strand to SEQ ID NO: 1836743
aagguuaucccaaacggag

SEQ ID NO: 1836745 - RNA, 19 nt, Artificial Sequence
  Description of Artificial Sequence: Synthetic oligonucleotide
  Sense strand starting at position 3673 of SEQ ID NO: 1563851
caguuucugguccauugau

SEQ ID NO: 1836746 - RNA, 19 nt, Artificial Sequence
  Description of Artificial Sequence: Synthetic oligonucleotide
  Antisense strand to SEQ ID NO: 1836745
aucaauggaccagaaacug

SEQ ID NO: 1836747 - RNA, 19 nt, Artificial Sequence
  Description of Artificial Sequence: Synthetic oligonucleotide
  Sense strand starting at position 3686 of SEQ ID NO: 1563851
auugauaauugcucugaau

SEQ ID NO: 1836748 - RNA, 19 nt, Artificial Sequence
  Description of Artificial Sequence: Synthetic oligonucleotide
  Antisense strand to SEQ ID NO: 1836747
auucagagcaauuaucaau

SEQ ID NO: 1836749 - RNA, 19 nt, Artificial Sequence
  Description of Artificial Sequence: Synthetic oligonucleotide
  Sense strand starting at position 3688 of SEQ ID NO: 1563851
ugauaauugcucugaauug

SEQ ID NO: 1836750 - RNA, 19 nt, Artificial Sequence
  Description of Artificial Sequence: Synthetic oligonucleotide
  Antisense strand to SEQ ID NO: 1836749
caauucagagcaauuauca

SEQ ID NO: 1836751 - RNA, 19 nt, Artificial Sequence
  Description of Artificial Sequence: Synthetic oligonucleotide
  Sense strand starting at position 3913 of SEQ ID NO: 1563851
accaauagcuagcuguaua

SEQ ID NO: 1836752 - RNA, 19 nt, Artificial Sequence
  Description of Artificial Sequence: Synthetic oligonucleotide
  Antisense strand to SEQ ID NO: 1836751
uauacagcuagcuauuggu

SEQ ID NO: 1836753 - RNA, 19 nt, Artificial Sequence
  Description of Artificial Sequence: Synthetic oligonucleotide
  Sense strand starting at position 5 of SEQ ID NO: 1563852
cauaguuugcccugaggca

SEQ ID NO: 1836754 - RNA, 19 nt, Artificial Sequence
  Description of Artificial Sequence: Synthetic oligonucleotide
  Antisense strand to SEQ ID NO: 1836753
ugccucagggcaaacuaug

SEQ ID NO: 1836755 - RNA, 19 nt, Artificial Sequence
  Description of Artificial Sequence: Synthetic oligonucleotide
  Sense strand starting at position 21 of SEQ ID NO: 1563852
gcaggaggccuccgauaga

SEQ ID NO: 1836756 - RNA, 19 nt, Artificial Sequence
  Description of Artificial Sequence: Synthetic oligonucleotide
  Antisense strand to SEQ ID NO: 1836755
ucuaucggaggccuccugc

SEQ ID NO: 1836757 - RNA, 19 nt, Artificial Sequence
  Description of Artificial Sequence: Synthetic oligonucleotide
  Sense strand starting at position 129 of SEQ ID NO: 1563852
cgcuaacagcugggagaua

SEQ ID NO: 1836758 - RNA, 19 nt, Artificial Sequence
  Description of Artificial Sequence: Synthetic oligonucleotide
  Antisense strand to SEQ ID NO: 1836757
uaucucccagcuguuagcg

SEQ ID NO: 1836759 - RNA, 19 nt, Artificial Sequence
  Description of Artificial Sequence: Synthetic oligonucleotide
  Sense strand starting at position 171 of SEQ ID NO: 1563852
gggacaugccauggaaacu

SEQ ID NO: 1836760 - RNA, 19 nt, Artificial Sequence
  Description of Artificial Sequence: Synthetic oligonucleotide
  Antisense strand to SEQ ID NO: 1836759
aguuuccauggcauguccc

SEQ ID NO: 1836761 - RNA, 19 nt, Artificial Sequence
  Description of Artificial Sequence: Synthetic oligonucleotide
  Sense strand starting at position 194 of SEQ ID NO: 1563852
aggaccuguucccugaguu

SEQ ID NO: 1836762 - RNA, 19 nt, Artificial Sequence
  Description of Artificial Sequence: Synthetic oligonucleotide
  Antisense strand to SEQ ID NO: 1836761
aacucagggaacagguccu

SEQ ID NO: 1836763 - RNA, 19 nt, Artificial Sequence
  Description of Artificial Sequence: Synthetic oligonucleotide
  Sense strand starting at position 195 of SEQ ID NO: 1563852
ggaccuguucccugaguua

SEQ ID NO: 1836764 - RNA, 19 nt, Artificial Sequence
  Description of Artificial Sequence: Synthetic oligonucleotide
  Antisense strand to SEQ ID NO: 1836763
uaacucagggaacaggucc

SEQ ID NO: 1836765 - RNA, 19 nt, Artificial Sequence
  Description of Artificial Sequence: Synthetic oligonucleotide
  Sense strand starting at position 198 of SEQ ID NO: 1563852
ccuguucccugaguuaaca

SEQ ID NO: 1836766 - RNA, 19 nt, Artificial Sequence
  Description of Artificial Sequence: Synthetic oligonucleotide
  Antisense strand to SEQ ID NO: 1836765
uguuaacucagggaacagg

SEQ ID NO: 1836767 - RNA, 19 nt, Artificial Sequence
  Description of Artificial Sequence: Synthetic oligonucleotide
  Sense strand starting at position 360 of SEQ ID NO: 1563852
ugggcucagccaugugaau

SEQ ID NO: 1836768 - RNA, 19 nt, Artificial Sequence
  Description of Artificial Sequence: Synthetic oligonucleotide
  Antisense strand to SEQ ID NO: 1836767
auucacauggcugagccca

SEQ ID NO: 1836769 - RNA, 19 nt, Artificial Sequence
  Description of Artificial Sequence: Synthetic oligonucleotide
  Sense strand starting at position 362 of SEQ ID NO: 1563852
ggcucagccaugugaauaa

SEQ ID NO: 1836770 - RNA, 19 nt, Artificial Sequence
  Description of Artificial Sequence: Synthetic oligonucleotide
  Antisense strand to SEQ ID NO: 1836769
uuauucacauggcugagcc

SEQ ID NO: 1836771 - RNA, 19 nt, Artificial Sequence
  Description of Artificial Sequence: Synthetic oligonucleotide
  Sense strand starting at position 374 of SEQ ID NO: 1563852
ugaauaaucuuccaggccu

SEQ ID NO: 1836772 - RNA, 19 nt, Artificial Sequence
  Description of Artificial Sequence: Synthetic oligonucleotide
  Antisense strand to SEQ ID NO: 1836771
aggccuggaagauuauuca

SEQ ID NO: 1836773 - RNA, 19 nt, Artificial Sequence
  Description of Artificial Sequence: Synthetic oligonucleotide
  Sense strand starting at position 1171 of SEQ ID NO: 1563852
ggccacucccucgauaguu

SEQ ID NO: 1836774 - RNA, 19 nt, Artificial Sequence
  Description of Artificial Sequence: Synthetic oligonucleotide
  Antisense strand to SEQ ID NO: 1836773
aacuaucgagggaguggcc

SEQ ID NO: 1836775 - RNA, 19 nt, Artificial Sequence
  Description of Artificial Sequence: Synthetic oligonucleotide
  Sense strand starting at position 1183 of SEQ ID NO: 1563852
gauaguuucggaggucacu

SEQ ID NO: 1836776 - RNA, 19 nt, Artificial Sequence
  Description of Artificial Sequence: Synthetic oligonucleotide
  Antisense strand to SEQ ID NO: 1836775
agugaccuccgaaacuauc

SEQ ID NO: 1836777 - RNA, 19 nt, Artificial Sequence
  Description of Artificial Sequence: Synthetic oligonucleotide
  Sense strand starting at position 1274 of SEQ ID NO: 1563852
ccuggagaucgcuguuuga

SEQ ID NO: 1836778 - RNA, 19 nt, Artificial Sequence
  Description of Artificial Sequence: Synthetic oligonucleotide
  Antisense strand to SEQ ID NO: 1836777
ucaaacagcgaucuccagg

SEQ ID NO: 1836779 - RNA, 19 nt, Artificial Sequence
  Description of Artificial Sequence: Synthetic oligonucleotide
  Sense strand starting at position 1284 of SEQ ID NO: 1563852
gcuguuugacugcaauagu

SEQ ID NO: 1836780 - RNA, 19 nt, Artificial Sequence
  Description of Artificial Sequence: Synthetic oligonucleotide
  Antisense strand to SEQ ID NO: 1836779
acuauugcagucaaacagc

SEQ ID NO: 1836781 - RNA, 19 nt, Artificial Sequence
  Description of Artificial Sequence: Synthetic oligonucleotide
  Sense strand starting at position 1295 of SEQ ID NO: 1563852
gcaauaguccuagacaccu

SEQ ID NO: 1836782 - RNA, 19 nt, Artificial Sequence
  Description of Artificial Sequence: Synthetic oligonucleotide
  Antisense strand to SEQ ID NO: 1836781
aggugucuaggacuauugc

SEQ ID NO: 1836783 - RNA, 19 nt, Artificial Sequence
  Description of Artificial Sequence: Synthetic oligonucleotide
  Sense strand starting at position 1364 of SEQ ID NO: 1563852
aacucuucgcccgcgauau

SEQ ID NO: 1836784 - RNA, 19 nt, Artificial Sequence
  Description of Artificial Sequence: Synthetic oligonucleotide
  Antisense strand to SEQ ID NO: 1836783
auaucgcgggcgaagaguu

SEQ ID NO: 1836785 - RNA, 19 nt, Artificial Sequence
  Description of Artificial Sequence: Synthetic oligonucleotide
  Sense strand starting at position 1403 of SEQ ID NO: 1563852
cagauauccugggagaaca

SEQ ID NO: 1836786 - RNA, 19 nt, Artificial Sequence
  Description of Artificial Sequence: Synthetic oligonucleotide
  Antisense strand to SEQ ID NO: 1836785
uguucucccaggauaucug

SEQ ID NO: 1836787 - RNA, 19 nt, Artificial Sequence
  Description of Artificial Sequence: Synthetic oligonucleotide
  Sense strand starting at position 1654 of SEQ ID NO: 1563852
gcacgucucccuggagacu

SEQ ID NO: 1836788 - RNA, 19 nt, Artificial Sequence
  Description of Artificial Sequence: Synthetic oligonucleotide
  Antisense strand to SEQ ID NO: 1836787
agucuccagggagacgugc

SEQ ID NO: 1836789 - RNA, 19 nt, Artificial Sequence
  Description of Artificial Sequence: Synthetic oligonucleotide
  Sense strand starting at position 1793 of SEQ ID NO: 1563852
gccagagccgcucuguuua

SEQ ID NO: 1836790 - RNA, 19 nt, Artificial Sequence
  Description of Artificial Sequence: Synthetic oligonucleotide
  Antisense strand to SEQ ID NO: 1836789
uaaacagagcggcucuggc

SEQ ID NO: 1836791 - RNA, 19 nt, Artificial Sequence
  Description of Artificial Sequence: Synthetic oligonucleotide
  Sense strand starting at position 2166 of SEQ ID NO: 1563852
cgccgcacucuguuaacua

SEQ ID NO: 1836792 - RNA, 19 nt, Artificial Sequence
  Description of Artificial Sequence: Synthetic oligonucleotide
  Antisense strand to SEQ ID NO: 1836791
uaguuaacagagugcggcg

SEQ ID NO: 1836793 - RNA, 19 nt, Artificial Sequence
  Description of Artificial Sequence: Synthetic oligonucleotide
  Sense strand starting at position 2180 of SEQ ID NO: 1563852
aacuaaagguccuaguuag

SEQ ID NO: 1836794 - RNA, 19 nt, Artificial Sequence
  Description of Artificial Sequence: Synthetic oligonucleotide
  Antisense strand to SEQ ID NO: 1836793
cuaacuaggaccuuuaguu

SEQ ID NO: 1836795 - RNA, 19 nt, Artificial Sequence
  Description of Artificial Sequence: Synthetic oligonucleotide
  Sense strand starting at position 2186 of SEQ ID NO: 1563852
agguccuaguuagaauuua

SEQ ID NO: 1836796 - RNA, 19 nt, Artificial Sequence
  Description of Artificial Sequence: Synthetic oligonucleotide
  Antisense strand to SEQ ID NO: 1836795
uaaauucuaacuaggaccu

SEQ ID NO: 1836797 - RNA, 19 nt, Artificial Sequence
  Description of Artificial Sequence: Synthetic oligonucleotide
  Sense strand starting at position 2219 of SEQ ID NO: 1563852
ccaacuguugcugaagaua

SEQ ID NO: 1836798 - RNA, 19 nt, Artificial Sequence
  Description of Artificial Sequence: Synthetic oligonucleotide
  Antisense strand to SEQ ID NO: 1836797
uaucuucagcaacaguugg

SEQ ID NO: 1836799 - RNA, 19 nt, Artificial Sequence
  Description of Artificial Sequence: Synthetic oligonucleotide
  Sense strand starting at position 2255 of SEQ ID NO: 1563852
cuauaccuccgguggaaau

SEQ ID NO: 1836800 - RNA, 19 nt, Artificial Sequence
  Description of Artificial Sequence: Synthetic oligonucleotide
  Antisense strand to SEQ ID NO: 1836799
auuuccaccggagguauag

SEQ ID NO: 1836801 - RNA, 19 nt, Artificial Sequence
  Description of Artificial Sequence: Synthetic oligonucleotide
  Sense strand starting at position 2663 of SEQ ID NO: 1563852
auuccacuccugcguauuu

SEQ ID NO: 1836802 - RNA, 19 nt, Artificial Sequence
  Description of Artificial Sequence: Synthetic oligonucleotide
  Antisense strand to SEQ ID NO: 1836801
aaauacgcaggaguggaau

SEQ ID NO: 1836803 - RNA, 19 nt, Artificial Sequence
  Description of Artificial Sequence: Synthetic oligonucleotide
  Sense strand starting at position 2664 of SEQ ID NO: 1563852
uuccacuccugcguauuua

SEQ ID NO: 1836804 - RNA, 19 nt, Artificial Sequence
  Description of Artificial Sequence: Synthetic oligonucleotide
  Antisense strand to SEQ ID NO: 1836803
uaaauacgcaggaguggaa

SEQ ID NO: 1836805 - RNA, 19 nt, Artificial Sequence
  Description of Artificial Sequence: Synthetic oligonucleotide
  Sense strand starting at position 2665 of SEQ ID NO: 1563852
uccacuccugcguauuuau

SEQ ID NO: 1836806 - RNA, 19 nt, Artificial Sequence
  Description of Artificial Sequence: Synthetic oligonucleotide
  Antisense strand to SEQ ID NO: 1836805
auaaauacgcaggagugga

SEQ ID NO: 1836807 - RNA, 19 nt, Artificial Sequence
  Description of Artificial Sequence: Synthetic oligonucleotide
  Sense strand starting at position 2701 of SEQ ID NO: 1563852
uuuacacagccuugucuua

SEQ ID NO: 1836808 - RNA, 19 nt, Artificial Sequence
  Description of Artificial Sequence: Synthetic oligonucleotide
  Antisense strand to SEQ ID NO: 1836807
uaagacaaggcuguguaaa

SEQ ID NO: 1836809 - RNA, 19 nt, Artificial Sequence
  Description of Artificial Sequence: Synthetic oligonucleotide
  Sense strand starting at position 2803 of SEQ ID NO: 1563852
acauaaguuucucacaguu

SEQ ID NO: 1836810 - RNA, 19 nt, Artificial Sequence
  Description of Artificial Sequence: Synthetic oligonucleotide
  Antisense strand to SEQ ID NO: 1836809
aacugugagaaacuuaugu

SEQ ID NO: 1836811 - RNA, 19 nt, Artificial Sequence
  Description of Artificial Sequence: Synthetic oligonucleotide
  Sense strand starting at position 2829 of SEQ ID NO: 1563852
ccggaaaguccacgaucaa

SEQ ID NO: 1836812 - RNA, 19 nt, Artificial Sequence
  Description of Artificial Sequence: Synthetic oligonucleotide
  Antisense strand to SEQ ID NO: 1836811
uugaucguggacuuuccgg

SEQ ID NO: 1836813 - RNA, 19 nt, Artificial Sequence
  Description of Artificial Sequence: Synthetic oligonucleotide
  Sense strand starting at position 2830 of SEQ ID NO: 1563852
cggaaaguccacgaucaag

SEQ ID NO: 1836814 - RNA, 19 nt, Artificial Sequence
  Description of Artificial Sequence: Synthetic oligonucleotide
  Antisense strand to SEQ ID NO: 1836813
cuugaucguggacuuuccg

SEQ ID NO: 1836815 - RNA, 19 nt, Artificial Sequence
  Description of Artificial Sequence: Synthetic oligonucleotide
  Sense strand starting at position 2914 of SEQ ID NO: 1563852
guguccucacauggaauua

SEQ ID NO: 1836816 - RNA, 19 nt, Artificial Sequence
  Description of Artificial Sequence: Synthetic oligonucleotide
  Antisense strand to SEQ ID NO: 1836815
uaauuccaugugaggacac

SEQ ID NO: 1836817 - RNA, 19 nt, Artificial Sequence
  Description of Artificial Sequence: Synthetic oligonucleotide
  Sense strand starting at position 2945 of SEQ ID NO: 1563852
agaguaaaggcgugagaga

SEQ ID NO: 1836818 - RNA, 19 nt, Artificial Sequence
  Description of Artificial Sequence: Synthetic oligonucleotide
  Antisense strand to SEQ ID NO: 1836817
ucucucacgccuuuacucu

SEQ ID NO: 1836819 - RNA, 19 nt, Artificial Sequence
  Description of Artificial Sequence: Synthetic oligonucleotide
  Sense strand starting at position 3276 of SEQ ID NO: 1563852
gcguggugucaggugacuu

SEQ ID NO: 1836820 - RNA, 19 nt, Artificial Sequence
  Description of Artificial Sequence: Synthetic oligonucleotide
  Antisense strand to SEQ ID NO: 1836819
aagucaccugacaccacgc

SEQ ID NO: 1836821 - RNA, 19 nt, Artificial Sequence
  Description of Artificial Sequence: Synthetic oligonucleotide
  Sense strand starting at position 3277 of SEQ ID NO: 1563852
cguggugucaggugacuua

SEQ ID NO: 1836822 - RNA, 19 nt, Artificial Sequence
  Description of Artificial Sequence: Synthetic oligonucleotide
  Antisense strand to SEQ ID NO: 1836821
uaagucaccugacaccacg

SEQ ID NO: 1836823 - RNA, 19 nt, Artificial Sequence
  Description of Artificial Sequence: Synthetic oligonucleotide
  Sense strand starting at position 3545 of SEQ ID NO: 1563852
guugaaugaggccaguaau

SEQ ID NO: 1836824 - RNA, 19 nt, Artificial Sequence
  Description of Artificial Sequence: Synthetic oligonucleotide
  Antisense strand to SEQ ID NO: 1836823
auuacuggccucauucaac

SEQ ID NO: 1836825 - RNA, 19 nt, Artificial Sequence
  Description of Artificial Sequence: Synthetic oligonucleotide
  Sense strand starting at position 3635 of SEQ ID NO: 1563852
agugaaagauugucucuau

SEQ ID NO: 1836826 - RNA, 19 nt, Artificial Sequence
  Description of Artificial Sequence: Synthetic oligonucleotide
  Antisense strand to SEQ ID NO: 1836825
auagagacaaucuuucacu

SEQ ID NO: 1836827 - RNA, 19 nt, Artificial Sequence
  Description of Artificial Sequence: Synthetic oligonucleotide
  Sense strand starting at position 3636 of SEQ ID NO: 1563852
gugaaagauugucucuauu

SEQ ID NO: 1836828 - RNA, 19 nt, Artificial Sequence
  Description of Artificial Sequence: Synthetic oligonucleotide
  Antisense strand to SEQ ID NO: 1836827
aauagagacaaucuuucac

SEQ ID NO: 1836829 - RNA, 19 nt, Artificial Sequence
  Description of Artificial Sequence: Synthetic oligonucleotide
  Sense strand starting at position 3690 of SEQ ID NO: 1563852
ugcuaaugccuguaauccu

SEQ ID NO: 1836830 - RNA, 19 nt, Artificial Sequence
  Description of Artificial Sequence: Synthetic oligonucleotide
  Antisense strand to SEQ ID NO: 1836829
aggauuacaggcauuagca

SEQ ID NO: 1836831 - RNA, 19 nt, Artificial Sequence
  Description of Artificial Sequence: Synthetic oligonucleotide
  Sense strand starting at position 3896 of SEQ ID NO: 1563852
aaugaaggauuuggaugaa

SEQ ID NO: 1836832 - RNA, 19 nt, Artificial Sequence
  Description of Artificial Sequence: Synthetic oligonucleotide
  Antisense strand to SEQ ID NO: 1836831
uucauccaaauccuucauu

SEQ ID NO: 1836833 - RNA, 19 nt, Artificial Sequence
  Description of Artificial Sequence: Synthetic oligonucleotide
  Sense strand starting at position 144 of SEQ ID NO: 1563853
cagagagacuccguuucua

SEQ ID NO: 1836834 - RNA, 19 nt, Artificial Sequence
  Description of Artificial Sequence: Synthetic oligonucleotide
  Antisense strand to SEQ ID NO: 1836833
uagaaacggagucucucug

SEQ ID NO: 1836835 - RNA, 19 nt, Artificial Sequence
  Description of Artificial Sequence: Synthetic oligonucleotide
  Sense strand starting at position 203 of SEQ ID NO: 1563853
ccgguaguccuagauauuc

SEQ ID NO: 1836836 - RNA, 19 nt, Artificial Sequence
  Description of Artificial Sequence: Synthetic oligonucleotide
  Antisense strand to SEQ ID NO: 1836835
gaauaucuaggacuaccgg

SEQ ID NO: 1836837 - RNA, 19 nt, Artificial Sequence
  Description of Artificial Sequence: Synthetic oligonucleotide
  Sense strand starting at position 379 of SEQ ID NO: 1563853
gcaauaccagcauguaaag

SEQ ID NO: 1836838 - RNA, 19 nt, Artificial Sequence
  Description of Artificial Sequence: Synthetic oligonucleotide
  Antisense strand to SEQ ID NO: 1836837
cuuuacaugcugguauugc

SEQ ID NO: 1836839 - RNA, 19 nt, Artificial Sequence
  Description of Artificial Sequence: Synthetic oligonucleotide
  Sense strand starting at position 428 of SEQ ID NO: 1563853
aucccaacugccuagagau

SEQ ID NO: 1836840 - RNA, 19 nt, Artificial Sequence
  Description of Artificial Sequence: Synthetic oligonucleotide
  Antisense strand to SEQ ID NO: 1836839
aucucuaggcaguugggau

SEQ ID NO: 1836841 - RNA, 19 nt, Artificial Sequence
  Description of Artificial Sequence: Synthetic oligonucleotide
  Sense strand starting at position 441 of SEQ ID NO: 1563853
agagauagccacuguuaag

SEQ ID NO: 1836842 - RNA, 19 nt, Artificial Sequence
  Description of Artificial Sequence: Synthetic oligonucleotide
  Antisense strand to SEQ ID NO: 1836841
cuuaacaguggcuaucucu

SEQ ID NO: 1836843 - RNA, 19 nt, Artificial Sequence
  Description of Artificial Sequence: Synthetic oligonucleotide
  Sense strand starting at position 459 of SEQ ID NO: 1563853
gguauugucauguauccuu

SEQ ID NO: 1836844 - RNA, 19 nt, Artificial Sequence
  Description of Artificial Sequence: Synthetic oligonucleotide
  Antisense strand to SEQ ID NO: 1836843
aaggauacaugacaauacc

SEQ ID NO: 1836845 - RNA, 19 nt, Artificial Sequence
  Description of Artificial Sequence: Synthetic oligonucleotide
  Sense strand starting at position 462 of SEQ ID NO: 1563853
auugucauguauccuuaca

SEQ ID NO: 1836846 - RNA, 19 nt, Artificial Sequence
  Description of Artificial Sequence: Synthetic oligonucleotide
  Antisense strand to SEQ ID NO: 1836845
uguaaggauacaugacaau

SEQ ID NO: 1836847 - RNA, 19 nt, Artificial Sequence
  Description of Artificial Sequence: Synthetic oligonucleotide
  Sense strand starting at position 464 of SEQ ID NO: 1563853
ugucauguauccuuacaga

SEQ ID NO: 1836848 - RNA, 19 nt, Artificial Sequence
  Description of Artificial Sequence: Synthetic oligonucleotide
  Antisense strand to SEQ ID NO: 1836847
ucuguaaggauacaugaca

SEQ ID NO: 1836849 - RNA, 19 nt, Artificial Sequence
  Description of Artificial Sequence: Synthetic oligonucleotide
  Sense strand starting at position 600 of SEQ ID NO: 1563853
agcuuaggauccucccaaa

SEQ ID NO: 1836850 - RNA, 19 nt, Artificial Sequence
  Description of Artificial Sequence: Synthetic oligonucleotide
  Antisense strand to SEQ ID NO: 1836849
uuugggaggauccuaagcu

SEQ ID NO: 1836851 - RNA, 19 nt, Artificial Sequence
  Description of Artificial Sequence: Synthetic oligonucleotide
  Sense strand starting at position 821 of SEQ ID NO: 1563853
guagacaaguaucugaagu

SEQ ID NO: 1836852 - RNA, 19 nt, Artificial Sequence
  Description of Artificial Sequence: Synthetic oligonucleotide
  Antisense strand to SEQ ID NO: 1836851
acuucagauacuugucuac

SEQ ID NO: 1836853 - RNA, 19 nt, Artificial Sequence
  Description of Artificial Sequence: Synthetic oligonucleotide
  Sense strand starting at position 834 of SEQ ID NO: 1563853
ugaagugcuuaacugguau

SEQ ID NO: 1836854 - RNA, 19 nt, Artificial Sequence
  Description of Artificial Sequence: Synthetic oligonucleotide
  Antisense strand to SEQ ID NO: 1836853
auaccaguuaagcacuuca

SEQ ID NO: 1836855 - RNA, 19 nt, Artificial Sequence
  Description of Artificial Sequence: Synthetic oligonucleotide
  Sense strand starting at position 906 of SEQ ID NO: 1563853
gaaauagaguuagaaugac

SEQ ID NO: 1836856 - RNA, 19 nt, Artificial Sequence
  Description of Artificial Sequence: Synthetic oligonucleotide
  Antisense strand to SEQ ID NO: 1836855
gucauucuaacucuauuuc

SEQ ID NO: 1836857 - RNA, 19 nt, Artificial Sequence
  Description of Artificial Sequence: Synthetic oligonucleotide
  Sense strand starting at position 914 of SEQ ID NO: 1563853
guuagaaugacugacguag

SEQ ID NO: 1836858 - RNA, 19 nt, Artificial Sequence
  Description of Artificial Sequence: Synthetic oligonucleotide
  Antisense strand to SEQ ID NO: 1836857
cuacgucagucauucuaac

SEQ ID NO: 1836859 - RNA, 19 nt, Artificial Sequence
  Description of Artificial Sequence: Synthetic oligonucleotide
  Sense strand starting at position 918 of SEQ ID NO: 1563853
gaaugacugacguaggguu

SEQ ID NO: 1836860 - RNA, 19 nt, Artificial Sequence
  Description of Artificial Sequence: Synthetic oligonucleotide
  Antisense strand to SEQ ID NO: 1836859
aacccuacgucagucauuc

SEQ ID NO: 1836861 - RNA, 19 nt, Artificial Sequence
  Description of Artificial Sequence: Synthetic oligonucleotide
  Sense strand starting at position 1090 of SEQ ID NO: 1563853
uugcuuaauggugagaaua

SEQ ID NO: 1836862 - RNA, 19 nt, Artificial Sequence
  Description of Artificial Sequence: Synthetic oligonucleotide
  Antisense strand to SEQ ID NO: 1836861
uauucucaccauuaagcaa

SEQ ID NO: 1836863 - RNA, 19 nt, Artificial Sequence
  Description of Artificial Sequence: Synthetic oligonucleotide
  Sense strand starting at position 1123 of SEQ ID NO: 1563853
cuuccuaaagccuaugagu

SEQ ID NO: 1836864 - RNA, 19 nt, Artificial Sequence
  Description of Artificial Sequence: Synthetic oligonucleotide
  Antisense strand to SEQ ID NO: 1836863
acucauaggcuuuaggaag

SEQ ID NO: 1836865 - RNA, 19 nt, Artificial Sequence
  Description of Artificial Sequence: Synthetic oligonucleotide
  Sense strand starting at position 1125 of SEQ ID NO: 1563853
uccuaaagccuaugaguuc

SEQ ID NO: 1836866 - RNA, 19 nt, Artificial Sequence
  Description of Artificial Sequence: Synthetic oligonucleotide
  Antisense strand to SEQ ID NO: 1836865
gaacucauaggcuuuagga

SEQ ID NO: 1836867 - RNA, 19 nt, Artificial Sequence
  Description of Artificial Sequence: Synthetic oligonucleotide
  Sense strand starting at position 1184 of SEQ ID NO: 1563853
cuagaacauugccuagcau

SEQ ID NO: 1836868 - RNA, 19 nt, Artificial Sequence
  Description of Artificial Sequence: Synthetic oligonucleotide
  Antisense strand to SEQ ID NO: 1836867
augcuaggcaauguucuag

SEQ ID NO: 1836869 - RNA, 19 nt, Artificial Sequence
  Description of Artificial Sequence: Synthetic oligonucleotide
  Sense strand starting at position 1246 of SEQ ID NO: 1563853
ucugguaaauugccuugaa

SEQ ID NO: 1836870 - RNA, 19 nt, Artificial Sequence
  Description of Artificial Sequence: Synthetic oligonucleotide
  Antisense strand to SEQ ID NO: 1836869
uucaaggcaauuuaccaga

SEQ ID NO: 1836871 - RNA, 19 nt, Artificial Sequence
  Description of Artificial Sequence: Synthetic oligonucleotide
  Sense strand starting at position 1247 of SEQ ID NO: 1563853
cugguaaauugccuugaaa

SEQ ID NO: 1836872 - RNA, 19 nt, Artificial Sequence
  Description of Artificial Sequence: Synthetic oligonucleotide
  Antisense strand to SEQ ID NO: 1836871
uuucaaggcaauuuaccag

SEQ ID NO: 1836873 - RNA, 19 nt, Artificial Sequence
  Description of Artificial Sequence: Synthetic oligonucleotide
  Sense strand starting at position 1250 of SEQ ID NO: 1563853
guaaauugccuugaaacaa

SEQ ID NO: 1836874 - RNA, 19 nt, Artificial Sequence
  Description of Artificial Sequence: Synthetic oligonucleotide
  Antisense strand to SEQ ID NO: 1836873
uuguuucaaggcaauuuac

SEQ ID NO: 1836875 - RNA, 19 nt, Artificial Sequence
  Description of Artificial Sequence: Synthetic oligonucleotide
  Sense strand starting at position 1411 of SEQ ID NO: 1563853
auccuacuccugggaucua

SEQ ID NO: 1836876 - RNA, 19 nt, Artificial Sequence
  Description of Artificial Sequence: Synthetic oligonucleotide
  Antisense strand to SEQ ID NO: 1836875
uagaucccaggaguaggau

SEQ ID NO: 1836877 - RNA, 19 nt, Artificial Sequence
  Description of Artificial Sequence: Synthetic oligonucleotide
  Sense strand starting at position 1721 of SEQ ID NO: 1563853
gcuggaaaccgcguucuca

SEQ ID NO: 1836878 - RNA, 19 nt, Artificial Sequence
  Description of Artificial Sequence: Synthetic oligonucleotide
  Antisense strand to SEQ ID NO: 1836877
ugagaacgcgguuuccagc

SEQ ID NO: 1836879 - RNA, 19 nt, Artificial Sequence
  Description of Artificial Sequence: Synthetic oligonucleotide
  Sense strand starting at position 2052 of SEQ ID NO: 1563853
aaagauaaucuggagcguu

SEQ ID NO: 1836880 - RNA, 19 nt, Artificial Sequence
  Description of Artificial Sequence: Synthetic oligonucleotide
  Antisense strand to SEQ ID NO: 1836879
aacgcuccagauuaucuuu

SEQ ID NO: 1836881 - RNA, 19 nt, Artificial Sequence
  Description of Artificial Sequence: Synthetic oligonucleotide
  Sense strand starting at position 2103 of SEQ ID NO: 1563853
cuuucucgauacguaaaca

SEQ ID NO: 1836882 - RNA, 19 nt, Artificial Sequence
  Description of Artificial Sequence: Synthetic oligonucleotide
  Antisense strand to SEQ ID NO: 1836881
uguuuacguaucgagaaag

SEQ ID NO: 1836883 - RNA, 19 nt, Artificial Sequence
  Description of Artificial Sequence: Synthetic oligonucleotide
  Sense strand starting at position 2149 of SEQ ID NO: 1563853
gcaugcgcaguugugaaau

SEQ ID NO: 1836884 - RNA, 19 nt, Artificial Sequence
  Description of Artificial Sequence: Synthetic oligonucleotide
  Antisense strand to SEQ ID NO: 1836883
auuucacaacugcgcaugc

SEQ ID NO: 1836885 - RNA, 19 nt, Artificial Sequence
  Description of Artificial Sequence: Synthetic oligonucleotide
  Sense strand starting at position 2232 of SEQ ID NO: 1563853
uuuagaaguccuugaaauu

SEQ ID NO: 1836886 - RNA, 19 nt, Artificial Sequence
  Description of Artificial Sequence: Synthetic oligonucleotide
  Antisense strand to SEQ ID NO: 1836885
aauuucaaggacuucuaaa

SEQ ID NO: 1836887 - RNA, 19 nt, Artificial Sequence
  Description of Artificial Sequence: Synthetic oligonucleotide
  Sense strand starting at position 2304 of SEQ ID NO: 1563853
agagcuauuuaguccguua

SEQ ID NO: 1836888 - RNA, 19 nt, Artificial Sequence
  Description of Artificial Sequence: Synthetic oligonucleotide
  Antisense strand to SEQ ID NO: 1836887
uaacggacuaaauagcucu

SEQ ID NO: 1836889 - RNA, 19 nt, Artificial Sequence
  Description of Artificial Sequence: Synthetic oligonucleotide
  Sense strand starting at position 2306 of SEQ ID NO: 1563853
agcuauuuaguccguuauc

SEQ ID NO: 1836890 - RNA, 19 nt, Artificial Sequence
  Description of Artificial Sequence: Synthetic oligonucleotide
  Antisense strand to SEQ ID NO: 1836889
gauaacggacuaaauagcu

SEQ ID NO: 1836891 - RNA, 19 nt, Artificial Sequence
  Description of Artificial Sequence: Synthetic oligonucleotide
  Sense strand starting at position 2415 of SEQ ID NO: 1563853
ugaacaagagcuuguugaa

SEQ ID NO: 1836892 - RNA, 19 nt, Artificial Sequence
  Description of Artificial Sequence: Synthetic oligonucleotide
  Antisense strand to SEQ ID NO: 1836891
uucaacaagcucuuguuca

SEQ ID NO: 1836893 - RNA, 19 nt, Artificial Sequence
  Description of Artificial Sequence: Synthetic oligonucleotide
  Sense strand starting at position 2422 of SEQ ID NO: 1563853
gagcuuguugaauaccuau

SEQ ID NO: 1836894 - RNA, 19 nt, Artificial Sequence
  Description of Artificial Sequence: Synthetic oligonucleotide
  Antisense strand to SEQ ID NO: 1836893
auagguauucaacaagcuc

SEQ ID NO: 1836895 - RNA, 19 nt, Artificial Sequence
  Description of Artificial Sequence: Synthetic oligonucleotide
  Sense strand starting at position 2872 of SEQ ID NO: 1563853
acuuuaauugcagguuaua

SEQ ID NO: 1836896 - RNA, 19 nt, Artificial Sequence
  Description of Artificial Sequence: Synthetic oligonucleotide
  Antisense strand to SEQ ID NO: 1836895
uauaaccugcaauuaaagu

SEQ ID NO: 1836897 - RNA, 19 nt, Artificial Sequence
  Description of Artificial Sequence: Synthetic oligonucleotide
  Sense strand starting at position 2881 of SEQ ID NO: 1563853
gcagguuauagacagcaaa

SEQ ID NO: 1836898 - RNA, 19 nt, Artificial Sequence
  Description of Artificial Sequence: Synthetic oligonucleotide
  Antisense strand to SEQ ID NO: 1836897
uuugcugucuauaaccugc

SEQ ID NO: 1836899 - RNA, 19 nt, Artificial Sequence
  Description of Artificial Sequence: Synthetic oligonucleotide
  Sense strand starting at position 2989 of SEQ ID NO: 1563853
ugccuacaauuuggauuua

SEQ ID NO: 1836900 - RNA, 19 nt, Artificial Sequence
  Description of Artificial Sequence: Synthetic oligonucleotide
  Antisense strand to SEQ ID NO: 1836899
uaaauccaaauuguaggca

SEQ ID NO: 1836901 - RNA, 19 nt, Artificial Sequence
  Description of Artificial Sequence: Synthetic oligonucleotide
  Sense strand starting at position 3440 of SEQ ID NO: 1563853
gaaaucguguuaucacacu

SEQ ID NO: 1836902 - RNA, 19 nt, Artificial Sequence
  Description of Artificial Sequence: Synthetic oligonucleotide
  Antisense strand to SEQ ID NO: 1836901
agugugauaacacgauuuc

SEQ ID NO: 1836903 - RNA, 19 nt, Artificial Sequence
  Description of Artificial Sequence: Synthetic oligonucleotide
  Sense strand starting at position 3588 of SEQ ID NO: 1563853
aggcaaacucauugguaca

SEQ ID NO: 1836904 - RNA, 19 nt, Artificial Sequence
  Description of Artificial Sequence: Synthetic oligonucleotide
  Antisense strand to SEQ ID NO: 1836903
uguaccaaugaguuugccu

SEQ ID NO: 1836905 - RNA, 19 nt, Artificial Sequence
  Description of Artificial Sequence: Synthetic oligonucleotide
  Sense strand starting at position 3590 of SEQ ID NO: 1563853
gcaaacucauugguacaga

SEQ ID NO: 1836906 - RNA, 19 nt, Artificial Sequence
  Description of Artificial Sequence: Synthetic oligonucleotide
  Antisense strand to SEQ ID NO: 1836905
ucuguaccaaugaguuugc

SEQ ID NO: 1836907 - RNA, 19 nt, Artificial Sequence
  Description of Artificial Sequence: Synthetic oligonucleotide
  Sense strand starting at position 3647 of SEQ ID NO: 1563853
aaggguugaucacaaagag

SEQ ID NO: 1836908 - RNA, 19 nt, Artificial Sequence
  Description of Artificial Sequence: Synthetic oligonucleotide
  Antisense strand to SEQ ID NO: 1836907
cucuuugugaucaacccuu

SEQ ID NO: 1836909 - RNA, 19 nt, Artificial Sequence
  Description of Artificial Sequence: Synthetic oligonucleotide
  Sense strand starting at position 3697 of SEQ ID NO: 1563853
cuauucuguccuuaauugu

SEQ ID NO: 1836910 - RNA, 19 nt, Artificial Sequence
  Description of Artificial Sequence: Synthetic oligonucleotide
  Antisense strand to SEQ ID NO: 1836909
acaauuaaggacagaauag

SEQ ID NO: 1836911 - RNA, 19 nt, Artificial Sequence
  Description of Artificial Sequence: Synthetic oligonucleotide
  Sense strand starting at position 3825 of SEQ ID NO: 1563853
gggauaucuuaccuaucau

SEQ ID NO: 1836912 - RNA, 19 nt, Artificial Sequence
  Description of Artificial Sequence: Synthetic oligonucleotide
  Antisense strand to SEQ ID NO: 1836911
augauagguaagauauccc

SEQ ID NO: 1836913 - RNA, 19 nt, Artificial Sequence
  Description of Artificial Sequence: Synthetic oligonucleotide
  Sense strand starting at position 100 of SEQ ID NO: 1563854
ucuccagccuccugggaaa

SEQ ID NO: 1836914 - RNA, 19 nt, Artificial Sequence
  Description of Artificial Sequence: Synthetic oligonucleotide
  Antisense strand to SEQ ID NO: 1836913
uuucccaggaggcuggaga

SEQ ID NO: 1836915 - RNA, 19 nt, Artificial Sequence
  Description of Artificial Sequence: Synthetic oligonucleotide
  Sense strand starting at position 498 of SEQ ID NO: 1563854
cuuggucucagggagacuu

SEQ ID NO: 1836916 - RNA, 19 nt, Artificial Sequence
  Description of Artificial Sequence: Synthetic oligonucleotide
  Antisense strand to SEQ ID NO: 1836915
aagucucccugagaccaag

SEQ ID NO: 1836917 - RNA, 19 nt, Artificial Sequence
  Description of Artificial Sequence: Synthetic oligonucleotide
  Sense strand starting at position 510 of SEQ ID NO: 1563854
gagacuuugcgccuuuguu

SEQ ID NO: 1836918 - RNA, 19 nt, Artificial Sequence
  Description of Artificial Sequence: Synthetic oligonucleotide
  Antisense strand to SEQ ID NO: 1836917
aacaaaggcgcaaagucuc

SEQ ID NO: 1836919 - RNA, 19 nt, Artificial Sequence
  Description of Artificial Sequence: Synthetic oligonucleotide
  Sense strand starting at position 827 of SEQ ID NO: 1563854
gcgcguguuugcacagguu

SEQ ID NO: 1836920 - RNA, 19 nt, Artificial Sequence
  Description of Artificial Sequence: Synthetic oligonucleotide
  Antisense strand to SEQ ID NO: 1836919
aaccugugcaaacacgcgc

SEQ ID NO: 1836921 - RNA, 19 nt, Artificial Sequence
  Description of Artificial Sequence: Synthetic oligonucleotide
  Sense strand starting at position 862 of SEQ ID NO: 1563854
cgagcuuucuggcaggcua

SEQ ID NO: 1836922 - RNA, 19 nt, Artificial Sequence
  Description of Artificial Sequence: Synthetic oligonucleotide
  Antisense strand to SEQ ID NO: 1836921
uagccugccagaaagcucg

SEQ ID NO: 1836923 - RNA, 19 nt, Artificial Sequence
  Description of Artificial Sequence: Synthetic oligonucleotide
  Sense strand starting at position 864 of SEQ ID NO: 1563854
agcuuucuggcaggcuaau

SEQ ID NO: 1836924 - RNA, 19 nt, Artificial Sequence
  Description of Artificial Sequence: Synthetic oligonucleotide
  Antisense strand to SEQ ID NO: 1836923
auuagccugccagaaagcu

SEQ ID NO: 1836925 - RNA, 19 nt, Artificial Sequence
  Description of Artificial Sequence: Synthetic oligonucleotide
  Sense strand starting at position 873 of SEQ ID NO: 1563854
gcaggcuaauccuauuagu

SEQ ID NO: 1836926 - RNA, 19 nt, Artificial Sequence
  Description of Artificial Sequence: Synthetic oligonucleotide
  Antisense strand to SEQ ID NO: 1836925
acuaauaggauuagccugc

SEQ ID NO: 1836927 - RNA, 19 nt, Artificial Sequence
  Description of Artificial Sequence: Synthetic oligonucleotide
  Sense strand starting at position 876 of SEQ ID NO: 1563854
ggcuaauccuauuaguguc

SEQ ID NO: 1836928 - RNA, 19 nt, Artificial Sequence
  Description of Artificial Sequence: Synthetic oligonucleotide
  Antisense strand to SEQ ID NO: 1836927
gacacuaauaggauuagcc

SEQ ID NO: 1836929 - RNA, 19 nt, Artificial Sequence
  Description of Artificial Sequence: Synthetic oligonucleotide
  Sense strand starting at position 882 of SEQ ID NO: 1563854
uccuauuagugucugcuca

SEQ ID NO: 1836930 - RNA, 19 nt, Artificial Sequence
  Description of Artificial Sequence: Synthetic oligonucleotide
  Antisense strand to SEQ ID NO: 1836929
ugagcagacacuaauagga

SEQ ID NO: 1836931 - RNA, 19 nt, Artificial Sequence
  Description of Artificial Sequence: Synthetic oligonucleotide
  Sense strand starting at position 884 of SEQ ID NO: 1563854
cuauuagugucugcucagu

SEQ ID NO: 1836932 - RNA, 19 nt, Artificial Sequence
  Description of Artificial Sequence: Synthetic oligonucleotide
  Antisense strand to SEQ ID NO: 1836931
acugagcagacacuaauag

SEQ ID NO: 1836933 - RNA, 19 nt, Artificial Sequence
  Description of Artificial Sequence: Synthetic oligonucleotide
  Sense strand starting at position 890 of SEQ ID NO: 1563854
gugucugcucaguccgaau

SEQ ID NO: 1836934 - RNA, 19 nt, Artificial Sequence
  Description of Artificial Sequence: Synthetic oligonucleotide
  Antisense strand to SEQ ID NO: 1836933
auucggacugagcagacac

SEQ ID NO: 1836935 - RNA, 19 nt, Artificial Sequence
  Description of Artificial Sequence: Synthetic oligonucleotide
  Sense strand starting at position 892 of SEQ ID NO: 1563854
gucugcucaguccgaauuu

SEQ ID NO: 1836936 - RNA, 19 nt, Artificial Sequence
  Description of Artificial Sequence: Synthetic oligonucleotide
  Antisense strand to SEQ ID NO: 1836935
aaauucggacugagcagac

SEQ ID NO: 1836937 - RNA, 19 nt, Artificial Sequence
  Description of Artificial Sequence: Synthetic oligonucleotide
  Sense strand starting at position 893 of SEQ ID NO: 1563854
ucugcucaguccgaauuua

SEQ ID NO: 1836938 - RNA, 19 nt, Artificial Sequence
  Description of Artificial Sequence: Synthetic oligonucleotide
  Antisense strand to SEQ ID NO: 1836937
uaaauucggacugagcaga

SEQ ID NO: 1836939 - RNA, 19 nt, Artificial Sequence
  Description of Artificial Sequence: Synthetic oligonucleotide
  Sense strand starting at position 904 of SEQ ID NO: 1563854
cgaauuuaaucacggauca

SEQ ID NO: 1836940 - RNA, 19 nt, Artificial Sequence
  Description of Artificial Sequence: Synthetic oligonucleotide
  Antisense strand to SEQ ID NO: 1836939
ugauccgugauuaaauucg

SEQ ID NO: 1836941 - RNA, 19 nt, Artificial Sequence
  Description of Artificial Sequence: Synthetic oligonucleotide
  Sense strand starting at position 928 of SEQ ID NO: 1563854
agacgacaucuccagcuuu

SEQ ID NO: 1836942 - RNA, 19 nt, Artificial Sequence
  Description of Artificial Sequence: Synthetic oligonucleotide
  Antisense strand to SEQ ID NO: 1836941
aaagcuggagaugucgucu

SEQ ID NO: 1836943 - RNA, 19 nt, Artificial Sequence
  Description of Artificial Sequence: Synthetic oligonucleotide
  Sense strand starting at position 1598 of SEQ ID NO: 1563854
ggccgugugcucagagcaa

SEQ ID NO: 1836944 - RNA, 19 nt, Artificial Sequence
  Description of Artificial Sequence: Synthetic oligonucleotide
  Antisense strand to SEQ ID NO: 1836943
uugcucugagcacacggcc

SEQ ID NO: 1836945 - RNA, 19 nt, Artificial Sequence
  Description of Artificial Sequence: Synthetic oligonucleotide
  Sense strand starting at position 1602 of SEQ ID NO: 1563854
gugugcucagagcaaacuu

SEQ ID NO: 1836946 - RNA, 19 nt, Artificial Sequence
  Description of Artificial Sequence: Synthetic oligonucleotide
  Antisense strand to SEQ ID NO: 1836945
aaguuugcucugagcacac

SEQ ID NO: 1836947 - RNA, 19 nt, Artificial Sequence
  Description of Artificial Sequence: Synthetic oligonucleotide
  Sense strand starting at position 1611 of SEQ ID NO: 1563854
gagcaaacuuuagggucua

SEQ ID NO: 1836948 - RNA, 19 nt, Artificial Sequence
  Description of Artificial Sequence: Synthetic oligonucleotide
  Antisense strand to SEQ ID NO: 1836947
uagacccuaaaguuugcuc

SEQ ID NO: 1836949 - RNA, 19 nt, Artificial Sequence
  Description of Artificial Sequence: Synthetic oligonucleotide
  Sense strand starting at position 2021 of SEQ ID NO: 1563854
ggguuuaaguuacugauag

SEQ ID NO: 1836950 - RNA, 19 nt, Artificial Sequence
  Description of Artificial Sequence: Synthetic oligonucleotide
  Antisense strand to SEQ ID NO: 1836949
cuaucaguaacuuaaaccc

SEQ ID NO: 1836951 - RNA, 19 nt, Artificial Sequence
  Description of Artificial Sequence: Synthetic oligonucleotide
  Sense strand starting at position 2022 of SEQ ID NO: 1563854
gguuuaaguuacugauagg

SEQ ID NO: 1836952 - RNA, 19 nt, Artificial Sequence
  Description of Artificial Sequence: Synthetic oligonucleotide
  Antisense strand to SEQ ID NO: 1836951
ccuaucaguaacuuaaacc

SEQ ID NO: 1836953 - RNA, 19 nt, Artificial Sequence
  Description of Artificial Sequence: Synthetic oligonucleotide
  Sense strand starting at position 2025 of SEQ ID NO: 1563854
uuaaguuacugauaggcau

SEQ ID NO: 1836954 - RNA, 19 nt, Artificial Sequence
  Description of Artificial Sequence: Synthetic oligonucleotide
  Antisense strand to SEQ ID NO: 1836953
augccuaucaguaacuuaa

SEQ ID NO: 1836955 - RNA, 19 nt, Artificial Sequence
  Description of Artificial Sequence: Synthetic oligonucleotide
  Sense strand starting at position 2937 of SEQ ID NO: 1563854
acgggagucucaucacaaa

SEQ ID NO: 1836956 - RNA, 19 nt, Artificial Sequence
  Description of Artificial Sequence: Synthetic oligonucleotide
  Antisense strand to SEQ ID NO: 1836955
uuugugaugagacucccgu

SEQ ID NO: 1836957 - RNA, 19 nt, Artificial Sequence
  Description of Artificial Sequence: Synthetic oligonucleotide
  Sense strand starting at position 3409 of SEQ ID NO: 1563854
gcggcuucugcaggaacau

SEQ ID NO: 1836958 - RNA, 19 nt, Artificial Sequence
  Description of Artificial Sequence: Synthetic oligonucleotide
  Antisense strand to SEQ ID NO: 1836957
auguuccugcagaagccgc

SEQ ID NO: 1836959 - RNA, 19 nt, Artificial Sequence
  Description of Artificial Sequence: Synthetic oligonucleotide
  Sense strand starting at position 3410 of SEQ ID NO: 1563854
cggcuucugcaggaacaua

SEQ ID NO: 1836960 - RNA, 19 nt, Artificial Sequence
  Description of Artificial Sequence: Synthetic oligonucleotide
  Antisense strand to SEQ ID NO: 1836959
uauguuccugcagaagccg

SEQ ID NO: 1836961 - RNA, 19 nt, Artificial Sequence
  Description of Artificial Sequence: Synthetic oligonucleotide
  Sense strand starting at position 3422 of SEQ ID NO: 1563854
gaacauagguuccuuggga

SEQ ID NO: 1836962 - RNA, 19 nt, Artificial Sequence
  Description of Artificial Sequence: Synthetic oligonucleotide
  Antisense strand to SEQ ID NO: 1836961
ucccaaggaaccuauguuc

SEQ ID NO: 1836963 - RNA, 19 nt, Artificial Sequence
  Description of Artificial Sequence: Synthetic oligonucleotide
  Sense strand starting at position 3423 of SEQ ID NO: 1563854
aacauagguuccuugggaa

SEQ ID NO: 1836964 - RNA, 19 nt, Artificial Sequence
  Description of Artificial Sequence: Synthetic oligonucleotide
  Antisense strand to SEQ ID NO: 1836963
uucccaaggaaccuauguu

SEQ ID NO: 1836965 - RNA, 19 nt, Artificial Sequence
  Description of Artificial Sequence: Synthetic oligonucleotide
  Sense strand starting at position 3875 of SEQ ID NO: 1563854
gcgauugccuccuagcguu

SEQ ID NO: 1836966 - RNA, 19 nt, Artificial Sequence
  Description of Artificial Sequence: Synthetic oligonucleotide
  Antisense strand to SEQ ID NO: 1836965
aacgcuaggaggcaaucgc

SEQ ID NO: 1836967 - RNA, 19 nt, Artificial Sequence
  Description of Artificial Sequence: Synthetic oligonucleotide
  Sense strand starting at position 3885 of SEQ ID NO: 1563854
ccuagcguuucacgaaguu

SEQ ID NO: 1836968 - RNA, 19 nt, Artificial Sequence
  Description of Artificial Sequence: Synthetic oligonucleotide
  Antisense strand to SEQ ID NO: 1836967
aacuucgugaaacgcuagg

SEQ ID NO: 1836969 - RNA, 19 nt, Artificial Sequence
  Description of Artificial Sequence: Synthetic oligonucleotide
  Sense strand starting at position 86 of SEQ ID NO: 1563855
aauucuuggucuucuagga

SEQ ID NO: 1836970 - RNA, 19 nt, Artificial Sequence
  Description of Artificial Sequence: Synthetic oligonucleotide
  Antisense strand to SEQ ID NO: 1836969
uccuagaagaccaagaauu

SEQ ID NO: 1836971 - RNA, 19 nt, Artificial Sequence
  Description of Artificial Sequence: Synthetic oligonucleotide
  Sense strand starting at position 99 of SEQ ID NO: 1563855
cuaggacagcuugaaguuu

SEQ ID NO: 1836972 - RNA, 19 nt, Artificial Sequence
  Description of Artificial Sequence: Synthetic oligonucleotide
  Antisense strand to SEQ ID NO: 1836971
aaacuucaagcuguccuag

SEQ ID NO: 1836973 - RNA, 19 nt, Artificial Sequence
  Description of Artificial Sequence: Synthetic oligonucleotide
  Sense strand starting at position 161 of SEQ ID NO: 1563855
gagaacaagguguggcaua

SEQ ID NO: 1836974 - RNA, 19 nt, Artificial Sequence
  Description of Artificial Sequence: Synthetic oligonucleotide
  Antisense strand to SEQ ID NO: 1836973
uaugccacaccuuguucuc

SEQ ID NO: 1836975 - RNA, 19 nt, Artificial Sequence
  Description of Artificial Sequence: Synthetic oligonucleotide
  Sense strand starting at position 192 of SEQ ID NO: 1563855
ggcugaucuugaucaaauc

SEQ ID NO: 1836976 - RNA, 19 nt, Artificial Sequence
  Description of Artificial Sequence: Synthetic oligonucleotide
  Antisense strand to SEQ ID NO: 1836975
gauuugaucaagaucagcc

SEQ ID NO: 1836977 - RNA, 19 nt, Artificial Sequence
  Description of Artificial Sequence: Synthetic oligonucleotide
  Sense strand starting at position 209 of SEQ ID NO: 1563855
uccaaagugugacucuaaa

SEQ ID NO: 1836978 - RNA, 19 nt, Artificial Sequence
  Description of Artificial Sequence: Synthetic oligonucleotide
  Antisense strand to SEQ ID NO: 1836977
uuuagagucacacuuugga

SEQ ID NO: 1836979 - RNA, 19 nt, Artificial Sequence
  Description of Artificial Sequence: Synthetic oligonucleotide
  Sense strand starting at position 220 of SEQ ID NO: 1563855
acucuaaagcaaugaaugu

SEQ ID NO: 1836980 - RNA, 19 nt, Artificial Sequence
  Description of Artificial Sequence: Synthetic oligonucleotide
  Antisense strand to SEQ ID NO: 1836979
acauucauugcuuuagagu

SEQ ID NO: 1836981 - RNA, 19 nt, Artificial Sequence
  Description of Artificial Sequence: Synthetic oligonucleotide
  Sense strand starting at position 297 of SEQ ID NO: 1563855
cuggaaaugacguaagcaa

SEQ ID NO: 1836982 - RNA, 19 nt, Artificial Sequence
  Description of Artificial Sequence: Synthetic oligonucleotide
  Antisense strand to SEQ ID NO: 1836981
uugcuuacgucauuuccag

SEQ ID NO: 1836983 - RNA, 19 nt, Artificial Sequence
  Description of Artificial Sequence: Synthetic oligonucleotide
  Sense strand starting at position 668 of SEQ ID NO: 1563855
ggguaauuaggauggaggu

SEQ ID NO: 1836984 - RNA, 19 nt, Artificial Sequence
  Description of Artificial Sequence: Synthetic oligonucleotide
  Antisense strand to SEQ ID NO: 1836983
accuccauccuaauuaccc

SEQ ID NO: 1836985 - RNA, 19 nt, Artificial Sequence
  Description of Artificial Sequence: Synthetic oligonucleotide
  Sense strand starting at position 669 of SEQ ID NO: 1563855
gguaauuaggauggagguu

SEQ ID NO: 1836986 - RNA, 19 nt, Artificial Sequence
  Description of Artificial Sequence: Synthetic oligonucleotide
  Antisense strand to SEQ ID NO: 1836985
aaccuccauccuaauuacc

SEQ ID NO: 1836987 - RNA, 19 nt, Artificial Sequence
  Description of Artificial Sequence: Synthetic oligonucleotide
  Sense strand starting at position 867 of SEQ ID NO: 1563855
ggugguugacaaugaggaa

SEQ ID NO: 1836988 - RNA, 19 nt, Artificial Sequence
  Description of Artificial Sequence: Synthetic oligonucleotide
  Antisense strand to SEQ ID NO: 1836987
uuccucauugucaaccacc

SEQ ID NO: 1836989 - RNA, 19 nt, Artificial Sequence
  Description of Artificial Sequence: Synthetic oligonucleotide
  Sense strand starting at position 918 of SEQ ID NO: 1563855
uccacaucugugcacauau

SEQ ID NO: 1836990 - RNA, 19 nt, Artificial Sequence
  Description of Artificial Sequence: Synthetic oligonucleotide
  Antisense strand to SEQ ID NO: 1836989
auaugugcacagaugugga

SEQ ID NO: 1836991 - RNA, 19 nt, Artificial Sequence
  Description of Artificial Sequence: Synthetic oligonucleotide
  Sense strand starting at position 974 of SEQ ID NO: 1563855
aguggauugcccugggaau

SEQ ID NO: 1836992 - RNA, 19 nt, Artificial Sequence
  Description of Artificial Sequence: Synthetic oligonucleotide
  Antisense strand to SEQ ID NO: 1836991
auucccagggcaauccacu

SEQ ID NO: 1836993 - RNA, 19 nt, Artificial Sequence
  Description of Artificial Sequence: Synthetic oligonucleotide
  Sense strand starting at position 1018 of SEQ ID NO: 1563855
gugaaauggcauuaccuca

SEQ ID NO: 1836994 - RNA, 19 nt, Artificial Sequence
  Description of Artificial Sequence: Synthetic oligonucleotide
  Antisense strand to SEQ ID NO: 1836993
ugagguaaugccauuucac

SEQ ID NO: 1836995 - RNA, 19 nt, Artificial Sequence
  Description of Artificial Sequence: Synthetic oligonucleotide
  Sense strand starting at position 1076 of SEQ ID NO: 1563855
gacccacggcucuauaaga

SEQ ID NO: 1836996 - RNA, 19 nt, Artificial Sequence
  Description of Artificial Sequence: Synthetic oligonucleotide
  Antisense strand to SEQ ID NO: 1836995
ucuuauagagccguggguc

SEQ ID NO: 1836997 - RNA, 19 nt, Artificial Sequence
  Description of Artificial Sequence: Synthetic oligonucleotide
  Sense strand starting at position 1150 of SEQ ID NO: 1563855
gcccuaauacccugagaua

SEQ ID NO: 1836998 - RNA, 19 nt, Artificial Sequence
  Description of Artificial Sequence: Synthetic oligonucleotide
  Antisense strand to SEQ ID NO: 1836997
uaucucaggguauuagggc

SEQ ID NO: 1836999 - RNA, 19 nt, Artificial Sequence
  Description of Artificial Sequence: Synthetic oligonucleotide
  Sense strand starting at position 1202 of SEQ ID NO: 1563855
agagcuaaucuugguagau

SEQ ID NO: 1837000 - RNA, 19 nt, Artificial Sequence
  Description of Artificial Sequence: Synthetic oligonucleotide
  Antisense strand to SEQ ID NO: 1836999
aucuaccaagauuagcucu

SEQ ID NO: 1837001 - RNA, 19 nt, Artificial Sequence
  Description of Artificial Sequence: Synthetic oligonucleotide
  Sense strand starting at position 1203 of SEQ ID NO: 1563855
gagcuaaucuugguagauu

SEQ ID NO: 1837002 - RNA, 19 nt, Artificial Sequence
  Description of Artificial Sequence: Synthetic oligonucleotide
  Antisense strand to SEQ ID NO: 1837001
aaucuaccaagauuagcuc

SEQ ID NO: 1837003 - RNA, 19 nt, Artificial Sequence
  Description of Artificial Sequence: Synthetic oligonucleotide
  Sense strand starting at position 1352 of SEQ ID NO: 1563855
cugaguucccagggaggaa

SEQ ID NO: 1837004 - RNA, 19 nt, Artificial Sequence
  Description of Artificial Sequence: Synthetic oligonucleotide
  Antisense strand to SEQ ID NO: 1837003
uuccucccugggaacucag

SEQ ID NO: 1837005 - RNA, 19 nt, Artificial Sequence
  Description of Artificial Sequence: Synthetic oligonucleotide
  Sense strand starting at position 1369 of SEQ ID NO: 1563855
aaaguagaagugugucaga

SEQ ID NO: 1837006 - RNA, 19 nt, Artificial Sequence
  Description of Artificial Sequence: Synthetic oligonucleotide
  Antisense strand to SEQ ID NO: 1837005
ucugacacacuucuacuuu

SEQ ID NO: 1837007 - RNA, 19 nt, Artificial Sequence
  Description of Artificial Sequence: Synthetic oligonucleotide
  Sense strand starting at position 1593 of SEQ ID NO: 1563855
ugcagugaucacuacuaga

SEQ ID NO: 1837008 - RNA, 19 nt, Artificial Sequence
  Description of Artificial Sequence: Synthetic oligonucleotide
  Antisense strand to SEQ ID NO: 1837007
ucuaguagugaucacugca

SEQ ID NO: 1837009 - RNA, 19 nt, Artificial Sequence
  Description of Artificial Sequence: Synthetic oligonucleotide
  Sense strand starting at position 1673 of SEQ ID NO: 1563855
gggaucagcucaucuccua

SEQ ID NO: 1837010 - RNA, 19 nt, Artificial Sequence
  Description of Artificial Sequence: Synthetic oligonucleotide
  Antisense strand to SEQ ID NO: 1837009
uaggagaugagcugauccc

SEQ ID NO: 1837011 - RNA, 19 nt, Artificial Sequence
  Description of Artificial Sequence: Synthetic oligonucleotide
  Sense strand starting at position 1840 of SEQ ID NO: 1563855
gaccgauuccuggagcuuu

SEQ ID NO: 1837012 - RNA, 19 nt, Artificial Sequence
  Description of Artificial Sequence: Synthetic oligonucleotide
  Antisense strand to SEQ ID NO: 1837011
aaagcuccaggaaucgguc

SEQ ID NO: 1837013 - RNA, 19 nt, Artificial Sequence
  Description of Artificial Sequence: Synthetic oligonucleotide
  Sense strand starting at position 2182 of SEQ ID NO: 1563855
gagacaguuggcugggaua

SEQ ID NO: 1837014 - RNA, 19 nt, Artificial Sequence
  Description of Artificial Sequence: Synthetic oligonucleotide
  Antisense strand to SEQ ID NO: 1837013
uaucccagccaacugucuc

SEQ ID NO: 1837015 - RNA, 19 nt, Artificial Sequence
  Description of Artificial Sequence: Synthetic oligonucleotide
  Sense strand starting at position 2184 of SEQ ID NO: 1563855
gacaguuggcugggauaaa

SEQ ID NO: 1837016 - RNA, 19 nt, Artificial Sequence
  Description of Artificial Sequence: Synthetic oligonucleotide
  Antisense strand to SEQ ID NO: 1837015
uuuaucccagccaacuguc

SEQ ID NO: 1837017 - RNA, 19 nt, Artificial Sequence
  Description of Artificial Sequence: Synthetic oligonucleotide
  Sense strand starting at position 2292 of SEQ ID NO: 1563855
ugggccuacaaguaugaua

SEQ ID NO: 1837018 - RNA, 19 nt, Artificial Sequence
  Description of Artificial Sequence: Synthetic oligonucleotide
  Antisense strand to SEQ ID NO: 1837017
uaucauacuuguaggccca

SEQ ID NO: 1837019 - RNA, 19 nt, Artificial Sequence
  Description of Artificial Sequence: Synthetic oligonucleotide
  Sense strand starting at position 2294 of SEQ ID NO: 1563855
ggccuacaaguaugauauc

SEQ ID NO: 1837020 - RNA, 19 nt, Artificial Sequence
  Description of Artificial Sequence: Synthetic oligonucleotide
  Antisense strand to SEQ ID NO: 1837019
gauaucauacuuguaggcc

SEQ ID NO: 1837021 - RNA, 19 nt, Artificial Sequence
  Description of Artificial Sequence: Synthetic oligonucleotide
  Sense strand starting at position 2314 of SEQ ID NO: 1563855
ggguccuacgucuggauuu

SEQ ID NO: 1837022 - RNA, 19 nt, Artificial Sequence
  Description of Artificial Sequence: Synthetic oligonucleotide
  Antisense strand to SEQ ID NO: 1837021
aaauccagacguaggaccc

SEQ ID NO: 1837023 - RNA, 19 nt, Artificial Sequence
  Description of Artificial Sequence: Synthetic oligonucleotide
  Sense strand starting at position 2453 of SEQ ID NO: 1563855
uagaguaagccuuaugguu

SEQ ID NO: 1837024 - RNA, 19 nt, Artificial Sequence
  Description of Artificial Sequence: Synthetic oligonucleotide
  Antisense strand to SEQ ID NO: 1837023
aaccauaaggcuuacucua

SEQ ID NO: 1837025 - RNA, 19 nt, Artificial Sequence
  Description of Artificial Sequence: Synthetic oligonucleotide
  Sense strand starting at position 2593 of SEQ ID NO: 1563855
ggugcacugauguaaagga

SEQ ID NO: 1837026 - RNA, 19 nt, Artificial Sequence
  Description of Artificial Sequence: Synthetic oligonucleotide
  Antisense strand to SEQ ID NO: 1837025
uccuuuacaucagugcacc

SEQ ID NO: 1837027 - RNA, 19 nt, Artificial Sequence
  Description of Artificial Sequence: Synthetic oligonucleotide
  Sense strand starting at position 2616 of SEQ ID NO: 1563855
gacugagcagguuaugauc

SEQ ID NO: 1837028 - RNA, 19 nt, Artificial Sequence
  Description of Artificial Sequence: Synthetic oligonucleotide
  Antisense strand to SEQ ID NO: 1837027
gaucauaaccugcucaguc

SEQ ID NO: 1837029 - RNA, 19 nt, Artificial Sequence
  Description of Artificial Sequence: Synthetic oligonucleotide
  Sense strand starting at position 2639 of SEQ ID NO: 1563855
cuacuccuccagugacaga

SEQ ID NO: 1837030 - RNA, 19 nt, Artificial Sequence
  Description of Artificial Sequence: Synthetic oligonucleotide
  Antisense strand to SEQ ID NO: 1837029
ucugucacuggaggaguag

SEQ ID NO: 1837031 - RNA, 19 nt, Artificial Sequence
  Description of Artificial Sequence: Synthetic oligonucleotide
  Sense strand starting at position 2883 of SEQ ID NO: 1563855
accucugggcauuauauau

SEQ ID NO: 1837032 - RNA, 19 nt, Artificial Sequence
  Description of Artificial Sequence: Synthetic oligonucleotide
  Antisense strand to SEQ ID NO: 1837031
auauauaaugcccagaggu

SEQ ID NO: 1837033 - RNA, 19 nt, Artificial Sequence
  Description of Artificial Sequence: Synthetic oligonucleotide
  Sense strand starting at position 2940 of SEQ ID NO: 1563855
aaaguauacugguuaggga

SEQ ID NO: 1837034 - RNA, 19 nt, Artificial Sequence
  Description of Artificial Sequence: Synthetic oligonucleotide
  Antisense strand to SEQ ID NO: 1837033
ucccuaaccaguauacuuu

SEQ ID NO: 1837035 - RNA, 19 nt, Artificial Sequence
  Description of Artificial Sequence: Synthetic oligonucleotide
  Sense strand starting at position 2964 of SEQ ID NO: 1563855
ggaccugagcaaugaugca

SEQ ID NO: 1837036 - RNA, 19 nt, Artificial Sequence
  Description of Artificial Sequence: Synthetic oligonucleotide
  Antisense strand to SEQ ID NO: 1837035
ugcaucauugcucaggucc

SEQ ID NO: 1837037 - RNA, 19 nt, Artificial Sequence
  Description of Artificial Sequence: Synthetic oligonucleotide
  Sense strand starting at position 2984 of SEQ ID NO: 1563855
uggcgaguucucuggauuu

SEQ ID NO: 1837038 - RNA, 19 nt, Artificial Sequence
  Description of Artificial Sequence: Synthetic oligonucleotide
  Antisense strand to SEQ ID NO: 1837037
aaauccagagaacucgcca

SEQ ID NO: 1837039 - RNA, 19 nt, Artificial Sequence
  Description of Artificial Sequence: Synthetic oligonucleotide
  Sense strand starting at position 3366 of SEQ ID NO: 1563855
cccugaugucaaugaagaa

SEQ ID NO: 1837040 - RNA, 19 nt, Artificial Sequence
  Description of Artificial Sequence: Synthetic oligonucleotide
  Antisense strand to SEQ ID NO: 1837039
uucuucauugacaucaggg

SEQ ID NO: 1837041 - RNA, 19 nt, Artificial Sequence
  Description of Artificial Sequence: Synthetic oligonucleotide
  Sense strand starting at position 3551 of SEQ ID NO: 1563855
auauuaucggcagaugcca

SEQ ID NO: 1837042 - RNA, 19 nt, Artificial Sequence
  Description of Artificial Sequence: Synthetic oligonucleotide
  Antisense strand to SEQ ID NO: 1837041
uggcaucugccgauaauau

SEQ ID NO: 1837043 - RNA, 19 nt, Artificial Sequence
  Description of Artificial Sequence: Synthetic oligonucleotide
  Sense strand starting at position 3589 of SEQ ID NO: 1563855
gucagaacugccugacaag

SEQ ID NO: 1837044 - RNA, 19 nt, Artificial Sequence
  Description of Artificial Sequence: Synthetic oligonucleotide
  Antisense strand to SEQ ID NO: 1837043
cuugucaggcaguucugac

SEQ ID NO: 1837045 - RNA, 19 nt, Artificial Sequence
  Description of Artificial Sequence: Synthetic oligonucleotide
  Sense strand starting at position 3691 of SEQ ID NO: 1563855
ucagcaaaguaaucagaau

SEQ ID NO: 1837046 - RNA, 19 nt, Artificial Sequence
  Description of Artificial Sequence: Synthetic oligonucleotide
  Antisense strand to SEQ ID NO: 1837045
auucugauuacuuugcuga

SEQ ID NO: 1837047 - RNA, 19 nt, Artificial Sequence
  Description of Artificial Sequence: Synthetic oligonucleotide
  Sense strand starting at position 3703 of SEQ ID NO: 1563855
ucagaauucucagcagaga

SEQ ID NO: 1837048 - RNA, 19 nt, Artificial Sequence
  Description of Artificial Sequence: Synthetic oligonucleotide
  Antisense strand to SEQ ID NO: 1837047
ucucugcugagaauucuga

SEQ ID NO: 1837049 - RNA, 19 nt, Artificial Sequence
  Description of Artificial Sequence: Synthetic oligonucleotide
  Sense strand starting at position 13 of SEQ ID NO: 1563856
auaugaaaucagugaggca

SEQ ID NO: 1837050 - RNA, 19 nt, Artificial Sequence
  Description of Artificial Sequence: Synthetic oligonucleotide
  Antisense strand to SEQ ID NO: 1837049
ugccucacugauuucauau

SEQ ID NO: 1837051 - RNA, 19 nt, Artificial Sequence
  Description of Artificial Sequence: Synthetic oligonucleotide
  Sense strand starting at position 49 of SEQ ID NO: 1563856
auuaguacugcaggucuua

SEQ ID NO: 1837052 - RNA, 19 nt, Artificial Sequence
  Description of Artificial Sequence: Synthetic oligonucleotide
  Antisense strand to SEQ ID NO: 1837051
uaagaccugcaguacuaau

SEQ ID NO: 1837053 - RNA, 19 nt, Artificial Sequence
  Description of Artificial Sequence: Synthetic oligonucleotide
  Sense strand starting at position 58 of SEQ ID NO: 1563856
gcaggucuuaaaugggaga

SEQ ID NO: 1837054 - RNA, 19 nt, Artificial Sequence
  Description of Artificial Sequence: Synthetic oligonucleotide
  Antisense strand to SEQ ID NO: 1837053
ucucccauuuaagaccugc

SEQ ID NO: 1837055 - RNA, 19 nt, Artificial Sequence
  Description of Artificial Sequence: Synthetic oligonucleotide
  Sense strand starting at position 106 of SEQ ID NO: 1563856
auucgaccucaagagaguu

SEQ ID NO: 1837056 - RNA, 19 nt, Artificial Sequence
  Description of Artificial Sequence: Synthetic oligonucleotide
  Antisense strand to SEQ ID NO: 1837055
aacucucuugaggucgaau

SEQ ID NO: 1837057 - RNA, 19 nt, Artificial Sequence
  Description of Artificial Sequence: Synthetic oligonucleotide
  Sense strand starting at position 344 of SEQ ID NO: 1563856
acuccuaccucgcaggaua

SEQ ID NO: 1837058 - RNA, 19 nt, Artificial Sequence
  Description of Artificial Sequence: Synthetic oligonucleotide
  Antisense strand to SEQ ID NO: 1837057
uauccugcgagguaggagu

SEQ ID NO: 1837059 - RNA, 19 nt, Artificial Sequence
  Description of Artificial Sequence: Synthetic oligonucleotide
  Sense strand starting at position 2101 of SEQ ID NO: 1563856
gggaguagacgugggugua

SEQ ID NO: 1837060 - RNA, 19 nt, Artificial Sequence
  Description of Artificial Sequence: Synthetic oligonucleotide
  Antisense strand to SEQ ID NO: 1837059
uacacccacgucuacuccc

SEQ ID NO: 1837061 - RNA, 19 nt, Artificial Sequence
  Description of Artificial Sequence: Synthetic oligonucleotide
  Sense strand starting at position 2166 of SEQ ID NO: 1563856
gaaagcuaucugggcaaga

SEQ ID NO: 1837062 - RNA, 19 nt, Artificial Sequence
  Description of Artificial Sequence: Synthetic oligonucleotide
  Antisense strand to SEQ ID NO: 1837061
ucuugcccagauagcuuuc

SEQ ID NO: 1837063 - RNA, 19 nt, Artificial Sequence
  Description of Artificial Sequence: Synthetic oligonucleotide
  Sense strand starting at position 2167 of SEQ ID NO: 1563856
aaagcuaucugggcaagag

SEQ ID NO: 1837064 - RNA, 19 nt, Artificial Sequence
  Description of Artificial Sequence: Synthetic oligonucleotide
  Antisense strand to SEQ ID NO: 1837063
cucuugcccagauagcuuu

SEQ ID NO: 1837065 - RNA, 19 nt, Artificial Sequence
  Description of Artificial Sequence: Synthetic oligonucleotide
  Sense strand starting at position 2168 of SEQ ID NO: 1563856
aagcuaucugggcaagagu

SEQ ID NO: 1837066 - RNA, 19 nt, Artificial Sequence
  Description of Artificial Sequence: Synthetic oligonucleotide
  Antisense strand to SEQ ID NO: 1837065
acucuugcccagauagcuu

SEQ ID NO: 1837067 - RNA, 19 nt, Artificial Sequence
  Description of Artificial Sequence: Synthetic oligonucleotide
  Sense strand starting at position 2582 of SEQ ID NO: 1563856
ucauguauuaagugggacu

SEQ ID NO: 1837068 - RNA, 19 nt, Artificial Sequence
  Description of Artificial Sequence: Synthetic oligonucleotide
  Antisense strand to SEQ ID NO: 1837067
agucccacuuaauacauga

SEQ ID NO: 1837069 - RNA, 19 nt, Artificial Sequence
  Description of Artificial Sequence: Synthetic oligonucleotide
  Sense strand starting at position 2683 of SEQ ID NO: 1563856
gagugcuauuuagugcaca

SEQ ID NO: 1837070 - RNA, 19 nt, Artificial Sequence
  Description of Artificial Sequence: Synthetic oligonucleotide
  Antisense strand to SEQ ID NO: 1837069
ugugcacuaaauagcacuc

SEQ ID NO: 1837071 - RNA, 19 nt, Artificial Sequence
  Description of Artificial Sequence: Synthetic oligonucleotide
  Sense strand starting at position 2716 of SEQ ID NO: 1563856
gccagccuucuguuugcua

SEQ ID NO: 1837072 - RNA, 19 nt, Artificial Sequence
  Description of Artificial Sequence: Synthetic oligonucleotide
  Antisense strand to SEQ ID NO: 1837071
uagcaaacagaaggcuggc

SEQ ID NO: 1837073 - RNA, 19 nt, Artificial Sequence
  Description of Artificial Sequence: Synthetic oligonucleotide
  Sense strand starting at position 2720 of SEQ ID NO: 1563856
gccuucuguuugcuaguuu

SEQ ID NO: 1837074 - RNA, 19 nt, Artificial Sequence
  Description of Artificial Sequence: Synthetic oligonucleotide
  Antisense strand to SEQ ID NO: 1837073
aaacuagcaaacagaaggc

SEQ ID NO: 1837075 - RNA, 19 nt, Artificial Sequence
  Description of Artificial Sequence: Synthetic oligonucleotide
  Sense strand starting at position 2789 of SEQ ID NO: 1563856
agcugaauuugucauuacu

SEQ ID NO: 1837076 - RNA, 19 nt, Artificial Sequence
  Description of Artificial Sequence: Synthetic oligonucleotide
  Antisense strand to SEQ ID NO: 1837075
aguaaugacaaauucagcu

SEQ ID NO: 1837077 - RNA, 19 nt, Artificial Sequence
  Description of Artificial Sequence: Synthetic oligonucleotide
  Sense strand starting at position 2795 of SEQ ID NO: 1563856
auuugucauuacuggaacu

SEQ ID NO: 1837078 - RNA, 19 nt, Artificial Sequence
  Description of Artificial Sequence: Synthetic oligonucleotide
  Antisense strand to SEQ ID NO: 1837077
aguuccaguaaugacaaau

SEQ ID NO: 1837079 - RNA, 19 nt, Artificial Sequence
  Description of Artificial Sequence: Synthetic oligonucleotide
  Sense strand starting at position 3134 of SEQ ID NO: 1563856
aggugaaaucgugacguaa

SEQ ID NO: 1837080 - RNA, 19 nt, Artificial Sequence
  Description of Artificial Sequence: Synthetic oligonucleotide
  Antisense strand to SEQ ID NO: 1837079
uuacgucacgauuucaccu

SEQ ID NO: 1837081 - RNA, 19 nt, Artificial Sequence
  Description of Artificial Sequence: Synthetic oligonucleotide
  Sense strand starting at position 3146 of SEQ ID NO: 1563856
gacguaaauuuagagaaag

SEQ ID NO: 1837082 - RNA, 19 nt, Artificial Sequence
  Description of Artificial Sequence: Synthetic oligonucleotide
  Antisense strand to SEQ ID NO: 1837081
cuuucucuaaauuuacguc

SEQ ID NO: 1837083 - RNA, 19 nt, Artificial Sequence
  Description of Artificial Sequence: Synthetic oligonucleotide
  Sense strand starting at position 3156 of SEQ ID NO: 1563856
uagagaaagugaugagaac

SEQ ID NO: 1837084 - RNA, 19 nt, Artificial Sequence
  Description of Artificial Sequence: Synthetic oligonucleotide
  Antisense strand to SEQ ID NO: 1837083
guucucaucacuuucucua

SEQ ID NO: 1837085 - RNA, 19 nt, Artificial Sequence
  Description of Artificial Sequence: Synthetic oligonucleotide
  Sense strand starting at position 3167 of SEQ ID NO: 1563856
augagaacucgaggaagcu

SEQ ID NO: 1837086 - RNA, 19 nt, Artificial Sequence
  Description of Artificial Sequence: Synthetic oligonucleotide
  Antisense strand to SEQ ID NO: 1837085
agcuuccucgaguucucau

SEQ ID NO: 1837087 - RNA, 19 nt, Artificial Sequence
  Description of Artificial Sequence: Synthetic oligonucleotide
  Sense strand starting at position 3332 of SEQ ID NO: 1563856
acuugagacuuaugacuaa

SEQ ID NO: 1837088 - RNA, 19 nt, Artificial Sequence
  Description of Artificial Sequence: Synthetic oligonucleotide
  Antisense strand to SEQ ID NO: 1837087
uuagucauaagucucaagu

SEQ ID NO: 1837089 - RNA, 19 nt, Artificial Sequence
  Description of Artificial Sequence: Synthetic oligonucleotide
  Sense strand starting at position 3368 of SEQ ID NO: 1563856
cuugguagacuuugagcau

SEQ ID NO: 1837090 - RNA, 19 nt, Artificial Sequence
  Description of Artificial Sequence: Synthetic oligonucleotide
  Antisense strand to SEQ ID NO: 1837089
augcucaaagucuaccaag

SEQ ID NO: 1837091 - RNA, 19 nt, Artificial Sequence
  Description of Artificial Sequence: Synthetic oligonucleotide
  Sense strand starting at position 3369 of SEQ ID NO: 1563856
uugguagacuuugagcaua

SEQ ID NO: 1837092 - RNA, 19 nt, Artificial Sequence
  Description of Artificial Sequence: Synthetic oligonucleotide
  Antisense strand to SEQ ID NO: 1837091
uaugcucaaagucuaccaa

SEQ ID NO: 1837093 - RNA, 19 nt, Artificial Sequence
  Description of Artificial Sequence: Synthetic oligonucleotide
  Sense strand starting at position 3371 of SEQ ID NO: 1563856
gguagacuuugagcauaga

SEQ ID NO: 1837094 - RNA, 19 nt, Artificial Sequence
  Description of Artificial Sequence: Synthetic oligonucleotide
  Antisense strand to SEQ ID NO: 1837093
ucuaugcucaaagucuacc

SEQ ID NO: 1837095 - RNA, 19 nt, Artificial Sequence
  Description of Artificial Sequence: Synthetic oligonucleotide
  Sense strand starting at position 3429 of SEQ ID NO: 1563856
augugauucuguccaccuu

SEQ ID NO: 1837096 - RNA, 19 nt, Artificial Sequence
  Description of Artificial Sequence: Synthetic oligonucleotide
  Antisense strand to SEQ ID NO: 1837095
aagguggacagaaucacau

SEQ ID NO: 1837097 - RNA, 19 nt, Artificial Sequence
  Description of Artificial Sequence: Synthetic oligonucleotide
  Sense strand starting at position 3430 of SEQ ID NO: 1563856
ugugauucuguccaccuuu

SEQ ID NO: 1837098 - RNA, 19 nt, Artificial Sequence
  Description of Artificial Sequence: Synthetic oligonucleotide
  Antisense strand to SEQ ID NO: 1837097
aaagguggacagaaucaca

SEQ ID NO: 1837099 - RNA, 19 nt, Artificial Sequence
  Description of Artificial Sequence: Synthetic oligonucleotide
  Sense strand starting at position 3516 of SEQ ID NO: 1563856
agggcaugguacugggaua

SEQ ID NO: 1837100 - RNA, 19 nt, Artificial Sequence
  Description of Artificial Sequence: Synthetic oligonucleotide
  Antisense strand to SEQ ID NO: 1837099
uaucccaguaccaugcccu

SEQ ID NO: 1837101 - RNA, 19 nt, Artificial Sequence
  Description of Artificial Sequence: Synthetic oligonucleotide
  Sense strand starting at position 3554 of SEQ ID NO: 1563856
agaccaucaucaucgaaca

SEQ ID NO: 1837102 - RNA, 19 nt, Artificial Sequence
  Description of Artificial Sequence: Synthetic oligonucleotide
  Antisense strand to SEQ ID NO: 1837101
uguucgaugaugauggucu

SEQ ID NO: 1837103 - RNA, 19 nt, Artificial Sequence
  Description of Artificial Sequence: Synthetic oligonucleotide
  Sense strand starting at position 3575 of SEQ ID NO: 1563856
cagucuaguggaugaguua

SEQ ID NO: 1837104 - RNA, 19 nt, Artificial Sequence
  Description of Artificial Sequence: Synthetic oligonucleotide
  Antisense strand to SEQ ID NO: 1837103
uaacucauccacuagacug

SEQ ID NO: 1837105 - RNA, 19 nt, Artificial Sequence
  Description of Artificial Sequence: Synthetic oligonucleotide
  Sense strand starting at position 3576 of SEQ ID NO: 1563856
agucuaguggaugaguuaa

SEQ ID NO: 1837106 - RNA, 19 nt, Artificial Sequence
  Description of Artificial Sequence: Synthetic oligonucleotide
  Antisense strand to SEQ ID NO: 1837105
uuaacucauccacuagacu

SEQ ID NO: 1837107 - RNA, 19 nt, Artificial Sequence
  Description of Artificial Sequence: Synthetic oligonucleotide
  Sense strand starting at position 3578 of SEQ ID NO: 1563856
ucuaguggaugaguuaaua

SEQ ID NO: 1837108 - RNA, 19 nt, Artificial Sequence
  Description of Artificial Sequence: Synthetic oligonucleotide
  Antisense strand to SEQ ID NO: 1837107
uauuaacucauccacuaga

SEQ ID NO: 1837109 - RNA, 19 nt, Artificial Sequence
  Description of Artificial Sequence: Synthetic oligonucleotide
  Sense strand starting at position 3613 of SEQ ID NO: 1563856
gucuaucugauguguaaau

SEQ ID NO: 1837110 - RNA, 19 nt, Artificial Sequence
  Description of Artificial Sequence: Synthetic oligonucleotide
  Antisense strand to SEQ ID NO: 1837109
auuuacacaucagauagac

SEQ ID NO: 1837111 - RNA, 19 nt, Artificial Sequence
  Description of Artificial Sequence: Synthetic oligonucleotide
  Sense strand starting at position 3614 of SEQ ID NO: 1563856
ucuaucugauguguaaaua

SEQ ID NO: 1837112 - RNA, 19 nt, Artificial Sequence
  Description of Artificial Sequence: Synthetic oligonucleotide
  Antisense strand to SEQ ID NO: 1837111
uauuuacacaucagauaga

SEQ ID NO: 1837113 - RNA, 19 nt, Artificial Sequence
  Description of Artificial Sequence: Synthetic oligonucleotide
  Sense strand starting at position 3615 of SEQ ID NO: 1563856
cuaucugauguguaaauac

SEQ ID NO: 1837114 - RNA, 19 nt, Artificial Sequence
  Description of Artificial Sequence: Synthetic oligonucleotide
  Antisense strand to SEQ ID NO: 1837113
guauuuacacaucagauag

SEQ ID NO: 1837115 - RNA, 19 nt, Artificial Sequence
  Description of Artificial Sequence: Synthetic oligonucleotide
  Sense strand starting at position 3712 of SEQ ID NO: 1563856
gagauuaacuuugggacag

SEQ ID NO: 1837116 - RNA, 19 nt, Artificial Sequence
  Description of Artificial Sequence: Synthetic oligonucleotide
  Antisense strand to SEQ ID NO: 1837115
cugucccaaaguuaaucuc

SEQ ID NO: 1837117 - RNA, 19 nt, Artificial Sequence
  Description of Artificial Sequence: Synthetic oligonucleotide
  Sense strand starting at position 3713 of SEQ ID NO: 1563856
agauuaacuuugggacaga

SEQ ID NO: 1837118 - RNA, 19 nt, Artificial Sequence
  Description of Artificial Sequence: Synthetic oligonucleotide
  Antisense strand to SEQ ID NO: 1837117
ucugucccaaaguuaaucu

SEQ ID NO: 1837119 - RNA, 19 nt, Artificial Sequence
  Description of Artificial Sequence: Synthetic oligonucleotide
  Sense strand starting at position 3755 of SEQ ID NO: 1563856
aagaaacaaugugugcaaa

SEQ ID NO: 1837120 - RNA, 19 nt, Artificial Sequence
  Description of Artificial Sequence: Synthetic oligonucleotide
  Antisense strand to SEQ ID NO: 1837119
uuugcacacauuguuucuu

SEQ ID NO: 1837121 - RNA, 19 nt, Artificial Sequence
  Description of Artificial Sequence: Synthetic oligonucleotide
  Sense strand starting at position 3816 of SEQ ID NO: 1563856
aaaguuacucuguggagcu

SEQ ID NO: 1837122 - RNA, 19 nt, Artificial Sequence
  Description of Artificial Sequence: Synthetic oligonucleotide
  Antisense strand to SEQ ID NO: 1837121
agcuccacagaguaacuuu

SEQ ID NO: 1837123 - RNA, 19 nt, Artificial Sequence
  Description of Artificial Sequence: Synthetic oligonucleotide
  Sense strand starting at position 3937 of SEQ ID NO: 1563856
gucgcaauauaccuagauu

SEQ ID NO: 1837124 - RNA, 19 nt, Artificial Sequence
  Description of Artificial Sequence: Synthetic oligonucleotide
  Antisense strand to SEQ ID NO: 1837123
aaucuagguauauugcgac

SEQ ID NO: 1837125 - RNA, 19 nt, Artificial Sequence
  Description of Artificial Sequence: Synthetic oligonucleotide
  Sense strand starting at position 3940 of SEQ ID NO: 1563856
gcaauauaccuagauugca

SEQ ID NO: 1837126 - RNA, 19 nt, Artificial Sequence
  Description of Artificial Sequence: Synthetic oligonucleotide
  Antisense strand to SEQ ID NO: 1837125
ugcaaucuagguauauugc

SEQ ID NO: 1837127 - RNA, 19 nt, Artificial Sequence
  Description of Artificial Sequence: Synthetic oligonucleotide
  Sense strand starting at position 3956 of SEQ ID NO: 1563856
gcaacuuggagaggucuau

SEQ ID NO: 1837128 - RNA, 19 nt, Artificial Sequence
  Description of Artificial Sequence: Synthetic oligonucleotide
  Antisense strand to SEQ ID NO: 1837127
auagaccucuccaaguugc

SEQ ID NO: 1837129 - RNA, 19 nt, Artificial Sequence
  Description of Artificial Sequence: Synthetic oligonucleotide
  Sense strand starting at position 37 of SEQ ID NO: 1563857
agaugaagcaauugaguaa

SEQ ID NO: 1837130 - RNA, 19 nt, Artificial Sequence
  Description of Artificial Sequence: Synthetic oligonucleotide
  Antisense strand to SEQ ID NO: 1837129
uuacucaauugcuucaucu

SEQ ID NO: 1837131 - RNA, 19 nt, Artificial Sequence
  Description of Artificial Sequence: Synthetic oligonucleotide
  Sense strand starting at position 76 of SEQ ID NO: 1563857
cuuucuugguucuuagaac

SEQ ID NO: 1837132 - RNA, 19 nt, Artificial Sequence
  Description of Artificial Sequence: Synthetic oligonucleotide
  Antisense strand to SEQ ID NO: 1837131
guucuaagaaccaagaaag

SEQ ID NO: 1837133 - RNA, 19 nt, Artificial Sequence
  Description of Artificial Sequence: Synthetic oligonucleotide
  Sense strand starting at position 106 of SEQ ID NO: 1563857
cguggaauguucuugagaa

SEQ ID NO: 1837134 - RNA, 19 nt, Artificial Sequence
  Description of Artificial Sequence: Synthetic oligonucleotide
  Antisense strand to SEQ ID NO: 1837133
uucucaagaacauuccacg

SEQ ID NO: 1837135 - RNA, 19 nt, Artificial Sequence
  Description of Artificial Sequence: Synthetic oligonucleotide
  Sense strand starting at position 159 of SEQ ID NO: 1563857
cagaguucgggaggaugaa

SEQ ID NO: 1837136 - RNA, 19 nt, Artificial Sequence
  Description of Artificial Sequence: Synthetic oligonucleotide
  Antisense strand to SEQ ID NO: 1837135
uucauccucccgaacucug

SEQ ID NO: 1837137 - RNA, 19 nt, Artificial Sequence
  Description of Artificial Sequence: Synthetic oligonucleotide
  Sense strand starting at position 238 of SEQ ID NO: 1563857
agucuaacaugaguaaugu

SEQ ID NO: 1837138 - RNA, 19 nt, Artificial Sequence
  Description of Artificial Sequence: Synthetic oligonucleotide
  Antisense strand to SEQ ID NO: 1837137
acauuacucauguuagacu

SEQ ID NO: 1837139 - RNA, 19 nt, Artificial Sequence
  Description of Artificial Sequence: Synthetic oligonucleotide
  Sense strand starting at position 239 of SEQ ID NO: 1563857
gucuaacaugaguaaugug

SEQ ID NO: 1837140 - RNA, 19 nt, Artificial Sequence
  Description of Artificial Sequence: Synthetic oligonucleotide
  Antisense strand to SEQ ID NO: 1837139
cacauuacucauguuagac

SEQ ID NO: 1837141 - RNA, 19 nt, Artificial Sequence
  Description of Artificial Sequence: Synthetic oligonucleotide
  Sense strand starting at position 244 of SEQ ID NO: 1563857
acaugaguaaugugauuga

SEQ ID NO: 1837142 - RNA, 19 nt, Artificial Sequence
  Description of Artificial Sequence: Synthetic oligonucleotide
  Antisense strand to SEQ ID NO: 1837141
ucaaucacauuacucaugu

SEQ ID NO: 1837143 - RNA, 19 nt, Artificial Sequence
  Description of Artificial Sequence: Synthetic oligonucleotide
  Sense strand starting at position 247 of SEQ ID NO: 1563857
ugaguaaugugauugaacc

SEQ ID NO: 1837144 - RNA, 19 nt, Artificial Sequence
  Description of Artificial Sequence: Synthetic oligonucleotide
  Antisense strand to SEQ ID NO: 1837143
gguucaaucacauuacuca

SEQ ID NO: 1837145 - RNA, 19 nt, Artificial Sequence
  Description of Artificial Sequence: Synthetic oligonucleotide
  Sense strand starting at position 248 of SEQ ID NO: 1563857
gaguaaugugauugaaccu

SEQ ID NO: 1837146 - RNA, 19 nt, Artificial Sequence
  Description of Artificial Sequence: Synthetic oligonucleotide
  Antisense strand to SEQ ID NO: 1837145
agguucaaucacauuacuc

SEQ ID NO: 1837147 - RNA, 19 nt, Artificial Sequence
  Description of Artificial Sequence: Synthetic oligonucleotide
  Sense strand starting at position 254 of SEQ ID NO: 1563857
ugugauugaaccugaaggu

SEQ ID NO: 1837148 - RNA, 19 nt, Artificial Sequence
  Description of Artificial Sequence: Synthetic oligonucleotide
  Antisense strand to SEQ ID NO: 1837147
accuucagguucaaucaca

SEQ ID NO: 1837149 - RNA, 19 nt, Artificial Sequence
  Description of Artificial Sequence: Synthetic oligonucleotide
  Sense strand starting at position 269 of SEQ ID NO: 1563857
agguguggaguaugaauca

SEQ ID NO: 1837150 - RNA, 19 nt, Artificial Sequence
  Description of Artificial Sequence: Synthetic oligonucleotide
  Antisense strand to SEQ ID NO: 1837149
ugauucauacuccacaccu

SEQ ID NO: 1837151 - RNA, 19 nt, Artificial Sequence
  Description of Artificial Sequence: Synthetic oligonucleotide
  Sense strand starting at position 321 of SEQ ID NO: 1563857
aucugaauccauugggcau

SEQ ID NO: 1837152 - RNA, 19 nt, Artificial Sequence
  Description of Artificial Sequence: Synthetic oligonucleotide
  Antisense strand to SEQ ID NO: 1837151
augcccaauggauucagau

SEQ ID NO: 1837153 - RNA, 19 nt, Artificial Sequence
  Description of Artificial Sequence: Synthetic oligonucleotide
  Sense strand starting at position 327 of SEQ ID NO: 1563857
auccauugggcauacuuua

SEQ ID NO: 1837154 - RNA, 19 nt, Artificial Sequence
  Description of Artificial Sequence: Synthetic oligonucleotide
  Antisense strand to SEQ ID NO: 1837153
uaaaguaugcccaauggau

SEQ ID NO: 1837155 - RNA, 19 nt, Artificial Sequence
  Description of Artificial Sequence: Synthetic oligonucleotide
  Sense strand starting at position 334 of SEQ ID NO: 1563857
gggcauacuuuagugagaa

SEQ ID NO: 1837156 - RNA, 19 nt, Artificial Sequence
  Description of Artificial Sequence: Synthetic oligonucleotide
  Antisense strand to SEQ ID NO: 1837155
uucucacuaaaguaugccc

SEQ ID NO: 1837157 - RNA, 19 nt, Artificial Sequence
  Description of Artificial Sequence: Synthetic oligonucleotide
  Sense strand starting at position 947 of SEQ ID NO: 1563857
ugcugagagcaucauugau

SEQ ID NO: 1837158 - RNA, 19 nt, Artificial Sequence
  Description of Artificial Sequence: Synthetic oligonucleotide
  Antisense strand to SEQ ID NO: 1837157
aucaaugaugcucucagca

SEQ ID NO: 1837159 - RNA, 19 nt, Artificial Sequence
  Description of Artificial Sequence: Synthetic oligonucleotide
  Sense strand starting at position 949 of SEQ ID NO: 1563857
cugagagcaucauugauuc

SEQ ID NO: 1837160 - RNA, 19 nt, Artificial Sequence
  Description of Artificial Sequence: Synthetic oligonucleotide
  Antisense strand to SEQ ID NO: 1837159
gaaucaaugaugcucucag

SEQ ID NO: 1837161 - RNA, 19 nt, Artificial Sequence
  Description of Artificial Sequence: Synthetic oligonucleotide
  Sense strand starting at position 981 of SEQ ID NO: 1563857
cccauaggaucugccugau

SEQ ID NO: 1837162 - RNA, 19 nt, Artificial Sequence
  Description of Artificial Sequence: Synthetic oligonucleotide
  Antisense strand to SEQ ID NO: 1837161
aucaggcagauccuauggg

SEQ ID NO: 1837163 - RNA, 19 nt, Artificial Sequence
  Description of Artificial Sequence: Synthetic oligonucleotide
  Sense strand starting at position 984 of SEQ ID NO: 1563857
auaggaucugccugauccu

SEQ ID NO: 1837164 - RNA, 19 nt, Artificial Sequence
  Description of Artificial Sequence: Synthetic oligonucleotide
  Antisense strand to SEQ ID NO: 1837163
aggaucaggcagauccuau

SEQ ID NO: 1837165 - RNA, 19 nt, Artificial Sequence
  Description of Artificial Sequence: Synthetic oligonucleotide
  Sense strand starting at position 1250 of SEQ ID NO: 1563857
ucaaguuagauccgugaca

SEQ ID NO: 1837166 - RNA, 19 nt, Artificial Sequence
  Description of Artificial Sequence: Synthetic oligonucleotide
  Antisense strand to SEQ ID NO: 1837165
ugucacggaucuaacuuga

SEQ ID NO: 1837167 - RNA, 19 nt, Artificial Sequence
  Description of Artificial Sequence: Synthetic oligonucleotide
  Sense strand starting at position 1251 of SEQ ID NO: 1563857
caaguuagauccgugacaa

SEQ ID NO: 1837168 - RNA, 19 nt, Artificial Sequence
  Description of Artificial Sequence: Synthetic oligonucleotide
  Antisense strand to SEQ ID NO: 1837167
uugucacggaucuaacuug

SEQ ID NO: 1837169 - RNA, 19 nt, Artificial Sequence
  Description of Artificial Sequence: Synthetic oligonucleotide
  Sense strand starting at position 1252 of SEQ ID NO: 1563857
aaguuagauccgugacaau

SEQ ID NO: 1837170 - RNA, 19 nt, Artificial Sequence
  Description of Artificial Sequence: Synthetic oligonucleotide
  Antisense strand to SEQ ID NO: 1837169
auugucacggaucuaacuu

SEQ ID NO: 1837171 - RNA, 19 nt, Artificial Sequence
  Description of Artificial Sequence: Synthetic oligonucleotide
  Sense strand starting at position 1297 of SEQ ID NO: 1563857
ccuggaaagucuuuggcaa

SEQ ID NO: 1837172 - RNA, 19 nt, Artificial Sequence
  Description of Artificial Sequence: Synthetic oligonucleotide
  Antisense strand to SEQ ID NO: 1837171
uugccaaagacuuuccagg

SEQ ID NO: 1837173 - RNA, 19 nt, Artificial Sequence
  Description of Artificial Sequence: Synthetic oligonucleotide
  Sense strand starting at position 1298 of SEQ ID NO: 1563857
cuggaaagucuuuggcaau

SEQ ID NO: 1837174 - RNA, 19 nt, Artificial Sequence
  Description of Artificial Sequence: Synthetic oligonucleotide
  Antisense strand to SEQ ID NO: 1837173
auugccaaagacuuuccag

SEQ ID NO: 1837175 - RNA, 19 nt, Artificial Sequence
  Description of Artificial Sequence: Synthetic oligonucleotide
  Sense strand starting at position 1384 of SEQ ID NO: 1563857
uggugcaugcuugcucuaa

SEQ ID NO: 1837176 - RNA, 19 nt, Artificial Sequence
  Description of Artificial Sequence: Synthetic oligonucleotide
  Antisense strand to SEQ ID NO: 1837175
uuagagcaagcaugcacca

SEQ ID NO: 1837177 - RNA, 19 nt, Artificial Sequence
  Description of Artificial Sequence: Synthetic oligonucleotide
  Sense strand starting at position 1432 of SEQ ID NO: 1563857
ggagcaaaugacugaccuu

SEQ ID NO: 1837178 - RNA, 19 nt, Artificial Sequence
  Description of Artificial Sequence: Synthetic oligonucleotide
  Antisense strand to SEQ ID NO: 1837177
aaggucagucauuugcucc

SEQ ID NO: 1837179 - RNA, 19 nt, Artificial Sequence
  Description of Artificial Sequence: Synthetic oligonucleotide
  Sense strand starting at position 2255 of SEQ ID NO: 1563857
caauuacuccuugggugua

SEQ ID NO: 1837180 - RNA, 19 nt, Artificial Sequence
  Description of Artificial Sequence: Synthetic oligonucleotide
  Antisense strand to SEQ ID NO: 1837179
uacacccaaggaguaauug

SEQ ID NO: 1837181 - RNA, 19 nt, Artificial Sequence
  Description of Artificial Sequence: Synthetic oligonucleotide
  Sense strand starting at position 2286 of SEQ ID NO: 1563857
agaaacuuccauugaguga

SEQ ID NO: 1837182 - RNA, 19 nt, Artificial Sequence
  Description of Artificial Sequence: Synthetic oligonucleotide
  Antisense strand to SEQ ID NO: 1837181
ucacucaauggaaguuucu

SEQ ID NO: 1837183 - RNA, 19 nt, Artificial Sequence
  Description of Artificial Sequence: Synthetic oligonucleotide
  Sense strand starting at position 2572 of SEQ ID NO: 1563857
cuacgugauuaagucagga

SEQ ID NO: 1837184 - RNA, 19 nt, Artificial Sequence
  Description of Artificial Sequence: Synthetic oligonucleotide
  Antisense strand to SEQ ID NO: 1837183
uccugacuuaaucacguag

SEQ ID NO: 1837185 - RNA, 19 nt, Artificial Sequence
  Description of Artificial Sequence: Synthetic oligonucleotide
  Sense strand starting at position 2574 of SEQ ID NO: 1563857
acgugauuaagucaggaag

SEQ ID NO: 1837186 - RNA, 19 nt, Artificial Sequence
  Description of Artificial Sequence: Synthetic oligonucleotide
  Antisense strand to SEQ ID NO: 1837185
cuuccugacuuaaucacgu

SEQ ID NO: 1837187 - RNA, 19 nt, Artificial Sequence
  Description of Artificial Sequence: Synthetic oligonucleotide
  Sense strand starting at position 2830 of SEQ ID NO: 1563857
auuauaggaguuuaagcua

SEQ ID NO: 1837188 - RNA, 19 nt, Artificial Sequence
  Description of Artificial Sequence: Synthetic oligonucleotide
  Antisense strand to SEQ ID NO: 1837187
uagcuuaaacuccuauaau

SEQ ID NO: 1837189 - RNA, 19 nt, Artificial Sequence
  Description of Artificial Sequence: Synthetic oligonucleotide
  Sense strand starting at position 2870 of SEQ ID NO: 1563857
aaguuuaugucuucuggac

SEQ ID NO: 1837190 - RNA, 19 nt, Artificial Sequence
  Description of Artificial Sequence: Synthetic oligonucleotide
  Antisense strand to SEQ ID NO: 1837189
guccagaagacauaaacuu

SEQ ID NO: 1837191 - RNA, 19 nt, Artificial Sequence
  Description of Artificial Sequence: Synthetic oligonucleotide
  Sense strand starting at position 2874 of SEQ ID NO: 1563857
uuaugucuucuggacagua

SEQ ID NO: 1837192 - RNA, 19 nt, Artificial Sequence
  Description of Artificial Sequence: Synthetic oligonucleotide
  Antisense strand to SEQ ID NO: 1837191
uacuguccagaagacauaa

SEQ ID NO: 1837193 - RNA, 19 nt, Artificial Sequence
  Description of Artificial Sequence: Synthetic oligonucleotide
  Sense strand starting at position 3124 of SEQ ID NO: 1563857
cacuucugugacugaguca

SEQ ID NO: 1837194 - RNA, 19 nt, Artificial Sequence
  Description of Artificial Sequence: Synthetic oligonucleotide
  Antisense strand to SEQ ID NO: 1837193
ugacucagucacagaagug

SEQ ID NO: 1837195 - RNA, 19 nt, Artificial Sequence
  Description of Artificial Sequence: Synthetic oligonucleotide
  Sense strand starting at position 3133 of SEQ ID NO: 1563857
gacugagucacaggugaca

SEQ ID NO: 1837196 - RNA, 19 nt, Artificial Sequence
  Description of Artificial Sequence: Synthetic oligonucleotide
  Antisense strand to SEQ ID NO: 1837195
ugucaccugugacucaguc

SEQ ID NO: 1837197 - RNA, 19 nt, Artificial Sequence
  Description of Artificial Sequence: Synthetic oligonucleotide
  Sense strand starting at position 3652 of SEQ ID NO: 1563857
gccagaugccaacaucuca

SEQ ID NO: 1837198 - RNA, 19 nt, Artificial Sequence
  Description of Artificial Sequence: Synthetic oligonucleotide
  Antisense strand to SEQ ID NO: 1837197
ugagauguuggcaucuggc

SEQ ID NO: 1837199 - RNA, 19 nt, Artificial Sequence
  Description of Artificial Sequence: Synthetic oligonucleotide
  Sense strand starting at position 3659 of SEQ ID NO: 1563857
gccaacaucucaucuugga

SEQ ID NO: 1837200 - RNA, 19 nt, Artificial Sequence
  Description of Artificial Sequence: Synthetic oligonucleotide
  Antisense strand to SEQ ID NO: 1837199
uccaagaugagauguuggc

SEQ ID NO: 1837201 - RNA, 19 nt, Artificial Sequence
  Description of Artificial Sequence: Synthetic oligonucleotide
  Sense strand starting at position 3771 of SEQ ID NO: 1563857
acacgagauccuuguggga

SEQ ID NO: 1837202 - RNA, 19 nt, Artificial Sequence
  Description of Artificial Sequence: Synthetic oligonucleotide
  Antisense strand to SEQ ID NO: 1837201
ucccacaaggaucucgugu

SEQ ID NO: 1837203 - RNA, 19 nt, Artificial Sequence
  Description of Artificial Sequence: Synthetic oligonucleotide
  Sense strand starting at position 3785 of SEQ ID NO: 1563857
ugggaucuucuuggaaucu

SEQ ID NO: 1837204 - RNA, 19 nt, Artificial Sequence
  Description of Artificial Sequence: Synthetic oligonucleotide
  Antisense strand to SEQ ID NO: 1837203
agauuccaagaagauccca

SEQ ID NO: 1837205 - RNA, 19 nt, Artificial Sequence
  Description of Artificial Sequence: Synthetic oligonucleotide
  Sense strand starting at position 3930 of SEQ ID NO: 1563857
guuccaugguaucuggaga

SEQ ID NO: 1837206 - RNA, 19 nt, Artificial Sequence
  Description of Artificial Sequence: Synthetic oligonucleotide
  Antisense strand to SEQ ID NO: 1837205
ucuccagauaccauggaac

SEQ ID NO: 1837207 - RNA, 19 nt, Artificial Sequence
  Description of Artificial Sequence: Synthetic oligonucleotide
  Sense strand starting at position 3931 of SEQ ID NO: 1563857
uuccaugguaucuggagaa

SEQ ID NO: 1837208 - RNA, 19 nt, Artificial Sequence
  Description of Artificial Sequence: Synthetic oligonucleotide
  Antisense strand to SEQ ID NO: 1837207
uucuccagauaccauggaa

SEQ ID NO: 1837209 - RNA, 19 nt, Artificial Sequence
  Description of Artificial Sequence: Synthetic oligonucleotide
  Sense strand starting at position 156 of SEQ ID NO: 1563858
cggagugguucuaggugaa

SEQ ID NO: 1837210 - RNA, 19 nt, Artificial Sequence
  Description of Artificial Sequence: Synthetic oligonucleotide
  Antisense strand to SEQ ID NO: 1837209
uucaccuagaaccacuccg

SEQ ID NO: 1837211 - RNA, 19 nt, Artificial Sequence
  Description of Artificial Sequence: Synthetic oligonucleotide
  Sense strand starting at position 157 of SEQ ID NO: 1563858
ggagugguucuaggugaag

SEQ ID NO: 1837212 - RNA, 19 nt, Artificial Sequence
  Description of Artificial Sequence: Synthetic oligonucleotide
  Antisense strand to SEQ ID NO: 1837211
cuucaccuagaaccacucc

SEQ ID NO: 1837213 - RNA, 19 nt, Artificial Sequence
  Description of Artificial Sequence: Synthetic oligonucleotide
  Sense strand starting at position 159 of SEQ ID NO: 1563858
agugguucuaggugaagug

SEQ ID NO: 1837214 - RNA, 19 nt, Artificial Sequence
  Description of Artificial Sequence: Synthetic oligonucleotide
  Antisense strand to SEQ ID NO: 1837213
cacuucaccuagaaccacu

SEQ ID NO: 1837215 - RNA, 19 nt, Artificial Sequence
  Description of Artificial Sequence: Synthetic oligonucleotide
  Sense strand starting at position 202 of SEQ ID NO: 1563858
agauguugugcugaagagu

SEQ ID NO: 1837216 - RNA, 19 nt, Artificial Sequence
  Description of Artificial Sequence: Synthetic oligonucleotide
  Antisense strand to SEQ ID NO: 1837215
acucuucagcacaacaucu

SEQ ID NO: 1837217 - RNA, 19 nt, Artificial Sequence
  Description of Artificial Sequence: Synthetic oligonucleotide
  Sense strand starting at position 205 of SEQ ID NO: 1563858
uguugugcugaagaguaua

SEQ ID NO: 1837218 - RNA, 19 nt, Artificial Sequence
  Description of Artificial Sequence: Synthetic oligonucleotide
  Antisense strand to SEQ ID NO: 1837217
uauacucuucagcacaaca

SEQ ID NO: 1837219 - RNA, 19 nt, Artificial Sequence
  Description of Artificial Sequence: Synthetic oligonucleotide
  Sense strand starting at position 213 of SEQ ID NO: 1563858
ugaagaguauacucagugu

SEQ ID NO: 1837220 - RNA, 19 nt, Artificial Sequence
  Description of Artificial Sequence: Synthetic oligonucleotide
  Antisense strand to SEQ ID NO: 1837219
acacugaguauacucuuca

SEQ ID NO: 1837221 - RNA, 19 nt, Artificial Sequence
  Description of Artificial Sequence: Synthetic oligonucleotide
  Sense strand starting at position 216 of SEQ ID NO: 1563858
agaguauacucaguguggu

SEQ ID NO: 1837222 - RNA, 19 nt, Artificial Sequence
  Description of Artificial Sequence: Synthetic oligonucleotide
  Antisense strand to SEQ ID NO: 1837221
accacacugaguauacucu

SEQ ID NO: 1837223 - RNA, 19 nt, Artificial Sequence
  Description of Artificial Sequence: Synthetic oligonucleotide
  Sense strand starting at position 217 of SEQ ID NO: 1563858
gaguauacucagugugguc

SEQ ID NO: 1837224 - RNA, 19 nt, Artificial Sequence
  Description of Artificial Sequence: Synthetic oligonucleotide
  Antisense strand to SEQ ID NO: 1837223
gaccacacugaguauacuc

SEQ ID NO: 1837225 - RNA, 19 nt, Artificial Sequence
  Description of Artificial Sequence: Synthetic oligonucleotide
  Sense strand starting at position 222 of SEQ ID NO: 1563858
uacucaguguggucagaaa

SEQ ID NO: 1837226 - RNA, 19 nt, Artificial Sequence
  Description of Artificial Sequence: Synthetic oligonucleotide
  Antisense strand to SEQ ID NO: 1837225
uuucugaccacacugagua

SEQ ID NO: 1837227 - RNA, 19 nt, Artificial Sequence
  Description of Artificial Sequence: Synthetic oligonucleotide
  Sense strand starting at position 234 of SEQ ID NO: 1563858
ucagaaaugucaggagagu

SEQ ID NO: 1837228 - RNA, 19 nt, Artificial Sequence
  Description of Artificial Sequence: Synthetic oligonucleotide
  Antisense strand to SEQ ID NO: 1837227
acucuccugacauuucuga

SEQ ID NO: 1837229 - RNA, 19 nt, Artificial Sequence
  Description of Artificial Sequence: Synthetic oligonucleotide
  Sense strand starting at position 269 of SEQ ID NO: 1563858
gcugccacuuguuuaaaca

SEQ ID NO: 1837230 - RNA, 19 nt, Artificial Sequence
  Description of Artificial Sequence: Synthetic oligonucleotide
  Antisense strand to SEQ ID NO: 1837229
uguuuaaacaaguggcagc

SEQ ID NO: 1837231 - RNA, 19 nt, Artificial Sequence
  Description of Artificial Sequence: Synthetic oligonucleotide
  Sense strand starting at position 491 of SEQ ID NO: 1563858
caaggacucccagguaauu

SEQ ID NO: 1837232 - RNA, 19 nt, Artificial Sequence
  Description of Artificial Sequence: Synthetic oligonucleotide
  Antisense strand to SEQ ID NO: 1837231
aauuaccugggaguccuug

SEQ ID NO: 1837233 - RNA, 19 nt, Artificial Sequence
  Description of Artificial Sequence: Synthetic oligonucleotide
  Sense strand starting at position 503 of SEQ ID NO: 1563858
gguaauuacugucucacau

SEQ ID NO: 1837234 - RNA, 19 nt, Artificial Sequence
  Description of Artificial Sequence: Synthetic oligonucleotide
  Antisense strand to SEQ ID NO: 1837233
augugagacaguaauuacc

SEQ ID NO: 1837235 - RNA, 19 nt, Artificial Sequence
  Description of Artificial Sequence: Synthetic oligonucleotide
  Sense strand starting at position 548 of SEQ ID NO: 1563858
gacagagguuugucaccaa

SEQ ID NO: 1837236 - RNA, 19 nt, Artificial Sequence
  Description of Artificial Sequence: Synthetic oligonucleotide
  Antisense strand to SEQ ID NO: 1837235
uuggugacaaaccucuguc

SEQ ID NO: 1837237 - RNA, 19 nt, Artificial Sequence
  Description of Artificial Sequence: Synthetic oligonucleotide
  Sense strand starting at position 551 of SEQ ID NO: 1563858
agagguuugucaccaaagg

SEQ ID NO: 1837238 - RNA, 19 nt, Artificial Sequence
  Description of Artificial Sequence: Synthetic oligonucleotide
  Antisense strand to SEQ ID NO: 1837237
ccuuuggugacaaaccucu

SEQ ID NO: 1837239 - RNA, 19 nt, Artificial Sequence
  Description of Artificial Sequence: Synthetic oligonucleotide
  Sense strand starting at position 552 of SEQ ID NO: 1563858
gagguuugucaccaaaggu

SEQ ID NO: 1837240 - RNA, 19 nt, Artificial Sequence
  Description of Artificial Sequence: Synthetic oligonucleotide
  Antisense strand to SEQ ID NO: 1837239
accuuuggugacaaaccuc

SEQ ID NO: 1837241 - RNA, 19 nt, Artificial Sequence
  Description of Artificial Sequence: Synthetic oligonucleotide
  Sense strand starting at position 726 of SEQ ID NO: 1563858
ccgugaaugcugugcauua

SEQ ID NO: 1837242 - RNA, 19 nt, Artificial Sequence
  Description of Artificial Sequence: Synthetic oligonucleotide
  Antisense strand to SEQ ID NO: 1837241
uaaugcacagcauucacgg

SEQ ID NO: 1837243 - RNA, 19 nt, Artificial Sequence
  Description of Artificial Sequence: Synthetic oligonucleotide
  Sense strand starting at position 727 of SEQ ID NO: 1563858
cgugaaugcugugcauuau

SEQ ID NO: 1837244 - RNA, 19 nt, Artificial Sequence
  Description of Artificial Sequence: Synthetic oligonucleotide
  Antisense strand to SEQ ID NO: 1837243
auaaugcacagcauucacg

SEQ ID NO: 1837245 - RNA, 19 nt, Artificial Sequence
  Description of Artificial Sequence: Synthetic oligonucleotide
  Sense strand starting at position 728 of SEQ ID NO: 1563858
gugaaugcugugcauuaug

SEQ ID NO: 1837246 - RNA, 19 nt, Artificial Sequence
  Description of Artificial Sequence: Synthetic oligonucleotide
  Antisense strand to SEQ ID NO: 1837245
cauaaugcacagcauucac

SEQ ID NO: 1837247 - RNA, 19 nt, Artificial Sequence
  Description of Artificial Sequence: Synthetic oligonucleotide
  Sense strand starting at position 735 of SEQ ID NO: 1563858
cugugcauuaugggauaaa

SEQ ID NO: 1837248 - RNA, 19 nt, Artificial Sequence
  Description of Artificial Sequence: Synthetic oligonucleotide
  Antisense strand to SEQ ID NO: 1837247
uuuaucccauaaugcacag

SEQ ID NO: 1837249 - RNA, 19 nt, Artificial Sequence
  Description of Artificial Sequence: Synthetic oligonucleotide
  Sense strand starting at position 804 of SEQ ID NO: 1563858
cgagaauugaagugugcaa

SEQ ID NO: 1837250 - RNA, 19 nt, Artificial Sequence
  Description of Artificial Sequence: Synthetic oligonucleotide
  Antisense strand to SEQ ID NO: 1837249
uugcacacuucaauucucg

SEQ ID NO: 1837251 - RNA, 19 nt, Artificial Sequence
  Description of Artificial Sequence: Synthetic oligonucleotide
  Sense strand starting at position 896 of SEQ ID NO: 1563858
aauggaaucgccugggaag

SEQ ID NO: 1837252 - RNA, 19 nt, Artificial Sequence
  Description of Artificial Sequence: Synthetic oligonucleotide
  Antisense strand to SEQ ID NO: 1837251
cuucccaggcgauuccauu

SEQ ID NO: 1837253 - RNA, 19 nt, Artificial Sequence
  Description of Artificial Sequence: Synthetic oligonucleotide
  Sense strand starting at position 937 of SEQ ID NO: 1563858
gugcuuaugucauuggucu

SEQ ID NO: 1837254 - RNA, 19 nt, Artificial Sequence
  Description of Artificial Sequence: Synthetic oligonucleotide
  Antisense strand to SEQ ID NO: 1837253
agaccaaugacauaagcac

SEQ ID NO: 1837255 - RNA, 19 nt, Artificial Sequence
  Description of Artificial Sequence: Synthetic oligonucleotide
  Sense strand starting at position 1114 of SEQ ID NO: 1563858
gcuguuucuuggguuaucu

SEQ ID NO: 1837256 - RNA, 19 nt, Artificial Sequence
  Description of Artificial Sequence: Synthetic oligonucleotide
  Antisense strand to SEQ ID NO: 1837255
agauaacccaagaaacagc

SEQ ID NO: 1837257 - RNA, 19 nt, Artificial Sequence
  Description of Artificial Sequence: Synthetic oligonucleotide
  Sense strand starting at position 1116 of SEQ ID NO: 1563858
uguuucuuggguuaucuga

SEQ ID NO: 1837258 - RNA, 19 nt, Artificial Sequence
  Description of Artificial Sequence: Synthetic oligonucleotide
  Antisense strand to SEQ ID NO: 1837257
ucagauaacccaagaaaca

SEQ ID NO: 1837259 - RNA, 19 nt, Artificial Sequence
  Description of Artificial Sequence: Synthetic oligonucleotide
  Sense strand starting at position 1126 of SEQ ID NO: 1563858
guuaucugauguuuaagau

SEQ ID NO: 1837260 - RNA, 19 nt, Artificial Sequence
  Description of Artificial Sequence: Synthetic oligonucleotide
  Antisense strand to SEQ ID NO: 1837259
aucuuaaacaucagauaac

SEQ ID NO: 1837261 - RNA, 19 nt, Artificial Sequence
  Description of Artificial Sequence: Synthetic oligonucleotide
  Sense strand starting at position 1132 of SEQ ID NO: 1563858
ugauguuuaagaugccuga

SEQ ID NO: 1837262 - RNA, 19 nt, Artificial Sequence
  Description of Artificial Sequence: Synthetic oligonucleotide
  Antisense strand to SEQ ID NO: 1837261
ucaggcaucuuaaacauca

SEQ ID NO: 1837263 - RNA, 19 nt, Artificial Sequence
  Description of Artificial Sequence: Synthetic oligonucleotide
  Sense strand starting at position 2498 of SEQ ID NO: 1563858
gaagcauucgagcagggua

SEQ ID NO: 1837264 - RNA, 19 nt, Artificial Sequence
  Description of Artificial Sequence: Synthetic oligonucleotide
  Antisense strand to SEQ ID NO: 1837263
uacccugcucgaaugcuuc

SEQ ID NO: 1837265 - RNA, 19 nt, Artificial Sequence
  Description of Artificial Sequence: Synthetic oligonucleotide
  Sense strand starting at position 2500 of SEQ ID NO: 1563858
agcauucgagcaggguaaa

SEQ ID NO: 1837266 - RNA, 19 nt, Artificial Sequence
  Description of Artificial Sequence: Synthetic oligonucleotide
  Antisense strand to SEQ ID NO: 1837265
uuuacccugcucgaaugcu

SEQ ID NO: 1837267 - RNA, 19 nt, Artificial Sequence
  Description of Artificial Sequence: Synthetic oligonucleotide
  Sense strand starting at position 2534 of SEQ ID NO: 1563858
ucgguuggauggaaauguu

SEQ ID NO: 1837268 - RNA, 19 nt, Artificial Sequence
  Description of Artificial Sequence: Synthetic oligonucleotide
  Antisense strand to SEQ ID NO: 1837267
aacauuuccauccaaccga

SEQ ID NO: 1837269 - RNA, 19 nt, Artificial Sequence
  Description of Artificial Sequence: Synthetic oligonucleotide
  Sense strand starting at position 2537 of SEQ ID NO: 1563858
guuggauggaaauguucua

SEQ ID NO: 1837270 - RNA, 19 nt, Artificial Sequence
  Description of Artificial Sequence: Synthetic oligonucleotide
  Antisense strand to SEQ ID NO: 1837269
uagaacauuuccauccaac

SEQ ID NO: 1837271 - RNA, 19 nt, Artificial Sequence
  Description of Artificial Sequence: Synthetic oligonucleotide
  Sense strand starting at position 2851 of SEQ ID NO: 1563858
uaguguuaccacugagggu

SEQ ID NO: 1837272 - RNA, 19 nt, Artificial Sequence
  Description of Artificial Sequence: Synthetic oligonucleotide
  Antisense strand to SEQ ID NO: 1837271
acccucagugguaacacua

SEQ ID NO: 1837273 - RNA, 19 nt, Artificial Sequence
  Description of Artificial Sequence: Synthetic oligonucleotide
  Sense strand starting at position 2852 of SEQ ID NO: 1563858
aguguuaccacugagggua

SEQ ID NO: 1837274 - RNA, 19 nt, Artificial Sequence
  Description of Artificial Sequence: Synthetic oligonucleotide
  Antisense strand to SEQ ID NO: 1837273
uacccucagugguaacacu

SEQ ID NO: 1837275 - RNA, 19 nt, Artificial Sequence
  Description of Artificial Sequence: Synthetic oligonucleotide
  Sense strand starting at position 2855 of SEQ ID NO: 1563858
guuaccacugaggguaaua

SEQ ID NO: 1837276 - RNA, 19 nt, Artificial Sequence
  Description of Artificial Sequence: Synthetic oligonucleotide
  Antisense strand to SEQ ID NO: 1837275
uauuacccucagugguaac

SEQ ID NO: 1837277 - RNA, 19 nt, Artificial Sequence
  Description of Artificial Sequence: Synthetic oligonucleotide
  Sense strand starting at position 2860 of SEQ ID NO: 1563858
cacugaggguaauaccauu

SEQ ID NO: 1837278 - RNA, 19 nt, Artificial Sequence
  Description of Artificial Sequence: Synthetic oligonucleotide
  Antisense strand to SEQ ID NO: 1837277
aaugguauuacccucagug

SEQ ID NO: 1837279 - RNA, 19 nt, Artificial Sequence
  Description of Artificial Sequence: Synthetic oligonucleotide
  Sense strand starting at position 2866 of SEQ ID NO: 1563858
ggguaauaccauuauucuu

SEQ ID NO: 1837280 - RNA, 19 nt, Artificial Sequence
  Description of Artificial Sequence: Synthetic oligonucleotide
  Antisense strand to SEQ ID NO: 1837279
aagaauaaugguauuaccc

SEQ ID NO: 1837281 - RNA, 19 nt, Artificial Sequence
  Description of Artificial Sequence: Synthetic oligonucleotide
  Sense strand starting at position 2901 of SEQ ID NO: 1563858
gagacaaagucugucgcua

SEQ ID NO: 1837282 - RNA, 19 nt, Artificial Sequence
  Description of Artificial Sequence: Synthetic oligonucleotide
  Antisense strand to SEQ ID NO: 1837281
uagcgacagacuuugucuc

SEQ ID NO: 1837283 - RNA, 19 nt, Artificial Sequence
  Description of Artificial Sequence: Synthetic oligonucleotide
  Sense strand starting at position 3129 of SEQ ID NO: 1563858
ugucgaauucccgaguuca

SEQ ID NO: 1837284 - RNA, 19 nt, Artificial Sequence
  Description of Artificial Sequence: Synthetic oligonucleotide
  Antisense strand to SEQ ID NO: 1837283
ugaacucgggaauucgaca

SEQ ID NO: 1837285 - RNA, 19 nt, Artificial Sequence
  Description of Artificial Sequence: Synthetic oligonucleotide
  Sense strand starting at position 3335 of SEQ ID NO: 1563858
ggaauacaaucuguuguuu

SEQ ID NO: 1837286 - RNA, 19 nt, Artificial Sequence
  Description of Artificial Sequence: Synthetic oligonucleotide
  Antisense strand to SEQ ID NO: 1837285
aaacaacagauuguauucc

SEQ ID NO: 1837287 - RNA, 19 nt, Artificial Sequence
  Description of Artificial Sequence: Synthetic oligonucleotide
  Sense strand starting at position 3807 of SEQ ID NO: 1563858
acacauguaugugucaaca

SEQ ID NO: 1837288 - RNA, 19 nt, Artificial Sequence
  Description of Artificial Sequence: Synthetic oligonucleotide
  Antisense strand to SEQ ID NO: 1837287
uguugacacauacaugugu

SEQ ID NO: 1837289 - RNA, 19 nt, Artificial Sequence
  Description of Artificial Sequence: Synthetic oligonucleotide
  Sense strand starting at position 131 of SEQ ID NO: 1563859
aucuuaauaucagaagagu

SEQ ID NO: 1837290 - RNA, 19 nt, Artificial Sequence
  Description of Artificial Sequence: Synthetic oligonucleotide
  Antisense strand to SEQ ID NO: 1837289
acucuucugauauuaagau

SEQ ID NO: 1837291 - RNA, 19 nt, Artificial Sequence
  Description of Artificial Sequence: Synthetic oligonucleotide
  Sense strand starting at position 137 of SEQ ID NO: 1563859
auaucagaagagugcauua

SEQ ID NO: 1837292 - RNA, 19 nt, Artificial Sequence
  Description of Artificial Sequence: Synthetic oligonucleotide
  Antisense strand to SEQ ID NO: 1837291
uaaugcacucuucugauau

SEQ ID NO: 1837293 - RNA, 19 nt, Artificial Sequence
  Description of Artificial Sequence: Synthetic oligonucleotide
  Sense strand starting at position 476 of SEQ ID NO: 1563859
cagguucuucccuagcaga

SEQ ID NO: 1837294 - RNA, 19 nt, Artificial Sequence
  Description of Artificial Sequence: Synthetic oligonucleotide
  Antisense strand to SEQ ID NO: 1837293
ucugcuagggaagaaccug

SEQ ID NO: 1837295 - RNA, 19 nt, Artificial Sequence
  Description of Artificial Sequence: Synthetic oligonucleotide
  Sense strand starting at position 551 of SEQ ID NO: 1563859
uaguuauaacguuauccug

SEQ ID NO: 1837296 - RNA, 19 nt, Artificial Sequence
  Description of Artificial Sequence: Synthetic oligonucleotide
  Antisense strand to SEQ ID NO: 1837295
caggauaacguuauaacua

SEQ ID NO: 1837297 - RNA, 19 nt, Artificial Sequence
  Description of Artificial Sequence: Synthetic oligonucleotide
  Sense strand starting at position 558 of SEQ ID NO: 1563859
aacguuauccugugacagu

SEQ ID NO: 1837298 - RNA, 19 nt, Artificial Sequence
  Description of Artificial Sequence: Synthetic oligonucleotide
  Antisense strand to SEQ ID NO: 1837297
acugucacaggauaacguu

SEQ ID NO: 1837299 - RNA, 19 nt, Artificial Sequence
  Description of Artificial Sequence: Synthetic oligonucleotide
  Sense strand starting at position 646 of SEQ ID NO: 1563859
uccuaagaaugaugcaacu

SEQ ID NO: 1837300 - RNA, 19 nt, Artificial Sequence
  Description of Artificial Sequence: Synthetic oligonucleotide
  Antisense strand to SEQ ID NO: 1837299
aguugcaucauucuuagga

SEQ ID NO: 1837301 - RNA, 19 nt, Artificial Sequence
  Description of Artificial Sequence: Synthetic oligonucleotide
  Sense strand starting at position 834 of SEQ ID NO: 1563859
ugcauauuagacugcaaua

SEQ ID NO: 1837302 - RNA, 19 nt, Artificial Sequence
  Description of Artificial Sequence: Synthetic oligonucleotide
  Antisense strand to SEQ ID NO: 1837301
uauugcagucuaauaugca

SEQ ID NO: 1837303 - RNA, 19 nt, Artificial Sequence
  Description of Artificial Sequence: Synthetic oligonucleotide
  Sense strand starting at position 1009 of SEQ ID NO: 1563859
ugccaaauguccucacagu

SEQ ID NO: 1837304 - RNA, 19 nt, Artificial Sequence
  Description of Artificial Sequence: Synthetic oligonucleotide
  Antisense strand to SEQ ID NO: 1837303
acugugaggacauuuggca

SEQ ID NO: 1837305 - RNA, 19 nt, Artificial Sequence
  Description of Artificial Sequence: Synthetic oligonucleotide
  Sense strand starting at position 1010 of SEQ ID NO: 1563859
gccaaauguccucacaguc

SEQ ID NO: 1837306 - RNA, 19 nt, Artificial Sequence
  Description of Artificial Sequence: Synthetic oligonucleotide
  Antisense strand to SEQ ID NO: 1837305
gacugugaggacauuuggc

SEQ ID NO: 1837307 - RNA, 19 nt, Artificial Sequence
  Description of Artificial Sequence: Synthetic oligonucleotide
  Sense strand starting at position 1236 of SEQ ID NO: 1563859
cgaaucugccucugccaau

SEQ ID NO: 1837308 - RNA, 19 nt, Artificial Sequence
  Description of Artificial Sequence: Synthetic oligonucleotide
  Antisense strand to SEQ ID NO: 1837307
auuggcagaggcagauucg

SEQ ID NO: 1837309 - RNA, 19 nt, Artificial Sequence
  Description of Artificial Sequence: Synthetic oligonucleotide
  Sense strand starting at position 1339 of SEQ ID NO: 1563859
gcgcguuucccagaacgca

SEQ ID NO: 1837310 - RNA, 19 nt, Artificial Sequence
  Description of Artificial Sequence: Synthetic oligonucleotide
  Antisense strand to SEQ ID NO: 1837309
ugcguucugggaaacgcgc

SEQ ID NO: 1837311 - RNA, 19 nt, Artificial Sequence
  Description of Artificial Sequence: Synthetic oligonucleotide
  Sense strand starting at position 1763 of SEQ ID NO: 1563859
gguaguugggcugagaggu

SEQ ID NO: 1837312 - RNA, 19 nt, Artificial Sequence
  Description of Artificial Sequence: Synthetic oligonucleotide
  Antisense strand to SEQ ID NO: 1837311
accucucagcccaacuacc

SEQ ID NO: 1837313 - RNA, 19 nt, Artificial Sequence
  Description of Artificial Sequence: Synthetic oligonucleotide
  Sense strand starting at position 1800 of SEQ ID NO: 1563859
ugcgaucuucccugggaga

SEQ ID NO: 1837314 - RNA, 19 nt, Artificial Sequence
  Description of Artificial Sequence: Synthetic oligonucleotide
  Antisense strand to SEQ ID NO: 1837313
ucucccagggaagaucgca

SEQ ID NO: 1837315 - RNA, 19 nt, Artificial Sequence
  Description of Artificial Sequence: Synthetic oligonucleotide
  Sense strand starting at position 1802 of SEQ ID NO: 1563859
cgaucuucccugggagaga

SEQ ID NO: 1837316 - RNA, 19 nt, Artificial Sequence
  Description of Artificial Sequence: Synthetic oligonucleotide
  Antisense strand to SEQ ID NO: 1837315
ucucucccagggaagaucg

SEQ ID NO: 1837317 - RNA, 19 nt, Artificial Sequence
  Description of Artificial Sequence: Synthetic oligonucleotide
  Sense strand starting at position 1996 of SEQ ID NO: 1563859
gcgauaagcgcaccgguua

SEQ ID NO: 1837318 - RNA, 19 nt, Artificial Sequence
  Description of Artificial Sequence: Synthetic oligonucleotide
  Antisense strand to SEQ ID NO: 1837317
uaaccggugcgcuuaucgc

SEQ ID NO: 1837319 - RNA, 19 nt, Artificial Sequence
  Description of Artificial Sequence: Synthetic oligonucleotide
  Sense strand starting at position 2328 of SEQ ID NO: 1563859
acucaaagcguguguagau

SEQ ID NO: 1837320 - RNA, 19 nt, Artificial Sequence
  Description of Artificial Sequence: Synthetic oligonucleotide
  Antisense strand to SEQ ID NO: 1837319
aucuacacacgcuuugagu

SEQ ID NO: 1837321 - RNA, 19 nt, Artificial Sequence
  Description of Artificial Sequence: Synthetic oligonucleotide
  Sense strand starting at position 2350 of SEQ ID NO: 1563859
gggugcaguuucucagaca

SEQ ID NO: 1837322 - RNA, 19 nt, Artificial Sequence
  Description of Artificial Sequence: Synthetic oligonucleotide
  Antisense strand to SEQ ID NO: 1837321
ugucugagaaacugcaccc

SEQ ID NO: 1837323 - RNA, 19 nt, Artificial Sequence
  Description of Artificial Sequence: Synthetic oligonucleotide
  Sense strand starting at position 2538 of SEQ ID NO: 1563859
cagugacaucugugcagac

SEQ ID NO: 1837324 - RNA, 19 nt, Artificial Sequence
  Description of Artificial Sequence: Synthetic oligonucleotide
  Antisense strand to SEQ ID NO: 1837323
gucugcacagaugucacug

SEQ ID NO: 1837325 - RNA, 19 nt, Artificial Sequence
  Description of Artificial Sequence: Synthetic oligonucleotide
  Sense strand starting at position 2607 of SEQ ID NO: 1563859
acggguaaucaguguuuag

SEQ ID NO: 1837326 - RNA, 19 nt, Artificial Sequence
  Description of Artificial Sequence: Synthetic oligonucleotide
  Antisense strand to SEQ ID NO: 1837325
cuaaacacugauuacccgu

SEQ ID NO: 1837327 - RNA, 19 nt, Artificial Sequence
  Description of Artificial Sequence: Synthetic oligonucleotide
  Sense strand starting at position 2610 of SEQ ID NO: 1563859
gguaaucaguguuuaguga

SEQ ID NO: 1837328 - RNA, 19 nt, Artificial Sequence
  Description of Artificial Sequence: Synthetic oligonucleotide
  Antisense strand to SEQ ID NO: 1837327
ucacuaaacacugauuacc

SEQ ID NO: 1837329 - RNA, 19 nt, Artificial Sequence
  Description of Artificial Sequence: Synthetic oligonucleotide
  Sense strand starting at position 2772 of SEQ ID NO: 1563859
cuucuccugaggcguaaau

SEQ ID NO: 1837330 - RNA, 19 nt, Artificial Sequence
  Description of Artificial Sequence: Synthetic oligonucleotide
  Antisense strand to SEQ ID NO: 1837329
auuuacgccucaggagaag

SEQ ID NO: 1837331 - RNA, 19 nt, Artificial Sequence
  Description of Artificial Sequence: Synthetic oligonucleotide
  Sense strand starting at position 2774 of SEQ ID NO: 1563859
ucuccugaggcguaaauaa

SEQ ID NO: 1837332 - RNA, 19 nt, Artificial Sequence
  Description of Artificial Sequence: Synthetic oligonucleotide
  Antisense strand to SEQ ID NO: 1837331
uuauuuacgccucaggaga

SEQ ID NO: 1837333 - RNA, 19 nt, Artificial Sequence
  Description of Artificial Sequence: Synthetic oligonucleotide
  Sense strand starting at position 2797 of SEQ ID NO: 1563859
gacugaaaccuccgcgaug

SEQ ID NO: 1837334 - RNA, 19 nt, Artificial Sequence
  Description of Artificial Sequence: Synthetic oligonucleotide
  Antisense strand to SEQ ID NO: 1837333
caucgcggagguuucaguc

SEQ ID NO: 1837335 - RNA, 19 nt, Artificial Sequence
  Description of Artificial Sequence: Synthetic oligonucleotide
  Sense strand starting at position 2868 of SEQ ID NO: 1563859
ggcggauugauugagcuaa

SEQ ID NO: 1837336 - RNA, 19 nt, Artificial Sequence
  Description of Artificial Sequence: Synthetic oligonucleotide
  Antisense strand to SEQ ID NO: 1837335
uuagcucaaucaauccgcc

SEQ ID NO: 1837337 - RNA, 19 nt, Artificial Sequence
  Description of Artificial Sequence: Synthetic oligonucleotide
  Sense strand starting at position 3092 of SEQ ID NO: 1563859
ggaggaucucuccgagaag

SEQ ID NO: 1837338 - RNA, 19 nt, Artificial Sequence
  Description of Artificial Sequence: Synthetic oligonucleotide
  Antisense strand to SEQ ID NO: 1837337
cuucucggagagauccucc

SEQ ID NO: 1837339 - RNA, 19 nt, Artificial Sequence
  Description of Artificial Sequence: Synthetic oligonucleotide
  Sense strand starting at position 3093 of SEQ ID NO: 1563859
gaggaucucuccgagaaga

SEQ ID NO: 1837340 - RNA, 19 nt, Artificial Sequence
  Description of Artificial Sequence: Synthetic oligonucleotide
  Antisense strand to SEQ ID NO: 1837339
ucuucucggagagauccuc

SEQ ID NO: 1837341 - RNA, 19 nt, Artificial Sequence
  Description of Artificial Sequence: Synthetic oligonucleotide
  Sense strand starting at position 3413 of SEQ ID NO: 1563859
ggauuaugaugagugcaca

SEQ ID NO: 1837342 - RNA, 19 nt, Artificial Sequence
  Description of Artificial Sequence: Synthetic oligonucleotide
  Antisense strand to SEQ ID NO: 1837341
ugugcacucaucauaaucc

SEQ ID NO: 1837343 - RNA, 19 nt, Artificial Sequence
  Description of Artificial Sequence: Synthetic oligonucleotide
  Sense strand starting at position 3414 of SEQ ID NO: 1563859
gauuaugaugagugcacaa

SEQ ID NO: 1837344 - RNA, 19 nt, Artificial Sequence
  Description of Artificial Sequence: Synthetic oligonucleotide
  Antisense strand to SEQ ID NO: 1837343
uugugcacucaucauaauc

SEQ ID NO: 1837345 - RNA, 19 nt, Artificial Sequence
  Description of Artificial Sequence: Synthetic oligonucleotide
  Sense strand starting at position 3416 of SEQ ID NO: 1563859
uuaugaugagugcacaacu

SEQ ID NO: 1837346 - RNA, 19 nt, Artificial Sequence
  Description of Artificial Sequence: Synthetic oligonucleotide
  Antisense strand to SEQ ID NO: 1837345
aguugugcacucaucauaa

SEQ ID NO: 1837347 - RNA, 19 nt, Artificial Sequence
  Description of Artificial Sequence: Synthetic oligonucleotide
  Sense strand starting at position 3525 of SEQ ID NO: 1563859
agcugaaacucucaggaau

SEQ ID NO: 1837348 - RNA, 19 nt, Artificial Sequence
  Description of Artificial Sequence: Synthetic oligonucleotide
  Antisense strand to SEQ ID NO: 1837347
auuccugagaguuucagcu

SEQ ID NO: 1837349 - RNA, 19 nt, Artificial Sequence
  Description of Artificial Sequence: Synthetic oligonucleotide
  Sense strand starting at position 3548 of SEQ ID NO: 1563859
accuguacucuuggccaaa

SEQ ID NO: 1837350 - RNA, 19 nt, Artificial Sequence
  Description of Artificial Sequence: Synthetic oligonucleotide
  Antisense strand to SEQ ID NO: 1837349
uuuggccaagaguacaggu

SEQ ID NO: 1837351 - RNA, 19 nt, Artificial Sequence
  Description of Artificial Sequence: Synthetic oligonucleotide
  Sense strand starting at position 3600 of SEQ ID NO: 1563859
uugugaugaacguguuccu

SEQ ID NO: 1837352 - RNA, 19 nt, Artificial Sequence
  Description of Artificial Sequence: Synthetic oligonucleotide
  Antisense strand to SEQ ID NO: 1837351
aggaacacguucaucacaa

SEQ ID NO: 1837353 - RNA, 19 nt, Artificial Sequence
  Description of Artificial Sequence: Synthetic oligonucleotide
  Sense strand starting at position 3639 of SEQ ID NO: 1563859
gggaguaggguucaagugu

SEQ ID NO: 1837354 - RNA, 19 nt, Artificial Sequence
  Description of Artificial Sequence: Synthetic oligonucleotide
  Antisense strand to SEQ ID NO: 1837353
acacuugaacccuacuccc

SEQ ID NO: 1837355 - RNA, 19 nt, Artificial Sequence
  Description of Artificial Sequence: Synthetic oligonucleotide
  Sense strand starting at position 3659 of SEQ ID NO: 1563859
gugagaaagccaggaaguu

SEQ ID NO: 1837356 - RNA, 19 nt, Artificial Sequence
  Description of Artificial Sequence: Synthetic oligonucleotide
  Antisense strand to SEQ ID NO: 1837355
aacuuccuggcuuucucac

SEQ ID NO: 1837357 - RNA, 19 nt, Artificial Sequence
  Description of Artificial Sequence: Synthetic oligonucleotide
  Sense strand starting at position 3714 of SEQ ID NO: 1563859
cugguacccugagcuguaa

SEQ ID NO: 1837358 - RNA, 19 nt, Artificial Sequence
  Description of Artificial Sequence: Synthetic oligonucleotide
  Antisense strand to SEQ ID NO: 1837357
uuacagcucaggguaccag

SEQ ID NO: 1837359 - RNA, 19 nt, Artificial Sequence
  Description of Artificial Sequence: Synthetic oligonucleotide
  Sense strand starting at position 3718 of SEQ ID NO: 1563859
uacccugagcuguaaugaa

SEQ ID NO: 1837360 - RNA, 19 nt, Artificial Sequence
  Description of Artificial Sequence: Synthetic oligonucleotide
  Antisense strand to SEQ ID NO: 1837359
uucauuacagcucagggua

SEQ ID NO: 1837361 - RNA, 19 nt, Artificial Sequence
  Description of Artificial Sequence: Synthetic oligonucleotide
  Sense strand starting at position 3738 of SEQ ID NO: 1563859
acucgaacacauugagauu

SEQ ID NO: 1837362 - RNA, 19 nt, Artificial Sequence
  Description of Artificial Sequence: Synthetic oligonucleotide
  Antisense strand to SEQ ID NO: 1837361
aaucucaauguguucgagu

SEQ ID NO: 1837363 - RNA, 19 nt, Artificial Sequence
  Description of Artificial Sequence: Synthetic oligonucleotide
  Sense strand starting at position 3741 of SEQ ID NO: 1563859
cgaacacauugagauuaag

SEQ ID NO: 1837364 - RNA, 19 nt, Artificial Sequence
  Description of Artificial Sequence: Synthetic oligonucleotide
  Antisense strand to SEQ ID NO: 1837363
cuuaaucucaauguguucg

SEQ ID NO: 1837365 - RNA, 19 nt, Artificial Sequence
  Description of Artificial Sequence: Synthetic oligonucleotide
  Sense strand starting at position 3937 of SEQ ID NO: 1563859
cucugauaucuuugcagcu

SEQ ID NO: 1837366 - RNA, 19 nt, Artificial Sequence
  Description of Artificial Sequence: Synthetic oligonucleotide
  Antisense strand to SEQ ID NO: 1837365
agcugcaaagauaucagag

SEQ ID NO: 1837367 - RNA, 19 nt, Artificial Sequence
  Description of Artificial Sequence: Synthetic oligonucleotide
  Sense strand starting at position 3974 of SEQ ID NO: 1563859
uuugaagauacgcauguau

SEQ ID NO: 1837368 - RNA, 19 nt, Artificial Sequence
  Description of Artificial Sequence: Synthetic oligonucleotide
  Antisense strand to SEQ ID NO: 1837367
auacaugcguaucuucaaa

SEQ ID NO: 1837369 - RNA, 19 nt, Artificial Sequence
  Description of Artificial Sequence: Synthetic oligonucleotide
  Sense strand starting at position 145 of SEQ ID NO: 1563860
gcccaagcuuaggaacaau

SEQ ID NO: 1837370 - RNA, 19 nt, Artificial Sequence
  Description of Artificial Sequence: Synthetic oligonucleotide
  Antisense strand to SEQ ID NO: 1837369
auuguuccuaagcuugggc

SEQ ID NO: 1837371 - RNA, 19 nt, Artificial Sequence
  Description of Artificial Sequence: Synthetic oligonucleotide
  Sense strand starting at position 162 of SEQ ID NO: 1563860
augguugacucucuagaaa

SEQ ID NO: 1837372 - RNA, 19 nt, Artificial Sequence
  Description of Artificial Sequence: Synthetic oligonucleotide
  Antisense strand to SEQ ID NO: 1837371
uuucuagagagucaaccau

SEQ ID NO: 1837373 - RNA, 19 nt, Artificial Sequence
  Description of Artificial Sequence: Synthetic oligonucleotide
  Sense strand starting at position 185 of SEQ ID NO: 1563860
gguuaagucucauuaggaa

SEQ ID NO: 1837374 - RNA, 19 nt, Artificial Sequence
  Description of Artificial Sequence: Synthetic oligonucleotide
  Antisense strand to SEQ ID NO: 1837373
uuccuaaugagacuuaacc

SEQ ID NO: 1837375 - RNA, 19 nt, Artificial Sequence
  Description of Artificial Sequence: Synthetic oligonucleotide
  Sense strand starting at position 293 of SEQ ID NO: 1563860
aggagacuuuacuuaagua

SEQ ID NO: 1837376 - RNA, 19 nt, Artificial Sequence
  Description of Artificial Sequence: Synthetic oligonucleotide
  Antisense strand to SEQ ID NO: 1837375
uacuuaaguaaagucuccu

SEQ ID NO: 1837377 - RNA, 19 nt, Artificial Sequence
  Description of Artificial Sequence: Synthetic oligonucleotide
  Sense strand starting at position 489 of SEQ ID NO: 1563860
aucuuaauaucagaagagu

SEQ ID NO: 1837378 - RNA, 19 nt, Artificial Sequence
  Description of Artificial Sequence: Synthetic oligonucleotide
  Antisense strand to SEQ ID NO: 1837377
acucuucugauauuaagau

SEQ ID NO: 1837379 - RNA, 19 nt, Artificial Sequence
  Description of Artificial Sequence: Synthetic oligonucleotide
  Sense strand starting at position 495 of SEQ ID NO: 1563860
auaucagaagagugcauua

SEQ ID NO: 1837380 - RNA, 19 nt, Artificial Sequence
  Description of Artificial Sequence: Synthetic oligonucleotide
  Antisense strand to SEQ ID NO: 1837379
uaaugcacucuucugauau

SEQ ID NO: 1837381 - RNA, 19 nt, Artificial Sequence
  Description of Artificial Sequence: Synthetic oligonucleotide
  Sense strand starting at position 834 of SEQ ID NO: 1563860
cagguucuucccuagcaga

SEQ ID NO: 1837382 - RNA, 19 nt, Artificial Sequence
  Description of Artificial Sequence: Synthetic oligonucleotide
  Antisense strand to SEQ ID NO: 1837381
ucugcuagggaagaaccug

SEQ ID NO: 1837383 - RNA, 19 nt, Artificial Sequence
  Description of Artificial Sequence: Synthetic oligonucleotide
  Sense strand starting at position 909 of SEQ ID NO: 1563860
uaguuauaacguuauccug

SEQ ID NO: 1837384 - RNA, 19 nt, Artificial Sequence
  Description of Artificial Sequence: Synthetic oligonucleotide
  Antisense strand to SEQ ID NO: 1837383
caggauaacguuauaacua

SEQ ID NO: 1837385 - RNA, 19 nt, Artificial Sequence
  Description of Artificial Sequence: Synthetic oligonucleotide
  Sense strand starting at position 916 of SEQ ID NO: 1563860
aacguuauccugugacagu

SEQ ID NO: 1837386 - RNA, 19 nt, Artificial Sequence
  Description of Artificial Sequence: Synthetic oligonucleotide
  Antisense strand to SEQ ID NO: 1837385
acugucacaggauaacguu

SEQ ID NO: 1837387 - RNA, 19 nt, Artificial Sequence
  Description of Artificial Sequence: Synthetic oligonucleotide
  Sense strand starting at position 919 of SEQ ID NO: 1563860
guuauccugugacaguuaa

SEQ ID NO: 1837388 - RNA, 19 nt, Artificial Sequence
  Description of Artificial Sequence: Synthetic oligonucleotide
  Antisense strand to SEQ ID NO: 1837387
uuaacugucacaggauaac

SEQ ID NO: 1837389 - RNA, 19 nt, Artificial Sequence
  Description of Artificial Sequence: Synthetic oligonucleotide
  Sense strand starting at position 1004 of SEQ ID NO: 1563860
uccuaagaaugaugcaacu

SEQ ID NO: 1837390 - RNA, 19 nt, Artificial Sequence
  Description of Artificial Sequence: Synthetic oligonucleotide
  Antisense strand to SEQ ID NO: 1837389
aguugcaucauucuuagga

SEQ ID NO: 1837391 - RNA, 19 nt, Artificial Sequence
  Description of Artificial Sequence: Synthetic oligonucleotide
  Sense strand starting at position 1112 of SEQ ID NO: 1563860
cuuggcccaucguauauaa

SEQ ID NO: 1837392 - RNA, 19 nt, Artificial Sequence
  Description of Artificial Sequence: Synthetic oligonucleotide
  Antisense strand to SEQ ID NO: 1837391
uuauauacgaugggccaag

SEQ ID NO: 1837393 - RNA, 19 nt, Artificial Sequence
  Description of Artificial Sequence: Synthetic oligonucleotide
  Sense strand starting at position 1192 of SEQ ID NO: 1563860
ugcauauuagacugcaaua

SEQ ID NO: 1837394 - RNA, 19 nt, Artificial Sequence
  Description of Artificial Sequence: Synthetic oligonucleotide
  Antisense strand to SEQ ID NO: 1837393
uauugcagucuaauaugca

SEQ ID NO: 1837395 - RNA, 19 nt, Artificial Sequence
  Description of Artificial Sequence: Synthetic oligonucleotide
  Sense strand starting at position 1367 of SEQ ID NO: 1563860
ugccaaauguccucacagu

SEQ ID NO: 1837396 - RNA, 19 nt, Artificial Sequence
  Description of Artificial Sequence: Synthetic oligonucleotide
  Antisense strand to SEQ ID NO: 1837395
acugugaggacauuuggca

SEQ ID NO: 1837397 - RNA, 19 nt, Artificial Sequence
  Description of Artificial Sequence: Synthetic oligonucleotide
  Sense strand starting at position 1368 of SEQ ID NO: 1563860
gccaaauguccucacaguc

SEQ ID NO: 1837398 - RNA, 19 nt, Artificial Sequence
  Description of Artificial Sequence: Synthetic oligonucleotide
  Antisense strand to SEQ ID NO: 1837397
gacugugaggacauuuggc

SEQ ID NO: 1837399 - RNA, 19 nt, Artificial Sequence
  Description of Artificial Sequence: Synthetic oligonucleotide
  Sense strand starting at position 1594 of SEQ ID NO: 1563860
cgaaucugccucugccaau

SEQ ID NO: 1837400 - RNA, 19 nt, Artificial Sequence
  Description of Artificial Sequence: Synthetic oligonucleotide
  Antisense strand to SEQ ID NO: 1837399
auuggcagaggcagauucg

SEQ ID NO: 1837401 - RNA, 19 nt, Artificial Sequence
  Description of Artificial Sequence: Synthetic oligonucleotide
  Sense strand starting at position 1697 of SEQ ID NO: 1563860
gcgcguuucccagaacgca

SEQ ID NO: 1837402 - RNA, 19 nt, Artificial Sequence
  Description of Artificial Sequence: Synthetic oligonucleotide
  Antisense strand to SEQ ID NO: 1837401
ugcguucugggaaacgcgc

SEQ ID NO: 1837403 - RNA, 19 nt, Artificial Sequence
  Description of Artificial Sequence: Synthetic oligonucleotide
  Sense strand starting at position 2121 of SEQ ID NO: 1563860
gguaguugggcugagaggu

SEQ ID NO: 1837404 - RNA, 19 nt, Artificial Sequence
  Description of Artificial Sequence: Synthetic oligonucleotide
  Antisense strand to SEQ ID NO: 1837403
accucucagcccaacuacc

SEQ ID NO: 1837405 - RNA, 19 nt, Artificial Sequence
  Description of Artificial Sequence: Synthetic oligonucleotide
  Sense strand starting at position 2158 of SEQ ID NO: 1563860
ugcgaucuucccugggaga

SEQ ID NO: 1837406 - RNA, 19 nt, Artificial Sequence
  Description of Artificial Sequence: Synthetic oligonucleotide
  Antisense strand to SEQ ID NO: 1837405
ucucccagggaagaucgca

SEQ ID NO: 1837407 - RNA, 19 nt, Artificial Sequence
  Description of Artificial Sequence: Synthetic oligonucleotide
  Sense strand starting at position 2160 of SEQ ID NO: 1563860
cgaucuucccugggagaga

SEQ ID NO: 1837408 - RNA, 19 nt, Artificial Sequence
  Description of Artificial Sequence: Synthetic oligonucleotide
  Antisense strand to SEQ ID NO: 1837407
ucucucccagggaagaucg

SEQ ID NO: 1837409 - RNA, 19 nt, Artificial Sequence
  Description of Artificial Sequence: Synthetic oligonucleotide
  Sense strand starting at position 2354 of SEQ ID NO: 1563860
gcgauaagcgcaccgguua

SEQ ID NO: 1837410 - RNA, 19 nt, Artificial Sequence
  Description of Artificial Sequence: Synthetic oligonucleotide
  Antisense strand to SEQ ID NO: 1837409
uaaccggugcgcuuaucgc

SEQ ID NO: 1837411 - RNA, 19 nt, Artificial Sequence
  Description of Artificial Sequence: Synthetic oligonucleotide
  Sense strand starting at position 2608 of SEQ ID NO: 1563860
auacgaugcuuacaugcaa

SEQ ID NO: 1837412 - RNA, 19 nt, Artificial Sequence
  Description of Artificial Sequence: Synthetic oligonucleotide
  Antisense strand to SEQ ID NO: 1837411
uugcauguaagcaucguau

SEQ ID NO: 1837413 - RNA, 19 nt, Artificial Sequence
  Description of Artificial Sequence: Synthetic oligonucleotide
  Sense strand starting at position 2686 of SEQ ID NO: 1563860
acucaaagcguguguagau

SEQ ID NO: 1837414 - RNA, 19 nt, Artificial Sequence
  Description of Artificial Sequence: Synthetic oligonucleotide
  Antisense strand to SEQ ID NO: 1837413
aucuacacacgcuuugagu

SEQ ID NO: 1837415 - RNA, 19 nt, Artificial Sequence
  Description of Artificial Sequence: Synthetic oligonucleotide
  Sense strand starting at position 2708 of SEQ ID NO: 1563860
gggugcaguuucucagaca

SEQ ID NO: 1837416 - RNA, 19 nt, Artificial Sequence
  Description of Artificial Sequence: Synthetic oligonucleotide
  Antisense strand to SEQ ID NO: 1837415
ugucugagaaacugcaccc

SEQ ID NO: 1837417 - RNA, 19 nt, Artificial Sequence
  Description of Artificial Sequence: Synthetic oligonucleotide
  Sense strand starting at position 2896 of SEQ ID NO: 1563860
cagugacaucugugcagac

SEQ ID NO: 1837418 - RNA, 19 nt, Artificial Sequence
  Description of Artificial Sequence: Synthetic oligonucleotide
  Antisense strand to SEQ ID NO: 1837417
gucugcacagaugucacug

SEQ ID NO: 1837419 - RNA, 19 nt, Artificial Sequence
  Description of Artificial Sequence: Synthetic oligonucleotide
  Sense strand starting at position 2965 of SEQ ID NO: 1563860
acggguaaucaguguuuag

SEQ ID NO: 1837420 - RNA, 19 nt, Artificial Sequence
  Description of Artificial Sequence: Synthetic oligonucleotide
  Antisense strand to SEQ ID NO: 1837419
cuaaacacugauuacccgu

SEQ ID NO: 1837421 - RNA, 19 nt, Artificial Sequence
  Description of Artificial Sequence: Synthetic oligonucleotide
  Sense strand starting at position 2968 of SEQ ID NO: 1563860
gguaaucaguguuuaguga

SEQ ID NO: 1837422 - RNA, 19 nt, Artificial Sequence
  Description of Artificial Sequence: Synthetic oligonucleotide
  Antisense strand to SEQ ID NO: 1837421
ucacuaaacacugauuacc

SEQ ID NO: 1837423 - RNA, 19 nt, Artificial Sequence
  Description of Artificial Sequence: Synthetic oligonucleotide
  Sense strand starting at position 3130 of SEQ ID NO: 1563860
cuucuccugaggcguaaau

SEQ ID NO: 1837424 - RNA, 19 nt, Artificial Sequence
  Description of Artificial Sequence: Synthetic oligonucleotide
  Antisense strand to SEQ ID NO: 1837423
auuuacgccucaggagaag

SEQ ID NO: 1837425 - RNA, 19 nt, Artificial Sequence
  Description of Artificial Sequence: Synthetic oligonucleotide
  Sense strand starting at position 3132 of SEQ ID NO: 1563860
ucuccugaggcguaaauaa

SEQ ID NO: 1837426 - RNA, 19 nt, Artificial Sequence
  Description of Artificial Sequence: Synthetic oligonucleotide
  Antisense strand to SEQ ID NO: 1837425
uuauuuacgccucaggaga

SEQ ID NO: 1837427 - RNA, 19 nt, Artificial Sequence
  Description of Artificial Sequence: Synthetic oligonucleotide
  Sense strand starting at position 3142 of SEQ ID NO: 1563860
cguaaauaaugcugacuga

SEQ ID NO: 1837428 - RNA, 19 nt, Artificial Sequence
  Description of Artificial Sequence: Synthetic oligonucleotide
  Antisense strand to SEQ ID NO: 1837427
ucagucagcauuauuuacg

SEQ ID NO: 1837429 - RNA, 19 nt, Artificial Sequence
  Description of Artificial Sequence: Synthetic oligonucleotide
  Sense strand starting at position 3155 of SEQ ID NO: 1563860
gacugaaaccuccgcgaug

SEQ ID NO: 1837430 - RNA, 19 nt, Artificial Sequence
  Description of Artificial Sequence: Synthetic oligonucleotide
  Antisense strand to SEQ ID NO: 1837429
caucgcggagguuucaguc

SEQ ID NO: 1837431 - RNA, 19 nt, Artificial Sequence
  Description of Artificial Sequence: Synthetic oligonucleotide
  Sense strand starting at position 3226 of SEQ ID NO: 1563860
ggcggauugauugagcuaa

SEQ ID NO: 1837432 - RNA, 19 nt, Artificial Sequence
  Description of Artificial Sequence: Synthetic oligonucleotide
  Antisense strand to SEQ ID NO: 1837431
uuagcucaaucaauccgcc

SEQ ID NO: 1837433 - RNA, 19 nt, Artificial Sequence
  Description of Artificial Sequence: Synthetic oligonucleotide
  Sense strand starting at position 3450 of SEQ ID NO: 1563860
ggaggaucucuccgagaag

SEQ ID NO: 1837434 - RNA, 19 nt, Artificial Sequence
  Description of Artificial Sequence: Synthetic oligonucleotide
  Antisense strand to SEQ ID NO: 1837433
cuucucggagagauccucc

SEQ ID NO: 1837435 - RNA, 19 nt, Artificial Sequence
  Description of Artificial Sequence: Synthetic oligonucleotide
  Sense strand starting at position 3451 of SEQ ID NO: 1563860
gaggaucucuccgagaaga

SEQ ID NO: 1837436 - RNA, 19 nt, Artificial Sequence
  Description of Artificial Sequence: Synthetic oligonucleotide
  Antisense strand to SEQ ID NO: 1837435
ucuucucggagagauccuc

SEQ ID NO: 1837437 - RNA, 19 nt, Artificial Sequence
  Description of Artificial Sequence: Synthetic oligonucleotide
  Sense strand starting at position 3771 of SEQ ID NO: 1563860
ggauuaugaugagugcaca

SEQ ID NO: 1837438 - RNA, 19 nt, Artificial Sequence
  Description of Artificial Sequence: Synthetic oligonucleotide
  Antisense strand to SEQ ID NO: 1837437
ugugcacucaucauaaucc

SEQ ID NO: 1837439 - RNA, 19 nt, Artificial Sequence
  Description of Artificial Sequence: Synthetic oligonucleotide
  Sense strand starting at position 3772 of SEQ ID NO: 1563860
gauuaugaugagugcacaa

SEQ ID NO: 1837440 - RNA, 19 nt, Artificial Sequence
  Description of Artificial Sequence: Synthetic oligonucleotide
  Antisense strand to SEQ ID NO: 1837439
uugugcacucaucauaauc

SEQ ID NO: 1837441 - RNA, 19 nt, Artificial Sequence
  Description of Artificial Sequence: Synthetic oligonucleotide
  Sense strand starting at position 3774 of SEQ ID NO: 1563860
uuaugaugagugcacaacu

SEQ ID NO: 1837442 - RNA, 19 nt, Artificial Sequence
  Description of Artificial Sequence: Synthetic oligonucleotide
  Antisense strand to SEQ ID NO: 1837441
aguugugcacucaucauaa

SEQ ID NO: 1837443 - RNA, 19 nt, Artificial Sequence
  Description of Artificial Sequence: Synthetic oligonucleotide
  Sense strand starting at position 3883 of SEQ ID NO: 1563860
agcugaaacucucaggaau

SEQ ID NO: 1837444 - RNA, 19 nt, Artificial Sequence
  Description of Artificial Sequence: Synthetic oligonucleotide
  Antisense strand to SEQ ID NO: 1837443
auuccugagaguuucagcu

SEQ ID NO: 1837445 - RNA, 19 nt, Artificial Sequence
  Description of Artificial Sequence: Synthetic oligonucleotide
  Sense strand starting at position 3906 of SEQ ID NO: 1563860
accuguacucuuggccaaa

SEQ ID NO: 1837446 - RNA, 19 nt, Artificial Sequence
  Description of Artificial Sequence: Synthetic oligonucleotide
  Antisense strand to SEQ ID NO: 1837445
uuuggccaagaguacaggu

SEQ ID NO: 1837447 - RNA, 19 nt, Artificial Sequence
  Description of Artificial Sequence: Synthetic oligonucleotide
  Sense strand starting at position 3958 of SEQ ID NO: 1563860
uugugaugaacguguuccu

SEQ ID NO: 1837448 - RNA, 19 nt, Artificial Sequence
  Description of Artificial Sequence: Synthetic oligonucleotide
  Antisense strand to SEQ ID NO: 1837447
aggaacacguucaucacaa

SEQ ID NO: 1837449 - RNA, 19 nt, Artificial Sequence
  Description of Artificial Sequence: Synthetic oligonucleotide
  Sense strand starting at position 168 of SEQ ID NO: 1563861
ccuguuuggagugaucaga

SEQ ID NO: 1837450 - RNA, 19 nt, Artificial Sequence
  Description of Artificial Sequence: Synthetic oligonucleotide
  Antisense strand to SEQ ID NO: 1837449
ucugaucacuccaaacagg

SEQ ID NO: 1837451 - RNA, 19 nt, Artificial Sequence
  Description of Artificial Sequence: Synthetic oligonucleotide
  Sense strand starting at position 184 of SEQ ID NO: 1563861
agagaagucuuuguggaag

SEQ ID NO: 1837452 - RNA, 19 nt, Artificial Sequence
  Description of Artificial Sequence: Synthetic oligonucleotide
  Antisense strand to SEQ ID NO: 1837451
cuuccacaaagacuucucu

SEQ ID NO: 1837453 - RNA, 19 nt, Artificial Sequence
  Description of Artificial Sequence: Synthetic oligonucleotide
  Sense strand starting at position 190 of SEQ ID NO: 1563861
gucuuuguggaagaauuag

SEQ ID NO: 1837454 - RNA, 19 nt, Artificial Sequence
  Description of Artificial Sequence: Synthetic oligonucleotide
  Antisense strand to SEQ ID NO: 1837453
cuaauucuuccacaaagac

SEQ ID NO: 1837455 - RNA, 19 nt, Artificial Sequence
  Description of Artificial Sequence: Synthetic oligonucleotide
  Sense strand starting at position 196 of SEQ ID NO: 1563861
guggaagaauuagcacuua

SEQ ID NO: 1837456 - RNA, 19 nt, Artificial Sequence
  Description of Artificial Sequence: Synthetic oligonucleotide
  Antisense strand to SEQ ID NO: 1837455
uaagugcuaauucuuccac

SEQ ID NO: 1837457 - RNA, 19 nt, Artificial Sequence
  Description of Artificial Sequence: Synthetic oligonucleotide
  Sense strand starting at position 212 of SEQ ID NO: 1563861
uuauucugggccugagaug

SEQ ID NO: 1837458 - RNA, 19 nt, Artificial Sequence
  Description of Artificial Sequence: Synthetic oligonucleotide
  Antisense strand to SEQ ID NO: 1837457
caucucaggcccagaauaa

SEQ ID NO: 1837459 - RNA, 19 nt, Artificial Sequence
  Description of Artificial Sequence: Synthetic oligonucleotide
  Sense strand starting at position 308 of SEQ ID NO: 1563861
cccaucuguggccagauau

SEQ ID NO: 1837460 - RNA, 19 nt, Artificial Sequence
  Description of Artificial Sequence: Synthetic oligonucleotide
  Antisense strand to SEQ ID NO: 1837459
auaucuggccacagauggg

SEQ ID NO: 1837461 - RNA, 19 nt, Artificial Sequence
  Description of Artificial Sequence: Synthetic oligonucleotide
  Sense strand starting at position 905 of SEQ ID NO: 1563861
cucuaacaucauugguaga

SEQ ID NO: 1837462 - RNA, 19 nt, Artificial Sequence
  Description of Artificial Sequence: Synthetic oligonucleotide
  Antisense strand to SEQ ID NO: 1837461
ucuaccaaugauguuagag

SEQ ID NO: 1837463 - RNA, 19 nt, Artificial Sequence
  Description of Artificial Sequence: Synthetic oligonucleotide
  Sense strand starting at position 907 of SEQ ID NO: 1563861
cuaacaucauugguagauu

SEQ ID NO: 1837464 - RNA, 19 nt, Artificial Sequence
  Description of Artificial Sequence: Synthetic oligonucleotide
  Antisense strand to SEQ ID NO: 1837463
aaucuaccaaugauguuag

SEQ ID NO: 1837465 - RNA, 19 nt, Artificial Sequence
  Description of Artificial Sequence: Synthetic oligonucleotide
  Sense strand starting at position 918 of SEQ ID NO: 1563861
gguagauuacugugagauu

SEQ ID NO: 1837466 - RNA, 19 nt, Artificial Sequence
  Description of Artificial Sequence: Synthetic oligonucleotide
  Antisense strand to SEQ ID NO: 1837465
aaucucacaguaaucuacc

SEQ ID NO: 1837467 - RNA, 19 nt, Artificial Sequence
  Description of Artificial Sequence: Synthetic oligonucleotide
  Sense strand starting at position 921 of SEQ ID NO: 1563861
agauuacugugagauuuag

SEQ ID NO: 1837468 - RNA, 19 nt, Artificial Sequence
  Description of Artificial Sequence: Synthetic oligonucleotide
  Antisense strand to SEQ ID NO: 1837467
cuaaaucucacaguaaucu

SEQ ID NO: 1837469 - RNA, 19 nt, Artificial Sequence
  Description of Artificial Sequence: Synthetic oligonucleotide
  Sense strand starting at position 1080 of SEQ ID NO: 1563861
acaucagggucccuuuaga

SEQ ID NO: 1837470 - RNA, 19 nt, Artificial Sequence
  Description of Artificial Sequence: Synthetic oligonucleotide
  Antisense strand to SEQ ID NO: 1837469
ucuaaagggacccugaugu

SEQ ID NO: 1837471 - RNA, 19 nt, Artificial Sequence
  Description of Artificial Sequence: Synthetic oligonucleotide
  Sense strand starting at position 1201 of SEQ ID NO: 1563861
gaguuuauucuggagccaa

SEQ ID NO: 1837472 - RNA, 19 nt, Artificial Sequence
  Description of Artificial Sequence: Synthetic oligonucleotide
  Antisense strand to SEQ ID NO: 1837471
uuggcuccagaauaaacuc

SEQ ID NO: 1837473 - RNA, 19 nt, Artificial Sequence
  Description of Artificial Sequence: Synthetic oligonucleotide
  Sense strand starting at position 1367 of SEQ ID NO: 1563861
accuuacacccuugggaaa

SEQ ID NO: 1837474 - RNA, 19 nt, Artificial Sequence
  Description of Artificial Sequence: Synthetic oligonucleotide
  Antisense strand to SEQ ID NO: 1837473
uuucccaaggguguaaggu

SEQ ID NO: 1837475 - RNA, 19 nt, Artificial Sequence
  Description of Artificial Sequence: Synthetic oligonucleotide
  Sense strand starting at position 1422 of SEQ ID NO: 1563861
uugccacauuuguuucuau

SEQ ID NO: 1837476 - RNA, 19 nt, Artificial Sequence
  Description of Artificial Sequence: Synthetic oligonucleotide
  Antisense strand to SEQ ID NO: 1837475
auagaaacaaauguggcaa

SEQ ID NO: 1837477 - RNA, 19 nt, Artificial Sequence
  Description of Artificial Sequence: Synthetic oligonucleotide
  Sense strand starting at position 1423 of SEQ ID NO: 1563861
ugccacauuuguuucuauu

SEQ ID NO: 1837478 - RNA, 19 nt, Artificial Sequence
  Description of Artificial Sequence: Synthetic oligonucleotide
  Antisense strand to SEQ ID NO: 1837477
aauagaaacaaauguggca

SEQ ID NO: 1837479 - RNA, 19 nt, Artificial Sequence
  Description of Artificial Sequence: Synthetic oligonucleotide
  Sense strand starting at position 1507 of SEQ ID NO: 1563861
agcgaauuugcaugcaaac

SEQ ID NO: 1837480 - RNA, 19 nt, Artificial Sequence
  Description of Artificial Sequence: Synthetic oligonucleotide
  Antisense strand to SEQ ID NO: 1837479
guuugcaugcaaauucgcu

SEQ ID NO: 1837481 - RNA, 19 nt, Artificial Sequence
  Description of Artificial Sequence: Synthetic oligonucleotide
  Sense strand starting at position 1953 of SEQ ID NO: 1563861
ugacccugcugucuaauuu

SEQ ID NO: 1837482 - RNA, 19 nt, Artificial Sequence
  Description of Artificial Sequence: Synthetic oligonucleotide
  Antisense strand to SEQ ID NO: 1837481
aaauuagacagcaggguca

SEQ ID NO: 1837483 - RNA, 19 nt, Artificial Sequence
  Description of Artificial Sequence: Synthetic oligonucleotide
  Sense strand starting at position 2157 of SEQ ID NO: 1563861
gggcaauuugcuuggagua

SEQ ID NO: 1837484 - RNA, 19 nt, Artificial Sequence
  Description of Artificial Sequence: Synthetic oligonucleotide
  Antisense strand to SEQ ID NO: 1837483
uacuccaagcaaauugccc

SEQ ID NO: 1837485 - RNA, 19 nt, Artificial Sequence
  Description of Artificial Sequence: Synthetic oligonucleotide
  Sense strand starting at position 2158 of SEQ ID NO: 1563861
ggcaauuugcuuggaguag

SEQ ID NO: 1837486 - RNA, 19 nt, Artificial Sequence
  Description of Artificial Sequence: Synthetic oligonucleotide
  Antisense strand to SEQ ID NO: 1837485
cuacuccaagcaaauugcc

SEQ ID NO: 1837487 - RNA, 19 nt, Artificial Sequence
  Description of Artificial Sequence: Synthetic oligonucleotide
  Sense strand starting at position 2187 of SEQ ID NO: 1563861
gaggaaacugccugguuga

SEQ ID NO: 1837488 - RNA, 19 nt, Artificial Sequence
  Description of Artificial Sequence: Synthetic oligonucleotide
  Antisense strand to SEQ ID NO: 1837487
ucaaccaggcaguuuccuc

SEQ ID NO: 1837489 - RNA, 19 nt, Artificial Sequence
  Description of Artificial Sequence: Synthetic oligonucleotide
  Sense strand starting at position 2188 of SEQ ID NO: 1563861
aggaaacugccugguugau

SEQ ID NO: 1837490 - RNA, 19 nt, Artificial Sequence
  Description of Artificial Sequence: Synthetic oligonucleotide
  Antisense strand to SEQ ID NO: 1837489
aucaaccaggcaguuuccu

SEQ ID NO: 1837491 - RNA, 19 nt, Artificial Sequence
  Description of Artificial Sequence: Synthetic oligonucleotide
  Sense strand starting at position 2258 of SEQ ID NO: 1563861
aagggucgacauggauuau

SEQ ID NO: 1837492 - RNA, 19 nt, Artificial Sequence
  Description of Artificial Sequence: Synthetic oligonucleotide
  Antisense strand to SEQ ID NO: 1837491
auaauccaugucgacccuu

SEQ ID NO: 1837493 - RNA, 19 nt, Artificial Sequence
  Description of Artificial Sequence: Synthetic oligonucleotide
  Sense strand starting at position 2259 of SEQ ID NO: 1563861
agggucgacauggauuauu

SEQ ID NO: 1837494 - RNA, 19 nt, Artificial Sequence
  Description of Artificial Sequence: Synthetic oligonucleotide
  Antisense strand to SEQ ID NO: 1837493
aauaauccaugucgacccu

SEQ ID NO: 1837495 - RNA, 19 nt, Artificial Sequence
  Description of Artificial Sequence: Synthetic oligonucleotide
  Sense strand starting at position 2378 of SEQ ID NO: 1563861
ugggaagucgcagaguuga

SEQ ID NO: 1837496 - RNA, 19 nt, Artificial Sequence
  Description of Artificial Sequence: Synthetic oligonucleotide
  Antisense strand to SEQ ID NO: 1837495
ucaacucugcgacuuccca

SEQ ID NO: 1837497 - RNA, 19 nt, Artificial Sequence
  Description of Artificial Sequence: Synthetic oligonucleotide
  Sense strand starting at position 2408 of SEQ ID NO: 1563861
acauguaucugacuccaga

SEQ ID NO: 1837498 - RNA, 19 nt, Artificial Sequence
  Description of Artificial Sequence: Synthetic oligonucleotide
  Antisense strand to SEQ ID NO: 1837497
ucuggagucagauacaugu

SEQ ID NO: 1837499 - RNA, 19 nt, Artificial Sequence
  Description of Artificial Sequence: Synthetic oligonucleotide
  Sense strand starting at position 2789 of SEQ ID NO: 1563861
gcccuuggacacuauuaau

SEQ ID NO: 1837500 - RNA, 19 nt, Artificial Sequence
  Description of Artificial Sequence: Synthetic oligonucleotide
  Antisense strand to SEQ ID NO: 1837499
auuaauaguguccaagggc

SEQ ID NO: 1837501 - RNA, 19 nt, Artificial Sequence
  Description of Artificial Sequence: Synthetic oligonucleotide
  Sense strand starting at position 2890 of SEQ ID NO: 1563861
uugguaaggucucccacaa

SEQ ID NO: 1837502 - RNA, 19 nt, Artificial Sequence
  Description of Artificial Sequence: Synthetic oligonucleotide
  Antisense strand to SEQ ID NO: 1837501
uugugggagaccuuaccaa

SEQ ID NO: 1837503 - RNA, 19 nt, Artificial Sequence
  Description of Artificial Sequence: Synthetic oligonucleotide
  Sense strand starting at position 2943 of SEQ ID NO: 1563861
cuguuaagccucuaaugaa

SEQ ID NO: 1837504 - RNA, 19 nt, Artificial Sequence
  Description of Artificial Sequence: Synthetic oligonucleotide
  Antisense strand to SEQ ID NO: 1837503
uucauuagaggcuuaacag

SEQ ID NO: 1837505 - RNA, 19 nt, Artificial Sequence
  Description of Artificial Sequence: Synthetic oligonucleotide
  Sense strand starting at position 3005 of SEQ ID NO: 1563861
uuaguugaugguuacaaua

SEQ ID NO: 1837506 - RNA, 19 nt, Artificial Sequence
  Description of Artificial Sequence: Synthetic oligonucleotide
  Antisense strand to SEQ ID NO: 1837505
uauuguaaccaucaacuaa

SEQ ID NO: 1837507 - RNA, 19 nt, Artificial Sequence
  Description of Artificial Sequence: Synthetic oligonucleotide
  Sense strand starting at position 3093 of SEQ ID NO: 1563861
ggguguuuaauguauaucu

SEQ ID NO: 1837508 - RNA, 19 nt, Artificial Sequence
  Description of Artificial Sequence: Synthetic oligonucleotide
  Antisense strand to SEQ ID NO: 1837507
agauauacauuaaacaccc

SEQ ID NO: 1837509 - RNA, 19 nt, Artificial Sequence
  Description of Artificial Sequence: Synthetic oligonucleotide
  Sense strand starting at position 3105 of SEQ ID NO: 1563861
uauaucuugcaagggagau

SEQ ID NO: 1837510 - RNA, 19 nt, Artificial Sequence
  Description of Artificial Sequence: Synthetic oligonucleotide
  Antisense strand to SEQ ID NO: 1837509
aucucccuugcaagauaua

SEQ ID NO: 1837511 - RNA, 19 nt, Artificial Sequence
  Description of Artificial Sequence: Synthetic oligonucleotide
  Sense strand starting at position 3106 of SEQ ID NO: 1563861
auaucuugcaagggagaua

SEQ ID NO: 1837512 - RNA, 19 nt, Artificial Sequence
  Description of Artificial Sequence: Synthetic oligonucleotide
  Antisense strand to SEQ ID NO: 1837511
uaucucccuugcaagauau

SEQ ID NO: 1837513 - RNA, 19 nt, Artificial Sequence
  Description of Artificial Sequence: Synthetic oligonucleotide
  Sense strand starting at position 3173 of SEQ ID NO: 1563861
ucaauaaaugcugaguaca

SEQ ID NO: 1837514 - RNA, 19 nt, Artificial Sequence
  Description of Artificial Sequence: Synthetic oligonucleotide
  Antisense strand to SEQ ID NO: 1837513
uguacucagcauuuauuga

SEQ ID NO: 1837515 - RNA, 19 nt, Artificial Sequence
  Description of Artificial Sequence: Synthetic oligonucleotide
  Sense strand starting at position 3175 of SEQ ID NO: 1563861
aauaaaugcugaguacaug

SEQ ID NO: 1837516 - RNA, 19 nt, Artificial Sequence
  Description of Artificial Sequence: Synthetic oligonucleotide
  Antisense strand to SEQ ID NO: 1837515
cauguacucagcauuuauu

SEQ ID NO: 1837517 - RNA, 19 nt, Artificial Sequence
  Description of Artificial Sequence: Synthetic oligonucleotide
  Sense strand starting at position 3245 of SEQ ID NO: 1563861
cuguguauccuguaaagaa

SEQ ID NO: 1837518 - RNA, 19 nt, Artificial Sequence
  Description of Artificial Sequence: Synthetic oligonucleotide
  Antisense strand to SEQ ID NO: 1837517
uucuuuacaggauacacag

SEQ ID NO: 1837519 - RNA, 19 nt, Artificial Sequence
  Description of Artificial Sequence: Synthetic oligonucleotide
  Sense strand starting at position 3671 of SEQ ID NO: 1563861
ugacauccauuccugagua

SEQ ID NO: 1837520 - RNA, 19 nt, Artificial Sequence
  Description of Artificial Sequence: Synthetic oligonucleotide
  Antisense strand to SEQ ID NO: 1837519
uacucaggaauggauguca

SEQ ID NO: 1837521 - RNA, 19 nt, Artificial Sequence
  Description of Artificial Sequence: Synthetic oligonucleotide
  Sense strand starting at position 3675 of SEQ ID NO: 1563861
auccauuccugaguauacu

SEQ ID NO: 1837522 - RNA, 19 nt, Artificial Sequence
  Description of Artificial Sequence: Synthetic oligonucleotide
  Antisense strand to SEQ ID NO: 1837521
aguauacucaggaauggau

SEQ ID NO: 1837523 - RNA, 19 nt, Artificial Sequence
  Description of Artificial Sequence: Synthetic oligonucleotide
  Sense strand starting at position 3714 of SEQ ID NO: 1563861
acaauuacugcugaguauu

SEQ ID NO: 1837524 - RNA, 19 nt, Artificial Sequence
  Description of Artificial Sequence: Synthetic oligonucleotide
  Antisense strand to SEQ ID NO: 1837523
aauacucagcaguaauugu

SEQ ID NO: 1837525 - RNA, 19 nt, Artificial Sequence
  Description of Artificial Sequence: Synthetic oligonucleotide
  Sense strand starting at position 3792 of SEQ ID NO: 1563861
guguacauuguggaauaua

SEQ ID NO: 1837526 - RNA, 19 nt, Artificial Sequence
  Description of Artificial Sequence: Synthetic oligonucleotide
  Antisense strand to SEQ ID NO: 1837525
uauauuccacaauguacac

SEQ ID NO: 1837527 - RNA, 19 nt, Artificial Sequence
  Description of Artificial Sequence: Synthetic oligonucleotide
  Sense strand starting at position 3918 of SEQ ID NO: 1563861
aagguagcaccaugacauu

SEQ ID NO: 1837528 - RNA, 19 nt, Artificial Sequence
  Description of Artificial Sequence: Synthetic oligonucleotide
  Antisense strand to SEQ ID NO: 1837527
aaugucauggugcuaccuu

SEQ ID NO: 1837529 - RNA, 19 nt, Artificial Sequence
  Description of Artificial Sequence: Synthetic oligonucleotide
  Sense strand starting at position 34 of SEQ ID NO: 1563862
uugacugugcuaugcauuu

SEQ ID NO: 1837530 - RNA, 19 nt, Artificial Sequence
  Description of Artificial Sequence: Synthetic oligonucleotide
  Antisense strand to SEQ ID NO: 1837529
aaaugcauagcacagucaa

SEQ ID NO: 1837531 - RNA, 19 nt, Artificial Sequence
  Description of Artificial Sequence: Synthetic oligonucleotide
  Sense strand starting at position 163 of SEQ ID NO: 1563862
cugagaucuaaagggcagu

SEQ ID NO: 1837532 - RNA, 19 nt, Artificial Sequence
  Description of Artificial Sequence: Synthetic oligonucleotide
  Antisense strand to SEQ ID NO: 1837531
acugcccuuuagaucucag

SEQ ID NO: 1837533 - RNA, 19 nt, Artificial Sequence
  Description of Artificial Sequence: Synthetic oligonucleotide
  Sense strand starting at position 311 of SEQ ID NO: 1563862
uuugaaaugcugugaauuc

SEQ ID NO: 1837534 - RNA, 19 nt, Artificial Sequence
  Description of Artificial Sequence: Synthetic oligonucleotide
  Antisense strand to SEQ ID NO: 1837533
gaauucacagcauuucaaa

SEQ ID NO: 1837535 - RNA, 19 nt, Artificial Sequence
  Description of Artificial Sequence: Synthetic oligonucleotide
  Sense strand starting at position 332 of SEQ ID NO: 1563862
guaucugucccauauauaa

SEQ ID NO: 1837536 - RNA, 19 nt, Artificial Sequence
  Description of Artificial Sequence: Synthetic oligonucleotide
  Antisense strand to SEQ ID NO: 1837535
uuauauaugggacagauac

SEQ ID NO: 1837537 - RNA, 19 nt, Artificial Sequence
  Description of Artificial Sequence: Synthetic oligonucleotide
  Sense strand starting at position 419 of SEQ ID NO: 1563862
accauauuggaguaaugcu

SEQ ID NO: 1837538 - RNA, 19 nt, Artificial Sequence
  Description of Artificial Sequence: Synthetic oligonucleotide
  Antisense strand to SEQ ID NO: 1837537
agcauuacuccaauauggu

SEQ ID NO: 1837539 - RNA, 19 nt, Artificial Sequence
  Description of Artificial Sequence: Synthetic oligonucleotide
  Sense strand starting at position 426 of SEQ ID NO: 1563862
uggaguaaugcugguuaau

SEQ ID NO: 1837540 - RNA, 19 nt, Artificial Sequence
  Description of Artificial Sequence: Synthetic oligonucleotide
  Antisense strand to SEQ ID NO: 1837539
auuaaccagcauuacucca

SEQ ID NO: 1837541 - RNA, 19 nt, Artificial Sequence
  Description of Artificial Sequence: Synthetic oligonucleotide
  Sense strand starting at position 429 of SEQ ID NO: 1563862
aguaaugcugguuaaucua

SEQ ID NO: 1837542 - RNA, 19 nt, Artificial Sequence
  Description of Artificial Sequence: Synthetic oligonucleotide
  Antisense strand to SEQ ID NO: 1837541
uagauuaaccagcauuacu

SEQ ID NO: 1837543 - RNA, 19 nt, Artificial Sequence
  Description of Artificial Sequence: Synthetic oligonucleotide
  Sense strand starting at position 455 of SEQ ID NO: 1563862
gaaauaaaccagugccuga

SEQ ID NO: 1837544 - RNA, 19 nt, Artificial Sequence
  Description of Artificial Sequence: Synthetic oligonucleotide
  Antisense strand to SEQ ID NO: 1837543
ucaggcacugguuuauuuc

SEQ ID NO: 1837545 - RNA, 19 nt, Artificial Sequence
  Description of Artificial Sequence: Synthetic oligonucleotide
  Sense strand starting at position 515 of SEQ ID NO: 1563862
gucuuucuaggugaaccau

SEQ ID NO: 1837546 - RNA, 19 nt, Artificial Sequence
  Description of Artificial Sequence: Synthetic oligonucleotide
  Antisense strand to SEQ ID NO: 1837545
augguucaccuagaaagac

SEQ ID NO: 1837547 - RNA, 19 nt, Artificial Sequence
  Description of Artificial Sequence: Synthetic oligonucleotide
  Sense strand starting at position 524 of SEQ ID NO: 1563862
ggugaaccauaaguauaga

SEQ ID NO: 1837548 - RNA, 19 nt, Artificial Sequence
  Description of Artificial Sequence: Synthetic oligonucleotide
  Antisense strand to SEQ ID NO: 1837547
ucuauacuuaugguucacc

SEQ ID NO: 1837549 - RNA, 19 nt, Artificial Sequence
  Description of Artificial Sequence: Synthetic oligonucleotide
  Sense strand starting at position 563 of SEQ ID NO: 1563862
cucccuaaugaauggugaa

SEQ ID NO: 1837550 - RNA, 19 nt, Artificial Sequence
  Description of Artificial Sequence: Synthetic oligonucleotide
  Antisense strand to SEQ ID NO: 1837549
uucaccauucauuagggag

SEQ ID NO: 1837551 - RNA, 19 nt, Artificial Sequence
  Description of Artificial Sequence: Synthetic oligonucleotide
  Sense strand starting at position 602 of SEQ ID NO: 1563862
cugacacagucuuuggaga

SEQ ID NO: 1837552 - RNA, 19 nt, Artificial Sequence
  Description of Artificial Sequence: Synthetic oligonucleotide
  Antisense strand to SEQ ID NO: 1837551
ucuccaaagacugugucag

SEQ ID NO: 1837553 - RNA, 19 nt, Artificial Sequence
  Description of Artificial Sequence: Synthetic oligonucleotide
  Sense strand starting at position 895 of SEQ ID NO: 1563862
uggcgaugggacuaguuga

SEQ ID NO: 1837554 - RNA, 19 nt, Artificial Sequence
  Description of Artificial Sequence: Synthetic oligonucleotide
  Antisense strand to SEQ ID NO: 1837553
ucaacuagucccaucgcca

SEQ ID NO: 1837555 - RNA, 19 nt, Artificial Sequence
  Description of Artificial Sequence: Synthetic oligonucleotide
  Sense strand starting at position 982 of SEQ ID NO: 1563862
gaugacaucuuguugaagu

SEQ ID NO: 1837556 - RNA, 19 nt, Artificial Sequence
  Description of Artificial Sequence: Synthetic oligonucleotide
  Antisense strand to SEQ ID NO: 1837555
acuucaacaagaugucauc

SEQ ID NO: 1837557 - RNA, 19 nt, Artificial Sequence
  Description of Artificial Sequence: Synthetic oligonucleotide
  Sense strand starting at position 984 of SEQ ID NO: 1563862
ugacaucuuguugaaguca

SEQ ID NO: 1837558 - RNA, 19 nt, Artificial Sequence
  Description of Artificial Sequence: Synthetic oligonucleotide
  Antisense strand to SEQ ID NO: 1837557
ugacuucaacaagauguca

SEQ ID NO: 1837559 - RNA, 19 nt, Artificial Sequence
  Description of Artificial Sequence: Synthetic oligonucleotide
  Sense strand starting at position 1126 of SEQ ID NO: 1563862
gagguaagccuuugggaga

SEQ ID NO: 1837560 - RNA, 19 nt, Artificial Sequence
  Description of Artificial Sequence: Synthetic oligonucleotide
  Antisense strand to SEQ ID NO: 1837559
ucucccaaaggcuuaccuc

SEQ ID NO: 1837561 - RNA, 19 nt, Artificial Sequence
  Description of Artificial Sequence: Synthetic oligonucleotide
  Sense strand starting at position 1147 of SEQ ID NO: 1563862
caaggacugcgacaguaaa

SEQ ID NO: 1837562 - RNA, 19 nt, Artificial Sequence
  Description of Artificial Sequence: Synthetic oligonucleotide
  Antisense strand to SEQ ID NO: 1837561
uuuacugucgcaguccuug

SEQ ID NO: 1837563 - RNA, 19 nt, Artificial Sequence
  Description of Artificial Sequence: Synthetic oligonucleotide
  Sense strand starting at position 2041 of SEQ ID NO: 1563862
cauugugaggacuagccaa

SEQ ID NO: 1837564 - RNA, 19 nt, Artificial Sequence
  Description of Artificial Sequence: Synthetic oligonucleotide
  Antisense strand to SEQ ID NO: 1837563
uuggcuaguccucacaaug

SEQ ID NO: 1837565 - RNA, 19 nt, Artificial Sequence
  Description of Artificial Sequence: Synthetic oligonucleotide
  Sense strand starting at position 2172 of SEQ ID NO: 1563862
cugggugcgcuuguaucau

SEQ ID NO: 1837566 - RNA, 19 nt, Artificial Sequence
  Description of Artificial Sequence: Synthetic oligonucleotide
  Antisense strand to SEQ ID NO: 1837565
augauacaagcgcacccag

SEQ ID NO: 1837567 - RNA, 19 nt, Artificial Sequence
  Description of Artificial Sequence: Synthetic oligonucleotide
  Sense strand starting at position 2181 of SEQ ID NO: 1563862
cuuguaucaugaguuuacu

SEQ ID NO: 1837568 - RNA, 19 nt, Artificial Sequence
  Description of Artificial Sequence: Synthetic oligonucleotide
  Antisense strand to SEQ ID NO: 1837567
aguaaacucaugauacaag

SEQ ID NO: 1837569 - RNA, 19 nt, Artificial Sequence
  Description of Artificial Sequence: Synthetic oligonucleotide
  Sense strand starting at position 2184 of SEQ ID NO: 1563862
guaucaugaguuuacuagu

SEQ ID NO: 1837570 - RNA, 19 nt, Artificial Sequence
  Description of Artificial Sequence: Synthetic oligonucleotide
  Antisense strand to SEQ ID NO: 1837569
acuaguaaacucaugauac

SEQ ID NO: 1837571 - RNA, 19 nt, Artificial Sequence
  Description of Artificial Sequence: Synthetic oligonucleotide
  Sense strand starting at position 2190 of SEQ ID NO: 1563862
ugaguuuacuaguccuuga

SEQ ID NO: 1837572 - RNA, 19 nt, Artificial Sequence
  Description of Artificial Sequence: Synthetic oligonucleotide
  Antisense strand to SEQ ID NO: 1837571
ucaaggacuaguaaacuca

SEQ ID NO: 1837573 - RNA, 19 nt, Artificial Sequence
  Description of Artificial Sequence: Synthetic oligonucleotide
  Sense strand starting at position 2193 of SEQ ID NO: 1563862
guuuacuaguccuugaaac

SEQ ID NO: 1837574 - RNA, 19 nt, Artificial Sequence
  Description of Artificial Sequence: Synthetic oligonucleotide
  Antisense strand to SEQ ID NO: 1837573
guuucaaggacuaguaaac

SEQ ID NO: 1837575 - RNA, 19 nt, Artificial Sequence
  Description of Artificial Sequence: Synthetic oligonucleotide
  Sense strand starting at position 2302 of SEQ ID NO: 1563862
ugaguaggcuucccuaaac

SEQ ID NO: 1837576 - RNA, 19 nt, Artificial Sequence
  Description of Artificial Sequence: Synthetic oligonucleotide
  Antisense strand to SEQ ID NO: 1837575
guuuagggaagccuacuca

SEQ ID NO: 1837577 - RNA, 19 nt, Artificial Sequence
  Description of Artificial Sequence: Synthetic oligonucleotide
  Sense strand starting at position 2349 of SEQ ID NO: 1563862
ucucaaaguugggugaaau

SEQ ID NO: 1837578 - RNA, 19 nt, Artificial Sequence
  Description of Artificial Sequence: Synthetic oligonucleotide
  Antisense strand to SEQ ID NO: 1837577
auuucacccaacuuugaga

SEQ ID NO: 1837579 - RNA, 19 nt, Artificial Sequence
  Description of Artificial Sequence: Synthetic oligonucleotide
  Sense strand starting at position 2350 of SEQ ID NO: 1563862
cucaaaguugggugaaaua

SEQ ID NO: 1837580 - RNA, 19 nt, Artificial Sequence
  Description of Artificial Sequence: Synthetic oligonucleotide
  Antisense strand to SEQ ID NO: 1837579
uauuucacccaacuuugag

SEQ ID NO: 1837581 - RNA, 19 nt, Artificial Sequence
  Description of Artificial Sequence: Synthetic oligonucleotide
  Sense strand starting at position 2360 of SEQ ID NO: 1563862
ggugaaauaucuuuaagau

SEQ ID NO: 1837582 - RNA, 19 nt, Artificial Sequence
  Description of Artificial Sequence: Synthetic oligonucleotide
  Antisense strand to SEQ ID NO: 1837581
aucuuaaagauauuucacc

SEQ ID NO: 1837583 - RNA, 19 nt, Artificial Sequence
  Description of Artificial Sequence: Synthetic oligonucleotide
  Sense strand starting at position 2369 of SEQ ID NO: 1563862
ucuuuaagauguuugugag

SEQ ID NO: 1837584 - RNA, 19 nt, Artificial Sequence
  Description of Artificial Sequence: Synthetic oligonucleotide
  Antisense strand to SEQ ID NO: 1837583
cucacaaacaucuuaaaga

SEQ ID NO: 1837585 - RNA, 19 nt, Artificial Sequence
  Description of Artificial Sequence: Synthetic oligonucleotide
  Sense strand starting at position 2403 of SEQ ID NO: 1563862
agaggacuuauuggcauca

SEQ ID NO: 1837586 - RNA, 19 nt, Artificial Sequence
  Description of Artificial Sequence: Synthetic oligonucleotide
  Antisense strand to SEQ ID NO: 1837585
ugaugccaauaaguccucu

SEQ ID NO: 1837587 - RNA, 19 nt, Artificial Sequence
  Description of Artificial Sequence: Synthetic oligonucleotide
  Sense strand starting at position 2404 of SEQ ID NO: 1563862
gaggacuuauuggcaucaa

SEQ ID NO: 1837588 - RNA, 19 nt, Artificial Sequence
  Description of Artificial Sequence: Synthetic oligonucleotide
  Antisense strand to SEQ ID NO: 1837587
uugaugccaauaaguccuc

SEQ ID NO: 1837589 - RNA, 19 nt, Artificial Sequence
  Description of Artificial Sequence: Synthetic oligonucleotide
  Sense strand starting at position 2748 of SEQ ID NO: 1563862
uuacauauguuagcaauga

SEQ ID NO: 1837590 - RNA, 19 nt, Artificial Sequence
  Description of Artificial Sequence: Synthetic oligonucleotide
  Antisense strand to SEQ ID NO: 1837589
ucauugcuaacauauguaa

SEQ ID NO: 1837591 - RNA, 19 nt, Artificial Sequence
  Description of Artificial Sequence: Synthetic oligonucleotide
  Sense strand starting at position 2763 of SEQ ID NO: 1563862
augauagcauaaguuacau

SEQ ID NO: 1837592 - RNA, 19 nt, Artificial Sequence
  Description of Artificial Sequence: Synthetic oligonucleotide
  Antisense strand to SEQ ID NO: 1837591
auguaacuuaugcuaucau

SEQ ID NO: 1837593 - RNA, 19 nt, Artificial Sequence
  Description of Artificial Sequence: Synthetic oligonucleotide
  Sense strand starting at position 3182 of SEQ ID NO: 1563862
aaacguggucaauaagugu

SEQ ID NO: 1837594 - RNA, 19 nt, Artificial Sequence
  Description of Artificial Sequence: Synthetic oligonucleotide
  Antisense strand to SEQ ID NO: 1837593
acacuuauugaccacguuu

SEQ ID NO: 1837595 - RNA, 19 nt, Artificial Sequence
  Description of Artificial Sequence: Synthetic oligonucleotide
  Sense strand starting at position 3202 of SEQ ID NO: 1563862
ugcgaugauguagauuaau

SEQ ID NO: 1837596 - RNA, 19 nt, Artificial Sequence
  Description of Artificial Sequence: Synthetic oligonucleotide
  Antisense strand to SEQ ID NO: 1837595
auuaaucuacaucaucgca

SEQ ID NO: 1837597 - RNA, 19 nt, Artificial Sequence
  Description of Artificial Sequence: Synthetic oligonucleotide
  Sense strand starting at position 3548 of SEQ ID NO: 1563862
acaguuuggcauuauaacu

SEQ ID NO: 1837598 - RNA, 19 nt, Artificial Sequence
  Description of Artificial Sequence: Synthetic oligonucleotide
  Antisense strand to SEQ ID NO: 1837597
aguuauaaugccaaacugu

SEQ ID NO: 1837599 - RNA, 19 nt, Artificial Sequence
  Description of Artificial Sequence: Synthetic oligonucleotide
  Sense strand starting at position 3596 of SEQ ID NO: 1563862
agaccaaugcuuugcauga

SEQ ID NO: 1837600 - RNA, 19 nt, Artificial Sequence
  Description of Artificial Sequence: Synthetic oligonucleotide
  Antisense strand to SEQ ID NO: 1837599
ucaugcaaagcauuggucu

SEQ ID NO: 1837601 - RNA, 19 nt, Artificial Sequence
  Description of Artificial Sequence: Synthetic oligonucleotide
  Sense strand starting at position 3606 of SEQ ID NO: 1563862
uuugcaugauauccaggau

SEQ ID NO: 1837602 - RNA, 19 nt, Artificial Sequence
  Description of Artificial Sequence: Synthetic oligonucleotide
  Antisense strand to SEQ ID NO: 1837601
auccuggauaucaugcaaa

SEQ ID NO: 1837603 - RNA, 19 nt, Artificial Sequence
  Description of Artificial Sequence: Synthetic oligonucleotide
  Sense strand starting at position 3609 of SEQ ID NO: 1563862
gcaugauauccaggauggu

SEQ ID NO: 1837604 - RNA, 19 nt, Artificial Sequence
  Description of Artificial Sequence: Synthetic oligonucleotide
  Antisense strand to SEQ ID NO: 1837603
accauccuggauaucaugc

SEQ ID NO: 1837605 - RNA, 19 nt, Artificial Sequence
  Description of Artificial Sequence: Synthetic oligonucleotide
  Sense strand starting at position 3943 of SEQ ID NO: 1563862
gaccacaugcaauguauga

SEQ ID NO: 1837606 - RNA, 19 nt, Artificial Sequence
  Description of Artificial Sequence: Synthetic oligonucleotide
  Antisense strand to SEQ ID NO: 1837605
ucauacauugcaugugguc

SEQ ID NO: 1837607 - RNA, 19 nt, Artificial Sequence
  Description of Artificial Sequence: Synthetic oligonucleotide
  Sense strand starting at position 3954 of SEQ ID NO: 1563862
auguaugauccuugauuac

SEQ ID NO: 1837608 - RNA, 19 nt, Artificial Sequence
  Description of Artificial Sequence: Synthetic oligonucleotide
  Antisense strand to SEQ ID NO: 1837607
guaaucaaggaucauacau

SEQ ID NO: 1837609 - RNA, 19 nt, Artificial Sequence
  Description of Artificial Sequence: Synthetic oligonucleotide
  Sense strand starting at position 149 of SEQ ID NO: 1563863
gcucuuaucgcuguguaca

SEQ ID NO: 1837610 - RNA, 19 nt, Artificial Sequence
  Description of Artificial Sequence: Synthetic oligonucleotide
  Antisense strand to SEQ ID NO: 1837609
uguacacagcgauaagagc

SEQ ID NO: 1837611 - RNA, 19 nt, Artificial Sequence
  Description of Artificial Sequence: Synthetic oligonucleotide
  Sense strand starting at position 160 of SEQ ID NO: 1563863
uguguacaucgauaaauug

SEQ ID NO: 1837612 - RNA, 19 nt, Artificial Sequence
  Description of Artificial Sequence: Synthetic oligonucleotide
  Antisense strand to SEQ ID NO: 1837611
caauuuaucgauguacaca

SEQ ID NO: 1837613 - RNA, 19 nt, Artificial Sequence
  Description of Artificial Sequence: Synthetic oligonucleotide
  Sense strand starting at position 212 of SEQ ID NO: 1563863
ccuguauaacggcagaacu

SEQ ID NO: 1837614 - RNA, 19 nt, Artificial Sequence
  Description of Artificial Sequence: Synthetic oligonucleotide
  Antisense strand to SEQ ID NO: 1837613
aguucugccguuauacagg

SEQ ID NO: 1837615 - RNA, 19 nt, Artificial Sequence
  Description of Artificial Sequence: Synthetic oligonucleotide
  Sense strand starting at position 540 of SEQ ID NO: 1563863
aggaauaugugaccauuac

SEQ ID NO: 1837616 - RNA, 19 nt, Artificial Sequence
  Description of Artificial Sequence: Synthetic oligonucleotide
  Antisense strand to SEQ ID NO: 1837615
guaauggucacauauuccu

SEQ ID NO: 1837617 - RNA, 19 nt, Artificial Sequence
  Description of Artificial Sequence: Synthetic oligonucleotide
  Sense strand starting at position 550 of SEQ ID NO: 1563863
gaccauuacggcugaaaca

SEQ ID NO: 1837618 - RNA, 19 nt, Artificial Sequence
  Description of Artificial Sequence: Synthetic oligonucleotide
  Antisense strand to SEQ ID NO: 1837617
uguuucagccguaaugguc

SEQ ID NO: 1837619 - RNA, 19 nt, Artificial Sequence
  Description of Artificial Sequence: Synthetic oligonucleotide
  Sense strand starting at position 551 of SEQ ID NO: 1563863
accauuacggcugaaacau

SEQ ID NO: 1837620 - RNA, 19 nt, Artificial Sequence
  Description of Artificial Sequence: Synthetic oligonucleotide
  Antisense strand to SEQ ID NO: 1837619
auguuucagccguaauggu

SEQ ID NO: 1837621 - RNA, 19 nt, Artificial Sequence
  Description of Artificial Sequence: Synthetic oligonucleotide
  Sense strand starting at position 561 of SEQ ID NO: 1563863
cugaaacauccugguaauu

SEQ ID NO: 1837622 - RNA, 19 nt, Artificial Sequence
  Description of Artificial Sequence: Synthetic oligonucleotide
  Antisense strand to SEQ ID NO: 1837621
aauuaccaggauguuucag

SEQ ID NO: 1837623 - RNA, 19 nt, Artificial Sequence
  Description of Artificial Sequence: Synthetic oligonucleotide
  Sense strand starting at position 626 of SEQ ID NO: 1563863
cagaaacucuggucugauu

SEQ ID NO: 1837624 - RNA, 19 nt, Artificial Sequence
  Description of Artificial Sequence: Synthetic oligonucleotide
  Antisense strand to SEQ ID NO: 1837623
aaucagaccagaguuucug

SEQ ID NO: 1837625 - RNA, 19 nt, Artificial Sequence
  Description of Artificial Sequence: Synthetic oligonucleotide
  Sense strand starting at position 710 of SEQ ID NO: 1563863
gcagcagauccauaucuaa

SEQ ID NO: 1837626 - RNA, 19 nt, Artificial Sequence
  Description of Artificial Sequence: Synthetic oligonucleotide
  Antisense strand to SEQ ID NO: 1837625
uuagauauggaucugcugc

SEQ ID NO: 1837627 - RNA, 19 nt, Artificial Sequence
  Description of Artificial Sequence: Synthetic oligonucleotide
  Sense strand starting at position 757 of SEQ ID NO: 1563863
cugcauuuccagggucagu

SEQ ID NO: 1837628 - RNA, 19 nt, Artificial Sequence
  Description of Artificial Sequence: Synthetic oligonucleotide
  Antisense strand to SEQ ID NO: 1837627
acugacccuggaaaugcag

SEQ ID NO: 1837629 - RNA, 19 nt, Artificial Sequence
  Description of Artificial Sequence: Synthetic oligonucleotide
  Sense strand starting at position 817 of SEQ ID NO: 1563863
cugaauuucucugaacaag

SEQ ID NO: 1837630 - RNA, 19 nt, Artificial Sequence
  Description of Artificial Sequence: Synthetic oligonucleotide
  Antisense strand to SEQ ID NO: 1837629
cuuguucagagaaauucag

SEQ ID NO: 1837631 - RNA, 19 nt, Artificial Sequence
  Description of Artificial Sequence: Synthetic oligonucleotide
  Sense strand starting at position 842 of SEQ ID NO: 1563863
gucaaauucccugaagcua

SEQ ID NO: 1837632 - RNA, 19 nt, Artificial Sequence
  Description of Artificial Sequence: Synthetic oligonucleotide
  Antisense strand to SEQ ID NO: 1837631
uagcuucagggaauuugac

SEQ ID NO: 1837633 - RNA, 19 nt, Artificial Sequence
  Description of Artificial Sequence: Synthetic oligonucleotide
  Sense strand starting at position 969 of SEQ ID NO: 1563863
ccacgcuuagcuuuguuua

SEQ ID NO: 1837634 - RNA, 19 nt, Artificial Sequence
  Description of Artificial Sequence: Synthetic oligonucleotide
  Antisense strand to SEQ ID NO: 1837633
uaaacaaagcuaagcgugg

SEQ ID NO: 1837635 - RNA, 19 nt, Artificial Sequence
  Description of Artificial Sequence: Synthetic oligonucleotide
  Sense strand starting at position 1010 of SEQ ID NO: 1563863
gaucaugagcuugaucuuu

SEQ ID NO: 1837636 - RNA, 19 nt, Artificial Sequence
  Description of Artificial Sequence: Synthetic oligonucleotide
  Antisense strand to SEQ ID NO: 1837635
aaagaucaagcucaugauc

SEQ ID NO: 1837637 - RNA, 19 nt, Artificial Sequence
  Description of Artificial Sequence: Synthetic oligonucleotide
  Sense strand starting at position 1169 of SEQ ID NO: 1563863
caucgaauaccguacauca

SEQ ID NO: 1837638 - RNA, 19 nt, Artificial Sequence
  Description of Artificial Sequence: Synthetic oligonucleotide
  Antisense strand to SEQ ID NO: 1837637
ugauguacgguauucgaug

SEQ ID NO: 1837639 - RNA, 19 nt, Artificial Sequence
  Description of Artificial Sequence: Synthetic oligonucleotide
  Sense strand starting at position 1205 of SEQ ID NO: 1563863
cugaaugacuggucaauua

SEQ ID NO: 1837640 - RNA, 19 nt, Artificial Sequence
  Description of Artificial Sequence: Synthetic oligonucleotide
  Antisense strand to SEQ ID NO: 1837639
uaauugaccagucauucag

SEQ ID NO: 1837641 - RNA, 19 nt, Artificial Sequence
  Description of Artificial Sequence: Synthetic oligonucleotide
  Sense strand starting at position 1694 of SEQ ID NO: 1563863
uuaggauccucucuagaga

SEQ ID NO: 1837642 - RNA, 19 nt, Artificial Sequence
  Description of Artificial Sequence: Synthetic oligonucleotide
  Antisense strand to SEQ ID NO: 1837641
ucucuagagaggauccuaa

SEQ ID NO: 1837643 - RNA, 19 nt, Artificial Sequence
  Description of Artificial Sequence: Synthetic oligonucleotide
  Sense strand starting at position 1850 of SEQ ID NO: 1563863
ccuugauaaguugagcuca

SEQ ID NO: 1837644 - RNA, 19 nt, Artificial Sequence
  Description of Artificial Sequence: Synthetic oligonucleotide
  Antisense strand to SEQ ID NO: 1837643
ugagcucaacuuaucaagg

SEQ ID NO: 1837645 - RNA, 19 nt, Artificial Sequence
  Description of Artificial Sequence: Synthetic oligonucleotide
  Sense strand starting at position 1852 of SEQ ID NO: 1563863
uugauaaguugagcucaau

SEQ ID NO: 1837646 - RNA, 19 nt, Artificial Sequence
  Description of Artificial Sequence: Synthetic oligonucleotide
  Antisense strand to SEQ ID NO: 1837645
auugagcucaacuuaucaa

SEQ ID NO: 1837647 - RNA, 19 nt, Artificial Sequence
  Description of Artificial Sequence: Synthetic oligonucleotide
  Sense strand starting at position 2183 of SEQ ID NO: 1563863
cccuuuaggcuaggaugaa

SEQ ID NO: 1837648 - RNA, 19 nt, Artificial Sequence
  Description of Artificial Sequence: Synthetic oligonucleotide
  Antisense strand to SEQ ID NO: 1837647
uucauccuagccuaaaggg

SEQ ID NO: 1837649 - RNA, 19 nt, Artificial Sequence
  Description of Artificial Sequence: Synthetic oligonucleotide
  Sense strand starting at position 2318 of SEQ ID NO: 1563863
uuuauuuaugugugcagag

SEQ ID NO: 1837650 - RNA, 19 nt, Artificial Sequence
  Description of Artificial Sequence: Synthetic oligonucleotide
  Antisense strand to SEQ ID NO: 1837649
cucugcacacauaaauaaa

SEQ ID NO: 1837651 - RNA, 19 nt, Artificial Sequence
  Description of Artificial Sequence: Synthetic oligonucleotide
  Sense strand starting at position 2375 of SEQ ID NO: 1563863
cugucuuuggaauacucaa

SEQ ID NO: 1837652 - RNA, 19 nt, Artificial Sequence
  Description of Artificial Sequence: Synthetic oligonucleotide
  Antisense strand to SEQ ID NO: 1837651
uugaguauuccaaagacag

SEQ ID NO: 1837653 - RNA, 19 nt, Artificial Sequence
  Description of Artificial Sequence: Synthetic oligonucleotide
  Sense strand starting at position 2413 of SEQ ID NO: 1563863
auuaaagugcagggaaaua

SEQ ID NO: 1837654 - RNA, 19 nt, Artificial Sequence
  Description of Artificial Sequence: Synthetic oligonucleotide
  Antisense strand to SEQ ID NO: 1837653
uauuucccugcacuuuaau

SEQ ID NO: 1837655 - RNA, 19 nt, Artificial Sequence
  Description of Artificial Sequence: Synthetic oligonucleotide
  Sense strand starting at position 2425 of SEQ ID NO: 1563863
ggaaauaacuacuuagcac

SEQ ID NO: 1837656 - RNA, 19 nt, Artificial Sequence
  Description of Artificial Sequence: Synthetic oligonucleotide
  Antisense strand to SEQ ID NO: 1837655
gugcuaaguaguuauuucc

SEQ ID NO: 1837657 - RNA, 19 nt, Artificial Sequence
  Description of Artificial Sequence: Synthetic oligonucleotide
  Sense strand starting at position 2458 of SEQ ID NO: 1563863
acacauaagcgcuauaaag

SEQ ID NO: 1837658 - RNA, 19 nt, Artificial Sequence
  Description of Artificial Sequence: Synthetic oligonucleotide
  Antisense strand to SEQ ID NO: 1837657
cuuuauagcgcuuaugugu

SEQ ID NO: 1837659 - RNA, 19 nt, Artificial Sequence
  Description of Artificial Sequence: Synthetic oligonucleotide
  Sense strand starting at position 2494 of SEQ ID NO: 1563863
gcagaugaauagccauuau

SEQ ID NO: 1837660 - RNA, 19 nt, Artificial Sequence
  Description of Artificial Sequence: Synthetic oligonucleotide
  Antisense strand to SEQ ID NO: 1837659
auaauggcuauucaucugc

SEQ ID NO: 1837661 - RNA, 19 nt, Artificial Sequence
  Description of Artificial Sequence: Synthetic oligonucleotide
  Sense strand starting at position 2570 of SEQ ID NO: 1563863
aguagagagguauggcuaa

SEQ ID NO: 1837662 - RNA, 19 nt, Artificial Sequence
  Description of Artificial Sequence: Synthetic oligonucleotide
  Antisense strand to SEQ ID NO: 1837661
uuagccauaccucucuacu

SEQ ID NO: 1837663 - RNA, 19 nt, Artificial Sequence
  Description of Artificial Sequence: Synthetic oligonucleotide
  Sense strand starting at position 2736 of SEQ ID NO: 1563863
gauuaagaauuaguaaggu

SEQ ID NO: 1837664 - RNA, 19 nt, Artificial Sequence
  Description of Artificial Sequence: Synthetic oligonucleotide
  Antisense strand to SEQ ID NO: 1837663
accuuacuaauucuuaauc

SEQ ID NO: 1837665 - RNA, 19 nt, Artificial Sequence
  Description of Artificial Sequence: Synthetic oligonucleotide
  Sense strand starting at position 2792 of SEQ ID NO: 1563863
uauguuuaugggcauauca

SEQ ID NO: 1837666 - RNA, 19 nt, Artificial Sequence
  Description of Artificial Sequence: Synthetic oligonucleotide
  Antisense strand to SEQ ID NO: 1837665
ugauaugcccauaaacaua

SEQ ID NO: 1837667 - RNA, 19 nt, Artificial Sequence
  Description of Artificial Sequence: Synthetic oligonucleotide
  Sense strand starting at position 2794 of SEQ ID NO: 1563863
uguuuaugggcauaucaua

SEQ ID NO: 1837668 - RNA, 19 nt, Artificial Sequence
  Description of Artificial Sequence: Synthetic oligonucleotide
  Antisense strand to SEQ ID NO: 1837667
uaugauaugcccauaaaca

SEQ ID NO: 1837669 - RNA, 19 nt, Artificial Sequence
  Description of Artificial Sequence: Synthetic oligonucleotide
  Sense strand starting at position 2873 of SEQ ID NO: 1563863
gaguguguaccacagacaa

SEQ ID NO: 1837670 - RNA, 19 nt, Artificial Sequence
  Description of Artificial Sequence: Synthetic oligonucleotide
  Antisense strand to SEQ ID NO: 1837669
uugucugugguacacacuc

SEQ ID NO: 1837671 - RNA, 19 nt, Artificial Sequence
  Description of Artificial Sequence: Synthetic oligonucleotide
  Sense strand starting at position 2875 of SEQ ID NO: 1563863
guguguaccacagacaacu

SEQ ID NO: 1837672 - RNA, 19 nt, Artificial Sequence
  Description of Artificial Sequence: Synthetic oligonucleotide
  Antisense strand to SEQ ID NO: 1837671
aguugucugugguacacac

SEQ ID NO: 1837673 - RNA, 19 nt, Artificial Sequence
  Description of Artificial Sequence: Synthetic oligonucleotide
  Sense strand starting at position 2929 of SEQ ID NO: 1563863
uggucaaucggguauaaga

SEQ ID NO: 1837674 - RNA, 19 nt, Artificial Sequence
  Description of Artificial Sequence: Synthetic oligonucleotide
  Antisense strand to SEQ ID NO: 1837673
ucuuauacccgauugacca

SEQ ID NO: 1837675 - RNA, 19 nt, Artificial Sequence
  Description of Artificial Sequence: Synthetic oligonucleotide
  Sense strand starting at position 2938 of SEQ ID NO: 1563863
ggguauaagaaaugucacu

SEQ ID NO: 1837676 - RNA, 19 nt, Artificial Sequence
  Description of Artificial Sequence: Synthetic oligonucleotide
  Antisense strand to SEQ ID NO: 1837675
agugacauuucuuauaccc

SEQ ID NO: 1837677 - RNA, 19 nt, Artificial Sequence
  Description of Artificial Sequence: Synthetic oligonucleotide
  Sense strand starting at position 3337 of SEQ ID NO: 1563863
agcuaacaagauggauauu

SEQ ID NO: 1837678 - RNA, 19 nt, Artificial Sequence
  Description of Artificial Sequence: Synthetic oligonucleotide
  Antisense strand to SEQ ID NO: 1837677
aauauccaucuuguuagcu

SEQ ID NO: 1837679 - RNA, 19 nt, Artificial Sequence
  Description of Artificial Sequence: Synthetic oligonucleotide
  Sense strand starting at position 3633 of SEQ ID NO: 1563863
ucagaagguauugggcaau

SEQ ID NO: 1837680 - RNA, 19 nt, Artificial Sequence
  Description of Artificial Sequence: Synthetic oligonucleotide
  Antisense strand to SEQ ID NO: 1837679
auugcccaauaccuucuga

SEQ ID NO: 1837681 - RNA, 19 nt, Artificial Sequence
  Description of Artificial Sequence: Synthetic oligonucleotide
  Sense strand starting at position 3867 of SEQ ID NO: 1563863
ugcugcucagaauaaauua

SEQ ID NO: 1837682 - RNA, 19 nt, Artificial Sequence
  Description of Artificial Sequence: Synthetic oligonucleotide
  Antisense strand to SEQ ID NO: 1837681
uaauuuauucugagcagca

SEQ ID NO: 1837683 - RNA, 19 nt, Artificial Sequence
  Description of Artificial Sequence: Synthetic oligonucleotide
  Sense strand starting at position 3942 of SEQ ID NO: 1563863
gguagauauggcuauugau

SEQ ID NO: 1837684 - RNA, 19 nt, Artificial Sequence
  Description of Artificial Sequence: Synthetic oligonucleotide
  Antisense strand to SEQ ID NO: 1837683
aucaauagccauaucuacc

SEQ ID NO: 1837685 - RNA, 19 nt, Artificial Sequence
  Description of Artificial Sequence: Synthetic oligonucleotide
  Sense strand starting at position 3975 of SEQ ID NO: 1563863
ugaaauuagcgguacaaag

SEQ ID NO: 1837686 - RNA, 19 nt, Artificial Sequence
  Description of Artificial Sequence: Synthetic oligonucleotide
  Antisense strand to SEQ ID NO: 1837685
cuuuguaccgcuaauuuca

SEQ ID NO: 1837687 - RNA, 19 nt, Artificial Sequence
  Description of Artificial Sequence: Synthetic oligonucleotide
  Sense strand starting at position 3977 of SEQ ID NO: 1563863
aaauuagcgguacaaagau

SEQ ID NO: 1837688 - RNA, 19 nt, Artificial Sequence
  Description of Artificial Sequence: Synthetic oligonucleotide
  Antisense strand to SEQ ID NO: 1837687
aucuuuguaccgcuaauuu

SEQ ID NO: 1837689 - RNA, 19 nt, Artificial Sequence
  Description of Artificial Sequence: Synthetic oligonucleotide
  Sense strand starting at position 116 of SEQ ID NO: 1563864
gcucuuaucgcuguguaca

SEQ ID NO: 1837690 - RNA, 19 nt, Artificial Sequence
  Description of Artificial Sequence: Synthetic oligonucleotide
  Antisense strand to SEQ ID NO: 1837689
uguacacagcgauaagagc

SEQ ID NO: 1837691 - RNA, 19 nt, Artificial Sequence
  Description of Artificial Sequence: Synthetic oligonucleotide
  Sense strand starting at position 127 of SEQ ID NO: 1563864
uguguacaucgauaaauug

SEQ ID NO: 1837692 - RNA, 19 nt, Artificial Sequence
  Description of Artificial Sequence: Synthetic oligonucleotide
  Antisense strand to SEQ ID NO: 1837691
caauuuaucgauguacaca

SEQ ID NO: 1837693 - RNA, 19 nt, Artificial Sequence
  Description of Artificial Sequence: Synthetic oligonucleotide
  Sense strand starting at position 179 of SEQ ID NO: 1563864
ccuguauaacggcagaacu

SEQ ID NO: 1837694 - RNA, 19 nt, Artificial Sequence
  Description of Artificial Sequence: Synthetic oligonucleotide
  Antisense strand to SEQ ID NO: 1837693
aguucugccguuauacagg

SEQ ID NO: 1837695 - RNA, 19 nt, Artificial Sequence
  Description of Artificial Sequence: Synthetic oligonucleotide
  Sense strand starting at position 507 of SEQ ID NO: 1563864
aggaauaugugaccauuac

SEQ ID NO: 1837696 - RNA, 19 nt, Artificial Sequence
  Description of Artificial Sequence: Synthetic oligonucleotide
  Antisense strand to SEQ ID NO: 1837695
guaauggucacauauuccu

SEQ ID NO: 1837697 - RNA, 19 nt, Artificial Sequence
  Description of Artificial Sequence: Synthetic oligonucleotide
  Sense strand starting at position 517 of SEQ ID NO: 1563864
gaccauuacggcugaaaca

SEQ ID NO: 1837698 - RNA, 19 nt, Artificial Sequence
  Description of Artificial Sequence: Synthetic oligonucleotide
  Antisense strand to SEQ ID NO: 1837697
uguuucagccguaaugguc

SEQ ID NO: 1837699 - RNA, 19 nt, Artificial Sequence
  Description of Artificial Sequence: Synthetic oligonucleotide
  Sense strand starting at position 518 of SEQ ID NO: 1563864
accauuacggcugaaacau

SEQ ID NO: 1837700 - RNA, 19 nt, Artificial Sequence
  Description of Artificial Sequence: Synthetic oligonucleotide
  Antisense strand to SEQ ID NO: 1837699
auguuucagccguaauggu

SEQ ID NO: 1837701 - RNA, 19 nt, Artificial Sequence
  Description of Artificial Sequence: Synthetic oligonucleotide
  Sense strand starting at position 528 of SEQ ID NO: 1563864
cugaaacauccugguaauu

SEQ ID NO: 1837702 - RNA, 19 nt, Artificial Sequence
  Description of Artificial Sequence: Synthetic oligonucleotide
  Antisense strand to SEQ ID NO: 1837701
aauuaccaggauguuucag

SEQ ID NO: 1837703 - RNA, 19 nt, Artificial Sequence
  Description of Artificial Sequence: Synthetic oligonucleotide
  Sense strand starting at position 593 of SEQ ID NO: 1563864
cagaaacucuggucugauu

SEQ ID NO: 1837704 - RNA, 19 nt, Artificial Sequence
  Description of Artificial Sequence: Synthetic oligonucleotide
  Antisense strand to SEQ ID NO: 1837703
aaucagaccagaguuucug

SEQ ID NO: 1837705 - RNA, 19 nt, Artificial Sequence
  Description of Artificial Sequence: Synthetic oligonucleotide
  Sense strand starting at position 677 of SEQ ID NO: 1563864
gcagcagauccauaucuaa

SEQ ID NO: 1837706 - RNA, 19 nt, Artificial Sequence
  Description of Artificial Sequence: Synthetic oligonucleotide
  Antisense strand to SEQ ID NO: 1837705
uuagauauggaucugcugc

SEQ ID NO: 1837707 - RNA, 19 nt, Artificial Sequence
  Description of Artificial Sequence: Synthetic oligonucleotide
  Sense strand starting at position 724 of SEQ ID NO: 1563864
cugcauuuccagggucagu

SEQ ID NO: 1837708 - RNA, 19 nt, Artificial Sequence
  Description of Artificial Sequence: Synthetic oligonucleotide
  Antisense strand to SEQ ID NO: 1837707
acugacccuggaaaugcag

SEQ ID NO: 1837709 - RNA, 19 nt, Artificial Sequence
  Description of Artificial Sequence: Synthetic oligonucleotide
  Sense strand starting at position 784 of SEQ ID NO: 1563864
cugaauuucucugaacaag

SEQ ID NO: 1837710 - RNA, 19 nt, Artificial Sequence
  Description of Artificial Sequence: Synthetic oligonucleotide
  Antisense strand to SEQ ID NO: 1837709
cuuguucagagaaauucag

SEQ ID NO: 1837711 - RNA, 19 nt, Artificial Sequence
  Description of Artificial Sequence: Synthetic oligonucleotide
  Sense strand starting at position 809 of SEQ ID NO: 1563864
gucaaauucccugaagcua

SEQ ID NO: 1837712 - RNA, 19 nt, Artificial Sequence
  Description of Artificial Sequence: Synthetic oligonucleotide
  Antisense strand to SEQ ID NO: 1837711
uagcuucagggaauuugac

SEQ ID NO: 1837713 - RNA, 19 nt, Artificial Sequence
  Description of Artificial Sequence: Synthetic oligonucleotide
  Sense strand starting at position 936 of SEQ ID NO: 1563864
ccacgcuuagcuuuguuua

SEQ ID NO: 1837714 - RNA, 19 nt, Artificial Sequence
  Description of Artificial Sequence: Synthetic oligonucleotide
  Antisense strand to SEQ ID NO: 1837713
uaaacaaagcuaagcgugg

SEQ ID NO: 1837715 - RNA, 19 nt, Artificial Sequence
  Description of Artificial Sequence: Synthetic oligonucleotide
  Sense strand starting at position 977 of SEQ ID NO: 1563864
gaucaugagcuugaucuuu

SEQ ID NO: 1837716 - RNA, 19 nt, Artificial Sequence
  Description of Artificial Sequence: Synthetic oligonucleotide
  Antisense strand to SEQ ID NO: 1837715
aaagaucaagcucaugauc

SEQ ID NO: 1837717 - RNA, 19 nt, Artificial Sequence
  Description of Artificial Sequence: Synthetic oligonucleotide
  Sense strand starting at position 1136 of SEQ ID NO: 1563864
caucgaauaccguacauca

SEQ ID NO: 1837718 - RNA, 19 nt, Artificial Sequence
  Description of Artificial Sequence: Synthetic oligonucleotide
  Antisense strand to SEQ ID NO: 1837717
ugauguacgguauucgaug

SEQ ID NO: 1837719 - RNA, 19 nt, Artificial Sequence
  Description of Artificial Sequence: Synthetic oligonucleotide
  Sense strand starting at position 1172 of SEQ ID NO: 1563864
cugaaugacuggucaauua

SEQ ID NO: 1837720 - RNA, 19 nt, Artificial Sequence
  Description of Artificial Sequence: Synthetic oligonucleotide
  Antisense strand to SEQ ID NO: 1837719
uaauugaccagucauucag

SEQ ID NO: 1837721 - RNA, 19 nt, Artificial Sequence
  Description of Artificial Sequence: Synthetic oligonucleotide
  Sense strand starting at position 1661 of SEQ ID NO: 1563864
uuaggauccucucuagaga

SEQ ID NO: 1837722 - RNA, 19 nt, Artificial Sequence
  Description of Artificial Sequence: Synthetic oligonucleotide
  Antisense strand to SEQ ID NO: 1837721
ucucuagagaggauccuaa

SEQ ID NO: 1837723 - RNA, 19 nt, Artificial Sequence
  Description of Artificial Sequence: Synthetic oligonucleotide
  Sense strand starting at position 1817 of SEQ ID NO: 1563864
ccuugauaaguugagcuca

SEQ ID NO: 1837724 - RNA, 19 nt, Artificial Sequence
  Description of Artificial Sequence: Synthetic oligonucleotide
  Antisense strand to SEQ ID NO: 1837723
ugagcucaacuuaucaagg

SEQ ID NO: 1837725 - RNA, 19 nt, Artificial Sequence
  Description of Artificial Sequence: Synthetic oligonucleotide
  Sense strand starting at position 1819 of SEQ ID NO: 1563864
uugauaaguugagcucaau

SEQ ID NO: 1837726 - RNA, 19 nt, Artificial Sequence
  Description of Artificial Sequence: Synthetic oligonucleotide
  Antisense strand to SEQ ID NO: 1837725
auugagcucaacuuaucaa

SEQ ID NO: 1837727 - RNA, 19 nt, Artificial Sequence
  Description of Artificial Sequence: Synthetic oligonucleotide
  Sense strand starting at position 2150 of SEQ ID NO: 1563864
cccuuuaggcuaggaugaa

SEQ ID NO: 1837728 - RNA, 19 nt, Artificial Sequence
  Description of Artificial Sequence: Synthetic oligonucleotide
  Antisense strand to SEQ ID NO: 1837727
uucauccuagccuaaaggg

SEQ ID NO: 1837729 - RNA, 19 nt, Artificial Sequence
  Description of Artificial Sequence: Synthetic oligonucleotide
  Sense strand starting at position 2285 of SEQ ID NO: 1563864
uuuauuuaugugugcagag

SEQ ID NO: 1837730 - RNA, 19 nt, Artificial Sequence
  Description of Artificial Sequence: Synthetic oligonucleotide
  Antisense strand to SEQ ID NO: 1837729
cucugcacacauaaauaaa

SEQ ID NO: 1837731 - RNA, 19 nt, Artificial Sequence
  Description of Artificial Sequence: Synthetic oligonucleotide
  Sense strand starting at position 2342 of SEQ ID NO: 1563864
cugucuuuggaauacucaa

SEQ ID NO: 1837732 - RNA, 19 nt, Artificial Sequence
  Description of Artificial Sequence: Synthetic oligonucleotide
  Antisense strand to SEQ ID NO: 1837731
uugaguauuccaaagacag

SEQ ID NO: 1837733 - RNA, 19 nt, Artificial Sequence
  Description of Artificial Sequence: Synthetic oligonucleotide
  Sense strand starting at position 2380 of SEQ ID NO: 1563864
auuaaagugcagggaaaua

SEQ ID NO: 1837734 - RNA, 19 nt, Artificial Sequence
  Description of Artificial Sequence: Synthetic oligonucleotide
  Antisense strand to SEQ ID NO: 1837733
uauuucccugcacuuuaau

SEQ ID NO: 1837735 - RNA, 19 nt, Artificial Sequence
  Description of Artificial Sequence: Synthetic oligonucleotide
  Sense strand starting at position 2392 of SEQ ID NO: 1563864
ggaaauaacuacuuagcac

SEQ ID NO: 1837736 - RNA, 19 nt, Artificial Sequence
  Description of Artificial Sequence: Synthetic oligonucleotide
  Antisense strand to SEQ ID NO: 1837735
gugcuaaguaguuauuucc

SEQ ID NO: 1837737 - RNA, 19 nt, Artificial Sequence
  Description of Artificial Sequence: Synthetic oligonucleotide
  Sense strand starting at position 2425 of SEQ ID NO: 1563864
acacauaagcgcuauaaag

SEQ ID NO: 1837738 - RNA, 19 nt, Artificial Sequence
  Description of Artificial Sequence: Synthetic oligonucleotide
  Antisense strand to SEQ ID NO: 1837737
cuuuauagcgcuuaugugu

SEQ ID NO: 1837739 - RNA, 19 nt, Artificial Sequence
  Description of Artificial Sequence: Synthetic oligonucleotide
  Sense strand starting at position 2461 of SEQ ID NO: 1563864
gcagaugaauagccauuau

SEQ ID NO: 1837740 - RNA, 19 nt, Artificial Sequence
  Description of Artificial Sequence: Synthetic oligonucleotide
  Antisense strand to SEQ ID NO: 1837739
auaauggcuauucaucugc

SEQ ID NO: 1837741 - RNA, 19 nt, Artificial Sequence
  Description of Artificial Sequence: Synthetic oligonucleotide
  Sense strand starting at position 2537 of SEQ ID NO: 1563864
aguagagagguauggcuaa

SEQ ID NO: 1837742 - RNA, 19 nt, Artificial Sequence
  Description of Artificial Sequence: Synthetic oligonucleotide
  Antisense strand to SEQ ID NO: 1837741
uuagccauaccucucuacu

SEQ ID NO: 1837743 - RNA, 19 nt, Artificial Sequence
  Description of Artificial Sequence: Synthetic oligonucleotide
  Sense strand starting at position 2703 of SEQ ID NO: 1563864
gauuaagaauuaguaaggu

SEQ ID NO: 1837744 - RNA, 19 nt, Artificial Sequence
  Description of Artificial Sequence: Synthetic oligonucleotide
  Antisense strand to SEQ ID NO: 1837743
accuuacuaauucuuaauc

SEQ ID NO: 1837745 - RNA, 19 nt, Artificial Sequence
  Description of Artificial Sequence: Synthetic oligonucleotide
  Sense strand starting at position 2759 of SEQ ID NO: 1563864
uauguuuaugggcauauca

SEQ ID NO: 1837746 - RNA, 19 nt, Artificial Sequence
  Description of Artificial Sequence: Synthetic oligonucleotide
  Antisense strand to SEQ ID NO: 1837745
ugauaugcccauaaacaua

SEQ ID NO: 1837747 - RNA, 19 nt, Artificial Sequence
  Description of Artificial Sequence: Synthetic oligonucleotide
  Sense strand starting at position 2761 of SEQ ID NO: 1563864
uguuuaugggcauaucaua

SEQ ID NO: 1837748 - RNA, 19 nt, Artificial Sequence
  Description of Artificial Sequence: Synthetic oligonucleotide
  Antisense strand to SEQ ID NO: 1837747
uaugauaugcccauaaaca

SEQ ID NO: 1837749 - RNA, 19 nt, Artificial Sequence
  Description of Artificial Sequence: Synthetic oligonucleotide
  Sense strand starting at position 2840 of SEQ ID NO: 1563864
gaguguguaccacagacaa

SEQ ID NO: 1837750 - RNA, 19 nt, Artificial Sequence
  Description of Artificial Sequence: Synthetic oligonucleotide
  Antisense strand to SEQ ID NO: 1837749
uugucugugguacacacuc

SEQ ID NO: 1837751 - RNA, 19 nt, Artificial Sequence
  Description of Artificial Sequence: Synthetic oligonucleotide
  Sense strand starting at position 2842 of SEQ ID NO: 1563864
guguguaccacagacaacu

SEQ ID NO: 1837752 - RNA, 19 nt, Artificial Sequence
  Description of Artificial Sequence: Synthetic oligonucleotide
  Antisense strand to SEQ ID NO: 1837751
aguugucugugguacacac

SEQ ID NO: 1837753 - RNA, 19 nt, Artificial Sequence
  Description of Artificial Sequence: Synthetic oligonucleotide
  Sense strand starting at position 2896 of SEQ ID NO: 1563864
uggucaaucggguauaaga

SEQ ID NO: 1837754 - RNA, 19 nt, Artificial Sequence
  Description of Artificial Sequence: Synthetic oligonucleotide
  Antisense strand to SEQ ID NO: 1837753
ucuuauacccgauugacca

SEQ ID NO: 1837755 - RNA, 19 nt, Artificial Sequence
  Description of Artificial Sequence: Synthetic oligonucleotide
  Sense strand starting at position 2905 of SEQ ID NO: 1563864
ggguauaagaaaugucacu

SEQ ID NO: 1837756 - RNA, 19 nt, Artificial Sequence
  Description of Artificial Sequence: Synthetic oligonucleotide
  Antisense strand to SEQ ID NO: 1837755
agugacauuucuuauaccc

SEQ ID NO: 1837757 - RNA, 19 nt, Artificial Sequence
  Description of Artificial Sequence: Synthetic oligonucleotide
  Sense strand starting at position 3304 of SEQ ID NO: 1563864
agcuaacaagauggauauu

SEQ ID NO: 1837758 - RNA, 19 nt, Artificial Sequence
  Description of Artificial Sequence: Synthetic oligonucleotide
  Antisense strand to SEQ ID NO: 1837757
aauauccaucuuguuagcu

SEQ ID NO: 1837759 - RNA, 19 nt, Artificial Sequence
  Description of Artificial Sequence: Synthetic oligonucleotide
  Sense strand starting at position 3600 of SEQ ID NO: 1563864
ucagaagguauugggcaau

SEQ ID NO: 1837760 - RNA, 19 nt, Artificial Sequence
  Description of Artificial Sequence: Synthetic oligonucleotide
  Antisense strand to SEQ ID NO: 1837759
auugcccaauaccuucuga

SEQ ID NO: 1837761 - RNA, 19 nt, Artificial Sequence
  Description of Artificial Sequence: Synthetic oligonucleotide
  Sense strand starting at position 3834 of SEQ ID NO: 1563864
ugcugcucagaauaaauua

SEQ ID NO: 1837762 - RNA, 19 nt, Artificial Sequence
  Description of Artificial Sequence: Synthetic oligonucleotide
  Antisense strand to SEQ ID NO: 1837761
uaauuuauucugagcagca

SEQ ID NO: 1837763 - RNA, 19 nt, Artificial Sequence
  Description of Artificial Sequence: Synthetic oligonucleotide
  Sense strand starting at position 3909 of SEQ ID NO: 1563864
gguagauauggcuauugau

SEQ ID NO: 1837764 - RNA, 19 nt, Artificial Sequence
  Description of Artificial Sequence: Synthetic oligonucleotide
  Antisense strand to SEQ ID NO: 1837763
aucaauagccauaucuacc

SEQ ID NO: 1837765 - RNA, 19 nt, Artificial Sequence
  Description of Artificial Sequence: Synthetic oligonucleotide
  Sense strand starting at position 3942 of SEQ ID NO: 1563864
ugaaauuagcgguacaaag

SEQ ID NO: 1837766 - RNA, 19 nt, Artificial Sequence
  Description of Artificial Sequence: Synthetic oligonucleotide
  Antisense strand to SEQ ID NO: 1837765
cuuuguaccgcuaauuuca

SEQ ID NO: 1837767 - RNA, 19 nt, Artificial Sequence
  Description of Artificial Sequence: Synthetic oligonucleotide
  Sense strand starting at position 3944 of SEQ ID NO: 1563864
aaauuagcgguacaaagau

SEQ ID NO: 1837768 - RNA, 19 nt, Artificial Sequence
  Description of Artificial Sequence: Synthetic oligonucleotide
  Antisense strand to SEQ ID NO: 1837767
aucuuuguaccgcuaauuu

SEQ ID NO: 1837769 - RNA, 19 nt, Artificial Sequence
  Description of Artificial Sequence: Synthetic oligonucleotide
  Sense strand starting at position 260 of SEQ ID NO: 1563865
aucuaagagugcucagaaa

SEQ ID NO: 1837770 - RNA, 19 nt, Artificial Sequence
  Description of Artificial Sequence: Synthetic oligonucleotide
  Antisense strand to SEQ ID NO: 1837769
uuucugagcacucuuagau

SEQ ID NO: 1837771 - RNA, 19 nt, Artificial Sequence
  Description of Artificial Sequence: Synthetic oligonucleotide
  Sense strand starting at position 287 of SEQ ID NO: 1563865
guaggucuauuacccuaau

SEQ ID NO: 1837772 - RNA, 19 nt, Artificial Sequence
  Description of Artificial Sequence: Synthetic oligonucleotide
  Antisense strand to SEQ ID NO: 1837771
auuaggguaauagaccuac

SEQ ID NO: 1837773 - RNA, 19 nt, Artificial Sequence
  Description of Artificial Sequence: Synthetic oligonucleotide
  Sense strand starting at position 607 of SEQ ID NO: 1563865
gcaagaaguuccuuuaaau

SEQ ID NO: 1837774 - RNA, 19 nt, Artificial Sequence
  Description of Artificial Sequence: Synthetic oligonucleotide
  Antisense strand to SEQ ID NO: 1837773
auuuaaaggaacuucuugc

SEQ ID NO: 1837775 - RNA, 19 nt, Artificial Sequence
  Description of Artificial Sequence: Synthetic oligonucleotide
  Sense strand starting at position 2385 of SEQ ID NO: 1563865
aauugaucuuagucgauga

SEQ ID NO: 1837776 - RNA, 19 nt, Artificial Sequence
  Description of Artificial Sequence: Synthetic oligonucleotide
  Antisense strand to SEQ ID NO: 1837775
ucaucgacuaagaucaauu

SEQ ID NO: 1837777 - RNA, 19 nt, Artificial Sequence
  Description of Artificial Sequence: Synthetic oligonucleotide
  Sense strand starting at position 2386 of SEQ ID NO: 1563865
auugaucuuagucgaugaa

SEQ ID NO: 1837778 - RNA, 19 nt, Artificial Sequence
  Description of Artificial Sequence: Synthetic oligonucleotide
  Antisense strand to SEQ ID NO: 1837777
uucaucgacuaagaucaau

SEQ ID NO: 1837779 - RNA, 19 nt, Artificial Sequence
  Description of Artificial Sequence: Synthetic oligonucleotide
  Sense strand starting at position 2387 of SEQ ID NO: 1563865
uugaucuuagucgaugaau

SEQ ID NO: 1837780 - RNA, 19 nt, Artificial Sequence
  Description of Artificial Sequence: Synthetic oligonucleotide
  Antisense strand to SEQ ID NO: 1837779
auucaucgacuaagaucaa

SEQ ID NO: 1837781 - RNA, 19 nt, Artificial Sequence
  Description of Artificial Sequence: Synthetic oligonucleotide
  Sense strand starting at position 2389 of SEQ ID NO: 1563865
gaucuuagucgaugaauaa

SEQ ID NO: 1837782 - RNA, 19 nt, Artificial Sequence
  Description of Artificial Sequence: Synthetic oligonucleotide
  Antisense strand to SEQ ID NO: 1837781
uuauucaucgacuaagauc

SEQ ID NO: 1837783 - RNA, 19 nt, Artificial Sequence
  Description of Artificial Sequence: Synthetic oligonucleotide
  Sense strand starting at position 2490 of SEQ ID NO: 1563865
ucguuuauuucccucuaag

SEQ ID NO: 1837784 - RNA, 19 nt, Artificial Sequence
  Description of Artificial Sequence: Synthetic oligonucleotide
  Antisense strand to SEQ ID NO: 1837783
cuuagagggaaauaaacga

SEQ ID NO: 1837785 - RNA, 19 nt, Artificial Sequence
  Description of Artificial Sequence: Synthetic oligonucleotide
  Sense strand starting at position 2523 of SEQ ID NO: 1563865
aaaugcugaucagugcaau

SEQ ID NO: 1837786 - RNA, 19 nt, Artificial Sequence
  Description of Artificial Sequence: Synthetic oligonucleotide
  Antisense strand to SEQ ID NO: 1837785
auugcacugaucagcauuu

SEQ ID NO: 1837787 - RNA, 19 nt, Artificial Sequence
  Description of Artificial Sequence: Synthetic oligonucleotide
  Sense strand starting at position 2559 of SEQ ID NO: 1563865
cggaguuugcaggauaaga

SEQ ID NO: 1837788 - RNA, 19 nt, Artificial Sequence
  Description of Artificial Sequence: Synthetic oligonucleotide
  Antisense strand to SEQ ID NO: 1837787
ucuuauccugcaaacuccg

SEQ ID NO: 1837789 - RNA, 19 nt, Artificial Sequence
  Description of Artificial Sequence: Synthetic oligonucleotide
  Sense strand starting at position 2593 of SEQ ID NO: 1563865
gguuccagauacuuuggaa

SEQ ID NO: 1837790 - RNA, 19 nt, Artificial Sequence
  Description of Artificial Sequence: Synthetic oligonucleotide
  Antisense strand to SEQ ID NO: 1837789
uuccaaaguaucuggaacc

SEQ ID NO: 1837791 - RNA, 19 nt, Artificial Sequence
  Description of Artificial Sequence: Synthetic oligonucleotide
  Sense strand starting at position 2655 of SEQ ID NO: 1563865
ugcaucugcacagggaaau

SEQ ID NO: 1837792 - RNA, 19 nt, Artificial Sequence
  Description of Artificial Sequence: Synthetic oligonucleotide
  Antisense strand to SEQ ID NO: 1837791
auuucccugugcagaugca

SEQ ID NO: 1837793 - RNA, 19 nt, Artificial Sequence
  Description of Artificial Sequence: Synthetic oligonucleotide
  Sense strand starting at position 2656 of SEQ ID NO: 1563865
gcaucugcacagggaaauu

SEQ ID NO: 1837794 - RNA, 19 nt, Artificial Sequence
  Description of Artificial Sequence: Synthetic oligonucleotide
  Antisense strand to SEQ ID NO: 1837793
aauuucccugugcagaugc

SEQ ID NO: 1837795 - RNA, 19 nt, Artificial Sequence
  Description of Artificial Sequence: Synthetic oligonucleotide
  Sense strand starting at position 2771 of SEQ ID NO: 1563865
agacaauuguaguugauaa

SEQ ID NO: 1837796 - RNA, 19 nt, Artificial Sequence
  Description of Artificial Sequence: Synthetic oligonucleotide
  Antisense strand to SEQ ID NO: 1837795
uuaucaacuacaauugucu

SEQ ID NO: 1837797 - RNA, 19 nt, Artificial Sequence
  Description of Artificial Sequence: Synthetic oligonucleotide
  Sense strand starting at position 2782 of SEQ ID NO: 1563865
guugauaacgcacacauau

SEQ ID NO: 1837798 - RNA, 19 nt, Artificial Sequence
  Description of Artificial Sequence: Synthetic oligonucleotide
  Antisense strand to SEQ ID NO: 1837797
auaugugugcguuaucaac

SEQ ID NO: 1837799 - RNA, 19 nt, Artificial Sequence
  Description of Artificial Sequence: Synthetic oligonucleotide
  Sense strand starting at position 2802 of SEQ ID NO: 1563865
caggaucgucagugacaag

SEQ ID NO: 1837800 - RNA, 19 nt, Artificial Sequence
  Description of Artificial Sequence: Synthetic oligonucleotide
  Antisense strand to SEQ ID NO: 1837799
cuugucacugacgauccug

SEQ ID NO: 1837801 - RNA, 19 nt, Artificial Sequence
  Description of Artificial Sequence: Synthetic oligonucleotide
  Sense strand starting at position 2870 of SEQ ID NO: 1563865
gacagaguucuacaugcuc

SEQ ID NO: 1837802 - RNA, 19 nt, Artificial Sequence
  Description of Artificial Sequence: Synthetic oligonucleotide
  Antisense strand to SEQ ID NO: 1837801
gagcauguagaacucuguc

SEQ ID NO: 1837803 - RNA, 19 nt, Artificial Sequence
  Description of Artificial Sequence: Synthetic oligonucleotide
  Sense strand starting at position 2973 of SEQ ID NO: 1563865
uuuaauucugauggacuga

SEQ ID NO: 1837804 - RNA, 19 nt, Artificial Sequence
  Description of Artificial Sequence: Synthetic oligonucleotide
  Antisense strand to SEQ ID NO: 1837803
ucaguccaucagaauuaaa

SEQ ID NO: 1837805 - RNA, 19 nt, Artificial Sequence
  Description of Artificial Sequence: Synthetic oligonucleotide
  Sense strand starting at position 3024 of SEQ ID NO: 1563865
agaaaucaaucuguuuguu

SEQ ID NO: 1837806 - RNA, 19 nt, Artificial Sequence
  Description of Artificial Sequence: Synthetic oligonucleotide
  Antisense strand to SEQ ID NO: 1837805
aacaaacagauugauuucu

SEQ ID NO: 1837807 - RNA, 19 nt, Artificial Sequence
  Description of Artificial Sequence: Synthetic oligonucleotide
  Sense strand starting at position 3036 of SEQ ID NO: 1563865
guuuguuaagugcaagaua

SEQ ID NO: 1837808 - RNA, 19 nt, Artificial Sequence
  Description of Artificial Sequence: Synthetic oligonucleotide
  Antisense strand to SEQ ID NO: 1837807
uaucuugcacuuaacaaac

SEQ ID NO: 1837809 - RNA, 19 nt, Artificial Sequence
  Description of Artificial Sequence: Synthetic oligonucleotide
  Sense strand starting at position 3146 of SEQ ID NO: 1563865
ucgugaaagucauugggac

SEQ ID NO: 1837810 - RNA, 19 nt, Artificial Sequence
  Description of Artificial Sequence: Synthetic oligonucleotide
  Antisense strand to SEQ ID NO: 1837809
gucccaaugacuuucacga

SEQ ID NO: 1837811 - RNA, 19 nt, Artificial Sequence
  Description of Artificial Sequence: Synthetic oligonucleotide
  Sense strand starting at position 3147 of SEQ ID NO: 1563865
cgugaaagucauugggaca

SEQ ID NO: 1837812 - RNA, 19 nt, Artificial Sequence
  Description of Artificial Sequence: Synthetic oligonucleotide
  Antisense strand to SEQ ID NO: 1837811
ugucccaaugacuuucacg

SEQ ID NO: 1837813 - RNA, 19 nt, Artificial Sequence
  Description of Artificial Sequence: Synthetic oligonucleotide
  Sense strand starting at position 3148 of SEQ ID NO: 1563865
gugaaagucauugggacaa

SEQ ID NO: 1837814 - RNA, 19 nt, Artificial Sequence
  Description of Artificial Sequence: Synthetic oligonucleotide
  Antisense strand to SEQ ID NO: 1837813
uugucccaaugacuuucac

SEQ ID NO: 1837815 - RNA, 19 nt, Artificial Sequence
  Description of Artificial Sequence: Synthetic oligonucleotide
  Sense strand starting at position 3172 of SEQ ID NO: 1563865
agggaugguguccgauacu

SEQ ID NO: 1837816 - RNA, 19 nt, Artificial Sequence
  Description of Artificial Sequence: Synthetic oligonucleotide
  Antisense strand to SEQ ID NO: 1837815
aguaucggacaccaucccu

SEQ ID NO: 1837817 - RNA, 19 nt, Artificial Sequence
  Description of Artificial Sequence: Synthetic oligonucleotide
  Sense strand starting at position 3175 of SEQ ID NO: 1563865
gaugguguccgauacuuug

SEQ ID NO: 1837818 - RNA, 19 nt, Artificial Sequence
  Description of Artificial Sequence: Synthetic oligonucleotide
  Antisense strand to SEQ ID NO: 1837817
caaaguaucggacaccauc

SEQ ID NO: 1837819 - RNA, 19 nt, Artificial Sequence
  Description of Artificial Sequence: Synthetic oligonucleotide
  Sense strand starting at position 3189 of SEQ ID NO: 1563865
cuuuguuauacuggguaga

SEQ ID NO: 1837820 - RNA, 19 nt, Artificial Sequence
  Description of Artificial Sequence: Synthetic oligonucleotide
  Antisense strand to SEQ ID NO: 1837819
ucuacccaguauaacaaag

SEQ ID NO: 1837821 - RNA, 19 nt, Artificial Sequence
  Description of Artificial Sequence: Synthetic oligonucleotide
  Sense strand starting at position 3190 of SEQ ID NO: 1563865
uuuguuauacuggguagaa

SEQ ID NO: 1837822 - RNA, 19 nt, Artificial Sequence
  Description of Artificial Sequence: Synthetic oligonucleotide
  Antisense strand to SEQ ID NO: 1837821
uucuacccaguauaacaaa

SEQ ID NO: 1837823 - RNA, 19 nt, Artificial Sequence
  Description of Artificial Sequence: Synthetic oligonucleotide
  Sense strand starting at position 3191 of SEQ ID NO: 1563865
uuguuauacuggguagaaa

SEQ ID NO: 1837824 - RNA, 19 nt, Artificial Sequence
  Description of Artificial Sequence: Synthetic oligonucleotide
  Antisense strand to SEQ ID NO: 1837823
uuucuacccaguauaacaa

SEQ ID NO: 1837825 - RNA, 19 nt, Artificial Sequence
  Description of Artificial Sequence: Synthetic oligonucleotide
  Sense strand starting at position 3333 of SEQ ID NO: 1563865
agucaaaugugucugacau

SEQ ID NO: 1837826 - RNA, 19 nt, Artificial Sequence
  Description of Artificial Sequence: Synthetic oligonucleotide
  Antisense strand to SEQ ID NO: 1837825
augucagacacauuugacu

SEQ ID NO: 1837827 - RNA, 19 nt, Artificial Sequence
  Description of Artificial Sequence: Synthetic oligonucleotide
  Sense strand starting at position 3334 of SEQ ID NO: 1563865
gucaaaugugucugacaua

SEQ ID NO: 1837828 - RNA, 19 nt, Artificial Sequence
  Description of Artificial Sequence: Synthetic oligonucleotide
  Antisense strand to SEQ ID NO: 1837827
uaugucagacacauuugac

SEQ ID NO: 1837829 - RNA, 19 nt, Artificial Sequence
  Description of Artificial Sequence: Synthetic oligonucleotide
  Sense strand starting at position 3433 of SEQ ID NO: 1563865
gggcaugggugaguuacau

SEQ ID NO: 1837830 - RNA, 19 nt, Artificial Sequence
  Description of Artificial Sequence: Synthetic oligonucleotide
  Antisense strand to SEQ ID NO: 1837829
auguaacucacccaugccc

SEQ ID NO: 1837831 - RNA, 19 nt, Artificial Sequence
  Description of Artificial Sequence: Synthetic oligonucleotide
  Sense strand starting at position 3439 of SEQ ID NO: 1563865
gggugaguuacauaacuuu

SEQ ID NO: 1837832 - RNA, 19 nt, Artificial Sequence
  Description of Artificial Sequence: Synthetic oligonucleotide
  Antisense strand to SEQ ID NO: 1837831
aaaguuauguaacucaccc

SEQ ID NO: 1837833 - RNA, 19 nt, Artificial Sequence
  Description of Artificial Sequence: Synthetic oligonucleotide
  Sense strand starting at position 3479 of SEQ ID NO: 1563865
gaggaacuguuaucacagu

SEQ ID NO: 1837834 - RNA, 19 nt, Artificial Sequence
  Description of Artificial Sequence: Synthetic oligonucleotide
  Antisense strand to SEQ ID NO: 1837833
acugugauaacaguuccuc

SEQ ID NO: 1837835 - RNA, 19 nt, Artificial Sequence
  Description of Artificial Sequence: Synthetic oligonucleotide
  Sense strand starting at position 3486 of SEQ ID NO: 1563865
uguuaucacagugagucaa

SEQ ID NO: 1837836 - RNA, 19 nt, Artificial Sequence
  Description of Artificial Sequence: Synthetic oligonucleotide
  Antisense strand to SEQ ID NO: 1837835
uugacucacugugauaaca

SEQ ID NO: 1837837 - RNA, 19 nt, Artificial Sequence
  Description of Artificial Sequence: Synthetic oligonucleotide
  Sense strand starting at position 3522 of SEQ ID NO: 1563865
uaaacauagcuugggucaa

SEQ ID NO: 1837838 - RNA, 19 nt, Artificial Sequence
  Description of Artificial Sequence: Synthetic oligonucleotide
  Antisense strand to SEQ ID NO: 1837837
uugacccaagcuauguuua

SEQ ID NO: 1837839 - RNA, 19 nt, Artificial Sequence
  Description of Artificial Sequence: Synthetic oligonucleotide
  Sense strand starting at position 3574 of SEQ ID NO: 1563865
gccacaucugugggacauu

SEQ ID NO: 1837840 - RNA, 19 nt, Artificial Sequence
  Description of Artificial Sequence: Synthetic oligonucleotide
  Antisense strand to SEQ ID NO: 1837839
aaugucccacagauguggc

SEQ ID NO: 1837841 - RNA, 19 nt, Artificial Sequence
  Description of Artificial Sequence: Synthetic oligonucleotide
  Sense strand starting at position 3620 of SEQ ID NO: 1563865
ggcucaaucuuauugaacu

SEQ ID NO: 1837842 - RNA, 19 nt, Artificial Sequence
  Description of Artificial Sequence: Synthetic oligonucleotide
  Antisense strand to SEQ ID NO: 1837841
aguucaauaagauugagcc

SEQ ID NO: 1837843 - RNA, 19 nt, Artificial Sequence
  Description of Artificial Sequence: Synthetic oligonucleotide
  Sense strand starting at position 3813 of SEQ ID NO: 1563865
caaaguuuagccugguaaa

SEQ ID NO: 1837844 - RNA, 19 nt, Artificial Sequence
  Description of Artificial Sequence: Synthetic oligonucleotide
  Antisense strand to SEQ ID NO: 1837843
uuuaccaggcuaaacuuug

SEQ ID NO: 1837845 - RNA, 19 nt, Artificial Sequence
  Description of Artificial Sequence: Synthetic oligonucleotide
  Sense strand starting at position 3814 of SEQ ID NO: 1563865
aaaguuuagccugguaaac

SEQ ID NO: 1837846 - RNA, 19 nt, Artificial Sequence
  Description of Artificial Sequence: Synthetic oligonucleotide
  Antisense strand to SEQ ID NO: 1837845
guuuaccaggcuaaacuuu

SEQ ID NO: 1837847 - RNA, 19 nt, Artificial Sequence
  Description of Artificial Sequence: Synthetic oligonucleotide
  Sense strand starting at position 3853 of SEQ ID NO: 1563865
uggcaugaccuccacaaau

SEQ ID NO: 1837848 - RNA, 19 nt, Artificial Sequence
  Description of Artificial Sequence: Synthetic oligonucleotide
  Antisense strand to SEQ ID NO: 1837847
auuuguggaggucaugcca

SEQ ID NO: 1837849 - RNA, 19 nt, Artificial Sequence
  Description of Artificial Sequence: Synthetic oligonucleotide
  Sense strand starting at position 151 of SEQ ID NO: 1563866
agucauaaugucuaccaca

SEQ ID NO: 1837850 - RNA, 19 nt, Artificial Sequence
  Description of Artificial Sequence: Synthetic oligonucleotide
  Antisense strand to SEQ ID NO: 1837849
ugugguagacauuaugacu

SEQ ID NO: 1837851 - RNA, 19 nt, Artificial Sequence
  Description of Artificial Sequence: Synthetic oligonucleotide
  Sense strand starting at position 311 of SEQ ID NO: 1563866
cuuuaaguacuacagguua

SEQ ID NO: 1837852 - RNA, 19 nt, Artificial Sequence
  Description of Artificial Sequence: Synthetic oligonucleotide
  Antisense strand to SEQ ID NO: 1837851
uaaccuguaguacuuaaag

SEQ ID NO: 1837853 - RNA, 19 nt, Artificial Sequence
  Description of Artificial Sequence: Synthetic oligonucleotide
  Sense strand starting at position 581 of SEQ ID NO: 1563866
ucucuuuauggauaugcaa

SEQ ID NO: 1837854 - RNA, 19 nt, Artificial Sequence
  Description of Artificial Sequence: Synthetic oligonucleotide
  Antisense strand to SEQ ID NO: 1837853
uugcauauccauaaagaga

SEQ ID NO: 1837855 - RNA, 19 nt, Artificial Sequence
  Description of Artificial Sequence: Synthetic oligonucleotide
  Sense strand starting at position 654 of SEQ ID NO: 1563866
agagauacuuaaccuguau

SEQ ID NO: 1837856 - RNA, 19 nt, Artificial Sequence
  Description of Artificial Sequence: Synthetic oligonucleotide
  Antisense strand to SEQ ID NO: 1837855
auacagguuaaguaucucu

SEQ ID NO: 1837857 - RNA, 19 nt, Artificial Sequence
  Description of Artificial Sequence: Synthetic oligonucleotide
  Sense strand starting at position 667 of SEQ ID NO: 1563866
cuguauaucgcuuaagaaa

SEQ ID NO: 1837858 - RNA, 19 nt, Artificial Sequence
  Description of Artificial Sequence: Synthetic oligonucleotide
  Antisense strand to SEQ ID NO: 1837857
uuucuuaagcgauauacag

SEQ ID NO: 1837859 - RNA, 19 nt, Artificial Sequence
  Description of Artificial Sequence: Synthetic oligonucleotide
  Sense strand starting at position 713 of SEQ ID NO: 1563866
agggauacaucucuguuag

SEQ ID NO: 1837860 - RNA, 19 nt, Artificial Sequence
  Description of Artificial Sequence: Synthetic oligonucleotide
  Antisense strand to SEQ ID NO: 1837859
cuaacagagauguaucccu

SEQ ID NO: 1837861 - RNA, 19 nt, Artificial Sequence
  Description of Artificial Sequence: Synthetic oligonucleotide
  Sense strand starting at position 714 of SEQ ID NO: 1563866
gggauacaucucuguuagc

SEQ ID NO: 1837862 - RNA, 19 nt, Artificial Sequence
  Description of Artificial Sequence: Synthetic oligonucleotide
  Antisense strand to SEQ ID NO: 1837861
gcuaacagagauguauccc

SEQ ID NO: 1837863 - RNA, 19 nt, Artificial Sequence
  Description of Artificial Sequence: Synthetic oligonucleotide
  Sense strand starting at position 1074 of SEQ ID NO: 1563866
gcuugaugaccuuaguaau

SEQ ID NO: 1837864 - RNA, 19 nt, Artificial Sequence
  Description of Artificial Sequence: Synthetic oligonucleotide
  Antisense strand to SEQ ID NO: 1837863
auuacuaaggucaucaagc

SEQ ID NO: 1837865 - RNA, 19 nt, Artificial Sequence
  Description of Artificial Sequence: Synthetic oligonucleotide
  Sense strand starting at position 1122 of SEQ ID NO: 1563866
aucugaaauuggucaauca

SEQ ID NO: 1837866 - RNA, 19 nt, Artificial Sequence
  Description of Artificial Sequence: Synthetic oligonucleotide
  Antisense strand to SEQ ID NO: 1837865
ugauugaccaauuucagau

SEQ ID NO: 1837867 - RNA, 19 nt, Artificial Sequence
  Description of Artificial Sequence: Synthetic oligonucleotide
  Sense strand starting at position 1137 of SEQ ID NO: 1563866
aucaucuguccaggaggaa

SEQ ID NO: 1837868 - RNA, 19 nt, Artificial Sequence
  Description of Artificial Sequence: Synthetic oligonucleotide
  Antisense strand to SEQ ID NO: 1837867
uuccuccuggacagaugau

SEQ ID NO: 1837869 - RNA, 19 nt, Artificial Sequence
  Description of Artificial Sequence: Synthetic oligonucleotide
  Sense strand starting at position 1177 of SEQ ID NO: 1563866
uagcaauacguuuaaguua

SEQ ID NO: 1837870 - RNA, 19 nt, Artificial Sequence
  Description of Artificial Sequence: Synthetic oligonucleotide
  Antisense strand to SEQ ID NO: 1837869
uaacuuaaacguauugcua

SEQ ID NO: 1837871 - RNA, 19 nt, Artificial Sequence
  Description of Artificial Sequence: Synthetic oligonucleotide
  Sense strand starting at position 1182 of SEQ ID NO: 1563866
auacguuuaaguuaaaggu

SEQ ID NO: 1837872 - RNA, 19 nt, Artificial Sequence
  Description of Artificial Sequence: Synthetic oligonucleotide
  Antisense strand to SEQ ID NO: 1837871
accuuuaacuuaaacguau

SEQ ID NO: 1837873 - RNA, 19 nt, Artificial Sequence
  Description of Artificial Sequence: Synthetic oligonucleotide
  Sense strand starting at position 1264 of SEQ ID NO: 1563866
ucagucugacuuuaguuau

SEQ ID NO: 1837874 - RNA, 19 nt, Artificial Sequence
  Description of Artificial Sequence: Synthetic oligonucleotide
  Antisense strand to SEQ ID NO: 1837873
auaacuaaagucagacuga

SEQ ID NO: 1837875 - RNA, 19 nt, Artificial Sequence
  Description of Artificial Sequence: Synthetic oligonucleotide
  Sense strand starting at position 1352 of SEQ ID NO: 1563866
agggcuucucuagguuaca

SEQ ID NO: 1837876 - RNA, 19 nt, Artificial Sequence
  Description of Artificial Sequence: Synthetic oligonucleotide
  Antisense strand to SEQ ID NO: 1837875
uguaaccuagagaagcccu

SEQ ID NO: 1837877 - RNA, 19 nt, Artificial Sequence
  Description of Artificial Sequence: Synthetic oligonucleotide
  Sense strand starting at position 1374 of SEQ ID NO: 1563866
ggauuaugaucacuguaac

SEQ ID NO: 1837878 - RNA, 19 nt, Artificial Sequence
  Description of Artificial Sequence: Synthetic oligonucleotide
  Antisense strand to SEQ ID NO: 1837877
guuacagugaucauaaucc

SEQ ID NO: 1837879 - RNA, 19 nt, Artificial Sequence
  Description of Artificial Sequence: Synthetic oligonucleotide
  Sense strand starting at position 1530 of SEQ ID NO: 1563866
uuggcuuagcucuacaaac

SEQ ID NO: 1837880 - RNA, 19 nt, Artificial Sequence
  Description of Artificial Sequence: Synthetic oligonucleotide
  Antisense strand to SEQ ID NO: 1837879
guuuguagagcuaagccaa

SEQ ID NO: 1837881 - RNA, 19 nt, Artificial Sequence
  Description of Artificial Sequence: Synthetic oligonucleotide
  Sense strand starting at position 1788 of SEQ ID NO: 1563866
uggcaaacucuugguggau

SEQ ID NO: 1837882 - RNA, 19 nt, Artificial Sequence
  Description of Artificial Sequence: Synthetic oligonucleotide
  Antisense strand to SEQ ID NO: 1837881
auccaccaagaguuugcca

SEQ ID NO: 1837883 - RNA, 19 nt, Artificial Sequence
  Description of Artificial Sequence: Synthetic oligonucleotide
  Sense strand starting at position 1789 of SEQ ID NO: 1563866
ggcaaacucuugguggaug

SEQ ID NO: 1837884 - RNA, 19 nt, Artificial Sequence
  Description of Artificial Sequence: Synthetic oligonucleotide
  Antisense strand to SEQ ID NO: 1837883
cauccaccaagaguuugcc

SEQ ID NO: 1837885 - RNA, 19 nt, Artificial Sequence
  Description of Artificial Sequence: Synthetic oligonucleotide
  Sense strand starting at position 1891 of SEQ ID NO: 1563866
cacgaaucagggcaacauu

SEQ ID NO: 1837886 - RNA, 19 nt, Artificial Sequence
  Description of Artificial Sequence: Synthetic oligonucleotide
  Antisense strand to SEQ ID NO: 1837885
aauguugcccugauucgug

SEQ ID NO: 1837887 - RNA, 19 nt, Artificial Sequence
  Description of Artificial Sequence: Synthetic oligonucleotide
  Sense strand starting at position 1913 of SEQ ID NO: 1563866
agccgucauauugaaagca

SEQ ID NO: 1837888 - RNA, 19 nt, Artificial Sequence
  Description of Artificial Sequence: Synthetic oligonucleotide
  Antisense strand to SEQ ID NO: 1837887
ugcuuucaauaugacggcu

SEQ ID NO: 1837889 - RNA, 19 nt, Artificial Sequence
  Description of Artificial Sequence: Synthetic oligonucleotide
  Sense strand starting at position 1961 of SEQ ID NO: 1563866
acaauauuacuguggacua

SEQ ID NO: 1837890 - RNA, 19 nt, Artificial Sequence
  Description of Artificial Sequence: Synthetic oligonucleotide
  Antisense strand to SEQ ID NO: 1837889
uaguccacaguaauauugu

SEQ ID NO: 1837891 - RNA, 19 nt, Artificial Sequence
  Description of Artificial Sequence: Synthetic oligonucleotide
  Sense strand starting at position 2075 of SEQ ID NO: 1563866
ucaaaucuggucuagucaa

SEQ ID NO: 1837892 - RNA, 19 nt, Artificial Sequence
  Description of Artificial Sequence: Synthetic oligonucleotide
  Antisense strand to SEQ ID NO: 1837891
uugacuagaccagauuuga

SEQ ID NO: 1837893 - RNA, 19 nt, Artificial Sequence
  Description of Artificial Sequence: Synthetic oligonucleotide
  Sense strand starting at position 2191 of SEQ ID NO: 1563866
uguuccuuugccgaauuua

SEQ ID NO: 1837894 - RNA, 19 nt, Artificial Sequence
  Description of Artificial Sequence: Synthetic oligonucleotide
  Antisense strand to SEQ ID NO: 1837893
uaaauucggcaaaggaaca

SEQ ID NO: 1837895 - RNA, 19 nt, Artificial Sequence
  Description of Artificial Sequence: Synthetic oligonucleotide
  Sense strand starting at position 2209 of SEQ ID NO: 1563866
auguuaaauaaccggcaga

SEQ ID NO: 1837896 - RNA, 19 nt, Artificial Sequence
  Description of Artificial Sequence: Synthetic oligonucleotide
  Antisense strand to SEQ ID NO: 1837895
ucugccgguuauuuaacau

SEQ ID NO: 1837897 - RNA, 19 nt, Artificial Sequence
  Description of Artificial Sequence: Synthetic oligonucleotide
  Sense strand starting at position 2212 of SEQ ID NO: 1563866
uuaaauaaccggcagacuu

SEQ ID NO: 1837898 - RNA, 19 nt, Artificial Sequence
  Description of Artificial Sequence: Synthetic oligonucleotide
  Antisense strand to SEQ ID NO: 1837897
aagucugccgguuauuuaa

SEQ ID NO: 1837899 - RNA, 19 nt, Artificial Sequence
  Description of Artificial Sequence: Synthetic oligonucleotide
  Sense strand starting at position 2298 of SEQ ID NO: 1563866
ugcccuucgauuuguggaa

SEQ ID NO: 1837900 - RNA, 19 nt, Artificial Sequence
  Description of Artificial Sequence: Synthetic oligonucleotide
  Antisense strand to SEQ ID NO: 1837899
uuccacaaaucgaagggca

SEQ ID NO: 1837901 - RNA, 19 nt, Artificial Sequence
  Description of Artificial Sequence: Synthetic oligonucleotide
  Sense strand starting at position 2299 of SEQ ID NO: 1563866
gcccuucgauuuguggaau

SEQ ID NO: 1837902 - RNA, 19 nt, Artificial Sequence
  Description of Artificial Sequence: Synthetic oligonucleotide
  Antisense strand to SEQ ID NO: 1837901
auuccacaaaucgaagggc

SEQ ID NO: 1837903 - RNA, 19 nt, Artificial Sequence
  Description of Artificial Sequence: Synthetic oligonucleotide
  Sense strand starting at position 2369 of SEQ ID NO: 1563866
uaacaagauugggaaggau

SEQ ID NO: 1837904 - RNA, 19 nt, Artificial Sequence
  Description of Artificial Sequence: Synthetic oligonucleotide
  Antisense strand to SEQ ID NO: 1837903
auccuucccaaucuuguua

SEQ ID NO: 1837905 - RNA, 19 nt, Artificial Sequence
  Description of Artificial Sequence: Synthetic oligonucleotide
  Sense strand starting at position 2579 of SEQ ID NO: 1563866
guagaauccaagcagcaga

SEQ ID NO: 1837906 - RNA, 19 nt, Artificial Sequence
  Description of Artificial Sequence: Synthetic oligonucleotide
  Antisense strand to SEQ ID NO: 1837905
ucugcugcuuggauucuac

SEQ ID NO: 1837907 - RNA, 19 nt, Artificial Sequence
  Description of Artificial Sequence: Synthetic oligonucleotide
  Sense strand starting at position 2954 of SEQ ID NO: 1563866
cuccuuagucucuaugaag

SEQ ID NO: 1837908 - RNA, 19 nt, Artificial Sequence
  Description of Artificial Sequence: Synthetic oligonucleotide
  Antisense strand to SEQ ID NO: 1837907
cuucauagagacuaaggag

SEQ ID NO: 1837909 - RNA, 19 nt, Artificial Sequence
  Description of Artificial Sequence: Synthetic oligonucleotide
  Sense strand starting at position 2961 of SEQ ID NO: 1563866
gucucuaugaagggaaauu

SEQ ID NO: 1837910 - RNA, 19 nt, Artificial Sequence
  Description of Artificial Sequence: Synthetic oligonucleotide
  Antisense strand to SEQ ID NO: 1837909
aauuucccuucauagagac

SEQ ID NO: 1837911 - RNA, 19 nt, Artificial Sequence
  Description of Artificial Sequence: Synthetic oligonucleotide
  Sense strand starting at position 3026 of SEQ ID NO: 1563866
gaaugugcuguuuaaugaa

SEQ ID NO: 1837912 - RNA, 19 nt, Artificial Sequence
  Description of Artificial Sequence: Synthetic oligonucleotide
  Antisense strand to SEQ ID NO: 1837911
uucauuaaacagcacauuc

SEQ ID NO: 1837913 - RNA, 19 nt, Artificial Sequence
  Description of Artificial Sequence: Synthetic oligonucleotide
  Sense strand starting at position 3077 of SEQ ID NO: 1563866
caguuuaacucagugugaa

SEQ ID NO: 1837914 - RNA, 19 nt, Artificial Sequence
  Description of Artificial Sequence: Synthetic oligonucleotide
  Antisense strand to SEQ ID NO: 1837913
uucacacugaguuaaacug

SEQ ID NO: 1837915 - RNA, 19 nt, Artificial Sequence
  Description of Artificial Sequence: Synthetic oligonucleotide
  Sense strand starting at position 3078 of SEQ ID NO: 1563866
aguuuaacucagugugaac

SEQ ID NO: 1837916 - RNA, 19 nt, Artificial Sequence
  Description of Artificial Sequence: Synthetic oligonucleotide
  Antisense strand to SEQ ID NO: 1837915
guucacacugaguuaaacu

SEQ ID NO: 1837917 - RNA, 19 nt, Artificial Sequence
  Description of Artificial Sequence: Synthetic oligonucleotide
  Sense strand starting at position 3170 of SEQ ID NO: 1563866
cugaaauagcauuaacgca

SEQ ID NO: 1837918 - RNA, 19 nt, Artificial Sequence
  Description of Artificial Sequence: Synthetic oligonucleotide
  Antisense strand to SEQ ID NO: 1837917
ugcguuaaugcuauuucag

SEQ ID NO: 1837919 - RNA, 19 nt, Artificial Sequence
  Description of Artificial Sequence: Synthetic oligonucleotide
  Sense strand starting at position 3192 of SEQ ID NO: 1563866
gugagcucugaguauuaga

SEQ ID NO: 1837920 - RNA, 19 nt, Artificial Sequence
  Description of Artificial Sequence: Synthetic oligonucleotide
  Antisense strand to SEQ ID NO: 1837919
ucuaauacucagagcucac

SEQ ID NO: 1837921 - RNA, 19 nt, Artificial Sequence
  Description of Artificial Sequence: Synthetic oligonucleotide
  Sense strand starting at position 3676 of SEQ ID NO: 1563866
gccagucaugaauguugaa

SEQ ID NO: 1837922 - RNA, 19 nt, Artificial Sequence
  Description of Artificial Sequence: Synthetic oligonucleotide
  Antisense strand to SEQ ID NO: 1837921
uucaacauucaugacuggc

SEQ ID NO: 1837923 - RNA, 19 nt, Artificial Sequence
  Description of Artificial Sequence: Synthetic oligonucleotide
  Sense strand starting at position 3701 of SEQ ID NO: 1563866
uuaguuacccacugaauga

SEQ ID NO: 1837924 - RNA, 19 nt, Artificial Sequence
  Description of Artificial Sequence: Synthetic oligonucleotide
  Antisense strand to SEQ ID NO: 1837923
ucauucaguggguaacuaa

SEQ ID NO: 1837925 - RNA, 19 nt, Artificial Sequence
  Description of Artificial Sequence: Synthetic oligonucleotide
  Sense strand starting at position 3831 of SEQ ID NO: 1563866
ugaaguugcaggcaaauga

SEQ ID NO: 1837926 - RNA, 19 nt, Artificial Sequence
  Description of Artificial Sequence: Synthetic oligonucleotide
  Antisense strand to SEQ ID NO: 1837925
ucauuugccugcaacuuca

SEQ ID NO: 1837927 - RNA, 19 nt, Artificial Sequence
  Description of Artificial Sequence: Synthetic oligonucleotide
  Sense strand starting at position 3914 of SEQ ID NO: 1563866
ugaccacucucauuagucu

SEQ ID NO: 1837928 - RNA, 19 nt, Artificial Sequence
  Description of Artificial Sequence: Synthetic oligonucleotide
  Antisense strand to SEQ ID NO: 1837927
agacuaaugagagugguca

SEQ ID NO: 1837929 - RNA, 19 nt, Artificial Sequence
  Description of Artificial Sequence: Synthetic oligonucleotide
  Sense strand starting at position 43 of SEQ ID NO: 1563867
aaaucauuguggccuguau

SEQ ID NO: 1837930 - RNA, 19 nt, Artificial Sequence
  Description of Artificial Sequence: Synthetic oligonucleotide
  Antisense strand to SEQ ID NO: 1837929
auacaggccacaaugauuu

SEQ ID NO: 1837931 - RNA, 19 nt, Artificial Sequence
  Description of Artificial Sequence: Synthetic oligonucleotide
  Sense strand starting at position 54 of SEQ ID NO: 1563867
gccuguauugcuuaugaca

SEQ ID NO: 1837932 - RNA, 19 nt, Artificial Sequence
  Description of Artificial Sequence: Synthetic oligonucleotide
  Antisense strand to SEQ ID NO: 1837931
ugucauaagcaauacaggc

SEQ ID NO: 1837933 - RNA, 19 nt, Artificial Sequence
  Description of Artificial Sequence: Synthetic oligonucleotide
  Sense strand starting at position 434 of SEQ ID NO: 1563867
agaggagucaccugggauc

SEQ ID NO: 1837934 - RNA, 19 nt, Artificial Sequence
  Description of Artificial Sequence: Synthetic oligonucleotide
  Antisense strand to SEQ ID NO: 1837933
gaucccaggugacuccucu

SEQ ID NO: 1837935 - RNA, 19 nt, Artificial Sequence
  Description of Artificial Sequence: Synthetic oligonucleotide
  Sense strand starting at position 436 of SEQ ID NO: 1563867
aggagucaccugggaucuu

SEQ ID NO: 1837936 - RNA, 19 nt, Artificial Sequence
  Description of Artificial Sequence: Synthetic oligonucleotide
  Antisense strand to SEQ ID NO: 1837935
aagaucccaggugacuccu

SEQ ID NO: 1837937 - RNA, 19 nt, Artificial Sequence
  Description of Artificial Sequence: Synthetic oligonucleotide
  Sense strand starting at position 568 of SEQ ID NO: 1563867
gcgagacuuuauguggaua

SEQ ID NO: 1837938 - RNA, 19 nt, Artificial Sequence
  Description of Artificial Sequence: Synthetic oligonucleotide
  Antisense strand to SEQ ID NO: 1837937
uauccacauaaagucucgc

SEQ ID NO: 1837939 - RNA, 19 nt, Artificial Sequence
  Description of Artificial Sequence: Synthetic oligonucleotide
  Sense strand starting at position 569 of SEQ ID NO: 1563867
cgagacuuuauguggauac

SEQ ID NO: 1837940 - RNA, 19 nt, Artificial Sequence
  Description of Artificial Sequence: Synthetic oligonucleotide
  Antisense strand to SEQ ID NO: 1837939
guauccacauaaagucucg

SEQ ID NO: 1837941 - RNA, 19 nt, Artificial Sequence
  Description of Artificial Sequence: Synthetic oligonucleotide
  Sense strand starting at position 592 of SEQ ID NO: 1563867
auguaauucucucuguaau

SEQ ID NO: 1837942 - RNA, 19 nt, Artificial Sequence
  Description of Artificial Sequence: Synthetic oligonucleotide
  Antisense strand to SEQ ID NO: 1837941
auuacagagagaauuacau

SEQ ID NO: 1837943 - RNA, 19 nt, Artificial Sequence
  Description of Artificial Sequence: Synthetic oligonucleotide
  Sense strand starting at position 593 of SEQ ID NO: 1563867
uguaauucucucuguaauc

SEQ ID NO: 1837944 - RNA, 19 nt, Artificial Sequence
  Description of Artificial Sequence: Synthetic oligonucleotide
  Antisense strand to SEQ ID NO: 1837943
gauuacagagagaauuaca

SEQ ID NO: 1837945 - RNA, 19 nt, Artificial Sequence
  Description of Artificial Sequence: Synthetic oligonucleotide
  Sense strand starting at position 594 of SEQ ID NO: 1563867
guaauucucucuguaaucu

SEQ ID NO: 1837946 - RNA, 19 nt, Artificial Sequence
  Description of Artificial Sequence: Synthetic oligonucleotide
  Antisense strand to SEQ ID NO: 1837945
agauuacagagagaauuac

SEQ ID NO: 1837947 - RNA, 19 nt, Artificial Sequence
  Description of Artificial Sequence: Synthetic oligonucleotide
  Sense strand starting at position 712 of SEQ ID NO: 1563867
uaaggacuacgcuauguaa

SEQ ID NO: 1837948 - RNA, 19 nt, Artificial Sequence
  Description of Artificial Sequence: Synthetic oligonucleotide
  Antisense strand to SEQ ID NO: 1837947
uuacauagcguaguccuua

SEQ ID NO: 1837949 - RNA, 19 nt, Artificial Sequence
  Description of Artificial Sequence: Synthetic oligonucleotide
  Sense strand starting at position 970 of SEQ ID NO: 1563867
gaagcauguggucagacga

SEQ ID NO: 1837950 - RNA, 19 nt, Artificial Sequence
  Description of Artificial Sequence: Synthetic oligonucleotide
  Antisense strand to SEQ ID NO: 1837949
ucgucugaccacaugcuuc

SEQ ID NO: 1837951 - RNA, 19 nt, Artificial Sequence
  Description of Artificial Sequence: Synthetic oligonucleotide
  Sense strand starting at position 981 of SEQ ID NO: 1563867
ucagacgacucuuccugau

SEQ ID NO: 1837952 - RNA, 19 nt, Artificial Sequence
  Description of Artificial Sequence: Synthetic oligonucleotide
  Antisense strand to SEQ ID NO: 1837951
aucaggaagagucgucuga

SEQ ID NO: 1837953 - RNA, 19 nt, Artificial Sequence
  Description of Artificial Sequence: Synthetic oligonucleotide
  Sense strand starting at position 1099 of SEQ ID NO: 1563867
guaguuagaaacugguuau

SEQ ID NO: 1837954 - RNA, 19 nt, Artificial Sequence
  Description of Artificial Sequence: Synthetic oligonucleotide
  Antisense strand to SEQ ID NO: 1837953
auaaccaguuucuaacuac

SEQ ID NO: 1837955 - RNA, 19 nt, Artificial Sequence
  Description of Artificial Sequence: Synthetic oligonucleotide
  Sense strand starting at position 1102 of SEQ ID NO: 1563867
guuagaaacugguuaugua

SEQ ID NO: 1837956 - RNA, 19 nt, Artificial Sequence
  Description of Artificial Sequence: Synthetic oligonucleotide
  Antisense strand to SEQ ID NO: 1837955
uacauaaccaguuucuaac

SEQ ID NO: 1837957 - RNA, 19 nt, Artificial Sequence
  Description of Artificial Sequence: Synthetic oligonucleotide
  Sense strand starting at position 1117 of SEQ ID NO: 1563867
uguaaauccuugcuauuug

SEQ ID NO: 1837958 - RNA, 19 nt, Artificial Sequence
  Description of Artificial Sequence: Synthetic oligonucleotide
  Antisense strand to SEQ ID NO: 1837957
caaauagcaaggauuuaca

SEQ ID NO: 1837959 - RNA, 19 nt, Artificial Sequence
  Description of Artificial Sequence: Synthetic oligonucleotide
  Sense strand starting at position 1126 of SEQ ID NO: 1563867
uugcuauuugagugugcua

SEQ ID NO: 1837960 - RNA, 19 nt, Artificial Sequence
  Description of Artificial Sequence: Synthetic oligonucleotide
  Antisense strand to SEQ ID NO: 1837959
uagcacacucaaauagcaa

SEQ ID NO: 1837961 - RNA, 19 nt, Artificial Sequence
  Description of Artificial Sequence: Synthetic oligonucleotide
  Sense strand starting at position 1128 of SEQ ID NO: 1563867
gcuauuugagugugcuacu

SEQ ID NO: 1837962 - RNA, 19 nt, Artificial Sequence
  Description of Artificial Sequence: Synthetic oligonucleotide
  Antisense strand to SEQ ID NO: 1837961
aguagcacacucaaauagc

SEQ ID NO: 1837963 - RNA, 19 nt, Artificial Sequence
  Description of Artificial Sequence: Synthetic oligonucleotide
  Sense strand starting at position 1129 of SEQ ID NO: 1563867
cuauuugagugugcuacuu

SEQ ID NO: 1837964 - RNA, 19 nt, Artificial Sequence
  Description of Artificial Sequence: Synthetic oligonucleotide
  Antisense strand to SEQ ID NO: 1837963
aaguagcacacucaaauag

SEQ ID NO: 1837965 - RNA, 19 nt, Artificial Sequence
  Description of Artificial Sequence: Synthetic oligonucleotide
  Sense strand starting at position 1148 of SEQ ID NO: 1563867
ugaaguacacucugugauc

SEQ ID NO: 1837966 - RNA, 19 nt, Artificial Sequence
  Description of Artificial Sequence: Synthetic oligonucleotide
  Antisense strand to SEQ ID NO: 1837965
gaucacagaguguacuuca

SEQ ID NO: 1837967 - RNA, 19 nt, Artificial Sequence
  Description of Artificial Sequence: Synthetic oligonucleotide
  Sense strand starting at position 1149 of SEQ ID NO: 1563867
gaaguacacucugugaucu

SEQ ID NO: 1837968 - RNA, 19 nt, Artificial Sequence
  Description of Artificial Sequence: Synthetic oligonucleotide
  Antisense strand to SEQ ID NO: 1837967
agaucacagaguguacuuc

SEQ ID NO: 1837969 - RNA, 19 nt, Artificial Sequence
  Description of Artificial Sequence: Synthetic oligonucleotide
  Sense strand starting at position 1373 of SEQ ID NO: 1563867
aagggaaagcacugucuuu

SEQ ID NO: 1837970 - RNA, 19 nt, Artificial Sequence
  Description of Artificial Sequence: Synthetic oligonucleotide
  Antisense strand to SEQ ID NO: 1837969
aaagacagugcuuucccuu

SEQ ID NO: 1837971 - RNA, 19 nt, Artificial Sequence
  Description of Artificial Sequence: Synthetic oligonucleotide
  Sense strand starting at position 2066 of SEQ ID NO: 1563867
gcaucuagucuuguagcga

SEQ ID NO: 1837972 - RNA, 19 nt, Artificial Sequence
  Description of Artificial Sequence: Synthetic oligonucleotide
  Antisense strand to SEQ ID NO: 1837971
ucgcuacaagacuagaugc

SEQ ID NO: 1837973 - RNA, 19 nt, Artificial Sequence
  Description of Artificial Sequence: Synthetic oligonucleotide
  Sense strand starting at position 2178 of SEQ ID NO: 1563867
ggucgucugaaguaauaau

SEQ ID NO: 1837974 - RNA, 19 nt, Artificial Sequence
  Description of Artificial Sequence: Synthetic oligonucleotide
  Antisense strand to SEQ ID NO: 1837973
auuauuacuucagacgacc

SEQ ID NO: 1837975 - RNA, 19 nt, Artificial Sequence
  Description of Artificial Sequence: Synthetic oligonucleotide
  Sense strand starting at position 2214 of SEQ ID NO: 1563867
ugucauagauauccagauu

SEQ ID NO: 1837976 - RNA, 19 nt, Artificial Sequence
  Description of Artificial Sequence: Synthetic oligonucleotide
  Antisense strand to SEQ ID NO: 1837975
aaucuggauaucuaugaca

SEQ ID NO: 1837977 - RNA, 19 nt, Artificial Sequence
  Description of Artificial Sequence: Synthetic oligonucleotide
  Sense strand starting at position 2299 of SEQ ID NO: 1563867
uuguccauuucugugaguu

SEQ ID NO: 1837978 - RNA, 19 nt, Artificial Sequence
  Description of Artificial Sequence: Synthetic oligonucleotide
  Antisense strand to SEQ ID NO: 1837977
aacucacagaaauggacaa

SEQ ID NO: 1837979 - RNA, 19 nt, Artificial Sequence
  Description of Artificial Sequence: Synthetic oligonucleotide
  Sense strand starting at position 2300 of SEQ ID NO: 1563867
uguccauuucugugaguuu

SEQ ID NO: 1837980 - RNA, 19 nt, Artificial Sequence
  Description of Artificial Sequence: Synthetic oligonucleotide
  Antisense strand to SEQ ID NO: 1837979
aaacucacagaaauggaca

SEQ ID NO: 1837981 - RNA, 19 nt, Artificial Sequence
  Description of Artificial Sequence: Synthetic oligonucleotide
  Sense strand starting at position 2343 of SEQ ID NO: 1563867
auacguguacccuaaucaa

SEQ ID NO: 1837982 - RNA, 19 nt, Artificial Sequence
  Description of Artificial Sequence: Synthetic oligonucleotide
  Antisense strand to SEQ ID NO: 1837981
uugauuaggguacacguau

SEQ ID NO: 1837983 - RNA, 19 nt, Artificial Sequence
  Description of Artificial Sequence: Synthetic oligonucleotide
  Sense strand starting at position 2463 of SEQ ID NO: 1563867
agcaauaaguacucuuugu

SEQ ID NO: 1837984 - RNA, 19 nt, Artificial Sequence
  Description of Artificial Sequence: Synthetic oligonucleotide
  Antisense strand to SEQ ID NO: 1837983
acaaagaguacuuauugcu

SEQ ID NO: 1837985 - RNA, 19 nt, Artificial Sequence
  Description of Artificial Sequence: Synthetic oligonucleotide
  Sense strand starting at position 2527 of SEQ ID NO: 1563867
ugauuaaauuaggcucuuu

SEQ ID NO: 1837986 - RNA, 19 nt, Artificial Sequence
  Description of Artificial Sequence: Synthetic oligonucleotide
  Antisense strand to SEQ ID NO: 1837985
aaagagccuaauuuaauca

SEQ ID NO: 1837987 - RNA, 19 nt, Artificial Sequence
  Description of Artificial Sequence: Synthetic oligonucleotide
  Sense strand starting at position 2619 of SEQ ID NO: 1563867
guuaauguauaccugauua

SEQ ID NO: 1837988 - RNA, 19 nt, Artificial Sequence
  Description of Artificial Sequence: Synthetic oligonucleotide
  Antisense strand to SEQ ID NO: 1837987
uaaucagguauacauuaac

SEQ ID NO: 1837989 - RNA, 19 nt, Artificial Sequence
  Description of Artificial Sequence: Synthetic oligonucleotide
  Sense strand starting at position 2717 of SEQ ID NO: 1563867
uucuguauccucgaccaau

SEQ ID NO: 1837990 - RNA, 19 nt, Artificial Sequence
  Description of Artificial Sequence: Synthetic oligonucleotide
  Antisense strand to SEQ ID NO: 1837989
auuggucgaggauacagaa

SEQ ID NO: 1837991 - RNA, 19 nt, Artificial Sequence
  Description of Artificial Sequence: Synthetic oligonucleotide
  Sense strand starting at position 2720 of SEQ ID NO: 1563867
uguauccucgaccaauuaa

SEQ ID NO: 1837992 - RNA, 19 nt, Artificial Sequence
  Description of Artificial Sequence: Synthetic oligonucleotide
  Antisense strand to SEQ ID NO: 1837991
uuaauuggucgaggauaca

SEQ ID NO: 1837993 - RNA, 19 nt, Artificial Sequence
  Description of Artificial Sequence: Synthetic oligonucleotide
  Sense strand starting at position 3223 of SEQ ID NO: 1563867
ggacauagcuggguguaaa

SEQ ID NO: 1837994 - RNA, 19 nt, Artificial Sequence
  Description of Artificial Sequence: Synthetic oligonucleotide
  Antisense strand to SEQ ID NO: 1837993
uuuacacccagcuaugucc

SEQ ID NO: 1837995 - RNA, 19 nt, Artificial Sequence
  Description of Artificial Sequence: Synthetic oligonucleotide
  Sense strand starting at position 3224 of SEQ ID NO: 1563867
gacauagcuggguguaaau

SEQ ID NO: 1837996 - RNA, 19 nt, Artificial Sequence
  Description of Artificial Sequence: Synthetic oligonucleotide
  Antisense strand to SEQ ID NO: 1837995
auuuacacccagcuauguc

SEQ ID NO: 1837997 - RNA, 19 nt, Artificial Sequence
  Description of Artificial Sequence: Synthetic oligonucleotide
  Sense strand starting at position 3226 of SEQ ID NO: 1563867
cauagcuggguguaaauua

SEQ ID NO: 1837998 - RNA, 19 nt, Artificial Sequence
  Description of Artificial Sequence: Synthetic oligonucleotide
  Antisense strand to SEQ ID NO: 1837997
uaauuuacacccagcuaug

SEQ ID NO: 1837999 - RNA, 19 nt, Artificial Sequence
  Description of Artificial Sequence: Synthetic oligonucleotide
  Sense strand starting at position 3366 of SEQ ID NO: 1563867
aagucacuugaagguuuau

SEQ ID NO: 1838000 - RNA, 19 nt, Artificial Sequence
  Description of Artificial Sequence: Synthetic oligonucleotide
  Antisense strand to SEQ ID NO: 1837999
auaaaccuucaagugacuu

SEQ ID NO: 1838001 - RNA, 19 nt, Artificial Sequence
  Description of Artificial Sequence: Synthetic oligonucleotide
  Sense strand starting at position 3442 of SEQ ID NO: 1563867
agucccuuuaacggaagau

SEQ ID NO: 1838002 - RNA, 19 nt, Artificial Sequence
  Description of Artificial Sequence: Synthetic oligonucleotide
  Antisense strand to SEQ ID NO: 1838001
aucuuccguuaaagggacu

SEQ ID NO: 1838003 - RNA, 19 nt, Artificial Sequence
  Description of Artificial Sequence: Synthetic oligonucleotide
  Sense strand starting at position 3443 of SEQ ID NO: 1563867
gucccuuuaacggaagaug

SEQ ID NO: 1838004 - RNA, 19 nt, Artificial Sequence
  Description of Artificial Sequence: Synthetic oligonucleotide
  Antisense strand to SEQ ID NO: 1838003
caucuuccguuaaagggac

SEQ ID NO: 1838005 - RNA, 19 nt, Artificial Sequence
  Description of Artificial Sequence: Synthetic oligonucleotide
  Sense strand starting at position 3572 of SEQ ID NO: 1563867
ucaaauaauguaugaguuc

SEQ ID NO: 1838006 - RNA, 19 nt, Artificial Sequence
  Description of Artificial Sequence: Synthetic oligonucleotide
  Antisense strand to SEQ ID NO: 1838005
gaacucauacauuauuuga

SEQ ID NO: 1838007 - RNA, 19 nt, Artificial Sequence
  Description of Artificial Sequence: Synthetic oligonucleotide
  Sense strand starting at position 3772 of SEQ ID NO: 1563867
cugggauuaugggcacaua

SEQ ID NO: 1838008 - RNA, 19 nt, Artificial Sequence
  Description of Artificial Sequence: Synthetic oligonucleotide
  Antisense strand to SEQ ID NO: 1838007
uaugugcccauaaucccag

SEQ ID NO: 1838009 - RNA, 19 nt, Artificial Sequence
  Description of Artificial Sequence: Synthetic oligonucleotide
  Sense strand starting at position 93 of SEQ ID NO: 1563868
gguucccaucagugguaaa

SEQ ID NO: 1838010 - RNA, 19 nt, Artificial Sequence
  Description of Artificial Sequence: Synthetic oligonucleotide
  Antisense strand to SEQ ID NO: 1838009
uuuaccacugaugggaacc

SEQ ID NO: 1838011 - RNA, 19 nt, Artificial Sequence
  Description of Artificial Sequence: Synthetic oligonucleotide
  Sense strand starting at position 94 of SEQ ID NO: 1563868
guucccaucagugguaaau

SEQ ID NO: 1838012 - RNA, 19 nt, Artificial Sequence
  Description of Artificial Sequence: Synthetic oligonucleotide
  Antisense strand to SEQ ID NO: 1838011
auuuaccacugaugggaac

SEQ ID NO: 1838013 - RNA, 19 nt, Artificial Sequence
  Description of Artificial Sequence: Synthetic oligonucleotide
  Sense strand starting at position 260 of SEQ ID NO: 1563868
guucucauuuaugaaggga

SEQ ID NO: 1838014 - RNA, 19 nt, Artificial Sequence
  Description of Artificial Sequence: Synthetic oligonucleotide
  Antisense strand to SEQ ID NO: 1838013
ucccuucauaaaugagaac

SEQ ID NO: 1838015 - RNA, 19 nt, Artificial Sequence
  Description of Artificial Sequence: Synthetic oligonucleotide
  Sense strand starting at position 301 of SEQ ID NO: 1563868
acauuaauaugggaacaac

SEQ ID NO: 1838016 - RNA, 19 nt, Artificial Sequence
  Description of Artificial Sequence: Synthetic oligonucleotide
  Antisense strand to SEQ ID NO: 1838015
guuguucccauauuaaugu

SEQ ID NO: 1838017 - RNA, 19 nt, Artificial Sequence
  Description of Artificial Sequence: Synthetic oligonucleotide
  Sense strand starting at position 604 of SEQ ID NO: 1563868
aacuuuauacugcgucaga

SEQ ID NO: 1838018 - RNA, 19 nt, Artificial Sequence
  Description of Artificial Sequence: Synthetic oligonucleotide
  Antisense strand to SEQ ID NO: 1838017
ucugacgcaguauaaaguu

SEQ ID NO: 1838019 - RNA, 19 nt, Artificial Sequence
  Description of Artificial Sequence: Synthetic oligonucleotide
  Sense strand starting at position 635 of SEQ ID NO: 1563868
aauaaagguugucuaagau

SEQ ID NO: 1838020 - RNA, 19 nt, Artificial Sequence
  Description of Artificial Sequence: Synthetic oligonucleotide
  Antisense strand to SEQ ID NO: 1838019
aucuuagacaaccuuuauu

SEQ ID NO: 1838021 - RNA, 19 nt, Artificial Sequence
  Description of Artificial Sequence: Synthetic oligonucleotide
  Sense strand starting at position 639 of SEQ ID NO: 1563868
aagguugucuaagauauuu

SEQ ID NO: 1838022 - RNA, 19 nt, Artificial Sequence
  Description of Artificial Sequence: Synthetic oligonucleotide
  Antisense strand to SEQ ID NO: 1838021
aaauaucuuagacaaccuu

SEQ ID NO: 1838023 - RNA, 19 nt, Artificial Sequence
  Description of Artificial Sequence: Synthetic oligonucleotide
  Sense strand starting at position 709 of SEQ ID NO: 1563868
uaaagaaguuaguagagaa

SEQ ID NO: 1838024 - RNA, 19 nt, Artificial Sequence
  Description of Artificial Sequence: Synthetic oligonucleotide
  Antisense strand to SEQ ID NO: 1838023
uucucuacuaacuucuuua

SEQ ID NO: 1838025 - RNA, 19 nt, Artificial Sequence
  Description of Artificial Sequence: Synthetic oligonucleotide
  Sense strand starting at position 930 of SEQ ID NO: 1563868
ucaccaaguuuggugaguu

SEQ ID NO: 1838026 - RNA, 19 nt, Artificial Sequence
  Description of Artificial Sequence: Synthetic oligonucleotide
  Antisense strand to SEQ ID NO: 1838025
aacucaccaaacuugguga

SEQ ID NO: 1838027 - RNA, 19 nt, Artificial Sequence
  Description of Artificial Sequence: Synthetic oligonucleotide
  Sense strand starting at position 1042 of SEQ ID NO: 1563868
agaagaccucuagguucuu

SEQ ID NO: 1838028 - RNA, 19 nt, Artificial Sequence
  Description of Artificial Sequence: Synthetic oligonucleotide
  Antisense strand to SEQ ID NO: 1838027
aagaaccuagaggucuucu

SEQ ID NO: 1838029 - RNA, 19 nt, Artificial Sequence
  Description of Artificial Sequence: Synthetic oligonucleotide
  Sense strand starting at position 1195 of SEQ ID NO: 1563868
uuuggaagauugcccucaa

SEQ ID NO: 1838030 - RNA, 19 nt, Artificial Sequence
  Description of Artificial Sequence: Synthetic oligonucleotide
  Antisense strand to SEQ ID NO: 1838029
uugagggcaaucuuccaaa

SEQ ID NO: 1838031 - RNA, 19 nt, Artificial Sequence
  Description of Artificial Sequence: Synthetic oligonucleotide
  Sense strand starting at position 1196 of SEQ ID NO: 1563868
uuggaagauugcccucaag

SEQ ID NO: 1838032 - RNA, 19 nt, Artificial Sequence
  Description of Artificial Sequence: Synthetic oligonucleotide
  Antisense strand to SEQ ID NO: 1838031
cuugagggcaaucuuccaa

SEQ ID NO: 1838033 - RNA, 19 nt, Artificial Sequence
  Description of Artificial Sequence: Synthetic oligonucleotide
  Sense strand starting at position 1278 of SEQ ID NO: 1563868
aguucuucuuggucuggaa

SEQ ID NO: 1838034 - RNA, 19 nt, Artificial Sequence
  Description of Artificial Sequence: Synthetic oligonucleotide
  Antisense strand to SEQ ID NO: 1838033
uuccagaccaagaagaacu

SEQ ID NO: 1838035 - RNA, 19 nt, Artificial Sequence
  Description of Artificial Sequence: Synthetic oligonucleotide
  Sense strand starting at position 1527 of SEQ ID NO: 1563868
cuaauaguuccagguuuac

SEQ ID NO: 1838036 - RNA, 19 nt, Artificial Sequence
  Description of Artificial Sequence: Synthetic oligonucleotide
  Antisense strand to SEQ ID NO: 1838035
guaaaccuggaacuauuag

SEQ ID NO: 1838037 - RNA, 19 nt, Artificial Sequence
  Description of Artificial Sequence: Synthetic oligonucleotide
  Sense strand starting at position 1536 of SEQ ID NO: 1563868
ccagguuuacaguggugaa

SEQ ID NO: 1838038 - RNA, 19 nt, Artificial Sequence
  Description of Artificial Sequence: Synthetic oligonucleotide
  Antisense strand to SEQ ID NO: 1838037
uucaccacuguaaaccugg

SEQ ID NO: 1838039 - RNA, 19 nt, Artificial Sequence
  Description of Artificial Sequence: Synthetic oligonucleotide
  Sense strand starting at position 1537 of SEQ ID NO: 1563868
cagguuuacaguggugaag

SEQ ID NO: 1838040 - RNA, 19 nt, Artificial Sequence
  Description of Artificial Sequence: Synthetic oligonucleotide
  Antisense strand to SEQ ID NO: 1838039
cuucaccacuguaaaccug

SEQ ID NO: 1838041 - RNA, 19 nt, Artificial Sequence
  Description of Artificial Sequence: Synthetic oligonucleotide
  Sense strand starting at position 1661 of SEQ ID NO: 1563868
aggcuauugcggucuguau

SEQ ID NO: 1838042 - RNA, 19 nt, Artificial Sequence
  Description of Artificial Sequence: Synthetic oligonucleotide
  Antisense strand to SEQ ID NO: 1838041
auacagaccgcaauagccu

SEQ ID NO: 1838043 - RNA, 19 nt, Artificial Sequence
  Description of Artificial Sequence: Synthetic oligonucleotide
  Sense strand starting at position 1669 of SEQ ID NO: 1563868
gcggucuguauggacagau

SEQ ID NO: 1838044 - RNA, 19 nt, Artificial Sequence
  Description of Artificial Sequence: Synthetic oligonucleotide
  Antisense strand to SEQ ID NO: 1838043
aucuguccauacagaccgc

SEQ ID NO: 1838045 - RNA, 19 nt, Artificial Sequence
  Description of Artificial Sequence: Synthetic oligonucleotide
  Sense strand starting at position 1717 of SEQ ID NO: 1563868
gcaaaucauugguccuaga

SEQ ID NO: 1838046 - RNA, 19 nt, Artificial Sequence
  Description of Artificial Sequence: Synthetic oligonucleotide
  Antisense strand to SEQ ID NO: 1838045
ucuaggaccaaugauuugc

SEQ ID NO: 1838047 - RNA, 19 nt, Artificial Sequence
  Description of Artificial Sequence: Synthetic oligonucleotide
  Sense strand starting at position 1882 of SEQ ID NO: 1563868
accacaaauguuuguccuu

SEQ ID NO: 1838048 - RNA, 19 nt, Artificial Sequence
  Description of Artificial Sequence: Synthetic oligonucleotide
  Antisense strand to SEQ ID NO: 1838047
aaggacaaacauuuguggu

SEQ ID NO: 1838049 - RNA, 19 nt, Artificial Sequence
  Description of Artificial Sequence: Synthetic oligonucleotide
  Sense strand starting at position 1883 of SEQ ID NO: 1563868
ccacaaauguuuguccuua

SEQ ID NO: 1838050 - RNA, 19 nt, Artificial Sequence
  Description of Artificial Sequence: Synthetic oligonucleotide
  Antisense strand to SEQ ID NO: 1838049
uaaggacaaacauuugugg

SEQ ID NO: 1838051 - RNA, 19 nt, Artificial Sequence
  Description of Artificial Sequence: Synthetic oligonucleotide
  Sense strand starting at position 1885 of SEQ ID NO: 1563868
acaaauguuuguccuuaag

SEQ ID NO: 1838052 - RNA, 19 nt, Artificial Sequence
  Description of Artificial Sequence: Synthetic oligonucleotide
  Antisense strand to SEQ ID NO: 1838051
cuuaaggacaaacauuugu

SEQ ID NO: 1838053 - RNA, 19 nt, Artificial Sequence
  Description of Artificial Sequence: Synthetic oligonucleotide
  Sense strand starting at position 2014 of SEQ ID NO: 1563868
aucugaugucagcaacuga

SEQ ID NO: 1838054 - RNA, 19 nt, Artificial Sequence
  Description of Artificial Sequence: Synthetic oligonucleotide
  Antisense strand to SEQ ID NO: 1838053
ucaguugcugacaucagau

SEQ ID NO: 1838055 - RNA, 19 nt, Artificial Sequence
  Description of Artificial Sequence: Synthetic oligonucleotide
  Sense strand starting at position 2137 of SEQ ID NO: 1563868
aaggacaaaucuggagaaa

SEQ ID NO: 1838056 - RNA, 19 nt, Artificial Sequence
  Description of Artificial Sequence: Synthetic oligonucleotide
  Antisense strand to SEQ ID NO: 1838055
uuucuccagauuuguccuu

SEQ ID NO: 1838057 - RNA, 19 nt, Artificial Sequence
  Description of Artificial Sequence: Synthetic oligonucleotide
  Sense strand starting at position 2170 of SEQ ID NO: 1563868
aagaguuagcccgacaguu

SEQ ID NO: 1838058 - RNA, 19 nt, Artificial Sequence
  Description of Artificial Sequence: Synthetic oligonucleotide
  Antisense strand to SEQ ID NO: 1838057
aacugucgggcuaacucuu

SEQ ID NO: 1838059 - RNA, 19 nt, Artificial Sequence
  Description of Artificial Sequence: Synthetic oligonucleotide
  Sense strand starting at position 2172 of SEQ ID NO: 1563868
gaguuagcccgacaguuug

SEQ ID NO: 1838060 - RNA, 19 nt, Artificial Sequence
  Description of Artificial Sequence: Synthetic oligonucleotide
  Antisense strand to SEQ ID NO: 1838059
caaacugucgggcuaacuc

SEQ ID NO: 1838061 - RNA, 19 nt, Artificial Sequence
  Description of Artificial Sequence: Synthetic oligonucleotide
  Sense strand starting at position 2260 of SEQ ID NO: 1563868
aauuguaugguguacaaua

SEQ ID NO: 1838062 - RNA, 19 nt, Artificial Sequence
  Description of Artificial Sequence: Synthetic oligonucleotide
  Antisense strand to SEQ ID NO: 1838061
uauuguacaccauacaauu

SEQ ID NO: 1838063 - RNA, 19 nt, Artificial Sequence
  Description of Artificial Sequence: Synthetic oligonucleotide
  Sense strand starting at position 2265 of SEQ ID NO: 1563868
uaugguguacaauaugauu

SEQ ID NO: 1838064 - RNA, 19 nt, Artificial Sequence
  Description of Artificial Sequence: Synthetic oligonucleotide
  Antisense strand to SEQ ID NO: 1838063
aaucauauuguacaccaua

SEQ ID NO: 1838065 - RNA, 19 nt, Artificial Sequence
  Description of Artificial Sequence: Synthetic oligonucleotide
  Sense strand starting at position 2812 of SEQ ID NO: 1563868
ccugucuacguguaaugau

SEQ ID NO: 1838066 - RNA, 19 nt, Artificial Sequence
  Description of Artificial Sequence: Synthetic oligonucleotide
  Antisense strand to SEQ ID NO: 1838065
aucauuacacguagacagg

SEQ ID NO: 1838067 - RNA, 19 nt, Artificial Sequence
  Description of Artificial Sequence: Synthetic oligonucleotide
  Sense strand starting at position 2827 of SEQ ID NO: 1563868
ugaugcauccuuugaccaa

SEQ ID NO: 1838068 - RNA, 19 nt, Artificial Sequence
  Description of Artificial Sequence: Synthetic oligonucleotide
  Antisense strand to SEQ ID NO: 1838067
uuggucaaaggaugcauca

SEQ ID NO: 1838069 - RNA, 19 nt, Artificial Sequence
  Description of Artificial Sequence: Synthetic oligonucleotide
  Sense strand starting at position 3444 of SEQ ID NO: 1563868
ucuugagguugcuuccaua

SEQ ID NO: 1838070 - RNA, 19 nt, Artificial Sequence
  Description of Artificial Sequence: Synthetic oligonucleotide
  Antisense strand to SEQ ID NO: 1838069
uauggaagcaaccucaaga

SEQ ID NO: 1838071 - RNA, 19 nt, Artificial Sequence
  Description of Artificial Sequence: Synthetic oligonucleotide
  Sense strand starting at position 3503 of SEQ ID NO: 1563868
guagauaucucuuugacag

SEQ ID NO: 1838072 - RNA, 19 nt, Artificial Sequence
  Description of Artificial Sequence: Synthetic oligonucleotide
  Antisense strand to SEQ ID NO: 1838071
cugucaaagagauaucuac

SEQ ID NO: 1838073 - RNA, 19 nt, Artificial Sequence
  Description of Artificial Sequence: Synthetic oligonucleotide
  Sense strand starting at position 3754 of SEQ ID NO: 1563868
auguuaucuaaaugugguu

SEQ ID NO: 1838074 - RNA, 19 nt, Artificial Sequence
  Description of Artificial Sequence: Synthetic oligonucleotide
  Antisense strand to SEQ ID NO: 1838073
aaccacauuuagauaacau

SEQ ID NO: 1838075 - RNA, 19 nt, Artificial Sequence
  Description of Artificial Sequence: Synthetic oligonucleotide
  Sense strand starting at position 3786 of SEQ ID NO: 1563868
uugugaugauaagugaugu

SEQ ID NO: 1838076 - RNA, 19 nt, Artificial Sequence
  Description of Artificial Sequence: Synthetic oligonucleotide
  Antisense strand to SEQ ID NO: 1838075
acaucacuuaucaucacaa

SEQ ID NO: 1838077 - RNA, 19 nt, Artificial Sequence
  Description of Artificial Sequence: Synthetic oligonucleotide
  Sense strand starting at position 3787 of SEQ ID NO: 1563868
ugugaugauaagugauguu

SEQ ID NO: 1838078 - RNA, 19 nt, Artificial Sequence
  Description of Artificial Sequence: Synthetic oligonucleotide
  Antisense strand to SEQ ID NO: 1838077
aacaucacuuaucaucaca

SEQ ID NO: 1838079 - RNA, 19 nt, Artificial Sequence
  Description of Artificial Sequence: Synthetic oligonucleotide
  Sense strand starting at position 3815 of SEQ ID NO: 1563868
gucauauacugguuggcca

SEQ ID NO: 1838080 - RNA, 19 nt, Artificial Sequence
  Description of Artificial Sequence: Synthetic oligonucleotide
  Antisense strand to SEQ ID NO: 1838079
uggccaaccaguauaugac

SEQ ID NO: 1838081 - RNA, 19 nt, Artificial Sequence
  Description of Artificial Sequence: Synthetic oligonucleotide
  Sense strand starting at position 3954 of SEQ ID NO: 1563868
ucagauguauggucuguaa

SEQ ID NO: 1838082 - RNA, 19 nt, Artificial Sequence
  Description of Artificial Sequence: Synthetic oligonucleotide
  Antisense strand to SEQ ID NO: 1838081
uuacagaccauacaucuga

SEQ ID NO: 1838083 - RNA, 19 nt, Artificial Sequence
  Description of Artificial Sequence: Synthetic oligonucleotide
  Sense strand starting at position 3956 of SEQ ID NO: 1563868
agauguauggucuguaagu

SEQ ID NO: 1838084 - RNA, 19 nt, Artificial Sequence
  Description of Artificial Sequence: Synthetic oligonucleotide
  Antisense strand to SEQ ID NO: 1838083
acuuacagaccauacaucu

SEQ ID NO: 1838085 - RNA, 19 nt, Artificial Sequence
  Description of Artificial Sequence: Synthetic oligonucleotide
  Sense strand starting at position 3957 of SEQ ID NO: 1563868
gauguauggucuguaagua

SEQ ID NO: 1838086 - RNA, 19 nt, Artificial Sequence
  Description of Artificial Sequence: Synthetic oligonucleotide
  Antisense strand to SEQ ID NO: 1838085
uacuuacagaccauacauc

SEQ ID NO: 1838087 - RNA, 19 nt, Artificial Sequence
  Description of Artificial Sequence: Synthetic oligonucleotide
  Sense strand starting at position 3958 of SEQ ID NO: 1563868
auguauggucuguaaguau

SEQ ID NO: 1838088 - RNA, 19 nt, Artificial Sequence
  Description of Artificial Sequence: Synthetic oligonucleotide
  Antisense strand to SEQ ID NO: 1838087
auacuuacagaccauacau

SEQ ID NO: 1838089 - RNA, 19 nt, Artificial Sequence
  Description of Artificial Sequence: Synthetic oligonucleotide
  Sense strand starting at position 151 of SEQ ID NO: 1563869
uuucuauuagauugagagu

SEQ ID NO: 1838090 - RNA, 19 nt, Artificial Sequence
  Description of Artificial Sequence: Synthetic oligonucleotide
  Antisense strand to SEQ ID NO: 1838089
acucucaaucuaauagaaa

SEQ ID NO: 1838091 - RNA, 19 nt, Artificial Sequence
  Description of Artificial Sequence: Synthetic oligonucleotide
  Sense strand starting at position 286 of SEQ ID NO: 1563869
aaugcauguguauagacau

SEQ ID NO: 1838092 - RNA, 19 nt, Artificial Sequence
  Description of Artificial Sequence: Synthetic oligonucleotide
  Antisense strand to SEQ ID NO: 1838091
augucuauacacaugcauu

SEQ ID NO: 1838093 - RNA, 19 nt, Artificial Sequence
  Description of Artificial Sequence: Synthetic oligonucleotide
  Sense strand starting at position 594 of SEQ ID NO: 1563869
cuaagagcuuuauuagaaa

SEQ ID NO: 1838094 - RNA, 19 nt, Artificial Sequence
  Description of Artificial Sequence: Synthetic oligonucleotide
  Antisense strand to SEQ ID NO: 1838093
uuucuaauaaagcucuuag

SEQ ID NO: 1838095 - RNA, 19 nt, Artificial Sequence
  Description of Artificial Sequence: Synthetic oligonucleotide
  Sense strand starting at position 745 of SEQ ID NO: 1563869
guguguuaucucgauauuu

SEQ ID NO: 1838096 - RNA, 19 nt, Artificial Sequence
  Description of Artificial Sequence: Synthetic oligonucleotide
  Antisense strand to SEQ ID NO: 1838095
aaauaucgagauaacacac

SEQ ID NO: 1838097 - RNA, 19 nt, Artificial Sequence
  Description of Artificial Sequence: Synthetic oligonucleotide
  Sense strand starting at position 933 of SEQ ID NO: 1563869
cugggaauuuacuauauga

SEQ ID NO: 1838098 - RNA, 19 nt, Artificial Sequence
  Description of Artificial Sequence: Synthetic oligonucleotide
  Antisense strand to SEQ ID NO: 1838097
ucauauaguaaauucccag

SEQ ID NO: 1838099 - RNA, 19 nt, Artificial Sequence
  Description of Artificial Sequence: Synthetic oligonucleotide
  Sense strand starting at position 1229 of SEQ ID NO: 1563869
agaccuauccauggcaaua

SEQ ID NO: 1838100 - RNA, 19 nt, Artificial Sequence
  Description of Artificial Sequence: Synthetic oligonucleotide
  Antisense strand to SEQ ID NO: 1838099
uauugccauggauaggucu

SEQ ID NO: 1838101 - RNA, 19 nt, Artificial Sequence
  Description of Artificial Sequence: Synthetic oligonucleotide
  Sense strand starting at position 1241 of SEQ ID NO: 1563869
ggcaauauacucuacuuga

SEQ ID NO: 1838102 - RNA, 19 nt, Artificial Sequence
  Description of Artificial Sequence: Synthetic oligonucleotide
  Antisense strand to SEQ ID NO: 1838101
ucaaguagaguauauugcc

SEQ ID NO: 1838103 - RNA, 19 nt, Artificial Sequence
  Description of Artificial Sequence: Synthetic oligonucleotide
  Sense strand starting at position 1577 of SEQ ID NO: 1563869
gcacuugaacuugggaaca

SEQ ID NO: 1838104 - RNA, 19 nt, Artificial Sequence
  Description of Artificial Sequence: Synthetic oligonucleotide
  Antisense strand to SEQ ID NO: 1838103
uguucccaaguucaagugc

SEQ ID NO: 1838105 - RNA, 19 nt, Artificial Sequence
  Description of Artificial Sequence: Synthetic oligonucleotide
  Sense strand starting at position 1716 of SEQ ID NO: 1563869
caacgcaacguugaugaaa

SEQ ID NO: 1838106 - RNA, 19 nt, Artificial Sequence
  Description of Artificial Sequence: Synthetic oligonucleotide
  Antisense strand to SEQ ID NO: 1838105
uuucaucaacguugcguug

SEQ ID NO: 1838107 - RNA, 19 nt, Artificial Sequence
  Description of Artificial Sequence: Synthetic oligonucleotide
  Sense strand starting at position 1856 of SEQ ID NO: 1563869
accacuaucccugauuagu

SEQ ID NO: 1838108 - RNA, 19 nt, Artificial Sequence
  Description of Artificial Sequence: Synthetic oligonucleotide
  Antisense strand to SEQ ID NO: 1838107
acuaaucagggauaguggu

SEQ ID NO: 1838109 - RNA, 19 nt, Artificial Sequence
  Description of Artificial Sequence: Synthetic oligonucleotide
  Sense strand starting at position 1867 of SEQ ID NO: 1563869
ugauuagucagcugacaga

SEQ ID NO: 1838110 - RNA, 19 nt, Artificial Sequence
  Description of Artificial Sequence: Synthetic oligonucleotide
  Antisense strand to SEQ ID NO: 1838109
ucugucagcugacuaauca

SEQ ID NO: 1838111 - RNA, 19 nt, Artificial Sequence
  Description of Artificial Sequence: Synthetic oligonucleotide
  Sense strand starting at position 1932 of SEQ ID NO: 1563869
auuacuuagccugauugaa

SEQ ID NO: 1838112 - RNA, 19 nt, Artificial Sequence
  Description of Artificial Sequence: Synthetic oligonucleotide
  Antisense strand to SEQ ID NO: 1838111
uucaaucaggcuaaguaau

SEQ ID NO: 1838113 - RNA, 19 nt, Artificial Sequence
  Description of Artificial Sequence: Synthetic oligonucleotide
  Sense strand starting at position 1942 of SEQ ID NO: 1563869
cugauugaaccuuguggau

SEQ ID NO: 1838114 - RNA, 19 nt, Artificial Sequence
  Description of Artificial Sequence: Synthetic oligonucleotide
  Antisense strand to SEQ ID NO: 1838113
auccacaagguucaaucag

SEQ ID NO: 1838115 - RNA, 19 nt, Artificial Sequence
  Description of Artificial Sequence: Synthetic oligonucleotide
  Sense strand starting at position 1983 of SEQ ID NO: 1563869
gaagaucaggcauguccua

SEQ ID NO: 1838116 - RNA, 19 nt, Artificial Sequence
  Description of Artificial Sequence: Synthetic oligonucleotide
  Antisense strand to SEQ ID NO: 1838115
uaggacaugccugaucuuc

SEQ ID NO: 1838117 - RNA, 19 nt, Artificial Sequence
  Description of Artificial Sequence: Synthetic oligonucleotide
  Sense strand starting at position 2101 of SEQ ID NO: 1563869
ugcuaagaaucuuugugaa

SEQ ID NO: 1838118 - RNA, 19 nt, Artificial Sequence
  Description of Artificial Sequence: Synthetic oligonucleotide
  Antisense strand to SEQ ID NO: 1838117
uucacaaagauucuuagca

SEQ ID NO: 1838119 - RNA, 19 nt, Artificial Sequence
  Description of Artificial Sequence: Synthetic oligonucleotide
  Sense strand starting at position 2103 of SEQ ID NO: 1563869
cuaagaaucuuugugaagg

SEQ ID NO: 1838120 - RNA, 19 nt, Artificial Sequence
  Description of Artificial Sequence: Synthetic oligonucleotide
  Antisense strand to SEQ ID NO: 1838119
ccuucacaaagauucuuag

SEQ ID NO: 1838121 - RNA, 19 nt, Artificial Sequence
  Description of Artificial Sequence: Synthetic oligonucleotide
  Sense strand starting at position 2287 of SEQ ID NO: 1563869
acuuucuaagacggauaca

SEQ ID NO: 1838122 - RNA, 19 nt, Artificial Sequence
  Description of Artificial Sequence: Synthetic oligonucleotide
  Antisense strand to SEQ ID NO: 1838121
uguauccgucuuagaaagu

SEQ ID NO: 1838123 - RNA, 19 nt, Artificial Sequence
  Description of Artificial Sequence: Synthetic oligonucleotide
  Sense strand starting at position 2449 of SEQ ID NO: 1563869
acagacacuuguuugaaau

SEQ ID NO: 1838124 - RNA, 19 nt, Artificial Sequence
  Description of Artificial Sequence: Synthetic oligonucleotide
  Antisense strand to SEQ ID NO: 1838123
auuucaaacaagugucugu

SEQ ID NO: 1838125 - RNA, 19 nt, Artificial Sequence
  Description of Artificial Sequence: Synthetic oligonucleotide
  Sense strand starting at position 2598 of SEQ ID NO: 1563869
aguuacuaaugguugagau

SEQ ID NO: 1838126 - RNA, 19 nt, Artificial Sequence
  Description of Artificial Sequence: Synthetic oligonucleotide
  Antisense strand to SEQ ID NO: 1838125
aucucaaccauuaguaacu

SEQ ID NO: 1838127 - RNA, 19 nt, Artificial Sequence
  Description of Artificial Sequence: Synthetic oligonucleotide
  Sense strand starting at position 2599 of SEQ ID NO: 1563869
guuacuaaugguugagaug

SEQ ID NO: 1838128 - RNA, 19 nt, Artificial Sequence
  Description of Artificial Sequence: Synthetic oligonucleotide
  Antisense strand to SEQ ID NO: 1838127
caucucaaccauuaguaac

SEQ ID NO: 1838129 - RNA, 19 nt, Artificial Sequence
  Description of Artificial Sequence: Synthetic oligonucleotide
  Sense strand starting at position 2600 of SEQ ID NO: 1563869
uuacuaaugguugagaugu

SEQ ID NO: 1838130 - RNA, 19 nt, Artificial Sequence
  Description of Artificial Sequence: Synthetic oligonucleotide
  Antisense strand to SEQ ID NO: 1838129
acaucucaaccauuaguaa

SEQ ID NO: 1838131 - RNA, 19 nt, Artificial Sequence
  Description of Artificial Sequence: Synthetic oligonucleotide
  Sense strand starting at position 2630 of SEQ ID NO: 1563869
ucuugaguaugaguauaga

SEQ ID NO: 1838132 - RNA, 19 nt, Artificial Sequence
  Description of Artificial Sequence: Synthetic oligonucleotide
  Antisense strand to SEQ ID NO: 1838131
ucuauacucauacucaaga

SEQ ID NO: 1838133 - RNA, 19 nt, Artificial Sequence
  Description of Artificial Sequence: Synthetic oligonucleotide
  Sense strand starting at position 2714 of SEQ ID NO: 1563869
guuacauguggucagaauc

SEQ ID NO: 1838134 - RNA, 19 nt, Artificial Sequence
  Description of Artificial Sequence: Synthetic oligonucleotide
  Antisense strand to SEQ ID NO: 1838133
gauucugaccacauguaac

SEQ ID NO: 1838135 - RNA, 19 nt, Artificial Sequence
  Description of Artificial Sequence: Synthetic oligonucleotide
  Sense strand starting at position 2752 of SEQ ID NO: 1563869
gcacgaucaauuuggcagu

SEQ ID NO: 1838136 - RNA, 19 nt, Artificial Sequence
  Description of Artificial Sequence: Synthetic oligonucleotide
  Antisense strand to SEQ ID NO: 1838135
acugccaaauugaucgugc

SEQ ID NO: 1838137 - RNA, 19 nt, Artificial Sequence
  Description of Artificial Sequence: Synthetic oligonucleotide
  Sense strand starting at position 2836 of SEQ ID NO: 1563869
gaaagcagcccugggaaua

SEQ ID NO: 1838138 - RNA, 19 nt, Artificial Sequence
  Description of Artificial Sequence: Synthetic oligonucleotide
  Antisense strand to SEQ ID NO: 1838137
uauucccagggcugcuuuc

SEQ ID NO: 1838139 - RNA, 19 nt, Artificial Sequence
  Description of Artificial Sequence: Synthetic oligonucleotide
  Sense strand starting at position 2876 of SEQ ID NO: 1563869
ccgguagacaaguaauuac

SEQ ID NO: 1838140 - RNA, 19 nt, Artificial Sequence
  Description of Artificial Sequence: Synthetic oligonucleotide
  Antisense strand to SEQ ID NO: 1838139
guaauuacuugucuaccgg

SEQ ID NO: 1838141 - RNA, 19 nt, Artificial Sequence
  Description of Artificial Sequence: Synthetic oligonucleotide
  Sense strand starting at position 3120 of SEQ ID NO: 1563869
uguaacaagugcuuuauuu

SEQ ID NO: 1838142 - RNA, 19 nt, Artificial Sequence
  Description of Artificial Sequence: Synthetic oligonucleotide
  Antisense strand to SEQ ID NO: 1838141
aaauaaagcacuuguuaca

SEQ ID NO: 1838143 - RNA, 19 nt, Artificial Sequence
  Description of Artificial Sequence: Synthetic oligonucleotide
  Sense strand starting at position 3128 of SEQ ID NO: 1563869
gugcuuuauuuaguauaag

SEQ ID NO: 1838144 - RNA, 19 nt, Artificial Sequence
  Description of Artificial Sequence: Synthetic oligonucleotide
  Antisense strand to SEQ ID NO: 1838143
cuuauacuaaauaaagcac

SEQ ID NO: 1838145 - RNA, 19 nt, Artificial Sequence
  Description of Artificial Sequence: Synthetic oligonucleotide
  Sense strand starting at position 3247 of SEQ ID NO: 1563869
acugauaaggcucaauugu

SEQ ID NO: 1838146 - RNA, 19 nt, Artificial Sequence
  Description of Artificial Sequence: Synthetic oligonucleotide
  Antisense strand to SEQ ID NO: 1838145
acaauugagccuuaucagu

SEQ ID NO: 1838147 - RNA, 19 nt, Artificial Sequence
  Description of Artificial Sequence: Synthetic oligonucleotide
  Sense strand starting at position 3255 of SEQ ID NO: 1563869
ggcucaauuguauauggag

SEQ ID NO: 1838148 - RNA, 19 nt, Artificial Sequence
  Description of Artificial Sequence: Synthetic oligonucleotide
  Antisense strand to SEQ ID NO: 1838147
cuccauauacaauugagcc

SEQ ID NO: 1838149 - RNA, 19 nt, Artificial Sequence
  Description of Artificial Sequence: Synthetic oligonucleotide
  Sense strand starting at position 3257 of SEQ ID NO: 1563869
cucaauuguauauggagga

SEQ ID NO: 1838150 - RNA, 19 nt, Artificial Sequence
  Description of Artificial Sequence: Synthetic oligonucleotide
  Antisense strand to SEQ ID NO: 1838149
uccuccauauacaauugag

SEQ ID NO: 1838151 - RNA, 19 nt, Artificial Sequence
  Description of Artificial Sequence: Synthetic oligonucleotide
  Sense strand starting at position 3333 of SEQ ID NO: 1563869
gucuauuuguaagccaauu

SEQ ID NO: 1838152 - RNA, 19 nt, Artificial Sequence
  Description of Artificial Sequence: Synthetic oligonucleotide
  Antisense strand to SEQ ID NO: 1838151
aauuggcuuacaaauagac

SEQ ID NO: 1838153 - RNA, 19 nt, Artificial Sequence
  Description of Artificial Sequence: Synthetic oligonucleotide
  Sense strand starting at position 3426 of SEQ ID NO: 1563869
gcuauuugagcuuggauuc

SEQ ID NO: 1838154 - RNA, 19 nt, Artificial Sequence
  Description of Artificial Sequence: Synthetic oligonucleotide
  Antisense strand to SEQ ID NO: 1838153
gaauccaagcucaaauagc

SEQ ID NO: 1838155 - RNA, 19 nt, Artificial Sequence
  Description of Artificial Sequence: Synthetic oligonucleotide
  Sense strand starting at position 3519 of SEQ ID NO: 1563869
ugcaguacuuaaucaggaa

SEQ ID NO: 1838156 - RNA, 19 nt, Artificial Sequence
  Description of Artificial Sequence: Synthetic oligonucleotide
  Antisense strand to SEQ ID NO: 1838155
uuccugauuaaguacugca

SEQ ID NO: 1838157 - RNA, 19 nt, Artificial Sequence
  Description of Artificial Sequence: Synthetic oligonucleotide
  Sense strand starting at position 3713 of SEQ ID NO: 1563869
uuugcuuauuuguccaaag

SEQ ID NO: 1838158 - RNA, 19 nt, Artificial Sequence
  Description of Artificial Sequence: Synthetic oligonucleotide
  Antisense strand to SEQ ID NO: 1838157
cuuuggacaaauaagcaaa

SEQ ID NO: 1838159 - RNA, 19 nt, Artificial Sequence
  Description of Artificial Sequence: Synthetic oligonucleotide
  Sense strand starting at position 3714 of SEQ ID NO: 1563869
uugcuuauuuguccaaagu

SEQ ID NO: 1838160 - RNA, 19 nt, Artificial Sequence
  Description of Artificial Sequence: Synthetic oligonucleotide
  Antisense strand to SEQ ID NO: 1838159
acuuuggacaaauaagcaa

SEQ ID NO: 1838161 - RNA, 19 nt, Artificial Sequence
  Description of Artificial Sequence: Synthetic oligonucleotide
  Sense strand starting at position 3786 of SEQ ID NO: 1563869
uugcaagugcuagaacauu

SEQ ID NO: 1838162 - RNA, 19 nt, Artificial Sequence
  Description of Artificial Sequence: Synthetic oligonucleotide
  Antisense strand to SEQ ID NO: 1838161
aauguucuagcacuugcaa

SEQ ID NO: 1838163 - RNA, 19 nt, Artificial Sequence
  Description of Artificial Sequence: Synthetic oligonucleotide
  Sense strand starting at position 3795 of SEQ ID NO: 1563869
cuagaacauuggcuuggaa

SEQ ID NO: 1838164 - RNA, 19 nt, Artificial Sequence
  Description of Artificial Sequence: Synthetic oligonucleotide
  Antisense strand to SEQ ID NO: 1838163
uuccaagccaauguucuag

SEQ ID NO: 1838165 - RNA, 19 nt, Artificial Sequence
  Description of Artificial Sequence: Synthetic oligonucleotide
  Sense strand starting at position 3797 of SEQ ID NO: 1563869
agaacauuggcuuggaagu

SEQ ID NO: 1838166 - RNA, 19 nt, Artificial Sequence
  Description of Artificial Sequence: Synthetic oligonucleotide
  Antisense strand to SEQ ID NO: 1838165
acuuccaagccaauguucu

SEQ ID NO: 1838167 - RNA, 19 nt, Artificial Sequence
  Description of Artificial Sequence: Synthetic oligonucleotide
  Sense strand starting at position 3971 of SEQ ID NO: 1563869
uagucugauagaggaaguu

SEQ ID NO: 1838168 - RNA, 19 nt, Artificial Sequence
  Description of Artificial Sequence: Synthetic oligonucleotide
  Antisense strand to SEQ ID NO: 1838167
aacuuccucuaucagacua

SEQ ID NO: 1838169 - RNA, 19 nt, Artificial Sequence
  Description of Artificial Sequence: Synthetic oligonucleotide
  Sense strand starting at position 183 of SEQ ID NO: 1563870
cuccgugcccggcaauaaa

SEQ ID NO: 1838170 - RNA, 19 nt, Artificial Sequence
  Description of Artificial Sequence: Synthetic oligonucleotide
  Antisense strand to SEQ ID NO: 1838169
uuuauugccgggcacggag

SEQ ID NO: 1838171 - RNA, 19 nt, Artificial Sequence
  Description of Artificial Sequence: Synthetic oligonucleotide
  Sense strand starting at position 237 of SEQ ID NO: 1563870
ggcuuucuggaaugcauga

SEQ ID NO: 1838172 - RNA, 19 nt, Artificial Sequence
  Description of Artificial Sequence: Synthetic oligonucleotide
  Antisense strand to SEQ ID NO: 1838171
ucaugcauuccagaaagcc

SEQ ID NO: 1838173 - RNA, 19 nt, Artificial Sequence
  Description of Artificial Sequence: Synthetic oligonucleotide
  Sense strand starting at position 339 of SEQ ID NO: 1563870
ugagucaauuaucagaagu

SEQ ID NO: 1838174 - RNA, 19 nt, Artificial Sequence
  Description of Artificial Sequence: Synthetic oligonucleotide
  Antisense strand to SEQ ID NO: 1838173
acuucugauaauugacuca

SEQ ID NO: 1838175 - RNA, 19 nt, Artificial Sequence
  Description of Artificial Sequence: Synthetic oligonucleotide
  Sense strand starting at position 341 of SEQ ID NO: 1563870
agucaauuaucagaaguca

SEQ ID NO: 1838176 - RNA, 19 nt, Artificial Sequence
  Description of Artificial Sequence: Synthetic oligonucleotide
  Antisense strand to SEQ ID NO: 1838175
ugacuucugauaauugacu

SEQ ID NO: 1838177 - RNA, 19 nt, Artificial Sequence
  Description of Artificial Sequence: Synthetic oligonucleotide
  Sense strand starting at position 425 of SEQ ID NO: 1563870
ugucuuaucugauuaaaug

SEQ ID NO: 1838178 - RNA, 19 nt, Artificial Sequence
  Description of Artificial Sequence: Synthetic oligonucleotide
  Antisense strand to SEQ ID NO: 1838177
cauuuaaucagauaagaca

SEQ ID NO: 1838179 - RNA, 19 nt, Artificial Sequence
  Description of Artificial Sequence: Synthetic oligonucleotide
  Sense strand starting at position 426 of SEQ ID NO: 1563870
gucuuaucugauuaaaugc

SEQ ID NO: 1838180 - RNA, 19 nt, Artificial Sequence
  Description of Artificial Sequence: Synthetic oligonucleotide
  Antisense strand to SEQ ID NO: 1838179
gcauuuaaucagauaagac

SEQ ID NO: 1838181 - RNA, 19 nt, Artificial Sequence
  Description of Artificial Sequence: Synthetic oligonucleotide
  Sense strand starting at position 516 of SEQ ID NO: 1563870
ccuuacauuugugaaguaa

SEQ ID NO: 1838182 - RNA, 19 nt, Artificial Sequence
  Description of Artificial Sequence: Synthetic oligonucleotide
  Antisense strand to SEQ ID NO: 1838181
uuacuucacaaauguaagg

SEQ ID NO: 1838183 - RNA, 19 nt, Artificial Sequence
  Description of Artificial Sequence: Synthetic oligonucleotide
  Sense strand starting at position 625 of SEQ ID NO: 1563870
agacaaaugucacaaagua

SEQ ID NO: 1838184 - RNA, 19 nt, Artificial Sequence
  Description of Artificial Sequence: Synthetic oligonucleotide
  Antisense strand to SEQ ID NO: 1838183
uacuuugugacauuugucu

SEQ ID NO: 1838185 - RNA, 19 nt, Artificial Sequence
  Description of Artificial Sequence: Synthetic oligonucleotide
  Sense strand starting at position 640 of SEQ ID NO: 1563870
aguaccaaguuagauauuu

SEQ ID NO: 1838186 - RNA, 19 nt, Artificial Sequence
  Description of Artificial Sequence: Synthetic oligonucleotide
  Antisense strand to SEQ ID NO: 1838185
aaauaucuaacuugguacu

SEQ ID NO: 1838187 - RNA, 19 nt, Artificial Sequence
  Description of Artificial Sequence: Synthetic oligonucleotide
  Sense strand starting at position 685 of SEQ ID NO: 1563870
acgcauauacagugauaaa

SEQ ID NO: 1838188 - RNA, 19 nt, Artificial Sequence
  Description of Artificial Sequence: Synthetic oligonucleotide
  Antisense strand to SEQ ID NO: 1838187
uuuaucacuguauaugcgu

SEQ ID NO: 1838189 - RNA, 19 nt, Artificial Sequence
  Description of Artificial Sequence: Synthetic oligonucleotide
  Sense strand starting at position 766 of SEQ ID NO: 1563870
augcaaguccaguagagaa

SEQ ID NO: 1838190 - RNA, 19 nt, Artificial Sequence
  Description of Artificial Sequence: Synthetic oligonucleotide
  Antisense strand to SEQ ID NO: 1838189
uucucuacuggacuugcau

SEQ ID NO: 1838191 - RNA, 19 nt, Artificial Sequence
  Description of Artificial Sequence: Synthetic oligonucleotide
  Sense strand starting at position 832 of SEQ ID NO: 1563870
uuaauuccauuguuaggua

SEQ ID NO: 1838192 - RNA, 19 nt, Artificial Sequence
  Description of Artificial Sequence: Synthetic oligonucleotide
  Antisense strand to SEQ ID NO: 1838191
uaccuaacaauggaauuaa

SEQ ID NO: 1838193 - RNA, 19 nt, Artificial Sequence
  Description of Artificial Sequence: Synthetic oligonucleotide
  Sense strand starting at position 1003 of SEQ ID NO: 1563870
uagaguuauucugugucua

SEQ ID NO: 1838194 - RNA, 19 nt, Artificial Sequence
  Description of Artificial Sequence: Synthetic oligonucleotide
  Antisense strand to SEQ ID NO: 1838193
uagacacagaauaacucua

SEQ ID NO: 1838195 - RNA, 19 nt, Artificial Sequence
  Description of Artificial Sequence: Synthetic oligonucleotide
  Sense strand starting at position 1004 of SEQ ID NO: 1563870
agaguuauucugugucuac

SEQ ID NO: 1838196 - RNA, 19 nt, Artificial Sequence
  Description of Artificial Sequence: Synthetic oligonucleotide
  Antisense strand to SEQ ID NO: 1838195
guagacacagaauaacucu

SEQ ID NO: 1838197 - RNA, 19 nt, Artificial Sequence
  Description of Artificial Sequence: Synthetic oligonucleotide
  Sense strand starting at position 1005 of SEQ ID NO: 1563870
gaguuauucugugucuacc

SEQ ID NO: 1838198 - RNA, 19 nt, Artificial Sequence
  Description of Artificial Sequence: Synthetic oligonucleotide
  Antisense strand to SEQ ID NO: 1838197
gguagacacagaauaacuc

SEQ ID NO: 1838199 - RNA, 19 nt, Artificial Sequence
  Description of Artificial Sequence: Synthetic oligonucleotide
  Sense strand starting at position 1066 of SEQ ID NO: 1563870
uuaguaugagugcaaucua

SEQ ID NO: 1838200 - RNA, 19 nt, Artificial Sequence
  Description of Artificial Sequence: Synthetic oligonucleotide
  Antisense strand to SEQ ID NO: 1838199
uagauugcacucauacuaa

SEQ ID NO: 1838201 - RNA, 19 nt, Artificial Sequence
  Description of Artificial Sequence: Synthetic oligonucleotide
  Sense strand starting at position 1132 of SEQ ID NO: 1563870
gacuuaccaucggacuauu

SEQ ID NO: 1838202 - RNA, 19 nt, Artificial Sequence
  Description of Artificial Sequence: Synthetic oligonucleotide
  Antisense strand to SEQ ID NO: 1838201
aauaguccgaugguaaguc

SEQ ID NO: 1838203 - RNA, 19 nt, Artificial Sequence
  Description of Artificial Sequence: Synthetic oligonucleotide
  Sense strand starting at position 1534 of SEQ ID NO: 1563870
ggaggaauaugagacauac

SEQ ID NO: 1838204 - RNA, 19 nt, Artificial Sequence
  Description of Artificial Sequence: Synthetic oligonucleotide
  Antisense strand to SEQ ID NO: 1838203
guaugucucauauuccucc

SEQ ID NO: 1838205 - RNA, 19 nt, Artificial Sequence
  Description of Artificial Sequence: Synthetic oligonucleotide
  Sense strand starting at position 1580 of SEQ ID NO: 1563870
acaaaugccuuuccuggaa

SEQ ID NO: 1838206 - RNA, 19 nt, Artificial Sequence
  Description of Artificial Sequence: Synthetic oligonucleotide
  Antisense strand to SEQ ID NO: 1838205
uuccaggaaaggcauuugu

SEQ ID NO: 1838207 - RNA, 19 nt, Artificial Sequence
  Description of Artificial Sequence: Synthetic oligonucleotide
  Sense strand starting at position 1781 of SEQ ID NO: 1563870
uucuaagaucccuauucgu

SEQ ID NO: 1838208 - RNA, 19 nt, Artificial Sequence
  Description of Artificial Sequence: Synthetic oligonucleotide
  Antisense strand to SEQ ID NO: 1838207
acgaauagggaucuuagaa

SEQ ID NO: 1838209 - RNA, 19 nt, Artificial Sequence
  Description of Artificial Sequence: Synthetic oligonucleotide
  Sense strand starting at position 2148 of SEQ ID NO: 1563870
cacggaugugauugguaga

SEQ ID NO: 1838210 - RNA, 19 nt, Artificial Sequence
  Description of Artificial Sequence: Synthetic oligonucleotide
  Antisense strand to SEQ ID NO: 1838209
ucuaccaaucacauccgug

SEQ ID NO: 1838211 - RNA, 19 nt, Artificial Sequence
  Description of Artificial Sequence: Synthetic oligonucleotide
  Sense strand starting at position 2149 of SEQ ID NO: 1563870
acggaugugauugguagaa

SEQ ID NO: 1838212 - RNA, 19 nt, Artificial Sequence
  Description of Artificial Sequence: Synthetic oligonucleotide
  Antisense strand to SEQ ID NO: 1838211
uucuaccaaucacauccgu

SEQ ID NO: 1838213 - RNA, 19 nt, Artificial Sequence
  Description of Artificial Sequence: Synthetic oligonucleotide
  Sense strand starting at position 2151 of SEQ ID NO: 1563870
ggaugugauugguagaacc

SEQ ID NO: 1838214 - RNA, 19 nt, Artificial Sequence
  Description of Artificial Sequence: Synthetic oligonucleotide
  Antisense strand to SEQ ID NO: 1838213
gguucuaccaaucacaucc

SEQ ID NO: 1838215 - RNA, 19 nt, Artificial Sequence
  Description of Artificial Sequence: Synthetic oligonucleotide
  Sense strand starting at position 2153 of SEQ ID NO: 1563870
augugauugguagaacccu

SEQ ID NO: 1838216 - RNA, 19 nt, Artificial Sequence
  Description of Artificial Sequence: Synthetic oligonucleotide
  Antisense strand to SEQ ID NO: 1838215
aggguucuaccaaucacau

SEQ ID NO: 1838217 - RNA, 19 nt, Artificial Sequence
  Description of Artificial Sequence: Synthetic oligonucleotide
  Sense strand starting at position 2307 of SEQ ID NO: 1563870
agagcauaguacuauagaa

SEQ ID NO: 1838218 - RNA, 19 nt, Artificial Sequence
  Description of Artificial Sequence: Synthetic oligonucleotide
  Antisense strand to SEQ ID NO: 1838217
uucuauaguacuaugcucu

SEQ ID NO: 1838219 - RNA, 19 nt, Artificial Sequence
  Description of Artificial Sequence: Synthetic oligonucleotide
  Sense strand starting at position 2439 of SEQ ID NO: 1563870
gcauguccuuacuucuuga

SEQ ID NO: 1838220 - RNA, 19 nt, Artificial Sequence
  Description of Artificial Sequence: Synthetic oligonucleotide
  Antisense strand to SEQ ID NO: 1838219
ucaagaaguaaggacaugc

SEQ ID NO: 1838221 - RNA, 19 nt, Artificial Sequence
  Description of Artificial Sequence: Synthetic oligonucleotide
  Sense strand starting at position 2810 of SEQ ID NO: 1563870
auggcacuugcgucaguua

SEQ ID NO: 1838222 - RNA, 19 nt, Artificial Sequence
  Description of Artificial Sequence: Synthetic oligonucleotide
  Antisense strand to SEQ ID NO: 1838221
uaacugacgcaagugccau

SEQ ID NO: 1838223 - RNA, 19 nt, Artificial Sequence
  Description of Artificial Sequence: Synthetic oligonucleotide
  Sense strand starting at position 2864 of SEQ ID NO: 1563870
cguugcuaccuaucgucaa

SEQ ID NO: 1838224 - RNA, 19 nt, Artificial Sequence
  Description of Artificial Sequence: Synthetic oligonucleotide
  Antisense strand to SEQ ID NO: 1838223
uugacgauagguagcaacg

SEQ ID NO: 1838225 - RNA, 19 nt, Artificial Sequence
  Description of Artificial Sequence: Synthetic oligonucleotide
  Sense strand starting at position 2867 of SEQ ID NO: 1563870
ugcuaccuaucgucaaagu

SEQ ID NO: 1838226 - RNA, 19 nt, Artificial Sequence
  Description of Artificial Sequence: Synthetic oligonucleotide
  Antisense strand to SEQ ID NO: 1838225
acuuugacgauagguagca

SEQ ID NO: 1838227 - RNA, 19 nt, Artificial Sequence
  Description of Artificial Sequence: Synthetic oligonucleotide
  Sense strand starting at position 2868 of SEQ ID NO: 1563870
gcuaccuaucgucaaagua

SEQ ID NO: 1838228 - RNA, 19 nt, Artificial Sequence
  Description of Artificial Sequence: Synthetic oligonucleotide
  Antisense strand to SEQ ID NO: 1838227
uacuuugacgauagguagc

SEQ ID NO: 1838229 - RNA, 19 nt, Artificial Sequence
  Description of Artificial Sequence: Synthetic oligonucleotide
  Sense strand starting at position 2935 of SEQ ID NO: 1563870
auggauuggugcuuaccua

SEQ ID NO: 1838230 - RNA, 19 nt, Artificial Sequence
  Description of Artificial Sequence: Synthetic oligonucleotide
  Antisense strand to SEQ ID NO: 1838229
uagguaagcaccaauccau

SEQ ID NO: 1838231 - RNA, 19 nt, Artificial Sequence
  Description of Artificial Sequence: Synthetic oligonucleotide
  Sense strand starting at position 2987 of SEQ ID NO: 1563870
uguuaaagugcugguagga

SEQ ID NO: 1838232 - RNA, 19 nt, Artificial Sequence
  Description of Artificial Sequence: Synthetic oligonucleotide
  Antisense strand to SEQ ID NO: 1838231
uccuaccagcacuuuaaca

SEQ ID NO: 1838233 - RNA, 19 nt, Artificial Sequence
  Description of Artificial Sequence: Synthetic oligonucleotide
  Sense strand starting at position 3083 of SEQ ID NO: 1563870
guguaaguauaccucauua

SEQ ID NO: 1838234 - RNA, 19 nt, Artificial Sequence
  Description of Artificial Sequence: Synthetic oligonucleotide
  Antisense strand to SEQ ID NO: 1838233
uaaugagguauacuuacac

SEQ ID NO: 1838235 - RNA, 19 nt, Artificial Sequence
  Description of Artificial Sequence: Synthetic oligonucleotide
  Sense strand starting at position 3085 of SEQ ID NO: 1563870
guaaguauaccucauuaau

SEQ ID NO: 1838236 - RNA, 19 nt, Artificial Sequence
  Description of Artificial Sequence: Synthetic oligonucleotide
  Antisense strand to SEQ ID NO: 1838235
auuaaugagguauacuuac

SEQ ID NO: 1838237 - RNA, 19 nt, Artificial Sequence
  Description of Artificial Sequence: Synthetic oligonucleotide
  Sense strand starting at position 3501 of SEQ ID NO: 1563870
ggguuacaagcgugaauga

SEQ ID NO: 1838238 - RNA, 19 nt, Artificial Sequence
  Description of Artificial Sequence: Synthetic oligonucleotide
  Antisense strand to SEQ ID NO: 1838237
ucauucacgcuuguaaccc

SEQ ID NO: 1838239 - RNA, 19 nt, Artificial Sequence
  Description of Artificial Sequence: Synthetic oligonucleotide
  Sense strand starting at position 3514 of SEQ ID NO: 1563870
gaaugacugugcucccgua

SEQ ID NO: 1838240 - RNA, 19 nt, Artificial Sequence
  Description of Artificial Sequence: Synthetic oligonucleotide
  Antisense strand to SEQ ID NO: 1838239
uacgggagcacagucauuc

SEQ ID NO: 1838241 - RNA, 19 nt, Artificial Sequence
  Description of Artificial Sequence: Synthetic oligonucleotide
  Sense strand starting at position 3521 of SEQ ID NO: 1563870
ugugcucccguagaauaau

SEQ ID NO: 1838242 - RNA, 19 nt, Artificial Sequence
  Description of Artificial Sequence: Synthetic oligonucleotide
  Antisense strand to SEQ ID NO: 1838241
auuauucuacgggagcaca

SEQ ID NO: 1838243 - RNA, 19 nt, Artificial Sequence
  Description of Artificial Sequence: Synthetic oligonucleotide
  Sense strand starting at position 3554 of SEQ ID NO: 1563870
uacagaagguaaucugauu

SEQ ID NO: 1838244 - RNA, 19 nt, Artificial Sequence
  Description of Artificial Sequence: Synthetic oligonucleotide
  Antisense strand to SEQ ID NO: 1838243
aaucagauuaccuucugua

SEQ ID NO: 1838245 - RNA, 19 nt, Artificial Sequence
  Description of Artificial Sequence: Synthetic oligonucleotide
  Sense strand starting at position 3788 of SEQ ID NO: 1563870
uccggaguaguugguacua

SEQ ID NO: 1838246 - RNA, 19 nt, Artificial Sequence
  Description of Artificial Sequence: Synthetic oligonucleotide
  Antisense strand to SEQ ID NO: 1838245
uaguaccaacuacuccgga

SEQ ID NO: 1838247 - RNA, 19 nt, Artificial Sequence
  Description of Artificial Sequence: Synthetic oligonucleotide
  Sense strand starting at position 3867 of SEQ ID NO: 1563870
cuaaguugcccagacugau

SEQ ID NO: 1838248 - RNA, 19 nt, Artificial Sequence
  Description of Artificial Sequence: Synthetic oligonucleotide
  Antisense strand to SEQ ID NO: 1838247
aucagucugggcaacuuag

SEQ ID NO: 1838249 - RNA, 19 nt, Artificial Sequence
  Description of Artificial Sequence: Synthetic oligonucleotide
  Sense strand starting at position 24 of SEQ ID NO: 1563871
uuaauuccauuguuaggua

SEQ ID NO: 1838250 - RNA, 19 nt, Artificial Sequence
  Description of Artificial Sequence: Synthetic oligonucleotide
  Antisense strand to SEQ ID NO: 1838249
uaccuaacaauggaauuaa

SEQ ID NO: 1838251 - RNA, 19 nt, Artificial Sequence
  Description of Artificial Sequence: Synthetic oligonucleotide
  Sense strand starting at position 195 of SEQ ID NO: 1563871
uagaguuauucugugucua

SEQ ID NO: 1838252 - RNA, 19 nt, Artificial Sequence
  Description of Artificial Sequence: Synthetic oligonucleotide
  Antisense strand to SEQ ID NO: 1838251
uagacacagaauaacucua

SEQ ID NO: 1838253 - RNA, 19 nt, Artificial Sequence
  Description of Artificial Sequence: Synthetic oligonucleotide
  Sense strand starting at position 196 of SEQ ID NO: 1563871
agaguuauucugugucuac

SEQ ID NO: 1838254 - RNA, 19 nt, Artificial Sequence
  Description of Artificial Sequence: Synthetic oligonucleotide
  Antisense strand to SEQ ID NO: 1838253
guagacacagaauaacucu

SEQ ID NO: 1838255 - RNA, 19 nt, Artificial Sequence
  Description of Artificial Sequence: Synthetic oligonucleotide
  Sense strand starting at position 197 of SEQ ID NO: 1563871
gaguuauucugugucuacc

SEQ ID NO: 1838256 - RNA, 19 nt, Artificial Sequence
  Description of Artificial Sequence: Synthetic oligonucleotide
  Antisense strand to SEQ ID NO: 1838255
gguagacacagaauaacuc

SEQ ID NO: 1838257 - RNA, 19 nt, Artificial Sequence
  Description of Artificial Sequence: Synthetic oligonucleotide
  Sense strand starting at position 258 of SEQ ID NO: 1563871
uuaguaugagugcaaucua

SEQ ID NO: 1838258 - RNA, 19 nt, Artificial Sequence
  Description of Artificial Sequence: Synthetic oligonucleotide
  Antisense strand to SEQ ID NO: 1838257
uagauugcacucauacuaa

SEQ ID NO: 1838259 - RNA, 19 nt, Artificial Sequence
  Description of Artificial Sequence: Synthetic oligonucleotide
  Sense strand starting at position 726 of SEQ ID NO: 1563871
ggaggaauaugagacauac

SEQ ID NO: 1838260 - RNA, 19 nt, Artificial Sequence
  Description of Artificial Sequence: Synthetic oligonucleotide
  Antisense strand to SEQ ID NO: 1838259
guaugucucauauuccucc

SEQ ID NO: 1838261 - RNA, 19 nt, Artificial Sequence
  Description of Artificial Sequence: Synthetic oligonucleotide
  Sense strand starting at position 772 of SEQ ID NO: 1563871
acaaaugccuuuccuggaa

SEQ ID NO: 1838262 - RNA, 19 nt, Artificial Sequence
  Description of Artificial Sequence: Synthetic oligonucleotide
  Antisense strand to SEQ ID NO: 1838261
uuccaggaaaggcauuugu

SEQ ID NO: 1838263 - RNA, 19 nt, Artificial Sequence
  Description of Artificial Sequence: Synthetic oligonucleotide
  Sense strand starting at position 973 of SEQ ID NO: 1563871
uucuaagaucccuauucgu

SEQ ID NO: 1838264 - RNA, 19 nt, Artificial Sequence
  Description of Artificial Sequence: Synthetic oligonucleotide
  Antisense strand to SEQ ID NO: 1838263
acgaauagggaucuuagaa

SEQ ID NO: 1838265 - RNA, 19 nt, Artificial Sequence
  Description of Artificial Sequence: Synthetic oligonucleotide
  Sense strand starting at position 1340 of SEQ ID NO: 1563871
cacggaugugauugguaga

SEQ ID NO: 1838266 - RNA, 19 nt, Artificial Sequence
  Description of Artificial Sequence: Synthetic oligonucleotide
  Antisense strand to SEQ ID NO: 1838265
ucuaccaaucacauccgug

SEQ ID NO: 1838267 - RNA, 19 nt, Artificial Sequence
  Description of Artificial Sequence: Synthetic oligonucleotide
  Sense strand starting at position 1341 of SEQ ID NO: 1563871
acggaugugauugguagaa

SEQ ID NO: 1838268 - RNA, 19 nt, Artificial Sequence
  Description of Artificial Sequence: Synthetic oligonucleotide
  Antisense strand to SEQ ID NO: 1838267
uucuaccaaucacauccgu

SEQ ID NO: 1838269 - RNA, 19 nt, Artificial Sequence
  Description of Artificial Sequence: Synthetic oligonucleotide
  Sense strand starting at position 1345 of SEQ ID NO: 1563871
augugauugguagaacccu

SEQ ID NO: 1838270 - RNA, 19 nt, Artificial Sequence
  Description of Artificial Sequence: Synthetic oligonucleotide
  Antisense strand to SEQ ID NO: 1838269
aggguucuaccaaucacau

SEQ ID NO: 1838271 - RNA, 19 nt, Artificial Sequence
  Description of Artificial Sequence: Synthetic oligonucleotide
  Sense strand starting at position 1631 of SEQ ID NO: 1563871
gcauguccuuacuucuuga

SEQ ID NO: 1838272 - RNA, 19 nt, Artificial Sequence
  Description of Artificial Sequence: Synthetic oligonucleotide
  Antisense strand to SEQ ID NO: 1838271
ucaagaaguaaggacaugc

SEQ ID NO: 1838273 - RNA, 19 nt, Artificial Sequence
  Description of Artificial Sequence: Synthetic oligonucleotide
  Sense strand starting at position 2002 of SEQ ID NO: 1563871
auggcacuugcgucaguua

SEQ ID NO: 1838274 - RNA, 19 nt, Artificial Sequence
  Description of Artificial Sequence: Synthetic oligonucleotide
  Antisense strand to SEQ ID NO: 1838273
uaacugacgcaagugccau

SEQ ID NO: 1838275 - RNA, 19 nt, Artificial Sequence
  Description of Artificial Sequence: Synthetic oligonucleotide
  Sense strand starting at position 2056 of SEQ ID NO: 1563871
cguugcuaccuaucgucaa

SEQ ID NO: 1838276 - RNA, 19 nt, Artificial Sequence
  Description of Artificial Sequence: Synthetic oligonucleotide
  Antisense strand to SEQ ID NO: 1838275
uugacgauagguagcaacg

SEQ ID NO: 1838277 - RNA, 19 nt, Artificial Sequence
  Description of Artificial Sequence: Synthetic oligonucleotide
  Sense strand starting at position 2060 of SEQ ID NO: 1563871
gcuaccuaucgucaaagua

SEQ ID NO: 1838278 - RNA, 19 nt, Artificial Sequence
  Description of Artificial Sequence: Synthetic oligonucleotide
  Antisense strand to SEQ ID NO: 1838277
uacuuugacgauagguagc

SEQ ID NO: 1838279 - RNA, 19 nt, Artificial Sequence
  Description of Artificial Sequence: Synthetic oligonucleotide
  Sense strand starting at position 2127 of SEQ ID NO: 1563871
auggauuggugcuuaccua

SEQ ID NO: 1838280 - RNA, 19 nt, Artificial Sequence
  Description of Artificial Sequence: Synthetic oligonucleotide
  Antisense strand to SEQ ID NO: 1838279
uagguaagcaccaauccau

SEQ ID NO: 1838281 - RNA, 19 nt, Artificial Sequence
  Description of Artificial Sequence: Synthetic oligonucleotide
  Sense strand starting at position 2179 of SEQ ID NO: 1563871
uguuaaagugcugguagga

SEQ ID NO: 1838282 - RNA, 19 nt, Artificial Sequence
  Description of Artificial Sequence: Synthetic oligonucleotide
  Antisense strand to SEQ ID NO: 1838281
uccuaccagcacuuuaaca

SEQ ID NO: 1838283 - RNA, 19 nt, Artificial Sequence
  Description of Artificial Sequence: Synthetic oligonucleotide
  Sense strand starting at position 2275 of SEQ ID NO: 1563871
guguaaguauaccucauua

SEQ ID NO: 1838284 - RNA, 19 nt, Artificial Sequence
  Description of Artificial Sequence: Synthetic oligonucleotide
  Antisense strand to SEQ ID NO: 1838283
uaaugagguauacuuacac

SEQ ID NO: 1838285 - RNA, 19 nt, Artificial Sequence
  Description of Artificial Sequence: Synthetic oligonucleotide
  Sense strand starting at position 2277 of SEQ ID NO: 1563871
guaaguauaccucauuaau

SEQ ID NO: 1838286 - RNA, 19 nt, Artificial Sequence
  Description of Artificial Sequence: Synthetic oligonucleotide
  Antisense strand to SEQ ID NO: 1838285
auuaaugagguauacuuac

SEQ ID NO: 1838287 - RNA, 19 nt, Artificial Sequence
  Description of Artificial Sequence: Synthetic oligonucleotide
  Sense strand starting at position 2693 of SEQ ID NO: 1563871
ggguuacaagcgugaauga

SEQ ID NO: 1838288 - RNA, 19 nt, Artificial Sequence
  Description of Artificial Sequence: Synthetic oligonucleotide
  Antisense strand to SEQ ID NO: 1838287
ucauucacgcuuguaaccc

SEQ ID NO: 1838289 - RNA, 19 nt, Artificial Sequence
  Description of Artificial Sequence: Synthetic oligonucleotide
  Sense strand starting at position 2713 of SEQ ID NO: 1563871
ugugcucccguagaauaau

SEQ ID NO: 1838290 - RNA, 19 nt, Artificial Sequence
  Description of Artificial Sequence: Synthetic oligonucleotide
  Antisense strand to SEQ ID NO: 1838289
auuauucuacgggagcaca

SEQ ID NO: 1838291 - RNA, 19 nt, Artificial Sequence
  Description of Artificial Sequence: Synthetic oligonucleotide
  Sense strand starting at position 2746 of SEQ ID NO: 1563871
uacagaagguaaucugauu

SEQ ID NO: 1838292 - RNA, 19 nt, Artificial Sequence
  Description of Artificial Sequence: Synthetic oligonucleotide
  Antisense strand to SEQ ID NO: 1838291
aaucagauuaccuucugua

SEQ ID NO: 1838293 - RNA, 19 nt, Artificial Sequence
  Description of Artificial Sequence: Synthetic oligonucleotide
  Sense strand starting at position 2980 of SEQ ID NO: 1563871
uccggaguaguugguacua

SEQ ID NO: 1838294 - RNA, 19 nt, Artificial Sequence
  Description of Artificial Sequence: Synthetic oligonucleotide
  Antisense strand to SEQ ID NO: 1838293
uaguaccaacuacuccgga

SEQ ID NO: 1838295 - RNA, 19 nt, Artificial Sequence
  Description of Artificial Sequence: Synthetic oligonucleotide
  Sense strand starting at position 3059 of SEQ ID NO: 1563871
cuaaguugcccagacugau

SEQ ID NO: 1838296 - RNA, 19 nt, Artificial Sequence
  Description of Artificial Sequence: Synthetic oligonucleotide
  Antisense strand to SEQ ID NO: 1838295
aucagucugggcaacuuag

SEQ ID NO: 1838297 - RNA, 19 nt, Artificial Sequence
  Description of Artificial Sequence: Synthetic oligonucleotide
  Sense strand starting at position 3280 of SEQ ID NO: 1563871
gggaguaaauacucuaguc

SEQ ID NO: 1838298 - RNA, 19 nt, Artificial Sequence
  Description of Artificial Sequence: Synthetic oligonucleotide
  Antisense strand to SEQ ID NO: 1838297
gacuagaguauuuacuccc

SEQ ID NO: 1838299 - RNA, 19 nt, Artificial Sequence
  Description of Artificial Sequence: Synthetic oligonucleotide
  Sense strand starting at position 3313 of SEQ ID NO: 1563871
gggccauuagagcaauuau

SEQ ID NO: 1838300 - RNA, 19 nt, Artificial Sequence
  Description of Artificial Sequence: Synthetic oligonucleotide
  Antisense strand to SEQ ID NO: 1838299
auaauugcucuaauggccc

SEQ ID NO: 1838301 - RNA, 19 nt, Artificial Sequence
  Description of Artificial Sequence: Synthetic oligonucleotide
  Sense strand starting at position 3374 of SEQ ID NO: 1563871
gucuuaauucuaugguaug

SEQ ID NO: 1838302 - RNA, 19 nt, Artificial Sequence
  Description of Artificial Sequence: Synthetic oligonucleotide
  Antisense strand to SEQ ID NO: 1838301
cauaccauagaauuaagac

SEQ ID NO: 1838303 - RNA, 19 nt, Artificial Sequence
  Description of Artificial Sequence: Synthetic oligonucleotide
  Sense strand starting at position 3413 of SEQ ID NO: 1563871
uuggcuucccaugaagauc

SEQ ID NO: 1838304 - RNA, 19 nt, Artificial Sequence
  Description of Artificial Sequence: Synthetic oligonucleotide
  Antisense strand to SEQ ID NO: 1838303
gaucuucaugggaagccaa

SEQ ID NO: 1838305 - RNA, 19 nt, Artificial Sequence
  Description of Artificial Sequence: Synthetic oligonucleotide
  Sense strand starting at position 3421 of SEQ ID NO: 1563871
ccaugaagaucugcccaca

SEQ ID NO: 1838306 - RNA, 19 nt, Artificial Sequence
  Description of Artificial Sequence: Synthetic oligonucleotide
  Antisense strand to SEQ ID NO: 1838305
ugugggcagaucuucaugg

SEQ ID NO: 1838307 - RNA, 19 nt, Artificial Sequence
  Description of Artificial Sequence: Synthetic oligonucleotide
  Sense strand starting at position 3444 of SEQ ID NO: 1563871
aagaauuagcuacguucca

SEQ ID NO: 1838308 - RNA, 19 nt, Artificial Sequence
  Description of Artificial Sequence: Synthetic oligonucleotide
  Antisense strand to SEQ ID NO: 1838307
uggaacguagcuaauucuu

SEQ ID NO: 1838309 - RNA, 19 nt, Artificial Sequence
  Description of Artificial Sequence: Synthetic oligonucleotide
  Sense strand starting at position 3445 of SEQ ID NO: 1563871
agaauuagcuacguuccaa

SEQ ID NO: 1838310 - RNA, 19 nt, Artificial Sequence
  Description of Artificial Sequence: Synthetic oligonucleotide
  Antisense strand to SEQ ID NO: 1838309
uuggaacguagcuaauucu

SEQ ID NO: 1838311 - RNA, 19 nt, Artificial Sequence
  Description of Artificial Sequence: Synthetic oligonucleotide
  Sense strand starting at position 3509 of SEQ ID NO: 1563871
uuggcauucugguuuauac

SEQ ID NO: 1838312 - RNA, 19 nt, Artificial Sequence
  Description of Artificial Sequence: Synthetic oligonucleotide
  Antisense strand to SEQ ID NO: 1838311
guauaaaccagaaugccaa

SEQ ID NO: 1838313 - RNA, 19 nt, Artificial Sequence
  Description of Artificial Sequence: Synthetic oligonucleotide
  Sense strand starting at position 3511 of SEQ ID NO: 1563871
ggcauucugguuuauacaa

SEQ ID NO: 1838314 - RNA, 19 nt, Artificial Sequence
  Description of Artificial Sequence: Synthetic oligonucleotide
  Antisense strand to SEQ ID NO: 1838313
uuguauaaaccagaaugcc

SEQ ID NO: 1838315 - RNA, 19 nt, Artificial Sequence
  Description of Artificial Sequence: Synthetic oligonucleotide
  Sense strand starting at position 3537 of SEQ ID NO: 1563871
uugugaacauccuuaguga

SEQ ID NO: 1838316 - RNA, 19 nt, Artificial Sequence
  Description of Artificial Sequence: Synthetic oligonucleotide
  Antisense strand to SEQ ID NO: 1838315
ucacuaaggauguucacaa

SEQ ID NO: 1838317 - RNA, 19 nt, Artificial Sequence
  Description of Artificial Sequence: Synthetic oligonucleotide
  Sense strand starting at position 3538 of SEQ ID NO: 1563871
ugugaacauccuuagugag

SEQ ID NO: 1838318 - RNA, 19 nt, Artificial Sequence
  Description of Artificial Sequence: Synthetic oligonucleotide
  Antisense strand to SEQ ID NO: 1838317
cucacuaaggauguucaca

SEQ ID NO: 1838319 - RNA, 19 nt, Artificial Sequence
  Description of Artificial Sequence: Synthetic oligonucleotide
  Sense strand starting at position 3540 of SEQ ID NO: 1563871
ugaacauccuuagugagaa

SEQ ID NO: 1838320 - RNA, 19 nt, Artificial Sequence
  Description of Artificial Sequence: Synthetic oligonucleotide
  Antisense strand to SEQ ID NO: 1838319
uucucacuaaggauguuca

SEQ ID NO: 1838321 - RNA, 19 nt, Artificial Sequence
  Description of Artificial Sequence: Synthetic oligonucleotide
  Sense strand starting at position 3653 of SEQ ID NO: 1563871
gccacacuggcaggauuau

SEQ ID NO: 1838322 - RNA, 19 nt, Artificial Sequence
  Description of Artificial Sequence: Synthetic oligonucleotide
  Antisense strand to SEQ ID NO: 1838321
auaauccugccaguguggc

SEQ ID NO: 1838323 - RNA, 19 nt, Artificial Sequence
  Description of Artificial Sequence: Synthetic oligonucleotide
  Sense strand starting at position 3654 of SEQ ID NO: 1563871
ccacacuggcaggauuauu

SEQ ID NO: 1838324 - RNA, 19 nt, Artificial Sequence
  Description of Artificial Sequence: Synthetic oligonucleotide
  Antisense strand to SEQ ID NO: 1838323
aauaauccugccagugugg

SEQ ID NO: 1838325 - RNA, 19 nt, Artificial Sequence
  Description of Artificial Sequence: Synthetic oligonucleotide
  Sense strand starting at position 3691 of SEQ ID NO: 1563871
guaccuaguagguguauaa

SEQ ID NO: 1838326 - RNA, 19 nt, Artificial Sequence
  Description of Artificial Sequence: Synthetic oligonucleotide
  Antisense strand to SEQ ID NO: 1838325
uuauacaccuacuagguac

SEQ ID NO: 1838327 - RNA, 19 nt, Artificial Sequence
  Description of Artificial Sequence: Synthetic oligonucleotide
  Sense strand starting at position 3717 of SEQ ID NO: 1563871
ggguauaugagauguacag

SEQ ID NO: 1838328 - RNA, 19 nt, Artificial Sequence
  Description of Artificial Sequence: Synthetic oligonucleotide
  Antisense strand to SEQ ID NO: 1838327
cuguacaucucauauaccc

SEQ ID NO: 1838329 - RNA, 19 nt, Artificial Sequence
  Description of Artificial Sequence: Synthetic oligonucleotide
  Sense strand starting at position 37 of SEQ ID NO: 1563872
uagacuuccucauugggau

SEQ ID NO: 1838330 - RNA, 19 nt, Artificial Sequence
  Description of Artificial Sequence: Synthetic oligonucleotide
  Antisense strand to SEQ ID NO: 1838329
aucccaaugaggaagucua

SEQ ID NO: 1838331 - RNA, 19 nt, Artificial Sequence
  Description of Artificial Sequence: Synthetic oligonucleotide
  Sense strand starting at position 38 of SEQ ID NO: 1563872
agacuuccucauugggauu

SEQ ID NO: 1838332 - RNA, 19 nt, Artificial Sequence
  Description of Artificial Sequence: Synthetic oligonucleotide
  Antisense strand to SEQ ID NO: 1838331
aaucccaaugaggaagucu

SEQ ID NO: 1838333 - RNA, 19 nt, Artificial Sequence
  Description of Artificial Sequence: Synthetic oligonucleotide
  Sense strand starting at position 41 of SEQ ID NO: 1563872
cuuccucauugggauuuga

SEQ ID NO: 1838334 - RNA, 19 nt, Artificial Sequence
  Description of Artificial Sequence: Synthetic oligonucleotide
  Antisense strand to SEQ ID NO: 1838333
ucaaaucccaaugaggaag

SEQ ID NO: 1838335 - RNA, 19 nt, Artificial Sequence
  Description of Artificial Sequence: Synthetic oligonucleotide
  Sense strand starting at position 94 of SEQ ID NO: 1563872
ucccuaaauccuuggugga

SEQ ID NO: 1838336 - RNA, 19 nt, Artificial Sequence
  Description of Artificial Sequence: Synthetic oligonucleotide
  Antisense strand to SEQ ID NO: 1838335
uccaccaaggauuuaggga

SEQ ID NO: 1838337 - RNA, 19 nt, Artificial Sequence
  Description of Artificial Sequence: Synthetic oligonucleotide
  Sense strand starting at position 95 of SEQ ID NO: 1563872
cccuaaauccuugguggaa

SEQ ID NO: 1838338 - RNA, 19 nt, Artificial Sequence
  Description of Artificial Sequence: Synthetic oligonucleotide
  Antisense strand to SEQ ID NO: 1838337
uuccaccaaggauuuaggg

SEQ ID NO: 1838339 - RNA, 19 nt, Artificial Sequence
  Description of Artificial Sequence: Synthetic oligonucleotide
  Sense strand starting at position 96 of SEQ ID NO: 1563872
ccuaaauccuugguggaaa

SEQ ID NO: 1838340 - RNA, 19 nt, Artificial Sequence
  Description of Artificial Sequence: Synthetic oligonucleotide
  Antisense strand to SEQ ID NO: 1838339
uuuccaccaaggauuuagg

SEQ ID NO: 1838341 - RNA, 19 nt, Artificial Sequence
  Description of Artificial Sequence: Synthetic oligonucleotide
  Sense strand starting at position 98 of SEQ ID NO: 1563872
uaaauccuugguggaaauu

SEQ ID NO: 1838342 - RNA, 19 nt, Artificial Sequence
  Description of Artificial Sequence: Synthetic oligonucleotide
  Antisense strand to SEQ ID NO: 1838341
aauuuccaccaaggauuua

SEQ ID NO: 1838343 - RNA, 19 nt, Artificial Sequence
  Description of Artificial Sequence: Synthetic oligonucleotide
  Sense strand starting at position 134 of SEQ ID NO: 1563872
uccagacccugucuuauua

SEQ ID NO: 1838344 - RNA, 19 nt, Artificial Sequence
  Description of Artificial Sequence: Synthetic oligonucleotide
  Antisense strand to SEQ ID NO: 1838343
uaauaagacagggucugga

SEQ ID NO: 1838345 - RNA, 19 nt, Artificial Sequence
  Description of Artificial Sequence: Synthetic oligonucleotide
  Sense strand starting at position 176 of SEQ ID NO: 1563872
gacucaagaggucagcuua

SEQ ID NO: 1838346 - RNA, 19 nt, Artificial Sequence
  Description of Artificial Sequence: Synthetic oligonucleotide
  Antisense strand to SEQ ID NO: 1838345
uaagcugaccucuugaguc

SEQ ID NO: 1838347 - RNA, 19 nt, Artificial Sequence
  Description of Artificial Sequence: Synthetic oligonucleotide
  Sense strand starting at position 189 of SEQ ID NO: 1563872
agcuuaaucugguuauuaa

SEQ ID NO: 1838348 - RNA, 19 nt, Artificial Sequence
  Description of Artificial Sequence: Synthetic oligonucleotide
  Antisense strand to SEQ ID NO: 1838347
uuaauaaccagauuaagcu

SEQ ID NO: 1838349 - RNA, 19 nt, Artificial Sequence
  Description of Artificial Sequence: Synthetic oligonucleotide
  Sense strand starting at position 190 of SEQ ID NO: 1563872
gcuuaaucugguuauuaac

SEQ ID NO: 1838350 - RNA, 19 nt, Artificial Sequence
  Description of Artificial Sequence: Synthetic oligonucleotide
  Antisense strand to SEQ ID NO: 1838349
guuaauaaccagauuaagc

SEQ ID NO: 1838351 - RNA, 19 nt, Artificial Sequence
  Description of Artificial Sequence: Synthetic oligonucleotide
  Sense strand starting at position 196 of SEQ ID NO: 1563872
ucugguuauuaacugaaau

SEQ ID NO: 1838352 - RNA, 19 nt, Artificial Sequence
  Description of Artificial Sequence: Synthetic oligonucleotide
  Antisense strand to SEQ ID NO: 1838351
auuucaguuaauaaccaga

SEQ ID NO: 1838353 - RNA, 19 nt, Artificial Sequence
  Description of Artificial Sequence: Synthetic oligonucleotide
  Sense strand starting at position 347 of SEQ ID NO: 1563872
augagaguccuacaacguc

SEQ ID NO: 1838354 - RNA, 19 nt, Artificial Sequence
  Description of Artificial Sequence: Synthetic oligonucleotide
  Antisense strand to SEQ ID NO: 1838353
gacguuguaggacucucau

SEQ ID NO: 1838355 - RNA, 19 nt, Artificial Sequence
  Description of Artificial Sequence: Synthetic oligonucleotide
  Sense strand starting at position 391 of SEQ ID NO: 1563872
uagguaugguuccuggauc

SEQ ID NO: 1838356 - RNA, 19 nt, Artificial Sequence
  Description of Artificial Sequence: Synthetic oligonucleotide
  Antisense strand to SEQ ID NO: 1838355
gauccaggaaccauaccua

SEQ ID NO: 1838357 - RNA, 19 nt, Artificial Sequence
  Description of Artificial Sequence: Synthetic oligonucleotide
  Sense strand starting at position 472 of SEQ ID NO: 1563872
agagacacaacgugugaaa

SEQ ID NO: 1838358 - RNA, 19 nt, Artificial Sequence
  Description of Artificial Sequence: Synthetic oligonucleotide
  Antisense strand to SEQ ID NO: 1838357
uuucacacguugugucucu

SEQ ID NO: 1838359 - RNA, 19 nt, Artificial Sequence
  Description of Artificial Sequence: Synthetic oligonucleotide
  Sense strand starting at position 504 of SEQ ID NO: 1563872
ccauuccuguuccuggaaa

SEQ ID NO: 1838360 - RNA, 19 nt, Artificial Sequence
  Description of Artificial Sequence: Synthetic oligonucleotide
  Antisense strand to SEQ ID NO: 1838359
uuuccaggaacaggaaugg

SEQ ID NO: 1838361 - RNA, 19 nt, Artificial Sequence
  Description of Artificial Sequence: Synthetic oligonucleotide
  Sense strand starting at position 580 of SEQ ID NO: 1563872
gagcccauuucugcuguga

SEQ ID NO: 1838362 - RNA, 19 nt, Artificial Sequence
  Description of Artificial Sequence: Synthetic oligonucleotide
  Antisense strand to SEQ ID NO: 1838361
ucacagcagaaaugggcuc

SEQ ID NO: 1838363 - RNA, 19 nt, Artificial Sequence
  Description of Artificial Sequence: Synthetic oligonucleotide
  Sense strand starting at position 584 of SEQ ID NO: 1563872
ccauuucugcugugaccaa

SEQ ID NO: 1838364 - RNA, 19 nt, Artificial Sequence
  Description of Artificial Sequence: Synthetic oligonucleotide
  Antisense strand to SEQ ID NO: 1838363
uuggucacagcagaaaugg

SEQ ID NO: 1838365 - RNA, 19 nt, Artificial Sequence
  Description of Artificial Sequence: Synthetic oligonucleotide
  Sense strand starting at position 645 of SEQ ID NO: 1563872
gcaauuccagaaugagcuu

SEQ ID NO: 1838366 - RNA, 19 nt, Artificial Sequence
  Description of Artificial Sequence: Synthetic oligonucleotide
  Antisense strand to SEQ ID NO: 1838365
aagcucauucuggaauugc

SEQ ID NO: 1838367 - RNA, 19 nt, Artificial Sequence
  Description of Artificial Sequence: Synthetic oligonucleotide
  Sense strand starting at position 744 of SEQ ID NO: 1563872
accuuaagucuuuagugca

SEQ ID NO: 1838368 - RNA, 19 nt, Artificial Sequence
  Description of Artificial Sequence: Synthetic oligonucleotide
  Antisense strand to SEQ ID NO: 1838367
ugcacuaaagacuuaaggu

SEQ ID NO: 1838369 - RNA, 19 nt, Artificial Sequence
  Description of Artificial Sequence: Synthetic oligonucleotide
  Sense strand starting at position 815 of SEQ ID NO: 1563872
gggugauucggucaugacc

SEQ ID NO: 1838370 - RNA, 19 nt, Artificial Sequence
  Description of Artificial Sequence: Synthetic oligonucleotide
  Antisense strand to SEQ ID NO: 1838369
ggucaugaccgaaucaccc

SEQ ID NO: 1838371 - RNA, 19 nt, Artificial Sequence
  Description of Artificial Sequence: Synthetic oligonucleotide
  Sense strand starting at position 818 of SEQ ID NO: 1563872
ugauucggucaugaccaaa

SEQ ID NO: 1838372 - RNA, 19 nt, Artificial Sequence
  Description of Artificial Sequence: Synthetic oligonucleotide
  Antisense strand to SEQ ID NO: 1838371
uuuggucaugaccgaauca

SEQ ID NO: 1838373 - RNA, 19 nt, Artificial Sequence
  Description of Artificial Sequence: Synthetic oligonucleotide
  Sense strand starting at position 1009 of SEQ ID NO: 1563872
augggagggugcucacauu

SEQ ID NO: 1838374 - RNA, 19 nt, Artificial Sequence
  Description of Artificial Sequence: Synthetic oligonucleotide
  Antisense strand to SEQ ID NO: 1838373
aaugugagcacccucccau

SEQ ID NO: 1838375 - RNA, 19 nt, Artificial Sequence
  Description of Artificial Sequence: Synthetic oligonucleotide
  Sense strand starting at position 1166 of SEQ ID NO: 1563872
ccucuuuaugaugaguugu

SEQ ID NO: 1838376 - RNA, 19 nt, Artificial Sequence
  Description of Artificial Sequence: Synthetic oligonucleotide
  Antisense strand to SEQ ID NO: 1838375
acaacucaucauaaagagg

SEQ ID NO: 1838377 - RNA, 19 nt, Artificial Sequence
  Description of Artificial Sequence: Synthetic oligonucleotide
  Sense strand starting at position 2169 of SEQ ID NO: 1563872
ccgucaauuggcgagauuu

SEQ ID NO: 1838378 - RNA, 19 nt, Artificial Sequence
  Description of Artificial Sequence: Synthetic oligonucleotide
  Antisense strand to SEQ ID NO: 1838377
aaaucucgccaauugacgg

SEQ ID NO: 1838379 - RNA, 19 nt, Artificial Sequence
  Description of Artificial Sequence: Synthetic oligonucleotide
  Sense strand starting at position 2177 of SEQ ID NO: 1563872
uggcgagauuuccugucca

SEQ ID NO: 1838380 - RNA, 19 nt, Artificial Sequence
  Description of Artificial Sequence: Synthetic oligonucleotide
  Antisense strand to SEQ ID NO: 1838379
uggacaggaaaucucgcca

SEQ ID NO: 1838381 - RNA, 19 nt, Artificial Sequence
  Description of Artificial Sequence: Synthetic oligonucleotide
  Sense strand starting at position 2293 of SEQ ID NO: 1563872
gguuuagugggcggaauuu

SEQ ID NO: 1838382 - RNA, 19 nt, Artificial Sequence
  Description of Artificial Sequence: Synthetic oligonucleotide
  Antisense strand to SEQ ID NO: 1838381
aaauuccgcccacuaaacc

SEQ ID NO: 1838383 - RNA, 19 nt, Artificial Sequence
  Description of Artificial Sequence: Synthetic oligonucleotide
  Sense strand starting at position 2306 of SEQ ID NO: 1563872
gaauuugaauguuaaggau

SEQ ID NO: 1838384 - RNA, 19 nt, Artificial Sequence
  Description of Artificial Sequence: Synthetic oligonucleotide
  Antisense strand to SEQ ID NO: 1838383
auccuuaacauucaaauuc

SEQ ID NO: 1838385 - RNA, 19 nt, Artificial Sequence
  Description of Artificial Sequence: Synthetic oligonucleotide
  Sense strand starting at position 2472 of SEQ ID NO: 1563872
ucacuaucuucggcagaag

SEQ ID NO: 1838386 - RNA, 19 nt, Artificial Sequence
  Description of Artificial Sequence: Synthetic oligonucleotide
  Antisense strand to SEQ ID NO: 1838385
cuucugccgaagauaguga

SEQ ID NO: 1838387 - RNA, 19 nt, Artificial Sequence
  Description of Artificial Sequence: Synthetic oligonucleotide
  Sense strand starting at position 2691 of SEQ ID NO: 1563872
gacaccugucacuguugga

SEQ ID NO: 1838388 - RNA, 19 nt, Artificial Sequence
  Description of Artificial Sequence: Synthetic oligonucleotide
  Antisense strand to SEQ ID NO: 1838387
uccaacagugacagguguc

SEQ ID NO: 1838389 - RNA, 19 nt, Artificial Sequence
  Description of Artificial Sequence: Synthetic oligonucleotide
  Sense strand starting at position 2774 of SEQ ID NO: 1563872
ggagcugagauccagcaau

SEQ ID NO: 1838390 - RNA, 19 nt, Artificial Sequence
  Description of Artificial Sequence: Synthetic oligonucleotide
  Antisense strand to SEQ ID NO: 1838389
auugcuggaucucagcucc

SEQ ID NO: 1838391 - RNA, 19 nt, Artificial Sequence
  Description of Artificial Sequence: Synthetic oligonucleotide
  Sense strand starting at position 2965 of SEQ ID NO: 1563872
uaguucuaugcuuagcaag

SEQ ID NO: 1838392 - RNA, 19 nt, Artificial Sequence
  Description of Artificial Sequence: Synthetic oligonucleotide
  Antisense strand to SEQ ID NO: 1838391
cuugcuaagcauagaacua

SEQ ID NO: 1838393 - RNA, 19 nt, Artificial Sequence
  Description of Artificial Sequence: Synthetic oligonucleotide
  Sense strand starting at position 3092 of SEQ ID NO: 1563872
cuaacauucuugccgggaa

SEQ ID NO: 1838394 - RNA, 19 nt, Artificial Sequence
  Description of Artificial Sequence: Synthetic oligonucleotide
  Antisense strand to SEQ ID NO: 1838393
uucccggcaagaauguuag

SEQ ID NO: 1838395 - RNA, 19 nt, Artificial Sequence
  Description of Artificial Sequence: Synthetic oligonucleotide
  Sense strand starting at position 3094 of SEQ ID NO: 1563872
aacauucuugccgggaaga

SEQ ID NO: 1838396 - RNA, 19 nt, Artificial Sequence
  Description of Artificial Sequence: Synthetic oligonucleotide
  Antisense strand to SEQ ID NO: 1838395
ucuucccggcaagaauguu

SEQ ID NO: 1838397 - RNA, 19 nt, Artificial Sequence
  Description of Artificial Sequence: Synthetic oligonucleotide
  Sense strand starting at position 3095 of SEQ ID NO: 1563872
acauucuugccgggaagau

SEQ ID NO: 1838398 - RNA, 19 nt, Artificial Sequence
  Description of Artificial Sequence: Synthetic oligonucleotide
  Antisense strand to SEQ ID NO: 1838397
aucuucccggcaagaaugu

SEQ ID NO: 1838399 - RNA, 19 nt, Artificial Sequence
  Description of Artificial Sequence: Synthetic oligonucleotide
  Sense strand starting at position 3096 of SEQ ID NO: 1563872
cauucuugccgggaagauu

SEQ ID NO: 1838400 - RNA, 19 nt, Artificial Sequence
  Description of Artificial Sequence: Synthetic oligonucleotide
  Antisense strand to SEQ ID NO: 1838399
aaucuucccggcaagaaug

SEQ ID NO: 1838401 - RNA, 19 nt, Artificial Sequence
  Description of Artificial Sequence: Synthetic oligonucleotide
  Sense strand starting at position 3291 of SEQ ID NO: 1563872
gagagacuaugccuggcau

SEQ ID NO: 1838402 - RNA, 19 nt, Artificial Sequence
  Description of Artificial Sequence: Synthetic oligonucleotide
  Antisense strand to SEQ ID NO: 1838401
augccaggcauagucucuc

SEQ ID NO: 1838403 - RNA, 19 nt, Artificial Sequence
  Description of Artificial Sequence: Synthetic oligonucleotide
  Sense strand starting at position 3345 of SEQ ID NO: 1563872
agugguagggaaugugauu

SEQ ID NO: 1838404 - RNA, 19 nt, Artificial Sequence
  Description of Artificial Sequence: Synthetic oligonucleotide
  Antisense strand to SEQ ID NO: 1838403
aaucacauucccuaccacu

SEQ ID NO: 1838405 - RNA, 19 nt, Artificial Sequence
  Description of Artificial Sequence: Synthetic oligonucleotide
  Sense strand starting at position 3707 of SEQ ID NO: 1563872
ccgagaguuuauucuaaga

SEQ ID NO: 1838406 - RNA, 19 nt, Artificial Sequence
  Description of Artificial Sequence: Synthetic oligonucleotide
  Antisense strand to SEQ ID NO: 1838405
ucuuagaauaaacucucgg

SEQ ID NO: 1838407 - RNA, 19 nt, Artificial Sequence
  Description of Artificial Sequence: Synthetic oligonucleotide
  Sense strand starting at position 3788 of SEQ ID NO: 1563872
gagaacuggacgugaugaa

SEQ ID NO: 1838408 - RNA, 19 nt, Artificial Sequence
  Description of Artificial Sequence: Synthetic oligonucleotide
  Antisense strand to SEQ ID NO: 1838407
uucaucacguccaguucuc

SEQ ID NO: 1838409 - RNA, 19 nt, Artificial Sequence
  Description of Artificial Sequence: Synthetic oligonucleotide
  Sense strand starting at position 6 of SEQ ID NO: 1563873
uuuagucucuagucaaauc

SEQ ID NO: 1838410 - RNA, 19 nt, Artificial Sequence
  Description of Artificial Sequence: Synthetic oligonucleotide
  Antisense strand to SEQ ID NO: 1838409
gauuugacuagagacuaaa

SEQ ID NO: 1838411 - RNA, 19 nt, Artificial Sequence
  Description of Artificial Sequence: Synthetic oligonucleotide
  Sense strand starting at position 189 of SEQ ID NO: 1563873
gagauuaugcaccggacau

SEQ ID NO: 1838412 - RNA, 19 nt, Artificial Sequence
  Description of Artificial Sequence: Synthetic oligonucleotide
  Antisense strand to SEQ ID NO: 1838411
auguccggugcauaaucuc

SEQ ID NO: 1838413 - RNA, 19 nt, Artificial Sequence
  Description of Artificial Sequence: Synthetic oligonucleotide
  Sense strand starting at position 190 of SEQ ID NO: 1563873
agauuaugcaccggacauc

SEQ ID NO: 1838414 - RNA, 19 nt, Artificial Sequence
  Description of Artificial Sequence: Synthetic oligonucleotide
  Antisense strand to SEQ ID NO: 1838413
gauguccggugcauaaucu

SEQ ID NO: 1838415 - RNA, 19 nt, Artificial Sequence
  Description of Artificial Sequence: Synthetic oligonucleotide
  Sense strand starting at position 206 of SEQ ID NO: 1563873
aucuuuguagcccaguaua

SEQ ID NO: 1838416 - RNA, 19 nt, Artificial Sequence
  Description of Artificial Sequence: Synthetic oligonucleotide
  Antisense strand to SEQ ID NO: 1838415
uauacugggcuacaaagau

SEQ ID NO: 1838417 - RNA, 19 nt, Artificial Sequence
  Description of Artificial Sequence: Synthetic oligonucleotide
  Sense strand starting at position 246 of SEQ ID NO: 1563873
uuucucaguguuuacugau

SEQ ID NO: 1838418 - RNA, 19 nt, Artificial Sequence
  Description of Artificial Sequence: Synthetic oligonucleotide
  Antisense strand to SEQ ID NO: 1838417
aucaguaaacacugagaaa

SEQ ID NO: 1838419 - RNA, 19 nt, Artificial Sequence
  Description of Artificial Sequence: Synthetic oligonucleotide
  Sense strand starting at position 252 of SEQ ID NO: 1563873
aguguuuacugaucaaaca

SEQ ID NO: 1838420 - RNA, 19 nt, Artificial Sequence
  Description of Artificial Sequence: Synthetic oligonucleotide
  Antisense strand to SEQ ID NO: 1838419
uguuugaucaguaaacacu

SEQ ID NO: 1838421 - RNA, 19 nt, Artificial Sequence
  Description of Artificial Sequence: Synthetic oligonucleotide
  Sense strand starting at position 253 of SEQ ID NO: 1563873
guguuuacugaucaaacaa

SEQ ID NO: 1838422 - RNA, 19 nt, Artificial Sequence
  Description of Artificial Sequence: Synthetic oligonucleotide
  Antisense strand to SEQ ID NO: 1838421
uuguuugaucaguaaacac

SEQ ID NO: 1838423 - RNA, 19 nt, Artificial Sequence
  Description of Artificial Sequence: Synthetic oligonucleotide
  Sense strand starting at position 374 of SEQ ID NO: 1563873
aggaguuacucacccauga

SEQ ID NO: 1838424 - RNA, 19 nt, Artificial Sequence
  Description of Artificial Sequence: Synthetic oligonucleotide
  Antisense strand to SEQ ID NO: 1838423
ucaugggugaguaacuccu

SEQ ID NO: 1838425 - RNA, 19 nt, Artificial Sequence
  Description of Artificial Sequence: Synthetic oligonucleotide
  Sense strand starting at position 544 of SEQ ID NO: 1563873
cuggauggacauugcaaau

SEQ ID NO: 1838426 - RNA, 19 nt, Artificial Sequence
  Description of Artificial Sequence: Synthetic oligonucleotide
  Antisense strand to SEQ ID NO: 1838425
auuugcaauguccauccag

SEQ ID NO: 1838427 - RNA, 19 nt, Artificial Sequence
  Description of Artificial Sequence: Synthetic oligonucleotide
  Sense strand starting at position 562 of SEQ ID NO: 1563873
uagugaggucucuauuauc

SEQ ID NO: 1838428 - RNA, 19 nt, Artificial Sequence
  Description of Artificial Sequence: Synthetic oligonucleotide
  Antisense strand to SEQ ID NO: 1838427
gauaauagagaccucacua

SEQ ID NO: 1838429 - RNA, 19 nt, Artificial Sequence
  Description of Artificial Sequence: Synthetic oligonucleotide
  Sense strand starting at position 594 of SEQ ID NO: 1563873
acccauguagcuuaauaug

SEQ ID NO: 1838430 - RNA, 19 nt, Artificial Sequence
  Description of Artificial Sequence: Synthetic oligonucleotide
  Antisense strand to SEQ ID NO: 1838429
cauauuaagcuacaugggu

SEQ ID NO: 1838431 - RNA, 19 nt, Artificial Sequence
  Description of Artificial Sequence: Synthetic oligonucleotide
  Sense strand starting at position 599 of SEQ ID NO: 1563873
uguagcuuaauaugggaau

SEQ ID NO: 1838432 - RNA, 19 nt, Artificial Sequence
  Description of Artificial Sequence: Synthetic oligonucleotide
  Antisense strand to SEQ ID NO: 1838431
auucccauauuaagcuaca

SEQ ID NO: 1838433 - RNA, 19 nt, Artificial Sequence
  Description of Artificial Sequence: Synthetic oligonucleotide
  Sense strand starting at position 938 of SEQ ID NO: 1563873
ggcaaaugccaaugagaua

SEQ ID NO: 1838434 - RNA, 19 nt, Artificial Sequence
  Description of Artificial Sequence: Synthetic oligonucleotide
  Antisense strand to SEQ ID NO: 1838433
uaucucauuggcauuugcc

SEQ ID NO: 1838435 - RNA, 19 nt, Artificial Sequence
  Description of Artificial Sequence: Synthetic oligonucleotide
  Sense strand starting at position 957 of SEQ ID NO: 1563873
guauuaggucaugaaggca

SEQ ID NO: 1838436 - RNA, 19 nt, Artificial Sequence
  Description of Artificial Sequence: Synthetic oligonucleotide
  Antisense strand to SEQ ID NO: 1838435
ugccuucaugaccuaauac

SEQ ID NO: 1838437 - RNA, 19 nt, Artificial Sequence
  Description of Artificial Sequence: Synthetic oligonucleotide
  Sense strand starting at position 987 of SEQ ID NO: 1563873
uuagguugucccuauaagu

SEQ ID NO: 1838438 - RNA, 19 nt, Artificial Sequence
  Description of Artificial Sequence: Synthetic oligonucleotide
  Antisense strand to SEQ ID NO: 1838437
acuuauagggacaaccuaa

SEQ ID NO: 1838439 - RNA, 19 nt, Artificial Sequence
  Description of Artificial Sequence: Synthetic oligonucleotide
  Sense strand starting at position 1287 of SEQ ID NO: 1563873
aggaggguuccguguagaa

SEQ ID NO: 1838440 - RNA, 19 nt, Artificial Sequence
  Description of Artificial Sequence: Synthetic oligonucleotide
  Antisense strand to SEQ ID NO: 1838439
uucuacacggaacccuccu

SEQ ID NO: 1838441 - RNA, 19 nt, Artificial Sequence
  Description of Artificial Sequence: Synthetic oligonucleotide
  Sense strand starting at position 1289 of SEQ ID NO: 1563873
gaggguuccguguagaaca

SEQ ID NO: 1838442 - RNA, 19 nt, Artificial Sequence
  Description of Artificial Sequence: Synthetic oligonucleotide
  Antisense strand to SEQ ID NO: 1838441
uguucuacacggaacccuc

SEQ ID NO: 1838443 - RNA, 19 nt, Artificial Sequence
  Description of Artificial Sequence: Synthetic oligonucleotide
  Sense strand starting at position 1299 of SEQ ID NO: 1563873
uguagaacagaucguuacu

SEQ ID NO: 1838444 - RNA, 19 nt, Artificial Sequence
  Description of Artificial Sequence: Synthetic oligonucleotide
  Antisense strand to SEQ ID NO: 1838443
aguaacgaucuguucuaca

SEQ ID NO: 1838445 - RNA, 19 nt, Artificial Sequence
  Description of Artificial Sequence: Synthetic oligonucleotide
  Sense strand starting at position 1301 of SEQ ID NO: 1563873
uagaacagaucguuacuua

SEQ ID NO: 1838446 - RNA, 19 nt, Artificial Sequence
  Description of Artificial Sequence: Synthetic oligonucleotide
  Antisense strand to SEQ ID NO: 1838445
uaaguaacgaucuguucua

SEQ ID NO: 1838447 - RNA, 19 nt, Artificial Sequence
  Description of Artificial Sequence: Synthetic oligonucleotide
  Sense strand starting at position 1304 of SEQ ID NO: 1563873
aacagaucguuacuuaaag

SEQ ID NO: 1838448 - RNA, 19 nt, Artificial Sequence
  Description of Artificial Sequence: Synthetic oligonucleotide
  Antisense strand to SEQ ID NO: 1838447
cuuuaaguaacgaucuguu

SEQ ID NO: 1838449 - RNA, 19 nt, Artificial Sequence
  Description of Artificial Sequence: Synthetic oligonucleotide
  Sense strand starting at position 1357 of SEQ ID NO: 1563873
cucccauggucacuaggau

SEQ ID NO: 1838450 - RNA, 19 nt, Artificial Sequence
  Description of Artificial Sequence: Synthetic oligonucleotide
  Antisense strand to SEQ ID NO: 1838449
auccuagugaccaugggag

SEQ ID NO: 1838451 - RNA, 19 nt, Artificial Sequence
  Description of Artificial Sequence: Synthetic oligonucleotide
  Sense strand starting at position 1358 of SEQ ID NO: 1563873
ucccauggucacuaggauu

SEQ ID NO: 1838452 - RNA, 19 nt, Artificial Sequence
  Description of Artificial Sequence: Synthetic oligonucleotide
  Antisense strand to SEQ ID NO: 1838451
aauccuagugaccauggga

SEQ ID NO: 1838453 - RNA, 19 nt, Artificial Sequence
  Description of Artificial Sequence: Synthetic oligonucleotide
  Sense strand starting at position 2176 of SEQ ID NO: 1563873
cugaguucugacuggacuu

SEQ ID NO: 1838454 - RNA, 19 nt, Artificial Sequence
  Description of Artificial Sequence: Synthetic oligonucleotide
  Antisense strand to SEQ ID NO: 1838453
aaguccagucagaacucag

SEQ ID NO: 1838455 - RNA, 19 nt, Artificial Sequence
  Description of Artificial Sequence: Synthetic oligonucleotide
  Sense strand starting at position 2257 of SEQ ID NO: 1563873
aggaacuccgucuauuaca

SEQ ID NO: 1838456 - RNA, 19 nt, Artificial Sequence
  Description of Artificial Sequence: Synthetic oligonucleotide
  Antisense strand to SEQ ID NO: 1838455
uguaauagacggaguuccu

SEQ ID NO: 1838457 - RNA, 19 nt, Artificial Sequence
  Description of Artificial Sequence: Synthetic oligonucleotide
  Sense strand starting at position 2337 of SEQ ID NO: 1563873
ggcuauugugaacauuaga

SEQ ID NO: 1838458 - RNA, 19 nt, Artificial Sequence
  Description of Artificial Sequence: Synthetic oligonucleotide
  Antisense strand to SEQ ID NO: 1838457
ucuaauguucacaauagcc

SEQ ID NO: 1838459 - RNA, 19 nt, Artificial Sequence
  Description of Artificial Sequence: Synthetic oligonucleotide
  Sense strand starting at position 2350 of SEQ ID NO: 1563873
auuagaaacuauguaugca

SEQ ID NO: 1838460 - RNA, 19 nt, Artificial Sequence
  Description of Artificial Sequence: Synthetic oligonucleotide
  Antisense strand to SEQ ID NO: 1838459
ugcauacauaguuucuaau

SEQ ID NO: 1838461 - RNA, 19 nt, Artificial Sequence
  Description of Artificial Sequence: Synthetic oligonucleotide
  Sense strand starting at position 2353 of SEQ ID NO: 1563873
agaaacuauguaugcauga

SEQ ID NO: 1838462 - RNA, 19 nt, Artificial Sequence
  Description of Artificial Sequence: Synthetic oligonucleotide
  Antisense strand to SEQ ID NO: 1838461
ucaugcauacauaguuucu

SEQ ID NO: 1838463 - RNA, 19 nt, Artificial Sequence
  Description of Artificial Sequence: Synthetic oligonucleotide
  Sense strand starting at position 2390 of SEQ ID NO: 1563873
cugaaaggcuggcucuaau

SEQ ID NO: 1838464 - RNA, 19 nt, Artificial Sequence
  Description of Artificial Sequence: Synthetic oligonucleotide
  Antisense strand to SEQ ID NO: 1838463
auuagagccagccuuucag

SEQ ID NO: 1838465 - RNA, 19 nt, Artificial Sequence
  Description of Artificial Sequence: Synthetic oligonucleotide
  Sense strand starting at position 2401 of SEQ ID NO: 1563873
gcucuaaucccucaagguc

SEQ ID NO: 1838466 - RNA, 19 nt, Artificial Sequence
  Description of Artificial Sequence: Synthetic oligonucleotide
  Antisense strand to SEQ ID NO: 1838465
gaccuugagggauuagagc

SEQ ID NO: 1838467 - RNA, 19 nt, Artificial Sequence
  Description of Artificial Sequence: Synthetic oligonucleotide
  Sense strand starting at position 2423 of SEQ ID NO: 1563873
caucgaguugucuaaccuu

SEQ ID NO: 1838468 - RNA, 19 nt, Artificial Sequence
  Description of Artificial Sequence: Synthetic oligonucleotide
  Antisense strand to SEQ ID NO: 1838467
aagguuagacaacucgaug

SEQ ID NO: 1838469 - RNA, 19 nt, Artificial Sequence
  Description of Artificial Sequence: Synthetic oligonucleotide
  Sense strand starting at position 2589 of SEQ ID NO: 1563873
ugcuuuagauucuuagauc

SEQ ID NO: 1838470 - RNA, 19 nt, Artificial Sequence
  Description of Artificial Sequence: Synthetic oligonucleotide
  Antisense strand to SEQ ID NO: 1838469
gaucuaagaaucuaaagca

SEQ ID NO: 1838471 - RNA, 19 nt, Artificial Sequence
  Description of Artificial Sequence: Synthetic oligonucleotide
  Sense strand starting at position 2640 of SEQ ID NO: 1563873
ccaugaacuccagguuaag

SEQ ID NO: 1838472 - RNA, 19 nt, Artificial Sequence
  Description of Artificial Sequence: Synthetic oligonucleotide
  Antisense strand to SEQ ID NO: 1838471
cuuaaccuggaguucaugg

SEQ ID NO: 1838473 - RNA, 19 nt, Artificial Sequence
  Description of Artificial Sequence: Synthetic oligonucleotide
  Sense strand starting at position 2658 of SEQ ID NO: 1563873
gaacccuuggucuagcuaa

SEQ ID NO: 1838474 - RNA, 19 nt, Artificial Sequence
  Description of Artificial Sequence: Synthetic oligonucleotide
  Antisense strand to SEQ ID NO: 1838473
uuagcuagaccaaggguuc

SEQ ID NO: 1838475 - RNA, 19 nt, Artificial Sequence
  Description of Artificial Sequence: Synthetic oligonucleotide
  Sense strand starting at position 2733 of SEQ ID NO: 1563873
agccucaugaguuagggau

SEQ ID NO: 1838476 - RNA, 19 nt, Artificial Sequence
  Description of Artificial Sequence: Synthetic oligonucleotide
  Antisense strand to SEQ ID NO: 1838475
aucccuaacucaugaggcu

SEQ ID NO: 1838477 - RNA, 19 nt, Artificial Sequence
  Description of Artificial Sequence: Synthetic oligonucleotide
  Sense strand starting at position 2747 of SEQ ID NO: 1563873
gggauuauuauuggcucga

SEQ ID NO: 1838478 - RNA, 19 nt, Artificial Sequence
  Description of Artificial Sequence: Synthetic oligonucleotide
  Antisense strand to SEQ ID NO: 1838477
ucgagccaauaauaauccc

SEQ ID NO: 1838479 - RNA, 19 nt, Artificial Sequence
  Description of Artificial Sequence: Synthetic oligonucleotide
  Sense strand starting at position 2748 of SEQ ID NO: 1563873
ggauuauuauuggcucgau

SEQ ID NO: 1838480 - RNA, 19 nt, Artificial Sequence
  Description of Artificial Sequence: Synthetic oligonucleotide
  Antisense strand to SEQ ID NO: 1838479
aucgagccaauaauaaucc

SEQ ID NO: 1838481 - RNA, 19 nt, Artificial Sequence
  Description of Artificial Sequence: Synthetic oligonucleotide
  Sense strand starting at position 2749 of SEQ ID NO: 1563873
gauuauuauuggcucgauu

SEQ ID NO: 1838482 - RNA, 19 nt, Artificial Sequence
  Description of Artificial Sequence: Synthetic oligonucleotide
  Antisense strand to SEQ ID NO: 1838481
aaucgagccaauaauaauc

SEQ ID NO: 1838483 - RNA, 19 nt, Artificial Sequence
  Description of Artificial Sequence: Synthetic oligonucleotide
  Sense strand starting at position 2839 of SEQ ID NO: 1563873
cagagcuggcacuaagauu

SEQ ID NO: 1838484 - RNA, 19 nt, Artificial Sequence
  Description of Artificial Sequence: Synthetic oligonucleotide
  Antisense strand to SEQ ID NO: 1838483
aaucuuagugccagcucug

SEQ ID NO: 1838485 - RNA, 19 nt, Artificial Sequence
  Description of Artificial Sequence: Synthetic oligonucleotide
  Sense strand starting at position 2856 of SEQ ID NO: 1563873
uucugaauuccagagccaa

SEQ ID NO: 1838486 - RNA, 19 nt, Artificial Sequence
  Description of Artificial Sequence: Synthetic oligonucleotide
  Antisense strand to SEQ ID NO: 1838485
uuggcucuggaauucagaa

SEQ ID NO: 1838487 - RNA, 19 nt, Artificial Sequence
  Description of Artificial Sequence: Synthetic oligonucleotide
  Sense strand starting at position 2885 of SEQ ID NO: 1563873
ucguauugcuauuuguuua

SEQ ID NO: 1838488 - RNA, 19 nt, Artificial Sequence
  Description of Artificial Sequence: Synthetic oligonucleotide
  Antisense strand to SEQ ID NO: 1838487
uaaacaaauagcaauacga

SEQ ID NO: 1838489 - RNA, 19 nt, Artificial Sequence
  Description of Artificial Sequence: Synthetic oligonucleotide
  Sense strand starting at position 196 of SEQ ID NO: 1563874
gaagguucugcaggaggga

SEQ ID NO: 1838490 - RNA, 19 nt, Artificial Sequence
  Description of Artificial Sequence: Synthetic oligonucleotide
  Antisense strand to SEQ ID NO: 1838489
ucccuccugcagaaccuuc

SEQ ID NO: 1838491 - RNA, 19 nt, Artificial Sequence
  Description of Artificial Sequence: Synthetic oligonucleotide
  Sense strand starting at position 252 of SEQ ID NO: 1563874
uguugaaaugcccaucaag

SEQ ID NO: 1838492 - RNA, 19 nt, Artificial Sequence
  Description of Artificial Sequence: Synthetic oligonucleotide
  Antisense strand to SEQ ID NO: 1838491
cuugaugggcauuucaaca

SEQ ID NO: 1838493 - RNA, 19 nt, Artificial Sequence
  Description of Artificial Sequence: Synthetic oligonucleotide
  Sense strand starting at position 291 of SEQ ID NO: 1563874
ggauauagagucuggaguu

SEQ ID NO: 1838494 - RNA, 19 nt, Artificial Sequence
  Description of Artificial Sequence: Synthetic oligonucleotide
  Antisense strand to SEQ ID NO: 1838493
aacuccagacucuauaucc

SEQ ID NO: 1838495 - RNA, 19 nt, Artificial Sequence
  Description of Artificial Sequence: Synthetic oligonucleotide
  Sense strand starting at position 320 of SEQ ID NO: 1563874
gucugugcuggagauacaa

SEQ ID NO: 1838496 - RNA, 19 nt, Artificial Sequence
  Description of Artificial Sequence: Synthetic oligonucleotide
  Antisense strand to SEQ ID NO: 1838495
uuguaucuccagcacagac

SEQ ID NO: 1838497 - RNA, 19 nt, Artificial Sequence
  Description of Artificial Sequence: Synthetic oligonucleotide
  Sense strand starting at position 322 of SEQ ID NO: 1563874
cugugcuggagauacaaau

SEQ ID NO: 1838498 - RNA, 19 nt, Artificial Sequence
  Description of Artificial Sequence: Synthetic oligonucleotide
  Antisense strand to SEQ ID NO: 1838497
auuuguaucuccagcacag

SEQ ID NO: 1838499 - RNA, 19 nt, Artificial Sequence
  Description of Artificial Sequence: Synthetic oligonucleotide
  Sense strand starting at position 364 of SEQ ID NO: 1563874
gugggacuauaacuacaua

SEQ ID NO: 1838500 - RNA, 19 nt, Artificial Sequence
  Description of Artificial Sequence: Synthetic oligonucleotide
  Antisense strand to SEQ ID NO: 1838499
uauguaguuauagucccac

SEQ ID NO: 1838501 - RNA, 19 nt, Artificial Sequence
  Description of Artificial Sequence: Synthetic oligonucleotide
  Sense strand starting at position 383 of SEQ ID NO: 1563874
cuuauucuacggcaauaaa

SEQ ID NO: 1838502 - RNA, 19 nt, Artificial Sequence
  Description of Artificial Sequence: Synthetic oligonucleotide
  Antisense strand to SEQ ID NO: 1838501
uuuauugccguagaauaag

SEQ ID NO: 1838503 - RNA, 19 nt, Artificial Sequence
  Description of Artificial Sequence: Synthetic oligonucleotide
  Sense strand starting at position 611 of SEQ ID NO: 1563874
ggugcagagagguauauca

SEQ ID NO: 1838504 - RNA, 19 nt, Artificial Sequence
  Description of Artificial Sequence: Synthetic oligonucleotide
  Antisense strand to SEQ ID NO: 1838503
ugauauaccucucugcacc

SEQ ID NO: 1838505 - RNA, 19 nt, Artificial Sequence
  Description of Artificial Sequence: Synthetic oligonucleotide
  Sense strand starting at position 613 of SEQ ID NO: 1563874
ugcagagagguauaucauu

SEQ ID NO: 1838506 - RNA, 19 nt, Artificial Sequence
  Description of Artificial Sequence: Synthetic oligonucleotide
  Antisense strand to SEQ ID NO: 1838505
aaugauauaccucucugca

SEQ ID NO: 1838507 - RNA, 19 nt, Artificial Sequence
  Description of Artificial Sequence: Synthetic oligonucleotide
  Sense strand starting at position 758 of SEQ ID NO: 1563874
aggaguuaaguagagccua

SEQ ID NO: 1838508 - RNA, 19 nt, Artificial Sequence
  Description of Artificial Sequence: Synthetic oligonucleotide
  Antisense strand to SEQ ID NO: 1838507
uaggcucuacuuaacuccu

SEQ ID NO: 1838509 - RNA, 19 nt, Artificial Sequence
  Description of Artificial Sequence: Synthetic oligonucleotide
  Sense strand starting at position 934 of SEQ ID NO: 1563874
uucugaaccuggguuauaa

SEQ ID NO: 1838510 - RNA, 19 nt, Artificial Sequence
  Description of Artificial Sequence: Synthetic oligonucleotide
  Antisense strand to SEQ ID NO: 1838509
uuauaacccagguucagaa

SEQ ID NO: 1838511 - RNA, 19 nt, Artificial Sequence
  Description of Artificial Sequence: Synthetic oligonucleotide
  Sense strand starting at position 943 of SEQ ID NO: 1563874
uggguuauaagauguacaa

SEQ ID NO: 1838512 - RNA, 19 nt, Artificial Sequence
  Description of Artificial Sequence: Synthetic oligonucleotide
  Antisense strand to SEQ ID NO: 1838511
uuguacaucuuauaaccca

SEQ ID NO: 1838513 - RNA, 19 nt, Artificial Sequence
  Description of Artificial Sequence: Synthetic oligonucleotide
  Sense strand starting at position 999 of SEQ ID NO: 1563874
acugaaauucguuaguaua

SEQ ID NO: 1838514 - RNA, 19 nt, Artificial Sequence
  Description of Artificial Sequence: Synthetic oligonucleotide
  Antisense strand to SEQ ID NO: 1838513
uauacuaacgaauuucagu

SEQ ID NO: 1838515 - RNA, 19 nt, Artificial Sequence
  Description of Artificial Sequence: Synthetic oligonucleotide
  Sense strand starting at position 1012 of SEQ ID NO: 1563874
aguauauucugauccuauu

SEQ ID NO: 1838516 - RNA, 19 nt, Artificial Sequence
  Description of Artificial Sequence: Synthetic oligonucleotide
  Antisense strand to SEQ ID NO: 1838515
aauaggaucagaauauacu

SEQ ID NO: 1838517 - RNA, 19 nt, Artificial Sequence
  Description of Artificial Sequence: Synthetic oligonucleotide
  Sense strand starting at position 1018 of SEQ ID NO: 1563874
uucugauccuauucugaag

SEQ ID NO: 1838518 - RNA, 19 nt, Artificial Sequence
  Description of Artificial Sequence: Synthetic oligonucleotide
  Antisense strand to SEQ ID NO: 1838517
cuucagaauaggaucagaa

SEQ ID NO: 1838519 - RNA, 19 nt, Artificial Sequence
  Description of Artificial Sequence: Synthetic oligonucleotide
  Sense strand starting at position 1024 of SEQ ID NO: 1563874
uccuauucugaagggauua

SEQ ID NO: 1838520 - RNA, 19 nt, Artificial Sequence
  Description of Artificial Sequence: Synthetic oligonucleotide
  Antisense strand to SEQ ID NO: 1838519
uaaucccuucagaauagga

SEQ ID NO: 1838521 - RNA, 19 nt, Artificial Sequence
  Description of Artificial Sequence: Synthetic oligonucleotide
  Sense strand starting at position 1368 of SEQ ID NO: 1563874
gagaguucuguugggaacu

SEQ ID NO: 1838522 - RNA, 19 nt, Artificial Sequence
  Description of Artificial Sequence: Synthetic oligonucleotide
  Antisense strand to SEQ ID NO: 1838521
aguucccaacagaacucuc

SEQ ID NO: 1838523 - RNA, 19 nt, Artificial Sequence
  Description of Artificial Sequence: Synthetic oligonucleotide
  Sense strand starting at position 2472 of SEQ ID NO: 1563874
agagaaauccaccaucgcu

SEQ ID NO: 1838524 - RNA, 19 nt, Artificial Sequence
  Description of Artificial Sequence: Synthetic oligonucleotide
  Antisense strand to SEQ ID NO: 1838523
agcgaugguggauuucucu

SEQ ID NO: 1838525 - RNA, 19 nt, Artificial Sequence
  Description of Artificial Sequence: Synthetic oligonucleotide
  Sense strand starting at position 2519 of SEQ ID NO: 1563874
ggaggccuccucuaaaugu

SEQ ID NO: 1838526 - RNA, 19 nt, Artificial Sequence
  Description of Artificial Sequence: Synthetic oligonucleotide
  Antisense strand to SEQ ID NO: 1838525
acauuuagaggaggccucc

SEQ ID NO: 1838527 - RNA, 19 nt, Artificial Sequence
  Description of Artificial Sequence: Synthetic oligonucleotide
  Sense strand starting at position 2725 of SEQ ID NO: 1563874
cuggcagaguaacucaauu

SEQ ID NO: 1838528 - RNA, 19 nt, Artificial Sequence
  Description of Artificial Sequence: Synthetic oligonucleotide
  Antisense strand to SEQ ID NO: 1838527
aauugaguuacucugccag

SEQ ID NO: 1838529 - RNA, 19 nt, Artificial Sequence
  Description of Artificial Sequence: Synthetic oligonucleotide
  Sense strand starting at position 2993 of SEQ ID NO: 1563874
cuuugcaauuaucugagga

SEQ ID NO: 1838530 - RNA, 19 nt, Artificial Sequence
  Description of Artificial Sequence: Synthetic oligonucleotide
  Antisense strand to SEQ ID NO: 1838529
uccucagauaauugcaaag

SEQ ID NO: 1838531 - RNA, 19 nt, Artificial Sequence
  Description of Artificial Sequence: Synthetic oligonucleotide
  Sense strand starting at position 2994 of SEQ ID NO: 1563874
uuugcaauuaucugaggag

SEQ ID NO: 1838532 - RNA, 19 nt, Artificial Sequence
  Description of Artificial Sequence: Synthetic oligonucleotide
  Antisense strand to SEQ ID NO: 1838531
cuccucagauaauugcaaa

SEQ ID NO: 1838533 - RNA, 19 nt, Artificial Sequence
  Description of Artificial Sequence: Synthetic oligonucleotide
  Sense strand starting at position 2998 of SEQ ID NO: 1563874
caauuaucugaggagcugu

SEQ ID NO: 1838534 - RNA, 19 nt, Artificial Sequence
  Description of Artificial Sequence: Synthetic oligonucleotide
  Antisense strand to SEQ ID NO: 1838533
acagcuccucagauaauug

SEQ ID NO: 1838535 - RNA, 19 nt, Artificial Sequence
  Description of Artificial Sequence: Synthetic oligonucleotide
  Sense strand starting at position 3158 of SEQ ID NO: 1563874
gaagcauucguugcugcga

SEQ ID NO: 1838536 - RNA, 19 nt, Artificial Sequence
  Description of Artificial Sequence: Synthetic oligonucleotide
  Antisense strand to SEQ ID NO: 1838535
ucgcagcaacgaaugcuuc

SEQ ID NO: 1838537 - RNA, 19 nt, Artificial Sequence
  Description of Artificial Sequence: Synthetic oligonucleotide
  Sense strand starting at position 3207 of SEQ ID NO: 1563874
cuccucuugguguaagaga

SEQ ID NO: 1838538 - RNA, 19 nt, Artificial Sequence
  Description of Artificial Sequence: Synthetic oligonucleotide
  Antisense strand to SEQ ID NO: 1838537
ucucuuacaccaagaggag

SEQ ID NO: 1838539 - RNA, 19 nt, Artificial Sequence
  Description of Artificial Sequence: Synthetic oligonucleotide
  Sense strand starting at position 3230 of SEQ ID NO: 1563874
caugauguucccuaagguu

SEQ ID NO: 1838540 - RNA, 19 nt, Artificial Sequence
  Description of Artificial Sequence: Synthetic oligonucleotide
  Antisense strand to SEQ ID NO: 1838539
aaccuuagggaacaucaug

SEQ ID NO: 1838541 - RNA, 19 nt, Artificial Sequence
  Description of Artificial Sequence: Synthetic oligonucleotide
  Sense strand starting at position 3236 of SEQ ID NO: 1563874
guucccuaagguuagaaua

SEQ ID NO: 1838542 - RNA, 19 nt, Artificial Sequence
  Description of Artificial Sequence: Synthetic oligonucleotide
  Antisense strand to SEQ ID NO: 1838541
uauucuaaccuuagggaac

SEQ ID NO: 1838543 - RNA, 19 nt, Artificial Sequence
  Description of Artificial Sequence: Synthetic oligonucleotide
  Sense strand starting at position 3244 of SEQ ID NO: 1563874
agguuagaauauucuuacu

SEQ ID NO: 1838544 - RNA, 19 nt, Artificial Sequence
  Description of Artificial Sequence: Synthetic oligonucleotide
  Antisense strand to SEQ ID NO: 1838543
aguaagaauauucuaaccu

SEQ ID NO: 1838545 - RNA, 19 nt, Artificial Sequence
  Description of Artificial Sequence: Synthetic oligonucleotide
  Sense strand starting at position 3264 of SEQ ID NO: 1563874
ucaucacuuggguaauucu

SEQ ID NO: 1838546 - RNA, 19 nt, Artificial Sequence
  Description of Artificial Sequence: Synthetic oligonucleotide
  Antisense strand to SEQ ID NO: 1838545
agaauuacccaagugauga

SEQ ID NO: 1838547 - RNA, 19 nt, Artificial Sequence
  Description of Artificial Sequence: Synthetic oligonucleotide
  Sense strand starting at position 3267 of SEQ ID NO: 1563874
ucacuuggguaauucuuua

SEQ ID NO: 1838548 - RNA, 19 nt, Artificial Sequence
  Description of Artificial Sequence: Synthetic oligonucleotide
  Antisense strand to SEQ ID NO: 1838547
uaaagaauuacccaaguga

SEQ ID NO: 1838549 - RNA, 19 nt, Artificial Sequence
  Description of Artificial Sequence: Synthetic oligonucleotide
  Sense strand starting at position 3271 of SEQ ID NO: 1563874
uuggguaauucuuuaucau

SEQ ID NO: 1838550 - RNA, 19 nt, Artificial Sequence
  Description of Artificial Sequence: Synthetic oligonucleotide
  Antisense strand to SEQ ID NO: 1838549
augauaaagaauuacccaa

SEQ ID NO: 1838551 - RNA, 19 nt, Artificial Sequence
  Description of Artificial Sequence: Synthetic oligonucleotide
  Sense strand starting at position 3272 of SEQ ID NO: 1563874
uggguaauucuuuaucauu

SEQ ID NO: 1838552 - RNA, 19 nt, Artificial Sequence
  Description of Artificial Sequence: Synthetic oligonucleotide
  Antisense strand to SEQ ID NO: 1838551
aaugauaaagaauuaccca

SEQ ID NO: 1838553 - RNA, 19 nt, Artificial Sequence
  Description of Artificial Sequence: Synthetic oligonucleotide
  Sense strand starting at position 3280 of SEQ ID NO: 1563874
ucuuuaucauuguugaaag

SEQ ID NO: 1838554 - RNA, 19 nt, Artificial Sequence
  Description of Artificial Sequence: Synthetic oligonucleotide
  Antisense strand to SEQ ID NO: 1838553
cuuucaacaaugauaaaga

SEQ ID NO: 1838555 - RNA, 19 nt, Artificial Sequence
  Description of Artificial Sequence: Synthetic oligonucleotide
  Sense strand starting at position 3298 of SEQ ID NO: 1563874
gcgguucaucugcuucuga

SEQ ID NO: 1838556 - RNA, 19 nt, Artificial Sequence
  Description of Artificial Sequence: Synthetic oligonucleotide
  Antisense strand to SEQ ID NO: 1838555
ucagaagcagaugaaccgc

SEQ ID NO: 1838557 - RNA, 19 nt, Artificial Sequence
  Description of Artificial Sequence: Synthetic oligonucleotide
  Sense strand starting at position 3367 of SEQ ID NO: 1563874
acagaauaucauugugcua

SEQ ID NO: 1838558 - RNA, 19 nt, Artificial Sequence
  Description of Artificial Sequence: Synthetic oligonucleotide
  Antisense strand to SEQ ID NO: 1838557
uagcacaaugauauucugu

SEQ ID NO: 1838559 - RNA, 19 nt, Artificial Sequence
  Description of Artificial Sequence: Synthetic oligonucleotide
  Sense strand starting at position 3520 of SEQ ID NO: 1563874
acauguaaccauuguggaa

SEQ ID NO: 1838560 - RNA, 19 nt, Artificial Sequence
  Description of Artificial Sequence: Synthetic oligonucleotide
  Antisense strand to SEQ ID NO: 1838559
uuccacaaugguuacaugu

SEQ ID NO: 1838561 - RNA, 19 nt, Artificial Sequence
  Description of Artificial Sequence: Synthetic oligonucleotide
  Sense strand starting at position 3527 of SEQ ID NO: 1563874
accauuguggaaugagcaa

SEQ ID NO: 1838562 - RNA, 19 nt, Artificial Sequence
  Description of Artificial Sequence: Synthetic oligonucleotide
  Antisense strand to SEQ ID NO: 1838561
uugcucauuccacaauggu

SEQ ID NO: 1838563 - RNA, 19 nt, Artificial Sequence
  Description of Artificial Sequence: Synthetic oligonucleotide
  Sense strand starting at position 3541 of SEQ ID NO: 1563874
agcaaaucaggcuauuaac

SEQ ID NO: 1838564 - RNA, 19 nt, Artificial Sequence
  Description of Artificial Sequence: Synthetic oligonucleotide
  Antisense strand to SEQ ID NO: 1838563
guuaauagccugauuugcu

SEQ ID NO: 1838565 - RNA, 19 nt, Artificial Sequence
  Description of Artificial Sequence: Synthetic oligonucleotide
  Sense strand starting at position 3663 of SEQ ID NO: 1563874
auugcugugcaauagauca

SEQ ID NO: 1838566 - RNA, 19 nt, Artificial Sequence
  Description of Artificial Sequence: Synthetic oligonucleotide
  Antisense strand to SEQ ID NO: 1838565
ugaucuauugcacagcaau

SEQ ID NO: 1838567 - RNA, 19 nt, Artificial Sequence
  Description of Artificial Sequence: Synthetic oligonucleotide
  Sense strand starting at position 3770 of SEQ ID NO: 1563874
ggugguaaccaccauucua

SEQ ID NO: 1838568 - RNA, 19 nt, Artificial Sequence
  Description of Artificial Sequence: Synthetic oligonucleotide
  Antisense strand to SEQ ID NO: 1838567
uagaauggugguuaccacc

SEQ ID NO: 1838569 - RNA, 19 nt, Artificial Sequence
  Description of Artificial Sequence: Synthetic oligonucleotide
  Sense strand starting at position 136 of SEQ ID NO: 1563875
ucaguuagauaggcggaau

SEQ ID NO: 1838570 - RNA, 19 nt, Artificial Sequence
  Description of Artificial Sequence: Synthetic oligonucleotide
  Antisense strand to SEQ ID NO: 1838569
auuccgccuaucuaacuga

SEQ ID NO: 1838571 - RNA, 19 nt, Artificial Sequence
  Description of Artificial Sequence: Synthetic oligonucleotide
  Sense strand starting at position 137 of SEQ ID NO: 1563875
caguuagauaggcggaaua

SEQ ID NO: 1838572 - RNA, 19 nt, Artificial Sequence
  Description of Artificial Sequence: Synthetic oligonucleotide
  Antisense strand to SEQ ID NO: 1838571
uauuccgccuaucuaacug

SEQ ID NO: 1838573 - RNA, 19 nt, Artificial Sequence
  Description of Artificial Sequence: Synthetic oligonucleotide
  Sense strand starting at position 139 of SEQ ID NO: 1563875
guuagauaggcggaauaag

SEQ ID NO: 1838574 - RNA, 19 nt, Artificial Sequence
  Description of Artificial Sequence: Synthetic oligonucleotide
  Antisense strand to SEQ ID NO: 1838573
cuuauuccgccuaucuaac

SEQ ID NO: 1838575 - RNA, 19 nt, Artificial Sequence
  Description of Artificial Sequence: Synthetic oligonucleotide
  Sense strand starting at position 164 of SEQ ID NO: 1563875
ugaucuauugcacagcaau

SEQ ID NO: 1838576 - RNA, 19 nt, Artificial Sequence
  Description of Artificial Sequence: Synthetic oligonucleotide
  Antisense strand to SEQ ID NO: 1838575
auugcugugcaauagauca

SEQ ID NO: 1838577 - RNA, 19 nt, Artificial Sequence
  Description of Artificial Sequence: Synthetic oligonucleotide
  Sense strand starting at position 175 of SEQ ID NO: 1563875
acagcaaugugacuacaau

SEQ ID NO: 1838578 - RNA, 19 nt, Artificial Sequence
  Description of Artificial Sequence: Synthetic oligonucleotide
  Antisense strand to SEQ ID NO: 1838577
auuguagucacauugcugu

SEQ ID NO: 1838579 - RNA, 19 nt, Artificial Sequence
  Description of Artificial Sequence: Synthetic oligonucleotide
  Sense strand starting at position 282 of SEQ ID NO: 1563875
agauguuaauagccugauu

SEQ ID NO: 1838580 - RNA, 19 nt, Artificial Sequence
  Description of Artificial Sequence: Synthetic oligonucleotide
  Antisense strand to SEQ ID NO: 1838579
aaucaggcuauuaacaucu

SEQ ID NO: 1838581 - RNA, 19 nt, Artificial Sequence
  Description of Artificial Sequence: Synthetic oligonucleotide
  Sense strand starting at position 962 of SEQ ID NO: 1563875
ucagaauagagcggugacu

SEQ ID NO: 1838582 - RNA, 19 nt, Artificial Sequence
  Description of Artificial Sequence: Synthetic oligonucleotide
  Antisense strand to SEQ ID NO: 1838581
agucaccgcucuauucuga

SEQ ID NO: 1838583 - RNA, 19 nt, Artificial Sequence
  Description of Artificial Sequence: Synthetic oligonucleotide
  Sense strand starting at position 1235 of SEQ ID NO: 1563875
ggagcaaaggccugagaau

SEQ ID NO: 1838584 - RNA, 19 nt, Artificial Sequence
  Description of Artificial Sequence: Synthetic oligonucleotide
  Antisense strand to SEQ ID NO: 1838583
auucucaggccuuugcucc

SEQ ID NO: 1838585 - RNA, 19 nt, Artificial Sequence
  Description of Artificial Sequence: Synthetic oligonucleotide
  Sense strand starting at position 1270 of SEQ ID NO: 1563875
cucccauuucuucgcgauu

SEQ ID NO: 1838586 - RNA, 19 nt, Artificial Sequence
  Description of Artificial Sequence: Synthetic oligonucleotide
  Antisense strand to SEQ ID NO: 1838585
aaucgcgaagaaaugggag

SEQ ID NO: 1838587 - RNA, 19 nt, Artificial Sequence
  Description of Artificial Sequence: Synthetic oligonucleotide
  Sense strand starting at position 1273 of SEQ ID NO: 1563875
ccauuucuucgcgauucca

SEQ ID NO: 1838588 - RNA, 19 nt, Artificial Sequence
  Description of Artificial Sequence: Synthetic oligonucleotide
  Antisense strand to SEQ ID NO: 1838587
uggaaucgcgaagaaaugg

SEQ ID NO: 1838589 - RNA, 19 nt, Artificial Sequence
  Description of Artificial Sequence: Synthetic oligonucleotide
  Sense strand starting at position 1576 of SEQ ID NO: 1563875
gugcuagacagcugagaga

SEQ ID NO: 1838590 - RNA, 19 nt, Artificial Sequence
  Description of Artificial Sequence: Synthetic oligonucleotide
  Antisense strand to SEQ ID NO: 1838589
ucucucagcugucuagcac

SEQ ID NO: 1838591 - RNA, 19 nt, Artificial Sequence
  Description of Artificial Sequence: Synthetic oligonucleotide
  Sense strand starting at position 2136 of SEQ ID NO: 1563875
ugagcacccucauugaauu

SEQ ID NO: 1838592 - RNA, 19 nt, Artificial Sequence
  Description of Artificial Sequence: Synthetic oligonucleotide
  Antisense strand to SEQ ID NO: 1838591
aauucaaugagggugcuca

SEQ ID NO: 1838593 - RNA, 19 nt, Artificial Sequence
  Description of Artificial Sequence: Synthetic oligonucleotide
  Sense strand starting at position 2290 of SEQ ID NO: 1563875
cuguguucuccgcuggacu

SEQ ID NO: 1838594 - RNA, 19 nt, Artificial Sequence
  Description of Artificial Sequence: Synthetic oligonucleotide
  Antisense strand to SEQ ID NO: 1838593
aguccagcggagaacacag

SEQ ID NO: 1838595 - RNA, 19 nt, Artificial Sequence
  Description of Artificial Sequence: Synthetic oligonucleotide
  Sense strand starting at position 2303 of SEQ ID NO: 1563875
uggacugcuuagucuagaa

SEQ ID NO: 1838596 - RNA, 19 nt, Artificial Sequence
  Description of Artificial Sequence: Synthetic oligonucleotide
  Antisense strand to SEQ ID NO: 1838595
uucuagacuaagcagucca

SEQ ID NO: 1838597 - RNA, 19 nt, Artificial Sequence
  Description of Artificial Sequence: Synthetic oligonucleotide
  Sense strand starting at position 2305 of SEQ ID NO: 1563875
gacugcuuagucuagaauu

SEQ ID NO: 1838598 - RNA, 19 nt, Artificial Sequence
  Description of Artificial Sequence: Synthetic oligonucleotide
  Antisense strand to SEQ ID NO: 1838597
aauucuagacuaagcaguc

SEQ ID NO: 1838599 - RNA, 19 nt, Artificial Sequence
  Description of Artificial Sequence: Synthetic oligonucleotide
  Sense strand starting at position 2456 of SEQ ID NO: 1563875
ccgaguucccaacagaacu

SEQ ID NO: 1838600 - RNA, 19 nt, Artificial Sequence
  Description of Artificial Sequence: Synthetic oligonucleotide
  Antisense strand to SEQ ID NO: 1838599
aguucuguugggaacucgg

SEQ ID NO: 1838601 - RNA, 19 nt, Artificial Sequence
  Description of Artificial Sequence: Synthetic oligonucleotide
  Sense strand starting at position 2524 of SEQ ID NO: 1563875
cucuauagaugggaaauuu

SEQ ID NO: 1838602 - RNA, 19 nt, Artificial Sequence
  Description of Artificial Sequence: Synthetic oligonucleotide
  Antisense strand to SEQ ID NO: 1838601
aaauuucccaucuauagag

SEQ ID NO: 1838603 - RNA, 19 nt, Artificial Sequence
  Description of Artificial Sequence: Synthetic oligonucleotide
  Sense strand starting at position 2532 of SEQ ID NO: 1563875
augggaaauuuguauuaca

SEQ ID NO: 1838604 - RNA, 19 nt, Artificial Sequence
  Description of Artificial Sequence: Synthetic oligonucleotide
  Antisense strand to SEQ ID NO: 1838603
uguaauacaaauuucccau

SEQ ID NO: 1838605 - RNA, 19 nt, Artificial Sequence
  Description of Artificial Sequence: Synthetic oligonucleotide
  Sense strand starting at position 2579 of SEQ ID NO: 1563875
gcuguuauugcuucuaagu

SEQ ID NO: 1838606 - RNA, 19 nt, Artificial Sequence
  Description of Artificial Sequence: Synthetic oligonucleotide
  Antisense strand to SEQ ID NO: 1838605
acuuagaagcaauaacagc

SEQ ID NO: 1838607 - RNA, 19 nt, Artificial Sequence
  Description of Artificial Sequence: Synthetic oligonucleotide
  Sense strand starting at position 2722 of SEQ ID NO: 1563875
gucuguuauuucuuggagu

SEQ ID NO: 1838608 - RNA, 19 nt, Artificial Sequence
  Description of Artificial Sequence: Synthetic oligonucleotide
  Antisense strand to SEQ ID NO: 1838607
acuccaagaaauaacagac

SEQ ID NO: 1838609 - RNA, 19 nt, Artificial Sequence
  Description of Artificial Sequence: Synthetic oligonucleotide
  Sense strand starting at position 2750 of SEQ ID NO: 1563875
guuuauaaaucaccuaguu

SEQ ID NO: 1838610 - RNA, 19 nt, Artificial Sequence
  Description of Artificial Sequence: Synthetic oligonucleotide
  Antisense strand to SEQ ID NO: 1838609
aacuaggugauuuauaaac

SEQ ID NO: 1838611 - RNA, 19 nt, Artificial Sequence
  Description of Artificial Sequence: Synthetic oligonucleotide
  Sense strand starting at position 2762 of SEQ ID NO: 1563875
ccuaguuacccaugaaaug

SEQ ID NO: 1838612 - RNA, 19 nt, Artificial Sequence
  Description of Artificial Sequence: Synthetic oligonucleotide
  Antisense strand to SEQ ID NO: 1838611
cauuucauggguaacuagg

SEQ ID NO: 1838613 - RNA, 19 nt, Artificial Sequence
  Description of Artificial Sequence: Synthetic oligonucleotide
  Sense strand starting at position 2813 of SEQ ID NO: 1563875
agaauaggaucagaauaua

SEQ ID NO: 1838614 - RNA, 19 nt, Artificial Sequence
  Description of Artificial Sequence: Synthetic oligonucleotide
  Antisense strand to SEQ ID NO: 1838613
uauauucugauccuauucu

SEQ ID NO: 1838615 - RNA, 19 nt, Artificial Sequence
  Description of Artificial Sequence: Synthetic oligonucleotide
  Sense strand starting at position 2836 of SEQ ID NO: 1563875
cgaauuucagugugugaag

SEQ ID NO: 1838616 - RNA, 19 nt, Artificial Sequence
  Description of Artificial Sequence: Synthetic oligonucleotide
  Antisense strand to SEQ ID NO: 1838615
cuucacacacugaaauucg

SEQ ID NO: 1838617 - RNA, 19 nt, Artificial Sequence
  Description of Artificial Sequence: Synthetic oligonucleotide
  Sense strand starting at position 2954 of SEQ ID NO: 1563875
agaucaggguuaucaauug

SEQ ID NO: 1838618 - RNA, 19 nt, Artificial Sequence
  Description of Artificial Sequence: Synthetic oligonucleotide
  Antisense strand to SEQ ID NO: 1838617
caauugauaacccugaucu

SEQ ID NO: 1838619 - RNA, 19 nt, Artificial Sequence
  Description of Artificial Sequence: Synthetic oligonucleotide
  Sense strand starting at position 2971 of SEQ ID NO: 1563875
ugagauacauuaguaugca

SEQ ID NO: 1838620 - RNA, 19 nt, Artificial Sequence
  Description of Artificial Sequence: Synthetic oligonucleotide
  Antisense strand to SEQ ID NO: 1838619
ugcauacuaauguaucuca

SEQ ID NO: 1838621 - RNA, 19 nt, Artificial Sequence
  Description of Artificial Sequence: Synthetic oligonucleotide
  Sense strand starting at position 2974 of SEQ ID NO: 1563875
gauacauuaguaugcagau

SEQ ID NO: 1838622 - RNA, 19 nt, Artificial Sequence
  Description of Artificial Sequence: Synthetic oligonucleotide
  Antisense strand to SEQ ID NO: 1838621
aucugcauacuaauguauc

SEQ ID NO: 1838623 - RNA, 19 nt, Artificial Sequence
  Description of Artificial Sequence: Synthetic oligonucleotide
  Sense strand starting at position 2975 of SEQ ID NO: 1563875
auacauuaguaugcagaua

SEQ ID NO: 1838624 - RNA, 19 nt, Artificial Sequence
  Description of Artificial Sequence: Synthetic oligonucleotide
  Antisense strand to SEQ ID NO: 1838623
uaucugcauacuaauguau

SEQ ID NO: 1838625 - RNA, 19 nt, Artificial Sequence
  Description of Artificial Sequence: Synthetic oligonucleotide
  Sense strand starting at position 2986 of SEQ ID NO: 1563875
ugcagauauuaggcucuaa

SEQ ID NO: 1838626 - RNA, 19 nt, Artificial Sequence
  Description of Artificial Sequence: Synthetic oligonucleotide
  Antisense strand to SEQ ID NO: 1838625
uuagagccuaauaucugca

SEQ ID NO: 1838627 - RNA, 19 nt, Artificial Sequence
  Description of Artificial Sequence: Synthetic oligonucleotide
  Sense strand starting at position 3038 of SEQ ID NO: 1563875
acagauacuuguuugcaga

SEQ ID NO: 1838628 - RNA, 19 nt, Artificial Sequence
  Description of Artificial Sequence: Synthetic oligonucleotide
  Antisense strand to SEQ ID NO: 1838627
ucugcaaacaaguaucugu

SEQ ID NO: 1838629 - RNA, 19 nt, Artificial Sequence
  Description of Artificial Sequence: Synthetic oligonucleotide
  Sense strand starting at position 3064 of SEQ ID NO: 1563875
aagaguaggcucuacuuaa

SEQ ID NO: 1838630 - RNA, 19 nt, Artificial Sequence
  Description of Artificial Sequence: Synthetic oligonucleotide
  Antisense strand to SEQ ID NO: 1838629
uuaaguagagccuacucuu

SEQ ID NO: 1838631 - RNA, 19 nt, Artificial Sequence
  Description of Artificial Sequence: Synthetic oligonucleotide
  Sense strand starting at position 3232 of SEQ ID NO: 1563875
accauuuauuguuggauuu

SEQ ID NO: 1838632 - RNA, 19 nt, Artificial Sequence
  Description of Artificial Sequence: Synthetic oligonucleotide
  Antisense strand to SEQ ID NO: 1838631
aaauccaacaauaaauggu

SEQ ID NO: 1838633 - RNA, 19 nt, Artificial Sequence
  Description of Artificial Sequence: Synthetic oligonucleotide
  Sense strand starting at position 3284 of SEQ ID NO: 1563875
cauguaugugccuauauag

SEQ ID NO: 1838634 - RNA, 19 nt, Artificial Sequence
  Description of Artificial Sequence: Synthetic oligonucleotide
  Antisense strand to SEQ ID NO: 1838633
cuauauaggcacauacaug

SEQ ID NO: 1838635 - RNA, 19 nt, Artificial Sequence
  Description of Artificial Sequence: Synthetic oligonucleotide
  Sense strand starting at position 3294 of SEQ ID NO: 1563875
ccuauauagagcuguggga

SEQ ID NO: 1838636 - RNA, 19 nt, Artificial Sequence
  Description of Artificial Sequence: Synthetic oligonucleotide
  Antisense strand to SEQ ID NO: 1838635
ucccacagcucuauauagg

SEQ ID NO: 1838637 - RNA, 19 nt, Artificial Sequence
  Description of Artificial Sequence: Synthetic oligonucleotide
  Sense strand starting at position 3296 of SEQ ID NO: 1563875
uauauagagcugugggaaa

SEQ ID NO: 1838638 - RNA, 19 nt, Artificial Sequence
  Description of Artificial Sequence: Synthetic oligonucleotide
  Antisense strand to SEQ ID NO: 1838637
uuucccacagcucuauaua

SEQ ID NO: 1838639 - RNA, 19 nt, Artificial Sequence
  Description of Artificial Sequence: Synthetic oligonucleotide
  Sense strand starting at position 3372 of SEQ ID NO: 1563875
guagaaauuccuugaauug

SEQ ID NO: 1838640 - RNA, 19 nt, Artificial Sequence
  Description of Artificial Sequence: Synthetic oligonucleotide
  Antisense strand to SEQ ID NO: 1838639
caauucaaggaauuucuac

SEQ ID NO: 1838641 - RNA, 19 nt, Artificial Sequence
  Description of Artificial Sequence: Synthetic oligonucleotide
  Sense strand starting at position 3444 of SEQ ID NO: 1563875
uuuauugccguagaauaag

SEQ ID NO: 1838642 - RNA, 19 nt, Artificial Sequence
  Description of Artificial Sequence: Synthetic oligonucleotide
  Antisense strand to SEQ ID NO: 1838641
cuuauucuacggcaauaaa

SEQ ID NO: 1838643 - RNA, 19 nt, Artificial Sequence
  Description of Artificial Sequence: Synthetic oligonucleotide
  Sense strand starting at position 3469 of SEQ ID NO: 1563875
guuauagucccacacccuu

SEQ ID NO: 1838644 - RNA, 19 nt, Artificial Sequence
  Description of Artificial Sequence: Synthetic oligonucleotide
  Antisense strand to SEQ ID NO: 1838643
aagggugugggacuauaac

SEQ ID NO: 1838645 - RNA, 19 nt, Artificial Sequence
  Description of Artificial Sequence: Synthetic oligonucleotide
  Sense strand starting at position 3489 of SEQ ID NO: 1563875
augugaugguucccauauu

SEQ ID NO: 1838646 - RNA, 19 nt, Artificial Sequence
  Description of Artificial Sequence: Synthetic oligonucleotide
  Antisense strand to SEQ ID NO: 1838645
aauaugggaaccaucacau

SEQ ID NO: 1838647 - RNA, 19 nt, Artificial Sequence
  Description of Artificial Sequence: Synthetic oligonucleotide
  Sense strand starting at position 3706 of SEQ ID NO: 1563875
ggaauaacuccuggcuccu

SEQ ID NO: 1838648 - RNA, 19 nt, Artificial Sequence
  Description of Artificial Sequence: Synthetic oligonucleotide
  Antisense strand to SEQ ID NO: 1838647
aggagccaggaguuauucc

SEQ ID NO: 1838649 - RNA, 19 nt, Artificial Sequence
  Description of Artificial Sequence: Synthetic oligonucleotide
  Sense strand starting at position 26 of SEQ ID NO: 1563876
acguaaaugccacaacaaa

SEQ ID NO: 1838650 - RNA, 19 nt, Artificial Sequence
  Description of Artificial Sequence: Synthetic oligonucleotide
  Antisense strand to SEQ ID NO: 1838649
uuuguuguggcauuuacgu

SEQ ID NO: 1838651 - RNA, 19 nt, Artificial Sequence
  Description of Artificial Sequence: Synthetic oligonucleotide
  Sense strand starting at position 120 of SEQ ID NO: 1563876
ugaggaauugugugggaac

SEQ ID NO: 1838652 - RNA, 19 nt, Artificial Sequence
  Description of Artificial Sequence: Synthetic oligonucleotide
  Antisense strand to SEQ ID NO: 1838651
guucccacacaauuccuca

SEQ ID NO: 1838653 - RNA, 19 nt, Artificial Sequence
  Description of Artificial Sequence: Synthetic oligonucleotide
  Sense strand starting at position 122 of SEQ ID NO: 1563876
aggaauugugugggaacag

SEQ ID NO: 1838654 - RNA, 19 nt, Artificial Sequence
  Description of Artificial Sequence: Synthetic oligonucleotide
  Antisense strand to SEQ ID NO: 1838653
cuguucccacacaauuccu

SEQ ID NO: 1838655 - RNA, 19 nt, Artificial Sequence
  Description of Artificial Sequence: Synthetic oligonucleotide
  Sense strand starting at position 145 of SEQ ID NO: 1563876
ucuggaaauugagcucaga

SEQ ID NO: 1838656 - RNA, 19 nt, Artificial Sequence
  Description of Artificial Sequence: Synthetic oligonucleotide
  Antisense strand to SEQ ID NO: 1838655
ucugagcucaauuuccaga

SEQ ID NO: 1838657 - RNA, 19 nt, Artificial Sequence
  Description of Artificial Sequence: Synthetic oligonucleotide
  Sense strand starting at position 333 of SEQ ID NO: 1563876
gagguuggacugugaguuu

SEQ ID NO: 1838658 - RNA, 19 nt, Artificial Sequence
  Description of Artificial Sequence: Synthetic oligonucleotide
  Antisense strand to SEQ ID NO: 1838657
aaacucacaguccaaccuc

SEQ ID NO: 1838659 - RNA, 19 nt, Artificial Sequence
  Description of Artificial Sequence: Synthetic oligonucleotide
  Sense strand starting at position 340 of SEQ ID NO: 1563876
gacugugaguuugcagaac

SEQ ID NO: 1838660 - RNA, 19 nt, Artificial Sequence
  Description of Artificial Sequence: Synthetic oligonucleotide
  Antisense strand to SEQ ID NO: 1838659
guucugcaaacucacaguc

SEQ ID NO: 1838661 - RNA, 19 nt, Artificial Sequence
  Description of Artificial Sequence: Synthetic oligonucleotide
  Sense strand starting at position 805 of SEQ ID NO: 1563876
uccuuauaugaguauuguu

SEQ ID NO: 1838662 - RNA, 19 nt, Artificial Sequence
  Description of Artificial Sequence: Synthetic oligonucleotide
  Antisense strand to SEQ ID NO: 1838661
aacaauacucauauaagga

SEQ ID NO: 1838663 - RNA, 19 nt, Artificial Sequence
  Description of Artificial Sequence: Synthetic oligonucleotide
  Sense strand starting at position 810 of SEQ ID NO: 1563876
auaugaguauuguucuuga

SEQ ID NO: 1838664 - RNA, 19 nt, Artificial Sequence
  Description of Artificial Sequence: Synthetic oligonucleotide
  Antisense strand to SEQ ID NO: 1838663
ucaagaacaauacucauau

SEQ ID NO: 1838665 - RNA, 19 nt, Artificial Sequence
  Description of Artificial Sequence: Synthetic oligonucleotide
  Sense strand starting at position 813 of SEQ ID NO: 1563876
ugaguauuguucuugauau

SEQ ID NO: 1838666 - RNA, 19 nt, Artificial Sequence
  Description of Artificial Sequence: Synthetic oligonucleotide
  Antisense strand to SEQ ID NO: 1838665
auaucaagaacaauacuca

SEQ ID NO: 1838667 - RNA, 19 nt, Artificial Sequence
  Description of Artificial Sequence: Synthetic oligonucleotide
  Sense strand starting at position 855 of SEQ ID NO: 1563876
ccauaacuuugauugaguu

SEQ ID NO: 1838668 - RNA, 19 nt, Artificial Sequence
  Description of Artificial Sequence: Synthetic oligonucleotide
  Antisense strand to SEQ ID NO: 1838667
aacucaaucaaaguuaugg

SEQ ID NO: 1838669 - RNA, 19 nt, Artificial Sequence
  Description of Artificial Sequence: Synthetic oligonucleotide
  Sense strand starting at position 859 of SEQ ID NO: 1563876
aacuuugauugaguuguaa

SEQ ID NO: 1838670 - RNA, 19 nt, Artificial Sequence
  Description of Artificial Sequence: Synthetic oligonucleotide
  Antisense strand to SEQ ID NO: 1838669
uuacaacucaaucaaaguu

SEQ ID NO: 1838671 - RNA, 19 nt, Artificial Sequence
  Description of Artificial Sequence: Synthetic oligonucleotide
  Sense strand starting at position 1000 of SEQ ID NO: 1563876
agaagcuguugguuuagaa

SEQ ID NO: 1838672 - RNA, 19 nt, Artificial Sequence
  Description of Artificial Sequence: Synthetic oligonucleotide
  Antisense strand to SEQ ID NO: 1838671
uucuaaaccaacagcuucu

SEQ ID NO: 1838673 - RNA, 19 nt, Artificial Sequence
  Description of Artificial Sequence: Synthetic oligonucleotide
  Sense strand starting at position 1052 of SEQ ID NO: 1563876
gcccuuucuccgcucacua

SEQ ID NO: 1838674 - RNA, 19 nt, Artificial Sequence
  Description of Artificial Sequence: Synthetic oligonucleotide
  Antisense strand to SEQ ID NO: 1838673
uagugagcggagaaagggc

SEQ ID NO: 1838675 - RNA, 19 nt, Artificial Sequence
  Description of Artificial Sequence: Synthetic oligonucleotide
  Sense strand starting at position 1324 of SEQ ID NO: 1563876
agauacauccugcacgaua

SEQ ID NO: 1838676 - RNA, 19 nt, Artificial Sequence
  Description of Artificial Sequence: Synthetic oligonucleotide
  Antisense strand to SEQ ID NO: 1838675
uaucgugcaggauguaucu

SEQ ID NO: 1838677 - RNA, 19 nt, Artificial Sequence
  Description of Artificial Sequence: Synthetic oligonucleotide
  Sense strand starting at position 1326 of SEQ ID NO: 1563876
auacauccugcacgauaca

SEQ ID NO: 1838678 - RNA, 19 nt, Artificial Sequence
  Description of Artificial Sequence: Synthetic oligonucleotide
  Antisense strand to SEQ ID NO: 1838677
uguaucgugcaggauguau

SEQ ID NO: 1838679 - RNA, 19 nt, Artificial Sequence
  Description of Artificial Sequence: Synthetic oligonucleotide
  Sense strand starting at position 1656 of SEQ ID NO: 1563876
cugccucauguuuagaauc

SEQ ID NO: 1838680 - RNA, 19 nt, Artificial Sequence
  Description of Artificial Sequence: Synthetic oligonucleotide
  Antisense strand to SEQ ID NO: 1838679
gauucuaaacaugaggcag

SEQ ID NO: 1838681 - RNA, 19 nt, Artificial Sequence
  Description of Artificial Sequence: Synthetic oligonucleotide
  Sense strand starting at position 1781 of SEQ ID NO: 1563876
gaaaucuacgggcagcaaa

SEQ ID NO: 1838682 - RNA, 19 nt, Artificial Sequence
  Description of Artificial Sequence: Synthetic oligonucleotide
  Antisense strand to SEQ ID NO: 1838681
uuugcugcccguagauuuc

SEQ ID NO: 1838683 - RNA, 19 nt, Artificial Sequence
  Description of Artificial Sequence: Synthetic oligonucleotide
  Sense strand starting at position 1938 of SEQ ID NO: 1563876
ucaaaucaguucucagaga

SEQ ID NO: 1838684 - RNA, 19 nt, Artificial Sequence
  Description of Artificial Sequence: Synthetic oligonucleotide
  Antisense strand to SEQ ID NO: 1838683
ucucugagaacugauuuga

SEQ ID NO: 1838685 - RNA, 19 nt, Artificial Sequence
  Description of Artificial Sequence: Synthetic oligonucleotide
  Sense strand starting at position 2114 of SEQ ID NO: 1563876
aguaaaggaugaguucuau

SEQ ID NO: 1838686 - RNA, 19 nt, Artificial Sequence
  Description of Artificial Sequence: Synthetic oligonucleotide
  Antisense strand to SEQ ID NO: 1838685
auagaacucauccuuuacu

SEQ ID NO: 1838687 - RNA, 19 nt, Artificial Sequence
  Description of Artificial Sequence: Synthetic oligonucleotide
  Sense strand starting at position 2123 of SEQ ID NO: 1563876
ugaguucuauucuuaucua

SEQ ID NO: 1838688 - RNA, 19 nt, Artificial Sequence
  Description of Artificial Sequence: Synthetic oligonucleotide
  Antisense strand to SEQ ID NO: 1838687
uagauaagaauagaacuca

SEQ ID NO: 1838689 - RNA, 19 nt, Artificial Sequence
  Description of Artificial Sequence: Synthetic oligonucleotide
  Sense strand starting at position 2633 of SEQ ID NO: 1563876
caggguugaucuguugaac

SEQ ID NO: 1838690 - RNA, 19 nt, Artificial Sequence
  Description of Artificial Sequence: Synthetic oligonucleotide
  Antisense strand to SEQ ID NO: 1838689
guucaacagaucaacccug

SEQ ID NO: 1838691 - RNA, 19 nt, Artificial Sequence
  Description of Artificial Sequence: Synthetic oligonucleotide
  Sense strand starting at position 2636 of SEQ ID NO: 1563876
gguugaucuguugaacuua

SEQ ID NO: 1838692 - RNA, 19 nt, Artificial Sequence
  Description of Artificial Sequence: Synthetic oligonucleotide
  Antisense strand to SEQ ID NO: 1838691
uaaguucaacagaucaacc

SEQ ID NO: 1838693 - RNA, 19 nt, Artificial Sequence
  Description of Artificial Sequence: Synthetic oligonucleotide
  Sense strand starting at position 2860 of SEQ ID NO: 1563876
caaagaguacuuuguguag

SEQ ID NO: 1838694 - RNA, 19 nt, Artificial Sequence
  Description of Artificial Sequence: Synthetic oligonucleotide
  Antisense strand to SEQ ID NO: 1838693
cuacacaaaguacucuuug

SEQ ID NO: 1838695 - RNA, 19 nt, Artificial Sequence
  Description of Artificial Sequence: Synthetic oligonucleotide
  Sense strand starting at position 2863 of SEQ ID NO: 1563876
agaguacuuuguguagaac

SEQ ID NO: 1838696 - RNA, 19 nt, Artificial Sequence
  Description of Artificial Sequence: Synthetic oligonucleotide
  Antisense strand to SEQ ID NO: 1838695
guucuacacaaaguacucu

SEQ ID NO: 1838697 - RNA, 19 nt, Artificial Sequence
  Description of Artificial Sequence: Synthetic oligonucleotide
  Sense strand starting at position 2864 of SEQ ID NO: 1563876
gaguacuuuguguagaacu

SEQ ID NO: 1838698 - RNA, 19 nt, Artificial Sequence
  Description of Artificial Sequence: Synthetic oligonucleotide
  Antisense strand to SEQ ID NO: 1838697
aguucuacacaaaguacuc

SEQ ID NO: 1838699 - RNA, 19 nt, Artificial Sequence
  Description of Artificial Sequence: Synthetic oligonucleotide
  Sense strand starting at position 2866 of SEQ ID NO: 1563876
guacuuuguguagaacuaa

SEQ ID NO: 1838700 - RNA, 19 nt, Artificial Sequence
  Description of Artificial Sequence: Synthetic oligonucleotide
  Antisense strand to SEQ ID NO: 1838699
uuaguucuacacaaaguac

SEQ ID NO: 1838701 - RNA, 19 nt, Artificial Sequence
  Description of Artificial Sequence: Synthetic oligonucleotide
  Sense strand starting at position 2899 of SEQ ID NO: 1563876
ccaagaaaugaccgcaauu

SEQ ID NO: 1838702 - RNA, 19 nt, Artificial Sequence
  Description of Artificial Sequence: Synthetic oligonucleotide
  Antisense strand to SEQ ID NO: 1838701
aauugcggucauuucuugg

SEQ ID NO: 1838703 - RNA, 19 nt, Artificial Sequence
  Description of Artificial Sequence: Synthetic oligonucleotide
  Sense strand starting at position 3295 of SEQ ID NO: 1563876
cuggauucugcacacuaga

SEQ ID NO: 1838704 - RNA, 19 nt, Artificial Sequence
  Description of Artificial Sequence: Synthetic oligonucleotide
  Antisense strand to SEQ ID NO: 1838703
ucuagugugcagaauccag

SEQ ID NO: 1838705 - RNA, 19 nt, Artificial Sequence
  Description of Artificial Sequence: Synthetic oligonucleotide
  Sense strand starting at position 3329 of SEQ ID NO: 1563876
cacaaucgugaugaccaau

SEQ ID NO: 1838706 - RNA, 19 nt, Artificial Sequence
  Description of Artificial Sequence: Synthetic oligonucleotide
  Antisense strand to SEQ ID NO: 1838705
auuggucaucacgauugug

SEQ ID NO: 1838707 - RNA, 19 nt, Artificial Sequence
  Description of Artificial Sequence: Synthetic oligonucleotide
  Sense strand starting at position 3335 of SEQ ID NO: 1563876
cgugaugaccaauaauguc

SEQ ID NO: 1838708 - RNA, 19 nt, Artificial Sequence
  Description of Artificial Sequence: Synthetic oligonucleotide
  Antisense strand to SEQ ID NO: 1838707
gacauuauuggucaucacg

SEQ ID NO: 1838709 - RNA, 19 nt, Artificial Sequence
  Description of Artificial Sequence: Synthetic oligonucleotide
  Sense strand starting at position 3367 of SEQ ID NO: 1563876
aaaugucuccugggugaug

SEQ ID NO: 1838710 - RNA, 19 nt, Artificial Sequence
  Description of Artificial Sequence: Synthetic oligonucleotide
  Antisense strand to SEQ ID NO: 1838709
caucacccaggagacauuu

SEQ ID NO: 1838711 - RNA, 19 nt, Artificial Sequence
  Description of Artificial Sequence: Synthetic oligonucleotide
  Sense strand starting at position 3368 of SEQ ID NO: 1563876
aaugucuccugggugauga

SEQ ID NO: 1838712 - RNA, 19 nt, Artificial Sequence
  Description of Artificial Sequence: Synthetic oligonucleotide
  Antisense strand to SEQ ID NO: 1838711
ucaucacccaggagacauu

SEQ ID NO: 1838713 - RNA, 19 nt, Artificial Sequence
  Description of Artificial Sequence: Synthetic oligonucleotide
  Sense strand starting at position 3369 of SEQ ID NO: 1563876
augucuccugggugaugaa

SEQ ID NO: 1838714 - RNA, 19 nt, Artificial Sequence
  Description of Artificial Sequence: Synthetic oligonucleotide
  Antisense strand to SEQ ID NO: 1838713
uucaucacccaggagacau

SEQ ID NO: 1838715 - RNA, 19 nt, Artificial Sequence
  Description of Artificial Sequence: Synthetic oligonucleotide
  Sense strand starting at position 3370 of SEQ ID NO: 1563876
ugucuccugggugaugaaa

SEQ ID NO: 1838716 - RNA, 19 nt, Artificial Sequence
  Description of Artificial Sequence: Synthetic oligonucleotide
  Antisense strand to SEQ ID NO: 1838715
uuucaucacccaggagaca

SEQ ID NO: 1838717 - RNA, 19 nt, Artificial Sequence
  Description of Artificial Sequence: Synthetic oligonucleotide
  Sense strand starting at position 3378 of SEQ ID NO: 1563876
gggugaugaaaucacgcuu

SEQ ID NO: 1838718 - RNA, 19 nt, Artificial Sequence
  Description of Artificial Sequence: Synthetic oligonucleotide
  Antisense strand to SEQ ID NO: 1838717
aagcgugauuucaucaccc

SEQ ID NO: 1838719 - RNA, 19 nt, Artificial Sequence
  Description of Artificial Sequence: Synthetic oligonucleotide
  Sense strand starting at position 3394 of SEQ ID NO: 1563876
cuuugaaagggugguucuu

SEQ ID NO: 1838720 - RNA, 19 nt, Artificial Sequence
  Description of Artificial Sequence: Synthetic oligonucleotide
  Antisense strand to SEQ ID NO: 1838719
aagaaccacccuuucaaag

SEQ ID NO: 1838721 - RNA, 19 nt, Artificial Sequence
  Description of Artificial Sequence: Synthetic oligonucleotide
  Sense strand starting at position 3396 of SEQ ID NO: 1563876
uugaaagggugguucuuaa

SEQ ID NO: 1838722 - RNA, 19 nt, Artificial Sequence
  Description of Artificial Sequence: Synthetic oligonucleotide
  Antisense strand to SEQ ID NO: 1838721
uuaagaaccacccuuucaa

SEQ ID NO: 1838723 - RNA, 19 nt, Artificial Sequence
  Description of Artificial Sequence: Synthetic oligonucleotide
  Sense strand starting at position 3503 of SEQ ID NO: 1563876
ugcugaggagccugagaau

SEQ ID NO: 1838724 - RNA, 19 nt, Artificial Sequence
  Description of Artificial Sequence: Synthetic oligonucleotide
  Antisense strand to SEQ ID NO: 1838723
auucucaggcuccucagca

SEQ ID NO: 1838725 - RNA, 19 nt, Artificial Sequence
  Description of Artificial Sequence: Synthetic oligonucleotide
  Sense strand starting at position 3649 of SEQ ID NO: 1563876
agcuuaaucccauggcaca

SEQ ID NO: 1838726 - RNA, 19 nt, Artificial Sequence
  Description of Artificial Sequence: Synthetic oligonucleotide
  Antisense strand to SEQ ID NO: 1838725
ugugccaugggauuaagcu

SEQ ID NO: 1838727 - RNA, 19 nt, Artificial Sequence
  Description of Artificial Sequence: Synthetic oligonucleotide
  Sense strand starting at position 3731 of SEQ ID NO: 1563876
guaaauaugagcugggauu

SEQ ID NO: 1838728 - RNA, 19 nt, Artificial Sequence
  Description of Artificial Sequence: Synthetic oligonucleotide
  Antisense strand to SEQ ID NO: 1838727
aaucccagcucauauuuac

SEQ ID NO: 1838729 - RNA, 19 nt, Artificial Sequence
  Description of Artificial Sequence: Synthetic oligonucleotide
  Sense strand starting at position 59 of SEQ ID NO: 1563877
augagcugauucuuugaaa

SEQ ID NO: 1838730 - RNA, 19 nt, Artificial Sequence
  Description of Artificial Sequence: Synthetic oligonucleotide
  Antisense strand to SEQ ID NO: 1838729
uuucaaagaaucagcucau

SEQ ID NO: 1838731 - RNA, 19 nt, Artificial Sequence
  Description of Artificial Sequence: Synthetic oligonucleotide
  Sense strand starting at position 83 of SEQ ID NO: 1563877
gaaggaaacguguaccuau

SEQ ID NO: 1838732 - RNA, 19 nt, Artificial Sequence
  Description of Artificial Sequence: Synthetic oligonucleotide
  Antisense strand to SEQ ID NO: 1838731
auagguacacguuuccuuc

SEQ ID NO: 1838733 - RNA, 19 nt, Artificial Sequence
  Description of Artificial Sequence: Synthetic oligonucleotide
  Sense strand starting at position 459 of SEQ ID NO: 1563877
ucugauagauaagugcauu

SEQ ID NO: 1838734 - RNA, 19 nt, Artificial Sequence
  Description of Artificial Sequence: Synthetic oligonucleotide
  Antisense strand to SEQ ID NO: 1838733
aaugcacuuaucuaucaga

SEQ ID NO: 1838735 - RNA, 19 nt, Artificial Sequence
  Description of Artificial Sequence: Synthetic oligonucleotide
  Sense strand starting at position 520 of SEQ ID NO: 1563877
aagucaguugcucagaagu

SEQ ID NO: 1838736 - RNA, 19 nt, Artificial Sequence
  Description of Artificial Sequence: Synthetic oligonucleotide
  Antisense strand to SEQ ID NO: 1838735
acuucugagcaacugacuu

SEQ ID NO: 1838737 - RNA, 19 nt, Artificial Sequence
  Description of Artificial Sequence: Synthetic oligonucleotide
  Sense strand starting at position 535 of SEQ ID NO: 1563877
aagugaugcuaaucaaguu

SEQ ID NO: 1838738 - RNA, 19 nt, Artificial Sequence
  Description of Artificial Sequence: Synthetic oligonucleotide
  Antisense strand to SEQ ID NO: 1838737
aacuugauuagcaucacuu

SEQ ID NO: 1838739 - RNA, 19 nt, Artificial Sequence
  Description of Artificial Sequence: Synthetic oligonucleotide
  Sense strand starting at position 542 of SEQ ID NO: 1563877
gcuaaucaaguuugggaaa

SEQ ID NO: 1838740 - RNA, 19 nt, Artificial Sequence
  Description of Artificial Sequence: Synthetic oligonucleotide
  Antisense strand to SEQ ID NO: 1838739
uuucccaaacuugauuagc

SEQ ID NO: 1838741 - RNA, 19 nt, Artificial Sequence
  Description of Artificial Sequence: Synthetic oligonucleotide
  Sense strand starting at position 750 of SEQ ID NO: 1563877
ucuccuaguguggacgaaa

SEQ ID NO: 1838742 - RNA, 19 nt, Artificial Sequence
  Description of Artificial Sequence: Synthetic oligonucleotide
  Antisense strand to SEQ ID NO: 1838741
uuucguccacacuaggaga

SEQ ID NO: 1838743 - RNA, 19 nt, Artificial Sequence
  Description of Artificial Sequence: Synthetic oligonucleotide
  Sense strand starting at position 807 of SEQ ID NO: 1563877
gucucagacuuacuugacu

SEQ ID NO: 1838744 - RNA, 19 nt, Artificial Sequence
  Description of Artificial Sequence: Synthetic oligonucleotide
  Antisense strand to SEQ ID NO: 1838743
agucaaguaagucugagac

SEQ ID NO: 1838745 - RNA, 19 nt, Artificial Sequence
  Description of Artificial Sequence: Synthetic oligonucleotide
  Sense strand starting at position 1044 of SEQ ID NO: 1563877
cgaauccucagggagucau

SEQ ID NO: 1838746 - RNA, 19 nt, Artificial Sequence
  Description of Artificial Sequence: Synthetic oligonucleotide
  Antisense strand to SEQ ID NO: 1838745
augacucccugaggauucg

SEQ ID NO: 1838747 - RNA, 19 nt, Artificial Sequence
  Description of Artificial Sequence: Synthetic oligonucleotide
  Sense strand starting at position 1081 of SEQ ID NO: 1563877
cuccucaucgacuggaaua

SEQ ID NO: 1838748 - RNA, 19 nt, Artificial Sequence
  Description of Artificial Sequence: Synthetic oligonucleotide
  Antisense strand to SEQ ID NO: 1838747
uauuccagucgaugaggag

SEQ ID NO: 1838749 - RNA, 19 nt, Artificial Sequence
  Description of Artificial Sequence: Synthetic oligonucleotide
  Sense strand starting at position 1161 of SEQ ID NO: 1563877
gucacuaucccucagggau

SEQ ID NO: 1838750 - RNA, 19 nt, Artificial Sequence
  Description of Artificial Sequence: Synthetic oligonucleotide
  Antisense strand to SEQ ID NO: 1838749
aucccugagggauagugac

SEQ ID NO: 1838751 - RNA, 19 nt, Artificial Sequence
  Description of Artificial Sequence: Synthetic oligonucleotide
  Sense strand starting at position 1213 of SEQ ID NO: 1563877
ugagucuuaugacccuuua

SEQ ID NO: 1838752 - RNA, 19 nt, Artificial Sequence
  Description of Artificial Sequence: Synthetic oligonucleotide
  Antisense strand to SEQ ID NO: 1838751
uaaagggucauaagacuca

SEQ ID NO: 1838753 - RNA, 19 nt, Artificial Sequence
  Description of Artificial Sequence: Synthetic oligonucleotide
  Sense strand starting at position 1255 of SEQ ID NO: 1563877
uuccaaacgaguuauguag

SEQ ID NO: 1838754 - RNA, 19 nt, Artificial Sequence
  Description of Artificial Sequence: Synthetic oligonucleotide
  Antisense strand to SEQ ID NO: 1838753
cuacauaacucguuuggaa

SEQ ID NO: 1838755 - RNA, 19 nt, Artificial Sequence
  Description of Artificial Sequence: Synthetic oligonucleotide
  Sense strand starting at position 1261 of SEQ ID NO: 1563877
acgaguuauguagaaauca

SEQ ID NO: 1838756 - RNA, 19 nt, Artificial Sequence
  Description of Artificial Sequence: Synthetic oligonucleotide
  Antisense strand to SEQ ID NO: 1838755
ugauuucuacauaacucgu

SEQ ID NO: 1838757 - RNA, 19 nt, Artificial Sequence
  Description of Artificial Sequence: Synthetic oligonucleotide
  Sense strand starting at position 1315 of SEQ ID NO: 1563877
uuaagagcccuugacaauu

SEQ ID NO: 1838758 - RNA, 19 nt, Artificial Sequence
  Description of Artificial Sequence: Synthetic oligonucleotide
  Antisense strand to SEQ ID NO: 1838757
aauugucaagggcucuuaa

SEQ ID NO: 1838759 - RNA, 19 nt, Artificial Sequence
  Description of Artificial Sequence: Synthetic oligonucleotide
  Sense strand starting at position 1528 of SEQ ID NO: 1563877
gcaugaccuucuuuaagau

SEQ ID NO: 1838760 - RNA, 19 nt, Artificial Sequence
  Description of Artificial Sequence: Synthetic oligonucleotide
  Antisense strand to SEQ ID NO: 1838759
aucuuaaagaaggucaugc

SEQ ID NO: 1838761 - RNA, 19 nt, Artificial Sequence
  Description of Artificial Sequence: Synthetic oligonucleotide
  Sense strand starting at position 1826 of SEQ ID NO: 1563877
agucauuauuucuaaggag

SEQ ID NO: 1838762 - RNA, 19 nt, Artificial Sequence
  Description of Artificial Sequence: Synthetic oligonucleotide
  Antisense strand to SEQ ID NO: 1838761
cuccuuagaaauaaugacu

SEQ ID NO: 1838763 - RNA, 19 nt, Artificial Sequence
  Description of Artificial Sequence: Synthetic oligonucleotide
  Sense strand starting at position 2016 of SEQ ID NO: 1563877
auggaugaguuucccaaga

SEQ ID NO: 1838764 - RNA, 19 nt, Artificial Sequence
  Description of Artificial Sequence: Synthetic oligonucleotide
  Antisense strand to SEQ ID NO: 1838763
ucuugggaaacucauccau

SEQ ID NO: 1838765 - RNA, 19 nt, Artificial Sequence
  Description of Artificial Sequence: Synthetic oligonucleotide
  Sense strand starting at position 2162 of SEQ ID NO: 1563877
gucugaggugcauagcaaa

SEQ ID NO: 1838766 - RNA, 19 nt, Artificial Sequence
  Description of Artificial Sequence: Synthetic oligonucleotide
  Antisense strand to SEQ ID NO: 1838765
uuugcuaugcaccucagac

SEQ ID NO: 1838767 - RNA, 19 nt, Artificial Sequence
  Description of Artificial Sequence: Synthetic oligonucleotide
  Sense strand starting at position 2455 of SEQ ID NO: 1563877
acuuaaagugucuauauca

SEQ ID NO: 1838768 - RNA, 19 nt, Artificial Sequence
  Description of Artificial Sequence: Synthetic oligonucleotide
  Antisense strand to SEQ ID NO: 1838767
ugauauagacacuuuaagu

SEQ ID NO: 1838769 - RNA, 19 nt, Artificial Sequence
  Description of Artificial Sequence: Synthetic oligonucleotide
  Sense strand starting at position 2727 of SEQ ID NO: 1563877
aucucagauguccaguaca

SEQ ID NO: 1838770 - RNA, 19 nt, Artificial Sequence
  Description of Artificial Sequence: Synthetic oligonucleotide
  Antisense strand to SEQ ID NO: 1838769
uguacuggacaucugagau

SEQ ID NO: 1838771 - RNA, 19 nt, Artificial Sequence
  Description of Artificial Sequence: Synthetic oligonucleotide
  Sense strand starting at position 2923 of SEQ ID NO: 1563877
auguuuaaugaaugccuaa

SEQ ID NO: 1838772 - RNA, 19 nt, Artificial Sequence
  Description of Artificial Sequence: Synthetic oligonucleotide
  Antisense strand to SEQ ID NO: 1838771
uuaggcauucauuaaacau

SEQ ID NO: 1838773 - RNA, 19 nt, Artificial Sequence
  Description of Artificial Sequence: Synthetic oligonucleotide
  Sense strand starting at position 3005 of SEQ ID NO: 1563877
ggagacauauaauuagucu

SEQ ID NO: 1838774 - RNA, 19 nt, Artificial Sequence
  Description of Artificial Sequence: Synthetic oligonucleotide
  Antisense strand to SEQ ID NO: 1838773
agacuaauuauaugucucc

SEQ ID NO: 1838775 - RNA, 19 nt, Artificial Sequence
  Description of Artificial Sequence: Synthetic oligonucleotide
  Sense strand starting at position 3021 of SEQ ID NO: 1563877
ucuuuaaaugcauggaaag

SEQ ID NO: 1838776 - RNA, 19 nt, Artificial Sequence
  Description of Artificial Sequence: Synthetic oligonucleotide
  Antisense strand to SEQ ID NO: 1838775
cuuuccaugcauuuaaaga

SEQ ID NO: 1838777 - RNA, 19 nt, Artificial Sequence
  Description of Artificial Sequence: Synthetic oligonucleotide
  Sense strand starting at position 3032 of SEQ ID NO: 1563877
auggaaagguguucuuucu

SEQ ID NO: 1838778 - RNA, 19 nt, Artificial Sequence
  Description of Artificial Sequence: Synthetic oligonucleotide
  Antisense strand to SEQ ID NO: 1838777
agaaagaacaccuuuccau

SEQ ID NO: 1838779 - RNA, 19 nt, Artificial Sequence
  Description of Artificial Sequence: Synthetic oligonucleotide
  Sense strand starting at position 3126 of SEQ ID NO: 1563877
aaagguuuggcucauacac

SEQ ID NO: 1838780 - RNA, 19 nt, Artificial Sequence
  Description of Artificial Sequence: Synthetic oligonucleotide
  Antisense strand to SEQ ID NO: 1838779
guguaugagccaaaccuuu

SEQ ID NO: 1838781 - RNA, 19 nt, Artificial Sequence
  Description of Artificial Sequence: Synthetic oligonucleotide
  Sense strand starting at position 3375 of SEQ ID NO: 1563877
gcaguagauugacuaaucu

SEQ ID NO: 1838782 - RNA, 19 nt, Artificial Sequence
  Description of Artificial Sequence: Synthetic oligonucleotide
  Antisense strand to SEQ ID NO: 1838781
agauuagucaaucuacugc

SEQ ID NO: 1838783 - RNA, 19 nt, Artificial Sequence
  Description of Artificial Sequence: Synthetic oligonucleotide
  Sense strand starting at position 3394 of SEQ ID NO: 1563877
guggcauaucuauauagug

SEQ ID NO: 1838784 - RNA, 19 nt, Artificial Sequence
  Description of Artificial Sequence: Synthetic oligonucleotide
  Antisense strand to SEQ ID NO: 1838783
cacuauauagauaugccac

SEQ ID NO: 1838785 - RNA, 19 nt, Artificial Sequence
  Description of Artificial Sequence: Synthetic oligonucleotide
  Sense strand starting at position 3409 of SEQ ID NO: 1563877
agugaaguacuaugcaaug

SEQ ID NO: 1838786 - RNA, 19 nt, Artificial Sequence
  Description of Artificial Sequence: Synthetic oligonucleotide
  Antisense strand to SEQ ID NO: 1838785
cauugcauaguacuucacu

SEQ ID NO: 1838787 - RNA, 19 nt, Artificial Sequence
  Description of Artificial Sequence: Synthetic oligonucleotide
  Sense strand starting at position 3440 of SEQ ID NO: 1563877
aucagaucucuauguacua

SEQ ID NO: 1838788 - RNA, 19 nt, Artificial Sequence
  Description of Artificial Sequence: Synthetic oligonucleotide
  Antisense strand to SEQ ID NO: 1838787
uaguacauagagaucugau

SEQ ID NO: 1838789 - RNA, 19 nt, Artificial Sequence
  Description of Artificial Sequence: Synthetic oligonucleotide
  Sense strand starting at position 3540 of SEQ ID NO: 1563877
ggaugaagucuauauaugc

SEQ ID NO: 1838790 - RNA, 19 nt, Artificial Sequence
  Description of Artificial Sequence: Synthetic oligonucleotide
  Antisense strand to SEQ ID NO: 1838789
gcauauauagacuucaucc

SEQ ID NO: 1838791 - RNA, 19 nt, Artificial Sequence
  Description of Artificial Sequence: Synthetic oligonucleotide
  Sense strand starting at position 3554 of SEQ ID NO: 1563877
uaugcauaggcuuguauuu

SEQ ID NO: 1838792 - RNA, 19 nt, Artificial Sequence
  Description of Artificial Sequence: Synthetic oligonucleotide
  Antisense strand to SEQ ID NO: 1838791
aaauacaagccuaugcaua

SEQ ID NO: 1838793 - RNA, 19 nt, Artificial Sequence
  Description of Artificial Sequence: Synthetic oligonucleotide
  Sense strand starting at position 3559 of SEQ ID NO: 1563877
auaggcuuguauuugcaaa

SEQ ID NO: 1838794 - RNA, 19 nt, Artificial Sequence
  Description of Artificial Sequence: Synthetic oligonucleotide
  Antisense strand to SEQ ID NO: 1838793
uuugcaaauacaagccuau

SEQ ID NO: 1838795 - RNA, 19 nt, Artificial Sequence
  Description of Artificial Sequence: Synthetic oligonucleotide
  Sense strand starting at position 3613 of SEQ ID NO: 1563877
aaagauaguuucuuauagg

SEQ ID NO: 1838796 - RNA, 19 nt, Artificial Sequence
  Description of Artificial Sequence: Synthetic oligonucleotide
  Antisense strand to SEQ ID NO: 1838795
ccuauaagaaacuaucuuu

SEQ ID NO: 1838797 - RNA, 19 nt, Artificial Sequence
  Description of Artificial Sequence: Synthetic oligonucleotide
  Sense strand starting at position 3670 of SEQ ID NO: 1563877
gugagauuccuguagguuu

SEQ ID NO: 1838798 - RNA, 19 nt, Artificial Sequence
  Description of Artificial Sequence: Synthetic oligonucleotide
  Antisense strand to SEQ ID NO: 1838797
aaaccuacaggaaucucac

SEQ ID NO: 1838799 - RNA, 19 nt, Artificial Sequence
  Description of Artificial Sequence: Synthetic oligonucleotide
  Sense strand starting at position 3755 of SEQ ID NO: 1563877
gguauaaauaaagguguau

SEQ ID NO: 1838800 - RNA, 19 nt, Artificial Sequence
  Description of Artificial Sequence: Synthetic oligonucleotide
  Antisense strand to SEQ ID NO: 1838799
auacaccuuuauuuauacc

SEQ ID NO: 1838801 - RNA, 19 nt, Artificial Sequence
  Description of Artificial Sequence: Synthetic oligonucleotide
  Sense strand starting at position 3764 of SEQ ID NO: 1563877
aaagguguauuaguacaca

SEQ ID NO: 1838802 - RNA, 19 nt, Artificial Sequence
  Description of Artificial Sequence: Synthetic oligonucleotide
  Antisense strand to SEQ ID NO: 1838801
uguguacuaauacaccuuu

SEQ ID NO: 1838803 - RNA, 19 nt, Artificial Sequence
  Description of Artificial Sequence: Synthetic oligonucleotide
  Sense strand starting at position 3790 of SEQ ID NO: 1563877
ccguucauuugaguauugu

SEQ ID NO: 1838804 - RNA, 19 nt, Artificial Sequence
  Description of Artificial Sequence: Synthetic oligonucleotide
  Antisense strand to SEQ ID NO: 1838803
acaauacucaaaugaacgg

SEQ ID NO: 1838805 - RNA, 19 nt, Artificial Sequence
  Description of Artificial Sequence: Synthetic oligonucleotide
  Sense strand starting at position 3791 of SEQ ID NO: 1563877
cguucauuugaguauuguc

SEQ ID NO: 1838806 - RNA, 19 nt, Artificial Sequence
  Description of Artificial Sequence: Synthetic oligonucleotide
  Antisense strand to SEQ ID NO: 1838805
gacaauacucaaaugaacg

SEQ ID NO: 1838807 - RNA, 19 nt, Artificial Sequence
  Description of Artificial Sequence: Synthetic oligonucleotide
  Sense strand starting at position 3925 of SEQ ID NO: 1563877
ccuauugcuguguaaugag

SEQ ID NO: 1838808 - RNA, 19 nt, Artificial Sequence
  Description of Artificial Sequence: Synthetic oligonucleotide
  Antisense strand to SEQ ID NO: 1838807
cucauuacacagcaauagg

SEQ ID NO: 1838809 - RNA, 19 nt, Artificial Sequence
  Description of Artificial Sequence: Synthetic oligonucleotide
  Sense strand starting at position 173 of SEQ ID NO: 1563878
aaugaauuauuugagaguc

SEQ ID NO: 1838810 - RNA, 19 nt, Artificial Sequence
  Description of Artificial Sequence: Synthetic oligonucleotide
  Antisense strand to SEQ ID NO: 1838809
gacucucaaauaauucauu

SEQ ID NO: 1838811 - RNA, 19 nt, Artificial Sequence
  Description of Artificial Sequence: Synthetic oligonucleotide
  Sense strand starting at position 175 of SEQ ID NO: 1563878
ugaauuauuugagaguccu

SEQ ID NO: 1838812 - RNA, 19 nt, Artificial Sequence
  Description of Artificial Sequence: Synthetic oligonucleotide
  Antisense strand to SEQ ID NO: 1838811
aggacucucaaauaauuca

SEQ ID NO: 1838813 - RNA, 19 nt, Artificial Sequence
  Description of Artificial Sequence: Synthetic oligonucleotide
  Sense strand starting at position 253 of SEQ ID NO: 1563878
ucaccuggguaauuagauu

SEQ ID NO: 1838814 - RNA, 19 nt, Artificial Sequence
  Description of Artificial Sequence: Synthetic oligonucleotide
  Antisense strand to SEQ ID NO: 1838813
aaucuaauuacccagguga

SEQ ID NO: 1838815 - RNA, 19 nt, Artificial Sequence
  Description of Artificial Sequence: Synthetic oligonucleotide
  Sense strand starting at position 278 of SEQ ID NO: 1563878
acuauugcuguuuggauuu

SEQ ID NO: 1838816 - RNA, 19 nt, Artificial Sequence
  Description of Artificial Sequence: Synthetic oligonucleotide
  Antisense strand to SEQ ID NO: 1838815
aaauccaaacagcaauagu

SEQ ID NO: 1838817 - RNA, 19 nt, Artificial Sequence
  Description of Artificial Sequence: Synthetic oligonucleotide
  Sense strand starting at position 297 of SEQ ID NO: 1563878
uugcuaugagauuaucuuu

SEQ ID NO: 1838818 - RNA, 19 nt, Artificial Sequence
  Description of Artificial Sequence: Synthetic oligonucleotide
  Antisense strand to SEQ ID NO: 1838817
aaagauaaucucauagcaa

SEQ ID NO: 1838819 - RNA, 19 nt, Artificial Sequence
  Description of Artificial Sequence: Synthetic oligonucleotide
  Sense strand starting at position 409 of SEQ ID NO: 1563878
acuacugaagugugaaaca

SEQ ID NO: 1838820 - RNA, 19 nt, Artificial Sequence
  Description of Artificial Sequence: Synthetic oligonucleotide
  Antisense strand to SEQ ID NO: 1838819
uguuucacacuucaguagu

SEQ ID NO: 1838821 - RNA, 19 nt, Artificial Sequence
  Description of Artificial Sequence: Synthetic oligonucleotide
  Sense strand starting at position 440 of SEQ ID NO: 1563878
cugaguuugggaggcagau

SEQ ID NO: 1838822 - RNA, 19 nt, Artificial Sequence
  Description of Artificial Sequence: Synthetic oligonucleotide
  Antisense strand to SEQ ID NO: 1838821
aucugccucccaaacucag

SEQ ID NO: 1838823 - RNA, 19 nt, Artificial Sequence
  Description of Artificial Sequence: Synthetic oligonucleotide
  Sense strand starting at position 649 of SEQ ID NO: 1563878
uuugacuuugagugauaaa

SEQ ID NO: 1838824 - RNA, 19 nt, Artificial Sequence
  Description of Artificial Sequence: Synthetic oligonucleotide
  Antisense strand to SEQ ID NO: 1838823
uuuaucacucaaagucaaa

SEQ ID NO: 1838825 - RNA, 19 nt, Artificial Sequence
  Description of Artificial Sequence: Synthetic oligonucleotide
  Sense strand starting at position 706 of SEQ ID NO: 1563878
ugauuagcacucuggccaa

SEQ ID NO: 1838826 - RNA, 19 nt, Artificial Sequence
  Description of Artificial Sequence: Synthetic oligonucleotide
  Antisense strand to SEQ ID NO: 1838825
uuggccagagugcuaauca

SEQ ID NO: 1838827 - RNA, 19 nt, Artificial Sequence
  Description of Artificial Sequence: Synthetic oligonucleotide
  Sense strand starting at position 709 of SEQ ID NO: 1563878
uuagcacucuggccaauuu

SEQ ID NO: 1838828 - RNA, 19 nt, Artificial Sequence
  Description of Artificial Sequence: Synthetic oligonucleotide
  Antisense strand to SEQ ID NO: 1838827
aaauuggccagagugcuaa

SEQ ID NO: 1838829 - RNA, 19 nt, Artificial Sequence
  Description of Artificial Sequence: Synthetic oligonucleotide
  Sense strand starting at position 795 of SEQ ID NO: 1563878
gggauccaguuggauuuaa

SEQ ID NO: 1838830 - RNA, 19 nt, Artificial Sequence
  Description of Artificial Sequence: Synthetic oligonucleotide
  Antisense strand to SEQ ID NO: 1838829
uuaaauccaacuggauccc

SEQ ID NO: 1838831 - RNA, 19 nt, Artificial Sequence
  Description of Artificial Sequence: Synthetic oligonucleotide
  Sense strand starting at position 950 of SEQ ID NO: 1563878
auagguaaagaauguuacu

SEQ ID NO: 1838832 - RNA, 19 nt, Artificial Sequence
  Description of Artificial Sequence: Synthetic oligonucleotide
  Antisense strand to SEQ ID NO: 1838831
aguaacauucuuuaccuau

SEQ ID NO: 1838833 - RNA, 19 nt, Artificial Sequence
  Description of Artificial Sequence: Synthetic oligonucleotide
  Sense strand starting at position 1019 of SEQ ID NO: 1563878
uugcucaaccaguaacaga

SEQ ID NO: 1838834 - RNA, 19 nt, Artificial Sequence
  Description of Artificial Sequence: Synthetic oligonucleotide
  Antisense strand to SEQ ID NO: 1838833
ucuguuacugguugagcaa

SEQ ID NO: 1838835 - RNA, 19 nt, Artificial Sequence
  Description of Artificial Sequence: Synthetic oligonucleotide
  Sense strand starting at position 1106 of SEQ ID NO: 1563878
gcagaugagcacugagaug

SEQ ID NO: 1838836 - RNA, 19 nt, Artificial Sequence
  Description of Artificial Sequence: Synthetic oligonucleotide
  Antisense strand to SEQ ID NO: 1838835
caucucagugcucaucugc

SEQ ID NO: 1838837 - RNA, 19 nt, Artificial Sequence
  Description of Artificial Sequence: Synthetic oligonucleotide
  Sense strand starting at position 1120 of SEQ ID NO: 1563878
agaugcuagccucaaguuu

SEQ ID NO: 1838838 - RNA, 19 nt, Artificial Sequence
  Description of Artificial Sequence: Synthetic oligonucleotide
  Antisense strand to SEQ ID NO: 1838837
aaacuugaggcuagcaucu

SEQ ID NO: 1838839 - RNA, 19 nt, Artificial Sequence
  Description of Artificial Sequence: Synthetic oligonucleotide
  Sense strand starting at position 1371 of SEQ ID NO: 1563878
acuggaucucuaggacauu

SEQ ID NO: 1838840 - RNA, 19 nt, Artificial Sequence
  Description of Artificial Sequence: Synthetic oligonucleotide
  Antisense strand to SEQ ID NO: 1838839
aauguccuagagauccagu

SEQ ID NO: 1838841 - RNA, 19 nt, Artificial Sequence
  Description of Artificial Sequence: Synthetic oligonucleotide
  Sense strand starting at position 1454 of SEQ ID NO: 1563878
gaagaaucacuucgaagca

SEQ ID NO: 1838842 - RNA, 19 nt, Artificial Sequence
  Description of Artificial Sequence: Synthetic oligonucleotide
  Antisense strand to SEQ ID NO: 1838841
ugcuucgaagugauucuuc

SEQ ID NO: 1838843 - RNA, 19 nt, Artificial Sequence
  Description of Artificial Sequence: Synthetic oligonucleotide
  Sense strand starting at position 1793 of SEQ ID NO: 1563878
cuaguacauugguccuuaa

SEQ ID NO: 1838844 - RNA, 19 nt, Artificial Sequence
  Description of Artificial Sequence: Synthetic oligonucleotide
  Antisense strand to SEQ ID NO: 1838843
uuaaggaccaauguacuag

SEQ ID NO: 1838845 - RNA, 19 nt, Artificial Sequence
  Description of Artificial Sequence: Synthetic oligonucleotide
  Sense strand starting at position 1796 of SEQ ID NO: 1563878
guacauugguccuuaauag

SEQ ID NO: 1838846 - RNA, 19 nt, Artificial Sequence
  Description of Artificial Sequence: Synthetic oligonucleotide
  Antisense strand to SEQ ID NO: 1838845
cuauuaaggaccaauguac

SEQ ID NO: 1838847 - RNA, 19 nt, Artificial Sequence
  Description of Artificial Sequence: Synthetic oligonucleotide
  Sense strand starting at position 1807 of SEQ ID NO: 1563878
cuuaauaguucuuugagca

SEQ ID NO: 1838848 - RNA, 19 nt, Artificial Sequence
  Description of Artificial Sequence: Synthetic oligonucleotide
  Antisense strand to SEQ ID NO: 1838847
ugcucaaagaacuauuaag

SEQ ID NO: 1838849 - RNA, 19 nt, Artificial Sequence
  Description of Artificial Sequence: Synthetic oligonucleotide
  Sense strand starting at position 1808 of SEQ ID NO: 1563878
uuaauaguucuuugagcac

SEQ ID NO: 1838850 - RNA, 19 nt, Artificial Sequence
  Description of Artificial Sequence: Synthetic oligonucleotide
  Antisense strand to SEQ ID NO: 1838849
gugcucaaagaacuauuaa

SEQ ID NO: 1838851 - RNA, 19 nt, Artificial Sequence
  Description of Artificial Sequence: Synthetic oligonucleotide
  Sense strand starting at position 1819 of SEQ ID NO: 1563878
uugagcaccucucuagauu

SEQ ID NO: 1838852 - RNA, 19 nt, Artificial Sequence
  Description of Artificial Sequence: Synthetic oligonucleotide
  Antisense strand to SEQ ID NO: 1838851
aaucuagagaggugcucaa

SEQ ID NO: 1838853 - RNA, 19 nt, Artificial Sequence
  Description of Artificial Sequence: Synthetic oligonucleotide
  Sense strand starting at position 1999 of SEQ ID NO: 1563878
gugagugcgucaacaguga

SEQ ID NO: 1838854 - RNA, 19 nt, Artificial Sequence
  Description of Artificial Sequence: Synthetic oligonucleotide
  Antisense strand to SEQ ID NO: 1838853
ucacuguugacgcacucac

SEQ ID NO: 1838855 - RNA, 19 nt, Artificial Sequence
  Description of Artificial Sequence: Synthetic oligonucleotide
  Sense strand starting at position 2087 of SEQ ID NO: 1563878
gcccgaguugaagaaucaa

SEQ ID NO: 1838856 - RNA, 19 nt, Artificial Sequence
  Description of Artificial Sequence: Synthetic oligonucleotide
  Antisense strand to SEQ ID NO: 1838855
uugauucuucaacucgggc

SEQ ID NO: 1838857 - RNA, 19 nt, Artificial Sequence
  Description of Artificial Sequence: Synthetic oligonucleotide
  Sense strand starting at position 2240 of SEQ ID NO: 1563878
cgggaucuguacucucauu

SEQ ID NO: 1838858 - RNA, 19 nt, Artificial Sequence
  Description of Artificial Sequence: Synthetic oligonucleotide
  Antisense strand to SEQ ID NO: 1838857
aaugagaguacagaucccg

SEQ ID NO: 1838859 - RNA, 19 nt, Artificial Sequence
  Description of Artificial Sequence: Synthetic oligonucleotide
  Sense strand starting at position 2380 of SEQ ID NO: 1563878
gcacuagacucauuugccu

SEQ ID NO: 1838860 - RNA, 19 nt, Artificial Sequence
  Description of Artificial Sequence: Synthetic oligonucleotide
  Antisense strand to SEQ ID NO: 1838859
aggcaaaugagucuagugc

SEQ ID NO: 1838861 - RNA, 19 nt, Artificial Sequence
  Description of Artificial Sequence: Synthetic oligonucleotide
  Sense strand starting at position 2511 of SEQ ID NO: 1563878
aauguauaaugucuggaag

SEQ ID NO: 1838862 - RNA, 19 nt, Artificial Sequence
  Description of Artificial Sequence: Synthetic oligonucleotide
  Antisense strand to SEQ ID NO: 1838861
cuuccagacauuauacauu

SEQ ID NO: 1838863 - RNA, 19 nt, Artificial Sequence
  Description of Artificial Sequence: Synthetic oligonucleotide
  Sense strand starting at position 2512 of SEQ ID NO: 1563878
auguauaaugucuggaaga

SEQ ID NO: 1838864 - RNA, 19 nt, Artificial Sequence
  Description of Artificial Sequence: Synthetic oligonucleotide
  Antisense strand to SEQ ID NO: 1838863
ucuuccagacauuauacau

SEQ ID NO: 1838865 - RNA, 19 nt, Artificial Sequence
  Description of Artificial Sequence: Synthetic oligonucleotide
  Sense strand starting at position 2755 of SEQ ID NO: 1563878
uuacauacacgguauauau

SEQ ID NO: 1838866 - RNA, 19 nt, Artificial Sequence
  Description of Artificial Sequence: Synthetic oligonucleotide
  Antisense strand to SEQ ID NO: 1838865
auauauaccguguauguaa

SEQ ID NO: 1838867 - RNA, 19 nt, Artificial Sequence
  Description of Artificial Sequence: Synthetic oligonucleotide
  Sense strand starting at position 2784 of SEQ ID NO: 1563878
aucugugauggguguccaa

SEQ ID NO: 1838868 - RNA, 19 nt, Artificial Sequence
  Description of Artificial Sequence: Synthetic oligonucleotide
  Antisense strand to SEQ ID NO: 1838867
uuggacacccaucacagau

SEQ ID NO: 1838869 - RNA, 19 nt, Artificial Sequence
  Description of Artificial Sequence: Synthetic oligonucleotide
  Sense strand starting at position 2939 of SEQ ID NO: 1563878
caguucuuugaaggauauu

SEQ ID NO: 1838870 - RNA, 19 nt, Artificial Sequence
  Description of Artificial Sequence: Synthetic oligonucleotide
  Antisense strand to SEQ ID NO: 1838869
aauauccuucaaagaacug

SEQ ID NO: 1838871 - RNA, 19 nt, Artificial Sequence
  Description of Artificial Sequence: Synthetic oligonucleotide
  Sense strand starting at position 2951 of SEQ ID NO: 1563878
ggauauugcuuaucaccau

SEQ ID NO: 1838872 - RNA, 19 nt, Artificial Sequence
  Description of Artificial Sequence: Synthetic oligonucleotide
  Antisense strand to SEQ ID NO: 1838871
auggugauaagcaauaucc

SEQ ID NO: 1838873 - RNA, 19 nt, Artificial Sequence
  Description of Artificial Sequence: Synthetic oligonucleotide
  Sense strand starting at position 2957 of SEQ ID NO: 1563878
ugcuuaucaccaugcaaga

SEQ ID NO: 1838874 - RNA, 19 nt, Artificial Sequence
  Description of Artificial Sequence: Synthetic oligonucleotide
  Antisense strand to SEQ ID NO: 1838873
ucuugcauggugauaagca

SEQ ID NO: 1838875 - RNA, 19 nt, Artificial Sequence
  Description of Artificial Sequence: Synthetic oligonucleotide
  Sense strand starting at position 3065 of SEQ ID NO: 1563878
caccaaagguguuuaagga

SEQ ID NO: 1838876 - RNA, 19 nt, Artificial Sequence
  Description of Artificial Sequence: Synthetic oligonucleotide
  Antisense strand to SEQ ID NO: 1838875
uccuuaaacaccuuuggug

SEQ ID NO: 1838877 - RNA, 19 nt, Artificial Sequence
  Description of Artificial Sequence: Synthetic oligonucleotide
  Sense strand starting at position 3334 of SEQ ID NO: 1563878
ucucauuguccucggaaga

SEQ ID NO: 1838878 - RNA, 19 nt, Artificial Sequence
  Description of Artificial Sequence: Synthetic oligonucleotide
  Antisense strand to SEQ ID NO: 1838877
ucuuccgaggacaaugaga

SEQ ID NO: 1838879 - RNA, 19 nt, Artificial Sequence
  Description of Artificial Sequence: Synthetic oligonucleotide
  Sense strand starting at position 3622 of SEQ ID NO: 1563878
cugaaugucucagacauuu

SEQ ID NO: 1838880 - RNA, 19 nt, Artificial Sequence
  Description of Artificial Sequence: Synthetic oligonucleotide
  Antisense strand to SEQ ID NO: 1838879
aaaugucugagacauucag

SEQ ID NO: 1838881 - RNA, 19 nt, Artificial Sequence
  Description of Artificial Sequence: Synthetic oligonucleotide
  Sense strand starting at position 3746 of SEQ ID NO: 1563878
cuggguaucaugcaagaau

SEQ ID NO: 1838882 - RNA, 19 nt, Artificial Sequence
  Description of Artificial Sequence: Synthetic oligonucleotide
  Antisense strand to SEQ ID NO: 1838881
auucuugcaugauacccag

SEQ ID NO: 1838883 - RNA, 19 nt, Artificial Sequence
  Description of Artificial Sequence: Synthetic oligonucleotide
  Sense strand starting at position 3761 of SEQ ID NO: 1563878
gaauuugguucugaaggca

SEQ ID NO: 1838884 - RNA, 19 nt, Artificial Sequence
  Description of Artificial Sequence: Synthetic oligonucleotide
  Antisense strand to SEQ ID NO: 1838883
ugccuucagaaccaaauuc

SEQ ID NO: 1838885 - RNA, 19 nt, Artificial Sequence
  Description of Artificial Sequence: Synthetic oligonucleotide
  Sense strand starting at position 3835 of SEQ ID NO: 1563878
cuggcagaagucuaaauca

SEQ ID NO: 1838886 - RNA, 19 nt, Artificial Sequence
  Description of Artificial Sequence: Synthetic oligonucleotide
  Antisense strand to SEQ ID NO: 1838885
ugauuuagacuucugccag

SEQ ID NO: 1838887 - RNA, 19 nt, Artificial Sequence
  Description of Artificial Sequence: Synthetic oligonucleotide
  Sense strand starting at position 3956 of SEQ ID NO: 1563878
cugaaugcuuucucaaaug

SEQ ID NO: 1838888 - RNA, 19 nt, Artificial Sequence
  Description of Artificial Sequence: Synthetic oligonucleotide
  Antisense strand to SEQ ID NO: 1838887
cauuugagaaagcauucag

SEQ ID NO: 1838889 - RNA, 19 nt, Artificial Sequence
  Description of Artificial Sequence: Synthetic oligonucleotide
  Sense strand starting at position 116 of SEQ ID NO: 1563879
gacccacuguugccugaaa

SEQ ID NO: 1838890 - RNA, 19 nt, Artificial Sequence
  Description of Artificial Sequence: Synthetic oligonucleotide
  Antisense strand to SEQ ID NO: 1838889
uuucaggcaacaguggguc

SEQ ID NO: 1838891 - RNA, 19 nt, Artificial Sequence
  Description of Artificial Sequence: Synthetic oligonucleotide
  Sense strand starting at position 117 of SEQ ID NO: 1563879
acccacuguugccugaaau

SEQ ID NO: 1838892 - RNA, 19 nt, Artificial Sequence
  Description of Artificial Sequence: Synthetic oligonucleotide
  Antisense strand to SEQ ID NO: 1838891
auuucaggcaacagugggu

SEQ ID NO: 1838893 - RNA, 19 nt, Artificial Sequence
  Description of Artificial Sequence: Synthetic oligonucleotide
  Sense strand starting at position 146 of SEQ ID NO: 1563879
uguggagacuuggcuuauu

SEQ ID NO: 1838894 - RNA, 19 nt, Artificial Sequence
  Description of Artificial Sequence: Synthetic oligonucleotide
  Antisense strand to SEQ ID NO: 1838893
aauaagccaagucuccaca

SEQ ID NO: 1838895 - RNA, 19 nt, Artificial Sequence
  Description of Artificial Sequence: Synthetic oligonucleotide
  Sense strand starting at position 149 of SEQ ID NO: 1563879
ggagacuuggcuuauuauu

SEQ ID NO: 1838896 - RNA, 19 nt, Artificial Sequence
  Description of Artificial Sequence: Synthetic oligonucleotide
  Antisense strand to SEQ ID NO: 1838895
aauaauaagccaagucucc

SEQ ID NO: 1838897 - RNA, 19 nt, Artificial Sequence
  Description of Artificial Sequence: Synthetic oligonucleotide
  Sense strand starting at position 564 of SEQ ID NO: 1563879
gaguuagguuaauaauuuc

SEQ ID NO: 1838898 - RNA, 19 nt, Artificial Sequence
  Description of Artificial Sequence: Synthetic oligonucleotide
  Antisense strand to SEQ ID NO: 1838897
gaaauuauuaaccuaacuc

SEQ ID NO: 1838899 - RNA, 19 nt, Artificial Sequence
  Description of Artificial Sequence: Synthetic oligonucleotide
  Sense strand starting at position 599 of SEQ ID NO: 1563879
ucaaauagucuugacugua

SEQ ID NO: 1838900 - RNA, 19 nt, Artificial Sequence
  Description of Artificial Sequence: Synthetic oligonucleotide
  Antisense strand to SEQ ID NO: 1838899
uacagucaagacuauuuga

SEQ ID NO: 1838901 - RNA, 19 nt, Artificial Sequence
  Description of Artificial Sequence: Synthetic oligonucleotide
  Sense strand starting at position 647 of SEQ ID NO: 1563879
aggaauucuuucgugaaac

SEQ ID NO: 1838902 - RNA, 19 nt, Artificial Sequence
  Description of Artificial Sequence: Synthetic oligonucleotide
  Antisense strand to SEQ ID NO: 1838901
guuucacgaaagaauuccu

SEQ ID NO: 1838903 - RNA, 19 nt, Artificial Sequence
  Description of Artificial Sequence: Synthetic oligonucleotide
  Sense strand starting at position 649 of SEQ ID NO: 1563879
gaauucuuucgugaaaccu

SEQ ID NO: 1838904 - RNA, 19 nt, Artificial Sequence
  Description of Artificial Sequence: Synthetic oligonucleotide
  Antisense strand to SEQ ID NO: 1838903
agguuucacgaaagaauuc

SEQ ID NO: 1838905 - RNA, 19 nt, Artificial Sequence
  Description of Artificial Sequence: Synthetic oligonucleotide
  Sense strand starting at position 655 of SEQ ID NO: 1563879
uuucgugaaaccugagauu

SEQ ID NO: 1838906 - RNA, 19 nt, Artificial Sequence
  Description of Artificial Sequence: Synthetic oligonucleotide
  Antisense strand to SEQ ID NO: 1838905
aaucucagguuucacgaaa

SEQ ID NO: 1838907 - RNA, 19 nt, Artificial Sequence
  Description of Artificial Sequence: Synthetic oligonucleotide
  Sense strand starting at position 694 of SEQ ID NO: 1563879
caauaagcuggauaucguu

SEQ ID NO: 1838908 - RNA, 19 nt, Artificial Sequence
  Description of Artificial Sequence: Synthetic oligonucleotide
  Antisense strand to SEQ ID NO: 1838907
aacgauauccagcuuauug

SEQ ID NO: 1838909 - RNA, 19 nt, Artificial Sequence
  Description of Artificial Sequence: Synthetic oligonucleotide
  Sense strand starting at position 701 of SEQ ID NO: 1563879
cuggauaucguuuauacaa

SEQ ID NO: 1838910 - RNA, 19 nt, Artificial Sequence
  Description of Artificial Sequence: Synthetic oligonucleotide
  Antisense strand to SEQ ID NO: 1838909
uuguauaaacgauauccag

SEQ ID NO: 1838911 - RNA, 19 nt, Artificial Sequence
  Description of Artificial Sequence: Synthetic oligonucleotide
  Sense strand starting at position 708 of SEQ ID NO: 1563879
ucguuuauacaaggaauaa

SEQ ID NO: 1838912 - RNA, 19 nt, Artificial Sequence
  Description of Artificial Sequence: Synthetic oligonucleotide
  Antisense strand to SEQ ID NO: 1838911
uuauuccuuguauaaacga

SEQ ID NO: 1838913 - RNA, 19 nt, Artificial Sequence
  Description of Artificial Sequence: Synthetic oligonucleotide
  Sense strand starting at position 810 of SEQ ID NO: 1563879
guacaaugagagugaauua

SEQ ID NO: 1838914 - RNA, 19 nt, Artificial Sequence
  Description of Artificial Sequence: Synthetic oligonucleotide
  Antisense strand to SEQ ID NO: 1838913
uaauucacucucauuguac

SEQ ID NO: 1838915 - RNA, 19 nt, Artificial Sequence
  Description of Artificial Sequence: Synthetic oligonucleotide
  Sense strand starting at position 1068 of SEQ ID NO: 1563879
ucaccuugacaacgcuaaa

SEQ ID NO: 1838916 - RNA, 19 nt, Artificial Sequence
  Description of Artificial Sequence: Synthetic oligonucleotide
  Antisense strand to SEQ ID NO: 1838915
uuuagcguugucaagguga

SEQ ID NO: 1838917 - RNA, 19 nt, Artificial Sequence
  Description of Artificial Sequence: Synthetic oligonucleotide
  Sense strand starting at position 1117 of SEQ ID NO: 1563879
acccuuauuguguaacauu

SEQ ID NO: 1838918 - RNA, 19 nt, Artificial Sequence
  Description of Artificial Sequence: Synthetic oligonucleotide
  Antisense strand to SEQ ID NO: 1838917
aauguuacacaauaagggu

SEQ ID NO: 1838919 - RNA, 19 nt, Artificial Sequence
  Description of Artificial Sequence: Synthetic oligonucleotide
  Sense strand starting at position 1205 of SEQ ID NO: 1563879
guagcuagcagugaauaca

SEQ ID NO: 1838920 - RNA, 19 nt, Artificial Sequence
  Description of Artificial Sequence: Synthetic oligonucleotide
  Antisense strand to SEQ ID NO: 1838919
uguauucacugcuagcuac

SEQ ID NO: 1838921 - RNA, 19 nt, Artificial Sequence
  Description of Artificial Sequence: Synthetic oligonucleotide
  Sense strand starting at position 1362 of SEQ ID NO: 1563879
agauuaacuggucaucggu

SEQ ID NO: 1838922 - RNA, 19 nt, Artificial Sequence
  Description of Artificial Sequence: Synthetic oligonucleotide
  Antisense strand to SEQ ID NO: 1838921
accgaugaccaguuaaucu

SEQ ID NO: 1838923 - RNA, 19 nt, Artificial Sequence
  Description of Artificial Sequence: Synthetic oligonucleotide
  Sense strand starting at position 1446 of SEQ ID NO: 1563879
ccggaauuggcucaaucag

SEQ ID NO: 1838924 - RNA, 19 nt, Artificial Sequence
  Description of Artificial Sequence: Synthetic oligonucleotide
  Antisense strand to SEQ ID NO: 1838923
cugauugagccaauuccgg

SEQ ID NO: 1838925 - RNA, 19 nt, Artificial Sequence
  Description of Artificial Sequence: Synthetic oligonucleotide
  Sense strand starting at position 1565 of SEQ ID NO: 1563879
gcaggauccuggucacaaa

SEQ ID NO: 1838926 - RNA, 19 nt, Artificial Sequence
  Description of Artificial Sequence: Synthetic oligonucleotide
  Antisense strand to SEQ ID NO: 1838925
uuugugaccaggauccugc

SEQ ID NO: 1838927 - RNA, 19 nt, Artificial Sequence
  Description of Artificial Sequence: Synthetic oligonucleotide
  Sense strand starting at position 1720 of SEQ ID NO: 1563879
gcgcuugagcccgucuaga

SEQ ID NO: 1838928 - RNA, 19 nt, Artificial Sequence
  Description of Artificial Sequence: Synthetic oligonucleotide
  Antisense strand to SEQ ID NO: 1838927
ucuagacgggcucaagcgc

SEQ ID NO: 1838929 - RNA, 19 nt, Artificial Sequence
  Description of Artificial Sequence: Synthetic oligonucleotide
  Sense strand starting at position 1989 of SEQ ID NO: 1563879
cugaucagcuaucuggaaa

SEQ ID NO: 1838930 - RNA, 19 nt, Artificial Sequence
  Description of Artificial Sequence: Synthetic oligonucleotide
  Antisense strand to SEQ ID NO: 1838929
uuuccagauagcugaucag

SEQ ID NO: 1838931 - RNA, 19 nt, Artificial Sequence
  Description of Artificial Sequence: Synthetic oligonucleotide
  Sense strand starting at position 2007 of SEQ ID NO: 1563879
acaagaauguaagauuuga

SEQ ID NO: 1838932 - RNA, 19 nt, Artificial Sequence
  Description of Artificial Sequence: Synthetic oligonucleotide
  Antisense strand to SEQ ID NO: 1838931
ucaaaucuuacauucuugu

SEQ ID NO: 1838933 - RNA, 19 nt, Artificial Sequence
  Description of Artificial Sequence: Synthetic oligonucleotide
  Sense strand starting at position 2094 of SEQ ID NO: 1563879
aggucaugaaaggguaagu

SEQ ID NO: 1838934 - RNA, 19 nt, Artificial Sequence
  Description of Artificial Sequence: Synthetic oligonucleotide
  Antisense strand to SEQ ID NO: 1838933
acuuacccuuucaugaccu

SEQ ID NO: 1838935 - RNA, 19 nt, Artificial Sequence
  Description of Artificial Sequence: Synthetic oligonucleotide
  Sense strand starting at position 2319 of SEQ ID NO: 1563879
agaauaaucuuauuguguc

SEQ ID NO: 1838936 - RNA, 19 nt, Artificial Sequence
  Description of Artificial Sequence: Synthetic oligonucleotide
  Antisense strand to SEQ ID NO: 1838935
gacacaauaagauuauucu

SEQ ID NO: 1838937 - RNA, 19 nt, Artificial Sequence
  Description of Artificial Sequence: Synthetic oligonucleotide
  Sense strand starting at position 2429 of SEQ ID NO: 1563879
cguauuaauguauacgaga

SEQ ID NO: 1838938 - RNA, 19 nt, Artificial Sequence
  Description of Artificial Sequence: Synthetic oligonucleotide
  Antisense strand to SEQ ID NO: 1838937
ucucguauacauuaauacg

SEQ ID NO: 1838939 - RNA, 19 nt, Artificial Sequence
  Description of Artificial Sequence: Synthetic oligonucleotide
  Sense strand starting at position 2515 of SEQ ID NO: 1563879
augggcaugaaauguacau

SEQ ID NO: 1838940 - RNA, 19 nt, Artificial Sequence
  Description of Artificial Sequence: Synthetic oligonucleotide
  Antisense strand to SEQ ID NO: 1838939
auguacauuucaugcccau

SEQ ID NO: 1838941 - RNA, 19 nt, Artificial Sequence
  Description of Artificial Sequence: Synthetic oligonucleotide
  Sense strand starting at position 2572 of SEQ ID NO: 1563879
uuaagugugggaugucauu

SEQ ID NO: 1838942 - RNA, 19 nt, Artificial Sequence
  Description of Artificial Sequence: Synthetic oligonucleotide
  Antisense strand to SEQ ID NO: 1838941
aaugacaucccacacuuaa

SEQ ID NO: 1838943 - RNA, 19 nt, Artificial Sequence
  Description of Artificial Sequence: Synthetic oligonucleotide
  Sense strand starting at position 2626 of SEQ ID NO: 1563879
ucacaaagaugauugugau

SEQ ID NO: 1838944 - RNA, 19 nt, Artificial Sequence
  Description of Artificial Sequence: Synthetic oligonucleotide
  Antisense strand to SEQ ID NO: 1838943
aucacaaucaucuuuguga

SEQ ID NO: 1838945 - RNA, 19 nt, Artificial Sequence
  Description of Artificial Sequence: Synthetic oligonucleotide
  Sense strand starting at position 2638 of SEQ ID NO: 1563879
uugugauagaggcaauauu

SEQ ID NO: 1838946 - RNA, 19 nt, Artificial Sequence
  Description of Artificial Sequence: Synthetic oligonucleotide
  Antisense strand to SEQ ID NO: 1838945
aauauugccucuaucacaa

SEQ ID NO: 1838947 - RNA, 19 nt, Artificial Sequence
  Description of Artificial Sequence: Synthetic oligonucleotide
  Sense strand starting at position 2769 of SEQ ID NO: 1563879
caguaaguuugaguaccaa

SEQ ID NO: 1838948 - RNA, 19 nt, Artificial Sequence
  Description of Artificial Sequence: Synthetic oligonucleotide
  Antisense strand to SEQ ID NO: 1838947
uugguacucaaacuuacug

SEQ ID NO: 1838949 - RNA, 19 nt, Artificial Sequence
  Description of Artificial Sequence: Synthetic oligonucleotide
  Sense strand starting at position 2853 of SEQ ID NO: 1563879
gugauaaguuauguuauga

SEQ ID NO: 1838950 - RNA, 19 nt, Artificial Sequence
  Description of Artificial Sequence: Synthetic oligonucleotide
  Antisense strand to SEQ ID NO: 1838949
ucauaacauaacuuaucac

SEQ ID NO: 1838951 - RNA, 19 nt, Artificial Sequence
  Description of Artificial Sequence: Synthetic oligonucleotide
  Sense strand starting at position 3189 of SEQ ID NO: 1563879
guucauuaagggugaagag

SEQ ID NO: 1838952 - RNA, 19 nt, Artificial Sequence
  Description of Artificial Sequence: Synthetic oligonucleotide
  Antisense strand to SEQ ID NO: 1838951
cucuucacccuuaaugaac

SEQ ID NO: 1838953 - RNA, 19 nt, Artificial Sequence
  Description of Artificial Sequence: Synthetic oligonucleotide
  Sense strand starting at position 3392 of SEQ ID NO: 1563879
gagcguucucagccggauu

SEQ ID NO: 1838954 - RNA, 19 nt, Artificial Sequence
  Description of Artificial Sequence: Synthetic oligonucleotide
  Antisense strand to SEQ ID NO: 1838953
aauccggcugagaacgcuc

SEQ ID NO: 1838955 - RNA, 19 nt, Artificial Sequence
  Description of Artificial Sequence: Synthetic oligonucleotide
  Sense strand starting at position 3395 of SEQ ID NO: 1563879
cguucucagccggauuuau

SEQ ID NO: 1838956 - RNA, 19 nt, Artificial Sequence
  Description of Artificial Sequence: Synthetic oligonucleotide
  Antisense strand to SEQ ID NO: 1838955
auaaauccggcugagaacg

SEQ ID NO: 1838957 - RNA, 19 nt, Artificial Sequence
  Description of Artificial Sequence: Synthetic oligonucleotide
  Sense strand starting at position 3430 of SEQ ID NO: 1563879
caaagcuauguuuagugau

SEQ ID NO: 1838958 - RNA, 19 nt, Artificial Sequence
  Description of Artificial Sequence: Synthetic oligonucleotide
  Antisense strand to SEQ ID NO: 1838957
aucacuaaacauagcuuug

SEQ ID NO: 1838959 - RNA, 19 nt, Artificial Sequence
  Description of Artificial Sequence: Synthetic oligonucleotide
  Sense strand starting at position 3436 of SEQ ID NO: 1563879
uauguuuagugauucugac

SEQ ID NO: 1838960 - RNA, 19 nt, Artificial Sequence
  Description of Artificial Sequence: Synthetic oligonucleotide
  Antisense strand to SEQ ID NO: 1838959
gucagaaucacuaaacaua

SEQ ID NO: 1838961 - RNA, 19 nt, Artificial Sequence
  Description of Artificial Sequence: Synthetic oligonucleotide
  Sense strand starting at position 3452 of SEQ ID NO: 1563879
gacaaucaaucguuuguau

SEQ ID NO: 1838962 - RNA, 19 nt, Artificial Sequence
  Description of Artificial Sequence: Synthetic oligonucleotide
  Antisense strand to SEQ ID NO: 1838961
auacaaacgauugauuguc

SEQ ID NO: 1838963 - RNA, 19 nt, Artificial Sequence
  Description of Artificial Sequence: Synthetic oligonucleotide
  Sense strand starting at position 3555 of SEQ ID NO: 1563879
uggugcuuuggugaaauua

SEQ ID NO: 1838964 - RNA, 19 nt, Artificial Sequence
  Description of Artificial Sequence: Synthetic oligonucleotide
  Antisense strand to SEQ ID NO: 1838963
uaauuucaccaaagcacca

SEQ ID NO: 1838965 - RNA, 19 nt, Artificial Sequence
  Description of Artificial Sequence: Synthetic oligonucleotide
  Sense strand starting at position 3624 of SEQ ID NO: 1563879
guaugucccgagccuguua

SEQ ID NO: 1838966 - RNA, 19 nt, Artificial Sequence
  Description of Artificial Sequence: Synthetic oligonucleotide
  Antisense strand to SEQ ID NO: 1838965
uaacaggcucgggacauac

SEQ ID NO: 1838967 - RNA, 19 nt, Artificial Sequence
  Description of Artificial Sequence: Synthetic oligonucleotide
  Sense strand starting at position 3734 of SEQ ID NO: 1563879
gagcaacugugacuugaaa

SEQ ID NO: 1838968 - RNA, 19 nt, Artificial Sequence
  Description of Artificial Sequence: Synthetic oligonucleotide
  Antisense strand to SEQ ID NO: 1838967
uuucaagucacaguugcuc

SEQ ID NO: 1838969 - RNA, 19 nt, Artificial Sequence
  Description of Artificial Sequence: Synthetic oligonucleotide
  Sense strand starting at position 108 of SEQ ID NO: 1563880
ccaggagacuuaucugucu

SEQ ID NO: 1838970 - RNA, 19 nt, Artificial Sequence
  Description of Artificial Sequence: Synthetic oligonucleotide
  Antisense strand to SEQ ID NO: 1838969
agacagauaagucuccugg

SEQ ID NO: 1838971 - RNA, 19 nt, Artificial Sequence
  Description of Artificial Sequence: Synthetic oligonucleotide
  Sense strand starting at position 205 of SEQ ID NO: 1563880
gcagacgugcuggcugauu

SEQ ID NO: 1838972 - RNA, 19 nt, Artificial Sequence
  Description of Artificial Sequence: Synthetic oligonucleotide
  Antisense strand to SEQ ID NO: 1838971
aaucagccagcacgucugc

SEQ ID NO: 1838973 - RNA, 19 nt, Artificial Sequence
  Description of Artificial Sequence: Synthetic oligonucleotide
  Sense strand starting at position 518 of SEQ ID NO: 1563880
ucauuuaaacuguguccuu

SEQ ID NO: 1838974 - RNA, 19 nt, Artificial Sequence
  Description of Artificial Sequence: Synthetic oligonucleotide
  Antisense strand to SEQ ID NO: 1838973
aaggacacaguuuaaauga

SEQ ID NO: 1838975 - RNA, 19 nt, Artificial Sequence
  Description of Artificial Sequence: Synthetic oligonucleotide
  Sense strand starting at position 544 of SEQ ID NO: 1563880
uuaugcuuucuagagucaa

SEQ ID NO: 1838976 - RNA, 19 nt, Artificial Sequence
  Description of Artificial Sequence: Synthetic oligonucleotide
  Antisense strand to SEQ ID NO: 1838975
uugacucuagaaagcauaa

SEQ ID NO: 1838977 - RNA, 19 nt, Artificial Sequence
  Description of Artificial Sequence: Synthetic oligonucleotide
  Sense strand starting at position 623 of SEQ ID NO: 1563880
guuugaaaucaauagucuc

SEQ ID NO: 1838978 - RNA, 19 nt, Artificial Sequence
  Description of Artificial Sequence: Synthetic oligonucleotide
  Antisense strand to SEQ ID NO: 1838977
gagacuauugauuucaaac

SEQ ID NO: 1838979 - RNA, 19 nt, Artificial Sequence
  Description of Artificial Sequence: Synthetic oligonucleotide
  Sense strand starting at position 631 of SEQ ID NO: 1563880
ucaauagucucacuaggga

SEQ ID NO: 1838980 - RNA, 19 nt, Artificial Sequence
  Description of Artificial Sequence: Synthetic oligonucleotide
  Antisense strand to SEQ ID NO: 1838979
ucccuagugagacuauuga

SEQ ID NO: 1838981 - RNA, 19 nt, Artificial Sequence
  Description of Artificial Sequence: Synthetic oligonucleotide
  Sense strand starting at position 824 of SEQ ID NO: 1563880
caggauaaagucuguauau

SEQ ID NO: 1838982 - RNA, 19 nt, Artificial Sequence
  Description of Artificial Sequence: Synthetic oligonucleotide
  Antisense strand to SEQ ID NO: 1838981
auauacagacuuuauccug

SEQ ID NO: 1838983 - RNA, 19 nt, Artificial Sequence
  Description of Artificial Sequence: Synthetic oligonucleotide
  Sense strand starting at position 825 of SEQ ID NO: 1563880
aggauaaagucuguauaug

SEQ ID NO: 1838984 - RNA, 19 nt, Artificial Sequence
  Description of Artificial Sequence: Synthetic oligonucleotide
  Antisense strand to SEQ ID NO: 1838983
cauauacagacuuuauccu

SEQ ID NO: 1838985 - RNA, 19 nt, Artificial Sequence
  Description of Artificial Sequence: Synthetic oligonucleotide
  Sense strand starting at position 854 of SEQ ID NO: 1563880
acaguauuccuuugaaaga

SEQ ID NO: 1838986 - RNA, 19 nt, Artificial Sequence
  Description of Artificial Sequence: Synthetic oligonucleotide
  Antisense strand to SEQ ID NO: 1838985
ucuuucaaaggaauacugu

SEQ ID NO: 1838987 - RNA, 19 nt, Artificial Sequence
  Description of Artificial Sequence: Synthetic oligonucleotide
  Sense strand starting at position 1360 of SEQ ID NO: 1563880
gaagguguccuuuauuaca

SEQ ID NO: 1838988 - RNA, 19 nt, Artificial Sequence
  Description of Artificial Sequence: Synthetic oligonucleotide
  Antisense strand to SEQ ID NO: 1838987
uguaauaaaggacaccuuc

SEQ ID NO: 1838989 - RNA, 19 nt, Artificial Sequence
  Description of Artificial Sequence: Synthetic oligonucleotide
  Sense strand starting at position 1374 of SEQ ID NO: 1563880
uuacauaugcaggaugcaa

SEQ ID NO: 1838990 - RNA, 19 nt, Artificial Sequence
  Description of Artificial Sequence: Synthetic oligonucleotide
  Antisense strand to SEQ ID NO: 1838989
uugcauccugcauauguaa

SEQ ID NO: 1838991 - RNA, 19 nt, Artificial Sequence
  Description of Artificial Sequence: Synthetic oligonucleotide
  Sense strand starting at position 1588 of SEQ ID NO: 1563880
ugagaaaguuugcucauca

SEQ ID NO: 1838992 - RNA, 19 nt, Artificial Sequence
  Description of Artificial Sequence: Synthetic oligonucleotide
  Antisense strand to SEQ ID NO: 1838991
ugaugagcaaacuuucuca

SEQ ID NO: 1838993 - RNA, 19 nt, Artificial Sequence
  Description of Artificial Sequence: Synthetic oligonucleotide
  Sense strand starting at position 1589 of SEQ ID NO: 1563880
gagaaaguuugcucaucac

SEQ ID NO: 1838994 - RNA, 19 nt, Artificial Sequence
  Description of Artificial Sequence: Synthetic oligonucleotide
  Antisense strand to SEQ ID NO: 1838993
gugaugagcaaacuuucuc

SEQ ID NO: 1838995 - RNA, 19 nt, Artificial Sequence
  Description of Artificial Sequence: Synthetic oligonucleotide
  Sense strand starting at position 1903 of SEQ ID NO: 1563880
ucaguucugaucuggaaga

SEQ ID NO: 1838996 - RNA, 19 nt, Artificial Sequence
  Description of Artificial Sequence: Synthetic oligonucleotide
  Antisense strand to SEQ ID NO: 1838995
ucuuccagaucagaacuga

SEQ ID NO: 1838997 - RNA, 19 nt, Artificial Sequence
  Description of Artificial Sequence: Synthetic oligonucleotide
  Sense strand starting at position 2199 of SEQ ID NO: 1563880
accagaauggcucagaguu

SEQ ID NO: 1838998 - RNA, 19 nt, Artificial Sequence
  Description of Artificial Sequence: Synthetic oligonucleotide
  Antisense strand to SEQ ID NO: 1838997
aacucugagccauucuggu

SEQ ID NO: 1838999 - RNA, 19 nt, Artificial Sequence
  Description of Artificial Sequence: Synthetic oligonucleotide
  Sense strand starting at position 2325 of SEQ ID NO: 1563880
ugagucaacaguuaguauu

SEQ ID NO: 1839000 - RNA, 19 nt, Artificial Sequence
  Description of Artificial Sequence: Synthetic oligonucleotide
  Antisense strand to SEQ ID NO: 1838999
aauacuaacuguugacuca

SEQ ID NO: 1839001 - RNA, 19 nt, Artificial Sequence
  Description of Artificial Sequence: Synthetic oligonucleotide
  Sense strand starting at position 2357 of SEQ ID NO: 1563880
ugugaccagccucauauua

SEQ ID NO: 1839002 - RNA, 19 nt, Artificial Sequence
  Description of Artificial Sequence: Synthetic oligonucleotide
  Antisense strand to SEQ ID NO: 1839001
uaauaugaggcuggucaca

SEQ ID NO: 1839003 - RNA, 19 nt, Artificial Sequence
  Description of Artificial Sequence: Synthetic oligonucleotide
  Sense strand starting at position 2443 of SEQ ID NO: 1563880
gguaauugaacuugagauu

SEQ ID NO: 1839004 - RNA, 19 nt, Artificial Sequence
  Description of Artificial Sequence: Synthetic oligonucleotide
  Antisense strand to SEQ ID NO: 1839003
aaucucaaguucaauuacc

SEQ ID NO: 1839005 - RNA, 19 nt, Artificial Sequence
  Description of Artificial Sequence: Synthetic oligonucleotide
  Sense strand starting at position 2474 of SEQ ID NO: 1563880
gugaauagaacaugugaca

SEQ ID NO: 1839006 - RNA, 19 nt, Artificial Sequence
  Description of Artificial Sequence: Synthetic oligonucleotide
  Antisense strand to SEQ ID NO: 1839005
ugucacauguucuauucac

SEQ ID NO: 1839007 - RNA, 19 nt, Artificial Sequence
  Description of Artificial Sequence: Synthetic oligonucleotide
  Sense strand starting at position 2546 of SEQ ID NO: 1563880
cauaguaacgaauaguuau

SEQ ID NO: 1839008 - RNA, 19 nt, Artificial Sequence
  Description of Artificial Sequence: Synthetic oligonucleotide
  Antisense strand to SEQ ID NO: 1839007
auaacuauucguuacuaug

SEQ ID NO: 1839009 - RNA, 19 nt, Artificial Sequence
  Description of Artificial Sequence: Synthetic oligonucleotide
  Sense strand starting at position 2576 of SEQ ID NO: 1563880
aggccuuugguagauaaug

SEQ ID NO: 1839010 - RNA, 19 nt, Artificial Sequence
  Description of Artificial Sequence: Synthetic oligonucleotide
  Antisense strand to SEQ ID NO: 1839009
cauuaucuaccaaaggccu

SEQ ID NO: 1839011 - RNA, 19 nt, Artificial Sequence
  Description of Artificial Sequence: Synthetic oligonucleotide
  Sense strand starting at position 2713 of SEQ ID NO: 1563880
gcugauguguuauuugaug

SEQ ID NO: 1839012 - RNA, 19 nt, Artificial Sequence
  Description of Artificial Sequence: Synthetic oligonucleotide
  Antisense strand to SEQ ID NO: 1839011
caucaaauaacacaucagc

SEQ ID NO: 1839013 - RNA, 19 nt, Artificial Sequence
  Description of Artificial Sequence: Synthetic oligonucleotide
  Sense strand starting at position 2715 of SEQ ID NO: 1563880
ugauguguuauuugauggu

SEQ ID NO: 1839014 - RNA, 19 nt, Artificial Sequence
  Description of Artificial Sequence: Synthetic oligonucleotide
  Antisense strand to SEQ ID NO: 1839013
accaucaaauaacacauca

SEQ ID NO: 1839015 - RNA, 19 nt, Artificial Sequence
  Description of Artificial Sequence: Synthetic oligonucleotide
  Sense strand starting at position 2756 of SEQ ID NO: 1563880
ugcgaauuugcauacuugu

SEQ ID NO: 1839016 - RNA, 19 nt, Artificial Sequence
  Description of Artificial Sequence: Synthetic oligonucleotide
  Antisense strand to SEQ ID NO: 1839015
acaaguaugcaaauucgca

SEQ ID NO: 1839017 - RNA, 19 nt, Artificial Sequence
  Description of Artificial Sequence: Synthetic oligonucleotide
  Sense strand starting at position 2864 of SEQ ID NO: 1563880
aucuacuacuuaguaaagu

SEQ ID NO: 1839018 - RNA, 19 nt, Artificial Sequence
  Description of Artificial Sequence: Synthetic oligonucleotide
  Antisense strand to SEQ ID NO: 1839017
acuuuacuaaguaguagau

SEQ ID NO: 1839019 - RNA, 19 nt, Artificial Sequence
  Description of Artificial Sequence: Synthetic oligonucleotide
  Sense strand starting at position 2902 of SEQ ID NO: 1563880
agccaauuccacugaagac

SEQ ID NO: 1839020 - RNA, 19 nt, Artificial Sequence
  Description of Artificial Sequence: Synthetic oligonucleotide
  Antisense strand to SEQ ID NO: 1839019
gucuucaguggaauuggcu

SEQ ID NO: 1839021 - RNA, 19 nt, Artificial Sequence
  Description of Artificial Sequence: Synthetic oligonucleotide
  Sense strand starting at position 2936 of SEQ ID NO: 1563880
gacuuuccuguguacuaga

SEQ ID NO: 1839022 - RNA, 19 nt, Artificial Sequence
  Description of Artificial Sequence: Synthetic oligonucleotide
  Antisense strand to SEQ ID NO: 1839021
ucuaguacacaggaaaguc

SEQ ID NO: 1839023 - RNA, 19 nt, Artificial Sequence
  Description of Artificial Sequence: Synthetic oligonucleotide
  Sense strand starting at position 2941 of SEQ ID NO: 1563880
uccuguguacuagagauga

SEQ ID NO: 1839024 - RNA, 19 nt, Artificial Sequence
  Description of Artificial Sequence: Synthetic oligonucleotide
  Antisense strand to SEQ ID NO: 1839023
ucaucucuaguacacagga

SEQ ID NO: 1839025 - RNA, 19 nt, Artificial Sequence
  Description of Artificial Sequence: Synthetic oligonucleotide
  Sense strand starting at position 2945 of SEQ ID NO: 1563880
guguacuagagaugaagau

SEQ ID NO: 1839026 - RNA, 19 nt, Artificial Sequence
  Description of Artificial Sequence: Synthetic oligonucleotide
  Antisense strand to SEQ ID NO: 1839025
aucuucaucucuaguacac

SEQ ID NO: 1839027 - RNA, 19 nt, Artificial Sequence
  Description of Artificial Sequence: Synthetic oligonucleotide
  Sense strand starting at position 2954 of SEQ ID NO: 1563880
agaugaagauugucugcua

SEQ ID NO: 1839028 - RNA, 19 nt, Artificial Sequence
  Description of Artificial Sequence: Synthetic oligonucleotide
  Antisense strand to SEQ ID NO: 1839027
uagcagacaaucuucaucu

SEQ ID NO: 1839029 - RNA, 19 nt, Artificial Sequence
  Description of Artificial Sequence: Synthetic oligonucleotide
  Sense strand starting at position 2955 of SEQ ID NO: 1563880
gaugaagauugucugcuaa

SEQ ID NO: 1839030 - RNA, 19 nt, Artificial Sequence
  Description of Artificial Sequence: Synthetic oligonucleotide
  Antisense strand to SEQ ID NO: 1839029
uuagcagacaaucuucauc

SEQ ID NO: 1839031 - RNA, 19 nt, Artificial Sequence
  Description of Artificial Sequence: Synthetic oligonucleotide
  Sense strand starting at position 3153 of SEQ ID NO: 1563880
aaaguuucugccgagauga

SEQ ID NO: 1839032 - RNA, 19 nt, Artificial Sequence
  Description of Artificial Sequence: Synthetic oligonucleotide
  Antisense strand to SEQ ID NO: 1839031
ucaucucggcagaaacuuu

SEQ ID NO: 1839033 - RNA, 19 nt, Artificial Sequence
  Description of Artificial Sequence: Synthetic oligonucleotide
  Sense strand starting at position 3161 of SEQ ID NO: 1563880
ugccgagaugaguaaggaa

SEQ ID NO: 1839034 - RNA, 19 nt, Artificial Sequence
  Description of Artificial Sequence: Synthetic oligonucleotide
  Antisense strand to SEQ ID NO: 1839033
uuccuuacucaucucggca

SEQ ID NO: 1839035 - RNA, 19 nt, Artificial Sequence
  Description of Artificial Sequence: Synthetic oligonucleotide
  Sense strand starting at position 3259 of SEQ ID NO: 1563880
uucuuaucucugcaggaac

SEQ ID NO: 1839036 - RNA, 19 nt, Artificial Sequence
  Description of Artificial Sequence: Synthetic oligonucleotide
  Antisense strand to SEQ ID NO: 1839035
guuccugcagagauaagaa

SEQ ID NO: 1839037 - RNA, 19 nt, Artificial Sequence
  Description of Artificial Sequence: Synthetic oligonucleotide
  Sense strand starting at position 3309 of SEQ ID NO: 1563880
auaauaaaguuggcuuaca

SEQ ID NO: 1839038 - RNA, 19 nt, Artificial Sequence
  Description of Artificial Sequence: Synthetic oligonucleotide
  Antisense strand to SEQ ID NO: 1839037
uguaagccaacuuuauuau

SEQ ID NO: 1839039 - RNA, 19 nt, Artificial Sequence
  Description of Artificial Sequence: Synthetic oligonucleotide
  Sense strand starting at position 3329 of SEQ ID NO: 1563880
agauaaagugauuggucca

SEQ ID NO: 1839040 - RNA, 19 nt, Artificial Sequence
  Description of Artificial Sequence: Synthetic oligonucleotide
  Antisense strand to SEQ ID NO: 1839039
uggaccaaucacuuuaucu

SEQ ID NO: 1839041 - RNA, 19 nt, Artificial Sequence
  Description of Artificial Sequence: Synthetic oligonucleotide
  Sense strand starting at position 3332 of SEQ ID NO: 1563880
uaaagugauugguccaaag

SEQ ID NO: 1839042 - RNA, 19 nt, Artificial Sequence
  Description of Artificial Sequence: Synthetic oligonucleotide
  Antisense strand to SEQ ID NO: 1839041
cuuuggaccaaucacuuua

SEQ ID NO: 1839043 - RNA, 19 nt, Artificial Sequence
  Description of Artificial Sequence: Synthetic oligonucleotide
  Sense strand starting at position 3334 of SEQ ID NO: 1563880
aagugauugguccaaaguc

SEQ ID NO: 1839044 - RNA, 19 nt, Artificial Sequence
  Description of Artificial Sequence: Synthetic oligonucleotide
  Antisense strand to SEQ ID NO: 1839043
gacuuuggaccaaucacuu

SEQ ID NO: 1839045 - RNA, 19 nt, Artificial Sequence
  Description of Artificial Sequence: Synthetic oligonucleotide
  Sense strand starting at position 3549 of SEQ ID NO: 1563880
agucauaacuuacuguuaa

SEQ ID NO: 1839046 - RNA, 19 nt, Artificial Sequence
  Description of Artificial Sequence: Synthetic oligonucleotide
  Antisense strand to SEQ ID NO: 1839045
uuaacaguaaguuaugacu

SEQ ID NO: 1839047 - RNA, 19 nt, Artificial Sequence
  Description of Artificial Sequence: Synthetic oligonucleotide
  Sense strand starting at position 3899 of SEQ ID NO: 1563880
ucuguuuauguagaaacuu

SEQ ID NO: 1839048 - RNA, 19 nt, Artificial Sequence
  Description of Artificial Sequence: Synthetic oligonucleotide
  Antisense strand to SEQ ID NO: 1839047
aaguuucuacauaaacaga

SEQ ID NO: 1839049 - RNA, 19 nt, Artificial Sequence
  Description of Artificial Sequence: Synthetic oligonucleotide
  Sense strand starting at position 889 of SEQ ID NO: 1563881
aaggacuaaucuguugaca

SEQ ID NO: 1839050 - RNA, 19 nt, Artificial Sequence
  Description of Artificial Sequence: Synthetic oligonucleotide
  Antisense strand to SEQ ID NO: 1839049
ugucaacagauuaguccuu

SEQ ID NO: 1839051 - RNA, 19 nt, Artificial Sequence
  Description of Artificial Sequence: Synthetic oligonucleotide
  Sense strand starting at position 981 of SEQ ID NO: 1563881
acguauuagcucuacauca

SEQ ID NO: 1839052 - RNA, 19 nt, Artificial Sequence
  Description of Artificial Sequence: Synthetic oligonucleotide
  Antisense strand to SEQ ID NO: 1839051
ugauguagagcuaauacgu

SEQ ID NO: 1839053 - RNA, 19 nt, Artificial Sequence
  Description of Artificial Sequence: Synthetic oligonucleotide
  Sense strand starting at position 983 of SEQ ID NO: 1563881
guauuagcucuacaucaca

SEQ ID NO: 1839054 - RNA, 19 nt, Artificial Sequence
  Description of Artificial Sequence: Synthetic oligonucleotide
  Antisense strand to SEQ ID NO: 1839053
ugugauguagagcuaauac

SEQ ID NO: 1839055 - RNA, 19 nt, Artificial Sequence
  Description of Artificial Sequence: Synthetic oligonucleotide
  Sense strand starting at position 1204 of SEQ ID NO: 1563881
ugccaaggacuuugauuaa

SEQ ID NO: 1839056 - RNA, 19 nt, Artificial Sequence
  Description of Artificial Sequence: Synthetic oligonucleotide
  Antisense strand to SEQ ID NO: 1839055
uuaaucaaaguccuuggca

SEQ ID NO: 1839057 - RNA, 19 nt, Artificial Sequence
  Description of Artificial Sequence: Synthetic oligonucleotide
  Sense strand starting at position 1207 of SEQ ID NO: 1563881
caaggacuuugauuaaguu

SEQ ID NO: 1839058 - RNA, 19 nt, Artificial Sequence
  Description of Artificial Sequence: Synthetic oligonucleotide
  Antisense strand to SEQ ID NO: 1839057
aacuuaaucaaaguccuug

SEQ ID NO: 1839059 - RNA, 19 nt, Artificial Sequence
  Description of Artificial Sequence: Synthetic oligonucleotide
  Sense strand starting at position 1280 of SEQ ID NO: 1563881
aauuguacuugauacagga

SEQ ID NO: 1839060 - RNA, 19 nt, Artificial Sequence
  Description of Artificial Sequence: Synthetic oligonucleotide
  Antisense strand to SEQ ID NO: 1839059
uccuguaucaaguacaauu

SEQ ID NO: 1839061 - RNA, 19 nt, Artificial Sequence
  Description of Artificial Sequence: Synthetic oligonucleotide
  Sense strand starting at position 1303 of SEQ ID NO: 1563881
aucauagugagagguguuu

SEQ ID NO: 1839062 - RNA, 19 nt, Artificial Sequence
  Description of Artificial Sequence: Synthetic oligonucleotide
  Antisense strand to SEQ ID NO: 1839061
aaacaccucucacuaugau

SEQ ID NO: 1839063 - RNA, 19 nt, Artificial Sequence
  Description of Artificial Sequence: Synthetic oligonucleotide
  Sense strand starting at position 1305 of SEQ ID NO: 1563881
cauagugagagguguuuau

SEQ ID NO: 1839064 - RNA, 19 nt, Artificial Sequence
  Description of Artificial Sequence: Synthetic oligonucleotide
  Antisense strand to SEQ ID NO: 1839063
auaaacaccucucacuaug

SEQ ID NO: 1839065 - RNA, 19 nt, Artificial Sequence
  Description of Artificial Sequence: Synthetic oligonucleotide
  Sense strand starting at position 1309 of SEQ ID NO: 1563881
gugagagguguuuauguga

SEQ ID NO: 1839066 - RNA, 19 nt, Artificial Sequence
  Description of Artificial Sequence: Synthetic oligonucleotide
  Antisense strand to SEQ ID NO: 1839065
ucacauaaacaccucucac

SEQ ID NO: 1839067 - RNA, 19 nt, Artificial Sequence
  Description of Artificial Sequence: Synthetic oligonucleotide
  Sense strand starting at position 1312 of SEQ ID NO: 1563881
agagguguuuaugugaaga

SEQ ID NO: 1839068 - RNA, 19 nt, Artificial Sequence
  Description of Artificial Sequence: Synthetic oligonucleotide
  Antisense strand to SEQ ID NO: 1839067
ucuucacauaaacaccucu

SEQ ID NO: 1839069 - RNA, 19 nt, Artificial Sequence
  Description of Artificial Sequence: Synthetic oligonucleotide
  Sense strand starting at position 1348 of SEQ ID NO: 1563881
uguggaaauugccuaugau

SEQ ID NO: 1839070 - RNA, 19 nt, Artificial Sequence
  Description of Artificial Sequence: Synthetic oligonucleotide
  Antisense strand to SEQ ID NO: 1839069
aucauaggcaauuuccaca

SEQ ID NO: 1839071 - RNA, 19 nt, Artificial Sequence
  Description of Artificial Sequence: Synthetic oligonucleotide
  Sense strand starting at position 1349 of SEQ ID NO: 1563881
guggaaauugccuaugaug

SEQ ID NO: 1839072 - RNA, 19 nt, Artificial Sequence
  Description of Artificial Sequence: Synthetic oligonucleotide
  Antisense strand to SEQ ID NO: 1839071
caucauaggcaauuuccac

SEQ ID NO: 1839073 - RNA, 19 nt, Artificial Sequence
  Description of Artificial Sequence: Synthetic oligonucleotide
  Sense strand starting at position 1351 of SEQ ID NO: 1563881
ggaaauugccuaugaugag

SEQ ID NO: 1839074 - RNA, 19 nt, Artificial Sequence
  Description of Artificial Sequence: Synthetic oligonucleotide
  Antisense strand to SEQ ID NO: 1839073
cucaucauaggcaauuucc

SEQ ID NO: 1839075 - RNA, 19 nt, Artificial Sequence
  Description of Artificial Sequence: Synthetic oligonucleotide
  Sense strand starting at position 1475 of SEQ ID NO: 1563881
gauauacaguuucuaguag

SEQ ID NO: 1839076 - RNA, 19 nt, Artificial Sequence
  Description of Artificial Sequence: Synthetic oligonucleotide
  Antisense strand to SEQ ID NO: 1839075
cuacuagaaacuguauauc

SEQ ID NO: 1839077 - RNA, 19 nt, Artificial Sequence
  Description of Artificial Sequence: Synthetic oligonucleotide
  Sense strand starting at position 1489 of SEQ ID NO: 1563881
aguagcugaucuucucaua

SEQ ID NO: 1839078 - RNA, 19 nt, Artificial Sequence
  Description of Artificial Sequence: Synthetic oligonucleotide
  Antisense strand to SEQ ID NO: 1839077
uaugagaagaucagcuacu

SEQ ID NO: 1839079 - RNA, 19 nt, Artificial Sequence
  Description of Artificial Sequence: Synthetic oligonucleotide
  Sense strand starting at position 1638 of SEQ ID NO: 1563881
caguuccaacagugugaua

SEQ ID NO: 1839080 - RNA, 19 nt, Artificial Sequence
  Description of Artificial Sequence: Synthetic oligonucleotide
  Antisense strand to SEQ ID NO: 1839079
uaucacacuguuggaacug

SEQ ID NO: 1839081 - RNA, 19 nt, Artificial Sequence
  Description of Artificial Sequence: Synthetic oligonucleotide
  Sense strand starting at position 1640 of SEQ ID NO: 1563881
guuccaacagugugauaac

SEQ ID NO: 1839082 - RNA, 19 nt, Artificial Sequence
  Description of Artificial Sequence: Synthetic oligonucleotide
  Antisense strand to SEQ ID NO: 1839081
guuaucacacuguuggaac

SEQ ID NO: 1839083 - RNA, 19 nt, Artificial Sequence
  Description of Artificial Sequence: Synthetic oligonucleotide
  Sense strand starting at position 1785 of SEQ ID NO: 1563881
ccgucuagucucgagauaa

SEQ ID NO: 1839084 - RNA, 19 nt, Artificial Sequence
  Description of Artificial Sequence: Synthetic oligonucleotide
  Antisense strand to SEQ ID NO: 1839083
uuaucucgagacuagacgg

SEQ ID NO: 1839085 - RNA, 19 nt, Artificial Sequence
  Description of Artificial Sequence: Synthetic oligonucleotide
  Sense strand starting at position 1832 of SEQ ID NO: 1563881
gccgcuguucuugaacauu

SEQ ID NO: 1839086 - RNA, 19 nt, Artificial Sequence
  Description of Artificial Sequence: Synthetic oligonucleotide
  Antisense strand to SEQ ID NO: 1839085
aauguucaagaacagcggc

SEQ ID NO: 1839087 - RNA, 19 nt, Artificial Sequence
  Description of Artificial Sequence: Synthetic oligonucleotide
  Sense strand starting at position 2273 of SEQ ID NO: 1563881
uuggaaaccucacugauug

SEQ ID NO: 1839088 - RNA, 19 nt, Artificial Sequence
  Description of Artificial Sequence: Synthetic oligonucleotide
  Antisense strand to SEQ ID NO: 1839087
caaucagugagguuuccaa

SEQ ID NO: 1839089 - RNA, 19 nt, Artificial Sequence
  Description of Artificial Sequence: Synthetic oligonucleotide
  Sense strand starting at position 2374 of SEQ ID NO: 1563881
acagaagucauccguugaa

SEQ ID NO: 1839090 - RNA, 19 nt, Artificial Sequence
  Description of Artificial Sequence: Synthetic oligonucleotide
  Antisense strand to SEQ ID NO: 1839089
uucaacggaugacuucugu

SEQ ID NO: 1839091 - RNA, 19 nt, Artificial Sequence
  Description of Artificial Sequence: Synthetic oligonucleotide
  Sense strand starting at position 2377 of SEQ ID NO: 1563881
gaagucauccguugaacaa

SEQ ID NO: 1839092 - RNA, 19 nt, Artificial Sequence
  Description of Artificial Sequence: Synthetic oligonucleotide
  Antisense strand to SEQ ID NO: 1839091
uuguucaacggaugacuuc

SEQ ID NO: 1839093 - RNA, 19 nt, Artificial Sequence
  Description of Artificial Sequence: Synthetic oligonucleotide
  Sense strand starting at position 2378 of SEQ ID NO: 1563881
aagucauccguugaacaaa

SEQ ID NO: 1839094 - RNA, 19 nt, Artificial Sequence
  Description of Artificial Sequence: Synthetic oligonucleotide
  Antisense strand to SEQ ID NO: 1839093
uuuguucaacggaugacuu

SEQ ID NO: 1839095 - RNA, 19 nt, Artificial Sequence
  Description of Artificial Sequence: Synthetic oligonucleotide
  Sense strand starting at position 2435 of SEQ ID NO: 1563881
gcaagaggucuuuggucuc

SEQ ID NO: 1839096 - RNA, 19 nt, Artificial Sequence
  Description of Artificial Sequence: Synthetic oligonucleotide
  Antisense strand to SEQ ID NO: 1839095
gagaccaaagaccucuugc

SEQ ID NO: 1839097 - RNA, 19 nt, Artificial Sequence
  Description of Artificial Sequence: Synthetic oligonucleotide
  Sense strand starting at position 2445 of SEQ ID NO: 1563881
uuuggucucugcuuucuau

SEQ ID NO: 1839098 - RNA, 19 nt, Artificial Sequence
  Description of Artificial Sequence: Synthetic oligonucleotide
  Antisense strand to SEQ ID NO: 1839097
auagaaagcagagaccaaa

SEQ ID NO: 1839099 - RNA, 19 nt, Artificial Sequence
  Description of Artificial Sequence: Synthetic oligonucleotide
  Sense strand starting at position 2528 of SEQ ID NO: 1563881
guugcaauucuggaauucu

SEQ ID NO: 1839100 - RNA, 19 nt, Artificial Sequence
  Description of Artificial Sequence: Synthetic oligonucleotide
  Antisense strand to SEQ ID NO: 1839099
agaauuccagaauugcaac

SEQ ID NO: 1839101 - RNA, 19 nt, Artificial Sequence
  Description of Artificial Sequence: Synthetic oligonucleotide
  Sense strand starting at position 2961 of SEQ ID NO: 1563881
uguacugugucccuuggau

SEQ ID NO: 1839102 - RNA, 19 nt, Artificial Sequence
  Description of Artificial Sequence: Synthetic oligonucleotide
  Antisense strand to SEQ ID NO: 1839101
auccaagggacacaguaca

SEQ ID NO: 1839103 - RNA, 19 nt, Artificial Sequence
  Description of Artificial Sequence: Synthetic oligonucleotide
  Sense strand starting at position 3035 of SEQ ID NO: 1563881
caaaguagucagcaagagu

SEQ ID NO: 1839104 - RNA, 19 nt, Artificial Sequence
  Description of Artificial Sequence: Synthetic oligonucleotide
  Antisense strand to SEQ ID NO: 1839103
acucuugcugacuacuuug

SEQ ID NO: 1839105 - RNA, 19 nt, Artificial Sequence
  Description of Artificial Sequence: Synthetic oligonucleotide
  Sense strand starting at position 3038 of SEQ ID NO: 1563881
aguagucagcaagaguaaa

SEQ ID NO: 1839106 - RNA, 19 nt, Artificial Sequence
  Description of Artificial Sequence: Synthetic oligonucleotide
  Antisense strand to SEQ ID NO: 1839105
uuuacucuugcugacuacu

SEQ ID NO: 1839107 - RNA, 19 nt, Artificial Sequence
  Description of Artificial Sequence: Synthetic oligonucleotide
  Sense strand starting at position 3153 of SEQ ID NO: 1563881
agcagagauccuggauuau

SEQ ID NO: 1839108 - RNA, 19 nt, Artificial Sequence
  Description of Artificial Sequence: Synthetic oligonucleotide
  Antisense strand to SEQ ID NO: 1839107
auaauccaggaucucugcu

SEQ ID NO: 1839109 - RNA, 19 nt, Artificial Sequence
  Description of Artificial Sequence: Synthetic oligonucleotide
  Sense strand starting at position 3261 of SEQ ID NO: 1563881
ccauccacuugugcugaaa

SEQ ID NO: 1839110 - RNA, 19 nt, Artificial Sequence
  Description of Artificial Sequence: Synthetic oligonucleotide
  Antisense strand to SEQ ID NO: 1839109
uuucagcacaaguggaugg

SEQ ID NO: 1839111 - RNA, 19 nt, Artificial Sequence
  Description of Artificial Sequence: Synthetic oligonucleotide
  Sense strand starting at position 3273 of SEQ ID NO: 1563881
gcugaaaucgcucacaaca

SEQ ID NO: 1839112 - RNA, 19 nt, Artificial Sequence
  Description of Artificial Sequence: Synthetic oligonucleotide
  Antisense strand to SEQ ID NO: 1839111
uguugugagcgauuucagc

SEQ ID NO: 1839113 - RNA, 19 nt, Artificial Sequence
  Description of Artificial Sequence: Synthetic oligonucleotide
  Sense strand starting at position 3337 of SEQ ID NO: 1563881
ucuccaguguucuucuauc

SEQ ID NO: 1839114 - RNA, 19 nt, Artificial Sequence
  Description of Artificial Sequence: Synthetic oligonucleotide
  Antisense strand to SEQ ID NO: 1839113
gauagaagaacacuggaga

SEQ ID NO: 1839115 - RNA, 19 nt, Artificial Sequence
  Description of Artificial Sequence: Synthetic oligonucleotide
  Sense strand starting at position 3406 of SEQ ID NO: 1563881
uagauauggucuccuuaag

SEQ ID NO: 1839116 - RNA, 19 nt, Artificial Sequence
  Description of Artificial Sequence: Synthetic oligonucleotide
  Antisense strand to SEQ ID NO: 1839115
cuuaaggagaccauaucua

SEQ ID NO: 1839117 - RNA, 19 nt, Artificial Sequence
  Description of Artificial Sequence: Synthetic oligonucleotide
  Sense strand starting at position 3503 of SEQ ID NO: 1563881
agucacuaacuuuagaagu

SEQ ID NO: 1839118 - RNA, 19 nt, Artificial Sequence
  Description of Artificial Sequence: Synthetic oligonucleotide
  Antisense strand to SEQ ID NO: 1839117
acuucuaaaguuagugacu

SEQ ID NO: 1839119 - RNA, 19 nt, Artificial Sequence
  Description of Artificial Sequence: Synthetic oligonucleotide
  Sense strand starting at position 3644 of SEQ ID NO: 1563881
gagcacaagugcuuggaaa

SEQ ID NO: 1839120 - RNA, 19 nt, Artificial Sequence
  Description of Artificial Sequence: Synthetic oligonucleotide
  Antisense strand to SEQ ID NO: 1839119
uuuccaagcacuugugcuc

SEQ ID NO: 1839121 - RNA, 19 nt, Artificial Sequence
  Description of Artificial Sequence: Synthetic oligonucleotide
  Sense strand starting at position 3645 of SEQ ID NO: 1563881
agcacaagugcuuggaaau

SEQ ID NO: 1839122 - RNA, 19 nt, Artificial Sequence
  Description of Artificial Sequence: Synthetic oligonucleotide
  Antisense strand to SEQ ID NO: 1839121
auuuccaagcacuugugcu

SEQ ID NO: 1839123 - RNA, 19 nt, Artificial Sequence
  Description of Artificial Sequence: Synthetic oligonucleotide
  Sense strand starting at position 3646 of SEQ ID NO: 1563881
gcacaagugcuuggaaauu

SEQ ID NO: 1839124 - RNA, 19 nt, Artificial Sequence
  Description of Artificial Sequence: Synthetic oligonucleotide
  Antisense strand to SEQ ID NO: 1839123
aauuuccaagcacuugugc

SEQ ID NO: 1839125 - RNA, 19 nt, Artificial Sequence
  Description of Artificial Sequence: Synthetic oligonucleotide
  Sense strand starting at position 3652 of SEQ ID NO: 1563881
gugcuuggaaauuagacuu

SEQ ID NO: 1839126 - RNA, 19 nt, Artificial Sequence
  Description of Artificial Sequence: Synthetic oligonucleotide
  Antisense strand to SEQ ID NO: 1839125
aagucuaauuuccaagcac

SEQ ID NO: 1839127 - RNA, 19 nt, Artificial Sequence
  Description of Artificial Sequence: Synthetic oligonucleotide
  Sense strand starting at position 3908 of SEQ ID NO: 1563881
uuguguacccuauacuuga

SEQ ID NO: 1839128 - RNA, 19 nt, Artificial Sequence
  Description of Artificial Sequence: Synthetic oligonucleotide
  Antisense strand to SEQ ID NO: 1839127
ucaaguauaggguacacaa

SEQ ID NO: 1839129 - RNA, 19 nt, Artificial Sequence
  Description of Artificial Sequence: Synthetic oligonucleotide
  Sense strand starting at position 208 of SEQ ID NO: 1563882
auuggaauauugccagaga

SEQ ID NO: 1839130 - RNA, 19 nt, Artificial Sequence
  Description of Artificial Sequence: Synthetic oligonucleotide
  Antisense strand to SEQ ID NO: 1839129
ucucuggcaauauuccaau

SEQ ID NO: 1839131 - RNA, 19 nt, Artificial Sequence
  Description of Artificial Sequence: Synthetic oligonucleotide
  Sense strand starting at position 284 of SEQ ID NO: 1563882
acuugagaaucagagggau

SEQ ID NO: 1839132 - RNA, 19 nt, Artificial Sequence
  Description of Artificial Sequence: Synthetic oligonucleotide
  Antisense strand to SEQ ID NO: 1839131
aucccucugauucucaagu

SEQ ID NO: 1839133 - RNA, 19 nt, Artificial Sequence
  Description of Artificial Sequence: Synthetic oligonucleotide
  Sense strand starting at position 316 of SEQ ID NO: 1563882
guacuucucuauuuaguuu

SEQ ID NO: 1839134 - RNA, 19 nt, Artificial Sequence
  Description of Artificial Sequence: Synthetic oligonucleotide
  Antisense strand to SEQ ID NO: 1839133
aaacuaaauagagaaguac

SEQ ID NO: 1839135 - RNA, 19 nt, Artificial Sequence
  Description of Artificial Sequence: Synthetic oligonucleotide
  Sense strand starting at position 352 of SEQ ID NO: 1563882
aagggcucauccucagaga

SEQ ID NO: 1839136 - RNA, 19 nt, Artificial Sequence
  Description of Artificial Sequence: Synthetic oligonucleotide
  Antisense strand to SEQ ID NO: 1839135
ucucugaggaugagcccuu

SEQ ID NO: 1839137 - RNA, 19 nt, Artificial Sequence
  Description of Artificial Sequence: Synthetic oligonucleotide
  Sense strand starting at position 418 of SEQ ID NO: 1563882
aaggcaaagugguugagaa

SEQ ID NO: 1839138 - RNA, 19 nt, Artificial Sequence
  Description of Artificial Sequence: Synthetic oligonucleotide
  Antisense strand to SEQ ID NO: 1839137
uucucaaccacuuugccuu

SEQ ID NO: 1839139 - RNA, 19 nt, Artificial Sequence
  Description of Artificial Sequence: Synthetic oligonucleotide
  Sense strand starting at position 419 of SEQ ID NO: 1563882
aggcaaagugguugagaag

SEQ ID NO: 1839140 - RNA, 19 nt, Artificial Sequence
  Description of Artificial Sequence: Synthetic oligonucleotide
  Antisense strand to SEQ ID NO: 1839139
cuucucaaccacuuugccu

SEQ ID NO: 1839141 - RNA, 19 nt, Artificial Sequence
  Description of Artificial Sequence: Synthetic oligonucleotide
  Sense strand starting at position 420 of SEQ ID NO: 1563882
ggcaaagugguugagaagu

SEQ ID NO: 1839142 - RNA, 19 nt, Artificial Sequence
  Description of Artificial Sequence: Synthetic oligonucleotide
  Antisense strand to SEQ ID NO: 1839141
acuucucaaccacuuugcc

SEQ ID NO: 1839143 - RNA, 19 nt, Artificial Sequence
  Description of Artificial Sequence: Synthetic oligonucleotide
  Sense strand starting at position 534 of SEQ ID NO: 1563882
agcguugugacauaggaag

SEQ ID NO: 1839144 - RNA, 19 nt, Artificial Sequence
  Description of Artificial Sequence: Synthetic oligonucleotide
  Antisense strand to SEQ ID NO: 1839143
cuuccuaugucacaacgcu

SEQ ID NO: 1839145 - RNA, 19 nt, Artificial Sequence
  Description of Artificial Sequence: Synthetic oligonucleotide
  Sense strand starting at position 549 of SEQ ID NO: 1563882
gaaggugagugauccugaa

SEQ ID NO: 1839146 - RNA, 19 nt, Artificial Sequence
  Description of Artificial Sequence: Synthetic oligonucleotide
  Antisense strand to SEQ ID NO: 1839145
uucaggaucacucaccuuc

SEQ ID NO: 1839147 - RNA, 19 nt, Artificial Sequence
  Description of Artificial Sequence: Synthetic oligonucleotide
  Sense strand starting at position 674 of SEQ ID NO: 1563882
cgaagugcuaaguaaccua

SEQ ID NO: 1839148 - RNA, 19 nt, Artificial Sequence
  Description of Artificial Sequence: Synthetic oligonucleotide
  Antisense strand to SEQ ID NO: 1839147
uagguuacuuagcacuucg

SEQ ID NO: 1839149 - RNA, 19 nt, Artificial Sequence
  Description of Artificial Sequence: Synthetic oligonucleotide
  Sense strand starting at position 706 of SEQ ID NO: 1563882
ccaguaauguuucuguaaa

SEQ ID NO: 1839150 - RNA, 19 nt, Artificial Sequence
  Description of Artificial Sequence: Synthetic oligonucleotide
  Antisense strand to SEQ ID NO: 1839149
uuuacagaaacauuacugg

SEQ ID NO: 1839151 - RNA, 19 nt, Artificial Sequence
  Description of Artificial Sequence: Synthetic oligonucleotide
  Sense strand starting at position 732 of SEQ ID NO: 1563882
cgccguuauuuacuuaauu

SEQ ID NO: 1839152 - RNA, 19 nt, Artificial Sequence
  Description of Artificial Sequence: Synthetic oligonucleotide
  Antisense strand to SEQ ID NO: 1839151
aauuaaguaaauaacggcg

SEQ ID NO: 1839153 - RNA, 19 nt, Artificial Sequence
  Description of Artificial Sequence: Synthetic oligonucleotide
  Sense strand starting at position 733 of SEQ ID NO: 1563882
gccguuauuuacuuaauuc

SEQ ID NO: 1839154 - RNA, 19 nt, Artificial Sequence
  Description of Artificial Sequence: Synthetic oligonucleotide
  Antisense strand to SEQ ID NO: 1839153
gaauuaaguaaauaacggc

SEQ ID NO: 1839155 - RNA, 19 nt, Artificial Sequence
  Description of Artificial Sequence: Synthetic oligonucleotide
  Sense strand starting at position 799 of SEQ ID NO: 1563882
gucuguccuguggacauau

SEQ ID NO: 1839156 - RNA, 19 nt, Artificial Sequence
  Description of Artificial Sequence: Synthetic oligonucleotide
  Antisense strand to SEQ ID NO: 1839155
auauguccacaggacagac

SEQ ID NO: 1839157 - RNA, 19 nt, Artificial Sequence
  Description of Artificial Sequence: Synthetic oligonucleotide
  Sense strand starting at position 2188 of SEQ ID NO: 1563882
gagauagcuaaaugugugu

SEQ ID NO: 1839158 - RNA, 19 nt, Artificial Sequence
  Description of Artificial Sequence: Synthetic oligonucleotide
  Antisense strand to SEQ ID NO: 1839157
acacacauuuagcuaucuc

SEQ ID NO: 1839159 - RNA, 19 nt, Artificial Sequence
  Description of Artificial Sequence: Synthetic oligonucleotide
  Sense strand starting at position 2215 of SEQ ID NO: 1563882
gaaggaaggcuauggcuaa

SEQ ID NO: 1839160 - RNA, 19 nt, Artificial Sequence
  Description of Artificial Sequence: Synthetic oligonucleotide
  Antisense strand to SEQ ID NO: 1839159
uuagccauagccuuccuuc

SEQ ID NO: 1839161 - RNA, 19 nt, Artificial Sequence
  Description of Artificial Sequence: Synthetic oligonucleotide
  Sense strand starting at position 2499 of SEQ ID NO: 1563882
agaaguuguggagguggau

SEQ ID NO: 1839162 - RNA, 19 nt, Artificial Sequence
  Description of Artificial Sequence: Synthetic oligonucleotide
  Antisense strand to SEQ ID NO: 1839161
auccaccuccacaacuucu

SEQ ID NO: 1839163 - RNA, 19 nt, Artificial Sequence
  Description of Artificial Sequence: Synthetic oligonucleotide
  Sense strand starting at position 2502 of SEQ ID NO: 1563882
aguuguggagguggauuaa

SEQ ID NO: 1839164 - RNA, 19 nt, Artificial Sequence
  Description of Artificial Sequence: Synthetic oligonucleotide
  Antisense strand to SEQ ID NO: 1839163
uuaauccaccuccacaacu

SEQ ID NO: 1839165 - RNA, 19 nt, Artificial Sequence
  Description of Artificial Sequence: Synthetic oligonucleotide
  Sense strand starting at position 2563 of SEQ ID NO: 1563882
ucaaauuguugaccaguaa

SEQ ID NO: 1839166 - RNA, 19 nt, Artificial Sequence
  Description of Artificial Sequence: Synthetic oligonucleotide
  Antisense strand to SEQ ID NO: 1839165
uuacuggucaacaauuuga

SEQ ID NO: 1839167 - RNA, 19 nt, Artificial Sequence
  Description of Artificial Sequence: Synthetic oligonucleotide
  Sense strand starting at position 2591 of SEQ ID NO: 1563882
gucguuaccacauggacaa

SEQ ID NO: 1839168 - RNA, 19 nt, Artificial Sequence
  Description of Artificial Sequence: Synthetic oligonucleotide
  Antisense strand to SEQ ID NO: 1839167
uuguccaugugguaacgac

SEQ ID NO: 1839169 - RNA, 19 nt, Artificial Sequence
  Description of Artificial Sequence: Synthetic oligonucleotide
  Sense strand starting at position 2682 of SEQ ID NO: 1563882
cucccauuggucuggaauc

SEQ ID NO: 1839170 - RNA, 19 nt, Artificial Sequence
  Description of Artificial Sequence: Synthetic oligonucleotide
  Antisense strand to SEQ ID NO: 1839169
gauuccagaccaaugggag

SEQ ID NO: 1839171 - RNA, 19 nt, Artificial Sequence
  Description of Artificial Sequence: Synthetic oligonucleotide
  Sense strand starting at position 2716 of SEQ ID NO: 1563882
cugucauuggcucagagac

SEQ ID NO: 1839172 - RNA, 19 nt, Artificial Sequence
  Description of Artificial Sequence: Synthetic oligonucleotide
  Antisense strand to SEQ ID NO: 1839171
gucucugagccaaugacag

SEQ ID NO: 1839173 - RNA, 19 nt, Artificial Sequence
  Description of Artificial Sequence: Synthetic oligonucleotide
  Sense strand starting at position 2785 of SEQ ID NO: 1563882
auaagagacucuguuucua

SEQ ID NO: 1839174 - RNA, 19 nt, Artificial Sequence
  Description of Artificial Sequence: Synthetic oligonucleotide
  Antisense strand to SEQ ID NO: 1839173
uagaaacagagucucuuau

SEQ ID NO: 1839175 - RNA, 19 nt, Artificial Sequence
  Description of Artificial Sequence: Synthetic oligonucleotide
  Sense strand starting at position 2886 of SEQ ID NO: 1563882
caucauugugcauaggaac

SEQ ID NO: 1839176 - RNA, 19 nt, Artificial Sequence
  Description of Artificial Sequence: Synthetic oligonucleotide
  Antisense strand to SEQ ID NO: 1839175
guuccuaugcacaaugaug

SEQ ID NO: 1839177 - RNA, 19 nt, Artificial Sequence
  Description of Artificial Sequence: Synthetic oligonucleotide
  Sense strand starting at position 2920 of SEQ ID NO: 1563882
gagguaucucuugguauau

SEQ ID NO: 1839178 - RNA, 19 nt, Artificial Sequence
  Description of Artificial Sequence: Synthetic oligonucleotide
  Antisense strand to SEQ ID NO: 1839177
auauaccaagagauaccuc

SEQ ID NO: 1839179 - RNA, 19 nt, Artificial Sequence
  Description of Artificial Sequence: Synthetic oligonucleotide
  Sense strand starting at position 2921 of SEQ ID NO: 1563882
agguaucucuugguauauc

SEQ ID NO: 1839180 - RNA, 19 nt, Artificial Sequence
  Description of Artificial Sequence: Synthetic oligonucleotide
  Antisense strand to SEQ ID NO: 1839179
gauauaccaagagauaccu

SEQ ID NO: 1839181 - RNA, 19 nt, Artificial Sequence
  Description of Artificial Sequence: Synthetic oligonucleotide
  Sense strand starting at position 2973 of SEQ ID NO: 1563882
ccuguuaaacaaugugcua

SEQ ID NO: 1839182 - RNA, 19 nt, Artificial Sequence
  Description of Artificial Sequence: Synthetic oligonucleotide
  Antisense strand to SEQ ID NO: 1839181
uagcacauuguuuaacagg

SEQ ID NO: 1839183 - RNA, 19 nt, Artificial Sequence
  Description of Artificial Sequence: Synthetic oligonucleotide
  Sense strand starting at position 3029 of SEQ ID NO: 1563882
ccaggcucuccugaugaaa

SEQ ID NO: 1839184 - RNA, 19 nt, Artificial Sequence
  Description of Artificial Sequence: Synthetic oligonucleotide
  Antisense strand to SEQ ID NO: 1839183
uuucaucaggagagccugg

SEQ ID NO: 1839185 - RNA, 19 nt, Artificial Sequence
  Description of Artificial Sequence: Synthetic oligonucleotide
  Sense strand starting at position 3113 of SEQ ID NO: 1563882
auagguaaaugggaccaua

SEQ ID NO: 1839186 - RNA, 19 nt, Artificial Sequence
  Description of Artificial Sequence: Synthetic oligonucleotide
  Antisense strand to SEQ ID NO: 1839185
uauggucccauuuaccuau

SEQ ID NO: 1839187 - RNA, 19 nt, Artificial Sequence
  Description of Artificial Sequence: Synthetic oligonucleotide
  Sense strand starting at position 3215 of SEQ ID NO: 1563882
ccauauaucggauaaugug

SEQ ID NO: 1839188 - RNA, 19 nt, Artificial Sequence
  Description of Artificial Sequence: Synthetic oligonucleotide
  Antisense strand to SEQ ID NO: 1839187
cacauuauccgauauaugg

SEQ ID NO: 1839189 - RNA, 19 nt, Artificial Sequence
  Description of Artificial Sequence: Synthetic oligonucleotide
  Sense strand starting at position 3221 of SEQ ID NO: 1563882
aucggauaaugugcuaaua

SEQ ID NO: 1839190 - RNA, 19 nt, Artificial Sequence
  Description of Artificial Sequence: Synthetic oligonucleotide
  Antisense strand to SEQ ID NO: 1839189
uauuagcacauuauccgau

SEQ ID NO: 1839191 - RNA, 19 nt, Artificial Sequence
  Description of Artificial Sequence: Synthetic oligonucleotide
  Sense strand starting at position 3229 of SEQ ID NO: 1563882
augugcuaauauccagaau

SEQ ID NO: 1839192 - RNA, 19 nt, Artificial Sequence
  Description of Artificial Sequence: Synthetic oligonucleotide
  Antisense strand to SEQ ID NO: 1839191
auucuggauauuagcacau

SEQ ID NO: 1839193 - RNA, 19 nt, Artificial Sequence
  Description of Artificial Sequence: Synthetic oligonucleotide
  Sense strand starting at position 3232 of SEQ ID NO: 1563882
ugcuaauauccagaaugua

SEQ ID NO: 1839194 - RNA, 19 nt, Artificial Sequence
  Description of Artificial Sequence: Synthetic oligonucleotide
  Antisense strand to SEQ ID NO: 1839193
uacauucuggauauuagca

SEQ ID NO: 1839195 - RNA, 19 nt, Artificial Sequence
  Description of Artificial Sequence: Synthetic oligonucleotide
  Sense strand starting at position 3349 of SEQ ID NO: 1563882
ggcauaugcaaagaugauc

SEQ ID NO: 1839196 - RNA, 19 nt, Artificial Sequence
  Description of Artificial Sequence: Synthetic oligonucleotide
  Antisense strand to SEQ ID NO: 1839195
gaucaucuuugcauaugcc

SEQ ID NO: 1839197 - RNA, 19 nt, Artificial Sequence
  Description of Artificial Sequence: Synthetic oligonucleotide
  Sense strand starting at position 3354 of SEQ ID NO: 1563882
augcaaagaugauccacau

SEQ ID NO: 1839198 - RNA, 19 nt, Artificial Sequence
  Description of Artificial Sequence: Synthetic oligonucleotide
  Antisense strand to SEQ ID NO: 1839197
auguggaucaucuuugcau

SEQ ID NO: 1839199 - RNA, 19 nt, Artificial Sequence
  Description of Artificial Sequence: Synthetic oligonucleotide
  Sense strand starting at position 3426 of SEQ ID NO: 1563882
ccauuaggauggucacaca

SEQ ID NO: 1839200 - RNA, 19 nt, Artificial Sequence
  Description of Artificial Sequence: Synthetic oligonucleotide
  Antisense strand to SEQ ID NO: 1839199
ugugugaccauccuaaugg

SEQ ID NO: 1839201 - RNA, 19 nt, Artificial Sequence
  Description of Artificial Sequence: Synthetic oligonucleotide
  Sense strand starting at position 3550 of SEQ ID NO: 1563882
gcaagagagucacuugaga

SEQ ID NO: 1839202 - RNA, 19 nt, Artificial Sequence
  Description of Artificial Sequence: Synthetic oligonucleotide
  Antisense strand to SEQ ID NO: 1839201
ucucaagugacucucuugc

SEQ ID NO: 1839203 - RNA, 19 nt, Artificial Sequence
  Description of Artificial Sequence: Synthetic oligonucleotide
  Sense strand starting at position 3597 of SEQ ID NO: 1563882
augaauagaacgugucucu

SEQ ID NO: 1839204 - RNA, 19 nt, Artificial Sequence
  Description of Artificial Sequence: Synthetic oligonucleotide
  Antisense strand to SEQ ID NO: 1839203
agagacacguucuauucau

SEQ ID NO: 1839205 - RNA, 19 nt, Artificial Sequence
  Description of Artificial Sequence: Synthetic oligonucleotide
  Sense strand starting at position 3600 of SEQ ID NO: 1563882
aauagaacgugucucuaca

SEQ ID NO: 1839206 - RNA, 19 nt, Artificial Sequence
  Description of Artificial Sequence: Synthetic oligonucleotide
  Antisense strand to SEQ ID NO: 1839205
uguagagacacguucuauu

SEQ ID NO: 1839207 - RNA, 19 nt, Artificial Sequence
  Description of Artificial Sequence: Synthetic oligonucleotide
  Sense strand starting at position 3602 of SEQ ID NO: 1563882
uagaacgugucucuacaaa

SEQ ID NO: 1839208 - RNA, 19 nt, Artificial Sequence
  Description of Artificial Sequence: Synthetic oligonucleotide
  Antisense strand to SEQ ID NO: 1839207
uuuguagagacacguucua

SEQ ID NO: 1839209 - RNA, 19 nt, Artificial Sequence
  Description of Artificial Sequence: Synthetic oligonucleotide
  Sense strand starting at position 33 of SEQ ID NO: 1563883
aauaaugugaggugaggau

SEQ ID NO: 1839210 - RNA, 19 nt, Artificial Sequence
  Description of Artificial Sequence: Synthetic oligonucleotide
  Antisense strand to SEQ ID NO: 1839209
auccucaccucacauuauu

SEQ ID NO: 1839211 - RNA, 19 nt, Artificial Sequence
  Description of Artificial Sequence: Synthetic oligonucleotide
  Sense strand starting at position 75 of SEQ ID NO: 1563883
ggugcccuacuguaacaaa

SEQ ID NO: 1839212 - RNA, 19 nt, Artificial Sequence
  Description of Artificial Sequence: Synthetic oligonucleotide
  Antisense strand to SEQ ID NO: 1839211
uuuguuacaguagggcacc

SEQ ID NO: 1839213 - RNA, 19 nt, Artificial Sequence
  Description of Artificial Sequence: Synthetic oligonucleotide
  Sense strand starting at position 326 of SEQ ID NO: 1563883
cguacuuuggacuaaauaa

SEQ ID NO: 1839214 - RNA, 19 nt, Artificial Sequence
  Description of Artificial Sequence: Synthetic oligonucleotide
  Antisense strand to SEQ ID NO: 1839213
uuauuuaguccaaaguacg

SEQ ID NO: 1839215 - RNA, 19 nt, Artificial Sequence
  Description of Artificial Sequence: Synthetic oligonucleotide
  Sense strand starting at position 357 of SEQ ID NO: 1563883
uugagugcauguguauuga

SEQ ID NO: 1839216 - RNA, 19 nt, Artificial Sequence
  Description of Artificial Sequence: Synthetic oligonucleotide
  Antisense strand to SEQ ID NO: 1839215
ucaauacacaugcacucaa

SEQ ID NO: 1839217 - RNA, 19 nt, Artificial Sequence
  Description of Artificial Sequence: Synthetic oligonucleotide
  Sense strand starting at position 378 of SEQ ID NO: 1563883
cuugaagaagaauguguuu

SEQ ID NO: 1839218 - RNA, 19 nt, Artificial Sequence
  Description of Artificial Sequence: Synthetic oligonucleotide
  Antisense strand to SEQ ID NO: 1839217
aaacacauucuucuucaag

SEQ ID NO: 1839219 - RNA, 19 nt, Artificial Sequence
  Description of Artificial Sequence: Synthetic oligonucleotide
  Sense strand starting at position 380 of SEQ ID NO: 1563883
ugaagaagaauguguuuag

SEQ ID NO: 1839220 - RNA, 19 nt, Artificial Sequence
  Description of Artificial Sequence: Synthetic oligonucleotide
  Antisense strand to SEQ ID NO: 1839219
cuaaacacauucuucuuca

SEQ ID NO: 1839221 - RNA, 19 nt, Artificial Sequence
  Description of Artificial Sequence: Synthetic oligonucleotide
  Sense strand starting at position 397 of SEQ ID NO: 1563883
agagacauuucuuaaguuu

SEQ ID NO: 1839222 - RNA, 19 nt, Artificial Sequence
  Description of Artificial Sequence: Synthetic oligonucleotide
  Antisense strand to SEQ ID NO: 1839221
aaacuuaagaaaugucucu

SEQ ID NO: 1839223 - RNA, 19 nt, Artificial Sequence
  Description of Artificial Sequence: Synthetic oligonucleotide
  Sense strand starting at position 649 of SEQ ID NO: 1563883
acaguuaaagcuuacugua

SEQ ID NO: 1839224 - RNA, 19 nt, Artificial Sequence
  Description of Artificial Sequence: Synthetic oligonucleotide
  Antisense strand to SEQ ID NO: 1839223
uacaguaagcuuuaacugu

SEQ ID NO: 1839225 - RNA, 19 nt, Artificial Sequence
  Description of Artificial Sequence: Synthetic oligonucleotide
  Sense strand starting at position 651 of SEQ ID NO: 1563883
aguuaaagcuuacuguaga

SEQ ID NO: 1839226 - RNA, 19 nt, Artificial Sequence
  Description of Artificial Sequence: Synthetic oligonucleotide
  Antisense strand to SEQ ID NO: 1839225
ucuacaguaagcuuuaacu

SEQ ID NO: 1839227 - RNA, 19 nt, Artificial Sequence
  Description of Artificial Sequence: Synthetic oligonucleotide
  Sense strand starting at position 674 of SEQ ID NO: 1563883
gacacaguacuccagugua

SEQ ID NO: 1839228 - RNA, 19 nt, Artificial Sequence
  Description of Artificial Sequence: Synthetic oligonucleotide
  Antisense strand to SEQ ID NO: 1839227
uacacuggaguacuguguc

SEQ ID NO: 1839229 - RNA, 19 nt, Artificial Sequence
  Description of Artificial Sequence: Synthetic oligonucleotide
  Sense strand starting at position 779 of SEQ ID NO: 1563883
acaggucuggccugaguau

SEQ ID NO: 1839230 - RNA, 19 nt, Artificial Sequence
  Description of Artificial Sequence: Synthetic oligonucleotide
  Antisense strand to SEQ ID NO: 1839229
auacucaggccagaccugu

SEQ ID NO: 1839231 - RNA, 19 nt, Artificial Sequence
  Description of Artificial Sequence: Synthetic oligonucleotide
  Sense strand starting at position 786 of SEQ ID NO: 1563883
uggccugaguaucuucuaa

SEQ ID NO: 1839232 - RNA, 19 nt, Artificial Sequence
  Description of Artificial Sequence: Synthetic oligonucleotide
  Antisense strand to SEQ ID NO: 1839231
uuagaagauacucaggcca

SEQ ID NO: 1839233 - RNA, 19 nt, Artificial Sequence
  Description of Artificial Sequence: Synthetic oligonucleotide
  Sense strand starting at position 788 of SEQ ID NO: 1563883
gccugaguaucuucuaauu

SEQ ID NO: 1839234 - RNA, 19 nt, Artificial Sequence
  Description of Artificial Sequence: Synthetic oligonucleotide
  Antisense strand to SEQ ID NO: 1839233
aauuagaagauacucaggc

SEQ ID NO: 1839235 - RNA, 19 nt, Artificial Sequence
  Description of Artificial Sequence: Synthetic oligonucleotide
  Sense strand starting at position 941 of SEQ ID NO: 1563883
agcauaucacuuuauugua

SEQ ID NO: 1839236 - RNA, 19 nt, Artificial Sequence
  Description of Artificial Sequence: Synthetic oligonucleotide
  Antisense strand to SEQ ID NO: 1839235
uacaauaaagugauaugcu

SEQ ID NO: 1839237 - RNA, 19 nt, Artificial Sequence
  Description of Artificial Sequence: Synthetic oligonucleotide
  Sense strand starting at position 1111 of SEQ ID NO: 1563883
cacagauguagcgguaaug

SEQ ID NO: 1839238 - RNA, 19 nt, Artificial Sequence
  Description of Artificial Sequence: Synthetic oligonucleotide
  Antisense strand to SEQ ID NO: 1839237
cauuaccgcuacaucugug

SEQ ID NO: 1839239 - RNA, 19 nt, Artificial Sequence
  Description of Artificial Sequence: Synthetic oligonucleotide
  Sense strand starting at position 1200 of SEQ ID NO: 1563883
gaggcaaucggucacuuaa

SEQ ID NO: 1839240 - RNA, 19 nt, Artificial Sequence
  Description of Artificial Sequence: Synthetic oligonucleotide
  Antisense strand to SEQ ID NO: 1839239
uuaagugaccgauugccuc

SEQ ID NO: 1839241 - RNA, 19 nt, Artificial Sequence
  Description of Artificial Sequence: Synthetic oligonucleotide
  Sense strand starting at position 1202 of SEQ ID NO: 1563883
ggcaaucggucacuuaacu

SEQ ID NO: 1839242 - RNA, 19 nt, Artificial Sequence
  Description of Artificial Sequence: Synthetic oligonucleotide
  Antisense strand to SEQ ID NO: 1839241
aguuaagugaccgauugcc

SEQ ID NO: 1839243 - RNA, 19 nt, Artificial Sequence
  Description of Artificial Sequence: Synthetic oligonucleotide
  Sense strand starting at position 1344 of SEQ ID NO: 1563883
gacaucacuuguccuggau

SEQ ID NO: 1839244 - RNA, 19 nt, Artificial Sequence
  Description of Artificial Sequence: Synthetic oligonucleotide
  Antisense strand to SEQ ID NO: 1839243
auccaggacaagugauguc

SEQ ID NO: 1839245 - RNA, 19 nt, Artificial Sequence
  Description of Artificial Sequence: Synthetic oligonucleotide
  Sense strand starting at position 1367 of SEQ ID NO: 1563883
ggagacuccuauucugaac

SEQ ID NO: 1839246 - RNA, 19 nt, Artificial Sequence
  Description of Artificial Sequence: Synthetic oligonucleotide
  Antisense strand to SEQ ID NO: 1839245
guucagaauaggagucucc

SEQ ID NO: 1839247 - RNA, 19 nt, Artificial Sequence
  Description of Artificial Sequence: Synthetic oligonucleotide
  Sense strand starting at position 1467 of SEQ ID NO: 1563883
ugggaacuccugcacugau

SEQ ID NO: 1839248 - RNA, 19 nt, Artificial Sequence
  Description of Artificial Sequence: Synthetic oligonucleotide
  Antisense strand to SEQ ID NO: 1839247
aucagugcaggaguuccca

SEQ ID NO: 1839249 - RNA, 19 nt, Artificial Sequence
  Description of Artificial Sequence: Synthetic oligonucleotide
  Sense strand starting at position 1540 of SEQ ID NO: 1563883
guccgauggucccuuagaa

SEQ ID NO: 1839250 - RNA, 19 nt, Artificial Sequence
  Description of Artificial Sequence: Synthetic oligonucleotide
  Antisense strand to SEQ ID NO: 1839249
uucuaagggaccaucggac

SEQ ID NO: 1839251 - RNA, 19 nt, Artificial Sequence
  Description of Artificial Sequence: Synthetic oligonucleotide
  Sense strand starting at position 1742 of SEQ ID NO: 1563883
ggcggagcuguuucuucuu

SEQ ID NO: 1839252 - RNA, 19 nt, Artificial Sequence
  Description of Artificial Sequence: Synthetic oligonucleotide
  Antisense strand to SEQ ID NO: 1839251
aagaagaaacagcuccgcc

SEQ ID NO: 1839253 - RNA, 19 nt, Artificial Sequence
  Description of Artificial Sequence: Synthetic oligonucleotide
  Sense strand starting at position 1745 of SEQ ID NO: 1563883
ggagcuguuucuucuucca

SEQ ID NO: 1839254 - RNA, 19 nt, Artificial Sequence
  Description of Artificial Sequence: Synthetic oligonucleotide
  Antisense strand to SEQ ID NO: 1839253
uggaagaagaaacagcucc

SEQ ID NO: 1839255 - RNA, 19 nt, Artificial Sequence
  Description of Artificial Sequence: Synthetic oligonucleotide
  Sense strand starting at position 1839 of SEQ ID NO: 1563883
gccagagggcugugagaaa

SEQ ID NO: 1839256 - RNA, 19 nt, Artificial Sequence
  Description of Artificial Sequence: Synthetic oligonucleotide
  Antisense strand to SEQ ID NO: 1839255
uuucucacagcccucuggc

SEQ ID NO: 1839257 - RNA, 19 nt, Artificial Sequence
  Description of Artificial Sequence: Synthetic oligonucleotide
  Sense strand starting at position 2780 of SEQ ID NO: 1563883
gcgggaagugcucaguaaa

SEQ ID NO: 1839258 - RNA, 19 nt, Artificial Sequence
  Description of Artificial Sequence: Synthetic oligonucleotide
  Antisense strand to SEQ ID NO: 1839257
uuuacugagcacuucccgc

SEQ ID NO: 1839259 - RNA, 19 nt, Artificial Sequence
  Description of Artificial Sequence: Synthetic oligonucleotide
  Sense strand starting at position 2783 of SEQ ID NO: 1563883
ggaagugcucaguaaacca

SEQ ID NO: 1839260 - RNA, 19 nt, Artificial Sequence
  Description of Artificial Sequence: Synthetic oligonucleotide
  Antisense strand to SEQ ID NO: 1839259
ugguuuacugagcacuucc

SEQ ID NO: 1839261 - RNA, 19 nt, Artificial Sequence
  Description of Artificial Sequence: Synthetic oligonucleotide
  Sense strand starting at position 2814 of SEQ ID NO: 1563883
ggagaaagauucgcgcaaa

SEQ ID NO: 1839262 - RNA, 19 nt, Artificial Sequence
  Description of Artificial Sequence: Synthetic oligonucleotide
  Antisense strand to SEQ ID NO: 1839261
uuugcgcgaaucuuucucc

SEQ ID NO: 1839263 - RNA, 19 nt, Artificial Sequence
  Description of Artificial Sequence: Synthetic oligonucleotide
  Sense strand starting at position 2946 of SEQ ID NO: 1563883
cuaucucugauccggguaa

SEQ ID NO: 1839264 - RNA, 19 nt, Artificial Sequence
  Description of Artificial Sequence: Synthetic oligonucleotide
  Antisense strand to SEQ ID NO: 1839263
uuacccggaucagagauag

SEQ ID NO: 1839265 - RNA, 19 nt, Artificial Sequence
  Description of Artificial Sequence: Synthetic oligonucleotide
  Sense strand starting at position 2968 of SEQ ID NO: 1563883
guauacuccucugcccauu

SEQ ID NO: 1839266 - RNA, 19 nt, Artificial Sequence
  Description of Artificial Sequence: Synthetic oligonucleotide
  Antisense strand to SEQ ID NO: 1839265
aaugggcagaggaguauac

SEQ ID NO: 1839267 - RNA, 19 nt, Artificial Sequence
  Description of Artificial Sequence: Synthetic oligonucleotide
  Sense strand starting at position 3108 of SEQ ID NO: 1563883
guauuacagugauuccaaa

SEQ ID NO: 1839268 - RNA, 19 nt, Artificial Sequence
  Description of Artificial Sequence: Synthetic oligonucleotide
  Antisense strand to SEQ ID NO: 1839267
uuuggaaucacuguaauac

SEQ ID NO: 1839269 - RNA, 19 nt, Artificial Sequence
  Description of Artificial Sequence: Synthetic oligonucleotide
  Sense strand starting at position 3190 of SEQ ID NO: 1563883
gcauuuauuuccuguggca

SEQ ID NO: 1839270 - RNA, 19 nt, Artificial Sequence
  Description of Artificial Sequence: Synthetic oligonucleotide
  Antisense strand to SEQ ID NO: 1839269
ugccacaggaaauaaaugc

SEQ ID NO: 1839271 - RNA, 19 nt, Artificial Sequence
  Description of Artificial Sequence: Synthetic oligonucleotide
  Sense strand starting at position 3290 of SEQ ID NO: 1563883
guggcaaagcuuuguaaac

SEQ ID NO: 1839272 - RNA, 19 nt, Artificial Sequence
  Description of Artificial Sequence: Synthetic oligonucleotide
  Antisense strand to SEQ ID NO: 1839271
guuuacaaagcuuugccac

SEQ ID NO: 1839273 - RNA, 19 nt, Artificial Sequence
  Description of Artificial Sequence: Synthetic oligonucleotide
  Sense strand starting at position 3291 of SEQ ID NO: 1563883
uggcaaagcuuuguaaacu

SEQ ID NO: 1839274 - RNA, 19 nt, Artificial Sequence
  Description of Artificial Sequence: Synthetic oligonucleotide
  Antisense strand to SEQ ID NO: 1839273
aguuuacaaagcuuugcca

SEQ ID NO: 1839275 - RNA, 19 nt, Artificial Sequence
  Description of Artificial Sequence: Synthetic oligonucleotide
  Sense strand starting at position 3309 of SEQ ID NO: 1563883
ugcauaucacaagguaaau

SEQ ID NO: 1839276 - RNA, 19 nt, Artificial Sequence
  Description of Artificial Sequence: Synthetic oligonucleotide
  Antisense strand to SEQ ID NO: 1839275
auuuaccuugugauaugca

SEQ ID NO: 1839277 - RNA, 19 nt, Artificial Sequence
  Description of Artificial Sequence: Synthetic oligonucleotide
  Sense strand starting at position 3564 of SEQ ID NO: 1563883
gaauguaagcucugagaga

SEQ ID NO: 1839278 - RNA, 19 nt, Artificial Sequence
  Description of Artificial Sequence: Synthetic oligonucleotide
  Antisense strand to SEQ ID NO: 1839277
ucucucagagcuuacauuc

SEQ ID NO: 1839279 - RNA, 19 nt, Artificial Sequence
  Description of Artificial Sequence: Synthetic oligonucleotide
  Sense strand starting at position 3609 of SEQ ID NO: 1563883
uugacugucaugugauaag

SEQ ID NO: 1839280 - RNA, 19 nt, Artificial Sequence
  Description of Artificial Sequence: Synthetic oligonucleotide
  Antisense strand to SEQ ID NO: 1839279
cuuaucacaugacagucaa

SEQ ID NO: 1839281 - RNA, 19 nt, Artificial Sequence
  Description of Artificial Sequence: Synthetic oligonucleotide
  Sense strand starting at position 3638 of SEQ ID NO: 1563883
gugcuuguugaaugacaaa

SEQ ID NO: 1839282 - RNA, 19 nt, Artificial Sequence
  Description of Artificial Sequence: Synthetic oligonucleotide
  Antisense strand to SEQ ID NO: 1839281
uuugucauucaacaagcac

SEQ ID NO: 1839283 - RNA, 19 nt, Artificial Sequence
  Description of Artificial Sequence: Synthetic oligonucleotide
  Sense strand starting at position 3801 of SEQ ID NO: 1563883
uucugauaugcuugagcuu

SEQ ID NO: 1839284 - RNA, 19 nt, Artificial Sequence
  Description of Artificial Sequence: Synthetic oligonucleotide
  Antisense strand to SEQ ID NO: 1839283
aagcucaagcauaucagaa

SEQ ID NO: 1839285 - RNA, 19 nt, Artificial Sequence
  Description of Artificial Sequence: Synthetic oligonucleotide
  Sense strand starting at position 3847 of SEQ ID NO: 1563883
aucucauuagcugggcaua

SEQ ID NO: 1839286 - RNA, 19 nt, Artificial Sequence
  Description of Artificial Sequence: Synthetic oligonucleotide
  Antisense strand to SEQ ID NO: 1839285
uaugcccagcuaaugagau

SEQ ID NO: 1839287 - RNA, 19 nt, Artificial Sequence
  Description of Artificial Sequence: Synthetic oligonucleotide
  Sense strand starting at position 3850 of SEQ ID NO: 1563883
ucauuagcugggcauagua

SEQ ID NO: 1839288 - RNA, 19 nt, Artificial Sequence
  Description of Artificial Sequence: Synthetic oligonucleotide
  Antisense strand to SEQ ID NO: 1839287
uacuaugcccagcuaauga

SEQ ID NO: 1839289 - RNA, 19 nt, Artificial Sequence
  Description of Artificial Sequence: Synthetic oligonucleotide
  Sense strand starting at position 94 of SEQ ID NO: 1563884
gguucuuuaagguaaugcu

SEQ ID NO: 1839290 - RNA, 19 nt, Artificial Sequence
  Description of Artificial Sequence: Synthetic oligonucleotide
  Antisense strand to SEQ ID NO: 1839289
agcauuaccuuaaagaacc

SEQ ID NO: 1839291 - RNA, 19 nt, Artificial Sequence
  Description of Artificial Sequence: Synthetic oligonucleotide
  Sense strand starting at position 402 of SEQ ID NO: 1563884
ggguuccaaacguaucaau

SEQ ID NO: 1839292 - RNA, 19 nt, Artificial Sequence
  Description of Artificial Sequence: Synthetic oligonucleotide
  Antisense strand to SEQ ID NO: 1839291
auugauacguuuggaaccc

SEQ ID NO: 1839293 - RNA, 19 nt, Artificial Sequence
  Description of Artificial Sequence: Synthetic oligonucleotide
  Sense strand starting at position 461 of SEQ ID NO: 1563884
uuguaaagcauuccguguu

SEQ ID NO: 1839294 - RNA, 19 nt, Artificial Sequence
  Description of Artificial Sequence: Synthetic oligonucleotide
  Antisense strand to SEQ ID NO: 1839293
aacacggaaugcuuuacaa

SEQ ID NO: 1839295 - RNA, 19 nt, Artificial Sequence
  Description of Artificial Sequence: Synthetic oligonucleotide
  Sense strand starting at position 476 of SEQ ID NO: 1563884
uguuaugguuaaucaucaa

SEQ ID NO: 1839296 - RNA, 19 nt, Artificial Sequence
  Description of Artificial Sequence: Synthetic oligonucleotide
  Antisense strand to SEQ ID NO: 1839295
uugaugauuaaccauaaca

SEQ ID NO: 1839297 - RNA, 19 nt, Artificial Sequence
  Description of Artificial Sequence: Synthetic oligonucleotide
  Sense strand starting at position 495 of SEQ ID NO: 1563884
aggucucuaucauucuuau

SEQ ID NO: 1839298 - RNA, 19 nt, Artificial Sequence
  Description of Artificial Sequence: Synthetic oligonucleotide
  Antisense strand to SEQ ID NO: 1839297
auaagaaugauagagaccu

SEQ ID NO: 1839299 - RNA, 19 nt, Artificial Sequence
  Description of Artificial Sequence: Synthetic oligonucleotide
  Sense strand starting at position 699 of SEQ ID NO: 1563884
auguauaaugcgcccugua

SEQ ID NO: 1839300 - RNA, 19 nt, Artificial Sequence
  Description of Artificial Sequence: Synthetic oligonucleotide
  Antisense strand to SEQ ID NO: 1839299
uacagggcgcauuauacau

SEQ ID NO: 1839301 - RNA, 19 nt, Artificial Sequence
  Description of Artificial Sequence: Synthetic oligonucleotide
  Sense strand starting at position 700 of SEQ ID NO: 1563884
uguauaaugcgcccuguau

SEQ ID NO: 1839302 - RNA, 19 nt, Artificial Sequence
  Description of Artificial Sequence: Synthetic oligonucleotide
  Antisense strand to SEQ ID NO: 1839301
auacagggcgcauuauaca

SEQ ID NO: 1839303 - RNA, 19 nt, Artificial Sequence
  Description of Artificial Sequence: Synthetic oligonucleotide
  Sense strand starting at position 701 of SEQ ID NO: 1563884
guauaaugcgcccuguaug

SEQ ID NO: 1839304 - RNA, 19 nt, Artificial Sequence
  Description of Artificial Sequence: Synthetic oligonucleotide
  Antisense strand to SEQ ID NO: 1839303
cauacagggcgcauuauac

SEQ ID NO: 1839305 - RNA, 19 nt, Artificial Sequence
  Description of Artificial Sequence: Synthetic oligonucleotide
  Sense strand starting at position 791 of SEQ ID NO: 1563884
uguaauuggcuugaaggga

SEQ ID NO: 1839306 - RNA, 19 nt, Artificial Sequence
  Description of Artificial Sequence: Synthetic oligonucleotide
  Antisense strand to SEQ ID NO: 1839305
ucccuucaagccaauuaca

SEQ ID NO: 1839307 - RNA, 19 nt, Artificial Sequence
  Description of Artificial Sequence: Synthetic oligonucleotide
  Sense strand starting at position 850 of SEQ ID NO: 1563884
gagguuaaguccucaauau

SEQ ID NO: 1839308 - RNA, 19 nt, Artificial Sequence
  Description of Artificial Sequence: Synthetic oligonucleotide
  Antisense strand to SEQ ID NO: 1839307
auauugaggacuuaaccuc

SEQ ID NO: 1839309 - RNA, 19 nt, Artificial Sequence
  Description of Artificial Sequence: Synthetic oligonucleotide
  Sense strand starting at position 851 of SEQ ID NO: 1563884
agguuaaguccucaauauu

SEQ ID NO: 1839310 - RNA, 19 nt, Artificial Sequence
  Description of Artificial Sequence: Synthetic oligonucleotide
  Antisense strand to SEQ ID NO: 1839309
aauauugaggacuuaaccu

SEQ ID NO: 1839311 - RNA, 19 nt, Artificial Sequence
  Description of Artificial Sequence: Synthetic oligonucleotide
  Sense strand starting at position 2234 of SEQ ID NO: 1563884
uguugcuaucugggaagau

SEQ ID NO: 1839312 - RNA, 19 nt, Artificial Sequence
  Description of Artificial Sequence: Synthetic oligonucleotide
  Antisense strand to SEQ ID NO: 1839311
aucuucccagauagcaaca

SEQ ID NO: 1839313 - RNA, 19 nt, Artificial Sequence
  Description of Artificial Sequence: Synthetic oligonucleotide
  Sense strand starting at position 2368 of SEQ ID NO: 1563884
cagggacgguguuucuaaa

SEQ ID NO: 1839314 - RNA, 19 nt, Artificial Sequence
  Description of Artificial Sequence: Synthetic oligonucleotide
  Antisense strand to SEQ ID NO: 1839313
uuuagaaacaccgucccug

SEQ ID NO: 1839315 - RNA, 19 nt, Artificial Sequence
  Description of Artificial Sequence: Synthetic oligonucleotide
  Sense strand starting at position 2432 of SEQ ID NO: 1563884
cgaguuaugaaguaugcau

SEQ ID NO: 1839316 - RNA, 19 nt, Artificial Sequence
  Description of Artificial Sequence: Synthetic oligonucleotide
  Antisense strand to SEQ ID NO: 1839315
augcauacuucauaacucg

SEQ ID NO: 1839317 - RNA, 19 nt, Artificial Sequence
  Description of Artificial Sequence: Synthetic oligonucleotide
  Sense strand starting at position 2434 of SEQ ID NO: 1563884
aguuaugaaguaugcauaa

SEQ ID NO: 1839318 - RNA, 19 nt, Artificial Sequence
  Description of Artificial Sequence: Synthetic oligonucleotide
  Antisense strand to SEQ ID NO: 1839317
uuaugcauacuucauaacu

SEQ ID NO: 1839319 - RNA, 19 nt, Artificial Sequence
  Description of Artificial Sequence: Synthetic oligonucleotide
  Sense strand starting at position 2476 of SEQ ID NO: 1563884
aaggccauguuuguagaua

SEQ ID NO: 1839320 - RNA, 19 nt, Artificial Sequence
  Description of Artificial Sequence: Synthetic oligonucleotide
  Antisense strand to SEQ ID NO: 1839319
uaucuacaaacauggccuu

SEQ ID NO: 1839321 - RNA, 19 nt, Artificial Sequence
  Description of Artificial Sequence: Synthetic oligonucleotide
  Sense strand starting at position 2488 of SEQ ID NO: 1563884
guagauaaguauguguuga

SEQ ID NO: 1839322 - RNA, 19 nt, Artificial Sequence
  Description of Artificial Sequence: Synthetic oligonucleotide
  Antisense strand to SEQ ID NO: 1839321
ucaacacauacuuaucuac

SEQ ID NO: 1839323 - RNA, 19 nt, Artificial Sequence
  Description of Artificial Sequence: Synthetic oligonucleotide
  Sense strand starting at position 2490 of SEQ ID NO: 1563884
agauaaguauguguugaug

SEQ ID NO: 1839324 - RNA, 19 nt, Artificial Sequence
  Description of Artificial Sequence: Synthetic oligonucleotide
  Antisense strand to SEQ ID NO: 1839323
caucaacacauacuuaucu

SEQ ID NO: 1839325 - RNA, 19 nt, Artificial Sequence
  Description of Artificial Sequence: Synthetic oligonucleotide
  Sense strand starting at position 2493 of SEQ ID NO: 1563884
uaaguauguguugauguag

SEQ ID NO: 1839326 - RNA, 19 nt, Artificial Sequence
  Description of Artificial Sequence: Synthetic oligonucleotide
  Antisense strand to SEQ ID NO: 1839325
cuacaucaacacauacuua

SEQ ID NO: 1839327 - RNA, 19 nt, Artificial Sequence
  Description of Artificial Sequence: Synthetic oligonucleotide
  Sense strand starting at position 2714 of SEQ ID NO: 1563884
agaugauaucucugggucu

SEQ ID NO: 1839328 - RNA, 19 nt, Artificial Sequence
  Description of Artificial Sequence: Synthetic oligonucleotide
  Antisense strand to SEQ ID NO: 1839327
agacccagagauaucaucu

SEQ ID NO: 1839329 - RNA, 19 nt, Artificial Sequence
  Description of Artificial Sequence: Synthetic oligonucleotide
  Sense strand starting at position 2717 of SEQ ID NO: 1563884
ugauaucucugggucugga

SEQ ID NO: 1839330 - RNA, 19 nt, Artificial Sequence
  Description of Artificial Sequence: Synthetic oligonucleotide
  Antisense strand to SEQ ID NO: 1839329
uccagacccagagauauca

SEQ ID NO: 1839331 - RNA, 19 nt, Artificial Sequence
  Description of Artificial Sequence: Synthetic oligonucleotide
  Sense strand starting at position 2832 of SEQ ID NO: 1563884
uguucuauggcaugaauga

SEQ ID NO: 1839332 - RNA, 19 nt, Artificial Sequence
  Description of Artificial Sequence: Synthetic oligonucleotide
  Antisense strand to SEQ ID NO: 1839331
ucauucaugccauagaaca

SEQ ID NO: 1839333 - RNA, 19 nt, Artificial Sequence
  Description of Artificial Sequence: Synthetic oligonucleotide
  Sense strand starting at position 2833 of SEQ ID NO: 1563884
guucuauggcaugaaugaa

SEQ ID NO: 1839334 - RNA, 19 nt, Artificial Sequence
  Description of Artificial Sequence: Synthetic oligonucleotide
  Antisense strand to SEQ ID NO: 1839333
uucauucaugccauagaac

SEQ ID NO: 1839335 - RNA, 19 nt, Artificial Sequence
  Description of Artificial Sequence: Synthetic oligonucleotide
  Sense strand starting at position 2864 of SEQ ID NO: 1563884
ugaccauuccuuuauggua

SEQ ID NO: 1839336 - RNA, 19 nt, Artificial Sequence
  Description of Artificial Sequence: Synthetic oligonucleotide
  Antisense strand to SEQ ID NO: 1839335
uaccauaaaggaaugguca

SEQ ID NO: 1839337 - RNA, 19 nt, Artificial Sequence
  Description of Artificial Sequence: Synthetic oligonucleotide
  Sense strand starting at position 2940 of SEQ ID NO: 1563884
ucguguacaggucauuaau

SEQ ID NO: 1839338 - RNA, 19 nt, Artificial Sequence
  Description of Artificial Sequence: Synthetic oligonucleotide
  Antisense strand to SEQ ID NO: 1839337
auuaaugaccuguacacga

SEQ ID NO: 1839339 - RNA, 19 nt, Artificial Sequence
  Description of Artificial Sequence: Synthetic oligonucleotide
  Sense strand starting at position 2962 of SEQ ID NO: 1563884
ugauacuguuaucuccaca

SEQ ID NO: 1839340 - RNA, 19 nt, Artificial Sequence
  Description of Artificial Sequence: Synthetic oligonucleotide
  Antisense strand to SEQ ID NO: 1839339
uguggagauaacaguauca

SEQ ID NO: 1839341 - RNA, 19 nt, Artificial Sequence
  Description of Artificial Sequence: Synthetic oligonucleotide
  Sense strand starting at position 2967 of SEQ ID NO: 1563884
cuguuaucuccacagaaug

SEQ ID NO: 1839342 - RNA, 19 nt, Artificial Sequence
  Description of Artificial Sequence: Synthetic oligonucleotide
  Antisense strand to SEQ ID NO: 1839341
cauucuguggagauaacag

SEQ ID NO: 1839343 - RNA, 19 nt, Artificial Sequence
  Description of Artificial Sequence: Synthetic oligonucleotide
  Sense strand starting at position 2997 of SEQ ID NO: 1563884
augagacugcugcaucuaa

SEQ ID NO: 1839344 - RNA, 19 nt, Artificial Sequence
  Description of Artificial Sequence: Synthetic oligonucleotide
  Antisense strand to SEQ ID NO: 1839343
uuagaugcagcagucucau

SEQ ID NO: 1839345 - RNA, 19 nt, Artificial Sequence
  Description of Artificial Sequence: Synthetic oligonucleotide
  Sense strand starting at position 3157 of SEQ ID NO: 1563884
auaguaucuccuuauuguu

SEQ ID NO: 1839346 - RNA, 19 nt, Artificial Sequence
  Description of Artificial Sequence: Synthetic oligonucleotide
  Antisense strand to SEQ ID NO: 1839345
aacaauaaggagauacuau

SEQ ID NO: 1839347 - RNA, 19 nt, Artificial Sequence
  Description of Artificial Sequence: Synthetic oligonucleotide
  Sense strand starting at position 3304 of SEQ ID NO: 1563884
gcuuuacauuugucuguuu

SEQ ID NO: 1839348 - RNA, 19 nt, Artificial Sequence
  Description of Artificial Sequence: Synthetic oligonucleotide
  Antisense strand to SEQ ID NO: 1839347
aaacagacaaauguaaagc

SEQ ID NO: 1839349 - RNA, 19 nt, Artificial Sequence
  Description of Artificial Sequence: Synthetic oligonucleotide
  Sense strand starting at position 3388 of SEQ ID NO: 1563884
auguacuuauuacucagau

SEQ ID NO: 1839350 - RNA, 19 nt, Artificial Sequence
  Description of Artificial Sequence: Synthetic oligonucleotide
  Antisense strand to SEQ ID NO: 1839349
aucugaguaauaaguacau

SEQ ID NO: 1839351 - RNA, 19 nt, Artificial Sequence
  Description of Artificial Sequence: Synthetic oligonucleotide
  Sense strand starting at position 3389 of SEQ ID NO: 1563884
uguacuuauuacucagaug

SEQ ID NO: 1839352 - RNA, 19 nt, Artificial Sequence
  Description of Artificial Sequence: Synthetic oligonucleotide
  Antisense strand to SEQ ID NO: 1839351
caucugaguaauaaguaca

SEQ ID NO: 1839353 - RNA, 19 nt, Artificial Sequence
  Description of Artificial Sequence: Synthetic oligonucleotide
  Sense strand starting at position 3434 of SEQ ID NO: 1563884
gcugcaauggacugaacau

SEQ ID NO: 1839354 - RNA, 19 nt, Artificial Sequence
  Description of Artificial Sequence: Synthetic oligonucleotide
  Antisense strand to SEQ ID NO: 1839353
auguucaguccauugcagc

SEQ ID NO: 1839355 - RNA, 19 nt, Artificial Sequence
  Description of Artificial Sequence: Synthetic oligonucleotide
  Sense strand starting at position 3503 of SEQ ID NO: 1563884
guauuagguauugggauua

SEQ ID NO: 1839356 - RNA, 19 nt, Artificial Sequence
  Description of Artificial Sequence: Synthetic oligonucleotide
  Antisense strand to SEQ ID NO: 1839355
uaaucccaauaccuaauac

SEQ ID NO: 1839357 - RNA, 19 nt, Artificial Sequence
  Description of Artificial Sequence: Synthetic oligonucleotide
  Sense strand starting at position 3538 of SEQ ID NO: 1563884
ccaaguaauuaggucauaa

SEQ ID NO: 1839358 - RNA, 19 nt, Artificial Sequence
  Description of Artificial Sequence: Synthetic oligonucleotide
  Antisense strand to SEQ ID NO: 1839357
uuaugaccuaauuacuugg

SEQ ID NO: 1839359 - RNA, 19 nt, Artificial Sequence
  Description of Artificial Sequence: Synthetic oligonucleotide
  Sense strand starting at position 3619 of SEQ ID NO: 1563884
cucuuucuuccaugaggac

SEQ ID NO: 1839360 - RNA, 19 nt, Artificial Sequence
  Description of Artificial Sequence: Synthetic oligonucleotide
  Antisense strand to SEQ ID NO: 1839359
guccucauggaagaaagag

SEQ ID NO: 1839361 - RNA, 19 nt, Artificial Sequence
  Description of Artificial Sequence: Synthetic oligonucleotide
  Sense strand starting at position 3620 of SEQ ID NO: 1563884
ucuuucuuccaugaggacu

SEQ ID NO: 1839362 - RNA, 19 nt, Artificial Sequence
  Description of Artificial Sequence: Synthetic oligonucleotide
  Antisense strand to SEQ ID NO: 1839361
aguccucauggaagaaaga

SEQ ID NO: 1839363 - RNA, 19 nt, Artificial Sequence
  Description of Artificial Sequence: Synthetic oligonucleotide
  Sense strand starting at position 3648 of SEQ ID NO: 1563884
gucugaauucugcaaccca

SEQ ID NO: 1839364 - RNA, 19 nt, Artificial Sequence
  Description of Artificial Sequence: Synthetic oligonucleotide
  Antisense strand to SEQ ID NO: 1839363
uggguugcagaauucagac

SEQ ID NO: 1839365 - RNA, 19 nt, Artificial Sequence
  Description of Artificial Sequence: Synthetic oligonucleotide
  Sense strand starting at position 3741 of SEQ ID NO: 1563884
gccagaucugacuaaggca

SEQ ID NO: 1839366 - RNA, 19 nt, Artificial Sequence
  Description of Artificial Sequence: Synthetic oligonucleotide
  Antisense strand to SEQ ID NO: 1839365
ugccuuagucagaucuggc

SEQ ID NO: 1839367 - RNA, 19 nt, Artificial Sequence
  Description of Artificial Sequence: Synthetic oligonucleotide
  Sense strand starting at position 3816 of SEQ ID NO: 1563884
ccauuucuguaagcuguga

SEQ ID NO: 1839368 - RNA, 19 nt, Artificial Sequence
  Description of Artificial Sequence: Synthetic oligonucleotide
  Antisense strand to SEQ ID NO: 1839367
ucacagcuuacagaaaugg

SEQ ID NO: 1839369 - RNA, 19 nt, Artificial Sequence
  Description of Artificial Sequence: Synthetic oligonucleotide
  Sense strand starting at position 117 of SEQ ID NO: 1563885
acaggagauugacuguagu

SEQ ID NO: 1839370 - RNA, 19 nt, Artificial Sequence
  Description of Artificial Sequence: Synthetic oligonucleotide
  Antisense strand to SEQ ID NO: 1839369
acuacagucaaucuccugu

SEQ ID NO: 1839371 - RNA, 19 nt, Artificial Sequence
  Description of Artificial Sequence: Synthetic oligonucleotide
  Sense strand starting at position 120 of SEQ ID NO: 1563885
ggagauugacuguaguauc

SEQ ID NO: 1839372 - RNA, 19 nt, Artificial Sequence
  Description of Artificial Sequence: Synthetic oligonucleotide
  Antisense strand to SEQ ID NO: 1839371
gauacuacagucaaucucc

SEQ ID NO: 1839373 - RNA, 19 nt, Artificial Sequence
  Description of Artificial Sequence: Synthetic oligonucleotide
  Sense strand starting at position 241 of SEQ ID NO: 1563885
agacuacuuucccagauag

SEQ ID NO: 1839374 - RNA, 19 nt, Artificial Sequence
  Description of Artificial Sequence: Synthetic oligonucleotide
  Antisense strand to SEQ ID NO: 1839373
cuaucugggaaaguagucu

SEQ ID NO: 1839375 - RNA, 19 nt, Artificial Sequence
  Description of Artificial Sequence: Synthetic oligonucleotide
  Sense strand starting at position 294 of SEQ ID NO: 1563885
uaggaagguuaugugguau

SEQ ID NO: 1839376 - RNA, 19 nt, Artificial Sequence
  Description of Artificial Sequence: Synthetic oligonucleotide
  Antisense strand to SEQ ID NO: 1839375
auaccacauaaccuuccua

SEQ ID NO: 1839377 - RNA, 19 nt, Artificial Sequence
  Description of Artificial Sequence: Synthetic oligonucleotide
  Sense strand starting at position 309 of SEQ ID NO: 1563885
guauuauccuguuugagaa

SEQ ID NO: 1839378 - RNA, 19 nt, Artificial Sequence
  Description of Artificial Sequence: Synthetic oligonucleotide
  Antisense strand to SEQ ID NO: 1839377
uucucaaacaggauaauac

SEQ ID NO: 1839379 - RNA, 19 nt, Artificial Sequence
  Description of Artificial Sequence: Synthetic oligonucleotide
  Sense strand starting at position 313 of SEQ ID NO: 1563885
uauccuguuugagaacuga

SEQ ID NO: 1839380 - RNA, 19 nt, Artificial Sequence
  Description of Artificial Sequence: Synthetic oligonucleotide
  Antisense strand to SEQ ID NO: 1839379
ucaguucucaaacaggaua

SEQ ID NO: 1839381 - RNA, 19 nt, Artificial Sequence
  Description of Artificial Sequence: Synthetic oligonucleotide
  Sense strand starting at position 359 of SEQ ID NO: 1563885
uucuguaaucagggaaggu

SEQ ID NO: 1839382 - RNA, 19 nt, Artificial Sequence
  Description of Artificial Sequence: Synthetic oligonucleotide
  Antisense strand to SEQ ID NO: 1839381
accuucccugauuacagaa

SEQ ID NO: 1839383 - RNA, 19 nt, Artificial Sequence
  Description of Artificial Sequence: Synthetic oligonucleotide
  Sense strand starting at position 360 of SEQ ID NO: 1563885
ucuguaaucagggaagguu

SEQ ID NO: 1839384 - RNA, 19 nt, Artificial Sequence
  Description of Artificial Sequence: Synthetic oligonucleotide
  Antisense strand to SEQ ID NO: 1839383
aaccuucccugauuacaga

SEQ ID NO: 1839385 - RNA, 19 nt, Artificial Sequence
  Description of Artificial Sequence: Synthetic oligonucleotide
  Sense strand starting at position 369 of SEQ ID NO: 1563885
agggaagguucugcaauca

SEQ ID NO: 1839386 - RNA, 19 nt, Artificial Sequence
  Description of Artificial Sequence: Synthetic oligonucleotide
  Antisense strand to SEQ ID NO: 1839385
ugauugcagaaccuucccu

SEQ ID NO: 1839387 - RNA, 19 nt, Artificial Sequence
  Description of Artificial Sequence: Synthetic oligonucleotide
  Sense strand starting at position 430 of SEQ ID NO: 1563885
uucugauggugaccuagaa

SEQ ID NO: 1839388 - RNA, 19 nt, Artificial Sequence
  Description of Artificial Sequence: Synthetic oligonucleotide
  Antisense strand to SEQ ID NO: 1839387
uucuaggucaccaucagaa

SEQ ID NO: 1839389 - RNA, 19 nt, Artificial Sequence
  Description of Artificial Sequence: Synthetic oligonucleotide
  Sense strand starting at position 486 of SEQ ID NO: 1563885
agauaugagauauggcuuu

SEQ ID NO: 1839390 - RNA, 19 nt, Artificial Sequence
  Description of Artificial Sequence: Synthetic oligonucleotide
  Antisense strand to SEQ ID NO: 1839389
aaagccauaucucauaucu

SEQ ID NO: 1839391 - RNA, 19 nt, Artificial Sequence
  Description of Artificial Sequence: Synthetic oligonucleotide
  Sense strand starting at position 821 of SEQ ID NO: 1563885
cggaauaucugacuucugu

SEQ ID NO: 1839392 - RNA, 19 nt, Artificial Sequence
  Description of Artificial Sequence: Synthetic oligonucleotide
  Antisense strand to SEQ ID NO: 1839391
acagaagucagauauuccg

SEQ ID NO: 1839393 - RNA, 19 nt, Artificial Sequence
  Description of Artificial Sequence: Synthetic oligonucleotide
  Sense strand starting at position 925 of SEQ ID NO: 1563885
uuauuaauuuagggccaau

SEQ ID NO: 1839394 - RNA, 19 nt, Artificial Sequence
  Description of Artificial Sequence: Synthetic oligonucleotide
  Antisense strand to SEQ ID NO: 1839393
auuggcccuaaauuaauaa

SEQ ID NO: 1839395 - RNA, 19 nt, Artificial Sequence
  Description of Artificial Sequence: Synthetic oligonucleotide
  Sense strand starting at position 1004 of SEQ ID NO: 1563885
ccuagucauuaauguauuu

SEQ ID NO: 1839396 - RNA, 19 nt, Artificial Sequence
  Description of Artificial Sequence: Synthetic oligonucleotide
  Antisense strand to SEQ ID NO: 1839395
aaauacauuaaugacuagg

SEQ ID NO: 1839397 - RNA, 19 nt, Artificial Sequence
  Description of Artificial Sequence: Synthetic oligonucleotide
  Sense strand starting at position 1060 of SEQ ID NO: 1563885
uuucguaugucucuacaaa

SEQ ID NO: 1839398 - RNA, 19 nt, Artificial Sequence
  Description of Artificial Sequence: Synthetic oligonucleotide
  Antisense strand to SEQ ID NO: 1839397
uuuguagagacauacgaaa

SEQ ID NO: 1839399 - RNA, 19 nt, Artificial Sequence
  Description of Artificial Sequence: Synthetic oligonucleotide
  Sense strand starting at position 1161 of SEQ ID NO: 1563885
ucgaauccgugucccaauu

SEQ ID NO: 1839400 - RNA, 19 nt, Artificial Sequence
  Description of Artificial Sequence: Synthetic oligonucleotide
  Antisense strand to SEQ ID NO: 1839399
aauugggacacggauucga

SEQ ID NO: 1839401 - RNA, 19 nt, Artificial Sequence
  Description of Artificial Sequence: Synthetic oligonucleotide
  Sense strand starting at position 1206 of SEQ ID NO: 1563885
uacaguugguguguucgau

SEQ ID NO: 1839402 - RNA, 19 nt, Artificial Sequence
  Description of Artificial Sequence: Synthetic oligonucleotide
  Antisense strand to SEQ ID NO: 1839401
aucgaacacaccaacugua

SEQ ID NO: 1839403 - RNA, 19 nt, Artificial Sequence
  Description of Artificial Sequence: Synthetic oligonucleotide
  Sense strand starting at position 1243 of SEQ ID NO: 1563885
cuacucaucgcaugugguu

SEQ ID NO: 1839404 - RNA, 19 nt, Artificial Sequence
  Description of Artificial Sequence: Synthetic oligonucleotide
  Antisense strand to SEQ ID NO: 1839403
aaccacaugcgaugaguag

SEQ ID NO: 1839405 - RNA, 19 nt, Artificial Sequence
  Description of Artificial Sequence: Synthetic oligonucleotide
  Sense strand starting at position 1368 of SEQ ID NO: 1563885
ugaggcaauucccaaauaa

SEQ ID NO: 1839406 - RNA, 19 nt, Artificial Sequence
  Description of Artificial Sequence: Synthetic oligonucleotide
  Antisense strand to SEQ ID NO: 1839405
uuauuugggaauugccuca

SEQ ID NO: 1839407 - RNA, 19 nt, Artificial Sequence
  Description of Artificial Sequence: Synthetic oligonucleotide
  Sense strand starting at position 1466 of SEQ ID NO: 1563885
gcacuacaauuagcgaauu

SEQ ID NO: 1839408 - RNA, 19 nt, Artificial Sequence
  Description of Artificial Sequence: Synthetic oligonucleotide
  Antisense strand to SEQ ID NO: 1839407
aauucgcuaauuguagugc

SEQ ID NO: 1839409 - RNA, 19 nt, Artificial Sequence
  Description of Artificial Sequence: Synthetic oligonucleotide
  Sense strand starting at position 1508 of SEQ ID NO: 1563885
uucuauuacgcguauuauu

SEQ ID NO: 1839410 - RNA, 19 nt, Artificial Sequence
  Description of Artificial Sequence: Synthetic oligonucleotide
  Antisense strand to SEQ ID NO: 1839409
aauaauacgcguaauagaa

SEQ ID NO: 1839411 - RNA, 19 nt, Artificial Sequence
  Description of Artificial Sequence: Synthetic oligonucleotide
  Sense strand starting at position 1517 of SEQ ID NO: 1563885
gcguauuauuuaucuccau

SEQ ID NO: 1839412 - RNA, 19 nt, Artificial Sequence
  Description of Artificial Sequence: Synthetic oligonucleotide
  Antisense strand to SEQ ID NO: 1839411
auggagauaaauaauacgc

SEQ ID NO: 1839413 - RNA, 19 nt, Artificial Sequence
  Description of Artificial Sequence: Synthetic oligonucleotide
  Sense strand starting at position 1599 of SEQ ID NO: 1563885
aguacacgucucugaggua

SEQ ID NO: 1839414 - RNA, 19 nt, Artificial Sequence
  Description of Artificial Sequence: Synthetic oligonucleotide
  Antisense strand to SEQ ID NO: 1839413
uaccucagagacguguacu

SEQ ID NO: 1839415 - RNA, 19 nt, Artificial Sequence
  Description of Artificial Sequence: Synthetic oligonucleotide
  Sense strand starting at position 1606 of SEQ ID NO: 1563885
gucucugagguagauacua

SEQ ID NO: 1839416 - RNA, 19 nt, Artificial Sequence
  Description of Artificial Sequence: Synthetic oligonucleotide
  Antisense strand to SEQ ID NO: 1839415
uaguaucuaccucagagac

SEQ ID NO: 1839417 - RNA, 19 nt, Artificial Sequence
  Description of Artificial Sequence: Synthetic oligonucleotide
  Sense strand starting at position 1751 of SEQ ID NO: 1563885
ccgucuauacccgacgaaa

SEQ ID NO: 1839418 - RNA, 19 nt, Artificial Sequence
  Description of Artificial Sequence: Synthetic oligonucleotide
  Antisense strand to SEQ ID NO: 1839417
uuucgucggguauagacgg

SEQ ID NO: 1839419 - RNA, 19 nt, Artificial Sequence
  Description of Artificial Sequence: Synthetic oligonucleotide
  Sense strand starting at position 1877 of SEQ ID NO: 1563885
auaguaaagccagguuucu

SEQ ID NO: 1839420 - RNA, 19 nt, Artificial Sequence
  Description of Artificial Sequence: Synthetic oligonucleotide
  Antisense strand to SEQ ID NO: 1839419
agaaaccuggcuuuacuau

SEQ ID NO: 1839421 - RNA, 19 nt, Artificial Sequence
  Description of Artificial Sequence: Synthetic oligonucleotide
  Sense strand starting at position 1961 of SEQ ID NO: 1563885
acaaucgucuugucuaagu

SEQ ID NO: 1839422 - RNA, 19 nt, Artificial Sequence
  Description of Artificial Sequence: Synthetic oligonucleotide
  Antisense strand to SEQ ID NO: 1839421
acuuagacaagacgauugu

SEQ ID NO: 1839423 - RNA, 19 nt, Artificial Sequence
  Description of Artificial Sequence: Synthetic oligonucleotide
  Sense strand starting at position 1963 of SEQ ID NO: 1563885
aaucgucuugucuaaguuu

SEQ ID NO: 1839424 - RNA, 19 nt, Artificial Sequence
  Description of Artificial Sequence: Synthetic oligonucleotide
  Antisense strand to SEQ ID NO: 1839423
aaacuuagacaagacgauu

SEQ ID NO: 1839425 - RNA, 19 nt, Artificial Sequence
  Description of Artificial Sequence: Synthetic oligonucleotide
  Sense strand starting at position 2031 of SEQ ID NO: 1563885
ugacacuucgccgcaguaa

SEQ ID NO: 1839426 - RNA, 19 nt, Artificial Sequence
  Description of Artificial Sequence: Synthetic oligonucleotide
  Antisense strand to SEQ ID NO: 1839425
uuacugcggcgaaguguca

SEQ ID NO: 1839427 - RNA, 19 nt, Artificial Sequence
  Description of Artificial Sequence: Synthetic oligonucleotide
  Sense strand starting at position 2032 of SEQ ID NO: 1563885
gacacuucgccgcaguaaa

SEQ ID NO: 1839428 - RNA, 19 nt, Artificial Sequence
  Description of Artificial Sequence: Synthetic oligonucleotide
  Antisense strand to SEQ ID NO: 1839427
uuuacugcggcgaaguguc

SEQ ID NO: 1839429 - RNA, 19 nt, Artificial Sequence
  Description of Artificial Sequence: Synthetic oligonucleotide
  Sense strand starting at position 2079 of SEQ ID NO: 1563885
uguuaaggucuacagcaaa

SEQ ID NO: 1839430 - RNA, 19 nt, Artificial Sequence
  Description of Artificial Sequence: Synthetic oligonucleotide
  Antisense strand to SEQ ID NO: 1839429
uuugcuguagaccuuaaca

SEQ ID NO: 1839431 - RNA, 19 nt, Artificial Sequence
  Description of Artificial Sequence: Synthetic oligonucleotide
  Sense strand starting at position 2102 of SEQ ID NO: 1563885
uccucuuccuccguuagua

SEQ ID NO: 1839432 - RNA, 19 nt, Artificial Sequence
  Description of Artificial Sequence: Synthetic oligonucleotide
  Antisense strand to SEQ ID NO: 1839431
uacuaacggaggaagagga

SEQ ID NO: 1839433 - RNA, 19 nt, Artificial Sequence
  Description of Artificial Sequence: Synthetic oligonucleotide
  Sense strand starting at position 2244 of SEQ ID NO: 1563885
cagaguuccucugaccaga

SEQ ID NO: 1839434 - RNA, 19 nt, Artificial Sequence
  Description of Artificial Sequence: Synthetic oligonucleotide
  Antisense strand to SEQ ID NO: 1839433
ucuggucagaggaacucug

SEQ ID NO: 1839435 - RNA, 19 nt, Artificial Sequence
  Description of Artificial Sequence: Synthetic oligonucleotide
  Sense strand starting at position 2310 of SEQ ID NO: 1563885
gcauuauggguuugugguu

SEQ ID NO: 1839436 - RNA, 19 nt, Artificial Sequence
  Description of Artificial Sequence: Synthetic oligonucleotide
  Antisense strand to SEQ ID NO: 1839435
aaccacaaacccauaaugc

SEQ ID NO: 1839437 - RNA, 19 nt, Artificial Sequence
  Description of Artificial Sequence: Synthetic oligonucleotide
  Sense strand starting at position 2359 of SEQ ID NO: 1563885
cuacguggccugcggaaau

SEQ ID NO: 1839438 - RNA, 19 nt, Artificial Sequence
  Description of Artificial Sequence: Synthetic oligonucleotide
  Antisense strand to SEQ ID NO: 1839437
auuuccgcaggccacguag

SEQ ID NO: 1839439 - RNA, 19 nt, Artificial Sequence
  Description of Artificial Sequence: Synthetic oligonucleotide
  Sense strand starting at position 2385 of SEQ ID NO: 1563885
gcggaaaugagcuaagguu

SEQ ID NO: 1839440 - RNA, 19 nt, Artificial Sequence
  Description of Artificial Sequence: Synthetic oligonucleotide
  Antisense strand to SEQ ID NO: 1839439
aaccuuagcucauuuccgc

SEQ ID NO: 1839441 - RNA, 19 nt, Artificial Sequence
  Description of Artificial Sequence: Synthetic oligonucleotide
  Sense strand starting at position 2740 of SEQ ID NO: 1563885
gcagguuguuaucuauuuc

SEQ ID NO: 1839442 - RNA, 19 nt, Artificial Sequence
  Description of Artificial Sequence: Synthetic oligonucleotide
  Antisense strand to SEQ ID NO: 1839441
gaaauagauaacaaccugc

SEQ ID NO: 1839443 - RNA, 19 nt, Artificial Sequence
  Description of Artificial Sequence: Synthetic oligonucleotide
  Sense strand starting at position 2850 of SEQ ID NO: 1563885
uuuggcuuuccguacugau

SEQ ID NO: 1839444 - RNA, 19 nt, Artificial Sequence
  Description of Artificial Sequence: Synthetic oligonucleotide
  Antisense strand to SEQ ID NO: 1839443
aucaguacggaaagccaaa

SEQ ID NO: 1839445 - RNA, 19 nt, Artificial Sequence
  Description of Artificial Sequence: Synthetic oligonucleotide
  Sense strand starting at position 3063 of SEQ ID NO: 1563885
ugcaguucucuuggcacaa

SEQ ID NO: 1839446 - RNA, 19 nt, Artificial Sequence
  Description of Artificial Sequence: Synthetic oligonucleotide
  Antisense strand to SEQ ID NO: 1839445
uugugccaagagaacugca

SEQ ID NO: 1839447 - RNA, 19 nt, Artificial Sequence
  Description of Artificial Sequence: Synthetic oligonucleotide
  Sense strand starting at position 3064 of SEQ ID NO: 1563885
gcaguucucuuggcacaaa

SEQ ID NO: 1839448 - RNA, 19 nt, Artificial Sequence
  Description of Artificial Sequence: Synthetic oligonucleotide
  Antisense strand to SEQ ID NO: 1839447
uuugugccaagagaacugc

SEQ ID NO: 1839449 - RNA, 19 nt, Artificial Sequence
  Description of Artificial Sequence: Synthetic oligonucleotide
  Sense strand starting at position 28 of SEQ ID NO: 1563886
ugaggcaauucccaaauaa

SEQ ID NO: 1839450 - RNA, 19 nt, Artificial Sequence
  Description of Artificial Sequence: Synthetic oligonucleotide
  Antisense strand to SEQ ID NO: 1839449
uuauuugggaauugccuca

SEQ ID NO: 1839451 - RNA, 19 nt, Artificial Sequence
  Description of Artificial Sequence: Synthetic oligonucleotide
  Sense strand starting at position 126 of SEQ ID NO: 1563886
gcacuacaauuagcgaauu

SEQ ID NO: 1839452 - RNA, 19 nt, Artificial Sequence
  Description of Artificial Sequence: Synthetic oligonucleotide
  Antisense strand to SEQ ID NO: 1839451
aauucgcuaauuguagugc

SEQ ID NO: 1839453 - RNA, 19 nt, Artificial Sequence
  Description of Artificial Sequence: Synthetic oligonucleotide
  Sense strand starting at position 168 of SEQ ID NO: 1563886
uucuauuacgcguauuauu

SEQ ID NO: 1839454 - RNA, 19 nt, Artificial Sequence
  Description of Artificial Sequence: Synthetic oligonucleotide
  Antisense strand to SEQ ID NO: 1839453
aauaauacgcguaauagaa

SEQ ID NO: 1839455 - RNA, 19 nt, Artificial Sequence
  Description of Artificial Sequence: Synthetic oligonucleotide
  Sense strand starting at position 177 of SEQ ID NO: 1563886
gcguauuauuuaucuccau

SEQ ID NO: 1839456 - RNA, 19 nt, Artificial Sequence
  Description of Artificial Sequence: Synthetic oligonucleotide
  Antisense strand to SEQ ID NO: 1839455
auggagauaaauaauacgc

SEQ ID NO: 1839457 - RNA, 19 nt, Artificial Sequence
  Description of Artificial Sequence: Synthetic oligonucleotide
  Sense strand starting at position 259 of SEQ ID NO: 1563886
aguacacgucucugaggua

SEQ ID NO: 1839458 - RNA, 19 nt, Artificial Sequence
  Description of Artificial Sequence: Synthetic oligonucleotide
  Antisense strand to SEQ ID NO: 1839457
uaccucagagacguguacu

SEQ ID NO: 1839459 - RNA, 19 nt, Artificial Sequence
  Description of Artificial Sequence: Synthetic oligonucleotide
  Sense strand starting at position 266 of SEQ ID NO: 1563886
gucucugagguagauacua

SEQ ID NO: 1839460 - RNA, 19 nt, Artificial Sequence
  Description of Artificial Sequence: Synthetic oligonucleotide
  Antisense strand to SEQ ID NO: 1839459
uaguaucuaccucagagac

SEQ ID NO: 1839461 - RNA, 19 nt, Artificial Sequence
  Description of Artificial Sequence: Synthetic oligonucleotide
  Sense strand starting at position 411 of SEQ ID NO: 1563886
ccgucuauacccgacgaaa

SEQ ID NO: 1839462 - RNA, 19 nt, Artificial Sequence
  Description of Artificial Sequence: Synthetic oligonucleotide
  Antisense strand to SEQ ID NO: 1839461
uuucgucggguauagacgg

SEQ ID NO: 1839463 - RNA, 19 nt, Artificial Sequence
  Description of Artificial Sequence: Synthetic oligonucleotide
  Sense strand starting at position 506 of SEQ ID NO: 1563886
acgugugaucacugccguu

SEQ ID NO: 1839464 - RNA, 19 nt, Artificial Sequence
  Description of Artificial Sequence: Synthetic oligonucleotide
  Antisense strand to SEQ ID NO: 1839463
aacggcagugaucacacgu

SEQ ID NO: 1839465 - RNA, 19 nt, Artificial Sequence
  Description of Artificial Sequence: Synthetic oligonucleotide
  Sense strand starting at position 537 of SEQ ID NO: 1563886
auaguaaagccagguuucu

SEQ ID NO: 1839466 - RNA, 19 nt, Artificial Sequence
  Description of Artificial Sequence: Synthetic oligonucleotide
  Antisense strand to SEQ ID NO: 1839465
agaaaccuggcuuuacuau

SEQ ID NO: 1839467 - RNA, 19 nt, Artificial Sequence
  Description of Artificial Sequence: Synthetic oligonucleotide
  Sense strand starting at position 548 of SEQ ID NO: 1563886
agguuucucuggcaacuga

SEQ ID NO: 1839468 - RNA, 19 nt, Artificial Sequence
  Description of Artificial Sequence: Synthetic oligonucleotide
  Antisense strand to SEQ ID NO: 1839467
ucaguugccagagaaaccu

SEQ ID NO: 1839469 - RNA, 19 nt, Artificial Sequence
  Description of Artificial Sequence: Synthetic oligonucleotide
  Sense strand starting at position 621 of SEQ ID NO: 1563886
acaaucgucuugucuaagu

SEQ ID NO: 1839470 - RNA, 19 nt, Artificial Sequence
  Description of Artificial Sequence: Synthetic oligonucleotide
  Antisense strand to SEQ ID NO: 1839469
acuuagacaagacgauugu

SEQ ID NO: 1839471 - RNA, 19 nt, Artificial Sequence
  Description of Artificial Sequence: Synthetic oligonucleotide
  Sense strand starting at position 623 of SEQ ID NO: 1563886
aaucgucuugucuaaguuu

SEQ ID NO: 1839472 - RNA, 19 nt, Artificial Sequence
  Description of Artificial Sequence: Synthetic oligonucleotide
  Antisense strand to SEQ ID NO: 1839471
aaacuuagacaagacgauu

SEQ ID NO: 1839473 - RNA, 19 nt, Artificial Sequence
  Description of Artificial Sequence: Synthetic oligonucleotide
  Sense strand starting at position 691 of SEQ ID NO: 1563886
ugacacuucgccgcaguaa

SEQ ID NO: 1839474 - RNA, 19 nt, Artificial Sequence
  Description of Artificial Sequence: Synthetic oligonucleotide
  Antisense strand to SEQ ID NO: 1839473
uuacugcggcgaaguguca

SEQ ID NO: 1839475 - RNA, 19 nt, Artificial Sequence
  Description of Artificial Sequence: Synthetic oligonucleotide
  Sense strand starting at position 692 of SEQ ID NO: 1563886
gacacuucgccgcaguaaa

SEQ ID NO: 1839476 - RNA, 19 nt, Artificial Sequence
  Description of Artificial Sequence: Synthetic oligonucleotide
  Antisense strand to SEQ ID NO: 1839475
uuuacugcggcgaaguguc

SEQ ID NO: 1839477 - RNA, 19 nt, Artificial Sequence
  Description of Artificial Sequence: Synthetic oligonucleotide
  Sense strand starting at position 739 of SEQ ID NO: 1563886
uguuaaggucuacagcaaa

SEQ ID NO: 1839478 - RNA, 19 nt, Artificial Sequence
  Description of Artificial Sequence: Synthetic oligonucleotide
  Antisense strand to SEQ ID NO: 1839477
uuugcuguagaccuuaaca

SEQ ID NO: 1839479 - RNA, 19 nt, Artificial Sequence
  Description of Artificial Sequence: Synthetic oligonucleotide
  Sense strand starting at position 762 of SEQ ID NO: 1563886
uccucuuccuccguuagua

SEQ ID NO: 1839480 - RNA, 19 nt, Artificial Sequence
  Description of Artificial Sequence: Synthetic oligonucleotide
  Antisense strand to SEQ ID NO: 1839479
uacuaacggaggaagagga

SEQ ID NO: 1839481 - RNA, 19 nt, Artificial Sequence
  Description of Artificial Sequence: Synthetic oligonucleotide
  Sense strand starting at position 904 of SEQ ID NO: 1563886
cagaguuccucugaccaga

SEQ ID NO: 1839482 - RNA, 19 nt, Artificial Sequence
  Description of Artificial Sequence: Synthetic oligonucleotide
  Antisense strand to SEQ ID NO: 1839481
ucuggucagaggaacucug

SEQ ID NO: 1839483 - RNA, 19 nt, Artificial Sequence
  Description of Artificial Sequence: Synthetic oligonucleotide
  Sense strand starting at position 970 of SEQ ID NO: 1563886
gcauuauggguuugugguu

SEQ ID NO: 1839484 - RNA, 19 nt, Artificial Sequence
  Description of Artificial Sequence: Synthetic oligonucleotide
  Antisense strand to SEQ ID NO: 1839483
aaccacaaacccauaaugc

SEQ ID NO: 1839485 - RNA, 19 nt, Artificial Sequence
  Description of Artificial Sequence: Synthetic oligonucleotide
  Sense strand starting at position 1019 of SEQ ID NO: 1563886
cuacguggccugcggaaau

SEQ ID NO: 1839486 - RNA, 19 nt, Artificial Sequence
  Description of Artificial Sequence: Synthetic oligonucleotide
  Antisense strand to SEQ ID NO: 1839485
auuuccgcaggccacguag

SEQ ID NO: 1839487 - RNA, 19 nt, Artificial Sequence
  Description of Artificial Sequence: Synthetic oligonucleotide
  Sense strand starting at position 1045 of SEQ ID NO: 1563886
gcggaaaugagcuaagguu

SEQ ID NO: 1839488 - RNA, 19 nt, Artificial Sequence
  Description of Artificial Sequence: Synthetic oligonucleotide
  Antisense strand to SEQ ID NO: 1839487
aaccuuagcucauuuccgc

SEQ ID NO: 1839489 - RNA, 19 nt, Artificial Sequence
  Description of Artificial Sequence: Synthetic oligonucleotide
  Sense strand starting at position 1400 of SEQ ID NO: 1563886
gcagguuguuaucuauuuc

SEQ ID NO: 1839490 - RNA, 19 nt, Artificial Sequence
  Description of Artificial Sequence: Synthetic oligonucleotide
  Antisense strand to SEQ ID NO: 1839489
gaaauagauaacaaccugc

SEQ ID NO: 1839491 - RNA, 19 nt, Artificial Sequence
  Description of Artificial Sequence: Synthetic oligonucleotide
  Sense strand starting at position 1510 of SEQ ID NO: 1563886
uuuggcuuuccguacugau

SEQ ID NO: 1839492 - RNA, 19 nt, Artificial Sequence
  Description of Artificial Sequence: Synthetic oligonucleotide
  Antisense strand to SEQ ID NO: 1839491
aucaguacggaaagccaaa

SEQ ID NO: 1839493 - RNA, 19 nt, Artificial Sequence
  Description of Artificial Sequence: Synthetic oligonucleotide
  Sense strand starting at position 1513 of SEQ ID NO: 1563886
ggcuuuccguacugauuua

SEQ ID NO: 1839494 - RNA, 19 nt, Artificial Sequence
  Description of Artificial Sequence: Synthetic oligonucleotide
  Antisense strand to SEQ ID NO: 1839493
uaaaucaguacggaaagcc

SEQ ID NO: 1839495 - RNA, 19 nt, Artificial Sequence
  Description of Artificial Sequence: Synthetic oligonucleotide
  Sense strand starting at position 1723 of SEQ ID NO: 1563886
ugcaguucucuuggcacaa

SEQ ID NO: 1839496 - RNA, 19 nt, Artificial Sequence
  Description of Artificial Sequence: Synthetic oligonucleotide
  Antisense strand to SEQ ID NO: 1839495
uugugccaagagaacugca

SEQ ID NO: 1839497 - RNA, 19 nt, Artificial Sequence
  Description of Artificial Sequence: Synthetic oligonucleotide
  Sense strand starting at position 1724 of SEQ ID NO: 1563886
gcaguucucuuggcacaaa

SEQ ID NO: 1839498 - RNA, 19 nt, Artificial Sequence
  Description of Artificial Sequence: Synthetic oligonucleotide
  Antisense strand to SEQ ID NO: 1839497
uuugugccaagagaacugc

SEQ ID NO: 1839499 - RNA, 19 nt, Artificial Sequence
  Description of Artificial Sequence: Synthetic oligonucleotide
  Sense strand starting at position 3327 of SEQ ID NO: 1563886
guggaaauauuucgauguu

SEQ ID NO: 1839500 - RNA, 19 nt, Artificial Sequence
  Description of Artificial Sequence: Synthetic oligonucleotide
  Antisense strand to SEQ ID NO: 1839499
aacaucgaaauauuuccac

SEQ ID NO: 1839501 - RNA, 19 nt, Artificial Sequence
  Description of Artificial Sequence: Synthetic oligonucleotide
  Sense strand starting at position 3328 of SEQ ID NO: 1563886
uggaaauauuucgauguuu

SEQ ID NO: 1839502 - RNA, 19 nt, Artificial Sequence
  Description of Artificial Sequence: Synthetic oligonucleotide
  Antisense strand to SEQ ID NO: 1839501
aaacaucgaaauauuucca

SEQ ID NO: 1839503 - RNA, 19 nt, Artificial Sequence
  Description of Artificial Sequence: Synthetic oligonucleotide
  Sense strand starting at position 3818 of SEQ ID NO: 1563886
gucuaaaucucuucuaugu

SEQ ID NO: 1839504 - RNA, 19 nt, Artificial Sequence
  Description of Artificial Sequence: Synthetic oligonucleotide
  Antisense strand to SEQ ID NO: 1839503
acauagaagagauuuagac

SEQ ID NO: 1839505 - RNA, 19 nt, Artificial Sequence
  Description of Artificial Sequence: Synthetic oligonucleotide
  Sense strand starting at position 3820 of SEQ ID NO: 1563886
cuaaaucucuucuaugugu

SEQ ID NO: 1839506 - RNA, 19 nt, Artificial Sequence
  Description of Artificial Sequence: Synthetic oligonucleotide
  Antisense strand to SEQ ID NO: 1839505
acacauagaagagauuuag

SEQ ID NO: 1839507 - RNA, 19 nt, Artificial Sequence
  Description of Artificial Sequence: Synthetic oligonucleotide
  Sense strand starting at position 3826 of SEQ ID NO: 1563886
cucuucuauguguguugaa

SEQ ID NO: 1839508 - RNA, 19 nt, Artificial Sequence
  Description of Artificial Sequence: Synthetic oligonucleotide
  Antisense strand to SEQ ID NO: 1839507
uucaacacacauagaagag

SEQ ID NO: 1839509 - RNA, 19 nt, Artificial Sequence
  Description of Artificial Sequence: Synthetic oligonucleotide
  Sense strand starting at position 3827 of SEQ ID NO: 1563886
ucuucuauguguguugaag

SEQ ID NO: 1839510 - RNA, 19 nt, Artificial Sequence
  Description of Artificial Sequence: Synthetic oligonucleotide
  Antisense strand to SEQ ID NO: 1839509
cuucaacacacauagaaga

SEQ ID NO: 1839511 - RNA, 19 nt, Artificial Sequence
  Description of Artificial Sequence: Synthetic oligonucleotide
  Sense strand starting at position 3927 of SEQ ID NO: 1563886
ccugcaaauugggugauau

SEQ ID NO: 1839512 - RNA, 19 nt, Artificial Sequence
  Description of Artificial Sequence: Synthetic oligonucleotide
  Antisense strand to SEQ ID NO: 1839511
auaucacccaauuugcagg

SEQ ID NO: 1839513 - RNA, 19 nt, Artificial Sequence
  Description of Artificial Sequence: Synthetic oligonucleotide
  Sense strand starting at position 3928 of SEQ ID NO: 1563886
cugcaaauugggugauauc

SEQ ID NO: 1839514 - RNA, 19 nt, Artificial Sequence
  Description of Artificial Sequence: Synthetic oligonucleotide
  Antisense strand to SEQ ID NO: 1839513
gauaucacccaauuugcag

SEQ ID NO: 1839515 - RNA, 19 nt, Artificial Sequence
  Description of Artificial Sequence: Synthetic oligonucleotide
  Sense strand starting at position 3929 of SEQ ID NO: 1563886
ugcaaauugggugauauca

SEQ ID NO: 1839516 - RNA, 19 nt, Artificial Sequence
  Description of Artificial Sequence: Synthetic oligonucleotide
  Antisense strand to SEQ ID NO: 1839515
ugauaucacccaauuugca

SEQ ID NO: 1839517 - RNA, 19 nt, Artificial Sequence
  Description of Artificial Sequence: Synthetic oligonucleotide
  Sense strand starting at position 3931 of SEQ ID NO: 1563886
caaauugggugauaucauc

SEQ ID NO: 1839518 - RNA, 19 nt, Artificial Sequence
  Description of Artificial Sequence: Synthetic oligonucleotide
  Antisense strand to SEQ ID NO: 1839517
gaugauaucacccaauuug

SEQ ID NO: 1839519 - RNA, 19 nt, Artificial Sequence
  Description of Artificial Sequence: Synthetic oligonucleotide
  Sense strand starting at position 3969 of SEQ ID NO: 1563886
aagugaauucugcagugug

SEQ ID NO: 1839520 - RNA, 19 nt, Artificial Sequence
  Description of Artificial Sequence: Synthetic oligonucleotide
  Antisense strand to SEQ ID NO: 1839519
cacacugcagaauucacuu

SEQ ID NO: 1839521 - RNA, 19 nt, Artificial Sequence
  Description of Artificial Sequence: Synthetic oligonucleotide
  Sense strand starting at position 3972 of SEQ ID NO: 1563886
ugaauucugcaguguguaa

SEQ ID NO: 1839522 - RNA, 19 nt, Artificial Sequence
  Description of Artificial Sequence: Synthetic oligonucleotide
  Antisense strand to SEQ ID NO: 1839521
uuacacacugcagaauuca

SEQ ID NO: 1839523 - RNA, 19 nt, Artificial Sequence
  Description of Artificial Sequence: Synthetic oligonucleotide
  Sense strand starting at position 3974 of SEQ ID NO: 1563886
aauucugcaguguguaauu

SEQ ID NO: 1839524 - RNA, 19 nt, Artificial Sequence
  Description of Artificial Sequence: Synthetic oligonucleotide
  Antisense strand to SEQ ID NO: 1839523
aauuacacacugcagaauu

SEQ ID NO: 1839525 - RNA, 19 nt, Artificial Sequence
  Description of Artificial Sequence: Synthetic oligonucleotide
  Sense strand starting at position 3979 of SEQ ID NO: 1563886
ugcaguguguaauuacuua

SEQ ID NO: 1839526 - RNA, 19 nt, Artificial Sequence
  Description of Artificial Sequence: Synthetic oligonucleotide
  Antisense strand to SEQ ID NO: 1839525
uaaguaauuacacacugca

SEQ ID NO: 1839527 - RNA, 19 nt, Artificial Sequence
  Description of Artificial Sequence: Synthetic oligonucleotide
  Sense strand starting at position 3983 of SEQ ID NO: 1563886
guguguaauuacuuaucuu

SEQ ID NO: 1839528 - RNA, 19 nt, Artificial Sequence
  Description of Artificial Sequence: Synthetic oligonucleotide
  Antisense strand to SEQ ID NO: 1839527
aagauaaguaauuacacac

SEQ ID NO: 1839529 - RNA, 19 nt, Artificial Sequence
  Description of Artificial Sequence: Synthetic oligonucleotide
  Sense strand starting at position 219 of SEQ ID NO: 1563887
uggaauagcuucucugauc

SEQ ID NO: 1839530 - RNA, 19 nt, Artificial Sequence
  Description of Artificial Sequence: Synthetic oligonucleotide
  Antisense strand to SEQ ID NO: 1839529
gaucagagaagcuauucca

SEQ ID NO: 1839531 - RNA, 19 nt, Artificial Sequence
  Description of Artificial Sequence: Synthetic oligonucleotide
  Sense strand starting at position 220 of SEQ ID NO: 1563887
ggaauagcuucucugauca

SEQ ID NO: 1839532 - RNA, 19 nt, Artificial Sequence
  Description of Artificial Sequence: Synthetic oligonucleotide
  Antisense strand to SEQ ID NO: 1839531
ugaucagagaagcuauucc

SEQ ID NO: 1839533 - RNA, 19 nt, Artificial Sequence
  Description of Artificial Sequence: Synthetic oligonucleotide
  Sense strand starting at position 310 of SEQ ID NO: 1563887
uugggaagcaaauguacau

SEQ ID NO: 1839534 - RNA, 19 nt, Artificial Sequence
  Description of Artificial Sequence: Synthetic oligonucleotide
  Antisense strand to SEQ ID NO: 1839533
auguacauuugcuucccaa

SEQ ID NO: 1839535 - RNA, 19 nt, Artificial Sequence
  Description of Artificial Sequence: Synthetic oligonucleotide
  Sense strand starting at position 340 of SEQ ID NO: 1563887
ggaagaagcaugcauuguu

SEQ ID NO: 1839536 - RNA, 19 nt, Artificial Sequence
  Description of Artificial Sequence: Synthetic oligonucleotide
  Antisense strand to SEQ ID NO: 1839535
aacaaugcaugcuucuucc

SEQ ID NO: 1839537 - RNA, 19 nt, Artificial Sequence
  Description of Artificial Sequence: Synthetic oligonucleotide
  Sense strand starting at position 399 of SEQ ID NO: 1563887
ggaguaacuuuauacugaa

SEQ ID NO: 1839538 - RNA, 19 nt, Artificial Sequence
  Description of Artificial Sequence: Synthetic oligonucleotide
  Antisense strand to SEQ ID NO: 1839537
uucaguauaaaguuacucc

SEQ ID NO: 1839539 - RNA, 19 nt, Artificial Sequence
  Description of Artificial Sequence: Synthetic oligonucleotide
  Sense strand starting at position 448 of SEQ ID NO: 1563887
uaauacauguauggagaau

SEQ ID NO: 1839540 - RNA, 19 nt, Artificial Sequence
  Description of Artificial Sequence: Synthetic oligonucleotide
  Antisense strand to SEQ ID NO: 1839539
auucuccauacauguauua

SEQ ID NO: 1839541 - RNA, 19 nt, Artificial Sequence
  Description of Artificial Sequence: Synthetic oligonucleotide
  Sense strand starting at position 459 of SEQ ID NO: 1563887
uggagaaucuaucacagcu

SEQ ID NO: 1839542 - RNA, 19 nt, Artificial Sequence
  Description of Artificial Sequence: Synthetic oligonucleotide
  Antisense strand to SEQ ID NO: 1839541
agcugugauagauucucca

SEQ ID NO: 1839543 - RNA, 19 nt, Artificial Sequence
  Description of Artificial Sequence: Synthetic oligonucleotide
  Sense strand starting at position 472 of SEQ ID NO: 1563887
acagcuaucccuuacagag

SEQ ID NO: 1839544 - RNA, 19 nt, Artificial Sequence
  Description of Artificial Sequence: Synthetic oligonucleotide
  Antisense strand to SEQ ID NO: 1839543
cucuguaagggauagcugu

SEQ ID NO: 1839545 - RNA, 19 nt, Artificial Sequence
  Description of Artificial Sequence: Synthetic oligonucleotide
  Sense strand starting at position 474 of SEQ ID NO: 1563887
agcuaucccuuacagaguu

SEQ ID NO: 1839546 - RNA, 19 nt, Artificial Sequence
  Description of Artificial Sequence: Synthetic oligonucleotide
  Antisense strand to SEQ ID NO: 1839545
aacucuguaagggauagcu

SEQ ID NO: 1839547 - RNA, 19 nt, Artificial Sequence
  Description of Artificial Sequence: Synthetic oligonucleotide
  Sense strand starting at position 580 of SEQ ID NO: 1563887
cucgcauccugauugggua

SEQ ID NO: 1839548 - RNA, 19 nt, Artificial Sequence
  Description of Artificial Sequence: Synthetic oligonucleotide
  Antisense strand to SEQ ID NO: 1839547
uacccaaucaggaugcgag

SEQ ID NO: 1839549 - RNA, 19 nt, Artificial Sequence
  Description of Artificial Sequence: Synthetic oligonucleotide
  Sense strand starting at position 584 of SEQ ID NO: 1563887
cauccugauuggguaugua

SEQ ID NO: 1839550 - RNA, 19 nt, Artificial Sequence
  Description of Artificial Sequence: Synthetic oligonucleotide
  Antisense strand to SEQ ID NO: 1839549
uacauacccaaucaggaug

SEQ ID NO: 1839551 - RNA, 19 nt, Artificial Sequence
  Description of Artificial Sequence: Synthetic oligonucleotide
  Sense strand starting at position 593 of SEQ ID NO: 1563887
uggguauguagacgugaac

SEQ ID NO: 1839552 - RNA, 19 nt, Artificial Sequence
  Description of Artificial Sequence: Synthetic oligonucleotide
  Antisense strand to SEQ ID NO: 1839551
guucacgucuacauaccca

SEQ ID NO: 1839553 - RNA, 19 nt, Artificial Sequence
  Description of Artificial Sequence: Synthetic oligonucleotide
  Sense strand starting at position 596 of SEQ ID NO: 1563887
guauguagacgugaacaac

SEQ ID NO: 1839554 - RNA, 19 nt, Artificial Sequence
  Description of Artificial Sequence: Synthetic oligonucleotide
  Antisense strand to SEQ ID NO: 1839553
guuguucacgucuacauac

SEQ ID NO: 1839555 - RNA, 19 nt, Artificial Sequence
  Description of Artificial Sequence: Synthetic oligonucleotide
  Sense strand starting at position 745 of SEQ ID NO: 1563887
caguacucagaguaagugu

SEQ ID NO: 1839556 - RNA, 19 nt, Artificial Sequence
  Description of Artificial Sequence: Synthetic oligonucleotide
  Antisense strand to SEQ ID NO: 1839555
acacuuacucugaguacug

SEQ ID NO: 1839557 - RNA, 19 nt, Artificial Sequence
  Description of Artificial Sequence: Synthetic oligonucleotide
  Sense strand starting at position 794 of SEQ ID NO: 1563887
ccaugugugccuugccuga

SEQ ID NO: 1839558 - RNA, 19 nt, Artificial Sequence
  Description of Artificial Sequence: Synthetic oligonucleotide
  Antisense strand to SEQ ID NO: 1839557
ucaggcaaggcacacaugg

SEQ ID NO: 1839559 - RNA, 19 nt, Artificial Sequence
  Description of Artificial Sequence: Synthetic oligonucleotide
  Sense strand starting at position 796 of SEQ ID NO: 1563887
augugugccuugccugaaa

SEQ ID NO: 1839560 - RNA, 19 nt, Artificial Sequence
  Description of Artificial Sequence: Synthetic oligonucleotide
  Antisense strand to SEQ ID NO: 1839559
uuucaggcaaggcacacau

SEQ ID NO: 1839561 - RNA, 19 nt, Artificial Sequence
  Description of Artificial Sequence: Synthetic oligonucleotide
  Sense strand starting at position 825 of SEQ ID NO: 1563887
ucuccuuucugucuggaau

SEQ ID NO: 1839562 - RNA, 19 nt, Artificial Sequence
  Description of Artificial Sequence: Synthetic oligonucleotide
  Antisense strand to SEQ ID NO: 1839561
auuccagacagaaaggaga

SEQ ID NO: 1839563 - RNA, 19 nt, Artificial Sequence
  Description of Artificial Sequence: Synthetic oligonucleotide
  Sense strand starting at position 826 of SEQ ID NO: 1563887
cuccuuucugucuggaauu

SEQ ID NO: 1839564 - RNA, 19 nt, Artificial Sequence
  Description of Artificial Sequence: Synthetic oligonucleotide
  Antisense strand to SEQ ID NO: 1839563
aauuccagacagaaaggag

SEQ ID NO: 1839565 - RNA, 19 nt, Artificial Sequence
  Description of Artificial Sequence: Synthetic oligonucleotide
  Sense strand starting at position 918 of SEQ ID NO: 1563887
acguuugaguccucuucuu

SEQ ID NO: 1839566 - RNA, 19 nt, Artificial Sequence
  Description of Artificial Sequence: Synthetic oligonucleotide
  Antisense strand to SEQ ID NO: 1839565
aagaagaggacucaaacgu

SEQ ID NO: 1839567 - RNA, 19 nt, Artificial Sequence
  Description of Artificial Sequence: Synthetic oligonucleotide
  Sense strand starting at position 963 of SEQ ID NO: 1563887
uagcauuuguccucucguu

SEQ ID NO: 1839568 - RNA, 19 nt, Artificial Sequence
  Description of Artificial Sequence: Synthetic oligonucleotide
  Antisense strand to SEQ ID NO: 1839567
aacgagaggacaaaugcua

SEQ ID NO: 1839569 - RNA, 19 nt, Artificial Sequence
  Description of Artificial Sequence: Synthetic oligonucleotide
  Sense strand starting at position 990 of SEQ ID NO: 1563887
ugagaucucucagauucua

SEQ ID NO: 1839570 - RNA, 19 nt, Artificial Sequence
  Description of Artificial Sequence: Synthetic oligonucleotide
  Antisense strand to SEQ ID NO: 1839569
uagaaucugagagaucuca

SEQ ID NO: 1839571 - RNA, 19 nt, Artificial Sequence
  Description of Artificial Sequence: Synthetic oligonucleotide
  Sense strand starting at position 1074 of SEQ ID NO: 1563887
accgcagaacauugauuaa

SEQ ID NO: 1839572 - RNA, 19 nt, Artificial Sequence
  Description of Artificial Sequence: Synthetic oligonucleotide
  Antisense strand to SEQ ID NO: 1839571
uuaaucaauguucugcggu

SEQ ID NO: 1839573 - RNA, 19 nt, Artificial Sequence
  Description of Artificial Sequence: Synthetic oligonucleotide
  Sense strand starting at position 1121 of SEQ ID NO: 1563887
aauggacuguccuaggauu

SEQ ID NO: 1839574 - RNA, 19 nt, Artificial Sequence
  Description of Artificial Sequence: Synthetic oligonucleotide
  Antisense strand to SEQ ID NO: 1839573
aauccuaggacaguccauu

SEQ ID NO: 1839575 - RNA, 19 nt, Artificial Sequence
  Description of Artificial Sequence: Synthetic oligonucleotide
  Sense strand starting at position 1188 of SEQ ID NO: 1563887
ccggccgcuccaugugaaa

SEQ ID NO: 1839576 - RNA, 19 nt, Artificial Sequence
  Description of Artificial Sequence: Synthetic oligonucleotide
  Antisense strand to SEQ ID NO: 1839575
uuucacauggagcggccgg

SEQ ID NO: 1839577 - RNA, 19 nt, Artificial Sequence
  Description of Artificial Sequence: Synthetic oligonucleotide
  Sense strand starting at position 1200 of SEQ ID NO: 1563887
ugugaaaccggucauguga

SEQ ID NO: 1839578 - RNA, 19 nt, Artificial Sequence
  Description of Artificial Sequence: Synthetic oligonucleotide
  Antisense strand to SEQ ID NO: 1839577
ucacaugaccgguuucaca

SEQ ID NO: 1839579 - RNA, 19 nt, Artificial Sequence
  Description of Artificial Sequence: Synthetic oligonucleotide
  Sense strand starting at position 1208 of SEQ ID NO: 1563887
cggucaugugagccuguuu

SEQ ID NO: 1839580 - RNA, 19 nt, Artificial Sequence
  Description of Artificial Sequence: Synthetic oligonucleotide
  Antisense strand to SEQ ID NO: 1839579
aaacaggcucacaugaccg

SEQ ID NO: 1839581 - RNA, 19 nt, Artificial Sequence
  Description of Artificial Sequence: Synthetic oligonucleotide
  Sense strand starting at position 1248 of SEQ ID NO: 1563887
ccaucaagauccgugcaga

SEQ ID NO: 1839582 - RNA, 19 nt, Artificial Sequence
  Description of Artificial Sequence: Synthetic oligonucleotide
  Antisense strand to SEQ ID NO: 1839581
ucugcacggaucuugaugg

SEQ ID NO: 1839583 - RNA, 19 nt, Artificial Sequence
  Description of Artificial Sequence: Synthetic oligonucleotide
  Sense strand starting at position 1388 of SEQ ID NO: 1563887
gagaguaaagcugaggcua

SEQ ID NO: 1839584 - RNA, 19 nt, Artificial Sequence
  Description of Artificial Sequence: Synthetic oligonucleotide
  Antisense strand to SEQ ID NO: 1839583
uagccucagcuuuacucuc

SEQ ID NO: 1839585 - RNA, 19 nt, Artificial Sequence
  Description of Artificial Sequence: Synthetic oligonucleotide
  Sense strand starting at position 1539 of SEQ ID NO: 1563887
ggugcauccaccgaagagu

SEQ ID NO: 1839586 - RNA, 19 nt, Artificial Sequence
  Description of Artificial Sequence: Synthetic oligonucleotide
  Antisense strand to SEQ ID NO: 1839585
acucuucgguggaugcacc

SEQ ID NO: 1839587 - RNA, 19 nt, Artificial Sequence
  Description of Artificial Sequence: Synthetic oligonucleotide
  Sense strand starting at position 2325 of SEQ ID NO: 1563887
gugaguacucaaggcuagu

SEQ ID NO: 1839588 - RNA, 19 nt, Artificial Sequence
  Description of Artificial Sequence: Synthetic oligonucleotide
  Antisense strand to SEQ ID NO: 1839587
acuagccuugaguacucac

SEQ ID NO: 1839589 - RNA, 19 nt, Artificial Sequence
  Description of Artificial Sequence: Synthetic oligonucleotide
  Sense strand starting at position 2353 of SEQ ID NO: 1563887
ucauacuuccgagacaugu

SEQ ID NO: 1839590 - RNA, 19 nt, Artificial Sequence
  Description of Artificial Sequence: Synthetic oligonucleotide
  Antisense strand to SEQ ID NO: 1839589
acaugucucggaaguauga

SEQ ID NO: 1839591 - RNA, 19 nt, Artificial Sequence
  Description of Artificial Sequence: Synthetic oligonucleotide
  Sense strand starting at position 2362 of SEQ ID NO: 1563887
cgagacaugucuuguugac

SEQ ID NO: 1839592 - RNA, 19 nt, Artificial Sequence
  Description of Artificial Sequence: Synthetic oligonucleotide
  Antisense strand to SEQ ID NO: 1839591
gucaacaagacaugucucg

SEQ ID NO: 1839593 - RNA, 19 nt, Artificial Sequence
  Description of Artificial Sequence: Synthetic oligonucleotide
  Sense strand starting at position 2448 of SEQ ID NO: 1563887
guagccuccuguuugaacu

SEQ ID NO: 1839594 - RNA, 19 nt, Artificial Sequence
  Description of Artificial Sequence: Synthetic oligonucleotide
  Antisense strand to SEQ ID NO: 1839593
aguucaaacaggaggcuac

SEQ ID NO: 1839595 - RNA, 19 nt, Artificial Sequence
  Description of Artificial Sequence: Synthetic oligonucleotide
  Sense strand starting at position 2511 of SEQ ID NO: 1563887
gccagagguaucgaucuaa

SEQ ID NO: 1839596 - RNA, 19 nt, Artificial Sequence
  Description of Artificial Sequence: Synthetic oligonucleotide
  Antisense strand to SEQ ID NO: 1839595
uuagaucgauaccucuggc

SEQ ID NO: 1839597 - RNA, 19 nt, Artificial Sequence
  Description of Artificial Sequence: Synthetic oligonucleotide
  Sense strand starting at position 2590 of SEQ ID NO: 1563887
gacaccuuagcaugguaua

SEQ ID NO: 1839598 - RNA, 19 nt, Artificial Sequence
  Description of Artificial Sequence: Synthetic oligonucleotide
  Antisense strand to SEQ ID NO: 1839597
uauaccaugcuaagguguc

SEQ ID NO: 1839599 - RNA, 19 nt, Artificial Sequence
  Description of Artificial Sequence: Synthetic oligonucleotide
  Sense strand starting at position 2591 of SEQ ID NO: 1563887
acaccuuagcaugguauau

SEQ ID NO: 1839600 - RNA, 19 nt, Artificial Sequence
  Description of Artificial Sequence: Synthetic oligonucleotide
  Antisense strand to SEQ ID NO: 1839599
auauaccaugcuaaggugu

SEQ ID NO: 1839601 - RNA, 19 nt, Artificial Sequence
  Description of Artificial Sequence: Synthetic oligonucleotide
  Sense strand starting at position 2593 of SEQ ID NO: 1563887
accuuagcaugguauauaa

SEQ ID NO: 1839602 - RNA, 19 nt, Artificial Sequence
  Description of Artificial Sequence: Synthetic oligonucleotide
  Antisense strand to SEQ ID NO: 1839601
uuauauaccaugcuaaggu

SEQ ID NO: 1839603 - RNA, 19 nt, Artificial Sequence
  Description of Artificial Sequence: Synthetic oligonucleotide
  Sense strand starting at position 2934 of SEQ ID NO: 1563887
agccaauaucauugugcca

SEQ ID NO: 1839604 - RNA, 19 nt, Artificial Sequence
  Description of Artificial Sequence: Synthetic oligonucleotide
  Antisense strand to SEQ ID NO: 1839603
uggcacaaugauauuggcu

SEQ ID NO: 1839605 - RNA, 19 nt, Artificial Sequence
  Description of Artificial Sequence: Synthetic oligonucleotide
  Sense strand starting at position 3527 of SEQ ID NO: 1563887
aucgaauacuagcucucau

SEQ ID NO: 1839606 - RNA, 19 nt, Artificial Sequence
  Description of Artificial Sequence: Synthetic oligonucleotide
  Antisense strand to SEQ ID NO: 1839605
augagagcuaguauucgau

SEQ ID NO: 1839607 - RNA, 19 nt, Artificial Sequence
  Description of Artificial Sequence: Synthetic oligonucleotide
  Sense strand starting at position 3743 of SEQ ID NO: 1563887
aaagauauuugggaucuug

SEQ ID NO: 1839608 - RNA, 19 nt, Artificial Sequence
  Description of Artificial Sequence: Synthetic oligonucleotide
  Antisense strand to SEQ ID NO: 1839607
caagaucccaaauaucuuu

SEQ ID NO: 1839609 - RNA, 19 nt, Artificial Sequence
  Description of Artificial Sequence: Synthetic oligonucleotide
  Sense strand starting at position 178 of SEQ ID NO: 1563888
ccaugacucugagcauaga

SEQ ID NO: 1839610 - RNA, 19 nt, Artificial Sequence
  Description of Artificial Sequence: Synthetic oligonucleotide
  Antisense strand to SEQ ID NO: 1839609
ucuaugcucagagucaugg

SEQ ID NO: 1839611 - RNA, 19 nt, Artificial Sequence
  Description of Artificial Sequence: Synthetic oligonucleotide
  Sense strand starting at position 233 of SEQ ID NO: 1563888
ucguauuggauggacuauu

SEQ ID NO: 1839612 - RNA, 19 nt, Artificial Sequence
  Description of Artificial Sequence: Synthetic oligonucleotide
  Antisense strand to SEQ ID NO: 1839611
aauaguccauccaauacga

SEQ ID NO: 1839613 - RNA, 19 nt, Artificial Sequence
  Description of Artificial Sequence: Synthetic oligonucleotide
  Sense strand starting at position 256 of SEQ ID NO: 1563888
uuagcuggacugcauaaau

SEQ ID NO: 1839614 - RNA, 19 nt, Artificial Sequence
  Description of Artificial Sequence: Synthetic oligonucleotide
  Antisense strand to SEQ ID NO: 1839613
auuuaugcaguccagcuaa

SEQ ID NO: 1839615 - RNA, 19 nt, Artificial Sequence
  Description of Artificial Sequence: Synthetic oligonucleotide
  Sense strand starting at position 368 of SEQ ID NO: 1563888
ucuugugaaacuggugaga

SEQ ID NO: 1839616 - RNA, 19 nt, Artificial Sequence
  Description of Artificial Sequence: Synthetic oligonucleotide
  Antisense strand to SEQ ID NO: 1839615
ucucaccaguuucacaaga

SEQ ID NO: 1839617 - RNA, 19 nt, Artificial Sequence
  Description of Artificial Sequence: Synthetic oligonucleotide
  Sense strand starting at position 411 of SEQ ID NO: 1563888
augggauuaagccauuggu

SEQ ID NO: 1839618 - RNA, 19 nt, Artificial Sequence
  Description of Artificial Sequence: Synthetic oligonucleotide
  Antisense strand to SEQ ID NO: 1839617
accaauggcuuaaucccau

SEQ ID NO: 1839619 - RNA, 19 nt, Artificial Sequence
  Description of Artificial Sequence: Synthetic oligonucleotide
  Sense strand starting at position 520 of SEQ ID NO: 1563888
ucuaauucugggugggauc

SEQ ID NO: 1839620 - RNA, 19 nt, Artificial Sequence
  Description of Artificial Sequence: Synthetic oligonucleotide
  Antisense strand to SEQ ID NO: 1839619
gaucccacccagaauuaga

SEQ ID NO: 1839621 - RNA, 19 nt, Artificial Sequence
  Description of Artificial Sequence: Synthetic oligonucleotide
  Sense strand starting at position 527 of SEQ ID NO: 1563888
cugggugggaucugacaau

SEQ ID NO: 1839622 - RNA, 19 nt, Artificial Sequence
  Description of Artificial Sequence: Synthetic oligonucleotide
  Antisense strand to SEQ ID NO: 1839621
auugucagaucccacccag

SEQ ID NO: 1839623 - RNA, 19 nt, Artificial Sequence
  Description of Artificial Sequence: Synthetic oligonucleotide
  Sense strand starting at position 534 of SEQ ID NO: 1563888
ggaucugacaauugguauu

SEQ ID NO: 1839624 - RNA, 19 nt, Artificial Sequence
  Description of Artificial Sequence: Synthetic oligonucleotide
  Antisense strand to SEQ ID NO: 1839623
aauaccaauugucagaucc

SEQ ID NO: 1839625 - RNA, 19 nt, Artificial Sequence
  Description of Artificial Sequence: Synthetic oligonucleotide
  Sense strand starting at position 813 of SEQ ID NO: 1563888
cggcucaagggucauacaa

SEQ ID NO: 1839626 - RNA, 19 nt, Artificial Sequence
  Description of Artificial Sequence: Synthetic oligonucleotide
  Antisense strand to SEQ ID NO: 1839625
uuguaugacccuugagccg

SEQ ID NO: 1839627 - RNA, 19 nt, Artificial Sequence
  Description of Artificial Sequence: Synthetic oligonucleotide
  Sense strand starting at position 846 of SEQ ID NO: 1563888
ugaucucuggucuacucua

SEQ ID NO: 1839628 - RNA, 19 nt, Artificial Sequence
  Description of Artificial Sequence: Synthetic oligonucleotide
  Antisense strand to SEQ ID NO: 1839627
uagaguagaccagagauca

SEQ ID NO: 1839629 - RNA, 19 nt, Artificial Sequence
  Description of Artificial Sequence: Synthetic oligonucleotide
  Sense strand starting at position 1005 of SEQ ID NO: 1563888
uauaauggaccuuggucua

SEQ ID NO: 1839630 - RNA, 19 nt, Artificial Sequence
  Description of Artificial Sequence: Synthetic oligonucleotide
  Antisense strand to SEQ ID NO: 1839629
uagaccaagguccauuaua

SEQ ID NO: 1839631 - RNA, 19 nt, Artificial Sequence
  Description of Artificial Sequence: Synthetic oligonucleotide
  Sense strand starting at position 1018 of SEQ ID NO: 1563888
ggucuauuccuguauauua

SEQ ID NO: 1839632 - RNA, 19 nt, Artificial Sequence
  Description of Artificial Sequence: Synthetic oligonucleotide
  Antisense strand to SEQ ID NO: 1839631
uaauauacaggaauagacc

SEQ ID NO: 1839633 - RNA, 19 nt, Artificial Sequence
  Description of Artificial Sequence: Synthetic oligonucleotide
  Sense strand starting at position 1316 of SEQ ID NO: 1563888
uuuguuacugaaugauuag

SEQ ID NO: 1839634 - RNA, 19 nt, Artificial Sequence
  Description of Artificial Sequence: Synthetic oligonucleotide
  Antisense strand to SEQ ID NO: 1839633
cuaaucauucaguaacaaa

SEQ ID NO: 1839635 - RNA, 19 nt, Artificial Sequence
  Description of Artificial Sequence: Synthetic oligonucleotide
  Sense strand starting at position 1635 of SEQ ID NO: 1563888
aucauaagccuaugacaag

SEQ ID NO: 1839636 - RNA, 19 nt, Artificial Sequence
  Description of Artificial Sequence: Synthetic oligonucleotide
  Antisense strand to SEQ ID NO: 1839635
cuugucauaggcuuaugau

SEQ ID NO: 1839637 - RNA, 19 nt, Artificial Sequence
  Description of Artificial Sequence: Synthetic oligonucleotide
  Sense strand starting at position 1644 of SEQ ID NO: 1563888
cuaugacaagauuggcaaa

SEQ ID NO: 1839638 - RNA, 19 nt, Artificial Sequence
  Description of Artificial Sequence: Synthetic oligonucleotide
  Antisense strand to SEQ ID NO: 1839637
uuugccaaucuugucauag

SEQ ID NO: 1839639 - RNA, 19 nt, Artificial Sequence
  Description of Artificial Sequence: Synthetic oligonucleotide
  Sense strand starting at position 2005 of SEQ ID NO: 1563888
gauguaguugcuuaauaau

SEQ ID NO: 1839640 - RNA, 19 nt, Artificial Sequence
  Description of Artificial Sequence: Synthetic oligonucleotide
  Antisense strand to SEQ ID NO: 1839639
auuauuaagcaacuacauc

SEQ ID NO: 1839641 - RNA, 19 nt, Artificial Sequence
  Description of Artificial Sequence: Synthetic oligonucleotide
  Sense strand starting at position 2282 of SEQ ID NO: 1563888
cugaaagaggguuguuaaa

SEQ ID NO: 1839642 - RNA, 19 nt, Artificial Sequence
  Description of Artificial Sequence: Synthetic oligonucleotide
  Antisense strand to SEQ ID NO: 1839641
uuuaacaacccucuuucag

SEQ ID NO: 1839643 - RNA, 19 nt, Artificial Sequence
  Description of Artificial Sequence: Synthetic oligonucleotide
  Sense strand starting at position 2313 of SEQ ID NO: 1563888
guuuguagauuucuugagu

SEQ ID NO: 1839644 - RNA, 19 nt, Artificial Sequence
  Description of Artificial Sequence: Synthetic oligonucleotide
  Antisense strand to SEQ ID NO: 1839643
acucaagaaaucuacaaac

SEQ ID NO: 1839645 - RNA, 19 nt, Artificial Sequence
  Description of Artificial Sequence: Synthetic oligonucleotide
  Sense strand starting at position 2373 of SEQ ID NO: 1563888
agguuauaugguuagguag

SEQ ID NO: 1839646 - RNA, 19 nt, Artificial Sequence
  Description of Artificial Sequence: Synthetic oligonucleotide
  Antisense strand to SEQ ID NO: 1839645
cuaccuaaccauauaaccu

SEQ ID NO: 1839647 - RNA, 19 nt, Artificial Sequence
  Description of Artificial Sequence: Synthetic oligonucleotide
  Sense strand starting at position 2816 of SEQ ID NO: 1563888
ugguguggaagucaaacau

SEQ ID NO: 1839648 - RNA, 19 nt, Artificial Sequence
  Description of Artificial Sequence: Synthetic oligonucleotide
  Antisense strand to SEQ ID NO: 1839647
auguuugacuuccacacca

SEQ ID NO: 1839649 - RNA, 19 nt, Artificial Sequence
  Description of Artificial Sequence: Synthetic oligonucleotide
  Sense strand starting at position 3188 of SEQ ID NO: 1563888
gcaguuauuucccucagca

SEQ ID NO: 1839650 - RNA, 19 nt, Artificial Sequence
  Description of Artificial Sequence: Synthetic oligonucleotide
  Antisense strand to SEQ ID NO: 1839649
ugcugagggaaauaacugc

SEQ ID NO: 1839651 - RNA, 19 nt, Artificial Sequence
  Description of Artificial Sequence: Synthetic oligonucleotide
  Sense strand starting at position 3284 of SEQ ID NO: 1563888
cuuuguggaugugucauuu

SEQ ID NO: 1839652 - RNA, 19 nt, Artificial Sequence
  Description of Artificial Sequence: Synthetic oligonucleotide
  Antisense strand to SEQ ID NO: 1839651
aaaugacacauccacaaag

SEQ ID NO: 1839653 - RNA, 19 nt, Artificial Sequence
  Description of Artificial Sequence: Synthetic oligonucleotide
  Sense strand starting at position 3288 of SEQ ID NO: 1563888
guggaugugucauuucucu

SEQ ID NO: 1839654 - RNA, 19 nt, Artificial Sequence
  Description of Artificial Sequence: Synthetic oligonucleotide
  Antisense strand to SEQ ID NO: 1839653
agagaaaugacacauccac

SEQ ID NO: 1839655 - RNA, 19 nt, Artificial Sequence
  Description of Artificial Sequence: Synthetic oligonucleotide
  Sense strand starting at position 3295 of SEQ ID NO: 1563888
ugucauuucucuuuggguu

SEQ ID NO: 1839656 - RNA, 19 nt, Artificial Sequence
  Description of Artificial Sequence: Synthetic oligonucleotide
  Antisense strand to SEQ ID NO: 1839655
aacccaaagagaaaugaca

SEQ ID NO: 1839657 - RNA, 19 nt, Artificial Sequence
  Description of Artificial Sequence: Synthetic oligonucleotide
  Sense strand starting at position 3299 of SEQ ID NO: 1563888
auuucucuuuggguuguua

SEQ ID NO: 1839658 - RNA, 19 nt, Artificial Sequence
  Description of Artificial Sequence: Synthetic oligonucleotide
  Antisense strand to SEQ ID NO: 1839657
uaacaacccaaagagaaau

SEQ ID NO: 1839659 - RNA, 19 nt, Artificial Sequence
  Description of Artificial Sequence: Synthetic oligonucleotide
  Sense strand starting at position 3407 of SEQ ID NO: 1563888
gguucuuuaaucugaggau

SEQ ID NO: 1839660 - RNA, 19 nt, Artificial Sequence
  Description of Artificial Sequence: Synthetic oligonucleotide
  Antisense strand to SEQ ID NO: 1839659
auccucagauuaaagaacc

SEQ ID NO: 1839661 - RNA, 19 nt, Artificial Sequence
  Description of Artificial Sequence: Synthetic oligonucleotide
  Sense strand starting at position 3416 of SEQ ID NO: 1563888
aucugaggauuugauaucu

SEQ ID NO: 1839662 - RNA, 19 nt, Artificial Sequence
  Description of Artificial Sequence: Synthetic oligonucleotide
  Antisense strand to SEQ ID NO: 1839661
agauaucaaauccucagau

SEQ ID NO: 1839663 - RNA, 19 nt, Artificial Sequence
  Description of Artificial Sequence: Synthetic oligonucleotide
  Sense strand starting at position 3436 of SEQ ID NO: 1563888
uuauaaauucuggguaacu

SEQ ID NO: 1839664 - RNA, 19 nt, Artificial Sequence
  Description of Artificial Sequence: Synthetic oligonucleotide
  Antisense strand to SEQ ID NO: 1839663
aguuacccagaauuuauaa

SEQ ID NO: 1839665 - RNA, 19 nt, Artificial Sequence
  Description of Artificial Sequence: Synthetic oligonucleotide
  Sense strand starting at position 3437 of SEQ ID NO: 1563888
uauaaauucuggguaacug

SEQ ID NO: 1839666 - RNA, 19 nt, Artificial Sequence
  Description of Artificial Sequence: Synthetic oligonucleotide
  Antisense strand to SEQ ID NO: 1839665
caguuacccagaauuuaua

SEQ ID NO: 1839667 - RNA, 19 nt, Artificial Sequence
  Description of Artificial Sequence: Synthetic oligonucleotide
  Sense strand starting at position 3438 of SEQ ID NO: 1563888
auaaauucuggguaacugu

SEQ ID NO: 1839668 - RNA, 19 nt, Artificial Sequence
  Description of Artificial Sequence: Synthetic oligonucleotide
  Antisense strand to SEQ ID NO: 1839667
acaguuacccagaauuuau

SEQ ID NO: 1839669 - RNA, 19 nt, Artificial Sequence
  Description of Artificial Sequence: Synthetic oligonucleotide
  Sense strand starting at position 3448 of SEQ ID NO: 1563888
gguaacugucaaugauuau

SEQ ID NO: 1839670 - RNA, 19 nt, Artificial Sequence
  Description of Artificial Sequence: Synthetic oligonucleotide
  Antisense strand to SEQ ID NO: 1839669
auaaucauugacaguuacc

SEQ ID NO: 1839671 - RNA, 19 nt, Artificial Sequence
  Description of Artificial Sequence: Synthetic oligonucleotide
  Sense strand starting at position 3495 of SEQ ID NO: 1563888
cuggaaguuugauuaaaug

SEQ ID NO: 1839672 - RNA, 19 nt, Artificial Sequence
  Description of Artificial Sequence: Synthetic oligonucleotide
  Antisense strand to SEQ ID NO: 1839671
cauuuaaucaaacuuccag

SEQ ID NO: 1839673 - RNA, 19 nt, Artificial Sequence
  Description of Artificial Sequence: Synthetic oligonucleotide
  Sense strand starting at position 3572 of SEQ ID NO: 1563888
uccaaugaucuggguauag

SEQ ID NO: 1839674 - RNA, 19 nt, Artificial Sequence
  Description of Artificial Sequence: Synthetic oligonucleotide
  Antisense strand to SEQ ID NO: 1839673
cuauacccagaucauugga

SEQ ID NO: 1839675 - RNA, 19 nt, Artificial Sequence
  Description of Artificial Sequence: Synthetic oligonucleotide
  Sense strand starting at position 3588 of SEQ ID NO: 1563888
uagaguaaguacuuguaga

SEQ ID NO: 1839676 - RNA, 19 nt, Artificial Sequence
  Description of Artificial Sequence: Synthetic oligonucleotide
  Antisense strand to SEQ ID NO: 1839675
ucuacaaguacuuacucua

SEQ ID NO: 1839677 - RNA, 19 nt, Artificial Sequence
  Description of Artificial Sequence: Synthetic oligonucleotide
  Sense strand starting at position 3589 of SEQ ID NO: 1563888
agaguaaguacuuguagaa

SEQ ID NO: 1839678 - RNA, 19 nt, Artificial Sequence
  Description of Artificial Sequence: Synthetic oligonucleotide
  Antisense strand to SEQ ID NO: 1839677
uucuacaaguacuuacucu

SEQ ID NO: 1839679 - RNA, 19 nt, Artificial Sequence
  Description of Artificial Sequence: Synthetic oligonucleotide
  Sense strand starting at position 3638 of SEQ ID NO: 1563888
gucaguugugaauauauag

SEQ ID NO: 1839680 - RNA, 19 nt, Artificial Sequence
  Description of Artificial Sequence: Synthetic oligonucleotide
  Antisense strand to SEQ ID NO: 1839679
cuauauauucacaacugac

SEQ ID NO: 1839681 - RNA, 19 nt, Artificial Sequence
  Description of Artificial Sequence: Synthetic oligonucleotide
  Sense strand starting at position 3656 of SEQ ID NO: 1563888
gcaguauaauggguaaaga

SEQ ID NO: 1839682 - RNA, 19 nt, Artificial Sequence
  Description of Artificial Sequence: Synthetic oligonucleotide
  Antisense strand to SEQ ID NO: 1839681
ucuuuacccauuauacugc

SEQ ID NO: 1839683 - RNA, 19 nt, Artificial Sequence
  Description of Artificial Sequence: Synthetic oligonucleotide
  Sense strand starting at position 3754 of SEQ ID NO: 1563888
cuuuauagucacuacaagu

SEQ ID NO: 1839684 - RNA, 19 nt, Artificial Sequence
  Description of Artificial Sequence: Synthetic oligonucleotide
  Antisense strand to SEQ ID NO: 1839683
acuuguagugacuauaaag

SEQ ID NO: 1839685 - RNA, 19 nt, Artificial Sequence
  Description of Artificial Sequence: Synthetic oligonucleotide
  Sense strand starting at position 3865 of SEQ ID NO: 1563888
uucugugagcacuacucaa

SEQ ID NO: 1839686 - RNA, 19 nt, Artificial Sequence
  Description of Artificial Sequence: Synthetic oligonucleotide
  Antisense strand to SEQ ID NO: 1839685
uugaguagugcucacagaa

SEQ ID NO: 1839687 - RNA, 19 nt, Artificial Sequence
  Description of Artificial Sequence: Synthetic oligonucleotide
  Sense strand starting at position 3910 of SEQ ID NO: 1563888
auucuuguuagaggguaaa

SEQ ID NO: 1839688 - RNA, 19 nt, Artificial Sequence
  Description of Artificial Sequence: Synthetic oligonucleotide
  Antisense strand to SEQ ID NO: 1839687
uuuacccucuaacaagaau

SEQ ID NO: 1839689 - RNA, 19 nt, Artificial Sequence
  Description of Artificial Sequence: Synthetic oligonucleotide
  Sense strand starting at position 216 of SEQ ID NO: 1563889
ccaauaacaucagggauuu

SEQ ID NO: 1839690 - RNA, 19 nt, Artificial Sequence
  Description of Artificial Sequence: Synthetic oligonucleotide
  Antisense strand to SEQ ID NO: 1839689
aaaucccugauguuauugg

SEQ ID NO: 1839691 - RNA, 19 nt, Artificial Sequence
  Description of Artificial Sequence: Synthetic oligonucleotide
  Sense strand starting at position 325 of SEQ ID NO: 1563889
ugccuaauuucugccugua

SEQ ID NO: 1839692 - RNA, 19 nt, Artificial Sequence
  Description of Artificial Sequence: Synthetic oligonucleotide
  Antisense strand to SEQ ID NO: 1839691
uacaggcagaaauuaggca

SEQ ID NO: 1839693 - RNA, 19 nt, Artificial Sequence
  Description of Artificial Sequence: Synthetic oligonucleotide
  Sense strand starting at position 353 of SEQ ID NO: 1563889
cucccuugggcauaaauaa

SEQ ID NO: 1839694 - RNA, 19 nt, Artificial Sequence
  Description of Artificial Sequence: Synthetic oligonucleotide
  Antisense strand to SEQ ID NO: 1839693
uuauuuaugcccaagggag

SEQ ID NO: 1839695 - RNA, 19 nt, Artificial Sequence
  Description of Artificial Sequence: Synthetic oligonucleotide
  Sense strand starting at position 501 of SEQ ID NO: 1563889
uggaaccagcuauauuauu

SEQ ID NO: 1839696 - RNA, 19 nt, Artificial Sequence
  Description of Artificial Sequence: Synthetic oligonucleotide
  Antisense strand to SEQ ID NO: 1839695
aauaauauagcugguucca

SEQ ID NO: 1839697 - RNA, 19 nt, Artificial Sequence
  Description of Artificial Sequence: Synthetic oligonucleotide
  Sense strand starting at position 558 of SEQ ID NO: 1563889
uuugcaacucucuggaaca

SEQ ID NO: 1839698 - RNA, 19 nt, Artificial Sequence
  Description of Artificial Sequence: Synthetic oligonucleotide
  Antisense strand to SEQ ID NO: 1839697
uguuccagagaguugcaaa

SEQ ID NO: 1839699 - RNA, 19 nt, Artificial Sequence
  Description of Artificial Sequence: Synthetic oligonucleotide
  Sense strand starting at position 646 of SEQ ID NO: 1563889
uuccauauuuguucuaugu

SEQ ID NO: 1839700 - RNA, 19 nt, Artificial Sequence
  Description of Artificial Sequence: Synthetic oligonucleotide
  Antisense strand to SEQ ID NO: 1839699
acauagaacaaauauggaa

SEQ ID NO: 1839701 - RNA, 19 nt, Artificial Sequence
  Description of Artificial Sequence: Synthetic oligonucleotide
  Sense strand starting at position 650 of SEQ ID NO: 1563889
auauuuguucuaugucauc

SEQ ID NO: 1839702 - RNA, 19 nt, Artificial Sequence
  Description of Artificial Sequence: Synthetic oligonucleotide
  Antisense strand to SEQ ID NO: 1839701
gaugacauagaacaaauau

SEQ ID NO: 1839703 - RNA, 19 nt, Artificial Sequence
  Description of Artificial Sequence: Synthetic oligonucleotide
  Sense strand starting at position 656 of SEQ ID NO: 1563889
guucuaugucaucaacuga

SEQ ID NO: 1839704 - RNA, 19 nt, Artificial Sequence
  Description of Artificial Sequence: Synthetic oligonucleotide
  Antisense strand to SEQ ID NO: 1839703
ucaguugaugacauagaac

SEQ ID NO: 1839705 - RNA, 19 nt, Artificial Sequence
  Description of Artificial Sequence: Synthetic oligonucleotide
  Sense strand starting at position 670 of SEQ ID NO: 1563889
acugauguauaaucuagga

SEQ ID NO: 1839706 - RNA, 19 nt, Artificial Sequence
  Description of Artificial Sequence: Synthetic oligonucleotide
  Antisense strand to SEQ ID NO: 1839705
uccuagauuauacaucagu

SEQ ID NO: 1839707 - RNA, 19 nt, Artificial Sequence
  Description of Artificial Sequence: Synthetic oligonucleotide
  Sense strand starting at position 674 of SEQ ID NO: 1563889
auguauaaucuaggauggu

SEQ ID NO: 1839708 - RNA, 19 nt, Artificial Sequence
  Description of Artificial Sequence: Synthetic oligonucleotide
  Antisense strand to SEQ ID NO: 1839707
accauccuagauuauacau

SEQ ID NO: 1839709 - RNA, 19 nt, Artificial Sequence
  Description of Artificial Sequence: Synthetic oligonucleotide
  Sense strand starting at position 677 of SEQ ID NO: 1563889
uauaaucuaggaugguuua

SEQ ID NO: 1839710 - RNA, 19 nt, Artificial Sequence
  Description of Artificial Sequence: Synthetic oligonucleotide
  Antisense strand to SEQ ID NO: 1839709
uaaaccauccuagauuaua

SEQ ID NO: 1839711 - RNA, 19 nt, Artificial Sequence
  Description of Artificial Sequence: Synthetic oligonucleotide
  Sense strand starting at position 678 of SEQ ID NO: 1563889
auaaucuaggaugguuuaa

SEQ ID NO: 1839712 - RNA, 19 nt, Artificial Sequence
  Description of Artificial Sequence: Synthetic oligonucleotide
  Antisense strand to SEQ ID NO: 1839711
uuaaaccauccuagauuau

SEQ ID NO: 1839713 - RNA, 19 nt, Artificial Sequence
  Description of Artificial Sequence: Synthetic oligonucleotide
  Sense strand starting at position 810 of SEQ ID NO: 1563889
agacaugcuagaugguuua

SEQ ID NO: 1839714 - RNA, 19 nt, Artificial Sequence
  Description of Artificial Sequence: Synthetic oligonucleotide
  Antisense strand to SEQ ID NO: 1839713
uaaaccaucuagcaugucu

SEQ ID NO: 1839715 - RNA, 19 nt, Artificial Sequence
  Description of Artificial Sequence: Synthetic oligonucleotide
  Sense strand starting at position 1040 of SEQ ID NO: 1563889
ucaguuaaguaccugacaa

SEQ ID NO: 1839716 - RNA, 19 nt, Artificial Sequence
  Description of Artificial Sequence: Synthetic oligonucleotide
  Antisense strand to SEQ ID NO: 1839715
uugucagguacuuaacuga

SEQ ID NO: 1839717 - RNA, 19 nt, Artificial Sequence
  Description of Artificial Sequence: Synthetic oligonucleotide
  Sense strand starting at position 1042 of SEQ ID NO: 1563889
aguuaaguaccugacaacu

SEQ ID NO: 1839718 - RNA, 19 nt, Artificial Sequence
  Description of Artificial Sequence: Synthetic oligonucleotide
  Antisense strand to SEQ ID NO: 1839717
aguugucagguacuuaacu

SEQ ID NO: 1839719 - RNA, 19 nt, Artificial Sequence
  Description of Artificial Sequence: Synthetic oligonucleotide
  Sense strand starting at position 1058 of SEQ ID NO: 1563889
acucaaguaucugugacau

SEQ ID NO: 1839720 - RNA, 19 nt, Artificial Sequence
  Description of Artificial Sequence: Synthetic oligonucleotide
  Antisense strand to SEQ ID NO: 1839719
augucacagauacuugagu

SEQ ID NO: 1839721 - RNA, 19 nt, Artificial Sequence
  Description of Artificial Sequence: Synthetic oligonucleotide
  Sense strand starting at position 1121 of SEQ ID NO: 1563889
gguacuuugcaagauacag

SEQ ID NO: 1839722 - RNA, 19 nt, Artificial Sequence
  Description of Artificial Sequence: Synthetic oligonucleotide
  Antisense strand to SEQ ID NO: 1839721
cuguaucuugcaaaguacc

SEQ ID NO: 1839723 - RNA, 19 nt, Artificial Sequence
  Description of Artificial Sequence: Synthetic oligonucleotide
  Sense strand starting at position 1143 of SEQ ID NO: 1563889
gggauaagaacuuguucca

SEQ ID NO: 1839724 - RNA, 19 nt, Artificial Sequence
  Description of Artificial Sequence: Synthetic oligonucleotide
  Antisense strand to SEQ ID NO: 1839723
uggaacaaguucuuauccc

SEQ ID NO: 1839725 - RNA, 19 nt, Artificial Sequence
  Description of Artificial Sequence: Synthetic oligonucleotide
  Sense strand starting at position 1146 of SEQ ID NO: 1563889
auaagaacuuguuccagca

SEQ ID NO: 1839726 - RNA, 19 nt, Artificial Sequence
  Description of Artificial Sequence: Synthetic oligonucleotide
  Antisense strand to SEQ ID NO: 1839725
ugcuggaacaaguucuuau

SEQ ID NO: 1839727 - RNA, 19 nt, Artificial Sequence
  Description of Artificial Sequence: Synthetic oligonucleotide
  Sense strand starting at position 1364 of SEQ ID NO: 1563889
acaaguauccugcaaguuc

SEQ ID NO: 1839728 - RNA, 19 nt, Artificial Sequence
  Description of Artificial Sequence: Synthetic oligonucleotide
  Antisense strand to SEQ ID NO: 1839727
gaacuugcaggauacuugu

SEQ ID NO: 1839729 - RNA, 19 nt, Artificial Sequence
  Description of Artificial Sequence: Synthetic oligonucleotide
  Sense strand starting at position 1486 of SEQ ID NO: 1563889
cggcuugucauggagagga

SEQ ID NO: 1839730 - RNA, 19 nt, Artificial Sequence
  Description of Artificial Sequence: Synthetic oligonucleotide
  Antisense strand to SEQ ID NO: 1839729
uccucuccaugacaagccg

SEQ ID NO: 1839731 - RNA, 19 nt, Artificial Sequence
  Description of Artificial Sequence: Synthetic oligonucleotide
  Sense strand starting at position 1709 of SEQ ID NO: 1563889
ggcgugauucuggauggga

SEQ ID NO: 1839732 - RNA, 19 nt, Artificial Sequence
  Description of Artificial Sequence: Synthetic oligonucleotide
  Antisense strand to SEQ ID NO: 1839731
ucccauccagaaucacgcc

SEQ ID NO: 1839733 - RNA, 19 nt, Artificial Sequence
  Description of Artificial Sequence: Synthetic oligonucleotide
  Sense strand starting at position 1711 of SEQ ID NO: 1563889
cgugauucuggaugggaga

SEQ ID NO: 1839734 - RNA, 19 nt, Artificial Sequence
  Description of Artificial Sequence: Synthetic oligonucleotide
  Antisense strand to SEQ ID NO: 1839733
ucucccauccagaaucacg

SEQ ID NO: 1839735 - RNA, 19 nt, Artificial Sequence
  Description of Artificial Sequence: Synthetic oligonucleotide
  Sense strand starting at position 2557 of SEQ ID NO: 1563889
uugcaaugauaauuggauu

SEQ ID NO: 1839736 - RNA, 19 nt, Artificial Sequence
  Description of Artificial Sequence: Synthetic oligonucleotide
  Antisense strand to SEQ ID NO: 1839735
aauccaauuaucauugcaa

SEQ ID NO: 1839737 - RNA, 19 nt, Artificial Sequence
  Description of Artificial Sequence: Synthetic oligonucleotide
  Sense strand starting at position 2634 of SEQ ID NO: 1563889
gugugagaugcuuaaugag

SEQ ID NO: 1839738 - RNA, 19 nt, Artificial Sequence
  Description of Artificial Sequence: Synthetic oligonucleotide
  Antisense strand to SEQ ID NO: 1839737
cucauuaagcaucucacac

SEQ ID NO: 1839739 - RNA, 19 nt, Artificial Sequence
  Description of Artificial Sequence: Synthetic oligonucleotide
  Sense strand starting at position 2705 of SEQ ID NO: 1563889
gcguguuucggcuuauuaa

SEQ ID NO: 1839740 - RNA, 19 nt, Artificial Sequence
  Description of Artificial Sequence: Synthetic oligonucleotide
  Antisense strand to SEQ ID NO: 1839739
uuaauaagccgaaacacgc

SEQ ID NO: 1839741 - RNA, 19 nt, Artificial Sequence
  Description of Artificial Sequence: Synthetic oligonucleotide
  Sense strand starting at position 2846 of SEQ ID NO: 1563889
aagagaugcucacuggcua

SEQ ID NO: 1839742 - RNA, 19 nt, Artificial Sequence
  Description of Artificial Sequence: Synthetic oligonucleotide
  Antisense strand to SEQ ID NO: 1839741
uagccagugagcaucucuu

SEQ ID NO: 1839743 - RNA, 19 nt, Artificial Sequence
  Description of Artificial Sequence: Synthetic oligonucleotide
  Sense strand starting at position 2858 of SEQ ID NO: 1563889
cuggcuacuaguggauaga

SEQ ID NO: 1839744 - RNA, 19 nt, Artificial Sequence
  Description of Artificial Sequence: Synthetic oligonucleotide
  Antisense strand to SEQ ID NO: 1839743
ucuauccacuaguagccag

SEQ ID NO: 1839745 - RNA, 19 nt, Artificial Sequence
  Description of Artificial Sequence: Synthetic oligonucleotide
  Sense strand starting at position 2891 of SEQ ID NO: 1563889
ccaaacauccuccagugua

SEQ ID NO: 1839746 - RNA, 19 nt, Artificial Sequence
  Description of Artificial Sequence: Synthetic oligonucleotide
  Antisense strand to SEQ ID NO: 1839745
uacacuggaggauguuugg

SEQ ID NO: 1839747 - RNA, 19 nt, Artificial Sequence
  Description of Artificial Sequence: Synthetic oligonucleotide
  Sense strand starting at position 3205 of SEQ ID NO: 1563889
gaacacauuguuuaaacgu

SEQ ID NO: 1839748 - RNA, 19 nt, Artificial Sequence
  Description of Artificial Sequence: Synthetic oligonucleotide
  Antisense strand to SEQ ID NO: 1839747
acguuuaaacaauguguuc

SEQ ID NO: 1839749 - RNA, 19 nt, Artificial Sequence
  Description of Artificial Sequence: Synthetic oligonucleotide
  Sense strand starting at position 3335 of SEQ ID NO: 1563889
gcaugaaauguuuacaguu

SEQ ID NO: 1839750 - RNA, 19 nt, Artificial Sequence
  Description of Artificial Sequence: Synthetic oligonucleotide
  Antisense strand to SEQ ID NO: 1839749
aacuguaaacauuucaugc

SEQ ID NO: 1839751 - RNA, 19 nt, Artificial Sequence
  Description of Artificial Sequence: Synthetic oligonucleotide
  Sense strand starting at position 3527 of SEQ ID NO: 1563889
auccaaagugcuuagagca

SEQ ID NO: 1839752 - RNA, 19 nt, Artificial Sequence
  Description of Artificial Sequence: Synthetic oligonucleotide
  Antisense strand to SEQ ID NO: 1839751
ugcucuaagcacuuuggau

SEQ ID NO: 1839753 - RNA, 19 nt, Artificial Sequence
  Description of Artificial Sequence: Synthetic oligonucleotide
  Sense strand starting at position 3616 of SEQ ID NO: 1563889
agggacuguagucauugua

SEQ ID NO: 1839754 - RNA, 19 nt, Artificial Sequence
  Description of Artificial Sequence: Synthetic oligonucleotide
  Antisense strand to SEQ ID NO: 1839753
uacaaugacuacagucccu

SEQ ID NO: 1839755 - RNA, 19 nt, Artificial Sequence
  Description of Artificial Sequence: Synthetic oligonucleotide
  Sense strand starting at position 3624 of SEQ ID NO: 1563889
uagucauuguagguaaaua

SEQ ID NO: 1839756 - RNA, 19 nt, Artificial Sequence
  Description of Artificial Sequence: Synthetic oligonucleotide
  Antisense strand to SEQ ID NO: 1839755
uauuuaccuacaaugacua

SEQ ID NO: 1839757 - RNA, 19 nt, Artificial Sequence
  Description of Artificial Sequence: Synthetic oligonucleotide
  Sense strand starting at position 3625 of SEQ ID NO: 1563889
agucauuguagguaaauag

SEQ ID NO: 1839758 - RNA, 19 nt, Artificial Sequence
  Description of Artificial Sequence: Synthetic oligonucleotide
  Antisense strand to SEQ ID NO: 1839757
cuauuuaccuacaaugacu

SEQ ID NO: 1839759 - RNA, 19 nt, Artificial Sequence
  Description of Artificial Sequence: Synthetic oligonucleotide
  Sense strand starting at position 3691 of SEQ ID NO: 1563889
aguguacauuugucugcaa

SEQ ID NO: 1839760 - RNA, 19 nt, Artificial Sequence
  Description of Artificial Sequence: Synthetic oligonucleotide
  Antisense strand to SEQ ID NO: 1839759
uugcagacaaauguacacu

SEQ ID NO: 1839761 - RNA, 19 nt, Artificial Sequence
  Description of Artificial Sequence: Synthetic oligonucleotide
  Sense strand starting at position 3693 of SEQ ID NO: 1563889
uguacauuugucugcaacu

SEQ ID NO: 1839762 - RNA, 19 nt, Artificial Sequence
  Description of Artificial Sequence: Synthetic oligonucleotide
  Antisense strand to SEQ ID NO: 1839761
aguugcagacaaauguaca

SEQ ID NO: 1839763 - RNA, 19 nt, Artificial Sequence
  Description of Artificial Sequence: Synthetic oligonucleotide
  Sense strand starting at position 3907 of SEQ ID NO: 1563889
gagcuucuagagcaaugua

SEQ ID NO: 1839764 - RNA, 19 nt, Artificial Sequence
  Description of Artificial Sequence: Synthetic oligonucleotide
  Antisense strand to SEQ ID NO: 1839763
uacauugcucuagaagcuc

SEQ ID NO: 1839765 - RNA, 19 nt, Artificial Sequence
  Description of Artificial Sequence: Synthetic oligonucleotide
  Sense strand starting at position 3951 of SEQ ID NO: 1563889
cuggguuuauaucuacaaa

SEQ ID NO: 1839766 - RNA, 19 nt, Artificial Sequence
  Description of Artificial Sequence: Synthetic oligonucleotide
  Antisense strand to SEQ ID NO: 1839765
uuuguagauauaaacccag

SEQ ID NO: 1839767 - RNA, 19 nt, Artificial Sequence
  Description of Artificial Sequence: Synthetic oligonucleotide
  Sense strand starting at position 3969 of SEQ ID NO: 1563889
augaaacuacuggguauau

SEQ ID NO: 1839768 - RNA, 19 nt, Artificial Sequence
  Description of Artificial Sequence: Synthetic oligonucleotide
  Antisense strand to SEQ ID NO: 1839767
auauacccaguaguuucau

SEQ ID NO: 1839769 - RNA, 19 nt, Artificial Sequence
  Description of Artificial Sequence: Synthetic oligonucleotide
  Sense strand starting at position 24 of SEQ ID NO: 1563890
gggcuaucucuuggaacac

SEQ ID NO: 1839770 - RNA, 19 nt, Artificial Sequence
  Description of Artificial Sequence: Synthetic oligonucleotide
  Antisense strand to SEQ ID NO: 1839769
guguuccaagagauagccc

SEQ ID NO: 1839771 - RNA, 19 nt, Artificial Sequence
  Description of Artificial Sequence: Synthetic oligonucleotide
  Sense strand starting at position 286 of SEQ ID NO: 1563890
ugauuacacggccauagau

SEQ ID NO: 1839772 - RNA, 19 nt, Artificial Sequence
  Description of Artificial Sequence: Synthetic oligonucleotide
  Antisense strand to SEQ ID NO: 1839771
aucuauggccguguaauca

SEQ ID NO: 1839773 - RNA, 19 nt, Artificial Sequence
  Description of Artificial Sequence: Synthetic oligonucleotide
  Sense strand starting at position 288 of SEQ ID NO: 1563890
auuacacggccauagauaa

SEQ ID NO: 1839774 - RNA, 19 nt, Artificial Sequence
  Description of Artificial Sequence: Synthetic oligonucleotide
  Antisense strand to SEQ ID NO: 1839773
uuaucuauggccguguaau

SEQ ID NO: 1839775 - RNA, 19 nt, Artificial Sequence
  Description of Artificial Sequence: Synthetic oligonucleotide
  Sense strand starting at position 414 of SEQ ID NO: 1563890
gaggacuucugcuuuaaug

SEQ ID NO: 1839776 - RNA, 19 nt, Artificial Sequence
  Description of Artificial Sequence: Synthetic oligonucleotide
  Antisense strand to SEQ ID NO: 1839775
cauuaaagcagaaguccuc

SEQ ID NO: 1839777 - RNA, 19 nt, Artificial Sequence
  Description of Artificial Sequence: Synthetic oligonucleotide
  Sense strand starting at position 424 of SEQ ID NO: 1563890
gcuuuaaugccagagaaga

SEQ ID NO: 1839778 - RNA, 19 nt, Artificial Sequence
  Description of Artificial Sequence: Synthetic oligonucleotide
  Antisense strand to SEQ ID NO: 1839777
ucuucucuggcauuaaagc

SEQ ID NO: 1839779 - RNA, 19 nt, Artificial Sequence
  Description of Artificial Sequence: Synthetic oligonucleotide
  Sense strand starting at position 656 of SEQ ID NO: 1563890
ggucaaaucguagagggca

SEQ ID NO: 1839780 - RNA, 19 nt, Artificial Sequence
  Description of Artificial Sequence: Synthetic oligonucleotide
  Antisense strand to SEQ ID NO: 1839779
ugcccucuacgauuugacc

SEQ ID NO: 1839781 - RNA, 19 nt, Artificial Sequence
  Description of Artificial Sequence: Synthetic oligonucleotide
  Sense strand starting at position 688 of SEQ ID NO: 1563890
agguaauggccuuagccua

SEQ ID NO: 1839782 - RNA, 19 nt, Artificial Sequence
  Description of Artificial Sequence: Synthetic oligonucleotide
  Antisense strand to SEQ ID NO: 1839781
uaggcuaaggccauuaccu

SEQ ID NO: 1839783 - RNA, 19 nt, Artificial Sequence
  Description of Artificial Sequence: Synthetic oligonucleotide
  Sense strand starting at position 745 of SEQ ID NO: 1563890
ggcucugugguuuaagaau

SEQ ID NO: 1839784 - RNA, 19 nt, Artificial Sequence
  Description of Artificial Sequence: Synthetic oligonucleotide
  Antisense strand to SEQ ID NO: 1839783
auucuuaaaccacagagcc

SEQ ID NO: 1839785 - RNA, 19 nt, Artificial Sequence
  Description of Artificial Sequence: Synthetic oligonucleotide
  Sense strand starting at position 753 of SEQ ID NO: 1563890
gguuuaagaauccguagga

SEQ ID NO: 1839786 - RNA, 19 nt, Artificial Sequence
  Description of Artificial Sequence: Synthetic oligonucleotide
  Antisense strand to SEQ ID NO: 1839785
uccuacggauucuuaaacc

SEQ ID NO: 1839787 - RNA, 19 nt, Artificial Sequence
  Description of Artificial Sequence: Synthetic oligonucleotide
  Sense strand starting at position 754 of SEQ ID NO: 1563890
guuuaagaauccguaggaa

SEQ ID NO: 1839788 - RNA, 19 nt, Artificial Sequence
  Description of Artificial Sequence: Synthetic oligonucleotide
  Antisense strand to SEQ ID NO: 1839787
uuccuacggauucuuaaac

SEQ ID NO: 1839789 - RNA, 19 nt, Artificial Sequence
  Description of Artificial Sequence: Synthetic oligonucleotide
  Sense strand starting at position 854 of SEQ ID NO: 1563890
cagaguugauagguaacca

SEQ ID NO: 1839790 - RNA, 19 nt, Artificial Sequence
  Description of Artificial Sequence: Synthetic oligonucleotide
  Antisense strand to SEQ ID NO: 1839789
ugguuaccuaucaacucug

SEQ ID NO: 1839791 - RNA, 19 nt, Artificial Sequence
  Description of Artificial Sequence: Synthetic oligonucleotide
  Sense strand starting at position 951 of SEQ ID NO: 1563890
ccuagaauccaggguugau

SEQ ID NO: 1839792 - RNA, 19 nt, Artificial Sequence
  Description of Artificial Sequence: Synthetic oligonucleotide
  Antisense strand to SEQ ID NO: 1839791
aucaacccuggauucuagg

SEQ ID NO: 1839793 - RNA, 19 nt, Artificial Sequence
  Description of Artificial Sequence: Synthetic oligonucleotide
  Sense strand starting at position 967 of SEQ ID NO: 1563890
gauggcaauuguccucaga

SEQ ID NO: 1839794 - RNA, 19 nt, Artificial Sequence
  Description of Artificial Sequence: Synthetic oligonucleotide
  Antisense strand to SEQ ID NO: 1839793
ucugaggacaauugccauc

SEQ ID NO: 1839795 - RNA, 19 nt, Artificial Sequence
  Description of Artificial Sequence: Synthetic oligonucleotide
  Sense strand starting at position 969 of SEQ ID NO: 1563890
uggcaauuguccucagaau

SEQ ID NO: 1839796 - RNA, 19 nt, Artificial Sequence
  Description of Artificial Sequence: Synthetic oligonucleotide
  Antisense strand to SEQ ID NO: 1839795
auucugaggacaauugcca

SEQ ID NO: 1839797 - RNA, 19 nt, Artificial Sequence
  Description of Artificial Sequence: Synthetic oligonucleotide
  Sense strand starting at position 970 of SEQ ID NO: 1563890
ggcaauuguccucagaauu

SEQ ID NO: 1839798 - RNA, 19 nt, Artificial Sequence
  Description of Artificial Sequence: Synthetic oligonucleotide
  Antisense strand to SEQ ID NO: 1839797
aauucugaggacaauugcc

SEQ ID NO: 1839799 - RNA, 19 nt, Artificial Sequence
  Description of Artificial Sequence: Synthetic oligonucleotide
  Sense strand starting at position 1035 of SEQ ID NO: 1563890
aagagauccuagguucucu

SEQ ID NO: 1839800 - RNA, 19 nt, Artificial Sequence
  Description of Artificial Sequence: Synthetic oligonucleotide
  Antisense strand to SEQ ID NO: 1839799
agagaaccuaggaucucuu

SEQ ID NO: 1839801 - RNA, 19 nt, Artificial Sequence
  Description of Artificial Sequence: Synthetic oligonucleotide
  Sense strand starting at position 1226 of SEQ ID NO: 1563890
agaaauacguucccaagag

SEQ ID NO: 1839802 - RNA, 19 nt, Artificial Sequence
  Description of Artificial Sequence: Synthetic oligonucleotide
  Antisense strand to SEQ ID NO: 1839801
cucuugggaacguauuucu

SEQ ID NO: 1839803 - RNA, 19 nt, Artificial Sequence
  Description of Artificial Sequence: Synthetic oligonucleotide
  Sense strand starting at position 1230 of SEQ ID NO: 1563890
auacguucccaagagagcu

SEQ ID NO: 1839804 - RNA, 19 nt, Artificial Sequence
  Description of Artificial Sequence: Synthetic oligonucleotide
  Antisense strand to SEQ ID NO: 1839803
agcucucuugggaacguau

SEQ ID NO: 1839805 - RNA, 19 nt, Artificial Sequence
  Description of Artificial Sequence: Synthetic oligonucleotide
  Sense strand starting at position 1269 of SEQ ID NO: 1563890
cuacgaguuagugaauacu

SEQ ID NO: 1839806 - RNA, 19 nt, Artificial Sequence
  Description of Artificial Sequence: Synthetic oligonucleotide
  Antisense strand to SEQ ID NO: 1839805
aguauucacuaacucguag

SEQ ID NO: 1839807 - RNA, 19 nt, Artificial Sequence
  Description of Artificial Sequence: Synthetic oligonucleotide
  Sense strand starting at position 1277 of SEQ ID NO: 1563890
uagugaauacugugaagug

SEQ ID NO: 1839808 - RNA, 19 nt, Artificial Sequence
  Description of Artificial Sequence: Synthetic oligonucleotide
  Antisense strand to SEQ ID NO: 1839807
cacuucacaguauucacua

SEQ ID NO: 1839809 - RNA, 19 nt, Artificial Sequence
  Description of Artificial Sequence: Synthetic oligonucleotide
  Sense strand starting at position 1326 of SEQ ID NO: 1563890
aaacuaucuugaguugcag

SEQ ID NO: 1839810 - RNA, 19 nt, Artificial Sequence
  Description of Artificial Sequence: Synthetic oligonucleotide
  Antisense strand to SEQ ID NO: 1839809
cugcaacucaagauaguuu

SEQ ID NO: 1839811 - RNA, 19 nt, Artificial Sequence
  Description of Artificial Sequence: Synthetic oligonucleotide
  Sense strand starting at position 2153 of SEQ ID NO: 1563890
gccgcuguucugucggaau

SEQ ID NO: 1839812 - RNA, 19 nt, Artificial Sequence
  Description of Artificial Sequence: Synthetic oligonucleotide
  Antisense strand to SEQ ID NO: 1839811
auuccgacagaacagcggc

SEQ ID NO: 1839813 - RNA, 19 nt, Artificial Sequence
  Description of Artificial Sequence: Synthetic oligonucleotide
  Sense strand starting at position 2200 of SEQ ID NO: 1563890
ucgcguugacuaccguaaa

SEQ ID NO: 1839814 - RNA, 19 nt, Artificial Sequence
  Description of Artificial Sequence: Synthetic oligonucleotide
  Antisense strand to SEQ ID NO: 1839813
uuuacgguagucaacgcga

SEQ ID NO: 1839815 - RNA, 19 nt, Artificial Sequence
  Description of Artificial Sequence: Synthetic oligonucleotide
  Sense strand starting at position 2379 of SEQ ID NO: 1563890
uguaaagugcuccagacua

SEQ ID NO: 1839816 - RNA, 19 nt, Artificial Sequence
  Description of Artificial Sequence: Synthetic oligonucleotide
  Antisense strand to SEQ ID NO: 1839815
uagucuggagcacuuuaca

SEQ ID NO: 1839817 - RNA, 19 nt, Artificial Sequence
  Description of Artificial Sequence: Synthetic oligonucleotide
  Sense strand starting at position 2486 of SEQ ID NO: 1563890
gcgguucugagagagugaa

SEQ ID NO: 1839818 - RNA, 19 nt, Artificial Sequence
  Description of Artificial Sequence: Synthetic oligonucleotide
  Antisense strand to SEQ ID NO: 1839817
uucacucucucagaaccgc

SEQ ID NO: 1839819 - RNA, 19 nt, Artificial Sequence
  Description of Artificial Sequence: Synthetic oligonucleotide
  Sense strand starting at position 2593 of SEQ ID NO: 1563890
guggguuugcccuugugca

SEQ ID NO: 1839820 - RNA, 19 nt, Artificial Sequence
  Description of Artificial Sequence: Synthetic oligonucleotide
  Antisense strand to SEQ ID NO: 1839819
ugcacaagggcaaacccac

SEQ ID NO: 1839821 - RNA, 19 nt, Artificial Sequence
  Description of Artificial Sequence: Synthetic oligonucleotide
  Sense strand starting at position 2623 of SEQ ID NO: 1563890
uguaaagugcuccagacag

SEQ ID NO: 1839822 - RNA, 19 nt, Artificial Sequence
  Description of Artificial Sequence: Synthetic oligonucleotide
  Antisense strand to SEQ ID NO: 1839821
cugucuggagcacuuuaca

SEQ ID NO: 1839823 - RNA, 19 nt, Artificial Sequence
  Description of Artificial Sequence: Synthetic oligonucleotide
  Sense strand starting at position 2625 of SEQ ID NO: 1563890
uaaagugcuccagacagca

SEQ ID NO: 1839824 - RNA, 19 nt, Artificial Sequence
  Description of Artificial Sequence: Synthetic oligonucleotide
  Antisense strand to SEQ ID NO: 1839823
ugcugucuggagcacuuua

SEQ ID NO: 1839825 - RNA, 19 nt, Artificial Sequence
  Description of Artificial Sequence: Synthetic oligonucleotide
  Sense strand starting at position 2921 of SEQ ID NO: 1563890
gacaguguugacuagaugu

SEQ ID NO: 1839826 - RNA, 19 nt, Artificial Sequence
  Description of Artificial Sequence: Synthetic oligonucleotide
  Antisense strand to SEQ ID NO: 1839825
acaucuagucaacacuguc

SEQ ID NO: 1839827 - RNA, 19 nt, Artificial Sequence
  Description of Artificial Sequence: Synthetic oligonucleotide
  Sense strand starting at position 2982 of SEQ ID NO: 1563890
acacaauuugccugagugu

SEQ ID NO: 1839828 - RNA, 19 nt, Artificial Sequence
  Description of Artificial Sequence: Synthetic oligonucleotide
  Antisense strand to SEQ ID NO: 1839827
acacucaggcaaauugugu

SEQ ID NO: 1839829 - RNA, 19 nt, Artificial Sequence
  Description of Artificial Sequence: Synthetic oligonucleotide
  Sense strand starting at position 2985 of SEQ ID NO: 1563890
caauuugccugaguguuac

SEQ ID NO: 1839830 - RNA, 19 nt, Artificial Sequence
  Description of Artificial Sequence: Synthetic oligonucleotide
  Antisense strand to SEQ ID NO: 1839829
guaacacucaggcaaauug

SEQ ID NO: 1839831 - RNA, 19 nt, Artificial Sequence
  Description of Artificial Sequence: Synthetic oligonucleotide
  Sense strand starting at position 2997 of SEQ ID NO: 1563890
guguuacuugcagacauag

SEQ ID NO: 1839832 - RNA, 19 nt, Artificial Sequence
  Description of Artificial Sequence: Synthetic oligonucleotide
  Antisense strand to SEQ ID NO: 1839831
cuaugucugcaaguaacac

SEQ ID NO: 1839833 - RNA, 19 nt, Artificial Sequence
  Description of Artificial Sequence: Synthetic oligonucleotide
  Sense strand starting at position 3098 of SEQ ID NO: 1563890
cuguaauaugcagagcaua

SEQ ID NO: 1839834 - RNA, 19 nt, Artificial Sequence
  Description of Artificial Sequence: Synthetic oligonucleotide
  Antisense strand to SEQ ID NO: 1839833
uaugcucugcauauuacag

SEQ ID NO: 1839835 - RNA, 19 nt, Artificial Sequence
  Description of Artificial Sequence: Synthetic oligonucleotide
  Sense strand starting at position 3297 of SEQ ID NO: 1563890
ucagaaugucuguaaguug

SEQ ID NO: 1839836 - RNA, 19 nt, Artificial Sequence
  Description of Artificial Sequence: Synthetic oligonucleotide
  Antisense strand to SEQ ID NO: 1839835
caacuuacagacauucuga

SEQ ID NO: 1839837 - RNA, 19 nt, Artificial Sequence
  Description of Artificial Sequence: Synthetic oligonucleotide
  Sense strand starting at position 3300 of SEQ ID NO: 1563890
gaaugucuguaaguuggau

SEQ ID NO: 1839838 - RNA, 19 nt, Artificial Sequence
  Description of Artificial Sequence: Synthetic oligonucleotide
  Antisense strand to SEQ ID NO: 1839837
auccaacuuacagacauuc

SEQ ID NO: 1839839 - RNA, 19 nt, Artificial Sequence
  Description of Artificial Sequence: Synthetic oligonucleotide
  Sense strand starting at position 3302 of SEQ ID NO: 1563890
augucuguaaguuggauuu

SEQ ID NO: 1839840 - RNA, 19 nt, Artificial Sequence
  Description of Artificial Sequence: Synthetic oligonucleotide
  Antisense strand to SEQ ID NO: 1839839
aaauccaacuuacagacau

SEQ ID NO: 1839841 - RNA, 19 nt, Artificial Sequence
  Description of Artificial Sequence: Synthetic oligonucleotide
  Sense strand starting at position 3308 of SEQ ID NO: 1563890
guaaguuggauuugucugu

SEQ ID NO: 1839842 - RNA, 19 nt, Artificial Sequence
  Description of Artificial Sequence: Synthetic oligonucleotide
  Antisense strand to SEQ ID NO: 1839841
acagacaaauccaacuuac

SEQ ID NO: 1839843 - RNA, 19 nt, Artificial Sequence
  Description of Artificial Sequence: Synthetic oligonucleotide
  Sense strand starting at position 3506 of SEQ ID NO: 1563890
aggcgugcggcuguaaauu

SEQ ID NO: 1839844 - RNA, 19 nt, Artificial Sequence
  Description of Artificial Sequence: Synthetic oligonucleotide
  Antisense strand to SEQ ID NO: 1839843
aauuuacagccgcacgccu

SEQ ID NO: 1839845 - RNA, 19 nt, Artificial Sequence
  Description of Artificial Sequence: Synthetic oligonucleotide
  Sense strand starting at position 3811 of SEQ ID NO: 1563890
cugccaacuucuccaggaa

SEQ ID NO: 1839846 - RNA, 19 nt, Artificial Sequence
  Description of Artificial Sequence: Synthetic oligonucleotide
  Antisense strand to SEQ ID NO: 1839845
uuccuggagaaguuggcag

SEQ ID NO: 1839847 - RNA, 19 nt, Artificial Sequence
  Description of Artificial Sequence: Synthetic oligonucleotide
  Sense strand starting at position 3930 of SEQ ID NO: 1563890
ggugguauucgugaauacu

SEQ ID NO: 1839848 - RNA, 19 nt, Artificial Sequence
  Description of Artificial Sequence: Synthetic oligonucleotide
  Antisense strand to SEQ ID NO: 1839847
aguauucacgaauaccacc

SEQ ID NO: 1839849 - RNA, 19 nt, Artificial Sequence
  Description of Artificial Sequence: Synthetic oligonucleotide
  Sense strand starting at position 120 of SEQ ID NO: 1563891
ccauguuccagguggagga

SEQ ID NO: 1839850 - RNA, 19 nt, Artificial Sequence
  Description of Artificial Sequence: Synthetic oligonucleotide
  Antisense strand to SEQ ID NO: 1839849
uccuccaccuggaacaugg

SEQ ID NO: 1839851 - RNA, 19 nt, Artificial Sequence
  Description of Artificial Sequence: Synthetic oligonucleotide
  Sense strand starting at position 274 of SEQ ID NO: 1563891
ugaauucuacuguaugcua

SEQ ID NO: 1839852 - RNA, 19 nt, Artificial Sequence
  Description of Artificial Sequence: Synthetic oligonucleotide
  Antisense strand to SEQ ID NO: 1839851
uagcauacaguagaauuca

SEQ ID NO: 1839853 - RNA, 19 nt, Artificial Sequence
  Description of Artificial Sequence: Synthetic oligonucleotide
  Sense strand starting at position 290 of SEQ ID NO: 1563891
cuaaguguaccucaauaag

SEQ ID NO: 1839854 - RNA, 19 nt, Artificial Sequence
  Description of Artificial Sequence: Synthetic oligonucleotide
  Antisense strand to SEQ ID NO: 1839853
cuuauugagguacacuuag

SEQ ID NO: 1839855 - RNA, 19 nt, Artificial Sequence
  Description of Artificial Sequence: Synthetic oligonucleotide
  Sense strand starting at position 293 of SEQ ID NO: 1563891
aguguaccucaauaagacu

SEQ ID NO: 1839856 - RNA, 19 nt, Artificial Sequence
  Description of Artificial Sequence: Synthetic oligonucleotide
  Antisense strand to SEQ ID NO: 1839855
agucuuauugagguacacu

SEQ ID NO: 1839857 - RNA, 19 nt, Artificial Sequence
  Description of Artificial Sequence: Synthetic oligonucleotide
  Sense strand starting at position 350 of SEQ ID NO: 1563891
cagccaagugaguacugau

SEQ ID NO: 1839858 - RNA, 19 nt, Artificial Sequence
  Description of Artificial Sequence: Synthetic oligonucleotide
  Antisense strand to SEQ ID NO: 1839857
aucaguacucacuuggcug

SEQ ID NO: 1839859 - RNA, 19 nt, Artificial Sequence
  Description of Artificial Sequence: Synthetic oligonucleotide
  Sense strand starting at position 469 of SEQ ID NO: 1563891
ccuguauuauuucugcacu

SEQ ID NO: 1839860 - RNA, 19 nt, Artificial Sequence
  Description of Artificial Sequence: Synthetic oligonucleotide
  Antisense strand to SEQ ID NO: 1839859
agugcagaaauaauacagg

SEQ ID NO: 1839861 - RNA, 19 nt, Artificial Sequence
  Description of Artificial Sequence: Synthetic oligonucleotide
  Sense strand starting at position 471 of SEQ ID NO: 1563891
uguauuauuucugcacuca

SEQ ID NO: 1839862 - RNA, 19 nt, Artificial Sequence
  Description of Artificial Sequence: Synthetic oligonucleotide
  Antisense strand to SEQ ID NO: 1839861
ugagugcagaaauaauaca

SEQ ID NO: 1839863 - RNA, 19 nt, Artificial Sequence
  Description of Artificial Sequence: Synthetic oligonucleotide
  Sense strand starting at position 523 of SEQ ID NO: 1563891
augacaggcaggugugaau

SEQ ID NO: 1839864 - RNA, 19 nt, Artificial Sequence
  Description of Artificial Sequence: Synthetic oligonucleotide
  Antisense strand to SEQ ID NO: 1839863
auucacaccugccugucau

SEQ ID NO: 1839865 - RNA, 19 nt, Artificial Sequence
  Description of Artificial Sequence: Synthetic oligonucleotide
  Sense strand starting at position 544 of SEQ ID NO: 1563891
cucacucgaguggaauaua

SEQ ID NO: 1839866 - RNA, 19 nt, Artificial Sequence
  Description of Artificial Sequence: Synthetic oligonucleotide
  Antisense strand to SEQ ID NO: 1839865
uauauuccacucgagugag

SEQ ID NO: 1839867 - RNA, 19 nt, Artificial Sequence
  Description of Artificial Sequence: Synthetic oligonucleotide
  Sense strand starting at position 622 of SEQ ID NO: 1563891
acuuguuuccuugaguuaa

SEQ ID NO: 1839868 - RNA, 19 nt, Artificial Sequence
  Description of Artificial Sequence: Synthetic oligonucleotide
  Antisense strand to SEQ ID NO: 1839867
uuaacucaaggaaacaagu

SEQ ID NO: 1839869 - RNA, 19 nt, Artificial Sequence
  Description of Artificial Sequence: Synthetic oligonucleotide
  Sense strand starting at position 666 of SEQ ID NO: 1563891
gcucuacugcuugccuuau

SEQ ID NO: 1839870 - RNA, 19 nt, Artificial Sequence
  Description of Artificial Sequence: Synthetic oligonucleotide
  Antisense strand to SEQ ID NO: 1839869
auaaggcaagcaguagagc

SEQ ID NO: 1839871 - RNA, 19 nt, Artificial Sequence
  Description of Artificial Sequence: Synthetic oligonucleotide
  Sense strand starting at position 718 of SEQ ID NO: 1563891
aucggaggguuacuguaaa

SEQ ID NO: 1839872 - RNA, 19 nt, Artificial Sequence
  Description of Artificial Sequence: Synthetic oligonucleotide
  Antisense strand to SEQ ID NO: 1839871
uuuacaguaacccuccgau

SEQ ID NO: 1839873 - RNA, 19 nt, Artificial Sequence
  Description of Artificial Sequence: Synthetic oligonucleotide
  Sense strand starting at position 792 of SEQ ID NO: 1563891
ccacuuauugggcacuuaa

SEQ ID NO: 1839874 - RNA, 19 nt, Artificial Sequence
  Description of Artificial Sequence: Synthetic oligonucleotide
  Antisense strand to SEQ ID NO: 1839873
uuaagugcccaauaagugg

SEQ ID NO: 1839875 - RNA, 19 nt, Artificial Sequence
  Description of Artificial Sequence: Synthetic oligonucleotide
  Sense strand starting at position 999 of SEQ ID NO: 1563891
ggcucauggcuccaaauga

SEQ ID NO: 1839876 - RNA, 19 nt, Artificial Sequence
  Description of Artificial Sequence: Synthetic oligonucleotide
  Antisense strand to SEQ ID NO: 1839875
ucauuuggagccaugagcc

SEQ ID NO: 1839877 - RNA, 19 nt, Artificial Sequence
  Description of Artificial Sequence: Synthetic oligonucleotide
  Sense strand starting at position 1007 of SEQ ID NO: 1563891
gcuccaaaugaguaaguga

SEQ ID NO: 1839878 - RNA, 19 nt, Artificial Sequence
  Description of Artificial Sequence: Synthetic oligonucleotide
  Antisense strand to SEQ ID NO: 1839877
ucacuuacucauuuggagc

SEQ ID NO: 1839879 - RNA, 19 nt, Artificial Sequence
  Description of Artificial Sequence: Synthetic oligonucleotide
  Sense strand starting at position 1320 of SEQ ID NO: 1563891
gagugagcucuuuagaacc

SEQ ID NO: 1839880 - RNA, 19 nt, Artificial Sequence
  Description of Artificial Sequence: Synthetic oligonucleotide
  Antisense strand to SEQ ID NO: 1839879
gguucuaaagagcucacuc

SEQ ID NO: 1839881 - RNA, 19 nt, Artificial Sequence
  Description of Artificial Sequence: Synthetic oligonucleotide
  Sense strand starting at position 1403 of SEQ ID NO: 1563891
gaccuacuccuugaugugu

SEQ ID NO: 1839882 - RNA, 19 nt, Artificial Sequence
  Description of Artificial Sequence: Synthetic oligonucleotide
  Antisense strand to SEQ ID NO: 1839881
acacaucaaggaguagguc

SEQ ID NO: 1839883 - RNA, 19 nt, Artificial Sequence
  Description of Artificial Sequence: Synthetic oligonucleotide
  Sense strand starting at position 1414 of SEQ ID NO: 1563891
ugauguguuccuuaaagac

SEQ ID NO: 1839884 - RNA, 19 nt, Artificial Sequence
  Description of Artificial Sequence: Synthetic oligonucleotide
  Antisense strand to SEQ ID NO: 1839883
gucuuuaaggaacacauca

SEQ ID NO: 1839885 - RNA, 19 nt, Artificial Sequence
  Description of Artificial Sequence: Synthetic oligonucleotide
  Sense strand starting at position 2105 of SEQ ID NO: 1563891
ugaggaagucguagcugua

SEQ ID NO: 1839886 - RNA, 19 nt, Artificial Sequence
  Description of Artificial Sequence: Synthetic oligonucleotide
  Antisense strand to SEQ ID NO: 1839885
uacagcuacgacuuccuca

SEQ ID NO: 1839887 - RNA, 19 nt, Artificial Sequence
  Description of Artificial Sequence: Synthetic oligonucleotide
  Sense strand starting at position 2312 of SEQ ID NO: 1563891
guaggugaacucuagacuc

SEQ ID NO: 1839888 - RNA, 19 nt, Artificial Sequence
  Description of Artificial Sequence: Synthetic oligonucleotide
  Antisense strand to SEQ ID NO: 1839887
gagucuagaguucaccuac

SEQ ID NO: 1839889 - RNA, 19 nt, Artificial Sequence
  Description of Artificial Sequence: Synthetic oligonucleotide
  Sense strand starting at position 2354 of SEQ ID NO: 1563891
agcauuacccuuugagauc

SEQ ID NO: 1839890 - RNA, 19 nt, Artificial Sequence
  Description of Artificial Sequence: Synthetic oligonucleotide
  Antisense strand to SEQ ID NO: 1839889
gaucucaaaggguaaugcu

SEQ ID NO: 1839891 - RNA, 19 nt, Artificial Sequence
  Description of Artificial Sequence: Synthetic oligonucleotide
  Sense strand starting at position 2368 of SEQ ID NO: 1563891
agaucuggacauugcgaaa

SEQ ID NO: 1839892 - RNA, 19 nt, Artificial Sequence
  Description of Artificial Sequence: Synthetic oligonucleotide
  Antisense strand to SEQ ID NO: 1839891
uuucgcaauguccagaucu

SEQ ID NO: 1839893 - RNA, 19 nt, Artificial Sequence
  Description of Artificial Sequence: Synthetic oligonucleotide
  Sense strand starting at position 2576 of SEQ ID NO: 1563891
gaggauuccuuagcauccu

SEQ ID NO: 1839894 - RNA, 19 nt, Artificial Sequence
  Description of Artificial Sequence: Synthetic oligonucleotide
  Antisense strand to SEQ ID NO: 1839893
aggaugcuaaggaauccuc

SEQ ID NO: 1839895 - RNA, 19 nt, Artificial Sequence
  Description of Artificial Sequence: Synthetic oligonucleotide
  Sense strand starting at position 2700 of SEQ ID NO: 1563891
guagccucacaguauuaga

SEQ ID NO: 1839896 - RNA, 19 nt, Artificial Sequence
  Description of Artificial Sequence: Synthetic oligonucleotide
  Antisense strand to SEQ ID NO: 1839895
ucuaauacugugaggcuac

SEQ ID NO: 1839897 - RNA, 19 nt, Artificial Sequence
  Description of Artificial Sequence: Synthetic oligonucleotide
  Sense strand starting at position 2756 of SEQ ID NO: 1563891
ccucaaagcuuccugggaa

SEQ ID NO: 1839898 - RNA, 19 nt, Artificial Sequence
  Description of Artificial Sequence: Synthetic oligonucleotide
  Antisense strand to SEQ ID NO: 1839897
uucccaggaagcuuugagg

SEQ ID NO: 1839899 - RNA, 19 nt, Artificial Sequence
  Description of Artificial Sequence: Synthetic oligonucleotide
  Sense strand starting at position 2759 of SEQ ID NO: 1563891
caaagcuuccugggaagga

SEQ ID NO: 1839900 - RNA, 19 nt, Artificial Sequence
  Description of Artificial Sequence: Synthetic oligonucleotide
  Antisense strand to SEQ ID NO: 1839899
uccuucccaggaagcuuug

SEQ ID NO: 1839901 - RNA, 19 nt, Artificial Sequence
  Description of Artificial Sequence: Synthetic oligonucleotide
  Sense strand starting at position 2957 of SEQ ID NO: 1563891
gauauugaggcauggauag

SEQ ID NO: 1839902 - RNA, 19 nt, Artificial Sequence
  Description of Artificial Sequence: Synthetic oligonucleotide
  Antisense strand to SEQ ID NO: 1839901
cuauccaugccucaauauc

SEQ ID NO: 1839903 - RNA, 19 nt, Artificial Sequence
  Description of Artificial Sequence: Synthetic oligonucleotide
  Sense strand starting at position 2969 of SEQ ID NO: 1563891
uggauagauuaauugagca

SEQ ID NO: 1839904 - RNA, 19 nt, Artificial Sequence
  Description of Artificial Sequence: Synthetic oligonucleotide
  Antisense strand to SEQ ID NO: 1839903
ugcucaauuaaucuaucca

SEQ ID NO: 1839905 - RNA, 19 nt, Artificial Sequence
  Description of Artificial Sequence: Synthetic oligonucleotide
  Sense strand starting at position 2977 of SEQ ID NO: 1563891
uuaauugagcaauggcaua

SEQ ID NO: 1839906 - RNA, 19 nt, Artificial Sequence
  Description of Artificial Sequence: Synthetic oligonucleotide
  Antisense strand to SEQ ID NO: 1839905
uaugccauugcucaauuaa

SEQ ID NO: 1839907 - RNA, 19 nt, Artificial Sequence
  Description of Artificial Sequence: Synthetic oligonucleotide
  Sense strand starting at position 3026 of SEQ ID NO: 1563891
aguauagaaaugugguaua

SEQ ID NO: 1839908 - RNA, 19 nt, Artificial Sequence
  Description of Artificial Sequence: Synthetic oligonucleotide
  Antisense strand to SEQ ID NO: 1839907
uauaccacauuucuauacu

SEQ ID NO: 1839909 - RNA, 19 nt, Artificial Sequence
  Description of Artificial Sequence: Synthetic oligonucleotide
  Sense strand starting at position 3054 of SEQ ID NO: 1563891
uggcauguuagguaaguaa

SEQ ID NO: 1839910 - RNA, 19 nt, Artificial Sequence
  Description of Artificial Sequence: Synthetic oligonucleotide
  Antisense strand to SEQ ID NO: 1839909
uuacuuaccuaacaugcca

SEQ ID NO: 1839911 - RNA, 19 nt, Artificial Sequence
  Description of Artificial Sequence: Synthetic oligonucleotide
  Sense strand starting at position 3057 of SEQ ID NO: 1563891
cauguuagguaaguaaaca

SEQ ID NO: 1839912 - RNA, 19 nt, Artificial Sequence
  Description of Artificial Sequence: Synthetic oligonucleotide
  Antisense strand to SEQ ID NO: 1839911
uguuuacuuaccuaacaug

SEQ ID NO: 1839913 - RNA, 19 nt, Artificial Sequence
  Description of Artificial Sequence: Synthetic oligonucleotide
  Sense strand starting at position 3423 of SEQ ID NO: 1563891
uccaauugcgaauauauaa

SEQ ID NO: 1839914 - RNA, 19 nt, Artificial Sequence
  Description of Artificial Sequence: Synthetic oligonucleotide
  Antisense strand to SEQ ID NO: 1839913
uuauauauucgcaauugga

SEQ ID NO: 1839915 - RNA, 19 nt, Artificial Sequence
  Description of Artificial Sequence: Synthetic oligonucleotide
  Sense strand starting at position 3522 of SEQ ID NO: 1563891
gacgcauauggccaauaaa

SEQ ID NO: 1839916 - RNA, 19 nt, Artificial Sequence
  Description of Artificial Sequence: Synthetic oligonucleotide
  Antisense strand to SEQ ID NO: 1839915
uuuauuggccauaugcguc

SEQ ID NO: 1839917 - RNA, 19 nt, Artificial Sequence
  Description of Artificial Sequence: Synthetic oligonucleotide
  Sense strand starting at position 3549 of SEQ ID NO: 1563891
uaaagagauguucgacauc

SEQ ID NO: 1839918 - RNA, 19 nt, Artificial Sequence
  Description of Artificial Sequence: Synthetic oligonucleotide
  Antisense strand to SEQ ID NO: 1839917
gaugucgaacaucucuuua

SEQ ID NO: 1839919 - RNA, 19 nt, Artificial Sequence
  Description of Artificial Sequence: Synthetic oligonucleotide
  Sense strand starting at position 3552 of SEQ ID NO: 1563891
agagauguucgacaucauu

SEQ ID NO: 1839920 - RNA, 19 nt, Artificial Sequence
  Description of Artificial Sequence: Synthetic oligonucleotide
  Antisense strand to SEQ ID NO: 1839919
aaugaugucgaacaucucu

SEQ ID NO: 1839921 - RNA, 19 nt, Artificial Sequence
  Description of Artificial Sequence: Synthetic oligonucleotide
  Sense strand starting at position 3558 of SEQ ID NO: 1563891
guucgacaucauuagugau

SEQ ID NO: 1839922 - RNA, 19 nt, Artificial Sequence
  Description of Artificial Sequence: Synthetic oligonucleotide
  Antisense strand to SEQ ID NO: 1839921
aucacuaaugaugucgaac

SEQ ID NO: 1839923 - RNA, 19 nt, Artificial Sequence
  Description of Artificial Sequence: Synthetic oligonucleotide
  Sense strand starting at position 3560 of SEQ ID NO: 1563891
ucgacaucauuagugauca

SEQ ID NO: 1839924 - RNA, 19 nt, Artificial Sequence
  Description of Artificial Sequence: Synthetic oligonucleotide
  Antisense strand to SEQ ID NO: 1839923
ugaucacuaaugaugucga

SEQ ID NO: 1839925 - RNA, 19 nt, Artificial Sequence
  Description of Artificial Sequence: Synthetic oligonucleotide
  Sense strand starting at position 3564 of SEQ ID NO: 1563891
caucauuagugaucaggaa

SEQ ID NO: 1839926 - RNA, 19 nt, Artificial Sequence
  Description of Artificial Sequence: Synthetic oligonucleotide
  Antisense strand to SEQ ID NO: 1839925
uuccugaucacuaaugaug

SEQ ID NO: 1839927 - RNA, 19 nt, Artificial Sequence
  Description of Artificial Sequence: Synthetic oligonucleotide
  Sense strand starting at position 3693 of SEQ ID NO: 1563891
uugaauauugcugguggga

SEQ ID NO: 1839928 - RNA, 19 nt, Artificial Sequence
  Description of Artificial Sequence: Synthetic oligonucleotide
  Antisense strand to SEQ ID NO: 1839927
ucccaccagcaauauucaa

SEQ ID NO: 1839929 - RNA, 19 nt, Artificial Sequence
  Description of Artificial Sequence: Synthetic oligonucleotide
  Sense strand starting at position 204 of SEQ ID NO: 1563892
ucaguacuuuaguuugaua

SEQ ID NO: 1839930 - RNA, 19 nt, Artificial Sequence
  Description of Artificial Sequence: Synthetic oligonucleotide
  Antisense strand to SEQ ID NO: 1839929
uaucaaacuaaaguacuga

SEQ ID NO: 1839931 - RNA, 19 nt, Artificial Sequence
  Description of Artificial Sequence: Synthetic oligonucleotide
  Sense strand starting at position 206 of SEQ ID NO: 1563892
aguacuuuaguuugauaug

SEQ ID NO: 1839932 - RNA, 19 nt, Artificial Sequence
  Description of Artificial Sequence: Synthetic oligonucleotide
  Antisense strand to SEQ ID NO: 1839931
cauaucaaacuaaaguacu

SEQ ID NO: 1839933 - RNA, 19 nt, Artificial Sequence
  Description of Artificial Sequence: Synthetic oligonucleotide
  Sense strand starting at position 410 of SEQ ID NO: 1563892
aguaacuauucgucacaau

SEQ ID NO: 1839934 - RNA, 19 nt, Artificial Sequence
  Description of Artificial Sequence: Synthetic oligonucleotide
  Antisense strand to SEQ ID NO: 1839933
auugugacgaauaguuacu

SEQ ID NO: 1839935 - RNA, 19 nt, Artificial Sequence
  Description of Artificial Sequence: Synthetic oligonucleotide
  Sense strand starting at position 411 of SEQ ID NO: 1563892
guaacuauucgucacaaua

SEQ ID NO: 1839936 - RNA, 19 nt, Artificial Sequence
  Description of Artificial Sequence: Synthetic oligonucleotide
  Antisense strand to SEQ ID NO: 1839935
uauugugacgaauaguuac

SEQ ID NO: 1839937 - RNA, 19 nt, Artificial Sequence
  Description of Artificial Sequence: Synthetic oligonucleotide
  Sense strand starting at position 475 of SEQ ID NO: 1563892
cucuacaaguguuucuaaa

SEQ ID NO: 1839938 - RNA, 19 nt, Artificial Sequence
  Description of Artificial Sequence: Synthetic oligonucleotide
  Antisense strand to SEQ ID NO: 1839937
uuuagaaacacuuguagag

SEQ ID NO: 1839939 - RNA, 19 nt, Artificial Sequence
  Description of Artificial Sequence: Synthetic oligonucleotide
  Sense strand starting at position 567 of SEQ ID NO: 1563892
cuuaaagaaguuugcaaug

SEQ ID NO: 1839940 - RNA, 19 nt, Artificial Sequence
  Description of Artificial Sequence: Synthetic oligonucleotide
  Antisense strand to SEQ ID NO: 1839939
cauugcaaacuucuuuaag

SEQ ID NO: 1839941 - RNA, 19 nt, Artificial Sequence
  Description of Artificial Sequence: Synthetic oligonucleotide
  Sense strand starting at position 572 of SEQ ID NO: 1563892
agaaguuugcaaugcuaca

SEQ ID NO: 1839942 - RNA, 19 nt, Artificial Sequence
  Description of Artificial Sequence: Synthetic oligonucleotide
  Antisense strand to SEQ ID NO: 1839941
uguagcauugcaaacuucu

SEQ ID NO: 1839943 - RNA, 19 nt, Artificial Sequence
  Description of Artificial Sequence: Synthetic oligonucleotide
  Sense strand starting at position 577 of SEQ ID NO: 1563892
uuugcaaugcuacaaagua

SEQ ID NO: 1839944 - RNA, 19 nt, Artificial Sequence
  Description of Artificial Sequence: Synthetic oligonucleotide
  Antisense strand to SEQ ID NO: 1839943
uacuuuguagcauugcaaa

SEQ ID NO: 1839945 - RNA, 19 nt, Artificial Sequence
  Description of Artificial Sequence: Synthetic oligonucleotide
  Sense strand starting at position 619 of SEQ ID NO: 1563892
cucuacaaguguuucugaa

SEQ ID NO: 1839946 - RNA, 19 nt, Artificial Sequence
  Description of Artificial Sequence: Synthetic oligonucleotide
  Antisense strand to SEQ ID NO: 1839945
uucagaaacacuuguagag

SEQ ID NO: 1839947 - RNA, 19 nt, Artificial Sequence
  Description of Artificial Sequence: Synthetic oligonucleotide
  Sense strand starting at position 621 of SEQ ID NO: 1563892
cuacaaguguuucugaaac

SEQ ID NO: 1839948 - RNA, 19 nt, Artificial Sequence
  Description of Artificial Sequence: Synthetic oligonucleotide
  Antisense strand to SEQ ID NO: 1839947
guuucagaaacacuuguag

SEQ ID NO: 1839949 - RNA, 19 nt, Artificial Sequence
  Description of Artificial Sequence: Synthetic oligonucleotide
  Sense strand starting at position 1042 of SEQ ID NO: 1563892
ccagccgauuugucacuaa

SEQ ID NO: 1839950 - RNA, 19 nt, Artificial Sequence
  Description of Artificial Sequence: Synthetic oligonucleotide
  Antisense strand to SEQ ID NO: 1839949
uuagugacaaaucggcugg

SEQ ID NO: 1839951 - RNA, 19 nt, Artificial Sequence
  Description of Artificial Sequence: Synthetic oligonucleotide
  Sense strand starting at position 1049 of SEQ ID NO: 1563892
auuugucacuaaggagaga

SEQ ID NO: 1839952 - RNA, 19 nt, Artificial Sequence
  Description of Artificial Sequence: Synthetic oligonucleotide
  Antisense strand to SEQ ID NO: 1839951
ucucuccuuagugacaaau

SEQ ID NO: 1839953 - RNA, 19 nt, Artificial Sequence
  Description of Artificial Sequence: Synthetic oligonucleotide
  Sense strand starting at position 1092 of SEQ ID NO: 1563892
cccugagagcucugggagu

SEQ ID NO: 1839954 - RNA, 19 nt, Artificial Sequence
  Description of Artificial Sequence: Synthetic oligonucleotide
  Antisense strand to SEQ ID NO: 1839953
acucccagagcucucaggg

SEQ ID NO: 1839955 - RNA, 19 nt, Artificial Sequence
  Description of Artificial Sequence: Synthetic oligonucleotide
  Sense strand starting at position 1319 of SEQ ID NO: 1563892
gcagaauaugcucaucccu

SEQ ID NO: 1839956 - RNA, 19 nt, Artificial Sequence
  Description of Artificial Sequence: Synthetic oligonucleotide
  Antisense strand to SEQ ID NO: 1839955
agggaugagcauauucugc

SEQ ID NO: 1839957 - RNA, 19 nt, Artificial Sequence
  Description of Artificial Sequence: Synthetic oligonucleotide
  Sense strand starting at position 1327 of SEQ ID NO: 1563892
ugcucaucccuuuagggau

SEQ ID NO: 1839958 - RNA, 19 nt, Artificial Sequence
  Description of Artificial Sequence: Synthetic oligonucleotide
  Antisense strand to SEQ ID NO: 1839957
aucccuaaagggaugagca

SEQ ID NO: 1839959 - RNA, 19 nt, Artificial Sequence
  Description of Artificial Sequence: Synthetic oligonucleotide
  Sense strand starting at position 1340 of SEQ ID NO: 1563892
agggauguccuuuagcauc

SEQ ID NO: 1839960 - RNA, 19 nt, Artificial Sequence
  Description of Artificial Sequence: Synthetic oligonucleotide
  Antisense strand to SEQ ID NO: 1839959
gaugcuaaaggacaucccu

SEQ ID NO: 1839961 - RNA, 19 nt, Artificial Sequence
  Description of Artificial Sequence: Synthetic oligonucleotide
  Sense strand starting at position 1366 of SEQ ID NO: 1563892
gacagagcuguccagacau

SEQ ID NO: 1839962 - RNA, 19 nt, Artificial Sequence
  Description of Artificial Sequence: Synthetic oligonucleotide
  Antisense strand to SEQ ID NO: 1839961
augucuggacagcucuguc

SEQ ID NO: 1839963 - RNA, 19 nt, Artificial Sequence
  Description of Artificial Sequence: Synthetic oligonucleotide
  Sense strand starting at position 1450 of SEQ ID NO: 1563892
gaacccaggucucugaaau

SEQ ID NO: 1839964 - RNA, 19 nt, Artificial Sequence
  Description of Artificial Sequence: Synthetic oligonucleotide
  Antisense strand to SEQ ID NO: 1839963
auuucagagaccuggguuc

SEQ ID NO: 1839965 - RNA, 19 nt, Artificial Sequence
  Description of Artificial Sequence: Synthetic oligonucleotide
  Sense strand starting at position 1451 of SEQ ID NO: 1563892
aacccaggucucugaaaug

SEQ ID NO: 1839966 - RNA, 19 nt, Artificial Sequence
  Description of Artificial Sequence: Synthetic oligonucleotide
  Antisense strand to SEQ ID NO: 1839965
cauuucagagaccuggguu

SEQ ID NO: 1839967 - RNA, 19 nt, Artificial Sequence
  Description of Artificial Sequence: Synthetic oligonucleotide
  Sense strand starting at position 1594 of SEQ ID NO: 1563892
cgcgauucccaucaacuau

SEQ ID NO: 1839968 - RNA, 19 nt, Artificial Sequence
  Description of Artificial Sequence: Synthetic oligonucleotide
  Antisense strand to SEQ ID NO: 1839967
auaguugaugggaaucgcg

SEQ ID NO: 1839969 - RNA, 19 nt, Artificial Sequence
  Description of Artificial Sequence: Synthetic oligonucleotide
  Sense strand starting at position 1612 of SEQ ID NO: 1563892
uggucagacccacguaaau

SEQ ID NO: 1839970 - RNA, 19 nt, Artificial Sequence
  Description of Artificial Sequence: Synthetic oligonucleotide
  Antisense strand to SEQ ID NO: 1839969
auuuacgugggucugacca

SEQ ID NO: 1839971 - RNA, 19 nt, Artificial Sequence
  Description of Artificial Sequence: Synthetic oligonucleotide
  Sense strand starting at position 3037 of SEQ ID NO: 1563892
guccuuaaagaguagcuga

SEQ ID NO: 1839972 - RNA, 19 nt, Artificial Sequence
  Description of Artificial Sequence: Synthetic oligonucleotide
  Antisense strand to SEQ ID NO: 1839971
ucagcuacucuuuaaggac

SEQ ID NO: 1839973 - RNA, 19 nt, Artificial Sequence
  Description of Artificial Sequence: Synthetic oligonucleotide
  Sense strand starting at position 3120 of SEQ ID NO: 1563892
gucuaucugcuccaauaga

SEQ ID NO: 1839974 - RNA, 19 nt, Artificial Sequence
  Description of Artificial Sequence: Synthetic oligonucleotide
  Antisense strand to SEQ ID NO: 1839973
ucuauuggagcagauagac

SEQ ID NO: 1839975 - RNA, 19 nt, Artificial Sequence
  Description of Artificial Sequence: Synthetic oligonucleotide
  Sense strand starting at position 3164 of SEQ ID NO: 1563892
ccuugaggccgcuaucaau

SEQ ID NO: 1839976 - RNA, 19 nt, Artificial Sequence
  Description of Artificial Sequence: Synthetic oligonucleotide
  Antisense strand to SEQ ID NO: 1839975
auugauagcggccucaagg

SEQ ID NO: 1839977 - RNA, 19 nt, Artificial Sequence
  Description of Artificial Sequence: Synthetic oligonucleotide
  Sense strand starting at position 3199 of SEQ ID NO: 1563892
guggauguuaaguaaauac

SEQ ID NO: 1839978 - RNA, 19 nt, Artificial Sequence
  Description of Artificial Sequence: Synthetic oligonucleotide
  Antisense strand to SEQ ID NO: 1839977
guauuuacuuaacauccac

SEQ ID NO: 1839979 - RNA, 19 nt, Artificial Sequence
  Description of Artificial Sequence: Synthetic oligonucleotide
  Sense strand starting at position 3214 of SEQ ID NO: 1563892
auacuugaugagcgaauga

SEQ ID NO: 1839980 - RNA, 19 nt, Artificial Sequence
  Description of Artificial Sequence: Synthetic oligonucleotide
  Antisense strand to SEQ ID NO: 1839979
ucauucgcucaucaaguau

SEQ ID NO: 1839981 - RNA, 19 nt, Artificial Sequence
  Description of Artificial Sequence: Synthetic oligonucleotide
  Sense strand starting at position 3311 of SEQ ID NO: 1563892
agccguugggcaguguaau

SEQ ID NO: 1839982 - RNA, 19 nt, Artificial Sequence
  Description of Artificial Sequence: Synthetic oligonucleotide
  Antisense strand to SEQ ID NO: 1839981
auuacacugcccaacggcu

SEQ ID NO: 1839983 - RNA, 19 nt, Artificial Sequence
  Description of Artificial Sequence: Synthetic oligonucleotide
  Sense strand starting at position 3322 of SEQ ID NO: 1563892
aguguaauuacuggauuag

SEQ ID NO: 1839984 - RNA, 19 nt, Artificial Sequence
  Description of Artificial Sequence: Synthetic oligonucleotide
  Antisense strand to SEQ ID NO: 1839983
cuaauccaguaauuacacu

SEQ ID NO: 1839985 - RNA, 19 nt, Artificial Sequence
  Description of Artificial Sequence: Synthetic oligonucleotide
  Sense strand starting at position 3323 of SEQ ID NO: 1563892
guguaauuacuggauuagg

SEQ ID NO: 1839986 - RNA, 19 nt, Artificial Sequence
  Description of Artificial Sequence: Synthetic oligonucleotide
  Antisense strand to SEQ ID NO: 1839985
ccuaauccaguaauuacac

SEQ ID NO: 1839987 - RNA, 19 nt, Artificial Sequence
  Description of Artificial Sequence: Synthetic oligonucleotide
  Sense strand starting at position 3509 of SEQ ID NO: 1563892
cccucaggcuucccaagau

SEQ ID NO: 1839988 - RNA, 19 nt, Artificial Sequence
  Description of Artificial Sequence: Synthetic oligonucleotide
  Antisense strand to SEQ ID NO: 1839987
aucuugggaagccugaggg

SEQ ID NO: 1839989 - RNA, 19 nt, Artificial Sequence
  Description of Artificial Sequence: Synthetic oligonucleotide
  Sense strand starting at position 3553 of SEQ ID NO: 1563892
cucccaggacucugcuuaa

SEQ ID NO: 1839990 - RNA, 19 nt, Artificial Sequence
  Description of Artificial Sequence: Synthetic oligonucleotide
  Antisense strand to SEQ ID NO: 1839989
uuaagcagaguccugggag

SEQ ID NO: 1839991 - RNA, 19 nt, Artificial Sequence
  Description of Artificial Sequence: Synthetic oligonucleotide
  Sense strand starting at position 3588 of SEQ ID NO: 1563892
accacugugcuauagaaug

SEQ ID NO: 1839992 - RNA, 19 nt, Artificial Sequence
  Description of Artificial Sequence: Synthetic oligonucleotide
  Antisense strand to SEQ ID NO: 1839991
cauucuauagcacaguggu

SEQ ID NO: 1839993 - RNA, 19 nt, Artificial Sequence
  Description of Artificial Sequence: Synthetic oligonucleotide
  Sense strand starting at position 3687 of SEQ ID NO: 1563892
ggcguauucguggcacaua

SEQ ID NO: 1839994 - RNA, 19 nt, Artificial Sequence
  Description of Artificial Sequence: Synthetic oligonucleotide
  Antisense strand to SEQ ID NO: 1839993
uaugugccacgaauacgcc

SEQ ID NO: 1839995 - RNA, 19 nt, Artificial Sequence
  Description of Artificial Sequence: Synthetic oligonucleotide
  Sense strand starting at position 3690 of SEQ ID NO: 1563892
guauucguggcacauaaua

SEQ ID NO: 1839996 - RNA, 19 nt, Artificial Sequence
  Description of Artificial Sequence: Synthetic oligonucleotide
  Antisense strand to SEQ ID NO: 1839995
uauuaugugccacgaauac

SEQ ID NO: 1839997 - RNA, 19 nt, Artificial Sequence
  Description of Artificial Sequence: Synthetic oligonucleotide
  Sense strand starting at position 3760 of SEQ ID NO: 1563892
gccaauuggaugugaagga

SEQ ID NO: 1839998 - RNA, 19 nt, Artificial Sequence
  Description of Artificial Sequence: Synthetic oligonucleotide
  Antisense strand to SEQ ID NO: 1839997
uccuucacauccaauuggc

SEQ ID NO: 1839999 - RNA, 19 nt, Artificial Sequence
  Description of Artificial Sequence: Synthetic oligonucleotide
  Sense strand starting at position 3821 of SEQ ID NO: 1563892
caaggaauugggugaguaa

SEQ ID NO: 1840000 - RNA, 19 nt, Artificial Sequence
  Description of Artificial Sequence: Synthetic oligonucleotide
  Antisense strand to SEQ ID NO: 1839999
uuacucacccaauuccuug

SEQ ID NO: 1840001 - RNA, 19 nt, Artificial Sequence
  Description of Artificial Sequence: Synthetic oligonucleotide
  Sense strand starting at position 3824 of SEQ ID NO: 1563892
ggaauugggugaguaauag

SEQ ID NO: 1840002 - RNA, 19 nt, Artificial Sequence
  Description of Artificial Sequence: Synthetic oligonucleotide
  Antisense strand to SEQ ID NO: 1840001
cuauuacucacccaauucc

SEQ ID NO: 1840003 - RNA, 19 nt, Artificial Sequence
  Description of Artificial Sequence: Synthetic oligonucleotide
  Sense strand starting at position 3860 of SEQ ID NO: 1563892
aggcuauacagaggaguua

SEQ ID NO: 1840004 - RNA, 19 nt, Artificial Sequence
  Description of Artificial Sequence: Synthetic oligonucleotide
  Antisense strand to SEQ ID NO: 1840003
uaacuccucuguauagccu

SEQ ID NO: 1840005 - RNA, 19 nt, Artificial Sequence
  Description of Artificial Sequence: Synthetic oligonucleotide
  Sense strand starting at position 3956 of SEQ ID NO: 1563892
cagguugugguguaucaga

SEQ ID NO: 1840006 - RNA, 19 nt, Artificial Sequence
  Description of Artificial Sequence: Synthetic oligonucleotide
  Antisense strand to SEQ ID NO: 1840005
ucugauacaccacaaccug

SEQ ID NO: 1840007 - RNA, 19 nt, Artificial Sequence
  Description of Artificial Sequence: Synthetic oligonucleotide
  Sense strand starting at position 3965 of SEQ ID NO: 1563892
guguaucagagaugagaac

SEQ ID NO: 1840008 - RNA, 19 nt, Artificial Sequence
  Description of Artificial Sequence: Synthetic oligonucleotide
  Antisense strand to SEQ ID NO: 1840007
guucucaucucugauacac

SEQ ID NO: 1840009 - RNA, 19 nt, Artificial Sequence
  Description of Artificial Sequence: Synthetic oligonucleotide
  Sense strand starting at position 52 of SEQ ID NO: 1563893
cucuacaaguguuucuaaa

SEQ ID NO: 1840010 - RNA, 19 nt, Artificial Sequence
  Description of Artificial Sequence: Synthetic oligonucleotide
  Antisense strand to SEQ ID NO: 1840009
uuuagaaacacuuguagag

SEQ ID NO: 1840011 - RNA, 19 nt, Artificial Sequence
  Description of Artificial Sequence: Synthetic oligonucleotide
  Sense strand starting at position 144 of SEQ ID NO: 1563893
cuuaaagaaguuugcaaug

SEQ ID NO: 1840012 - RNA, 19 nt, Artificial Sequence
  Description of Artificial Sequence: Synthetic oligonucleotide
  Antisense strand to SEQ ID NO: 1840011
cauugcaaacuucuuuaag

SEQ ID NO: 1840013 - RNA, 19 nt, Artificial Sequence
  Description of Artificial Sequence: Synthetic oligonucleotide
  Sense strand starting at position 149 of SEQ ID NO: 1563893
agaaguuugcaaugcuaca

SEQ ID NO: 1840014 - RNA, 19 nt, Artificial Sequence
  Description of Artificial Sequence: Synthetic oligonucleotide
  Antisense strand to SEQ ID NO: 1840013
uguagcauugcaaacuucu

SEQ ID NO: 1840015 - RNA, 19 nt, Artificial Sequence
  Description of Artificial Sequence: Synthetic oligonucleotide
  Sense strand starting at position 154 of SEQ ID NO: 1563893
uuugcaaugcuacaaagua

SEQ ID NO: 1840016 - RNA, 19 nt, Artificial Sequence
  Description of Artificial Sequence: Synthetic oligonucleotide
  Antisense strand to SEQ ID NO: 1840015
uacuuuguagcauugcaaa

SEQ ID NO: 1840017 - RNA, 19 nt, Artificial Sequence
  Description of Artificial Sequence: Synthetic oligonucleotide
  Sense strand starting at position 196 of SEQ ID NO: 1563893
cucuacaaguguuucugaa

SEQ ID NO: 1840018 - RNA, 19 nt, Artificial Sequence
  Description of Artificial Sequence: Synthetic oligonucleotide
  Antisense strand to SEQ ID NO: 1840017
uucagaaacacuuguagag

SEQ ID NO: 1840019 - RNA, 19 nt, Artificial Sequence
  Description of Artificial Sequence: Synthetic oligonucleotide
  Sense strand starting at position 198 of SEQ ID NO: 1563893
cuacaaguguuucugaaac

SEQ ID NO: 1840020 - RNA, 19 nt, Artificial Sequence
  Description of Artificial Sequence: Synthetic oligonucleotide
  Antisense strand to SEQ ID NO: 1840019
guuucagaaacacuuguag

SEQ ID NO: 1840021 - RNA, 19 nt, Artificial Sequence
  Description of Artificial Sequence: Synthetic oligonucleotide
  Sense strand starting at position 619 of SEQ ID NO: 1563893
ccagccgauuugucacuaa

SEQ ID NO: 1840022 - RNA, 19 nt, Artificial Sequence
  Description of Artificial Sequence: Synthetic oligonucleotide
  Antisense strand to SEQ ID NO: 1840021
uuagugacaaaucggcugg

SEQ ID NO: 1840023 - RNA, 19 nt, Artificial Sequence
  Description of Artificial Sequence: Synthetic oligonucleotide
  Sense strand starting at position 626 of SEQ ID NO: 1563893
auuugucacuaaggagaga

SEQ ID NO: 1840024 - RNA, 19 nt, Artificial Sequence
  Description of Artificial Sequence: Synthetic oligonucleotide
  Antisense strand to SEQ ID NO: 1840023
ucucuccuuagugacaaau

SEQ ID NO: 1840025 - RNA, 19 nt, Artificial Sequence
  Description of Artificial Sequence: Synthetic oligonucleotide
  Sense strand starting at position 669 of SEQ ID NO: 1563893
cccugagagcucugggagu

SEQ ID NO: 1840026 - RNA, 19 nt, Artificial Sequence
  Description of Artificial Sequence: Synthetic oligonucleotide
  Antisense strand to SEQ ID NO: 1840025
acucccagagcucucaggg

SEQ ID NO: 1840027 - RNA, 19 nt, Artificial Sequence
  Description of Artificial Sequence: Synthetic oligonucleotide
  Sense strand starting at position 896 of SEQ ID NO: 1563893
gcagaauaugcucaucccu

SEQ ID NO: 1840028 - RNA, 19 nt, Artificial Sequence
  Description of Artificial Sequence: Synthetic oligonucleotide
  Antisense strand to SEQ ID NO: 1840027
agggaugagcauauucugc

SEQ ID NO: 1840029 - RNA, 19 nt, Artificial Sequence
  Description of Artificial Sequence: Synthetic oligonucleotide
  Sense strand starting at position 904 of SEQ ID NO: 1563893
ugcucaucccuuuagggau

SEQ ID NO: 1840030 - RNA, 19 nt, Artificial Sequence
  Description of Artificial Sequence: Synthetic oligonucleotide
  Antisense strand to SEQ ID NO: 1840029
aucccuaaagggaugagca

SEQ ID NO: 1840031 - RNA, 19 nt, Artificial Sequence
  Description of Artificial Sequence: Synthetic oligonucleotide
  Sense strand starting at position 917 of SEQ ID NO: 1563893
agggauguccuuuagcauc

SEQ ID NO: 1840032 - RNA, 19 nt, Artificial Sequence
  Description of Artificial Sequence: Synthetic oligonucleotide
  Antisense strand to SEQ ID NO: 1840031
gaugcuaaaggacaucccu

SEQ ID NO: 1840033 - RNA, 19 nt, Artificial Sequence
  Description of Artificial Sequence: Synthetic oligonucleotide
  Sense strand starting at position 943 of SEQ ID NO: 1563893
gacagagcuguccagacau

SEQ ID NO: 1840034 - RNA, 19 nt, Artificial Sequence
  Description of Artificial Sequence: Synthetic oligonucleotide
  Antisense strand to SEQ ID NO: 1840033
augucuggacagcucuguc

SEQ ID NO: 1840035 - RNA, 19 nt, Artificial Sequence
  Description of Artificial Sequence: Synthetic oligonucleotide
  Sense strand starting at position 1027 of SEQ ID NO: 1563893
gaacccaggucucugaaau

SEQ ID NO: 1840036 - RNA, 19 nt, Artificial Sequence
  Description of Artificial Sequence: Synthetic oligonucleotide
  Antisense strand to SEQ ID NO: 1840035
auuucagagaccuggguuc

SEQ ID NO: 1840037 - RNA, 19 nt, Artificial Sequence
  Description of Artificial Sequence: Synthetic oligonucleotide
  Sense strand starting at position 1028 of SEQ ID NO: 1563893
aacccaggucucugaaaug

SEQ ID NO: 1840038 - RNA, 19 nt, Artificial Sequence
  Description of Artificial Sequence: Synthetic oligonucleotide
  Antisense strand to SEQ ID NO: 1840037
cauuucagagaccuggguu

SEQ ID NO: 1840039 - RNA, 19 nt, Artificial Sequence
  Description of Artificial Sequence: Synthetic oligonucleotide
  Sense strand starting at position 1171 of SEQ ID NO: 1563893
cgcgauucccaucaacuau

SEQ ID NO: 1840040 - RNA, 19 nt, Artificial Sequence
  Description of Artificial Sequence: Synthetic oligonucleotide
  Antisense strand to SEQ ID NO: 1840039
auaguugaugggaaucgcg

SEQ ID NO: 1840041 - RNA, 19 nt, Artificial Sequence
  Description of Artificial Sequence: Synthetic oligonucleotide
  Sense strand starting at position 1189 of SEQ ID NO: 1563893
uggucagacccacguaaau

SEQ ID NO: 1840042 - RNA, 19 nt, Artificial Sequence
  Description of Artificial Sequence: Synthetic oligonucleotide
  Antisense strand to SEQ ID NO: 1840041
auuuacgugggucugacca

SEQ ID NO: 1840043 - RNA, 19 nt, Artificial Sequence
  Description of Artificial Sequence: Synthetic oligonucleotide
  Sense strand starting at position 2614 of SEQ ID NO: 1563893
guccuuaaagaguagcuga

SEQ ID NO: 1840044 - RNA, 19 nt, Artificial Sequence
  Description of Artificial Sequence: Synthetic oligonucleotide
  Antisense strand to SEQ ID NO: 1840043
ucagcuacucuuuaaggac

SEQ ID NO: 1840045 - RNA, 19 nt, Artificial Sequence
  Description of Artificial Sequence: Synthetic oligonucleotide
  Sense strand starting at position 2697 of SEQ ID NO: 1563893
gucuaucugcuccaauaga

SEQ ID NO: 1840046 - RNA, 19 nt, Artificial Sequence
  Description of Artificial Sequence: Synthetic oligonucleotide
  Antisense strand to SEQ ID NO: 1840045
ucuauuggagcagauagac

SEQ ID NO: 1840047 - RNA, 19 nt, Artificial Sequence
  Description of Artificial Sequence: Synthetic oligonucleotide
  Sense strand starting at position 2741 of SEQ ID NO: 1563893
ccuugaggccgcuaucaau

SEQ ID NO: 1840048 - RNA, 19 nt, Artificial Sequence
  Description of Artificial Sequence: Synthetic oligonucleotide
  Antisense strand to SEQ ID NO: 1840047
auugauagcggccucaagg

SEQ ID NO: 1840049 - RNA, 19 nt, Artificial Sequence
  Description of Artificial Sequence: Synthetic oligonucleotide
  Sense strand starting at position 2776 of SEQ ID NO: 1563893
guggauguuaaguaaauac

SEQ ID NO: 1840050 - RNA, 19 nt, Artificial Sequence
  Description of Artificial Sequence: Synthetic oligonucleotide
  Antisense strand to SEQ ID NO: 1840049
guauuuacuuaacauccac

SEQ ID NO: 1840051 - RNA, 19 nt, Artificial Sequence
  Description of Artificial Sequence: Synthetic oligonucleotide
  Sense strand starting at position 2791 of SEQ ID NO: 1563893
auacuugaugagcgaauga

SEQ ID NO: 1840052 - RNA, 19 nt, Artificial Sequence
  Description of Artificial Sequence: Synthetic oligonucleotide
  Antisense strand to SEQ ID NO: 1840051
ucauucgcucaucaaguau

SEQ ID NO: 1840053 - RNA, 19 nt, Artificial Sequence
  Description of Artificial Sequence: Synthetic oligonucleotide
  Sense strand starting at position 2888 of SEQ ID NO: 1563893
agccguugggcaguguaau

SEQ ID NO: 1840054 - RNA, 19 nt, Artificial Sequence
  Description of Artificial Sequence: Synthetic oligonucleotide
  Antisense strand to SEQ ID NO: 1840053
auuacacugcccaacggcu

SEQ ID NO: 1840055 - RNA, 19 nt, Artificial Sequence
  Description of Artificial Sequence: Synthetic oligonucleotide
  Sense strand starting at position 2899 of SEQ ID NO: 1563893
aguguaauuacuggauuag

SEQ ID NO: 1840056 - RNA, 19 nt, Artificial Sequence
  Description of Artificial Sequence: Synthetic oligonucleotide
  Antisense strand to SEQ ID NO: 1840055
cuaauccaguaauuacacu

SEQ ID NO: 1840057 - RNA, 19 nt, Artificial Sequence
  Description of Artificial Sequence: Synthetic oligonucleotide
  Sense strand starting at position 2900 of SEQ ID NO: 1563893
guguaauuacuggauuagg

SEQ ID NO: 1840058 - RNA, 19 nt, Artificial Sequence
  Description of Artificial Sequence: Synthetic oligonucleotide
  Antisense strand to SEQ ID NO: 1840057
ccuaauccaguaauuacac

SEQ ID NO: 1840059 - RNA, 19 nt, Artificial Sequence
  Description of Artificial Sequence: Synthetic oligonucleotide
  Sense strand starting at position 3086 of SEQ ID NO: 1563893
cccucaggcuucccaagau

SEQ ID NO: 1840060 - RNA, 19 nt, Artificial Sequence
  Description of Artificial Sequence: Synthetic oligonucleotide
  Antisense strand to SEQ ID NO: 1840059
aucuugggaagccugaggg

SEQ ID NO: 1840061 - RNA, 19 nt, Artificial Sequence
  Description of Artificial Sequence: Synthetic oligonucleotide
  Sense strand starting at position 3130 of SEQ ID NO: 1563893
cucccaggacucugcuuaa

SEQ ID NO: 1840062 - RNA, 19 nt, Artificial Sequence
  Description of Artificial Sequence: Synthetic oligonucleotide
  Antisense strand to SEQ ID NO: 1840061
uuaagcagaguccugggag

SEQ ID NO: 1840063 - RNA, 19 nt, Artificial Sequence
  Description of Artificial Sequence: Synthetic oligonucleotide
  Sense strand starting at position 3165 of SEQ ID NO: 1563893
accacugugcuauagaaug

SEQ ID NO: 1840064 - RNA, 19 nt, Artificial Sequence
  Description of Artificial Sequence: Synthetic oligonucleotide
  Antisense strand to SEQ ID NO: 1840063
cauucuauagcacaguggu

SEQ ID NO: 1840065 - RNA, 19 nt, Artificial Sequence
  Description of Artificial Sequence: Synthetic oligonucleotide
  Sense strand starting at position 3264 of SEQ ID NO: 1563893
ggcguauucguggcacaua

SEQ ID NO: 1840066 - RNA, 19 nt, Artificial Sequence
  Description of Artificial Sequence: Synthetic oligonucleotide
  Antisense strand to SEQ ID NO: 1840065
uaugugccacgaauacgcc

SEQ ID NO: 1840067 - RNA, 19 nt, Artificial Sequence
  Description of Artificial Sequence: Synthetic oligonucleotide
  Sense strand starting at position 3267 of SEQ ID NO: 1563893
guauucguggcacauaaua

SEQ ID NO: 1840068 - RNA, 19 nt, Artificial Sequence
  Description of Artificial Sequence: Synthetic oligonucleotide
  Antisense strand to SEQ ID NO: 1840067
uauuaugugccacgaauac

SEQ ID NO: 1840069 - RNA, 19 nt, Artificial Sequence
  Description of Artificial Sequence: Synthetic oligonucleotide
  Sense strand starting at position 3337 of SEQ ID NO: 1563893
gccaauuggaugugaagga

SEQ ID NO: 1840070 - RNA, 19 nt, Artificial Sequence
  Description of Artificial Sequence: Synthetic oligonucleotide
  Antisense strand to SEQ ID NO: 1840069
uccuucacauccaauuggc

SEQ ID NO: 1840071 - RNA, 19 nt, Artificial Sequence
  Description of Artificial Sequence: Synthetic oligonucleotide
  Sense strand starting at position 3398 of SEQ ID NO: 1563893
caaggaauugggugaguaa

SEQ ID NO: 1840072 - RNA, 19 nt, Artificial Sequence
  Description of Artificial Sequence: Synthetic oligonucleotide
  Antisense strand to SEQ ID NO: 1840071
uuacucacccaauuccuug

SEQ ID NO: 1840073 - RNA, 19 nt, Artificial Sequence
  Description of Artificial Sequence: Synthetic oligonucleotide
  Sense strand starting at position 3401 of SEQ ID NO: 1563893
ggaauugggugaguaauag

SEQ ID NO: 1840074 - RNA, 19 nt, Artificial Sequence
  Description of Artificial Sequence: Synthetic oligonucleotide
  Antisense strand to SEQ ID NO: 1840073
cuauuacucacccaauucc

SEQ ID NO: 1840075 - RNA, 19 nt, Artificial Sequence
  Description of Artificial Sequence: Synthetic oligonucleotide
  Sense strand starting at position 3437 of SEQ ID NO: 1563893
aggcuauacagaggaguua

SEQ ID NO: 1840076 - RNA, 19 nt, Artificial Sequence
  Description of Artificial Sequence: Synthetic oligonucleotide
  Antisense strand to SEQ ID NO: 1840075
uaacuccucuguauagccu

SEQ ID NO: 1840077 - RNA, 19 nt, Artificial Sequence
  Description of Artificial Sequence: Synthetic oligonucleotide
  Sense strand starting at position 3533 of SEQ ID NO: 1563893
cagguugugguguaucaga

SEQ ID NO: 1840078 - RNA, 19 nt, Artificial Sequence
  Description of Artificial Sequence: Synthetic oligonucleotide
  Antisense strand to SEQ ID NO: 1840077
ucugauacaccacaaccug

SEQ ID NO: 1840079 - RNA, 19 nt, Artificial Sequence
  Description of Artificial Sequence: Synthetic oligonucleotide
  Sense strand starting at position 3542 of SEQ ID NO: 1563893
guguaucagagaugagaac

SEQ ID NO: 1840080 - RNA, 19 nt, Artificial Sequence
  Description of Artificial Sequence: Synthetic oligonucleotide
  Antisense strand to SEQ ID NO: 1840079
guucucaucucugauacac

SEQ ID NO: 1840081 - RNA, 19 nt, Artificial Sequence
  Description of Artificial Sequence: Synthetic oligonucleotide
  Sense strand starting at position 3624 of SEQ ID NO: 1563893
cuguguaaaccguaacuga

SEQ ID NO: 1840082 - RNA, 19 nt, Artificial Sequence
  Description of Artificial Sequence: Synthetic oligonucleotide
  Antisense strand to SEQ ID NO: 1840081
ucaguuacgguuuacacag

SEQ ID NO: 1840083 - RNA, 19 nt, Artificial Sequence
  Description of Artificial Sequence: Synthetic oligonucleotide
  Sense strand starting at position 3757 of SEQ ID NO: 1563893
cuucuuaugucauugagga

SEQ ID NO: 1840084 - RNA, 19 nt, Artificial Sequence
  Description of Artificial Sequence: Synthetic oligonucleotide
  Antisense strand to SEQ ID NO: 1840083
uccucaaugacauaagaag

SEQ ID NO: 1840085 - RNA, 19 nt, Artificial Sequence
  Description of Artificial Sequence: Synthetic oligonucleotide
  Sense strand starting at position 3758 of SEQ ID NO: 1563893
uucuuaugucauugaggaa

SEQ ID NO: 1840086 - RNA, 19 nt, Artificial Sequence
  Description of Artificial Sequence: Synthetic oligonucleotide
  Antisense strand to SEQ ID NO: 1840085
uuccucaaugacauaagaa

SEQ ID NO: 1840087 - RNA, 19 nt, Artificial Sequence
  Description of Artificial Sequence: Synthetic oligonucleotide
  Sense strand starting at position 3868 of SEQ ID NO: 1563893
acaguccuccuccagauua

SEQ ID NO: 1840088 - RNA, 19 nt, Artificial Sequence
  Description of Artificial Sequence: Synthetic oligonucleotide
  Antisense strand to SEQ ID NO: 1840087
uaaucuggaggaggacugu

SEQ ID NO: 1840089 - RNA, 19 nt, Artificial Sequence
  Description of Artificial Sequence: Synthetic oligonucleotide
  Sense strand starting at position 101 of SEQ ID NO: 1563894
agaggaacugcuuaaugcu

SEQ ID NO: 1840090 - RNA, 19 nt, Artificial Sequence
  Description of Artificial Sequence: Synthetic oligonucleotide
  Antisense strand to SEQ ID NO: 1840089
agcauuaagcaguuccucu

SEQ ID NO: 1840091 - RNA, 19 nt, Artificial Sequence
  Description of Artificial Sequence: Synthetic oligonucleotide
  Sense strand starting at position 109 of SEQ ID NO: 1563894
ugcuuaaugcuaggugaaa

SEQ ID NO: 1840092 - RNA, 19 nt, Artificial Sequence
  Description of Artificial Sequence: Synthetic oligonucleotide
  Antisense strand to SEQ ID NO: 1840091
uuucaccuagcauuaagca

SEQ ID NO: 1840093 - RNA, 19 nt, Artificial Sequence
  Description of Artificial Sequence: Synthetic oligonucleotide
  Sense strand starting at position 110 of SEQ ID NO: 1563894
gcuuaaugcuaggugaaac

SEQ ID NO: 1840094 - RNA, 19 nt, Artificial Sequence
  Description of Artificial Sequence: Synthetic oligonucleotide
  Antisense strand to SEQ ID NO: 1840093
guuucaccuagcauuaagc

SEQ ID NO: 1840095 - RNA, 19 nt, Artificial Sequence
  Description of Artificial Sequence: Synthetic oligonucleotide
  Sense strand starting at position 167 of SEQ ID NO: 1563894
cccuuaugucuacagaucu

SEQ ID NO: 1840096 - RNA, 19 nt, Artificial Sequence
  Description of Artificial Sequence: Synthetic oligonucleotide
  Antisense strand to SEQ ID NO: 1840095
agaucuguagacauaaggg

SEQ ID NO: 1840097 - RNA, 19 nt, Artificial Sequence
  Description of Artificial Sequence: Synthetic oligonucleotide
  Sense strand starting at position 197 of SEQ ID NO: 1563894
gugggugcuacuggaaaua

SEQ ID NO: 1840098 - RNA, 19 nt, Artificial Sequence
  Description of Artificial Sequence: Synthetic oligonucleotide
  Antisense strand to SEQ ID NO: 1840097
uauuuccaguagcacccac

SEQ ID NO: 1840099 - RNA, 19 nt, Artificial Sequence
  Description of Artificial Sequence: Synthetic oligonucleotide
  Sense strand starting at position 319 of SEQ ID NO: 1563894
acuagcuaaugaucggaaa

SEQ ID NO: 1840100 - RNA, 19 nt, Artificial Sequence
  Description of Artificial Sequence: Synthetic oligonucleotide
  Antisense strand to SEQ ID NO: 1840099
uuuccgaucauuagcuagu

SEQ ID NO: 1840101 - RNA, 19 nt, Artificial Sequence
  Description of Artificial Sequence: Synthetic oligonucleotide
  Sense strand starting at position 334 of SEQ ID NO: 1563894
gaaaguguauugucaguua

SEQ ID NO: 1840102 - RNA, 19 nt, Artificial Sequence
  Description of Artificial Sequence: Synthetic oligonucleotide
  Antisense strand to SEQ ID NO: 1840101
uaacugacaauacacuuuc

SEQ ID NO: 1840103 - RNA, 19 nt, Artificial Sequence
  Description of Artificial Sequence: Synthetic oligonucleotide
  Sense strand starting at position 337 of SEQ ID NO: 1563894
aguguauugucaguuagga

SEQ ID NO: 1840104 - RNA, 19 nt, Artificial Sequence
  Description of Artificial Sequence: Synthetic oligonucleotide
  Antisense strand to SEQ ID NO: 1840103
uccuaacugacaauacacu

SEQ ID NO: 1840105 - RNA, 19 nt, Artificial Sequence
  Description of Artificial Sequence: Synthetic oligonucleotide
  Sense strand starting at position 339 of SEQ ID NO: 1563894
uguauugucaguuaggauc

SEQ ID NO: 1840106 - RNA, 19 nt, Artificial Sequence
  Description of Artificial Sequence: Synthetic oligonucleotide
  Antisense strand to SEQ ID NO: 1840105
gauccuaacugacaauaca

SEQ ID NO: 1840107 - RNA, 19 nt, Artificial Sequence
  Description of Artificial Sequence: Synthetic oligonucleotide
  Sense strand starting at position 413 of SEQ ID NO: 1563894
gagaacagaucccaugaga

SEQ ID NO: 1840108 - RNA, 19 nt, Artificial Sequence
  Description of Artificial Sequence: Synthetic oligonucleotide
  Antisense strand to SEQ ID NO: 1840107
ucucaugggaucuguucuc

SEQ ID NO: 1840109 - RNA, 19 nt, Artificial Sequence
  Description of Artificial Sequence: Synthetic oligonucleotide
  Sense strand starting at position 575 of SEQ ID NO: 1563894
acauaaugagcuugaagug

SEQ ID NO: 1840110 - RNA, 19 nt, Artificial Sequence
  Description of Artificial Sequence: Synthetic oligonucleotide
  Antisense strand to SEQ ID NO: 1840109
cacuucaagcucauuaugu

SEQ ID NO: 1840111 - RNA, 19 nt, Artificial Sequence
  Description of Artificial Sequence: Synthetic oligonucleotide
  Sense strand starting at position 591 of SEQ ID NO: 1563894
guguuucccugucuagaau

SEQ ID NO: 1840112 - RNA, 19 nt, Artificial Sequence
  Description of Artificial Sequence: Synthetic oligonucleotide
  Antisense strand to SEQ ID NO: 1840111
auucuagacagggaaacac

SEQ ID NO: 1840113 - RNA, 19 nt, Artificial Sequence
  Description of Artificial Sequence: Synthetic oligonucleotide
  Sense strand starting at position 592 of SEQ ID NO: 1563894
uguuucccugucuagaauu

SEQ ID NO: 1840114 - RNA, 19 nt, Artificial Sequence
  Description of Artificial Sequence: Synthetic oligonucleotide
  Antisense strand to SEQ ID NO: 1840113
aauucuagacagggaaaca

SEQ ID NO: 1840115 - RNA, 19 nt, Artificial Sequence
  Description of Artificial Sequence: Synthetic oligonucleotide
  Sense strand starting at position 613 of SEQ ID NO: 1563894
agugaauccuucucucagu

SEQ ID NO: 1840116 - RNA, 19 nt, Artificial Sequence
  Description of Artificial Sequence: Synthetic oligonucleotide
  Antisense strand to SEQ ID NO: 1840115
acugagagaaggauucacu

SEQ ID NO: 1840117 - RNA, 19 nt, Artificial Sequence
  Description of Artificial Sequence: Synthetic oligonucleotide
  Sense strand starting at position 664 of SEQ ID NO: 1563894
aagugaagcuacucacagu

SEQ ID NO: 1840118 - RNA, 19 nt, Artificial Sequence
  Description of Artificial Sequence: Synthetic oligonucleotide
  Antisense strand to SEQ ID NO: 1840117
acugugaguagcuucacuu

SEQ ID NO: 1840119 - RNA, 19 nt, Artificial Sequence
  Description of Artificial Sequence: Synthetic oligonucleotide
  Sense strand starting at position 815 of SEQ ID NO: 1563894
ugacauugaacucgugagu

SEQ ID NO: 1840120 - RNA, 19 nt, Artificial Sequence
  Description of Artificial Sequence: Synthetic oligonucleotide
  Antisense strand to SEQ ID NO: 1840119
acucacgaguucaauguca

SEQ ID NO: 1840121 - RNA, 19 nt, Artificial Sequence
  Description of Artificial Sequence: Synthetic oligonucleotide
  Sense strand starting at position 818 of SEQ ID NO: 1563894
cauugaacucgugagucuu

SEQ ID NO: 1840122 - RNA, 19 nt, Artificial Sequence
  Description of Artificial Sequence: Synthetic oligonucleotide
  Antisense strand to SEQ ID NO: 1840121
aagacucacgaguucaaug

SEQ ID NO: 1840123 - RNA, 19 nt, Artificial Sequence
  Description of Artificial Sequence: Synthetic oligonucleotide
  Sense strand starting at position 1238 of SEQ ID NO: 1563894
ucaguacuuuaguuugaua

SEQ ID NO: 1840124 - RNA, 19 nt, Artificial Sequence
  Description of Artificial Sequence: Synthetic oligonucleotide
  Antisense strand to SEQ ID NO: 1840123
uaucaaacuaaaguacuga

SEQ ID NO: 1840125 - RNA, 19 nt, Artificial Sequence
  Description of Artificial Sequence: Synthetic oligonucleotide
  Sense strand starting at position 1240 of SEQ ID NO: 1563894
aguacuuuaguuugauaug

SEQ ID NO: 1840126 - RNA, 19 nt, Artificial Sequence
  Description of Artificial Sequence: Synthetic oligonucleotide
  Antisense strand to SEQ ID NO: 1840125
cauaucaaacuaaaguacu

SEQ ID NO: 1840127 - RNA, 19 nt, Artificial Sequence
  Description of Artificial Sequence: Synthetic oligonucleotide
  Sense strand starting at position 1444 of SEQ ID NO: 1563894
aguaacuauucgucacaau

SEQ ID NO: 1840128 - RNA, 19 nt, Artificial Sequence
  Description of Artificial Sequence: Synthetic oligonucleotide
  Antisense strand to SEQ ID NO: 1840127
auugugacgaauaguuacu

SEQ ID NO: 1840129 - RNA, 19 nt, Artificial Sequence
  Description of Artificial Sequence: Synthetic oligonucleotide
  Sense strand starting at position 1445 of SEQ ID NO: 1563894
guaacuauucgucacaaua

SEQ ID NO: 1840130 - RNA, 19 nt, Artificial Sequence
  Description of Artificial Sequence: Synthetic oligonucleotide
  Antisense strand to SEQ ID NO: 1840129
uauugugacgaauaguuac

SEQ ID NO: 1840131 - RNA, 19 nt, Artificial Sequence
  Description of Artificial Sequence: Synthetic oligonucleotide
  Sense strand starting at position 1509 of SEQ ID NO: 1563894
cucuacaaguguuucuaaa

SEQ ID NO: 1840132 - RNA, 19 nt, Artificial Sequence
  Description of Artificial Sequence: Synthetic oligonucleotide
  Antisense strand to SEQ ID NO: 1840131
uuuagaaacacuuguagag

SEQ ID NO: 1840133 - RNA, 19 nt, Artificial Sequence
  Description of Artificial Sequence: Synthetic oligonucleotide
  Sense strand starting at position 1534 of SEQ ID NO: 1563894
agaaguuugcaacgcuaca

SEQ ID NO: 1840134 - RNA, 19 nt, Artificial Sequence
  Description of Artificial Sequence: Synthetic oligonucleotide
  Antisense strand to SEQ ID NO: 1840133
uguagcguugcaaacuucu

SEQ ID NO: 1840135 - RNA, 19 nt, Artificial Sequence
  Description of Artificial Sequence: Synthetic oligonucleotide
  Sense strand starting at position 1601 of SEQ ID NO: 1563894
cuuaaagaaguuugcaaug

SEQ ID NO: 1840136 - RNA, 19 nt, Artificial Sequence
  Description of Artificial Sequence: Synthetic oligonucleotide
  Antisense strand to SEQ ID NO: 1840135
cauugcaaacuucuuuaag

SEQ ID NO: 1840137 - RNA, 19 nt, Artificial Sequence
  Description of Artificial Sequence: Synthetic oligonucleotide
  Sense strand starting at position 1606 of SEQ ID NO: 1563894
agaaguuugcaaugcuaca

SEQ ID NO: 1840138 - RNA, 19 nt, Artificial Sequence
  Description of Artificial Sequence: Synthetic oligonucleotide
  Antisense strand to SEQ ID NO: 1840137
uguagcauugcaaacuucu

SEQ ID NO: 1840139 - RNA, 19 nt, Artificial Sequence
  Description of Artificial Sequence: Synthetic oligonucleotide
  Sense strand starting at position 1611 of SEQ ID NO: 1563894
uuugcaaugcuacaaagua

SEQ ID NO: 1840140 - RNA, 19 nt, Artificial Sequence
  Description of Artificial Sequence: Synthetic oligonucleotide
  Antisense strand to SEQ ID NO: 1840139
uacuuuguagcauugcaaa

SEQ ID NO: 1840141 - RNA, 19 nt, Artificial Sequence
  Description of Artificial Sequence: Synthetic oligonucleotide
  Sense strand starting at position 1653 of SEQ ID NO: 1563894
cucuacaaguguuucugaa

SEQ ID NO: 1840142 - RNA, 19 nt, Artificial Sequence
  Description of Artificial Sequence: Synthetic oligonucleotide
  Antisense strand to SEQ ID NO: 1840141
uucagaaacacuuguagag

SEQ ID NO: 1840143 - RNA, 19 nt, Artificial Sequence
  Description of Artificial Sequence: Synthetic oligonucleotide
  Sense strand starting at position 1655 of SEQ ID NO: 1563894
cuacaaguguuucugaaac

SEQ ID NO: 1840144 - RNA, 19 nt, Artificial Sequence
  Description of Artificial Sequence: Synthetic oligonucleotide
  Antisense strand to SEQ ID NO: 1840143
guuucagaaacacuuguag

SEQ ID NO: 1840145 - RNA, 19 nt, Artificial Sequence
  Description of Artificial Sequence: Synthetic oligonucleotide
  Sense strand starting at position 2033 of SEQ ID NO: 1563894
ggucucugagcgugagaca

SEQ ID NO: 1840146 - RNA, 19 nt, Artificial Sequence
  Description of Artificial Sequence: Synthetic oligonucleotide
  Antisense strand to SEQ ID NO: 1840145
ugucucacgcucagagacc

SEQ ID NO: 1840147 - RNA, 19 nt, Artificial Sequence
  Description of Artificial Sequence: Synthetic oligonucleotide
  Sense strand starting at position 2076 of SEQ ID NO: 1563894
ccagccgauuugucacuaa

SEQ ID NO: 1840148 - RNA, 19 nt, Artificial Sequence
  Description of Artificial Sequence: Synthetic oligonucleotide
  Antisense strand to SEQ ID NO: 1840147
uuagugacaaaucggcugg

SEQ ID NO: 1840149 - RNA, 19 nt, Artificial Sequence
  Description of Artificial Sequence: Synthetic oligonucleotide
  Sense strand starting at position 2083 of SEQ ID NO: 1563894
auuugucacuaaggagaga

SEQ ID NO: 1840150 - RNA, 19 nt, Artificial Sequence
  Description of Artificial Sequence: Synthetic oligonucleotide
  Antisense strand to SEQ ID NO: 1840149
ucucuccuuagugacaaau

SEQ ID NO: 1840151 - RNA, 19 nt, Artificial Sequence
  Description of Artificial Sequence: Synthetic oligonucleotide
  Sense strand starting at position 2126 of SEQ ID NO: 1563894
cccugagagcucugggagu

SEQ ID NO: 1840152 - RNA, 19 nt, Artificial Sequence
  Description of Artificial Sequence: Synthetic oligonucleotide
  Antisense strand to SEQ ID NO: 1840151
acucccagagcucucaggg

SEQ ID NO: 1840153 - RNA, 19 nt, Artificial Sequence
  Description of Artificial Sequence: Synthetic oligonucleotide
  Sense strand starting at position 2353 of SEQ ID NO: 1563894
gcagaauaugcucaucccu

SEQ ID NO: 1840154 - RNA, 19 nt, Artificial Sequence
  Description of Artificial Sequence: Synthetic oligonucleotide
  Antisense strand to SEQ ID NO: 1840153
agggaugagcauauucugc

SEQ ID NO: 1840155 - RNA, 19 nt, Artificial Sequence
  Description of Artificial Sequence: Synthetic oligonucleotide
  Sense strand starting at position 2361 of SEQ ID NO: 1563894
ugcucaucccuuuagggau

SEQ ID NO: 1840156 - RNA, 19 nt, Artificial Sequence
  Description of Artificial Sequence: Synthetic oligonucleotide
  Antisense strand to SEQ ID NO: 1840155
aucccuaaagggaugagca

SEQ ID NO: 1840157 - RNA, 19 nt, Artificial Sequence
  Description of Artificial Sequence: Synthetic oligonucleotide
  Sense strand starting at position 2374 of SEQ ID NO: 1563894
agggauguccuuuagcauc

SEQ ID NO: 1840158 - RNA, 19 nt, Artificial Sequence
  Description of Artificial Sequence: Synthetic oligonucleotide
  Antisense strand to SEQ ID NO: 1840157
gaugcuaaaggacaucccu

SEQ ID NO: 1840159 - RNA, 19 nt, Artificial Sequence
  Description of Artificial Sequence: Synthetic oligonucleotide
  Sense strand starting at position 2400 of SEQ ID NO: 1563894
gacagagcuguccagacau

SEQ ID NO: 1840160 - RNA, 19 nt, Artificial Sequence
  Description of Artificial Sequence: Synthetic oligonucleotide
  Antisense strand to SEQ ID NO: 1840159
augucuggacagcucuguc

SEQ ID NO: 1840161 - RNA, 19 nt, Artificial Sequence
  Description of Artificial Sequence: Synthetic oligonucleotide
  Sense strand starting at position 2484 of SEQ ID NO: 1563894
gaacccaggucucugaaau

SEQ ID NO: 1840162 - RNA, 19 nt, Artificial Sequence
  Description of Artificial Sequence: Synthetic oligonucleotide
  Antisense strand to SEQ ID NO: 1840161
auuucagagaccuggguuc

SEQ ID NO: 1840163 - RNA, 19 nt, Artificial Sequence
  Description of Artificial Sequence: Synthetic oligonucleotide
  Sense strand starting at position 2485 of SEQ ID NO: 1563894
aacccaggucucugaaaug

SEQ ID NO: 1840164 - RNA, 19 nt, Artificial Sequence
  Description of Artificial Sequence: Synthetic oligonucleotide
  Antisense strand to SEQ ID NO: 1840163
cauuucagagaccuggguu

SEQ ID NO: 1840165 - RNA, 19 nt, Artificial Sequence
  Description of Artificial Sequence: Synthetic oligonucleotide
  Sense strand starting at position 2628 of SEQ ID NO: 1563894
cgcgauucccaucaacuau

SEQ ID NO: 1840166 - RNA, 19 nt, Artificial Sequence
  Description of Artificial Sequence: Synthetic oligonucleotide
  Antisense strand to SEQ ID NO: 1840165
auaguugaugggaaucgcg

SEQ ID NO: 1840167 - RNA, 19 nt, Artificial Sequence
  Description of Artificial Sequence: Synthetic oligonucleotide
  Sense strand starting at position 2646 of SEQ ID NO: 1563894
uggucagacccacguaaau

SEQ ID NO: 1840168 - RNA, 19 nt, Artificial Sequence
  Description of Artificial Sequence: Synthetic oligonucleotide
  Antisense strand to SEQ ID NO: 1840167
auuuacgugggucugacca

SEQ ID NO: 1840169 - RNA, 19 nt, Artificial Sequence
  Description of Artificial Sequence: Synthetic oligonucleotide
  Sense strand starting at position 41 of SEQ ID NO: 1563895
cucauuacuccaggccuga

SEQ ID NO: 1840170 - RNA, 19 nt, Artificial Sequence
  Description of Artificial Sequence: Synthetic oligonucleotide
  Antisense strand to SEQ ID NO: 1840169
ucaggccuggaguaaugag

SEQ ID NO: 1840171 - RNA, 19 nt, Artificial Sequence
  Description of Artificial Sequence: Synthetic oligonucleotide
  Sense strand starting at position 129 of SEQ ID NO: 1563895
uugccacuuugacucagau

SEQ ID NO: 1840172 - RNA, 19 nt, Artificial Sequence
  Description of Artificial Sequence: Synthetic oligonucleotide
  Antisense strand to SEQ ID NO: 1840171
aucugagucaaaguggcaa

SEQ ID NO: 1840173 - RNA, 19 nt, Artificial Sequence
  Description of Artificial Sequence: Synthetic oligonucleotide
  Sense strand starting at position 141 of SEQ ID NO: 1563895
cucagaugagacgguuaau

SEQ ID NO: 1840174 - RNA, 19 nt, Artificial Sequence
  Description of Artificial Sequence: Synthetic oligonucleotide
  Antisense strand to SEQ ID NO: 1840173
auuaaccgucucaucugag

SEQ ID NO: 1840175 - RNA, 19 nt, Artificial Sequence
  Description of Artificial Sequence: Synthetic oligonucleotide
  Sense strand starting at position 144 of SEQ ID NO: 1563895
agaugagacgguuaaugca

SEQ ID NO: 1840176 - RNA, 19 nt, Artificial Sequence
  Description of Artificial Sequence: Synthetic oligonucleotide
  Antisense strand to SEQ ID NO: 1840175
ugcauuaaccgucucaucu

SEQ ID NO: 1840177 - RNA, 19 nt, Artificial Sequence
  Description of Artificial Sequence: Synthetic oligonucleotide
  Sense strand starting at position 259 of SEQ ID NO: 1563895
agcaaugucuauucccaga

SEQ ID NO: 1840178 - RNA, 19 nt, Artificial Sequence
  Description of Artificial Sequence: Synthetic oligonucleotide
  Antisense strand to SEQ ID NO: 1840177
ucugggaauagacauugcu

SEQ ID NO: 1840179 - RNA, 19 nt, Artificial Sequence
  Description of Artificial Sequence: Synthetic oligonucleotide
  Sense strand starting at position 264 of SEQ ID NO: 1563895
ugucuauucccagagaucc

SEQ ID NO: 1840180 - RNA, 19 nt, Artificial Sequence
  Description of Artificial Sequence: Synthetic oligonucleotide
  Antisense strand to SEQ ID NO: 1840179
ggaucucugggaauagaca

SEQ ID NO: 1840181 - RNA, 19 nt, Artificial Sequence
  Description of Artificial Sequence: Synthetic oligonucleotide
  Sense strand starting at position 365 of SEQ ID NO: 1563895
ggaucuuuauaaucuuguu

SEQ ID NO: 1840182 - RNA, 19 nt, Artificial Sequence
  Description of Artificial Sequence: Synthetic oligonucleotide
  Antisense strand to SEQ ID NO: 1840181
aacaagauuauaaagaucc

SEQ ID NO: 1840183 - RNA, 19 nt, Artificial Sequence
  Description of Artificial Sequence: Synthetic oligonucleotide
  Sense strand starting at position 386 of SEQ ID NO: 1563895
ggcagacaaugggauauuu

SEQ ID NO: 1840184 - RNA, 19 nt, Artificial Sequence
  Description of Artificial Sequence: Synthetic oligonucleotide
  Antisense strand to SEQ ID NO: 1840183
aaauaucccauugucugcc

SEQ ID NO: 1840185 - RNA, 19 nt, Artificial Sequence
  Description of Artificial Sequence: Synthetic oligonucleotide
  Sense strand starting at position 542 of SEQ ID NO: 1563895
gguguuucugaaggacaag

SEQ ID NO: 1840186 - RNA, 19 nt, Artificial Sequence
  Description of Artificial Sequence: Synthetic oligonucleotide
  Antisense strand to SEQ ID NO: 1840185
cuuguccuucagaaacacc

SEQ ID NO: 1840187 - RNA, 19 nt, Artificial Sequence
  Description of Artificial Sequence: Synthetic oligonucleotide
  Sense strand starting at position 572 of SEQ ID NO: 1563895
gcaagaacgacuuggcagu

SEQ ID NO: 1840188 - RNA, 19 nt, Artificial Sequence
  Description of Artificial Sequence: Synthetic oligonucleotide
  Antisense strand to SEQ ID NO: 1840187
acugccaagucguucuugc

SEQ ID NO: 1840189 - RNA, 19 nt, Artificial Sequence
  Description of Artificial Sequence: Synthetic oligonucleotide
  Sense strand starting at position 697 of SEQ ID NO: 1563895
gcuacuagucacuaucuca

SEQ ID NO: 1840190 - RNA, 19 nt, Artificial Sequence
  Description of Artificial Sequence: Synthetic oligonucleotide
  Antisense strand to SEQ ID NO: 1840189
ugagauagugacuaguagc

SEQ ID NO: 1840191 - RNA, 19 nt, Artificial Sequence
  Description of Artificial Sequence: Synthetic oligonucleotide
  Sense strand starting at position 786 of SEQ ID NO: 1563895
agcuguuuggccuaaggga

SEQ ID NO: 1840192 - RNA, 19 nt, Artificial Sequence
  Description of Artificial Sequence: Synthetic oligonucleotide
  Antisense strand to SEQ ID NO: 1840191
ucccuuaggccaaacagcu

SEQ ID NO: 1840193 - RNA, 19 nt, Artificial Sequence
  Description of Artificial Sequence: Synthetic oligonucleotide
  Sense strand starting at position 826 of SEQ ID NO: 1563895
ggccuuucugagcaaggga

SEQ ID NO: 1840194 - RNA, 19 nt, Artificial Sequence
  Description of Artificial Sequence: Synthetic oligonucleotide
  Antisense strand to SEQ ID NO: 1840193
ucccuugcucagaaaggcc

SEQ ID NO: 1840195 - RNA, 19 nt, Artificial Sequence
  Description of Artificial Sequence: Synthetic oligonucleotide
  Sense strand starting at position 882 of SEQ ID NO: 1563895
gcaagcagagcucauuagu

SEQ ID NO: 1840196 - RNA, 19 nt, Artificial Sequence
  Description of Artificial Sequence: Synthetic oligonucleotide
  Antisense strand to SEQ ID NO: 1840195
acuaaugagcucugcuugc

SEQ ID NO: 1840197 - RNA, 19 nt, Artificial Sequence
  Description of Artificial Sequence: Synthetic oligonucleotide
  Sense strand starting at position 965 of SEQ ID NO: 1563895
gcuucuguuccucucguaa

SEQ ID NO: 1840198 - RNA, 19 nt, Artificial Sequence
  Description of Artificial Sequence: Synthetic oligonucleotide
  Antisense strand to SEQ ID NO: 1840197
uuacgagaggaacagaagc

SEQ ID NO: 1840199 - RNA, 19 nt, Artificial Sequence
  Description of Artificial Sequence: Synthetic oligonucleotide
  Sense strand starting at position 1188 of SEQ ID NO: 1563895
ucagacuggugccuaaaua

SEQ ID NO: 1840200 - RNA, 19 nt, Artificial Sequence
  Description of Artificial Sequence: Synthetic oligonucleotide
  Antisense strand to SEQ ID NO: 1840199
uauuuaggcaccagucuga

SEQ ID NO: 1840201 - RNA, 19 nt, Artificial Sequence
  Description of Artificial Sequence: Synthetic oligonucleotide
  Sense strand starting at position 1189 of SEQ ID NO: 1563895
cagacuggugccuaaauaa

SEQ ID NO: 1840202 - RNA, 19 nt, Artificial Sequence
  Description of Artificial Sequence: Synthetic oligonucleotide
  Antisense strand to SEQ ID NO: 1840201
uuauuuaggcaccagucug

SEQ ID NO: 1840203 - RNA, 19 nt, Artificial Sequence
  Description of Artificial Sequence: Synthetic oligonucleotide
  Sense strand starting at position 1432 of SEQ ID NO: 1563895
gggaaaguguugucuucug

SEQ ID NO: 1840204 - RNA, 19 nt, Artificial Sequence
  Description of Artificial Sequence: Synthetic oligonucleotide
  Antisense strand to SEQ ID NO: 1840203
cagaagacaacacuuuccc

SEQ ID NO: 1840205 - RNA, 19 nt, Artificial Sequence
  Description of Artificial Sequence: Synthetic oligonucleotide
  Sense strand starting at position 2384 of SEQ ID NO: 1563895
aguucuugccgugucugaa

SEQ ID NO: 1840206 - RNA, 19 nt, Artificial Sequence
  Description of Artificial Sequence: Synthetic oligonucleotide
  Antisense strand to SEQ ID NO: 1840205
uucagacacggcaagaacu

SEQ ID NO: 1840207 - RNA, 19 nt, Artificial Sequence
  Description of Artificial Sequence: Synthetic oligonucleotide
  Sense strand starting at position 2484 of SEQ ID NO: 1563895
uccucaaaggccugaagau

SEQ ID NO: 1840208 - RNA, 19 nt, Artificial Sequence
  Description of Artificial Sequence: Synthetic oligonucleotide
  Antisense strand to SEQ ID NO: 1840207
aucuucaggccuuugagga

SEQ ID NO: 1840209 - RNA, 19 nt, Artificial Sequence
  Description of Artificial Sequence: Synthetic oligonucleotide
  Sense strand starting at position 2567 of SEQ ID NO: 1563895
cauucucuuccguaggacu

SEQ ID NO: 1840210 - RNA, 19 nt, Artificial Sequence
  Description of Artificial Sequence: Synthetic oligonucleotide
  Antisense strand to SEQ ID NO: 1840209
aguccuacggaagagaaug

SEQ ID NO: 1840211 - RNA, 19 nt, Artificial Sequence
  Description of Artificial Sequence: Synthetic oligonucleotide
  Sense strand starting at position 2611 of SEQ ID NO: 1563895
cuugcucaguccucauuua

SEQ ID NO: 1840212 - RNA, 19 nt, Artificial Sequence
  Description of Artificial Sequence: Synthetic oligonucleotide
  Antisense strand to SEQ ID NO: 1840211
uaaaugaggacugagcaag

SEQ ID NO: 1840213 - RNA, 19 nt, Artificial Sequence
  Description of Artificial Sequence: Synthetic oligonucleotide
  Sense strand starting at position 2733 of SEQ ID NO: 1563895
ggcuauaauucccucaggu

SEQ ID NO: 1840214 - RNA, 19 nt, Artificial Sequence
  Description of Artificial Sequence: Synthetic oligonucleotide
  Antisense strand to SEQ ID NO: 1840213
accugagggaauuauagcc

SEQ ID NO: 1840215 - RNA, 19 nt, Artificial Sequence
  Description of Artificial Sequence: Synthetic oligonucleotide
  Sense strand starting at position 2807 of SEQ ID NO: 1563895
ccuucuugucaaggucaca

SEQ ID NO: 1840216 - RNA, 19 nt, Artificial Sequence
  Description of Artificial Sequence: Synthetic oligonucleotide
  Antisense strand to SEQ ID NO: 1840215
ugugaccuugacaagaagg

SEQ ID NO: 1840217 - RNA, 19 nt, Artificial Sequence
  Description of Artificial Sequence: Synthetic oligonucleotide
  Sense strand starting at position 2831 of SEQ ID NO: 1563895
ccaggauggcaguguucua

SEQ ID NO: 1840218 - RNA, 19 nt, Artificial Sequence
  Description of Artificial Sequence: Synthetic oligonucleotide
  Antisense strand to SEQ ID NO: 1840217
uagaacacugccauccugg

SEQ ID NO: 1840219 - RNA, 19 nt, Artificial Sequence
  Description of Artificial Sequence: Synthetic oligonucleotide
  Sense strand starting at position 2838 of SEQ ID NO: 1563895
ggcaguguucuagacuguu

SEQ ID NO: 1840220 - RNA, 19 nt, Artificial Sequence
  Description of Artificial Sequence: Synthetic oligonucleotide
  Antisense strand to SEQ ID NO: 1840219
aacagucuagaacacugcc

SEQ ID NO: 1840221 - RNA, 19 nt, Artificial Sequence
  Description of Artificial Sequence: Synthetic oligonucleotide
  Sense strand starting at position 2841 of SEQ ID NO: 1563895
aguguucuagacuguugaa

SEQ ID NO: 1840222 - RNA, 19 nt, Artificial Sequence
  Description of Artificial Sequence: Synthetic oligonucleotide
  Antisense strand to SEQ ID NO: 1840221
uucaacagucuagaacacu

SEQ ID NO: 1840223 - RNA, 19 nt, Artificial Sequence
  Description of Artificial Sequence: Synthetic oligonucleotide
  Sense strand starting at position 2864 of SEQ ID NO: 1563895
ucuggucaagucugaguuu

SEQ ID NO: 1840224 - RNA, 19 nt, Artificial Sequence
  Description of Artificial Sequence: Synthetic oligonucleotide
  Antisense strand to SEQ ID NO: 1840223
aaacucagacuugaccaga

SEQ ID NO: 1840225 - RNA, 19 nt, Artificial Sequence
  Description of Artificial Sequence: Synthetic oligonucleotide
  Sense strand starting at position 3700 of SEQ ID NO: 1563895
augugaaggcauggucuga

SEQ ID NO: 1840226 - RNA, 19 nt, Artificial Sequence
  Description of Artificial Sequence: Synthetic oligonucleotide
  Antisense strand to SEQ ID NO: 1840225
ucagaccaugccuucacau

SEQ ID NO: 1840227 - RNA, 19 nt, Artificial Sequence
  Description of Artificial Sequence: Synthetic oligonucleotide
  Sense strand starting at position 3704 of SEQ ID NO: 1563895
gaaggcauggucugaguau

SEQ ID NO: 1840228 - RNA, 19 nt, Artificial Sequence
  Description of Artificial Sequence: Synthetic oligonucleotide
  Antisense strand to SEQ ID NO: 1840227
auacucagaccaugccuuc

SEQ ID NO: 1840229 - RNA, 19 nt, Artificial Sequence
  Description of Artificial Sequence: Synthetic oligonucleotide
  Sense strand starting at position 3713 of SEQ ID NO: 1563895
gucugaguauccuuuguga

SEQ ID NO: 1840230 - RNA, 19 nt, Artificial Sequence
  Description of Artificial Sequence: Synthetic oligonucleotide
  Antisense strand to SEQ ID NO: 1840229
ucacaaaggauacucagac

SEQ ID NO: 1840231 - RNA, 19 nt, Artificial Sequence
  Description of Artificial Sequence: Synthetic oligonucleotide
  Sense strand starting at position 3715 of SEQ ID NO: 1563895
cugaguauccuuugugagg

SEQ ID NO: 1840232 - RNA, 19 nt, Artificial Sequence
  Description of Artificial Sequence: Synthetic oligonucleotide
  Antisense strand to SEQ ID NO: 1840231
ccucacaaaggauacucag

SEQ ID NO: 1840233 - RNA, 19 nt, Artificial Sequence
  Description of Artificial Sequence: Synthetic oligonucleotide
  Sense strand starting at position 3716 of SEQ ID NO: 1563895
ugaguauccuuugugaggu

SEQ ID NO: 1840234 - RNA, 19 nt, Artificial Sequence
  Description of Artificial Sequence: Synthetic oligonucleotide
  Antisense strand to SEQ ID NO: 1840233
accucacaaaggauacuca

SEQ ID NO: 1840235 - RNA, 19 nt, Artificial Sequence
  Description of Artificial Sequence: Synthetic oligonucleotide
  Sense strand starting at position 3722 of SEQ ID NO: 1563895
uccuuugugagguaaggca

SEQ ID NO: 1840236 - RNA, 19 nt, Artificial Sequence
  Description of Artificial Sequence: Synthetic oligonucleotide
  Antisense strand to SEQ ID NO: 1840235
ugccuuaccucacaaagga

SEQ ID NO: 1840237 - RNA, 19 nt, Artificial Sequence
  Description of Artificial Sequence: Synthetic oligonucleotide
  Sense strand starting at position 3773 of SEQ ID NO: 1563895
aaggauacuugagagguca

SEQ ID NO: 1840238 - RNA, 19 nt, Artificial Sequence
  Description of Artificial Sequence: Synthetic oligonucleotide
  Antisense strand to SEQ ID NO: 1840237
ugaccucucaaguauccuu

SEQ ID NO: 1840239 - RNA, 19 nt, Artificial Sequence
  Description of Artificial Sequence: Synthetic oligonucleotide
  Sense strand starting at position 3842 of SEQ ID NO: 1563895
cuauguggccuuggguaau

SEQ ID NO: 1840240 - RNA, 19 nt, Artificial Sequence
  Description of Artificial Sequence: Synthetic oligonucleotide
  Antisense strand to SEQ ID NO: 1840239
auuacccaaggccacauag

SEQ ID NO: 1840241 - RNA, 19 nt, Artificial Sequence
  Description of Artificial Sequence: Synthetic oligonucleotide
  Sense strand starting at position 3884 of SEQ ID NO: 1563895
guuuccauuucuguagcaa

SEQ ID NO: 1840242 - RNA, 19 nt, Artificial Sequence
  Description of Artificial Sequence: Synthetic oligonucleotide
  Antisense strand to SEQ ID NO: 1840241
uugcuacagaaauggaaac

SEQ ID NO: 1840243 - RNA, 19 nt, Artificial Sequence
  Description of Artificial Sequence: Synthetic oligonucleotide
  Sense strand starting at position 3888 of SEQ ID NO: 1563895
ccauuucuguagcaagaaa

SEQ ID NO: 1840244 - RNA, 19 nt, Artificial Sequence
  Description of Artificial Sequence: Synthetic oligonucleotide
  Antisense strand to SEQ ID NO: 1840243
uuucuugcuacagaaaugg

SEQ ID NO: 1840245 - RNA, 19 nt, Artificial Sequence
  Description of Artificial Sequence: Synthetic oligonucleotide
  Sense strand starting at position 3969 of SEQ ID NO: 1563895
gaaguauacucccuaggac

SEQ ID NO: 1840246 - RNA, 19 nt, Artificial Sequence
  Description of Artificial Sequence: Synthetic oligonucleotide
  Antisense strand to SEQ ID NO: 1840245
guccuagggaguauacuuc

SEQ ID NO: 1840247 - RNA, 19 nt, Artificial Sequence
  Description of Artificial Sequence: Synthetic oligonucleotide
  Sense strand starting at position 3972 of SEQ ID NO: 1563895
guauacucccuaggacaau

SEQ ID NO: 1840248 - RNA, 19 nt, Artificial Sequence
  Description of Artificial Sequence: Synthetic oligonucleotide
  Antisense strand to SEQ ID NO: 1840247
auuguccuagggaguauac

SEQ ID NO: 1840249 - RNA, 19 nt, Artificial Sequence
  Description of Artificial Sequence: Synthetic oligonucleotide
  Sense strand starting at position 15 of SEQ ID NO: 1563896
guccaauuacaaugaguga

SEQ ID NO: 1840250 - RNA, 19 nt, Artificial Sequence
  Description of Artificial Sequence: Synthetic oligonucleotide
  Antisense strand to SEQ ID NO: 1840249
ucacucauuguaauuggac

SEQ ID NO: 1840251 - RNA, 19 nt, Artificial Sequence
  Description of Artificial Sequence: Synthetic oligonucleotide
  Sense strand starting at position 248 of SEQ ID NO: 1563896
cuaugaggugggcagaauu

SEQ ID NO: 1840252 - RNA, 19 nt, Artificial Sequence
  Description of Artificial Sequence: Synthetic oligonucleotide
  Antisense strand to SEQ ID NO: 1840251
aauucugcccaccucauag

SEQ ID NO: 1840253 - RNA, 19 nt, Artificial Sequence
  Description of Artificial Sequence: Synthetic oligonucleotide
  Sense strand starting at position 256 of SEQ ID NO: 1563896
ugggcagaauuauuaucau

SEQ ID NO: 1840254 - RNA, 19 nt, Artificial Sequence
  Description of Artificial Sequence: Synthetic oligonucleotide
  Antisense strand to SEQ ID NO: 1840253
augauaauaauucugccca

SEQ ID NO: 1840255 - RNA, 19 nt, Artificial Sequence
  Description of Artificial Sequence: Synthetic oligonucleotide
  Sense strand starting at position 381 of SEQ ID NO: 1563896
auguaccaggcauauaaau

SEQ ID NO: 1840256 - RNA, 19 nt, Artificial Sequence
  Description of Artificial Sequence: Synthetic oligonucleotide
  Antisense strand to SEQ ID NO: 1840255
auuuauaugccugguacau

SEQ ID NO: 1840257 - RNA, 19 nt, Artificial Sequence
  Description of Artificial Sequence: Synthetic oligonucleotide
  Sense strand starting at position 506 of SEQ ID NO: 1563896
uagugaaccucauucugga

SEQ ID NO: 1840258 - RNA, 19 nt, Artificial Sequence
  Description of Artificial Sequence: Synthetic oligonucleotide
  Antisense strand to SEQ ID NO: 1840257
uccagaaugagguucacua

SEQ ID NO: 1840259 - RNA, 19 nt, Artificial Sequence
  Description of Artificial Sequence: Synthetic oligonucleotide
  Sense strand starting at position 721 of SEQ ID NO: 1563896
uuuagacagguccaaugua

SEQ ID NO: 1840260 - RNA, 19 nt, Artificial Sequence
  Description of Artificial Sequence: Synthetic oligonucleotide
  Antisense strand to SEQ ID NO: 1840259
uacauuggaccugucuaaa

SEQ ID NO: 1840261 - RNA, 19 nt, Artificial Sequence
  Description of Artificial Sequence: Synthetic oligonucleotide
  Sense strand starting at position 798 of SEQ ID NO: 1563896
ccaugugauccuuacagau

SEQ ID NO: 1840262 - RNA, 19 nt, Artificial Sequence
  Description of Artificial Sequence: Synthetic oligonucleotide
  Antisense strand to SEQ ID NO: 1840261
aucuguaaggaucacaugg

SEQ ID NO: 1840263 - RNA, 19 nt, Artificial Sequence
  Description of Artificial Sequence: Synthetic oligonucleotide
  Sense strand starting at position 808 of SEQ ID NO: 1563896
cuuacagaucguuagguaa

SEQ ID NO: 1840264 - RNA, 19 nt, Artificial Sequence
  Description of Artificial Sequence: Synthetic oligonucleotide
  Antisense strand to SEQ ID NO: 1840263
uuaccuaacgaucuguaag

SEQ ID NO: 1840265 - RNA, 19 nt, Artificial Sequence
  Description of Artificial Sequence: Synthetic oligonucleotide
  Sense strand starting at position 889 of SEQ ID NO: 1563896
ggagacuuggguuggaacu

SEQ ID NO: 1840266 - RNA, 19 nt, Artificial Sequence
  Description of Artificial Sequence: Synthetic oligonucleotide
  Antisense strand to SEQ ID NO: 1840265
aguuccaacccaagucucc

SEQ ID NO: 1840267 - RNA, 19 nt, Artificial Sequence
  Description of Artificial Sequence: Synthetic oligonucleotide
  Sense strand starting at position 941 of SEQ ID NO: 1563896
caaguagcaccuugggaau

SEQ ID NO: 1840268 - RNA, 19 nt, Artificial Sequence
  Description of Artificial Sequence: Synthetic oligonucleotide
  Antisense strand to SEQ ID NO: 1840267
auucccaaggugcuacuug

SEQ ID NO: 1840269 - RNA, 19 nt, Artificial Sequence
  Description of Artificial Sequence: Synthetic oligonucleotide
  Sense strand starting at position 1112 of SEQ ID NO: 1563896
cuagacuugugaguuggaa

SEQ ID NO: 1840270 - RNA, 19 nt, Artificial Sequence
  Description of Artificial Sequence: Synthetic oligonucleotide
  Antisense strand to SEQ ID NO: 1840269
uuccaacucacaagucuag

SEQ ID NO: 1840271 - RNA, 19 nt, Artificial Sequence
  Description of Artificial Sequence: Synthetic oligonucleotide
  Sense strand starting at position 1114 of SEQ ID NO: 1563896
agacuugugaguuggaaga

SEQ ID NO: 1840272 - RNA, 19 nt, Artificial Sequence
  Description of Artificial Sequence: Synthetic oligonucleotide
  Antisense strand to SEQ ID NO: 1840271
ucuuccaacucacaagucu

SEQ ID NO: 1840273 - RNA, 19 nt, Artificial Sequence
  Description of Artificial Sequence: Synthetic oligonucleotide
  Sense strand starting at position 1156 of SEQ ID NO: 1563896
uuugacauaccucgaaaua

SEQ ID NO: 1840274 - RNA, 19 nt, Artificial Sequence
  Description of Artificial Sequence: Synthetic oligonucleotide
  Antisense strand to SEQ ID NO: 1840273
uauuucgagguaugucaaa

SEQ ID NO: 1840275 - RNA, 19 nt, Artificial Sequence
  Description of Artificial Sequence: Synthetic oligonucleotide
  Sense strand starting at position 1202 of SEQ ID NO: 1563896
gucugauaucaucgagaca

SEQ ID NO: 1840276 - RNA, 19 nt, Artificial Sequence
  Description of Artificial Sequence: Synthetic oligonucleotide
  Antisense strand to SEQ ID NO: 1840275
ugucucgaugauaucagac

SEQ ID NO: 1840277 - RNA, 19 nt, Artificial Sequence
  Description of Artificial Sequence: Synthetic oligonucleotide
  Sense strand starting at position 1238 of SEQ ID NO: 1563896
uugcauucuggauaccuaa

SEQ ID NO: 1840278 - RNA, 19 nt, Artificial Sequence
  Description of Artificial Sequence: Synthetic oligonucleotide
  Antisense strand to SEQ ID NO: 1840277
uuagguauccagaaugcaa

SEQ ID NO: 1840279 - RNA, 19 nt, Artificial Sequence
  Description of Artificial Sequence: Synthetic oligonucleotide
  Sense strand starting at position 1332 of SEQ ID NO: 1563896
aaagccuuuguagaaagua

SEQ ID NO: 1840280 - RNA, 19 nt, Artificial Sequence
  Description of Artificial Sequence: Synthetic oligonucleotide
  Antisense strand to SEQ ID NO: 1840279
uacuuucuacaaaggcuuu

SEQ ID NO: 1840281 - RNA, 19 nt, Artificial Sequence
  Description of Artificial Sequence: Synthetic oligonucleotide
  Sense strand starting at position 1359 of SEQ ID NO: 1563896
caagcuuaagagugauacu

SEQ ID NO: 1840282 - RNA, 19 nt, Artificial Sequence
  Description of Artificial Sequence: Synthetic oligonucleotide
  Antisense strand to SEQ ID NO: 1840281
aguaucacucuuaagcuug

SEQ ID NO: 1840283 - RNA, 19 nt, Artificial Sequence
  Description of Artificial Sequence: Synthetic oligonucleotide
  Sense strand starting at position 1432 of SEQ ID NO: 1563896
uguuucuugggcuaauuaa

SEQ ID NO: 1840284 - RNA, 19 nt, Artificial Sequence
  Description of Artificial Sequence: Synthetic oligonucleotide
  Antisense strand to SEQ ID NO: 1840283
uuaauuagcccaagaaaca

SEQ ID NO: 1840285 - RNA, 19 nt, Artificial Sequence
  Description of Artificial Sequence: Synthetic oligonucleotide
  Sense strand starting at position 1611 of SEQ ID NO: 1563896
gggagaguuguacgagauu

SEQ ID NO: 1840286 - RNA, 19 nt, Artificial Sequence
  Description of Artificial Sequence: Synthetic oligonucleotide
  Antisense strand to SEQ ID NO: 1840285
aaucucguacaacucuccc

SEQ ID NO: 1840287 - RNA, 19 nt, Artificial Sequence
  Description of Artificial Sequence: Synthetic oligonucleotide
  Sense strand starting at position 1731 of SEQ ID NO: 1563896
cgcggagaugucgucuuaa

SEQ ID NO: 1840288 - RNA, 19 nt, Artificial Sequence
  Description of Artificial Sequence: Synthetic oligonucleotide
  Antisense strand to SEQ ID NO: 1840287
uuaagacgacaucuccgcg

SEQ ID NO: 1840289 - RNA, 19 nt, Artificial Sequence
  Description of Artificial Sequence: Synthetic oligonucleotide
  Sense strand starting at position 2388 of SEQ ID NO: 1563896
ucuguuagccuggauggaa

SEQ ID NO: 1840290 - RNA, 19 nt, Artificial Sequence
  Description of Artificial Sequence: Synthetic oligonucleotide
  Antisense strand to SEQ ID NO: 1840289
uuccauccaggcuaacaga

SEQ ID NO: 1840291 - RNA, 19 nt, Artificial Sequence
  Description of Artificial Sequence: Synthetic oligonucleotide
  Sense strand starting at position 2766 of SEQ ID NO: 1563896
gagucuucugucuagggag

SEQ ID NO: 1840292 - RNA, 19 nt, Artificial Sequence
  Description of Artificial Sequence: Synthetic oligonucleotide
  Antisense strand to SEQ ID NO: 1840291
cucccuagacagaagacuc

SEQ ID NO: 1840293 - RNA, 19 nt, Artificial Sequence
  Description of Artificial Sequence: Synthetic oligonucleotide
  Sense strand starting at position 2915 of SEQ ID NO: 1563896
cuguuuacagucuaaagua

SEQ ID NO: 1840294 - RNA, 19 nt, Artificial Sequence
  Description of Artificial Sequence: Synthetic oligonucleotide
  Antisense strand to SEQ ID NO: 1840293
uacuuuagacuguaaacag

SEQ ID NO: 1840295 - RNA, 19 nt, Artificial Sequence
  Description of Artificial Sequence: Synthetic oligonucleotide
  Sense strand starting at position 2923 of SEQ ID NO: 1563896
agucuaaaguaauucucca

SEQ ID NO: 1840296 - RNA, 19 nt, Artificial Sequence
  Description of Artificial Sequence: Synthetic oligonucleotide
  Antisense strand to SEQ ID NO: 1840295
uggagaauuacuuuagacu

SEQ ID NO: 1840297 - RNA, 19 nt, Artificial Sequence
  Description of Artificial Sequence: Synthetic oligonucleotide
  Sense strand starting at position 2958 of SEQ ID NO: 1563896
gcgugaacacaugaccuaa

SEQ ID NO: 1840298 - RNA, 19 nt, Artificial Sequence
  Description of Artificial Sequence: Synthetic oligonucleotide
  Antisense strand to SEQ ID NO: 1840297
uuaggucauguguucacgc

SEQ ID NO: 1840299 - RNA, 19 nt, Artificial Sequence
  Description of Artificial Sequence: Synthetic oligonucleotide
  Sense strand starting at position 2960 of SEQ ID NO: 1563896
gugaacacaugaccuaauu

SEQ ID NO: 1840300 - RNA, 19 nt, Artificial Sequence
  Description of Artificial Sequence: Synthetic oligonucleotide
  Antisense strand to SEQ ID NO: 1840299
aauuaggucauguguucac

SEQ ID NO: 1840301 - RNA, 19 nt, Artificial Sequence
  Description of Artificial Sequence: Synthetic oligonucleotide
  Sense strand starting at position 3011 of SEQ ID NO: 1563896
aacguaaugugaucaauaa

SEQ ID NO: 1840302 - RNA, 19 nt, Artificial Sequence
  Description of Artificial Sequence: Synthetic oligonucleotide
  Antisense strand to SEQ ID NO: 1840301
uuauugaucacauuacguu

SEQ ID NO: 1840303 - RNA, 19 nt, Artificial Sequence
  Description of Artificial Sequence: Synthetic oligonucleotide
  Sense strand starting at position 3012 of SEQ ID NO: 1563896
acguaaugugaucaauaau

SEQ ID NO: 1840304 - RNA, 19 nt, Artificial Sequence
  Description of Artificial Sequence: Synthetic oligonucleotide
  Antisense strand to SEQ ID NO: 1840303
auuauugaucacauuacgu

SEQ ID NO: 1840305 - RNA, 19 nt, Artificial Sequence
  Description of Artificial Sequence: Synthetic oligonucleotide
  Sense strand starting at position 3048 of SEQ ID NO: 1563896
acucuaguugaacgaugau

SEQ ID NO: 1840306 - RNA, 19 nt, Artificial Sequence
  Description of Artificial Sequence: Synthetic oligonucleotide
  Antisense strand to SEQ ID NO: 1840305
aucaucguucaacuagagu

SEQ ID NO: 1840307 - RNA, 19 nt, Artificial Sequence
  Description of Artificial Sequence: Synthetic oligonucleotide
  Sense strand starting at position 3051 of SEQ ID NO: 1563896
cuaguugaacgaugauaca

SEQ ID NO: 1840308 - RNA, 19 nt, Artificial Sequence
  Description of Artificial Sequence: Synthetic oligonucleotide
  Antisense strand to SEQ ID NO: 1840307
uguaucaucguucaacuag

SEQ ID NO: 1840309 - RNA, 19 nt, Artificial Sequence
  Description of Artificial Sequence: Synthetic oligonucleotide
  Sense strand starting at position 3135 of SEQ ID NO: 1563896
gcgacuuuggcaguauugu

SEQ ID NO: 1840310 - RNA, 19 nt, Artificial Sequence
  Description of Artificial Sequence: Synthetic oligonucleotide
  Antisense strand to SEQ ID NO: 1840309
acaauacugccaaagucgc

SEQ ID NO: 1840311 - RNA, 19 nt, Artificial Sequence
  Description of Artificial Sequence: Synthetic oligonucleotide
  Sense strand starting at position 3616 of SEQ ID NO: 1563896
cuuaaaugccagugagaua

SEQ ID NO: 1840312 - RNA, 19 nt, Artificial Sequence
  Description of Artificial Sequence: Synthetic oligonucleotide
  Antisense strand to SEQ ID NO: 1840311
uaucucacuggcauuuaag

SEQ ID NO: 1840313 - RNA, 19 nt, Artificial Sequence
  Description of Artificial Sequence: Synthetic oligonucleotide
  Sense strand starting at position 3621 of SEQ ID NO: 1563896
augccagugagauaucagu

SEQ ID NO: 1840314 - RNA, 19 nt, Artificial Sequence
  Description of Artificial Sequence: Synthetic oligonucleotide
  Antisense strand to SEQ ID NO: 1840313
acugauaucucacuggcau

SEQ ID NO: 1840315 - RNA, 19 nt, Artificial Sequence
  Description of Artificial Sequence: Synthetic oligonucleotide
  Sense strand starting at position 3704 of SEQ ID NO: 1563896
guaaauugacagugacauu

SEQ ID NO: 1840316 - RNA, 19 nt, Artificial Sequence
  Description of Artificial Sequence: Synthetic oligonucleotide
  Antisense strand to SEQ ID NO: 1840315
aaugucacugucaauuuac

SEQ ID NO: 1840317 - RNA, 19 nt, Artificial Sequence
  Description of Artificial Sequence: Synthetic oligonucleotide
  Sense strand starting at position 3735 of SEQ ID NO: 1563896
gauggaccucagugaucuc

SEQ ID NO: 1840318 - RNA, 19 nt, Artificial Sequence
  Description of Artificial Sequence: Synthetic oligonucleotide
  Antisense strand to SEQ ID NO: 1840317
gagaucacugagguccauc

SEQ ID NO: 1840319 - RNA, 19 nt, Artificial Sequence
  Description of Artificial Sequence: Synthetic oligonucleotide
  Sense strand starting at position 3738 of SEQ ID NO: 1563896
ggaccucagugaucucaga

SEQ ID NO: 1840320 - RNA, 19 nt, Artificial Sequence
  Description of Artificial Sequence: Synthetic oligonucleotide
  Antisense strand to SEQ ID NO: 1840319
ucugagaucacugaggucc

SEQ ID NO: 1840321 - RNA, 19 nt, Artificial Sequence
  Description of Artificial Sequence: Synthetic oligonucleotide
  Sense strand starting at position 3773 of SEQ ID NO: 1563896
aauacuugacguggugaaa

SEQ ID NO: 1840322 - RNA, 19 nt, Artificial Sequence
  Description of Artificial Sequence: Synthetic oligonucleotide
  Antisense strand to SEQ ID NO: 1840321
uuucaccacgucaaguauu

SEQ ID NO: 1840323 - RNA, 19 nt, Artificial Sequence
  Description of Artificial Sequence: Synthetic oligonucleotide
  Sense strand starting at position 3788 of SEQ ID NO: 1563896
gaaaccuuucgguaacauu

SEQ ID NO: 1840324 - RNA, 19 nt, Artificial Sequence
  Description of Artificial Sequence: Synthetic oligonucleotide
  Antisense strand to SEQ ID NO: 1840323
aauguuaccgaaagguuuc

SEQ ID NO: 1840325 - RNA, 19 nt, Artificial Sequence
  Description of Artificial Sequence: Synthetic oligonucleotide
  Sense strand starting at position 3856 of SEQ ID NO: 1563896
cuuaguucccaggauucca

SEQ ID NO: 1840326 - RNA, 19 nt, Artificial Sequence
  Description of Artificial Sequence: Synthetic oligonucleotide
  Antisense strand to SEQ ID NO: 1840325
uggaauccugggaacuaag

SEQ ID NO: 1840327 - RNA, 19 nt, Artificial Sequence
  Description of Artificial Sequence: Synthetic oligonucleotide
  Sense strand starting at position 3937 of SEQ ID NO: 1563896
gcuucuaacagauagagug

SEQ ID NO: 1840328 - RNA, 19 nt, Artificial Sequence
  Description of Artificial Sequence: Synthetic oligonucleotide
  Antisense strand to SEQ ID NO: 1840327
cacucuaucuguuagaagc

SEQ ID NO: 1840329 - RNA, 19 nt, Artificial Sequence
  Description of Artificial Sequence: Synthetic oligonucleotide
  Sense strand starting at position 451 of SEQ ID NO: 1563897
cauucuuguguuugaugaa

SEQ ID NO: 1840330 - RNA, 19 nt, Artificial Sequence
  Description of Artificial Sequence: Synthetic oligonucleotide
  Antisense strand to SEQ ID NO: 1840329
uucaucaaacacaagaaug

SEQ ID NO: 1840331 - RNA, 19 nt, Artificial Sequence
  Description of Artificial Sequence: Synthetic oligonucleotide
  Sense strand starting at position 724 of SEQ ID NO: 1563897
caugaucgugcccaauaua

SEQ ID NO: 1840332 - RNA, 19 nt, Artificial Sequence
  Description of Artificial Sequence: Synthetic oligonucleotide
  Antisense strand to SEQ ID NO: 1840331
uauauugggcacgaucaug

SEQ ID NO: 1840333 - RNA, 19 nt, Artificial Sequence
  Description of Artificial Sequence: Synthetic oligonucleotide
  Sense strand starting at position 772 of SEQ ID NO: 1563897
aaguaacaggccugauugu

SEQ ID NO: 1840334 - RNA, 19 nt, Artificial Sequence
  Description of Artificial Sequence: Synthetic oligonucleotide
  Antisense strand to SEQ ID NO: 1840333
acaaucaggccuguuacuu

SEQ ID NO: 1840335 - RNA, 19 nt, Artificial Sequence
  Description of Artificial Sequence: Synthetic oligonucleotide
  Sense strand starting at position 779 of SEQ ID NO: 1563897
aggccugauugucuuauuu

SEQ ID NO: 1840336 - RNA, 19 nt, Artificial Sequence
  Description of Artificial Sequence: Synthetic oligonucleotide
  Antisense strand to SEQ ID NO: 1840335
aaauaagacaaucaggccu

SEQ ID NO: 1840337 - RNA, 19 nt, Artificial Sequence
  Description of Artificial Sequence: Synthetic oligonucleotide
  Sense strand starting at position 783 of SEQ ID NO: 1563897
cugauugucuuauuugguu

SEQ ID NO: 1840338 - RNA, 19 nt, Artificial Sequence
  Description of Artificial Sequence: Synthetic oligonucleotide
  Antisense strand to SEQ ID NO: 1840337
aaccaaauaagacaaucag

SEQ ID NO: 1840339 - RNA, 19 nt, Artificial Sequence
  Description of Artificial Sequence: Synthetic oligonucleotide
  Sense strand starting at position 787 of SEQ ID NO: 1563897
uugucuuauuugguuggua

SEQ ID NO: 1840340 - RNA, 19 nt, Artificial Sequence
  Description of Artificial Sequence: Synthetic oligonucleotide
  Antisense strand to SEQ ID NO: 1840339
uaccaaccaaauaagacaa

SEQ ID NO: 1840341 - RNA, 19 nt, Artificial Sequence
  Description of Artificial Sequence: Synthetic oligonucleotide
  Sense strand starting at position 788 of SEQ ID NO: 1563897
ugucuuauuugguugguaa

SEQ ID NO: 1840342 - RNA, 19 nt, Artificial Sequence
  Description of Artificial Sequence: Synthetic oligonucleotide
  Antisense strand to SEQ ID NO: 1840341
uuaccaaccaaauaagaca

SEQ ID NO: 1840343 - RNA, 19 nt, Artificial Sequence
  Description of Artificial Sequence: Synthetic oligonucleotide
  Sense strand starting at position 789 of SEQ ID NO: 1563897
gucuuauuugguugguaaa

SEQ ID NO: 1840344 - RNA, 19 nt, Artificial Sequence
  Description of Artificial Sequence: Synthetic oligonucleotide
  Antisense strand to SEQ ID NO: 1840343
uuuaccaaccaaauaagac

SEQ ID NO: 1840345 - RNA, 19 nt, Artificial Sequence
  Description of Artificial Sequence: Synthetic oligonucleotide
  Sense strand starting at position 896 of SEQ ID NO: 1563897
auaauacugagcuguggua

SEQ ID NO: 1840346 - RNA, 19 nt, Artificial Sequence
  Description of Artificial Sequence: Synthetic oligonucleotide
  Antisense strand to SEQ ID NO: 1840345
uaccacagcucaguauuau

SEQ ID NO: 1840347 - RNA, 19 nt, Artificial Sequence
  Description of Artificial Sequence: Synthetic oligonucleotide
  Sense strand starting at position 898 of SEQ ID NO: 1563897
aauacugagcugugguaaa

SEQ ID NO: 1840348 - RNA, 19 nt, Artificial Sequence
  Description of Artificial Sequence: Synthetic oligonucleotide
  Antisense strand to SEQ ID NO: 1840347
uuuaccacagcucaguauu

SEQ ID NO: 1840349 - RNA, 19 nt, Artificial Sequence
  Description of Artificial Sequence: Synthetic oligonucleotide
  Sense strand starting at position 980 of SEQ ID NO: 1563897
ccauuaaguugcccugaag

SEQ ID NO: 1840350 - RNA, 19 nt, Artificial Sequence
  Description of Artificial Sequence: Synthetic oligonucleotide
  Antisense strand to SEQ ID NO: 1840349
cuucagggcaacuuaaugg

SEQ ID NO: 1840351 - RNA, 19 nt, Artificial Sequence
  Description of Artificial Sequence: Synthetic oligonucleotide
  Sense strand starting at position 991 of SEQ ID NO: 1563897
cccugaagcccgggacaua

SEQ ID NO: 1840352 - RNA, 19 nt, Artificial Sequence
  Description of Artificial Sequence: Synthetic oligonucleotide
  Antisense strand to SEQ ID NO: 1840351
uaugucccgggcuucaggg

SEQ ID NO: 1840353 - RNA, 19 nt, Artificial Sequence
  Description of Artificial Sequence: Synthetic oligonucleotide
  Sense strand starting at position 992 of SEQ ID NO: 1563897
ccugaagcccgggacauau

SEQ ID NO: 1840354 - RNA, 19 nt, Artificial Sequence
  Description of Artificial Sequence: Synthetic oligonucleotide
  Antisense strand to SEQ ID NO: 1840353
auaugucccgggcuucagg

SEQ ID NO: 1840355 - RNA, 19 nt, Artificial Sequence
  Description of Artificial Sequence: Synthetic oligonucleotide
  Sense strand starting at position 1002 of SEQ ID NO: 1563897
gggacauauuaguuacccu

SEQ ID NO: 1840356 - RNA, 19 nt, Artificial Sequence
  Description of Artificial Sequence: Synthetic oligonucleotide
  Antisense strand to SEQ ID NO: 1840355
aggguaacuaauauguccc

SEQ ID NO: 1840357 - RNA, 19 nt, Artificial Sequence
  Description of Artificial Sequence: Synthetic oligonucleotide
  Sense strand starting at position 1114 of SEQ ID NO: 1563897
gaagaucugguguaucugu

SEQ ID NO: 1840358 - RNA, 19 nt, Artificial Sequence
  Description of Artificial Sequence: Synthetic oligonucleotide
  Antisense strand to SEQ ID NO: 1840357
acagauacaccagaucuuc

SEQ ID NO: 1840359 - RNA, 19 nt, Artificial Sequence
  Description of Artificial Sequence: Synthetic oligonucleotide
  Sense strand starting at position 1166 of SEQ ID NO: 1563897
cgaugcgugcgucuauaaa

SEQ ID NO: 1840360 - RNA, 19 nt, Artificial Sequence
  Description of Artificial Sequence: Synthetic oligonucleotide
  Antisense strand to SEQ ID NO: 1840359
uuuauagacgcacgcaucg

SEQ ID NO: 1840361 - RNA, 19 nt, Artificial Sequence
  Description of Artificial Sequence: Synthetic oligonucleotide
  Sense strand starting at position 1218 of SEQ ID NO: 1563897
uuacuugcuuaggcaaaua

SEQ ID NO: 1840362 - RNA, 19 nt, Artificial Sequence
  Description of Artificial Sequence: Synthetic oligonucleotide
  Antisense strand to SEQ ID NO: 1840361
uauuugccuaagcaaguaa

SEQ ID NO: 1840363 - RNA, 19 nt, Artificial Sequence
  Description of Artificial Sequence: Synthetic oligonucleotide
  Sense strand starting at position 1331 of SEQ ID NO: 1563897
cugcguaucagggaacuaa

SEQ ID NO: 1840364 - RNA, 19 nt, Artificial Sequence
  Description of Artificial Sequence: Synthetic oligonucleotide
  Antisense strand to SEQ ID NO: 1840363
uuaguucccugauacgcag

SEQ ID NO: 1840365 - RNA, 19 nt, Artificial Sequence
  Description of Artificial Sequence: Synthetic oligonucleotide
  Sense strand starting at position 1393 of SEQ ID NO: 1563897
aaaccucucguguaugaca

SEQ ID NO: 1840366 - RNA, 19 nt, Artificial Sequence
  Description of Artificial Sequence: Synthetic oligonucleotide
  Antisense strand to SEQ ID NO: 1840365
ugucauacacgagagguuu

SEQ ID NO: 1840367 - RNA, 19 nt, Artificial Sequence
  Description of Artificial Sequence: Synthetic oligonucleotide
  Sense strand starting at position 2263 of SEQ ID NO: 1563897
gggccaucccuguaaggga

SEQ ID NO: 1840368 - RNA, 19 nt, Artificial Sequence
  Description of Artificial Sequence: Synthetic oligonucleotide
  Antisense strand to SEQ ID NO: 1840367
ucccuuacagggauggccc

SEQ ID NO: 1840369 - RNA, 19 nt, Artificial Sequence
  Description of Artificial Sequence: Synthetic oligonucleotide
  Sense strand starting at position 2422 of SEQ ID NO: 1563897
ugagcuauuauuggguaca

SEQ ID NO: 1840370 - RNA, 19 nt, Artificial Sequence
  Description of Artificial Sequence: Synthetic oligonucleotide
  Antisense strand to SEQ ID NO: 1840369
uguacccaauaauagcuca

SEQ ID NO: 1840371 - RNA, 19 nt, Artificial Sequence
  Description of Artificial Sequence: Synthetic oligonucleotide
  Sense strand starting at position 2424 of SEQ ID NO: 1563897
agcuauuauuggguacaca

SEQ ID NO: 1840372 - RNA, 19 nt, Artificial Sequence
  Description of Artificial Sequence: Synthetic oligonucleotide
  Antisense strand to SEQ ID NO: 1840371
uguguacccaauaauagcu

SEQ ID NO: 1840373 - RNA, 19 nt, Artificial Sequence
  Description of Artificial Sequence: Synthetic oligonucleotide
  Sense strand starting at position 2425 of SEQ ID NO: 1563897
gcuauuauuggguacacag

SEQ ID NO: 1840374 - RNA, 19 nt, Artificial Sequence
  Description of Artificial Sequence: Synthetic oligonucleotide
  Antisense strand to SEQ ID NO: 1840373
cuguguacccaauaauagc

SEQ ID NO: 1840375 - RNA, 19 nt, Artificial Sequence
  Description of Artificial Sequence: Synthetic oligonucleotide
  Sense strand starting at position 2555 of SEQ ID NO: 1563897
gccagcaccuuuccaagaa

SEQ ID NO: 1840376 - RNA, 19 nt, Artificial Sequence
  Description of Artificial Sequence: Synthetic oligonucleotide
  Antisense strand to SEQ ID NO: 1840375
uucuuggaaaggugcuggc

SEQ ID NO: 1840377 - RNA, 19 nt, Artificial Sequence
  Description of Artificial Sequence: Synthetic oligonucleotide
  Sense strand starting at position 2559 of SEQ ID NO: 1563897
gcaccuuuccaagaacgca

SEQ ID NO: 1840378 - RNA, 19 nt, Artificial Sequence
  Description of Artificial Sequence: Synthetic oligonucleotide
  Antisense strand to SEQ ID NO: 1840377
ugcguucuuggaaaggugc

SEQ ID NO: 1840379 - RNA, 19 nt, Artificial Sequence
  Description of Artificial Sequence: Synthetic oligonucleotide
  Sense strand starting at position 3130 of SEQ ID NO: 1563897
ugacuuuaucaugaccugu

SEQ ID NO: 1840380 - RNA, 19 nt, Artificial Sequence
  Description of Artificial Sequence: Synthetic oligonucleotide
  Antisense strand to SEQ ID NO: 1840379
acaggucaugauaaaguca

SEQ ID NO: 1840381 - RNA, 19 nt, Artificial Sequence
  Description of Artificial Sequence: Synthetic oligonucleotide
  Sense strand starting at position 3132 of SEQ ID NO: 1563897
acuuuaucaugaccuguuu

SEQ ID NO: 1840382 - RNA, 19 nt, Artificial Sequence
  Description of Artificial Sequence: Synthetic oligonucleotide
  Antisense strand to SEQ ID NO: 1840381
aaacaggucaugauaaagu

SEQ ID NO: 1840383 - RNA, 19 nt, Artificial Sequence
  Description of Artificial Sequence: Synthetic oligonucleotide
  Sense strand starting at position 3199 of SEQ ID NO: 1563897
accugauaccaguguauau

SEQ ID NO: 1840384 - RNA, 19 nt, Artificial Sequence
  Description of Artificial Sequence: Synthetic oligonucleotide
  Antisense strand to SEQ ID NO: 1840383
auauacacugguaucaggu

SEQ ID NO: 1840385 - RNA, 19 nt, Artificial Sequence
  Description of Artificial Sequence: Synthetic oligonucleotide
  Sense strand starting at position 3228 of SEQ ID NO: 1563897
guuucuacauagucacaca

SEQ ID NO: 1840386 - RNA, 19 nt, Artificial Sequence
  Description of Artificial Sequence: Synthetic oligonucleotide
  Antisense strand to SEQ ID NO: 1840385
ugugugacuauguagaaac

SEQ ID NO: 1840387 - RNA, 19 nt, Artificial Sequence
  Description of Artificial Sequence: Synthetic oligonucleotide
  Sense strand starting at position 3292 of SEQ ID NO: 1563897
ugcuuuauugaagagucua

SEQ ID NO: 1840388 - RNA, 19 nt, Artificial Sequence
  Description of Artificial Sequence: Synthetic oligonucleotide
  Antisense strand to SEQ ID NO: 1840387
uagacucuucaauaaagca

SEQ ID NO: 1840389 - RNA, 19 nt, Artificial Sequence
  Description of Artificial Sequence: Synthetic oligonucleotide
  Sense strand starting at position 3305 of SEQ ID NO: 1563897
agucuagacuucuuagaag

SEQ ID NO: 1840390 - RNA, 19 nt, Artificial Sequence
  Description of Artificial Sequence: Synthetic oligonucleotide
  Antisense strand to SEQ ID NO: 1840389
cuucuaagaagucuagacu

SEQ ID NO: 1840391 - RNA, 19 nt, Artificial Sequence
  Description of Artificial Sequence: Synthetic oligonucleotide
  Sense strand starting at position 3411 of SEQ ID NO: 1563897
ggccuaguuccagggaacu

SEQ ID NO: 1840392 - RNA, 19 nt, Artificial Sequence
  Description of Artificial Sequence: Synthetic oligonucleotide
  Antisense strand to SEQ ID NO: 1840391
aguucccuggaacuaggcc

SEQ ID NO: 1840393 - RNA, 19 nt, Artificial Sequence
  Description of Artificial Sequence: Synthetic oligonucleotide
  Sense strand starting at position 3489 of SEQ ID NO: 1563897
ugccaaacuccuggaaaga

SEQ ID NO: 1840394 - RNA, 19 nt, Artificial Sequence
  Description of Artificial Sequence: Synthetic oligonucleotide
  Antisense strand to SEQ ID NO: 1840393
ucuuuccaggaguuuggca

SEQ ID NO: 1840395 - RNA, 19 nt, Artificial Sequence
  Description of Artificial Sequence: Synthetic oligonucleotide
  Sense strand starting at position 3687 of SEQ ID NO: 1563897
aaauuugcaugcuagagag

SEQ ID NO: 1840396 - RNA, 19 nt, Artificial Sequence
  Description of Artificial Sequence: Synthetic oligonucleotide
  Antisense strand to SEQ ID NO: 1840395
cucucuagcaugcaaauuu

SEQ ID NO: 1840397 - RNA, 19 nt, Artificial Sequence
  Description of Artificial Sequence: Synthetic oligonucleotide
  Sense strand starting at position 3721 of SEQ ID NO: 1563897
gcugaauaacucuggauuc

SEQ ID NO: 1840398 - RNA, 19 nt, Artificial Sequence
  Description of Artificial Sequence: Synthetic oligonucleotide
  Antisense strand to SEQ ID NO: 1840397
gaauccagaguuauucagc

SEQ ID NO: 1840399 - RNA, 19 nt, Artificial Sequence
  Description of Artificial Sequence: Synthetic oligonucleotide
  Sense strand starting at position 3735 of SEQ ID NO: 1563897
gauuccugguaucugugaa

SEQ ID NO: 1840400 - RNA, 19 nt, Artificial Sequence
  Description of Artificial Sequence: Synthetic oligonucleotide
  Antisense strand to SEQ ID NO: 1840399
uucacagauaccaggaauc

SEQ ID NO: 1840401 - RNA, 19 nt, Artificial Sequence
  Description of Artificial Sequence: Synthetic oligonucleotide
  Sense strand starting at position 3825 of SEQ ID NO: 1563897
auauaauaggccugguuaa

SEQ ID NO: 1840402 - RNA, 19 nt, Artificial Sequence
  Description of Artificial Sequence: Synthetic oligonucleotide
  Antisense strand to SEQ ID NO: 1840401
uuaaccaggccuauuauau

SEQ ID NO: 1840403 - RNA, 19 nt, Artificial Sequence
  Description of Artificial Sequence: Synthetic oligonucleotide
  Sense strand starting at position 3826 of SEQ ID NO: 1563897
uauaauaggccugguuaag

SEQ ID NO: 1840404 - RNA, 19 nt, Artificial Sequence
  Description of Artificial Sequence: Synthetic oligonucleotide
  Antisense strand to SEQ ID NO: 1840403
cuuaaccaggccuauuaua

SEQ ID NO: 1840405 - RNA, 19 nt, Artificial Sequence
  Description of Artificial Sequence: Synthetic oligonucleotide
  Sense strand starting at position 3836 of SEQ ID NO: 1563897
cugguuaagugucccaaga

SEQ ID NO: 1840406 - RNA, 19 nt, Artificial Sequence
  Description of Artificial Sequence: Synthetic oligonucleotide
  Antisense strand to SEQ ID NO: 1840405
ucuugggacacuuaaccag

SEQ ID NO: 1840407 - RNA, 19 nt, Artificial Sequence
  Description of Artificial Sequence: Synthetic oligonucleotide
  Sense strand starting at position 3931 of SEQ ID NO: 1563897
ucauccuaaggagguaauu

SEQ ID NO: 1840408 - RNA, 19 nt, Artificial Sequence
  Description of Artificial Sequence: Synthetic oligonucleotide
  Antisense strand to SEQ ID NO: 1840407
aauuaccuccuuaggauga

SEQ ID NO: 1840409 - RNA, 19 nt, Artificial Sequence
  Description of Artificial Sequence: Synthetic oligonucleotide
  Sense strand starting at position 35 of SEQ ID NO: 1563898
cucuauuguccacauagca

SEQ ID NO: 1840410 - RNA, 19 nt, Artificial Sequence
  Description of Artificial Sequence: Synthetic oligonucleotide
  Antisense strand to SEQ ID NO: 1840409
ugcuauguggacaauagag

SEQ ID NO: 1840411 - RNA, 19 nt, Artificial Sequence
  Description of Artificial Sequence: Synthetic oligonucleotide
  Sense strand starting at position 154 of SEQ ID NO: 1563898
cugugacuucucuaacguc

SEQ ID NO: 1840412 - RNA, 19 nt, Artificial Sequence
  Description of Artificial Sequence: Synthetic oligonucleotide
  Antisense strand to SEQ ID NO: 1840411
gacguuagagaagucacag

SEQ ID NO: 1840413 - RNA, 19 nt, Artificial Sequence
  Description of Artificial Sequence: Synthetic oligonucleotide
  Sense strand starting at position 273 of SEQ ID NO: 1563898
acaggccucugacuagaau

SEQ ID NO: 1840414 - RNA, 19 nt, Artificial Sequence
  Description of Artificial Sequence: Synthetic oligonucleotide
  Antisense strand to SEQ ID NO: 1840413
auucuagucagaggccugu

SEQ ID NO: 1840415 - RNA, 19 nt, Artificial Sequence
  Description of Artificial Sequence: Synthetic oligonucleotide
  Sense strand starting at position 276 of SEQ ID NO: 1563898
ggccucugacuagaauacu

SEQ ID NO: 1840416 - RNA, 19 nt, Artificial Sequence
  Description of Artificial Sequence: Synthetic oligonucleotide
  Antisense strand to SEQ ID NO: 1840415
aguauucuagucagaggcc

SEQ ID NO: 1840417 - RNA, 19 nt, Artificial Sequence
  Description of Artificial Sequence: Synthetic oligonucleotide
  Sense strand starting at position 364 of SEQ ID NO: 1563898
ucaggcuuucccugaucau

SEQ ID NO: 1840418 - RNA, 19 nt, Artificial Sequence
  Description of Artificial Sequence: Synthetic oligonucleotide
  Antisense strand to SEQ ID NO: 1840417
augaucagggaaagccuga

SEQ ID NO: 1840419 - RNA, 19 nt, Artificial Sequence
  Description of Artificial Sequence: Synthetic oligonucleotide
  Sense strand starting at position 367 of SEQ ID NO: 1563898
ggcuuucccugaucaucaa

SEQ ID NO: 1840420 - RNA, 19 nt, Artificial Sequence
  Description of Artificial Sequence: Synthetic oligonucleotide
  Antisense strand to SEQ ID NO: 1840419
uugaugaucagggaaagcc

SEQ ID NO: 1840421 - RNA, 19 nt, Artificial Sequence
  Description of Artificial Sequence: Synthetic oligonucleotide
  Sense strand starting at position 441 of SEQ ID NO: 1563898
uccuuuggcuucuuaaaug

SEQ ID NO: 1840422 - RNA, 19 nt, Artificial Sequence
  Description of Artificial Sequence: Synthetic oligonucleotide
  Antisense strand to SEQ ID NO: 1840421
cauuuaagaagccaaagga

SEQ ID NO: 1840423 - RNA, 19 nt, Artificial Sequence
  Description of Artificial Sequence: Synthetic oligonucleotide
  Sense strand starting at position 525 of SEQ ID NO: 1563898
uucgauuuccacuguuggu

SEQ ID NO: 1840424 - RNA, 19 nt, Artificial Sequence
  Description of Artificial Sequence: Synthetic oligonucleotide
  Antisense strand to SEQ ID NO: 1840423
accaacaguggaaaucgaa

SEQ ID NO: 1840425 - RNA, 19 nt, Artificial Sequence
  Description of Artificial Sequence: Synthetic oligonucleotide
  Sense strand starting at position 641 of SEQ ID NO: 1563898
guugaauauuugcagauga

SEQ ID NO: 1840426 - RNA, 19 nt, Artificial Sequence
  Description of Artificial Sequence: Synthetic oligonucleotide
  Antisense strand to SEQ ID NO: 1840425
ucaucugcaaauauucaac

SEQ ID NO: 1840427 - RNA, 19 nt, Artificial Sequence
  Description of Artificial Sequence: Synthetic oligonucleotide
  Sense strand starting at position 658 of SEQ ID NO: 1563898
gagugaaguccucaccauu

SEQ ID NO: 1840428 - RNA, 19 nt, Artificial Sequence
  Description of Artificial Sequence: Synthetic oligonucleotide
  Antisense strand to SEQ ID NO: 1840427
aauggugaggacuucacuc

SEQ ID NO: 1840429 - RNA, 19 nt, Artificial Sequence
  Description of Artificial Sequence: Synthetic oligonucleotide
  Sense strand starting at position 716 of SEQ ID NO: 1563898
uaaccacuugggugauuaa

SEQ ID NO: 1840430 - RNA, 19 nt, Artificial Sequence
  Description of Artificial Sequence: Synthetic oligonucleotide
  Antisense strand to SEQ ID NO: 1840429
uuaaucacccaagugguua

SEQ ID NO: 1840431 - RNA, 19 nt, Artificial Sequence
  Description of Artificial Sequence: Synthetic oligonucleotide
  Sense strand starting at position 749 of SEQ ID NO: 1563898
uuguaauuacacugaggua

SEQ ID NO: 1840432 - RNA, 19 nt, Artificial Sequence
  Description of Artificial Sequence: Synthetic oligonucleotide
  Antisense strand to SEQ ID NO: 1840431
uaccucaguguaauuacaa

SEQ ID NO: 1840433 - RNA, 19 nt, Artificial Sequence
  Description of Artificial Sequence: Synthetic oligonucleotide
  Sense strand starting at position 780 of SEQ ID NO: 1563898
aagggaauguuucuuguuu

SEQ ID NO: 1840434 - RNA, 19 nt, Artificial Sequence
  Description of Artificial Sequence: Synthetic oligonucleotide
  Antisense strand to SEQ ID NO: 1840433
aaacaagaaacauucccuu

SEQ ID NO: 1840435 - RNA, 19 nt, Artificial Sequence
  Description of Artificial Sequence: Synthetic oligonucleotide
  Sense strand starting at position 781 of SEQ ID NO: 1563898
agggaauguuucuuguuuc

SEQ ID NO: 1840436 - RNA, 19 nt, Artificial Sequence
  Description of Artificial Sequence: Synthetic oligonucleotide
  Antisense strand to SEQ ID NO: 1840435
gaaacaagaaacauucccu

SEQ ID NO: 1840437 - RNA, 19 nt, Artificial Sequence
  Description of Artificial Sequence: Synthetic oligonucleotide
  Sense strand starting at position 1013 of SEQ ID NO: 1563898
guucgacacggucacuuua

SEQ ID NO: 1840438 - RNA, 19 nt, Artificial Sequence
  Description of Artificial Sequence: Synthetic oligonucleotide
  Antisense strand to SEQ ID NO: 1840437
uaaagugaccgugucgaac

SEQ ID NO: 1840439 - RNA, 19 nt, Artificial Sequence
  Description of Artificial Sequence: Synthetic oligonucleotide
  Sense strand starting at position 1023 of SEQ ID NO: 1563898
gucacuuuauguuucuaac

SEQ ID NO: 1840440 - RNA, 19 nt, Artificial Sequence
  Description of Artificial Sequence: Synthetic oligonucleotide
  Antisense strand to SEQ ID NO: 1840439
guuagaaacauaaagugac

SEQ ID NO: 1840441 - RNA, 19 nt, Artificial Sequence
  Description of Artificial Sequence: Synthetic oligonucleotide
  Sense strand starting at position 1116 of SEQ ID NO: 1563898
ucccucaaagugugaagaa

SEQ ID NO: 1840442 - RNA, 19 nt, Artificial Sequence
  Description of Artificial Sequence: Synthetic oligonucleotide
  Antisense strand to SEQ ID NO: 1840441
uucuucacacuuugaggga

SEQ ID NO: 1840443 - RNA, 19 nt, Artificial Sequence
  Description of Artificial Sequence: Synthetic oligonucleotide
  Sense strand starting at position 1137 of SEQ ID NO: 1563898
gaaaguaaaugguucuguu

SEQ ID NO: 1840444 - RNA, 19 nt, Artificial Sequence
  Description of Artificial Sequence: Synthetic oligonucleotide
  Antisense strand to SEQ ID NO: 1840443
aacagaaccauuuacuuuc

SEQ ID NO: 1840445 - RNA, 19 nt, Artificial Sequence
  Description of Artificial Sequence: Synthetic oligonucleotide
  Sense strand starting at position 2395 of SEQ ID NO: 1563898
ggagcaauuccgugcauuu

SEQ ID NO: 1840446 - RNA, 19 nt, Artificial Sequence
  Description of Artificial Sequence: Synthetic oligonucleotide
  Antisense strand to SEQ ID NO: 1840445
aaaugcacggaauugcucc

SEQ ID NO: 1840447 - RNA, 19 nt, Artificial Sequence
  Description of Artificial Sequence: Synthetic oligonucleotide
  Sense strand starting at position 2615 of SEQ ID NO: 1563898
caauaucuuggugaggcau

SEQ ID NO: 1840448 - RNA, 19 nt, Artificial Sequence
  Description of Artificial Sequence: Synthetic oligonucleotide
  Antisense strand to SEQ ID NO: 1840447
augccucaccaagauauug

SEQ ID NO: 1840449 - RNA, 19 nt, Artificial Sequence
  Description of Artificial Sequence: Synthetic oligonucleotide
  Sense strand starting at position 2641 of SEQ ID NO: 1563898
auuugcuuucugggcuaga

SEQ ID NO: 1840450 - RNA, 19 nt, Artificial Sequence
  Description of Artificial Sequence: Synthetic oligonucleotide
  Antisense strand to SEQ ID NO: 1840449
ucuagcccagaaagcaaau

SEQ ID NO: 1840451 - RNA, 19 nt, Artificial Sequence
  Description of Artificial Sequence: Synthetic oligonucleotide
  Sense strand starting at position 2723 of SEQ ID NO: 1563898
cccugauuaaguugggagu

SEQ ID NO: 1840452 - RNA, 19 nt, Artificial Sequence
  Description of Artificial Sequence: Synthetic oligonucleotide
  Antisense strand to SEQ ID NO: 1840451
acucccaacuuaaucaggg

SEQ ID NO: 1840453 - RNA, 19 nt, Artificial Sequence
  Description of Artificial Sequence: Synthetic oligonucleotide
  Sense strand starting at position 2743 of SEQ ID NO: 1563898
gguguguggcucgugauua

SEQ ID NO: 1840454 - RNA, 19 nt, Artificial Sequence
  Description of Artificial Sequence: Synthetic oligonucleotide
  Antisense strand to SEQ ID NO: 1840453
uaaucacgagccacacacc

SEQ ID NO: 1840455 - RNA, 19 nt, Artificial Sequence
  Description of Artificial Sequence: Synthetic oligonucleotide
  Sense strand starting at position 3069 of SEQ ID NO: 1563898
ccuaucucacacuggagaa

SEQ ID NO: 1840456 - RNA, 19 nt, Artificial Sequence
  Description of Artificial Sequence: Synthetic oligonucleotide
  Antisense strand to SEQ ID NO: 1840455
uucuccagugugagauagg

SEQ ID NO: 1840457 - RNA, 19 nt, Artificial Sequence
  Description of Artificial Sequence: Synthetic oligonucleotide
  Sense strand starting at position 3081 of SEQ ID NO: 1563898
uggagaaucaccgacugca

SEQ ID NO: 1840458 - RNA, 19 nt, Artificial Sequence
  Description of Artificial Sequence: Synthetic oligonucleotide
  Antisense strand to SEQ ID NO: 1840457
ugcagucggugauucucca

SEQ ID NO: 1840459 - RNA, 19 nt, Artificial Sequence
  Description of Artificial Sequence: Synthetic oligonucleotide
  Sense strand starting at position 3132 of SEQ ID NO: 1563898
ugguuaacccacuguuaug

SEQ ID NO: 1840460 - RNA, 19 nt, Artificial Sequence
  Description of Artificial Sequence: Synthetic oligonucleotide
  Antisense strand to SEQ ID NO: 1840459
cauaacaguggguuaacca

SEQ ID NO: 1840461 - RNA, 19 nt, Artificial Sequence
  Description of Artificial Sequence: Synthetic oligonucleotide
  Sense strand starting at position 3169 of SEQ ID NO: 1563898
cccugaaguccauauguug

SEQ ID NO: 1840462 - RNA, 19 nt, Artificial Sequence
  Description of Artificial Sequence: Synthetic oligonucleotide
  Antisense strand to SEQ ID NO: 1840461
caacauauggacuucaggg

SEQ ID NO: 1840463 - RNA, 19 nt, Artificial Sequence
  Description of Artificial Sequence: Synthetic oligonucleotide
  Sense strand starting at position 3192 of SEQ ID NO: 1563898
ccuaauucccugugugaug

SEQ ID NO: 1840464 - RNA, 19 nt, Artificial Sequence
  Description of Artificial Sequence: Synthetic oligonucleotide
  Antisense strand to SEQ ID NO: 1840463
caucacacagggaauuagg

SEQ ID NO: 1840465 - RNA, 19 nt, Artificial Sequence
  Description of Artificial Sequence: Synthetic oligonucleotide
  Sense strand starting at position 3256 of SEQ ID NO: 1563898
caagcucuagucugaugga

SEQ ID NO: 1840466 - RNA, 19 nt, Artificial Sequence
  Description of Artificial Sequence: Synthetic oligonucleotide
  Antisense strand to SEQ ID NO: 1840465
uccaucagacuagagcuug

SEQ ID NO: 1840467 - RNA, 19 nt, Artificial Sequence
  Description of Artificial Sequence: Synthetic oligonucleotide
  Sense strand starting at position 3300 of SEQ ID NO: 1563898
cagagagcuugaucucaug

SEQ ID NO: 1840468 - RNA, 19 nt, Artificial Sequence
  Description of Artificial Sequence: Synthetic oligonucleotide
  Antisense strand to SEQ ID NO: 1840467
caugagaucaagcucucug

SEQ ID NO: 1840469 - RNA, 19 nt, Artificial Sequence
  Description of Artificial Sequence: Synthetic oligonucleotide
  Sense strand starting at position 3567 of SEQ ID NO: 1563898
cuuagcugugcugagaauu

SEQ ID NO: 1840470 - RNA, 19 nt, Artificial Sequence
  Description of Artificial Sequence: Synthetic oligonucleotide
  Antisense strand to SEQ ID NO: 1840469
aauucucagcacagcuaag

SEQ ID NO: 1840471 - RNA, 19 nt, Artificial Sequence
  Description of Artificial Sequence: Synthetic oligonucleotide
  Sense strand starting at position 3573 of SEQ ID NO: 1563898
ugugcugagaauugucaga

SEQ ID NO: 1840472 - RNA, 19 nt, Artificial Sequence
  Description of Artificial Sequence: Synthetic oligonucleotide
  Antisense strand to SEQ ID NO: 1840471
ucugacaauucucagcaca

SEQ ID NO: 1840473 - RNA, 19 nt, Artificial Sequence
  Description of Artificial Sequence: Synthetic oligonucleotide
  Sense strand starting at position 3575 of SEQ ID NO: 1563898
ugcugagaauugucagaaa

SEQ ID NO: 1840474 - RNA, 19 nt, Artificial Sequence
  Description of Artificial Sequence: Synthetic oligonucleotide
  Antisense strand to SEQ ID NO: 1840473
uuucugacaauucucagca

SEQ ID NO: 1840475 - RNA, 19 nt, Artificial Sequence
  Description of Artificial Sequence: Synthetic oligonucleotide
  Sense strand starting at position 3578 of SEQ ID NO: 1563898
ugagaauugucagaaagaa

SEQ ID NO: 1840476 - RNA, 19 nt, Artificial Sequence
  Description of Artificial Sequence: Synthetic oligonucleotide
  Antisense strand to SEQ ID NO: 1840475
uucuuucugacaauucuca

SEQ ID NO: 1840477 - RNA, 19 nt, Artificial Sequence
  Description of Artificial Sequence: Synthetic oligonucleotide
  Sense strand starting at position 3720 of SEQ ID NO: 1563898
agagaugaaucugacauau

SEQ ID NO: 1840478 - RNA, 19 nt, Artificial Sequence
  Description of Artificial Sequence: Synthetic oligonucleotide
  Antisense strand to SEQ ID NO: 1840477
auaugucagauucaucucu

SEQ ID NO: 1840479 - RNA, 19 nt, Artificial Sequence
  Description of Artificial Sequence: Synthetic oligonucleotide
  Sense strand starting at position 3922 of SEQ ID NO: 1563898
ugaguaaauccuugaugag

SEQ ID NO: 1840480 - RNA, 19 nt, Artificial Sequence
  Description of Artificial Sequence: Synthetic oligonucleotide
  Antisense strand to SEQ ID NO: 1840479
cucaucaaggauuuacuca

SEQ ID NO: 1840481 - RNA, 19 nt, Artificial Sequence
  Description of Artificial Sequence: Synthetic oligonucleotide
  Sense strand starting at position 3951 of SEQ ID NO: 1563898
caaguuauuccaggcagaa

SEQ ID NO: 1840482 - RNA, 19 nt, Artificial Sequence
  Description of Artificial Sequence: Synthetic oligonucleotide
  Antisense strand to SEQ ID NO: 1840481
uucugccuggaauaacuug

SEQ ID NO: 1840483 - RNA, 19 nt, Artificial Sequence
  Description of Artificial Sequence: Synthetic oligonucleotide
  Sense strand starting at position 3972 of SEQ ID NO: 1563898
cacaguuaugggcaaaggu

SEQ ID NO: 1840484 - RNA, 19 nt, Artificial Sequence
  Description of Artificial Sequence: Synthetic oligonucleotide
  Antisense strand to SEQ ID NO: 1840483
accuuugcccauaacugug

SEQ ID NO: 1840485 - RNA, 19 nt, Artificial Sequence
  Description of Artificial Sequence: Synthetic oligonucleotide
  Sense strand starting at position 3980 of SEQ ID NO: 1563898
ugggcaaagguguggauua

SEQ ID NO: 1840486 - RNA, 19 nt, Artificial Sequence
  Description of Artificial Sequence: Synthetic oligonucleotide
  Antisense strand to SEQ ID NO: 1840485
uaauccacaccuuugccca

SEQ ID NO: 1840487 - RNA, 19 nt, Artificial Sequence
  Description of Artificial Sequence: Synthetic oligonucleotide
  Sense strand starting at position 3982 of SEQ ID NO: 1563898
ggcaaagguguggauuagu

SEQ ID NO: 1840488 - RNA, 19 nt, Artificial Sequence
  Description of Artificial Sequence: Synthetic oligonucleotide
  Antisense strand to SEQ ID NO: 1840487
acuaauccacaccuuugcc

SEQ ID NO: 1840489 - RNA, 19 nt, Artificial Sequence
  Description of Artificial Sequence: Synthetic oligonucleotide
  Sense strand starting at position 76 of SEQ ID NO: 1563899
gaguauucgagugagcuga

SEQ ID NO: 1840490 - RNA, 19 nt, Artificial Sequence
  Description of Artificial Sequence: Synthetic oligonucleotide
  Antisense strand to SEQ ID NO: 1840489
ucagcucacucgaauacuc

SEQ ID NO: 1840491 - RNA, 19 nt, Artificial Sequence
  Description of Artificial Sequence: Synthetic oligonucleotide
  Sense strand starting at position 165 of SEQ ID NO: 1563899
guuccuuuccuuuaauggu

SEQ ID NO: 1840492 - RNA, 19 nt, Artificial Sequence
  Description of Artificial Sequence: Synthetic oligonucleotide
  Antisense strand to SEQ ID NO: 1840491
accauuaaaggaaaggaac

SEQ ID NO: 1840493 - RNA, 19 nt, Artificial Sequence
  Description of Artificial Sequence: Synthetic oligonucleotide
  Sense strand starting at position 189 of SEQ ID NO: 1563899
cuucuuauaccaugucaga

SEQ ID NO: 1840494 - RNA, 19 nt, Artificial Sequence
  Description of Artificial Sequence: Synthetic oligonucleotide
  Antisense strand to SEQ ID NO: 1840493
ucugacaugguauaagaag

SEQ ID NO: 1840495 - RNA, 19 nt, Artificial Sequence
  Description of Artificial Sequence: Synthetic oligonucleotide
  Sense strand starting at position 335 of SEQ ID NO: 1563899
agguuaaagguuggaguuu

SEQ ID NO: 1840496 - RNA, 19 nt, Artificial Sequence
  Description of Artificial Sequence: Synthetic oligonucleotide
  Antisense strand to SEQ ID NO: 1840495
aaacuccaaccuuuaaccu

SEQ ID NO: 1840497 - RNA, 19 nt, Artificial Sequence
  Description of Artificial Sequence: Synthetic oligonucleotide
  Sense strand starting at position 494 of SEQ ID NO: 1563899
ccucauuugguagguguau

SEQ ID NO: 1840498 - RNA, 19 nt, Artificial Sequence
  Description of Artificial Sequence: Synthetic oligonucleotide
  Antisense strand to SEQ ID NO: 1840497
auacaccuaccaaaugagg

SEQ ID NO: 1840499 - RNA, 19 nt, Artificial Sequence
  Description of Artificial Sequence: Synthetic oligonucleotide
  Sense strand starting at position 496 of SEQ ID NO: 1563899
ucauuugguagguguauca

SEQ ID NO: 1840500 - RNA, 19 nt, Artificial Sequence
  Description of Artificial Sequence: Synthetic oligonucleotide
  Antisense strand to SEQ ID NO: 1840499
ugauacaccuaccaaauga

SEQ ID NO: 1840501 - RNA, 19 nt, Artificial Sequence
  Description of Artificial Sequence: Synthetic oligonucleotide
  Sense strand starting at position 807 of SEQ ID NO: 1563899
gugagaauuacggaagcua

SEQ ID NO: 1840502 - RNA, 19 nt, Artificial Sequence
  Description of Artificial Sequence: Synthetic oligonucleotide
  Antisense strand to SEQ ID NO: 1840501
uagcuuccguaauucucac

SEQ ID NO: 1840503 - RNA, 19 nt, Artificial Sequence
  Description of Artificial Sequence: Synthetic oligonucleotide
  Sense strand starting at position 861 of SEQ ID NO: 1563899
ccuaucaguaggugaggaa

SEQ ID NO: 1840504 - RNA, 19 nt, Artificial Sequence
  Description of Artificial Sequence: Synthetic oligonucleotide
  Antisense strand to SEQ ID NO: 1840503
uuccucaccuacugauagg

SEQ ID NO: 1840505 - RNA, 19 nt, Artificial Sequence
  Description of Artificial Sequence: Synthetic oligonucleotide
  Sense strand starting at position 909 of SEQ ID NO: 1563899
guccaaagucauuagcuaa

SEQ ID NO: 1840506 - RNA, 19 nt, Artificial Sequence
  Description of Artificial Sequence: Synthetic oligonucleotide
  Antisense strand to SEQ ID NO: 1840505
uuagcuaaugacuuuggac

SEQ ID NO: 1840507 - RNA, 19 nt, Artificial Sequence
  Description of Artificial Sequence: Synthetic oligonucleotide
  Sense strand starting at position 1075 of SEQ ID NO: 1563899
accacagacuaguugugaa

SEQ ID NO: 1840508 - RNA, 19 nt, Artificial Sequence
  Description of Artificial Sequence: Synthetic oligonucleotide
  Antisense strand to SEQ ID NO: 1840507
uucacaacuagucuguggu

SEQ ID NO: 1840509 - RNA, 19 nt, Artificial Sequence
  Description of Artificial Sequence: Synthetic oligonucleotide
  Sense strand starting at position 1246 of SEQ ID NO: 1563899
ggugacaacuggcuagaua

SEQ ID NO: 1840510 - RNA, 19 nt, Artificial Sequence
  Description of Artificial Sequence: Synthetic oligonucleotide
  Antisense strand to SEQ ID NO: 1840509
uaucuagccaguugucacc

SEQ ID NO: 1840511 - RNA, 19 nt, Artificial Sequence
  Description of Artificial Sequence: Synthetic oligonucleotide
  Sense strand starting at position 1339 of SEQ ID NO: 1563899
ccagcuuuggcugaagaga

SEQ ID NO: 1840512 - RNA, 19 nt, Artificial Sequence
  Description of Artificial Sequence: Synthetic oligonucleotide
  Antisense strand to SEQ ID NO: 1840511
ucucuucagccaaagcugg

SEQ ID NO: 1840513 - RNA, 19 nt, Artificial Sequence
  Description of Artificial Sequence: Synthetic oligonucleotide
  Sense strand starting at position 1466 of SEQ ID NO: 1563899
ugaagaaacgcucgauaaa

SEQ ID NO: 1840514 - RNA, 19 nt, Artificial Sequence
  Description of Artificial Sequence: Synthetic oligonucleotide
  Antisense strand to SEQ ID NO: 1840513
uuuaucgagcguuucuuca

SEQ ID NO: 1840515 - RNA, 19 nt, Artificial Sequence
  Description of Artificial Sequence: Synthetic oligonucleotide
  Sense strand starting at position 1523 of SEQ ID NO: 1563899
ucgcgaauggcgguuacaa

SEQ ID NO: 1840516 - RNA, 19 nt, Artificial Sequence
  Description of Artificial Sequence: Synthetic oligonucleotide
  Antisense strand to SEQ ID NO: 1840515
uuguaaccgccauucgcga

SEQ ID NO: 1840517 - RNA, 19 nt, Artificial Sequence
  Description of Artificial Sequence: Synthetic oligonucleotide
  Sense strand starting at position 1715 of SEQ ID NO: 1563899
agaagagguguuugguuga

SEQ ID NO: 1840518 - RNA, 19 nt, Artificial Sequence
  Description of Artificial Sequence: Synthetic oligonucleotide
  Antisense strand to SEQ ID NO: 1840517
ucaaccaaacaccucuucu

SEQ ID NO: 1840519 - RNA, 19 nt, Artificial Sequence
  Description of Artificial Sequence: Synthetic oligonucleotide
  Sense strand starting at position 1718 of SEQ ID NO: 1563899
agagguguuugguugaaag

SEQ ID NO: 1840520 - RNA, 19 nt, Artificial Sequence
  Description of Artificial Sequence: Synthetic oligonucleotide
  Antisense strand to SEQ ID NO: 1840519
cuuucaaccaaacaccucu

SEQ ID NO: 1840521 - RNA, 19 nt, Artificial Sequence
  Description of Artificial Sequence: Synthetic oligonucleotide
  Sense strand starting at position 1773 of SEQ ID NO: 1563899
acaggaaagacgcgucaaa

SEQ ID NO: 1840522 - RNA, 19 nt, Artificial Sequence
  Description of Artificial Sequence: Synthetic oligonucleotide
  Antisense strand to SEQ ID NO: 1840521
uuugacgcgucuuuccugu

SEQ ID NO: 1840523 - RNA, 19 nt, Artificial Sequence
  Description of Artificial Sequence: Synthetic oligonucleotide
  Sense strand starting at position 1894 of SEQ ID NO: 1563899
accguaauaugauccauga

SEQ ID NO: 1840524 - RNA, 19 nt, Artificial Sequence
  Description of Artificial Sequence: Synthetic oligonucleotide
  Antisense strand to SEQ ID NO: 1840523
ucauggaucauauuacggu

SEQ ID NO: 1840525 - RNA, 19 nt, Artificial Sequence
  Description of Artificial Sequence: Synthetic oligonucleotide
  Sense strand starting at position 1930 of SEQ ID NO: 1563899
ggaagaucucagugcuacu

SEQ ID NO: 1840526 - RNA, 19 nt, Artificial Sequence
  Description of Artificial Sequence: Synthetic oligonucleotide
  Antisense strand to SEQ ID NO: 1840525
aguagcacugagaucuucc

SEQ ID NO: 1840527 - RNA, 19 nt, Artificial Sequence
  Description of Artificial Sequence: Synthetic oligonucleotide
  Sense strand starting at position 2122 of SEQ ID NO: 1563899
ucgggaaauugauuauucu

SEQ ID NO: 1840528 - RNA, 19 nt, Artificial Sequence
  Description of Artificial Sequence: Synthetic oligonucleotide
  Antisense strand to SEQ ID NO: 1840527
agaauaaucaauuucccga

SEQ ID NO: 1840529 - RNA, 19 nt, Artificial Sequence
  Description of Artificial Sequence: Synthetic oligonucleotide
  Sense strand starting at position 2125 of SEQ ID NO: 1563899
ggaaauugauuauucuggu

SEQ ID NO: 1840530 - RNA, 19 nt, Artificial Sequence
  Description of Artificial Sequence: Synthetic oligonucleotide
  Antisense strand to SEQ ID NO: 1840529
accagaauaaucaauuucc

SEQ ID NO: 1840531 - RNA, 19 nt, Artificial Sequence
  Description of Artificial Sequence: Synthetic oligonucleotide
  Sense strand starting at position 2126 of SEQ ID NO: 1563899
gaaauugauuauucugguu

SEQ ID NO: 1840532 - RNA, 19 nt, Artificial Sequence
  Description of Artificial Sequence: Synthetic oligonucleotide
  Antisense strand to SEQ ID NO: 1840531
aaccagaauaaucaauuuc

SEQ ID NO: 1840533 - RNA, 19 nt, Artificial Sequence
  Description of Artificial Sequence: Synthetic oligonucleotide
  Sense strand starting at position 2153 of SEQ ID NO: 1563899
acguuuggccgagucuuua

SEQ ID NO: 1840534 - RNA, 19 nt, Artificial Sequence
  Description of Artificial Sequence: Synthetic oligonucleotide
  Antisense strand to SEQ ID NO: 1840533
uaaagacucggccaaacgu

SEQ ID NO: 1840535 - RNA, 19 nt, Artificial Sequence
  Description of Artificial Sequence: Synthetic oligonucleotide
  Sense strand starting at position 2167 of SEQ ID NO: 1563899
cuuuaagucccagauucga

SEQ ID NO: 1840536 - RNA, 19 nt, Artificial Sequence
  Description of Artificial Sequence: Synthetic oligonucleotide
  Antisense strand to SEQ ID NO: 1840535
ucgaaucugggacuuaaag

SEQ ID NO: 1840537 - RNA, 19 nt, Artificial Sequence
  Description of Artificial Sequence: Synthetic oligonucleotide
  Sense strand starting at position 2306 of SEQ ID NO: 1563899
gcaauuggguuucugaaga

SEQ ID NO: 1840538 - RNA, 19 nt, Artificial Sequence
  Description of Artificial Sequence: Synthetic oligonucleotide
  Antisense strand to SEQ ID NO: 1840537
ucuucagaaacccaauugc

SEQ ID NO: 1840539 - RNA, 19 nt, Artificial Sequence
  Description of Artificial Sequence: Synthetic oligonucleotide
  Sense strand starting at position 2675 of SEQ ID NO: 1563899
ccaccucucugggucuuaa

SEQ ID NO: 1840540 - RNA, 19 nt, Artificial Sequence
  Description of Artificial Sequence: Synthetic oligonucleotide
  Antisense strand to SEQ ID NO: 1840539
uuaagacccagagaggugg

SEQ ID NO: 1840541 - RNA, 19 nt, Artificial Sequence
  Description of Artificial Sequence: Synthetic oligonucleotide
  Sense strand starting at position 2684 of SEQ ID NO: 1563899
ugggucuuaaguugaccaa

SEQ ID NO: 1840542 - RNA, 19 nt, Artificial Sequence
  Description of Artificial Sequence: Synthetic oligonucleotide
  Antisense strand to SEQ ID NO: 1840541
uuggucaacuuaagaccca

SEQ ID NO: 1840543 - RNA, 19 nt, Artificial Sequence
  Description of Artificial Sequence: Synthetic oligonucleotide
  Sense strand starting at position 2688 of SEQ ID NO: 1563899
ucuuaaguugaccaagguu

SEQ ID NO: 1840544 - RNA, 19 nt, Artificial Sequence
  Description of Artificial Sequence: Synthetic oligonucleotide
  Antisense strand to SEQ ID NO: 1840543
aaccuuggucaacuuaaga

SEQ ID NO: 1840545 - RNA, 19 nt, Artificial Sequence
  Description of Artificial Sequence: Synthetic oligonucleotide
  Sense strand starting at position 2691 of SEQ ID NO: 1563899
uaaguugaccaagguuaca

SEQ ID NO: 1840546 - RNA, 19 nt, Artificial Sequence
  Description of Artificial Sequence: Synthetic oligonucleotide
  Antisense strand to SEQ ID NO: 1840545
uguaaccuuggucaacuua

SEQ ID NO: 1840547 - RNA, 19 nt, Artificial Sequence
  Description of Artificial Sequence: Synthetic oligonucleotide
  Sense strand starting at position 2715 of SEQ ID NO: 1563899
gguauuggccacuaucuca

SEQ ID NO: 1840548 - RNA, 19 nt, Artificial Sequence
  Description of Artificial Sequence: Synthetic oligonucleotide
  Antisense strand to SEQ ID NO: 1840547
ugagauaguggccaauacc

SEQ ID NO: 1840549 - RNA, 19 nt, Artificial Sequence
  Description of Artificial Sequence: Synthetic oligonucleotide
  Sense strand starting at position 2723 of SEQ ID NO: 1563899
ccacuaucucaggguaauu

SEQ ID NO: 1840550 - RNA, 19 nt, Artificial Sequence
  Description of Artificial Sequence: Synthetic oligonucleotide
  Antisense strand to SEQ ID NO: 1840549
aauuacccugagauagugg

SEQ ID NO: 1840551 - RNA, 19 nt, Artificial Sequence
  Description of Artificial Sequence: Synthetic oligonucleotide
  Sense strand starting at position 2735 of SEQ ID NO: 1563899
gguaauuucuagcucuacu

SEQ ID NO: 1840552 - RNA, 19 nt, Artificial Sequence
  Description of Artificial Sequence: Synthetic oligonucleotide
  Antisense strand to SEQ ID NO: 1840551
aguagagcuagaaauuacc

SEQ ID NO: 1840553 - RNA, 19 nt, Artificial Sequence
  Description of Artificial Sequence: Synthetic oligonucleotide
  Sense strand starting at position 2756 of SEQ ID NO: 1563899
ugcaguguuaugguuugca

SEQ ID NO: 1840554 - RNA, 19 nt, Artificial Sequence
  Description of Artificial Sequence: Synthetic oligonucleotide
  Antisense strand to SEQ ID NO: 1840553
ugcaaaccauaacacugca

SEQ ID NO: 1840555 - RNA, 19 nt, Artificial Sequence
  Description of Artificial Sequence: Synthetic oligonucleotide
  Sense strand starting at position 3293 of SEQ ID NO: 1563899
uuugguuaucuugaucucu

SEQ ID NO: 1840556 - RNA, 19 nt, Artificial Sequence
  Description of Artificial Sequence: Synthetic oligonucleotide
  Antisense strand to SEQ ID NO: 1840555
agagaucaagauaaccaaa

SEQ ID NO: 1840557 - RNA, 19 nt, Artificial Sequence
  Description of Artificial Sequence: Synthetic oligonucleotide
  Sense strand starting at position 3324 of SEQ ID NO: 1563899
acccuuacuccuggauaug

SEQ ID NO: 1840558 - RNA, 19 nt, Artificial Sequence
  Description of Artificial Sequence: Synthetic oligonucleotide
  Antisense strand to SEQ ID NO: 1840557
cauauccaggaguaagggu

SEQ ID NO: 1840559 - RNA, 19 nt, Artificial Sequence
  Description of Artificial Sequence: Synthetic oligonucleotide
  Sense strand starting at position 3334 of SEQ ID NO: 1563899
cuggauauggcuuggaucu

SEQ ID NO: 1840560 - RNA, 19 nt, Artificial Sequence
  Description of Artificial Sequence: Synthetic oligonucleotide
  Antisense strand to SEQ ID NO: 1840559
agauccaagccauauccag

SEQ ID NO: 1840561 - RNA, 19 nt, Artificial Sequence
  Description of Artificial Sequence: Synthetic oligonucleotide
  Sense strand starting at position 3378 of SEQ ID NO: 1563899
auuguaaucccuuacguug

SEQ ID NO: 1840562 - RNA, 19 nt, Artificial Sequence
  Description of Artificial Sequence: Synthetic oligonucleotide
  Antisense strand to SEQ ID NO: 1840561
caacguaagggauuacaau

SEQ ID NO: 1840563 - RNA, 19 nt, Artificial Sequence
  Description of Artificial Sequence: Synthetic oligonucleotide
  Sense strand starting at position 3440 of SEQ ID NO: 1563899
ucuucugaaugguuuaaca

SEQ ID NO: 1840564 - RNA, 19 nt, Artificial Sequence
  Description of Artificial Sequence: Synthetic oligonucleotide
  Antisense strand to SEQ ID NO: 1840563
uguuaaaccauucagaaga

SEQ ID NO: 1840565 - RNA, 19 nt, Artificial Sequence
  Description of Artificial Sequence: Synthetic oligonucleotide
  Sense strand starting at position 3442 of SEQ ID NO: 1563899
uucugaaugguuuaacacu

SEQ ID NO: 1840566 - RNA, 19 nt, Artificial Sequence
  Description of Artificial Sequence: Synthetic oligonucleotide
  Antisense strand to SEQ ID NO: 1840565
aguguuaaaccauucagaa

SEQ ID NO: 1840567 - RNA, 19 nt, Artificial Sequence
  Description of Artificial Sequence: Synthetic oligonucleotide
  Sense strand starting at position 3504 of SEQ ID NO: 1563899
gagaucugauggcuuagaa

SEQ ID NO: 1840568 - RNA, 19 nt, Artificial Sequence
  Description of Artificial Sequence: Synthetic oligonucleotide
  Antisense strand to SEQ ID NO: 1840567
uucuaagccaucagaucuc

SEQ ID NO: 1840569 - RNA, 19 nt, Artificial Sequence
  Description of Artificial Sequence: Synthetic oligonucleotide
  Sense strand starting at position 87 of SEQ ID NO: 1563900
uaggaagauagugguaguu

SEQ ID NO: 1840570 - RNA, 19 nt, Artificial Sequence
  Description of Artificial Sequence: Synthetic oligonucleotide
  Antisense strand to SEQ ID NO: 1840569
aacuaccacuaucuuccua

SEQ ID NO: 1840571 - RNA, 19 nt, Artificial Sequence
  Description of Artificial Sequence: Synthetic oligonucleotide
  Sense strand starting at position 177 of SEQ ID NO: 1563900
gauguugaagccugagaca

SEQ ID NO: 1840572 - RNA, 19 nt, Artificial Sequence
  Description of Artificial Sequence: Synthetic oligonucleotide
  Antisense strand to SEQ ID NO: 1840571
ugucucaggcuucaacauc

SEQ ID NO: 1840573 - RNA, 19 nt, Artificial Sequence
  Description of Artificial Sequence: Synthetic oligonucleotide
  Sense strand starting at position 310 of SEQ ID NO: 1563900
cauugugaugaaugcauau

SEQ ID NO: 1840574 - RNA, 19 nt, Artificial Sequence
  Description of Artificial Sequence: Synthetic oligonucleotide
  Antisense strand to SEQ ID NO: 1840573
auaugcauucaucacaaug

SEQ ID NO: 1840575 - RNA, 19 nt, Artificial Sequence
  Description of Artificial Sequence: Synthetic oligonucleotide
  Sense strand starting at position 410 of SEQ ID NO: 1563900
gcucgugaugcgccaauua

SEQ ID NO: 1840576 - RNA, 19 nt, Artificial Sequence
  Description of Artificial Sequence: Synthetic oligonucleotide
  Antisense strand to SEQ ID NO: 1840575
uaauuggcgcaucacgagc

SEQ ID NO: 1840577 - RNA, 19 nt, Artificial Sequence
  Description of Artificial Sequence: Synthetic oligonucleotide
  Sense strand starting at position 419 of SEQ ID NO: 1563900
gcgccaauuagugcauauu

SEQ ID NO: 1840578 - RNA, 19 nt, Artificial Sequence
  Description of Artificial Sequence: Synthetic oligonucleotide
  Antisense strand to SEQ ID NO: 1840577
aauaugcacuaauuggcgc

SEQ ID NO: 1840579 - RNA, 19 nt, Artificial Sequence
  Description of Artificial Sequence: Synthetic oligonucleotide
  Sense strand starting at position 420 of SEQ ID NO: 1563900
cgccaauuagugcauauuu

SEQ ID NO: 1840580 - RNA, 19 nt, Artificial Sequence
  Description of Artificial Sequence: Synthetic oligonucleotide
  Antisense strand to SEQ ID NO: 1840579
aaauaugcacuaauuggcg

SEQ ID NO: 1840581 - RNA, 19 nt, Artificial Sequence
  Description of Artificial Sequence: Synthetic oligonucleotide
  Sense strand starting at position 475 of SEQ ID NO: 1563900
cuaggauugauauggcuag

SEQ ID NO: 1840582 - RNA, 19 nt, Artificial Sequence
  Description of Artificial Sequence: Synthetic oligonucleotide
  Antisense strand to SEQ ID NO: 1840581
cuagccauaucaauccuag

SEQ ID NO: 1840583 - RNA, 19 nt, Artificial Sequence
  Description of Artificial Sequence: Synthetic oligonucleotide
  Sense strand starting at position 479 of SEQ ID NO: 1563900
gauugauauggcuaguaua

SEQ ID NO: 1840584 - RNA, 19 nt, Artificial Sequence
  Description of Artificial Sequence: Synthetic oligonucleotide
  Antisense strand to SEQ ID NO: 1840583
uauacuagccauaucaauc

SEQ ID NO: 1840585 - RNA, 19 nt, Artificial Sequence
  Description of Artificial Sequence: Synthetic oligonucleotide
  Sense strand starting at position 499 of SEQ ID NO: 1563900
auaggaggccuauguuaaa

SEQ ID NO: 1840586 - RNA, 19 nt, Artificial Sequence
  Description of Artificial Sequence: Synthetic oligonucleotide
  Antisense strand to SEQ ID NO: 1840585
uuuaacauaggccuccuau

SEQ ID NO: 1840587 - RNA, 19 nt, Artificial Sequence
  Description of Artificial Sequence: Synthetic oligonucleotide
  Sense strand starting at position 810 of SEQ ID NO: 1563900
uuguuaaugagaggaguug

SEQ ID NO: 1840588 - RNA, 19 nt, Artificial Sequence
  Description of Artificial Sequence: Synthetic oligonucleotide
  Antisense strand to SEQ ID NO: 1840587
caacuccucucauuaacaa

SEQ ID NO: 1840589 - RNA, 19 nt, Artificial Sequence
  Description of Artificial Sequence: Synthetic oligonucleotide
  Sense strand starting at position 926 of SEQ ID NO: 1563900
uugagauagcaucaucugu

SEQ ID NO: 1840590 - RNA, 19 nt, Artificial Sequence
  Description of Artificial Sequence: Synthetic oligonucleotide
  Antisense strand to SEQ ID NO: 1840589
acagaugaugcuaucucaa

SEQ ID NO: 1840591 - RNA, 19 nt, Artificial Sequence
  Description of Artificial Sequence: Synthetic oligonucleotide
  Sense strand starting at position 1057 of SEQ ID NO: 1563900
guaggacuuuaauuguuga

SEQ ID NO: 1840592 - RNA, 19 nt, Artificial Sequence
  Description of Artificial Sequence: Synthetic oligonucleotide
  Antisense strand to SEQ ID NO: 1840591
ucaacaauuaaaguccuac

SEQ ID NO: 1840593 - RNA, 19 nt, Artificial Sequence
  Description of Artificial Sequence: Synthetic oligonucleotide
  Sense strand starting at position 1116 of SEQ ID NO: 1563900
cugauccaacaucgagauu

SEQ ID NO: 1840594 - RNA, 19 nt, Artificial Sequence
  Description of Artificial Sequence: Synthetic oligonucleotide
  Antisense strand to SEQ ID NO: 1840593
aaucucgauguuggaucag

SEQ ID NO: 1840595 - RNA, 19 nt, Artificial Sequence
  Description of Artificial Sequence: Synthetic oligonucleotide
  Sense strand starting at position 1119 of SEQ ID NO: 1563900
auccaacaucgagauugua

SEQ ID NO: 1840596 - RNA, 19 nt, Artificial Sequence
  Description of Artificial Sequence: Synthetic oligonucleotide
  Antisense strand to SEQ ID NO: 1840595
uacaaucucgauguuggau

SEQ ID NO: 1840597 - RNA, 19 nt, Artificial Sequence
  Description of Artificial Sequence: Synthetic oligonucleotide
  Sense strand starting at position 1122 of SEQ ID NO: 1563900
caacaucgagauuguaaac

SEQ ID NO: 1840598 - RNA, 19 nt, Artificial Sequence
  Description of Artificial Sequence: Synthetic oligonucleotide
  Antisense strand to SEQ ID NO: 1840597
guuuacaaucucgauguug

SEQ ID NO: 1840599 - RNA, 19 nt, Artificial Sequence
  Description of Artificial Sequence: Synthetic oligonucleotide
  Sense strand starting at position 1193 of SEQ ID NO: 1563900
acuuacuccguugaucaaa

SEQ ID NO: 1840600 - RNA, 19 nt, Artificial Sequence
  Description of Artificial Sequence: Synthetic oligonucleotide
  Antisense strand to SEQ ID NO: 1840599
uuugaucaacggaguaagu

SEQ ID NO: 1840601 - RNA, 19 nt, Artificial Sequence
  Description of Artificial Sequence: Synthetic oligonucleotide
  Sense strand starting at position 1243 of SEQ ID NO: 1563900
gcuagugcagucuuaguuu

SEQ ID NO: 1840602 - RNA, 19 nt, Artificial Sequence
  Description of Artificial Sequence: Synthetic oligonucleotide
  Antisense strand to SEQ ID NO: 1840601
aaacuaagacugcacuagc

SEQ ID NO: 1840603 - RNA, 19 nt, Artificial Sequence
  Description of Artificial Sequence: Synthetic oligonucleotide
  Sense strand starting at position 1658 of SEQ ID NO: 1563900
guauucuuuccuuagagca

SEQ ID NO: 1840604 - RNA, 19 nt, Artificial Sequence
  Description of Artificial Sequence: Synthetic oligonucleotide
  Antisense strand to SEQ ID NO: 1840603
ugcucuaaggaaagaauac

SEQ ID NO: 1840605 - RNA, 19 nt, Artificial Sequence
  Description of Artificial Sequence: Synthetic oligonucleotide
  Sense strand starting at position 1729 of SEQ ID NO: 1563900
uuaauauuaggcuaacugu

SEQ ID NO: 1840606 - RNA, 19 nt, Artificial Sequence
  Description of Artificial Sequence: Synthetic oligonucleotide
  Antisense strand to SEQ ID NO: 1840605
acaguuagccuaauauuaa

SEQ ID NO: 1840607 - RNA, 19 nt, Artificial Sequence
  Description of Artificial Sequence: Synthetic oligonucleotide
  Sense strand starting at position 1887 of SEQ ID NO: 1563900
gauagauguugagcuuaaa

SEQ ID NO: 1840608 - RNA, 19 nt, Artificial Sequence
  Description of Artificial Sequence: Synthetic oligonucleotide
  Antisense strand to SEQ ID NO: 1840607
uuuaagcucaacaucuauc

SEQ ID NO: 1840609 - RNA, 19 nt, Artificial Sequence
  Description of Artificial Sequence: Synthetic oligonucleotide
  Sense strand starting at position 1934 of SEQ ID NO: 1563900
gccaacuaugguggaaaua

SEQ ID NO: 1840610 - RNA, 19 nt, Artificial Sequence
  Description of Artificial Sequence: Synthetic oligonucleotide
  Antisense strand to SEQ ID NO: 1840609
uauuuccaccauaguuggc

SEQ ID NO: 1840611 - RNA, 19 nt, Artificial Sequence
  Description of Artificial Sequence: Synthetic oligonucleotide
  Sense strand starting at position 2188 of SEQ ID NO: 1563900
ggaacuuggcuauaauucu

SEQ ID NO: 1840612 - RNA, 19 nt, Artificial Sequence
  Description of Artificial Sequence: Synthetic oligonucleotide
  Antisense strand to SEQ ID NO: 1840611
agaauuauagccaaguucc

SEQ ID NO: 1840613 - RNA, 19 nt, Artificial Sequence
  Description of Artificial Sequence: Synthetic oligonucleotide
  Sense strand starting at position 2241 of SEQ ID NO: 1563900
agaagauauaaggguuugu

SEQ ID NO: 1840614 - RNA, 19 nt, Artificial Sequence
  Description of Artificial Sequence: Synthetic oligonucleotide
  Antisense strand to SEQ ID NO: 1840613
acaaacccuuauaucuucu

SEQ ID NO: 1840615 - RNA, 19 nt, Artificial Sequence
  Description of Artificial Sequence: Synthetic oligonucleotide
  Sense strand starting at position 2358 of SEQ ID NO: 1563900
uaggguaaaugguuugauu

SEQ ID NO: 1840616 - RNA, 19 nt, Artificial Sequence
  Description of Artificial Sequence: Synthetic oligonucleotide
  Antisense strand to SEQ ID NO: 1840615
aaucaaaccauuuacccua

SEQ ID NO: 1840617 - RNA, 19 nt, Artificial Sequence
  Description of Artificial Sequence: Synthetic oligonucleotide
  Sense strand starting at position 2360 of SEQ ID NO: 1563900
ggguaaaugguuugauuaa

SEQ ID NO: 1840618 - RNA, 19 nt, Artificial Sequence
  Description of Artificial Sequence: Synthetic oligonucleotide
  Antisense strand to SEQ ID NO: 1840617
uuaaucaaaccauuuaccc

SEQ ID NO: 1840619 - RNA, 19 nt, Artificial Sequence
  Description of Artificial Sequence: Synthetic oligonucleotide
  Sense strand starting at position 2402 of SEQ ID NO: 1563900
gagguuuggagcuagaguu

SEQ ID NO: 1840620 - RNA, 19 nt, Artificial Sequence
  Description of Artificial Sequence: Synthetic oligonucleotide
  Antisense strand to SEQ ID NO: 1840619
aacucuagcuccaaaccuc

SEQ ID NO: 1840621 - RNA, 19 nt, Artificial Sequence
  Description of Artificial Sequence: Synthetic oligonucleotide
  Sense strand starting at position 2583 of SEQ ID NO: 1563900
uggaguaauacuugagggu

SEQ ID NO: 1840622 - RNA, 19 nt, Artificial Sequence
  Description of Artificial Sequence: Synthetic oligonucleotide
  Antisense strand to SEQ ID NO: 1840621
acccucaaguauuacucca

SEQ ID NO: 1840623 - RNA, 19 nt, Artificial Sequence
  Description of Artificial Sequence: Synthetic oligonucleotide
  Sense strand starting at position 2697 of SEQ ID NO: 1563900
gguugucgugagaguuucu

SEQ ID NO: 1840624 - RNA, 19 nt, Artificial Sequence
  Description of Artificial Sequence: Synthetic oligonucleotide
  Antisense strand to SEQ ID NO: 1840623
agaaacucucacgacaacc

SEQ ID NO: 1840625 - RNA, 19 nt, Artificial Sequence
  Description of Artificial Sequence: Synthetic oligonucleotide
  Sense strand starting at position 2752 of SEQ ID NO: 1563900
ugggcuaaaccuugaccua

SEQ ID NO: 1840626 - RNA, 19 nt, Artificial Sequence
  Description of Artificial Sequence: Synthetic oligonucleotide
  Antisense strand to SEQ ID NO: 1840625
uaggucaagguuuagccca

SEQ ID NO: 1840627 - RNA, 19 nt, Artificial Sequence
  Description of Artificial Sequence: Synthetic oligonucleotide
  Sense strand starting at position 3217 of SEQ ID NO: 1563900
cccuaaauauuaguauagu

SEQ ID NO: 1840628 - RNA, 19 nt, Artificial Sequence
  Description of Artificial Sequence: Synthetic oligonucleotide
  Antisense strand to SEQ ID NO: 1840627
acuauacuaauauuuaggg

SEQ ID NO: 1840629 - RNA, 19 nt, Artificial Sequence
  Description of Artificial Sequence: Synthetic oligonucleotide
  Sense strand starting at position 3459 of SEQ ID NO: 1563900
uguggacccaucuagguau

SEQ ID NO: 1840630 - RNA, 19 nt, Artificial Sequence
  Description of Artificial Sequence: Synthetic oligonucleotide
  Antisense strand to SEQ ID NO: 1840629
auaccuagauggguccaca

SEQ ID NO: 1840631 - RNA, 19 nt, Artificial Sequence
  Description of Artificial Sequence: Synthetic oligonucleotide
  Sense strand starting at position 3486 of SEQ ID NO: 1563900
ucuugcuuugaauaguuaa

SEQ ID NO: 1840632 - RNA, 19 nt, Artificial Sequence
  Description of Artificial Sequence: Synthetic oligonucleotide
  Antisense strand to SEQ ID NO: 1840631
uuaacuauucaaagcaaga

SEQ ID NO: 1840633 - RNA, 19 nt, Artificial Sequence
  Description of Artificial Sequence: Synthetic oligonucleotide
  Sense strand starting at position 3493 of SEQ ID NO: 1563900
uugaauaguuaagcuacau

SEQ ID NO: 1840634 - RNA, 19 nt, Artificial Sequence
  Description of Artificial Sequence: Synthetic oligonucleotide
  Antisense strand to SEQ ID NO: 1840633
auguagcuuaacuauucaa

SEQ ID NO: 1840635 - RNA, 19 nt, Artificial Sequence
  Description of Artificial Sequence: Synthetic oligonucleotide
  Sense strand starting at position 3605 of SEQ ID NO: 1563900
auugaauuggcagagguuu

SEQ ID NO: 1840636 - RNA, 19 nt, Artificial Sequence
  Description of Artificial Sequence: Synthetic oligonucleotide
  Antisense strand to SEQ ID NO: 1840635
aaaccucugccaauucaau

SEQ ID NO: 1840637 - RNA, 19 nt, Artificial Sequence
  Description of Artificial Sequence: Synthetic oligonucleotide
  Sense strand starting at position 3626 of SEQ ID NO: 1563900
ccgagaggguuaguuauaa

SEQ ID NO: 1840638 - RNA, 19 nt, Artificial Sequence
  Description of Artificial Sequence: Synthetic oligonucleotide
  Antisense strand to SEQ ID NO: 1840637
uuauaacuaacccucucgg

SEQ ID NO: 1840639 - RNA, 19 nt, Artificial Sequence
  Description of Artificial Sequence: Synthetic oligonucleotide
  Sense strand starting at position 3716 of SEQ ID NO: 1563900
uuaguauuagggcagaagu

SEQ ID NO: 1840640 - RNA, 19 nt, Artificial Sequence
  Description of Artificial Sequence: Synthetic oligonucleotide
  Antisense strand to SEQ ID NO: 1840639
acuucugcccuaauacuaa

SEQ ID NO: 1840641 - RNA, 19 nt, Artificial Sequence
  Description of Artificial Sequence: Synthetic oligonucleotide
  Sense strand starting at position 3718 of SEQ ID NO: 1563900
aguauuagggcagaaguau

SEQ ID NO: 1840642 - RNA, 19 nt, Artificial Sequence
  Description of Artificial Sequence: Synthetic oligonucleotide
  Antisense strand to SEQ ID NO: 1840641
auacuucugcccuaauacu

SEQ ID NO: 1840643 - RNA, 19 nt, Artificial Sequence
  Description of Artificial Sequence: Synthetic oligonucleotide
  Sense strand starting at position 3724 of SEQ ID NO: 1563900
agggcagaaguauaguuau

SEQ ID NO: 1840644 - RNA, 19 nt, Artificial Sequence
  Description of Artificial Sequence: Synthetic oligonucleotide
  Antisense strand to SEQ ID NO: 1840643
auaacuauacuucugcccu

SEQ ID NO: 1840645 - RNA, 19 nt, Artificial Sequence
  Description of Artificial Sequence: Synthetic oligonucleotide
  Sense strand starting at position 3849 of SEQ ID NO: 1563900
cacgauuucucggcuccga

SEQ ID NO: 1840646 - RNA, 19 nt, Artificial Sequence
  Description of Artificial Sequence: Synthetic oligonucleotide
  Antisense strand to SEQ ID NO: 1840645
ucggagccgagaaaucgug

SEQ ID NO: 1840647 - RNA, 19 nt, Artificial Sequence
  Description of Artificial Sequence: Synthetic oligonucleotide
  Sense strand starting at position 3973 of SEQ ID NO: 1563900
cggagauaguucuugaaau

SEQ ID NO: 1840648 - RNA, 19 nt, Artificial Sequence
  Description of Artificial Sequence: Synthetic oligonucleotide
  Antisense strand to SEQ ID NO: 1840647
auuucaagaacuaucuccg

SEQ ID NO: 1840649 - RNA, 19 nt, Artificial Sequence
  Description of Artificial Sequence: Synthetic oligonucleotide
  Sense strand starting at position 5 of SEQ ID NO: 1563901
ugguuugcucuguauauuu

SEQ ID NO: 1840650 - RNA, 19 nt, Artificial Sequence
  Description of Artificial Sequence: Synthetic oligonucleotide
  Antisense strand to SEQ ID NO: 1840649
aaauauacagagcaaacca

SEQ ID NO: 1840651 - RNA, 19 nt, Artificial Sequence
  Description of Artificial Sequence: Synthetic oligonucleotide
  Sense strand starting at position 37 of SEQ ID NO: 1563901
uguagagacuuaccaaugu

SEQ ID NO: 1840652 - RNA, 19 nt, Artificial Sequence
  Description of Artificial Sequence: Synthetic oligonucleotide
  Antisense strand to SEQ ID NO: 1840651
acauugguaagucucuaca

SEQ ID NO: 1840653 - RNA, 19 nt, Artificial Sequence
  Description of Artificial Sequence: Synthetic oligonucleotide
  Sense strand starting at position 281 of SEQ ID NO: 1563901
ucugucuauuaauuggaga

SEQ ID NO: 1840654 - RNA, 19 nt, Artificial Sequence
  Description of Artificial Sequence: Synthetic oligonucleotide
  Antisense strand to SEQ ID NO: 1840653
ucuccaauuaauagacaga

SEQ ID NO: 1840655 - RNA, 19 nt, Artificial Sequence
  Description of Artificial Sequence: Synthetic oligonucleotide
  Sense strand starting at position 294 of SEQ ID NO: 1563901
uggagauauguguggagau

SEQ ID NO: 1840656 - RNA, 19 nt, Artificial Sequence
  Description of Artificial Sequence: Synthetic oligonucleotide
  Antisense strand to SEQ ID NO: 1840655
aucuccacacauaucucca

SEQ ID NO: 1840657 - RNA, 19 nt, Artificial Sequence
  Description of Artificial Sequence: Synthetic oligonucleotide
  Sense strand starting at position 337 of SEQ ID NO: 1563901
aauaaaguggcauguauua

SEQ ID NO: 1840658 - RNA, 19 nt, Artificial Sequence
  Description of Artificial Sequence: Synthetic oligonucleotide
  Antisense strand to SEQ ID NO: 1840657
uaauacaugccacuuuauu

SEQ ID NO: 1840659 - RNA, 19 nt, Artificial Sequence
  Description of Artificial Sequence: Synthetic oligonucleotide
  Sense strand starting at position 384 of SEQ ID NO: 1563901
gcauguauauuuccagguu

SEQ ID NO: 1840660 - RNA, 19 nt, Artificial Sequence
  Description of Artificial Sequence: Synthetic oligonucleotide
  Antisense strand to SEQ ID NO: 1840659
aaccuggaaauauacaugc

SEQ ID NO: 1840661 - RNA, 19 nt, Artificial Sequence
  Description of Artificial Sequence: Synthetic oligonucleotide
  Sense strand starting at position 407 of SEQ ID NO: 1563901
uugcauacacuguacgaau

SEQ ID NO: 1840662 - RNA, 19 nt, Artificial Sequence
  Description of Artificial Sequence: Synthetic oligonucleotide
  Antisense strand to SEQ ID NO: 1840661
auucguacaguguaugcaa

SEQ ID NO: 1840663 - RNA, 19 nt, Artificial Sequence
  Description of Artificial Sequence: Synthetic oligonucleotide
  Sense strand starting at position 590 of SEQ ID NO: 1563901
ccuauaugacuaugucaua

SEQ ID NO: 1840664 - RNA, 19 nt, Artificial Sequence
  Description of Artificial Sequence: Synthetic oligonucleotide
  Antisense strand to SEQ ID NO: 1840663
uaugacauagucauauagg

SEQ ID NO: 1840665 - RNA, 19 nt, Artificial Sequence
  Description of Artificial Sequence: Synthetic oligonucleotide
  Sense strand starting at position 627 of SEQ ID NO: 1563901
acgaauuauuccucaggag

SEQ ID NO: 1840666 - RNA, 19 nt, Artificial Sequence
  Description of Artificial Sequence: Synthetic oligonucleotide
  Antisense strand to SEQ ID NO: 1840665
cuccugaggaauaauucgu

SEQ ID NO: 1840667 - RNA, 19 nt, Artificial Sequence
  Description of Artificial Sequence: Synthetic oligonucleotide
  Sense strand starting at position 628 of SEQ ID NO: 1563901
cgaauuauuccucaggagu

SEQ ID NO: 1840668 - RNA, 19 nt, Artificial Sequence
  Description of Artificial Sequence: Synthetic oligonucleotide
  Antisense strand to SEQ ID NO: 1840667
acuccugaggaauaauucg

SEQ ID NO: 1840669 - RNA, 19 nt, Artificial Sequence
  Description of Artificial Sequence: Synthetic oligonucleotide
  Sense strand starting at position 651 of SEQ ID NO: 1563901
agauaaauauguucugcuu

SEQ ID NO: 1840670 - RNA, 19 nt, Artificial Sequence
  Description of Artificial Sequence: Synthetic oligonucleotide
  Antisense strand to SEQ ID NO: 1840669
aagcagaacauauuuaucu

SEQ ID NO: 1840671 - RNA, 19 nt, Artificial Sequence
  Description of Artificial Sequence: Synthetic oligonucleotide
  Sense strand starting at position 682 of SEQ ID NO: 1563901
ggacuauagccucaauagu

SEQ ID NO: 1840672 - RNA, 19 nt, Artificial Sequence
  Description of Artificial Sequence: Synthetic oligonucleotide
  Antisense strand to SEQ ID NO: 1840671
acuauugaggcuauagucc

SEQ ID NO: 1840673 - RNA, 19 nt, Artificial Sequence
  Description of Artificial Sequence: Synthetic oligonucleotide
  Sense strand starting at position 794 of SEQ ID NO: 1563901
uggcuauuugcucaagugu

SEQ ID NO: 1840674 - RNA, 19 nt, Artificial Sequence
  Description of Artificial Sequence: Synthetic oligonucleotide
  Antisense strand to SEQ ID NO: 1840673
acacuugagcaaauagcca

SEQ ID NO: 1840675 - RNA, 19 nt, Artificial Sequence
  Description of Artificial Sequence: Synthetic oligonucleotide
  Sense strand starting at position 1047 of SEQ ID NO: 1563901
uauauaugaguuuacgcua

SEQ ID NO: 1840676 - RNA, 19 nt, Artificial Sequence
  Description of Artificial Sequence: Synthetic oligonucleotide
  Antisense strand to SEQ ID NO: 1840675
uagcguaaacucauauaua

SEQ ID NO: 1840677 - RNA, 19 nt, Artificial Sequence
  Description of Artificial Sequence: Synthetic oligonucleotide
  Sense strand starting at position 1050 of SEQ ID NO: 1563901
auaugaguuuacgcuauuu

SEQ ID NO: 1840678 - RNA, 19 nt, Artificial Sequence
  Description of Artificial Sequence: Synthetic oligonucleotide
  Antisense strand to SEQ ID NO: 1840677
aaauagcguaaacucauau

SEQ ID NO: 1840679 - RNA, 19 nt, Artificial Sequence
  Description of Artificial Sequence: Synthetic oligonucleotide
  Sense strand starting at position 1113 of SEQ ID NO: 1563901
uuucuaugccgacauagaa

SEQ ID NO: 1840680 - RNA, 19 nt, Artificial Sequence
  Description of Artificial Sequence: Synthetic oligonucleotide
  Antisense strand to SEQ ID NO: 1840679
uucuaugucggcauagaaa

SEQ ID NO: 1840681 - RNA, 19 nt, Artificial Sequence
  Description of Artificial Sequence: Synthetic oligonucleotide
  Sense strand starting at position 1313 of SEQ ID NO: 1563901
auguacaauucucuugaga

SEQ ID NO: 1840682 - RNA, 19 nt, Artificial Sequence
  Description of Artificial Sequence: Synthetic oligonucleotide
  Antisense strand to SEQ ID NO: 1840681
ucucaagagaauuguacau

SEQ ID NO: 1840683 - RNA, 19 nt, Artificial Sequence
  Description of Artificial Sequence: Synthetic oligonucleotide
  Sense strand starting at position 1452 of SEQ ID NO: 1563901
acaguuaugcauuacuuua

SEQ ID NO: 1840684 - RNA, 19 nt, Artificial Sequence
  Description of Artificial Sequence: Synthetic oligonucleotide
  Antisense strand to SEQ ID NO: 1840683
uaaaguaaugcauaacugu

SEQ ID NO: 1840685 - RNA, 19 nt, Artificial Sequence
  Description of Artificial Sequence: Synthetic oligonucleotide
  Sense strand starting at position 2075 of SEQ ID NO: 1563901
ucuuccuucgcuuaggaga

SEQ ID NO: 1840686 - RNA, 19 nt, Artificial Sequence
  Description of Artificial Sequence: Synthetic oligonucleotide
  Antisense strand to SEQ ID NO: 1840685
ucuccuaagcgaaggaaga

SEQ ID NO: 1840687 - RNA, 19 nt, Artificial Sequence
  Description of Artificial Sequence: Synthetic oligonucleotide
  Sense strand starting at position 2378 of SEQ ID NO: 1563901
ugauuuggauuacagugaa

SEQ ID NO: 1840688 - RNA, 19 nt, Artificial Sequence
  Description of Artificial Sequence: Synthetic oligonucleotide
  Antisense strand to SEQ ID NO: 1840687
uucacuguaauccaaauca

SEQ ID NO: 1840689 - RNA, 19 nt, Artificial Sequence
  Description of Artificial Sequence: Synthetic oligonucleotide
  Sense strand starting at position 2381 of SEQ ID NO: 1563901
uuuggauuacagugaauua

SEQ ID NO: 1840690 - RNA, 19 nt, Artificial Sequence
  Description of Artificial Sequence: Synthetic oligonucleotide
  Antisense strand to SEQ ID NO: 1840689
uaauucacuguaauccaaa

SEQ ID NO: 1840691 - RNA, 19 nt, Artificial Sequence
  Description of Artificial Sequence: Synthetic oligonucleotide
  Sense strand starting at position 2499 of SEQ ID NO: 1563901
uuaggucauuuccaaagaa

SEQ ID NO: 1840692 - RNA, 19 nt, Artificial Sequence
  Description of Artificial Sequence: Synthetic oligonucleotide
  Antisense strand to SEQ ID NO: 1840691
uucuuuggaaaugaccuaa

SEQ ID NO: 1840693 - RNA, 19 nt, Artificial Sequence
  Description of Artificial Sequence: Synthetic oligonucleotide
  Sense strand starting at position 2636 of SEQ ID NO: 1563901
uuuguuuguccauaugauu

SEQ ID NO: 1840694 - RNA, 19 nt, Artificial Sequence
  Description of Artificial Sequence: Synthetic oligonucleotide
  Antisense strand to SEQ ID NO: 1840693
aaucauauggacaaacaaa

SEQ ID NO: 1840695 - RNA, 19 nt, Artificial Sequence
  Description of Artificial Sequence: Synthetic oligonucleotide
  Sense strand starting at position 2641 of SEQ ID NO: 1563901
uuguccauaugauuagaua

SEQ ID NO: 1840696 - RNA, 19 nt, Artificial Sequence
  Description of Artificial Sequence: Synthetic oligonucleotide
  Antisense strand to SEQ ID NO: 1840695
uaucuaaucauauggacaa

SEQ ID NO: 1840697 - RNA, 19 nt, Artificial Sequence
  Description of Artificial Sequence: Synthetic oligonucleotide
  Sense strand starting at position 2822 of SEQ ID NO: 1563901
gcucucugcgucuucuaga

SEQ ID NO: 1840698 - RNA, 19 nt, Artificial Sequence
  Description of Artificial Sequence: Synthetic oligonucleotide
  Antisense strand to SEQ ID NO: 1840697
ucuagaagacgcagagagc

SEQ ID NO: 1840699 - RNA, 19 nt, Artificial Sequence
  Description of Artificial Sequence: Synthetic oligonucleotide
  Sense strand starting at position 2830 of SEQ ID NO: 1563901
cgucuucuagacuagagaa

SEQ ID NO: 1840700 - RNA, 19 nt, Artificial Sequence
  Description of Artificial Sequence: Synthetic oligonucleotide
  Antisense strand to SEQ ID NO: 1840699
uucucuagucuagaagacg

SEQ ID NO: 1840701 - RNA, 19 nt, Artificial Sequence
  Description of Artificial Sequence: Synthetic oligonucleotide
  Sense strand starting at position 2843 of SEQ ID NO: 1563901
agagaaauaugcuucuagg

SEQ ID NO: 1840702 - RNA, 19 nt, Artificial Sequence
  Description of Artificial Sequence: Synthetic oligonucleotide
  Antisense strand to SEQ ID NO: 1840701
ccuagaagcauauuucucu

SEQ ID NO: 1840703 - RNA, 19 nt, Artificial Sequence
  Description of Artificial Sequence: Synthetic oligonucleotide
  Sense strand starting at position 2865 of SEQ ID NO: 1563901
auggauagguuuccuuaag

SEQ ID NO: 1840704 - RNA, 19 nt, Artificial Sequence
  Description of Artificial Sequence: Synthetic oligonucleotide
  Antisense strand to SEQ ID NO: 1840703
cuuaaggaaaccuauccau

SEQ ID NO: 1840705 - RNA, 19 nt, Artificial Sequence
  Description of Artificial Sequence: Synthetic oligonucleotide
  Sense strand starting at position 2866 of SEQ ID NO: 1563901
uggauagguuuccuuaagu

SEQ ID NO: 1840706 - RNA, 19 nt, Artificial Sequence
  Description of Artificial Sequence: Synthetic oligonucleotide
  Antisense strand to SEQ ID NO: 1840705
acuuaaggaaaccuaucca

SEQ ID NO: 1840707 - RNA, 19 nt, Artificial Sequence
  Description of Artificial Sequence: Synthetic oligonucleotide
  Sense strand starting at position 2876 of SEQ ID NO: 1563901
uccuuaagucuggaguucu

SEQ ID NO: 1840708 - RNA, 19 nt, Artificial Sequence
  Description of Artificial Sequence: Synthetic oligonucleotide
  Antisense strand to SEQ ID NO: 1840707
agaacuccagacuuaagga

SEQ ID NO: 1840709 - RNA, 19 nt, Artificial Sequence
  Description of Artificial Sequence: Synthetic oligonucleotide
  Sense strand starting at position 3093 of SEQ ID NO: 1563901
auacauuauugggcaagua

SEQ ID NO: 1840710 - RNA, 19 nt, Artificial Sequence
  Description of Artificial Sequence: Synthetic oligonucleotide
  Antisense strand to SEQ ID NO: 1840709
uacuugcccaauaauguau

SEQ ID NO: 1840711 - RNA, 19 nt, Artificial Sequence
  Description of Artificial Sequence: Synthetic oligonucleotide
  Sense strand starting at position 3094 of SEQ ID NO: 1563901
uacauuauugggcaaguaa

SEQ ID NO: 1840712 - RNA, 19 nt, Artificial Sequence
  Description of Artificial Sequence: Synthetic oligonucleotide
  Antisense strand to SEQ ID NO: 1840711
uuacuugcccaauaaugua

SEQ ID NO: 1840713 - RNA, 19 nt, Artificial Sequence
  Description of Artificial Sequence: Synthetic oligonucleotide
  Sense strand starting at position 3370 of SEQ ID NO: 1563901
uaccauuucgugugagaug

SEQ ID NO: 1840714 - RNA, 19 nt, Artificial Sequence
  Description of Artificial Sequence: Synthetic oligonucleotide
  Antisense strand to SEQ ID NO: 1840713
caucucacacgaaauggua

SEQ ID NO: 1840715 - RNA, 19 nt, Artificial Sequence
  Description of Artificial Sequence: Synthetic oligonucleotide
  Sense strand starting at position 3381 of SEQ ID NO: 1563901
gugagaugagaacgcuuua

SEQ ID NO: 1840716 - RNA, 19 nt, Artificial Sequence
  Description of Artificial Sequence: Synthetic oligonucleotide
  Antisense strand to SEQ ID NO: 1840715
uaaagcguucucaucucac

SEQ ID NO: 1840717 - RNA, 19 nt, Artificial Sequence
  Description of Artificial Sequence: Synthetic oligonucleotide
  Sense strand starting at position 3386 of SEQ ID NO: 1563901
augagaacgcuuuagaucu

SEQ ID NO: 1840718 - RNA, 19 nt, Artificial Sequence
  Description of Artificial Sequence: Synthetic oligonucleotide
  Antisense strand to SEQ ID NO: 1840717
agaucuaaagcguucucau

SEQ ID NO: 1840719 - RNA, 19 nt, Artificial Sequence
  Description of Artificial Sequence: Synthetic oligonucleotide
  Sense strand starting at position 3580 of SEQ ID NO: 1563901
ucuuauuguggguauuaau

SEQ ID NO: 1840720 - RNA, 19 nt, Artificial Sequence
  Description of Artificial Sequence: Synthetic oligonucleotide
  Antisense strand to SEQ ID NO: 1840719
auuaauacccacaauaaga

SEQ ID NO: 1840721 - RNA, 19 nt, Artificial Sequence
  Description of Artificial Sequence: Synthetic oligonucleotide
  Sense strand starting at position 3602 of SEQ ID NO: 1563901
auaaguuucuaauugugga

SEQ ID NO: 1840722 - RNA, 19 nt, Artificial Sequence
  Description of Artificial Sequence: Synthetic oligonucleotide
  Antisense strand to SEQ ID NO: 1840721
uccacaauuagaaacuuau

SEQ ID NO: 1840723 - RNA, 19 nt, Artificial Sequence
  Description of Artificial Sequence: Synthetic oligonucleotide
  Sense strand starting at position 3615 of SEQ ID NO: 1563901
uguggauauugacuccuua

SEQ ID NO: 1840724 - RNA, 19 nt, Artificial Sequence
  Description of Artificial Sequence: Synthetic oligonucleotide
  Antisense strand to SEQ ID NO: 1840723
uaaggagucaauauccaca

SEQ ID NO: 1840725 - RNA, 19 nt, Artificial Sequence
  Description of Artificial Sequence: Synthetic oligonucleotide
  Sense strand starting at position 3869 of SEQ ID NO: 1563901
gggacaaauucugcuaaug

SEQ ID NO: 1840726 - RNA, 19 nt, Artificial Sequence
  Description of Artificial Sequence: Synthetic oligonucleotide
  Antisense strand to SEQ ID NO: 1840725
cauuagcagaauuuguccc

SEQ ID NO: 1840727 - RNA, 19 nt, Artificial Sequence
  Description of Artificial Sequence: Synthetic oligonucleotide
  Sense strand starting at position 3952 of SEQ ID NO: 1563901
acugauaaacuguguucua

SEQ ID NO: 1840728 - RNA, 19 nt, Artificial Sequence
  Description of Artificial Sequence: Synthetic oligonucleotide
  Antisense strand to SEQ ID NO: 1840727
uagaacacaguuuaucagu

SEQ ID NO: 1840729 - RNA, 19 nt, Artificial Sequence
  Description of Artificial Sequence: Synthetic oligonucleotide
  Sense strand starting at position 97 of SEQ ID NO: 1563902
gaaaguaaauagggauaca

SEQ ID NO: 1840730 - RNA, 19 nt, Artificial Sequence
  Description of Artificial Sequence: Synthetic oligonucleotide
  Antisense strand to SEQ ID NO: 1840729
uguaucccuauuuacuuuc

SEQ ID NO: 1840731 - RNA, 19 nt, Artificial Sequence
  Description of Artificial Sequence: Synthetic oligonucleotide
  Sense strand starting at position 157 of SEQ ID NO: 1563902
gcgcgaacugcugauuaaa

SEQ ID NO: 1840732 - RNA, 19 nt, Artificial Sequence
  Description of Artificial Sequence: Synthetic oligonucleotide
  Antisense strand to SEQ ID NO: 1840731
uuuaaucagcaguucgcgc

SEQ ID NO: 1840733 - RNA, 19 nt, Artificial Sequence
  Description of Artificial Sequence: Synthetic oligonucleotide
  Sense strand starting at position 560 of SEQ ID NO: 1563902
gccuuuaagugaccuagaa

SEQ ID NO: 1840734 - RNA, 19 nt, Artificial Sequence
  Description of Artificial Sequence: Synthetic oligonucleotide
  Antisense strand to SEQ ID NO: 1840733
uucuaggucacuuaaaggc

SEQ ID NO: 1840735 - RNA, 19 nt, Artificial Sequence
  Description of Artificial Sequence: Synthetic oligonucleotide
  Sense strand starting at position 1174 of SEQ ID NO: 1563902
cuggcugcgggaugaauua

SEQ ID NO: 1840736 - RNA, 19 nt, Artificial Sequence
  Description of Artificial Sequence: Synthetic oligonucleotide
  Antisense strand to SEQ ID NO: 1840735
uaauucaucccgcagccag

SEQ ID NO: 1840737 - RNA, 19 nt, Artificial Sequence
  Description of Artificial Sequence: Synthetic oligonucleotide
  Sense strand starting at position 1272 of SEQ ID NO: 1563902
gcgugaugacugucccggu

SEQ ID NO: 1840738 - RNA, 19 nt, Artificial Sequence
  Description of Artificial Sequence: Synthetic oligonucleotide
  Antisense strand to SEQ ID NO: 1840737
accgggacagucaucacgc

SEQ ID NO: 1840739 - RNA, 19 nt, Artificial Sequence
  Description of Artificial Sequence: Synthetic oligonucleotide
  Sense strand starting at position 1339 of SEQ ID NO: 1563902
agggaaagccuggguaaga

SEQ ID NO: 1840740 - RNA, 19 nt, Artificial Sequence
  Description of Artificial Sequence: Synthetic oligonucleotide
  Antisense strand to SEQ ID NO: 1840739
ucuuacccaggcuuucccu

SEQ ID NO: 1840741 - RNA, 19 nt, Artificial Sequence
  Description of Artificial Sequence: Synthetic oligonucleotide
  Sense strand starting at position 1509 of SEQ ID NO: 1563902
guuggcagcuuccuagaaa

SEQ ID NO: 1840742 - RNA, 19 nt, Artificial Sequence
  Description of Artificial Sequence: Synthetic oligonucleotide
  Antisense strand to SEQ ID NO: 1840741
uuucuaggaagcugccaac

SEQ ID NO: 1840743 - RNA, 19 nt, Artificial Sequence
  Description of Artificial Sequence: Synthetic oligonucleotide
  Sense strand starting at position 1541 of SEQ ID NO: 1563902
gguugaaggucuccagaga

SEQ ID NO: 1840744 - RNA, 19 nt, Artificial Sequence
  Description of Artificial Sequence: Synthetic oligonucleotide
  Antisense strand to SEQ ID NO: 1840743
ucucuggagaccuucaacc

SEQ ID NO: 1840745 - RNA, 19 nt, Artificial Sequence
  Description of Artificial Sequence: Synthetic oligonucleotide
  Sense strand starting at position 1605 of SEQ ID NO: 1563902
augggaugucugggcuuaa

SEQ ID NO: 1840746 - RNA, 19 nt, Artificial Sequence
  Description of Artificial Sequence: Synthetic oligonucleotide
  Antisense strand to SEQ ID NO: 1840745
uuaagcccagacaucccau

SEQ ID NO: 1840747 - RNA, 19 nt, Artificial Sequence
  Description of Artificial Sequence: Synthetic oligonucleotide
  Sense strand starting at position 1606 of SEQ ID NO: 1563902
ugggaugucugggcuuaau

SEQ ID NO: 1840748 - RNA, 19 nt, Artificial Sequence
  Description of Artificial Sequence: Synthetic oligonucleotide
  Antisense strand to SEQ ID NO: 1840747
auuaagcccagacauccca

SEQ ID NO: 1840749 - RNA, 19 nt, Artificial Sequence
  Description of Artificial Sequence: Synthetic oligonucleotide
  Sense strand starting at position 1609 of SEQ ID NO: 1563902
gaugucugggcuuaauuag

SEQ ID NO: 1840750 - RNA, 19 nt, Artificial Sequence
  Description of Artificial Sequence: Synthetic oligonucleotide
  Antisense strand to SEQ ID NO: 1840749
cuaauuaagcccagacauc

SEQ ID NO: 1840751 - RNA, 19 nt, Artificial Sequence
  Description of Artificial Sequence: Synthetic oligonucleotide
  Sense strand starting at position 1708 of SEQ ID NO: 1563902
guauccugauuucuuagca

SEQ ID NO: 1840752 - RNA, 19 nt, Artificial Sequence
  Description of Artificial Sequence: Synthetic oligonucleotide
  Antisense strand to SEQ ID NO: 1840751
ugcuaagaaaucaggauac

SEQ ID NO: 1840753 - RNA, 19 nt, Artificial Sequence
  Description of Artificial Sequence: Synthetic oligonucleotide
  Sense strand starting at position 1790 of SEQ ID NO: 1563902
ucccuugggugucucaaau

SEQ ID NO: 1840754 - RNA, 19 nt, Artificial Sequence
  Description of Artificial Sequence: Synthetic oligonucleotide
  Antisense strand to SEQ ID NO: 1840753
auuugagacacccaaggga

SEQ ID NO: 1840755 - RNA, 19 nt, Artificial Sequence
  Description of Artificial Sequence: Synthetic oligonucleotide
  Sense strand starting at position 2246 of SEQ ID NO: 1563902
gagggcucuuugucagaga

SEQ ID NO: 1840756 - RNA, 19 nt, Artificial Sequence
  Description of Artificial Sequence: Synthetic oligonucleotide
  Antisense strand to SEQ ID NO: 1840755
ucucugacaaagagcccuc

SEQ ID NO: 1840757 - RNA, 19 nt, Artificial Sequence
  Description of Artificial Sequence: Synthetic oligonucleotide
  Sense strand starting at position 2251 of SEQ ID NO: 1563902
cucuuugucagagagaagu

SEQ ID NO: 1840758 - RNA, 19 nt, Artificial Sequence
  Description of Artificial Sequence: Synthetic oligonucleotide
  Antisense strand to SEQ ID NO: 1840757
acuucucucugacaaagag

SEQ ID NO: 1840759 - RNA, 19 nt, Artificial Sequence
  Description of Artificial Sequence: Synthetic oligonucleotide
  Sense strand starting at position 2584 of SEQ ID NO: 1563902
gucuuccugccagaaaggu

SEQ ID NO: 1840760 - RNA, 19 nt, Artificial Sequence
  Description of Artificial Sequence: Synthetic oligonucleotide
  Antisense strand to SEQ ID NO: 1840759
accuuucuggcaggaagac

SEQ ID NO: 1840761 - RNA, 19 nt, Artificial Sequence
  Description of Artificial Sequence: Synthetic oligonucleotide
  Sense strand starting at position 2754 of SEQ ID NO: 1563902
gucccuauuccaggaggca

SEQ ID NO: 1840762 - RNA, 19 nt, Artificial Sequence
  Description of Artificial Sequence: Synthetic oligonucleotide
  Antisense strand to SEQ ID NO: 1840761
ugccuccuggaauagggac

SEQ ID NO: 1840763 - RNA, 19 nt, Artificial Sequence
  Description of Artificial Sequence: Synthetic oligonucleotide
  Sense strand starting at position 2792 of SEQ ID NO: 1563902
cugccuggcuuccuggaua

SEQ ID NO: 1840764 - RNA, 19 nt, Artificial Sequence
  Description of Artificial Sequence: Synthetic oligonucleotide
  Antisense strand to SEQ ID NO: 1840763
uauccaggaagccaggcag

SEQ ID NO: 1840765 - RNA, 19 nt, Artificial Sequence
  Description of Artificial Sequence: Synthetic oligonucleotide
  Sense strand starting at position 2795 of SEQ ID NO: 1563902
ccuggcuuccuggauaagu

SEQ ID NO: 1840766 - RNA, 19 nt, Artificial Sequence
  Description of Artificial Sequence: Synthetic oligonucleotide
  Antisense strand to SEQ ID NO: 1840765
acuuauccaggaagccagg

SEQ ID NO: 1840767 - RNA, 19 nt, Artificial Sequence
  Description of Artificial Sequence: Synthetic oligonucleotide
  Sense strand starting at position 2797 of SEQ ID NO: 1563902
uggcuuccuggauaaguca

SEQ ID NO: 1840768 - RNA, 19 nt, Artificial Sequence
  Description of Artificial Sequence: Synthetic oligonucleotide
  Antisense strand to SEQ ID NO: 1840767
ugacuuauccaggaagcca

SEQ ID NO: 1840769 - RNA, 19 nt, Artificial Sequence
  Description of Artificial Sequence: Synthetic oligonucleotide
  Sense strand starting at position 2840 of SEQ ID NO: 1563902
aggcgaguaucuucaguca

SEQ ID NO: 1840770 - RNA, 19 nt, Artificial Sequence
  Description of Artificial Sequence: Synthetic oligonucleotide
  Antisense strand to SEQ ID NO: 1840769
ugacugaagauacucgccu

SEQ ID NO: 1840771 - RNA, 19 nt, Artificial Sequence
  Description of Artificial Sequence: Synthetic oligonucleotide
  Sense strand starting at position 2981 of SEQ ID NO: 1563902
ccguauuccucucccugaa

SEQ ID NO: 1840772 - RNA, 19 nt, Artificial Sequence
  Description of Artificial Sequence: Synthetic oligonucleotide
  Antisense strand to SEQ ID NO: 1840771
uucagggagaggaauacgg

SEQ ID NO: 1840773 - RNA, 19 nt, Artificial Sequence
  Description of Artificial Sequence: Synthetic oligonucleotide
  Sense strand starting at position 3007 of SEQ ID NO: 1563902
uuugacauguccuuagggu

SEQ ID NO: 1840774 - RNA, 19 nt, Artificial Sequence
  Description of Artificial Sequence: Synthetic oligonucleotide
  Antisense strand to SEQ ID NO: 1840773
acccuaaggacaugucaaa

SEQ ID NO: 1840775 - RNA, 19 nt, Artificial Sequence
  Description of Artificial Sequence: Synthetic oligonucleotide
  Sense strand starting at position 3026 of SEQ ID NO: 1563902
caguguuugccuguugugu

SEQ ID NO: 1840776 - RNA, 19 nt, Artificial Sequence
  Description of Artificial Sequence: Synthetic oligonucleotide
  Antisense strand to SEQ ID NO: 1840775
acacaacaggcaaacacug

SEQ ID NO: 1840777 - RNA, 19 nt, Artificial Sequence
  Description of Artificial Sequence: Synthetic oligonucleotide
  Sense strand starting at position 3027 of SEQ ID NO: 1563902
aguguuugccuguuguguu

SEQ ID NO: 1840778 - RNA, 19 nt, Artificial Sequence
  Description of Artificial Sequence: Synthetic oligonucleotide
  Antisense strand to SEQ ID NO: 1840777
aacacaacaggcaaacacu

SEQ ID NO: 1840779 - RNA, 19 nt, Artificial Sequence
  Description of Artificial Sequence: Synthetic oligonucleotide
  Sense strand starting at position 3034 of SEQ ID NO: 1563902
gccuguuguguucuuugau

SEQ ID NO: 1840780 - RNA, 19 nt, Artificial Sequence
  Description of Artificial Sequence: Synthetic oligonucleotide
  Antisense strand to SEQ ID NO: 1840779
aucaaagaacacaacaggc

SEQ ID NO: 1840781 - RNA, 19 nt, Artificial Sequence
  Description of Artificial Sequence: Synthetic oligonucleotide
  Sense strand starting at position 3040 of SEQ ID NO: 1563902
uguguucuuugaucuacaa

SEQ ID NO: 1840782 - RNA, 19 nt, Artificial Sequence
  Description of Artificial Sequence: Synthetic oligonucleotide
  Antisense strand to SEQ ID NO: 1840781
uuguagaucaaagaacaca

SEQ ID NO: 1840783 - RNA, 19 nt, Artificial Sequence
  Description of Artificial Sequence: Synthetic oligonucleotide
  Sense strand starting at position 3060 of SEQ ID NO: 1563902
agacaucugugaguauaaa

SEQ ID NO: 1840784 - RNA, 19 nt, Artificial Sequence
  Description of Artificial Sequence: Synthetic oligonucleotide
  Antisense strand to SEQ ID NO: 1840783
uuuauacucacagaugucu

SEQ ID NO: 1840785 - RNA, 19 nt, Artificial Sequence
  Description of Artificial Sequence: Synthetic oligonucleotide
  Sense strand starting at position 3103 of SEQ ID NO: 1563902
gguaccauguacuuguaca

SEQ ID NO: 1840786 - RNA, 19 nt, Artificial Sequence
  Description of Artificial Sequence: Synthetic oligonucleotide
  Antisense strand to SEQ ID NO: 1840785
uguacaaguacaugguacc

SEQ ID NO: 1840787 - RNA, 19 nt, Artificial Sequence
  Description of Artificial Sequence: Synthetic oligonucleotide
  Sense strand starting at position 3108 of SEQ ID NO: 1563902
cauguacuuguacaacgaa

SEQ ID NO: 1840788 - RNA, 19 nt, Artificial Sequence
  Description of Artificial Sequence: Synthetic oligonucleotide
  Antisense strand to SEQ ID NO: 1840787
uucguuguacaaguacaug

SEQ ID NO: 1840789 - RNA, 19 nt, Artificial Sequence
  Description of Artificial Sequence: Synthetic oligonucleotide
  Sense strand starting at position 3123 of SEQ ID NO: 1563902
cgaauccugucugcugaga

SEQ ID NO: 1840790 - RNA, 19 nt, Artificial Sequence
  Description of Artificial Sequence: Synthetic oligonucleotide
  Antisense strand to SEQ ID NO: 1840789
ucucagcagacaggauucg

SEQ ID NO: 1840791 - RNA, 19 nt, Artificial Sequence
  Description of Artificial Sequence: Synthetic oligonucleotide
  Sense strand starting at position 3163 of SEQ ID NO: 1563902
gcgugcggcauuuauguau

SEQ ID NO: 1840792 - RNA, 19 nt, Artificial Sequence
  Description of Artificial Sequence: Synthetic oligonucleotide
  Antisense strand to SEQ ID NO: 1840791
auacauaaaugccgcacgc

SEQ ID NO: 1840793 - RNA, 19 nt, Artificial Sequence
  Description of Artificial Sequence: Synthetic oligonucleotide
  Sense strand starting at position 3167 of SEQ ID NO: 1563902
gcggcauuuauguaugugu

SEQ ID NO: 1840794 - RNA, 19 nt, Artificial Sequence
  Description of Artificial Sequence: Synthetic oligonucleotide
  Antisense strand to SEQ ID NO: 1840793
acacauacauaaaugccgc

SEQ ID NO: 1840795 - RNA, 19 nt, Artificial Sequence
  Description of Artificial Sequence: Synthetic oligonucleotide
  Sense strand starting at position 3206 of SEQ ID NO: 1563902
cuauguauuugagacagag

SEQ ID NO: 1840796 - RNA, 19 nt, Artificial Sequence
  Description of Artificial Sequence: Synthetic oligonucleotide
  Antisense strand to SEQ ID NO: 1840795
cucugucucaaauacauag

SEQ ID NO: 1840797 - RNA, 19 nt, Artificial Sequence
  Description of Artificial Sequence: Synthetic oligonucleotide
  Sense strand starting at position 3513 of SEQ ID NO: 1563902
aaggcaaugcauggagaaa

SEQ ID NO: 1840798 - RNA, 19 nt, Artificial Sequence
  Description of Artificial Sequence: Synthetic oligonucleotide
  Antisense strand to SEQ ID NO: 1840797
uuucuccaugcauugccuu

SEQ ID NO: 1840799 - RNA, 19 nt, Artificial Sequence
  Description of Artificial Sequence: Synthetic oligonucleotide
  Sense strand starting at position 3545 of SEQ ID NO: 1563902
gugccugcucuuuagauuc

SEQ ID NO: 1840800 - RNA, 19 nt, Artificial Sequence
  Description of Artificial Sequence: Synthetic oligonucleotide
  Antisense strand to SEQ ID NO: 1840799
gaaucuaaagagcaggcac

SEQ ID NO: 1840801 - RNA, 19 nt, Artificial Sequence
  Description of Artificial Sequence: Synthetic oligonucleotide
  Sense strand starting at position 3653 of SEQ ID NO: 1563902
ugaagcgugguucaucuua

SEQ ID NO: 1840802 - RNA, 19 nt, Artificial Sequence
  Description of Artificial Sequence: Synthetic oligonucleotide
  Antisense strand to SEQ ID NO: 1840801
uaagaugaaccacgcuuca

SEQ ID NO: 1840803 - RNA, 19 nt, Artificial Sequence
  Description of Artificial Sequence: Synthetic oligonucleotide
  Sense strand starting at position 3731 of SEQ ID NO: 1563902
guggcuuccacagaguuga

SEQ ID NO: 1840804 - RNA, 19 nt, Artificial Sequence
  Description of Artificial Sequence: Synthetic oligonucleotide
  Antisense strand to SEQ ID NO: 1840803
ucaacucuguggaagccac

SEQ ID NO: 1840805 - RNA, 19 nt, Artificial Sequence
  Description of Artificial Sequence: Synthetic oligonucleotide
  Sense strand starting at position 3741 of SEQ ID NO: 1563902
cagaguugauagucaggaa

SEQ ID NO: 1840806 - RNA, 19 nt, Artificial Sequence
  Description of Artificial Sequence: Synthetic oligonucleotide
  Antisense strand to SEQ ID NO: 1840805
uuccugacuaucaacucug

SEQ ID NO: 1840807 - RNA, 19 nt, Artificial Sequence
  Description of Artificial Sequence: Synthetic oligonucleotide
  Sense strand starting at position 3818 of SEQ ID NO: 1563902
gacauaguuccagggauua

SEQ ID NO: 1840808 - RNA, 19 nt, Artificial Sequence
  Description of Artificial Sequence: Synthetic oligonucleotide
  Antisense strand to SEQ ID NO: 1840807
uaaucccuggaacuauguc

SEQ ID NO: 1840809 - RNA, 19 nt, Artificial Sequence
  Description of Artificial Sequence: Synthetic oligonucleotide
  Sense strand starting at position 64 of SEQ ID NO: 1563903
agugguugccacggguuaa

SEQ ID NO: 1840810 - RNA, 19 nt, Artificial Sequence
  Description of Artificial Sequence: Synthetic oligonucleotide
  Antisense strand to SEQ ID NO: 1840809
uuaacccguggcaaccacu

SEQ ID NO: 1840811 - RNA, 19 nt, Artificial Sequence
  Description of Artificial Sequence: Synthetic oligonucleotide
  Sense strand starting at position 90 of SEQ ID NO: 1563903
gagggaugaaugcguggaa

SEQ ID NO: 1840812 - RNA, 19 nt, Artificial Sequence
  Description of Artificial Sequence: Synthetic oligonucleotide
  Antisense strand to SEQ ID NO: 1840811
uuccacgcauucaucccuc

SEQ ID NO: 1840813 - RNA, 19 nt, Artificial Sequence
  Description of Artificial Sequence: Synthetic oligonucleotide
  Sense strand starting at position 94 of SEQ ID NO: 1563903
gaugaaugcguggaacaca

SEQ ID NO: 1840814 - RNA, 19 nt, Artificial Sequence
  Description of Artificial Sequence: Synthetic oligonucleotide
  Antisense strand to SEQ ID NO: 1840813
uguguuccacgcauucauc

SEQ ID NO: 1840815 - RNA, 19 nt, Artificial Sequence
  Description of Artificial Sequence: Synthetic oligonucleotide
  Sense strand starting at position 111 of SEQ ID NO: 1563903
cagugaaacuauccugcga

SEQ ID NO: 1840816 - RNA, 19 nt, Artificial Sequence
  Description of Artificial Sequence: Synthetic oligonucleotide
  Antisense strand to SEQ ID NO: 1840815
ucgcaggauaguuucacug

SEQ ID NO: 1840817 - RNA, 19 nt, Artificial Sequence
  Description of Artificial Sequence: Synthetic oligonucleotide
  Sense strand starting at position 118 of SEQ ID NO: 1563903
acuauccugcgauaauaug

SEQ ID NO: 1840818 - RNA, 19 nt, Artificial Sequence
  Description of Artificial Sequence: Synthetic oligonucleotide
  Antisense strand to SEQ ID NO: 1840817
cauauuaucgcaggauagu

SEQ ID NO: 1840819 - RNA, 19 nt, Artificial Sequence
  Description of Artificial Sequence: Synthetic oligonucleotide
  Sense strand starting at position 185 of SEQ ID NO: 1563903
agagaagugcaguaaugua

SEQ ID NO: 1840820 - RNA, 19 nt, Artificial Sequence
  Description of Artificial Sequence: Synthetic oligonucleotide
  Antisense strand to SEQ ID NO: 1840819
uacauuacugcacuucucu

SEQ ID NO: 1840821 - RNA, 19 nt, Artificial Sequence
  Description of Artificial Sequence: Synthetic oligonucleotide
  Sense strand starting at position 198 of SEQ ID NO: 1563903
aauguaaacuauggguuua

SEQ ID NO: 1840822 - RNA, 19 nt, Artificial Sequence
  Description of Artificial Sequence: Synthetic oligonucleotide
  Antisense strand to SEQ ID NO: 1840821
uaaacccauaguuuacauu

SEQ ID NO: 1840823 - RNA, 19 nt, Artificial Sequence
  Description of Artificial Sequence: Synthetic oligonucleotide
  Sense strand starting at position 200 of SEQ ID NO: 1563903
uguaaacuauggguuuagu

SEQ ID NO: 1840824 - RNA, 19 nt, Artificial Sequence
  Description of Artificial Sequence: Synthetic oligonucleotide
  Antisense strand to SEQ ID NO: 1840823
acuaaacccauaguuuaca

SEQ ID NO: 1840825 - RNA, 19 nt, Artificial Sequence
  Description of Artificial Sequence: Synthetic oligonucleotide
  Sense strand starting at position 819 of SEQ ID NO: 1563903
ccauucucguccucagcaa

SEQ ID NO: 1840826 - RNA, 19 nt, Artificial Sequence
  Description of Artificial Sequence: Synthetic oligonucleotide
  Antisense strand to SEQ ID NO: 1840825
uugcugaggacgagaaugg

SEQ ID NO: 1840827 - RNA, 19 nt, Artificial Sequence
  Description of Artificial Sequence: Synthetic oligonucleotide
  Sense strand starting at position 823 of SEQ ID NO: 1563903
ucucguccucagcaaugua

SEQ ID NO: 1840828 - RNA, 19 nt, Artificial Sequence
  Description of Artificial Sequence: Synthetic oligonucleotide
  Antisense strand to SEQ ID NO: 1840827
uacauugcugaggacgaga

SEQ ID NO: 1840829 - RNA, 19 nt, Artificial Sequence
  Description of Artificial Sequence: Synthetic oligonucleotide
  Sense strand starting at position 826 of SEQ ID NO: 1563903
cguccucagcaauguaaga

SEQ ID NO: 1840830 - RNA, 19 nt, Artificial Sequence
  Description of Artificial Sequence: Synthetic oligonucleotide
  Antisense strand to SEQ ID NO: 1840829
ucuuacauugcugaggacg

SEQ ID NO: 1840831 - RNA, 19 nt, Artificial Sequence
  Description of Artificial Sequence: Synthetic oligonucleotide
  Sense strand starting at position 873 of SEQ ID NO: 1563903
aaacuucuugucggagcua

SEQ ID NO: 1840832 - RNA, 19 nt, Artificial Sequence
  Description of Artificial Sequence: Synthetic oligonucleotide
  Antisense strand to SEQ ID NO: 1840831
uagcuccgacaagaaguuu

SEQ ID NO: 1840833 - RNA, 19 nt, Artificial Sequence
  Description of Artificial Sequence: Synthetic oligonucleotide
  Sense strand starting at position 878 of SEQ ID NO: 1563903
ucuugucggagcuagaaga

SEQ ID NO: 1840834 - RNA, 19 nt, Artificial Sequence
  Description of Artificial Sequence: Synthetic oligonucleotide
  Antisense strand to SEQ ID NO: 1840833
ucuucuagcuccgacaaga

SEQ ID NO: 1840835 - RNA, 19 nt, Artificial Sequence
  Description of Artificial Sequence: Synthetic oligonucleotide
  Sense strand starting at position 1441 of SEQ ID NO: 1563903
acgaucugacuuugcacaa

SEQ ID NO: 1840836 - RNA, 19 nt, Artificial Sequence
  Description of Artificial Sequence: Synthetic oligonucleotide
  Antisense strand to SEQ ID NO: 1840835
uugugcaaagucagaucgu

SEQ ID NO: 1840837 - RNA, 19 nt, Artificial Sequence
  Description of Artificial Sequence: Synthetic oligonucleotide
  Sense strand starting at position 1733 of SEQ ID NO: 1563903
cgcauugcggauguucaua

SEQ ID NO: 1840838 - RNA, 19 nt, Artificial Sequence
  Description of Artificial Sequence: Synthetic oligonucleotide
  Antisense strand to SEQ ID NO: 1840837
uaugaacauccgcaaugcg

SEQ ID NO: 1840839 - RNA, 19 nt, Artificial Sequence
  Description of Artificial Sequence: Synthetic oligonucleotide
  Sense strand starting at position 2538 of SEQ ID NO: 1563903
cgaucuuaaccgcgacacu

SEQ ID NO: 1840840 - RNA, 19 nt, Artificial Sequence
  Description of Artificial Sequence: Synthetic oligonucleotide
  Antisense strand to SEQ ID NO: 1840839
agugucgcgguuaagaucg

SEQ ID NO: 1840841 - RNA, 19 nt, Artificial Sequence
  Description of Artificial Sequence: Synthetic oligonucleotide
  Sense strand starting at position 2555 of SEQ ID NO: 1563903
cugcguccuccacaaagau

SEQ ID NO: 1840842 - RNA, 19 nt, Artificial Sequence
  Description of Artificial Sequence: Synthetic oligonucleotide
  Antisense strand to SEQ ID NO: 1840841
aucuuuguggaggacgcag

SEQ ID NO: 1840843 - RNA, 19 nt, Artificial Sequence
  Description of Artificial Sequence: Synthetic oligonucleotide
  Sense strand starting at position 2850 of SEQ ID NO: 1563903
uuguaaucccagcaguaua

SEQ ID NO: 1840844 - RNA, 19 nt, Artificial Sequence
  Description of Artificial Sequence: Synthetic oligonucleotide
  Antisense strand to SEQ ID NO: 1840843
uauacugcugggauuacaa

SEQ ID NO: 1840845 - RNA, 19 nt, Artificial Sequence
  Description of Artificial Sequence: Synthetic oligonucleotide
  Sense strand starting at position 3019 of SEQ ID NO: 1563903
ucucuauugugauuguagu

SEQ ID NO: 1840846 - RNA, 19 nt, Artificial Sequence
  Description of Artificial Sequence: Synthetic oligonucleotide
  Antisense strand to SEQ ID NO: 1840845
acuacaaucacaauagaga

SEQ ID NO: 1840847 - RNA, 19 nt, Artificial Sequence
  Description of Artificial Sequence: Synthetic oligonucleotide
  Sense strand starting at position 3025 of SEQ ID NO: 1563903
uugugauuguagucguggu

SEQ ID NO: 1840848 - RNA, 19 nt, Artificial Sequence
  Description of Artificial Sequence: Synthetic oligonucleotide
  Antisense strand to SEQ ID NO: 1840847
accacgacuacaaucacaa

SEQ ID NO: 1840849 - RNA, 19 nt, Artificial Sequence
  Description of Artificial Sequence: Synthetic oligonucleotide
  Sense strand starting at position 3026 of SEQ ID NO: 1563903
ugugauuguagucgugguu

SEQ ID NO: 1840850 - RNA, 19 nt, Artificial Sequence
  Description of Artificial Sequence: Synthetic oligonucleotide
  Antisense strand to SEQ ID NO: 1840849
aaccacgacuacaaucaca

SEQ ID NO: 1840851 - RNA, 19 nt, Artificial Sequence
  Description of Artificial Sequence: Synthetic oligonucleotide
  Sense strand starting at position 3027 of SEQ ID NO: 1563903
gugauuguagucgugguua

SEQ ID NO: 1840852 - RNA, 19 nt, Artificial Sequence
  Description of Artificial Sequence: Synthetic oligonucleotide
  Antisense strand to SEQ ID NO: 1840851
uaaccacgacuacaaucac

SEQ ID NO: 1840853 - RNA, 19 nt, Artificial Sequence
  Description of Artificial Sequence: Synthetic oligonucleotide
  Sense strand starting at position 3031 of SEQ ID NO: 1563903
uuguagucgugguuacguu

SEQ ID NO: 1840854 - RNA, 19 nt, Artificial Sequence
  Description of Artificial Sequence: Synthetic oligonucleotide
  Antisense strand to SEQ ID NO: 1840853
aacguaaccacgacuacaa

SEQ ID NO: 1840855 - RNA, 19 nt, Artificial Sequence
  Description of Artificial Sequence: Synthetic oligonucleotide
  Sense strand starting at position 3035 of SEQ ID NO: 1563903
agucgugguuacguugauu

SEQ ID NO: 1840856 - RNA, 19 nt, Artificial Sequence
  Description of Artificial Sequence: Synthetic oligonucleotide
  Antisense strand to SEQ ID NO: 1840855
aaucaacguaaccacgacu

SEQ ID NO: 1840857 - RNA, 19 nt, Artificial Sequence
  Description of Artificial Sequence: Synthetic oligonucleotide
  Sense strand starting at position 3038 of SEQ ID NO: 1563903
cgugguuacguugauucaa

SEQ ID NO: 1840858 - RNA, 19 nt, Artificial Sequence
  Description of Artificial Sequence: Synthetic oligonucleotide
  Antisense strand to SEQ ID NO: 1840857
uugaaucaacguaaccacg

SEQ ID NO: 1840859 - RNA, 19 nt, Artificial Sequence
  Description of Artificial Sequence: Synthetic oligonucleotide
  Sense strand starting at position 3040 of SEQ ID NO: 1563903
ugguuacguugauucaaag

SEQ ID NO: 1840860 - RNA, 19 nt, Artificial Sequence
  Description of Artificial Sequence: Synthetic oligonucleotide
  Antisense strand to SEQ ID NO: 1840859
cuuugaaucaacguaacca

SEQ ID NO: 1840861 - RNA, 19 nt, Artificial Sequence
  Description of Artificial Sequence: Synthetic oligonucleotide
  Sense strand starting at position 3406 of SEQ ID NO: 1563903
gacgaccugucaugaaacu

SEQ ID NO: 1840862 - RNA, 19 nt, Artificial Sequence
  Description of Artificial Sequence: Synthetic oligonucleotide
  Antisense strand to SEQ ID NO: 1840861
aguuucaugacaggucguc

SEQ ID NO: 1840863 - RNA, 19 nt, Artificial Sequence
  Description of Artificial Sequence: Synthetic oligonucleotide
  Sense strand starting at position 3415 of SEQ ID NO: 1563903
ucaugaaacucuuaagaag

SEQ ID NO: 1840864 - RNA, 19 nt, Artificial Sequence
  Description of Artificial Sequence: Synthetic oligonucleotide
  Antisense strand to SEQ ID NO: 1840863
cuucuuaagaguuucauga

SEQ ID NO: 1840865 - RNA, 19 nt, Artificial Sequence
  Description of Artificial Sequence: Synthetic oligonucleotide
  Sense strand starting at position 3418 of SEQ ID NO: 1563903
ugaaacucuuaagaaguga

SEQ ID NO: 1840866 - RNA, 19 nt, Artificial Sequence
  Description of Artificial Sequence: Synthetic oligonucleotide
  Antisense strand to SEQ ID NO: 1840865
ucacuucuuaagaguuuca

SEQ ID NO: 1840867 - RNA, 19 nt, Artificial Sequence
  Description of Artificial Sequence: Synthetic oligonucleotide
  Sense strand starting at position 3514 of SEQ ID NO: 1563903
gcucaccauuggucccaaa

SEQ ID NO: 1840868 - RNA, 19 nt, Artificial Sequence
  Description of Artificial Sequence: Synthetic oligonucleotide
  Antisense strand to SEQ ID NO: 1840867
uuugggaccaauggugagc

SEQ ID NO: 1840869 - RNA, 19 nt, Artificial Sequence
  Description of Artificial Sequence: Synthetic oligonucleotide
  Sense strand starting at position 3700 of SEQ ID NO: 1563903
uuuaaaugguggcccauaa

SEQ ID NO: 1840870 - RNA, 19 nt, Artificial Sequence
  Description of Artificial Sequence: Synthetic oligonucleotide
  Antisense strand to SEQ ID NO: 1840869
uuaugggccaccauuuaaa

SEQ ID NO: 1840871 - RNA, 19 nt, Artificial Sequence
  Description of Artificial Sequence: Synthetic oligonucleotide
  Sense strand starting at position 3704 of SEQ ID NO: 1563903
aaugguggcccauaagagu

SEQ ID NO: 1840872 - RNA, 19 nt, Artificial Sequence
  Description of Artificial Sequence: Synthetic oligonucleotide
  Antisense strand to SEQ ID NO: 1840871
acucuuaugggccaccauu

SEQ ID NO: 1840873 - RNA, 19 nt, Artificial Sequence
  Description of Artificial Sequence: Synthetic oligonucleotide
  Sense strand starting at position 3711 of SEQ ID NO: 1563903
gcccauaagaguuggugua

SEQ ID NO: 1840874 - RNA, 19 nt, Artificial Sequence
  Description of Artificial Sequence: Synthetic oligonucleotide
  Antisense strand to SEQ ID NO: 1840873
uacaccaacucuuaugggc

SEQ ID NO: 1840875 - RNA, 19 nt, Artificial Sequence
  Description of Artificial Sequence: Synthetic oligonucleotide
  Sense strand starting at position 3712 of SEQ ID NO: 1563903
cccauaagaguugguguau

SEQ ID NO: 1840876 - RNA, 19 nt, Artificial Sequence
  Description of Artificial Sequence: Synthetic oligonucleotide
  Antisense strand to SEQ ID NO: 1840875
auacaccaacucuuauggg

SEQ ID NO: 1840877 - RNA, 19 nt, Artificial Sequence
  Description of Artificial Sequence: Synthetic oligonucleotide
  Sense strand starting at position 3713 of SEQ ID NO: 1563903
ccauaagaguugguguauu

SEQ ID NO: 1840878 - RNA, 19 nt, Artificial Sequence
  Description of Artificial Sequence: Synthetic oligonucleotide
  Antisense strand to SEQ ID NO: 1840877
aauacaccaacucuuaugg

SEQ ID NO: 1840879 - RNA, 19 nt, Artificial Sequence
  Description of Artificial Sequence: Synthetic oligonucleotide
  Sense strand starting at position 3724 of SEQ ID NO: 1563903
gguguauucuucuuuguag

SEQ ID NO: 1840880 - RNA, 19 nt, Artificial Sequence
  Description of Artificial Sequence: Synthetic oligonucleotide
  Antisense strand to SEQ ID NO: 1840879
cuacaaagaagaauacacc

SEQ ID NO: 1840881 - RNA, 19 nt, Artificial Sequence
  Description of Artificial Sequence: Synthetic oligonucleotide
  Sense strand starting at position 3726 of SEQ ID NO: 1563903
uguauucuucuuuguagga

SEQ ID NO: 1840882 - RNA, 19 nt, Artificial Sequence
  Description of Artificial Sequence: Synthetic oligonucleotide
  Antisense strand to SEQ ID NO: 1840881
uccuacaaagaagaauaca

SEQ ID NO: 1840883 - RNA, 19 nt, Artificial Sequence
  Description of Artificial Sequence: Synthetic oligonucleotide
  Sense strand starting at position 3727 of SEQ ID NO: 1563903
guauucuucuuuguaggaa

SEQ ID NO: 1840884 - RNA, 19 nt, Artificial Sequence
  Description of Artificial Sequence: Synthetic oligonucleotide
  Antisense strand to SEQ ID NO: 1840883
uuccuacaaagaagaauac

SEQ ID NO: 1840885 - RNA, 19 nt, Artificial Sequence
  Description of Artificial Sequence: Synthetic oligonucleotide
  Sense strand starting at position 3730 of SEQ ID NO: 1563903
uucuucuuuguaggaagua

SEQ ID NO: 1840886 - RNA, 19 nt, Artificial Sequence
  Description of Artificial Sequence: Synthetic oligonucleotide
  Antisense strand to SEQ ID NO: 1840885
uacuuccuacaaagaagaa

SEQ ID NO: 1840887 - RNA, 19 nt, Artificial Sequence
  Description of Artificial Sequence: Synthetic oligonucleotide
  Sense strand starting at position 3731 of SEQ ID NO: 1563903
ucuucuuuguaggaaguaa

SEQ ID NO: 1840888 - RNA, 19 nt, Artificial Sequence
  Description of Artificial Sequence: Synthetic oligonucleotide
  Antisense strand to SEQ ID NO: 1840887
uuacuuccuacaaagaaga

SEQ ID NO: 1840889 - RNA, 19 nt, Artificial Sequence
  Description of Artificial Sequence: Synthetic oligonucleotide
  Sense strand starting at position 190 of SEQ ID NO: 1563904
uaacuauaucuagggcagu

SEQ ID NO: 1840890 - RNA, 19 nt, Artificial Sequence
  Description of Artificial Sequence: Synthetic oligonucleotide
  Antisense strand to SEQ ID NO: 1840889
acugcccuagauauaguua

SEQ ID NO: 1840891 - RNA, 19 nt, Artificial Sequence
  Description of Artificial Sequence: Synthetic oligonucleotide
  Sense strand starting at position 193 of SEQ ID NO: 1563904
cuauaucuagggcaguuaa

SEQ ID NO: 1840892 - RNA, 19 nt, Artificial Sequence
  Description of Artificial Sequence: Synthetic oligonucleotide
  Antisense strand to SEQ ID NO: 1840891
uuaacugcccuagauauag

SEQ ID NO: 1840893 - RNA, 19 nt, Artificial Sequence
  Description of Artificial Sequence: Synthetic oligonucleotide
  Sense strand starting at position 253 of SEQ ID NO: 1563904
cuacuaaugccucaagguu

SEQ ID NO: 1840894 - RNA, 19 nt, Artificial Sequence
  Description of Artificial Sequence: Synthetic oligonucleotide
  Antisense strand to SEQ ID NO: 1840893
aaccuugaggcauuaguag

SEQ ID NO: 1840895 - RNA, 19 nt, Artificial Sequence
  Description of Artificial Sequence: Synthetic oligonucleotide
  Sense strand starting at position 430 of SEQ ID NO: 1563904
guaaauugugaccaaguaa

SEQ ID NO: 1840896 - RNA, 19 nt, Artificial Sequence
  Description of Artificial Sequence: Synthetic oligonucleotide
  Antisense strand to SEQ ID NO: 1840895
uuacuuggucacaauuuac

SEQ ID NO: 1840897 - RNA, 19 nt, Artificial Sequence
  Description of Artificial Sequence: Synthetic oligonucleotide
  Sense strand starting at position 704 of SEQ ID NO: 1563904
ggucuuugucaacaacuca

SEQ ID NO: 1840898 - RNA, 19 nt, Artificial Sequence
  Description of Artificial Sequence: Synthetic oligonucleotide
  Antisense strand to SEQ ID NO: 1840897
ugaguuguugacaaagacc

SEQ ID NO: 1840899 - RNA, 19 nt, Artificial Sequence
  Description of Artificial Sequence: Synthetic oligonucleotide
  Sense strand starting at position 738 of SEQ ID NO: 1563904
uuggguuugaagugaaauu

SEQ ID NO: 1840900 - RNA, 19 nt, Artificial Sequence
  Description of Artificial Sequence: Synthetic oligonucleotide
  Antisense strand to SEQ ID NO: 1840899
aauuucacuucaaacccaa

SEQ ID NO: 1840901 - RNA, 19 nt, Artificial Sequence
  Description of Artificial Sequence: Synthetic oligonucleotide
  Sense strand starting at position 739 of SEQ ID NO: 1563904
uggguuugaagugaaauuc

SEQ ID NO: 1840902 - RNA, 19 nt, Artificial Sequence
  Description of Artificial Sequence: Synthetic oligonucleotide
  Antisense strand to SEQ ID NO: 1840901
gaauuucacuucaaaccca

SEQ ID NO: 1840903 - RNA, 19 nt, Artificial Sequence
  Description of Artificial Sequence: Synthetic oligonucleotide
  Sense strand starting at position 751 of SEQ ID NO: 1563904
gaaauucuagugugaaacu

SEQ ID NO: 1840904 - RNA, 19 nt, Artificial Sequence
  Description of Artificial Sequence: Synthetic oligonucleotide
  Antisense strand to SEQ ID NO: 1840903
aguuucacacuagaauuuc

SEQ ID NO: 1840905 - RNA, 19 nt, Artificial Sequence
  Description of Artificial Sequence: Synthetic oligonucleotide
  Sense strand starting at position 798 of SEQ ID NO: 1563904
acuuuaauaucugucagga

SEQ ID NO: 1840906 - RNA, 19 nt, Artificial Sequence
  Description of Artificial Sequence: Synthetic oligonucleotide
  Antisense strand to SEQ ID NO: 1840905
uccugacagauauuaaagu

SEQ ID NO: 1840907 - RNA, 19 nt, Artificial Sequence
  Description of Artificial Sequence: Synthetic oligonucleotide
  Sense strand starting at position 822 of SEQ ID NO: 1563904
agaauaggcucaucauauu

SEQ ID NO: 1840908 - RNA, 19 nt, Artificial Sequence
  Description of Artificial Sequence: Synthetic oligonucleotide
  Antisense strand to SEQ ID NO: 1840907
aauaugaugagccuauucu

SEQ ID NO: 1840909 - RNA, 19 nt, Artificial Sequence
  Description of Artificial Sequence: Synthetic oligonucleotide
  Sense strand starting at position 1089 of SEQ ID NO: 1563904
ucaucacaguccucagagu

SEQ ID NO: 1840910 - RNA, 19 nt, Artificial Sequence
  Description of Artificial Sequence: Synthetic oligonucleotide
  Antisense strand to SEQ ID NO: 1840909
acucugaggacugugauga

SEQ ID NO: 1840911 - RNA, 19 nt, Artificial Sequence
  Description of Artificial Sequence: Synthetic oligonucleotide
  Sense strand starting at position 1141 of SEQ ID NO: 1563904
cauagauugcauugaugau

SEQ ID NO: 1840912 - RNA, 19 nt, Artificial Sequence
  Description of Artificial Sequence: Synthetic oligonucleotide
  Antisense strand to SEQ ID NO: 1840911
aucaucaaugcaaucuaug

SEQ ID NO: 1840913 - RNA, 19 nt, Artificial Sequence
  Description of Artificial Sequence: Synthetic oligonucleotide
  Sense strand starting at position 1175 of SEQ ID NO: 1563904
caguaaggguugguacauu

SEQ ID NO: 1840914 - RNA, 19 nt, Artificial Sequence
  Description of Artificial Sequence: Synthetic oligonucleotide
  Antisense strand to SEQ ID NO: 1840913
aauguaccaacccuuacug

SEQ ID NO: 1840915 - RNA, 19 nt, Artificial Sequence
  Description of Artificial Sequence: Synthetic oligonucleotide
  Sense strand starting at position 1314 of SEQ ID NO: 1563904
ucaacaaagucuguaucua

SEQ ID NO: 1840916 - RNA, 19 nt, Artificial Sequence
  Description of Artificial Sequence: Synthetic oligonucleotide
  Antisense strand to SEQ ID NO: 1840915
uagauacagacuuuguuga

SEQ ID NO: 1840917 - RNA, 19 nt, Artificial Sequence
  Description of Artificial Sequence: Synthetic oligonucleotide
  Sense strand starting at position 1964 of SEQ ID NO: 1563904
cgcagcuaucacuugccua

SEQ ID NO: 1840918 - RNA, 19 nt, Artificial Sequence
  Description of Artificial Sequence: Synthetic oligonucleotide
  Antisense strand to SEQ ID NO: 1840917
uaggcaagugauagcugcg

SEQ ID NO: 1840919 - RNA, 19 nt, Artificial Sequence
  Description of Artificial Sequence: Synthetic oligonucleotide
  Sense strand starting at position 2037 of SEQ ID NO: 1563904
gcucuaaucucauuugcug

SEQ ID NO: 1840920 - RNA, 19 nt, Artificial Sequence
  Description of Artificial Sequence: Synthetic oligonucleotide
  Antisense strand to SEQ ID NO: 1840919
cagcaaaugagauuagagc

SEQ ID NO: 1840921 - RNA, 19 nt, Artificial Sequence
  Description of Artificial Sequence: Synthetic oligonucleotide
  Sense strand starting at position 2044 of SEQ ID NO: 1563904
ucucauuugcugcaaugua

SEQ ID NO: 1840922 - RNA, 19 nt, Artificial Sequence
  Description of Artificial Sequence: Synthetic oligonucleotide
  Antisense strand to SEQ ID NO: 1840921
uacauugcagcaaaugaga

SEQ ID NO: 1840923 - RNA, 19 nt, Artificial Sequence
  Description of Artificial Sequence: Synthetic oligonucleotide
  Sense strand starting at position 2056 of SEQ ID NO: 1563904
caauguagugacugacaaa

SEQ ID NO: 1840924 - RNA, 19 nt, Artificial Sequence
  Description of Artificial Sequence: Synthetic oligonucleotide
  Antisense strand to SEQ ID NO: 1840923
uuugucagucacuacauug

SEQ ID NO: 1840925 - RNA, 19 nt, Artificial Sequence
  Description of Artificial Sequence: Synthetic oligonucleotide
  Sense strand starting at position 2081 of SEQ ID NO: 1563904
gccaguaaauuauuagauc

SEQ ID NO: 1840926 - RNA, 19 nt, Artificial Sequence
  Description of Artificial Sequence: Synthetic oligonucleotide
  Antisense strand to SEQ ID NO: 1840925
gaucuaauaauuuacuggc

SEQ ID NO: 1840927 - RNA, 19 nt, Artificial Sequence
  Description of Artificial Sequence: Synthetic oligonucleotide
  Sense strand starting at position 2255 of SEQ ID NO: 1563904
uuaugcuuuccagagagcu

SEQ ID NO: 1840928 - RNA, 19 nt, Artificial Sequence
  Description of Artificial Sequence: Synthetic oligonucleotide
  Antisense strand to SEQ ID NO: 1840927
agcucucuggaaagcauaa

SEQ ID NO: 1840929 - RNA, 19 nt, Artificial Sequence
  Description of Artificial Sequence: Synthetic oligonucleotide
  Sense strand starting at position 2429 of SEQ ID NO: 1563904
aggaauuagcacugauggu

SEQ ID NO: 1840930 - RNA, 19 nt, Artificial Sequence
  Description of Artificial Sequence: Synthetic oligonucleotide
  Antisense strand to SEQ ID NO: 1840929
accaucagugcuaauuccu

SEQ ID NO: 1840931 - RNA, 19 nt, Artificial Sequence
  Description of Artificial Sequence: Synthetic oligonucleotide
  Sense strand starting at position 2450 of SEQ ID NO: 1563904
uuagguggcgugucaguua

SEQ ID NO: 1840932 - RNA, 19 nt, Artificial Sequence
  Description of Artificial Sequence: Synthetic oligonucleotide
  Antisense strand to SEQ ID NO: 1840931
uaacugacacgccaccuaa

SEQ ID NO: 1840933 - RNA, 19 nt, Artificial Sequence
  Description of Artificial Sequence: Synthetic oligonucleotide
  Sense strand starting at position 2455 of SEQ ID NO: 1563904
uggcgugucaguuauuuaa

SEQ ID NO: 1840934 - RNA, 19 nt, Artificial Sequence
  Description of Artificial Sequence: Synthetic oligonucleotide
  Antisense strand to SEQ ID NO: 1840933
uuaaauaacugacacgcca

SEQ ID NO: 1840935 - RNA, 19 nt, Artificial Sequence
  Description of Artificial Sequence: Synthetic oligonucleotide
  Sense strand starting at position 2457 of SEQ ID NO: 1563904
gcgugucaguuauuuaaau

SEQ ID NO: 1840936 - RNA, 19 nt, Artificial Sequence
  Description of Artificial Sequence: Synthetic oligonucleotide
  Antisense strand to SEQ ID NO: 1840935
auuuaaauaacugacacgc

SEQ ID NO: 1840937 - RNA, 19 nt, Artificial Sequence
  Description of Artificial Sequence: Synthetic oligonucleotide
  Sense strand starting at position 2458 of SEQ ID NO: 1563904
cgugucaguuauuuaaaua

SEQ ID NO: 1840938 - RNA, 19 nt, Artificial Sequence
  Description of Artificial Sequence: Synthetic oligonucleotide
  Antisense strand to SEQ ID NO: 1840937
uauuuaaauaacugacacg

SEQ ID NO: 1840939 - RNA, 19 nt, Artificial Sequence
  Description of Artificial Sequence: Synthetic oligonucleotide
  Sense strand starting at position 2610 of SEQ ID NO: 1563904
acuaguaugguguauacaa

SEQ ID NO: 1840940 - RNA, 19 nt, Artificial Sequence
  Description of Artificial Sequence: Synthetic oligonucleotide
  Antisense strand to SEQ ID NO: 1840939
uuguauacaccauacuagu

SEQ ID NO: 1840941 - RNA, 19 nt, Artificial Sequence
  Description of Artificial Sequence: Synthetic oligonucleotide
  Sense strand starting at position 2618 of SEQ ID NO: 1563904
gguguauacaacuacguga

SEQ ID NO: 1840942 - RNA, 19 nt, Artificial Sequence
  Description of Artificial Sequence: Synthetic oligonucleotide
  Antisense strand to SEQ ID NO: 1840941
ucacguaguuguauacacc

SEQ ID NO: 1840943 - RNA, 19 nt, Artificial Sequence
  Description of Artificial Sequence: Synthetic oligonucleotide
  Sense strand starting at position 2621 of SEQ ID NO: 1563904
guauacaacuacgugacua

SEQ ID NO: 1840944 - RNA, 19 nt, Artificial Sequence
  Description of Artificial Sequence: Synthetic oligonucleotide
  Antisense strand to SEQ ID NO: 1840943
uagucacguaguuguauac

SEQ ID NO: 1840945 - RNA, 19 nt, Artificial Sequence
  Description of Artificial Sequence: Synthetic oligonucleotide
  Sense strand starting at position 2625 of SEQ ID NO: 1563904
acaacuacgugacuaguaa

SEQ ID NO: 1840946 - RNA, 19 nt, Artificial Sequence
  Description of Artificial Sequence: Synthetic oligonucleotide
  Antisense strand to SEQ ID NO: 1840945
uuacuagucacguaguugu

SEQ ID NO: 1840947 - RNA, 19 nt, Artificial Sequence
  Description of Artificial Sequence: Synthetic oligonucleotide
  Sense strand starting at position 2626 of SEQ ID NO: 1563904
caacuacgugacuaguaaa

SEQ ID NO: 1840948 - RNA, 19 nt, Artificial Sequence
  Description of Artificial Sequence: Synthetic oligonucleotide
  Antisense strand to SEQ ID NO: 1840947
uuuacuagucacguaguug

SEQ ID NO: 1840949 - RNA, 19 nt, Artificial Sequence
  Description of Artificial Sequence: Synthetic oligonucleotide
  Sense strand starting at position 2740 of SEQ ID NO: 1563904
uuuaacagccguuagaaau

SEQ ID NO: 1840950 - RNA, 19 nt, Artificial Sequence
  Description of Artificial Sequence: Synthetic oligonucleotide
  Antisense strand to SEQ ID NO: 1840949
auuucuaacggcuguuaaa

SEQ ID NO: 1840951 - RNA, 19 nt, Artificial Sequence
  Description of Artificial Sequence: Synthetic oligonucleotide
  Sense strand starting at position 2810 of SEQ ID NO: 1563904
auaacauuugcuugaugcu

SEQ ID NO: 1840952 - RNA, 19 nt, Artificial Sequence
  Description of Artificial Sequence: Synthetic oligonucleotide
  Antisense strand to SEQ ID NO: 1840951
agcaucaagcaaauguuau

SEQ ID NO: 1840953 - RNA, 19 nt, Artificial Sequence
  Description of Artificial Sequence: Synthetic oligonucleotide
  Sense strand starting at position 2890 of SEQ ID NO: 1563904
auguauuuauaggauggaa

SEQ ID NO: 1840954 - RNA, 19 nt, Artificial Sequence
  Description of Artificial Sequence: Synthetic oligonucleotide
  Antisense strand to SEQ ID NO: 1840953
uuccauccuauaaauacau

SEQ ID NO: 1840955 - RNA, 19 nt, Artificial Sequence
  Description of Artificial Sequence: Synthetic oligonucleotide
  Sense strand starting at position 2939 of SEQ ID NO: 1563904
uaguaauuauuggugaggu

SEQ ID NO: 1840956 - RNA, 19 nt, Artificial Sequence
  Description of Artificial Sequence: Synthetic oligonucleotide
  Antisense strand to SEQ ID NO: 1840955
accucaccaauaauuacua

SEQ ID NO: 1840957 - RNA, 19 nt, Artificial Sequence
  Description of Artificial Sequence: Synthetic oligonucleotide
  Sense strand starting at position 2941 of SEQ ID NO: 1563904
guaauuauuggugagguuu

SEQ ID NO: 1840958 - RNA, 19 nt, Artificial Sequence
  Description of Artificial Sequence: Synthetic oligonucleotide
  Antisense strand to SEQ ID NO: 1840957
aaaccucaccaauaauuac

SEQ ID NO: 1840959 - RNA, 19 nt, Artificial Sequence
  Description of Artificial Sequence: Synthetic oligonucleotide
  Sense strand starting at position 3188 of SEQ ID NO: 1563904
agguaucuagagcagucaa

SEQ ID NO: 1840960 - RNA, 19 nt, Artificial Sequence
  Description of Artificial Sequence: Synthetic oligonucleotide
  Antisense strand to SEQ ID NO: 1840959
uugacugcucuagauaccu

SEQ ID NO: 1840961 - RNA, 19 nt, Artificial Sequence
  Description of Artificial Sequence: Synthetic oligonucleotide
  Sense strand starting at position 3360 of SEQ ID NO: 1563904
cuuaaugcuccugaaaugu

SEQ ID NO: 1840962 - RNA, 19 nt, Artificial Sequence
  Description of Artificial Sequence: Synthetic oligonucleotide
  Antisense strand to SEQ ID NO: 1840961
acauuucaggagcauuaag

SEQ ID NO: 1840963 - RNA, 19 nt, Artificial Sequence
  Description of Artificial Sequence: Synthetic oligonucleotide
  Sense strand starting at position 3641 of SEQ ID NO: 1563904
guaaguuugcaugaagcaa

SEQ ID NO: 1840964 - RNA, 19 nt, Artificial Sequence
  Description of Artificial Sequence: Synthetic oligonucleotide
  Antisense strand to SEQ ID NO: 1840963
uugcuucaugcaaacuuac

SEQ ID NO: 1840965 - RNA, 19 nt, Artificial Sequence
  Description of Artificial Sequence: Synthetic oligonucleotide
  Sense strand starting at position 3789 of SEQ ID NO: 1563904
gugaaagaucuacgcaaua

SEQ ID NO: 1840966 - RNA, 19 nt, Artificial Sequence
  Description of Artificial Sequence: Synthetic oligonucleotide
  Antisense strand to SEQ ID NO: 1840965
uauugcguagaucuuucac

SEQ ID NO: 1840967 - RNA, 19 nt, Artificial Sequence
  Description of Artificial Sequence: Synthetic oligonucleotide
  Sense strand starting at position 3859 of SEQ ID NO: 1563904
gauauccuaugcuuaugga

SEQ ID NO: 1840968 - RNA, 19 nt, Artificial Sequence
  Description of Artificial Sequence: Synthetic oligonucleotide
  Antisense strand to SEQ ID NO: 1840967
uccauaagcauaggauauc

SEQ ID NO: 1840969 - RNA, 19 nt, Artificial Sequence
  Description of Artificial Sequence: Synthetic oligonucleotide
  Sense strand starting at position 109 of SEQ ID NO: 1563905
uguauuucuuguuuccaua

SEQ ID NO: 1840970 - RNA, 19 nt, Artificial Sequence
  Description of Artificial Sequence: Synthetic oligonucleotide
  Antisense strand to SEQ ID NO: 1840969
uauggaaacaagaaauaca

SEQ ID NO: 1840971 - RNA, 19 nt, Artificial Sequence
  Description of Artificial Sequence: Synthetic oligonucleotide
  Sense strand starting at position 152 of SEQ ID NO: 1563905
accauugacuucuccagua

SEQ ID NO: 1840972 - RNA, 19 nt, Artificial Sequence
  Description of Artificial Sequence: Synthetic oligonucleotide
  Antisense strand to SEQ ID NO: 1840971
uacuggagaagucaauggu

SEQ ID NO: 1840973 - RNA, 19 nt, Artificial Sequence
  Description of Artificial Sequence: Synthetic oligonucleotide
  Sense strand starting at position 157 of SEQ ID NO: 1563905
ugacuucuccaguauagua

SEQ ID NO: 1840974 - RNA, 19 nt, Artificial Sequence
  Description of Artificial Sequence: Synthetic oligonucleotide
  Antisense strand to SEQ ID NO: 1840973
uacuauacuggagaaguca

SEQ ID NO: 1840975 - RNA, 19 nt, Artificial Sequence
  Description of Artificial Sequence: Synthetic oligonucleotide
  Sense strand starting at position 159 of SEQ ID NO: 1563905
acuucuccaguauaguaau

SEQ ID NO: 1840976 - RNA, 19 nt, Artificial Sequence
  Description of Artificial Sequence: Synthetic oligonucleotide
  Antisense strand to SEQ ID NO: 1840975
auuacuauacuggagaagu

SEQ ID NO: 1840977 - RNA, 19 nt, Artificial Sequence
  Description of Artificial Sequence: Synthetic oligonucleotide
  Sense strand starting at position 459 of SEQ ID NO: 1563905
ggaucauugugaucugguu

SEQ ID NO: 1840978 - RNA, 19 nt, Artificial Sequence
  Description of Artificial Sequence: Synthetic oligonucleotide
  Antisense strand to SEQ ID NO: 1840977
aaccagaucacaaugaucc

SEQ ID NO: 1840979 - RNA, 19 nt, Artificial Sequence
  Description of Artificial Sequence: Synthetic oligonucleotide
  Sense strand starting at position 518 of SEQ ID NO: 1563905
gaaguauggguuggguaga

SEQ ID NO: 1840980 - RNA, 19 nt, Artificial Sequence
  Description of Artificial Sequence: Synthetic oligonucleotide
  Antisense strand to SEQ ID NO: 1840979
ucuacccaacccauacuuc

SEQ ID NO: 1840981 - RNA, 19 nt, Artificial Sequence
  Description of Artificial Sequence: Synthetic oligonucleotide
  Sense strand starting at position 618 of SEQ ID NO: 1563905
ggcucaucauacuucugaa

SEQ ID NO: 1840982 - RNA, 19 nt, Artificial Sequence
  Description of Artificial Sequence: Synthetic oligonucleotide
  Antisense strand to SEQ ID NO: 1840981
uucagaaguaugaugagcc

SEQ ID NO: 1840983 - RNA, 19 nt, Artificial Sequence
  Description of Artificial Sequence: Synthetic oligonucleotide
  Sense strand starting at position 753 of SEQ ID NO: 1563905
ugaagccuuuccucaggaa

SEQ ID NO: 1840984 - RNA, 19 nt, Artificial Sequence
  Description of Artificial Sequence: Synthetic oligonucleotide
  Antisense strand to SEQ ID NO: 1840983
uuccugaggaaaggcuuca

SEQ ID NO: 1840985 - RNA, 19 nt, Artificial Sequence
  Description of Artificial Sequence: Synthetic oligonucleotide
  Sense strand starting at position 777 of SEQ ID NO: 1563905
uuaugagucucucuuacug

SEQ ID NO: 1840986 - RNA, 19 nt, Artificial Sequence
  Description of Artificial Sequence: Synthetic oligonucleotide
  Antisense strand to SEQ ID NO: 1840985
caguaagagagacucauaa

SEQ ID NO: 1840987 - RNA, 19 nt, Artificial Sequence
  Description of Artificial Sequence: Synthetic oligonucleotide
  Sense strand starting at position 1174 of SEQ ID NO: 1563905
uuugaaaccgccuaucaua

SEQ ID NO: 1840988 - RNA, 19 nt, Artificial Sequence
  Description of Artificial Sequence: Synthetic oligonucleotide
  Antisense strand to SEQ ID NO: 1840987
uaugauaggcgguuucaaa

SEQ ID NO: 1840989 - RNA, 19 nt, Artificial Sequence
  Description of Artificial Sequence: Synthetic oligonucleotide
  Sense strand starting at position 1250 of SEQ ID NO: 1563905
caggguaucuaccuuguca

SEQ ID NO: 1840990 - RNA, 19 nt, Artificial Sequence
  Description of Artificial Sequence: Synthetic oligonucleotide
  Antisense strand to SEQ ID NO: 1840989
ugacaagguagauacccug

SEQ ID NO: 1840991 - RNA, 19 nt, Artificial Sequence
  Description of Artificial Sequence: Synthetic oligonucleotide
  Sense strand starting at position 1283 of SEQ ID NO: 1563905
guuucuaagcgcuugcaca

SEQ ID NO: 1840992 - RNA, 19 nt, Artificial Sequence
  Description of Artificial Sequence: Synthetic oligonucleotide
  Antisense strand to SEQ ID NO: 1840991
ugugcaagcgcuuagaaac

SEQ ID NO: 1840993 - RNA, 19 nt, Artificial Sequence
  Description of Artificial Sequence: Synthetic oligonucleotide
  Sense strand starting at position 1535 of SEQ ID NO: 1563905
agaaucacuagucgagcua

SEQ ID NO: 1840994 - RNA, 19 nt, Artificial Sequence
  Description of Artificial Sequence: Synthetic oligonucleotide
  Antisense strand to SEQ ID NO: 1840993
uagcucgacuagugauucu

SEQ ID NO: 1840995 - RNA, 19 nt, Artificial Sequence
  Description of Artificial Sequence: Synthetic oligonucleotide
  Sense strand starting at position 1855 of SEQ ID NO: 1563905
gcuagagugccgagaugua

SEQ ID NO: 1840996 - RNA, 19 nt, Artificial Sequence
  Description of Artificial Sequence: Synthetic oligonucleotide
  Antisense strand to SEQ ID NO: 1840995
uacaucucggcacucuagc

SEQ ID NO: 1840997 - RNA, 19 nt, Artificial Sequence
  Description of Artificial Sequence: Synthetic oligonucleotide
  Sense strand starting at position 1957 of SEQ ID NO: 1563905
ccguuaauuucguucccag

SEQ ID NO: 1840998 - RNA, 19 nt, Artificial Sequence
  Description of Artificial Sequence: Synthetic oligonucleotide
  Antisense strand to SEQ ID NO: 1840997
cugggaacgaaauuaacgg

SEQ ID NO: 1840999 - RNA, 19 nt, Artificial Sequence
  Description of Artificial Sequence: Synthetic oligonucleotide
  Sense strand starting at position 2001 of SEQ ID NO: 1563905
gcugguccaccuuaauuga

SEQ ID NO: 1841000 - RNA, 19 nt, Artificial Sequence
  Description of Artificial Sequence: Synthetic oligonucleotide
  Antisense strand to SEQ ID NO: 1840999
ucaauuaagguggaccagc

SEQ ID NO: 1841001 - RNA, 19 nt, Artificial Sequence
  Description of Artificial Sequence: Synthetic oligonucleotide
  Sense strand starting at position 2004 of SEQ ID NO: 1563905
gguccaccuuaauugacaa

SEQ ID NO: 1841002 - RNA, 19 nt, Artificial Sequence
  Description of Artificial Sequence: Synthetic oligonucleotide
  Antisense strand to SEQ ID NO: 1841001
uugucaauuaagguggacc

SEQ ID NO: 1841003 - RNA, 19 nt, Artificial Sequence
  Description of Artificial Sequence: Synthetic oligonucleotide
  Sense strand starting at position 2176 of SEQ ID NO: 1563905
aagcguagacaugagguaa

SEQ ID NO: 1841004 - RNA, 19 nt, Artificial Sequence
  Description of Artificial Sequence: Synthetic oligonucleotide
  Antisense strand to SEQ ID NO: 1841003
uuaccucaugucuacgcuu

SEQ ID NO: 1841005 - RNA, 19 nt, Artificial Sequence
  Description of Artificial Sequence: Synthetic oligonucleotide
  Sense strand starting at position 2231 of SEQ ID NO: 1563905
gcgugucuuccuucuccca

SEQ ID NO: 1841006 - RNA, 19 nt, Artificial Sequence
  Description of Artificial Sequence: Synthetic oligonucleotide
  Antisense strand to SEQ ID NO: 1841005
ugggagaaggaagacacgc

SEQ ID NO: 1841007 - RNA, 19 nt, Artificial Sequence
  Description of Artificial Sequence: Synthetic oligonucleotide
  Sense strand starting at position 2692 of SEQ ID NO: 1563905
uuguaacaaccuuguagau

SEQ ID NO: 1841008 - RNA, 19 nt, Artificial Sequence
  Description of Artificial Sequence: Synthetic oligonucleotide
  Antisense strand to SEQ ID NO: 1841007
aucuacaagguuguuacaa

SEQ ID NO: 1841009 - RNA, 19 nt, Artificial Sequence
  Description of Artificial Sequence: Synthetic oligonucleotide
  Sense strand starting at position 2751 of SEQ ID NO: 1563905
agcaaaugauuugcguuau

SEQ ID NO: 1841010 - RNA, 19 nt, Artificial Sequence
  Description of Artificial Sequence: Synthetic oligonucleotide
  Antisense strand to SEQ ID NO: 1841009
auaacgcaaaucauuugcu

SEQ ID NO: 1841011 - RNA, 19 nt, Artificial Sequence
  Description of Artificial Sequence: Synthetic oligonucleotide
  Sense strand starting at position 2836 of SEQ ID NO: 1563905
gugcaucuucugucagugu

SEQ ID NO: 1841012 - RNA, 19 nt, Artificial Sequence
  Description of Artificial Sequence: Synthetic oligonucleotide
  Antisense strand to SEQ ID NO: 1841011
acacugacagaagaugcac

SEQ ID NO: 1841013 - RNA, 19 nt, Artificial Sequence
  Description of Artificial Sequence: Synthetic oligonucleotide
  Sense strand starting at position 2921 of SEQ ID NO: 1563905
uuacaaguccaguaauaug

SEQ ID NO: 1841014 - RNA, 19 nt, Artificial Sequence
  Description of Artificial Sequence: Synthetic oligonucleotide
  Antisense strand to SEQ ID NO: 1841013
cauauuacuggacuuguaa

SEQ ID NO: 1841015 - RNA, 19 nt, Artificial Sequence
  Description of Artificial Sequence: Synthetic oligonucleotide
  Sense strand starting at position 3068 of SEQ ID NO: 1563905
agguaaggaucauauuuag

SEQ ID NO: 1841016 - RNA, 19 nt, Artificial Sequence
  Description of Artificial Sequence: Synthetic oligonucleotide
  Antisense strand to SEQ ID NO: 1841015
cuaaauaugauccuuaccu

SEQ ID NO: 1841017 - RNA, 19 nt, Artificial Sequence
  Description of Artificial Sequence: Synthetic oligonucleotide
  Sense strand starting at position 3263 of SEQ ID NO: 1563905
aucuaaaccuggucauaga

SEQ ID NO: 1841018 - RNA, 19 nt, Artificial Sequence
  Description of Artificial Sequence: Synthetic oligonucleotide
  Antisense strand to SEQ ID NO: 1841017
ucuaugaccagguuuagau

SEQ ID NO: 1841019 - RNA, 19 nt, Artificial Sequence
  Description of Artificial Sequence: Synthetic oligonucleotide
  Sense strand starting at position 3363 of SEQ ID NO: 1563905
uauagaauuugugcuuugu

SEQ ID NO: 1841020 - RNA, 19 nt, Artificial Sequence
  Description of Artificial Sequence: Synthetic oligonucleotide
  Antisense strand to SEQ ID NO: 1841019
acaaagcacaaauucuaua

SEQ ID NO: 1841021 - RNA, 19 nt, Artificial Sequence
  Description of Artificial Sequence: Synthetic oligonucleotide
  Sense strand starting at position 3365 of SEQ ID NO: 1563905
uagaauuugugcuuuguca

SEQ ID NO: 1841022 - RNA, 19 nt, Artificial Sequence
  Description of Artificial Sequence: Synthetic oligonucleotide
  Antisense strand to SEQ ID NO: 1841021
ugacaaagcacaaauucua

SEQ ID NO: 1841023 - RNA, 19 nt, Artificial Sequence
  Description of Artificial Sequence: Synthetic oligonucleotide
  Sense strand starting at position 3369 of SEQ ID NO: 1563905
auuugugcuuugucaugua

SEQ ID NO: 1841024 - RNA, 19 nt, Artificial Sequence
  Description of Artificial Sequence: Synthetic oligonucleotide
  Antisense strand to SEQ ID NO: 1841023
uacaugacaaagcacaaau

SEQ ID NO: 1841025 - RNA, 19 nt, Artificial Sequence
  Description of Artificial Sequence: Synthetic oligonucleotide
  Sense strand starting at position 3460 of SEQ ID NO: 1563905
uugucaaagucugugaaca

SEQ ID NO: 1841026 - RNA, 19 nt, Artificial Sequence
  Description of Artificial Sequence: Synthetic oligonucleotide
  Antisense strand to SEQ ID NO: 1841025
uguucacagacuuugacaa

SEQ ID NO: 1841027 - RNA, 19 nt, Artificial Sequence
  Description of Artificial Sequence: Synthetic oligonucleotide
  Sense strand starting at position 3544 of SEQ ID NO: 1563905
ugauaagaauuacuagcau

SEQ ID NO: 1841028 - RNA, 19 nt, Artificial Sequence
  Description of Artificial Sequence: Synthetic oligonucleotide
  Antisense strand to SEQ ID NO: 1841027
augcuaguaauucuuauca

SEQ ID NO: 1841029 - RNA, 19 nt, Artificial Sequence
  Description of Artificial Sequence: Synthetic oligonucleotide
  Sense strand starting at position 3586 of SEQ ID NO: 1563905
uuuccuugugcauauacau

SEQ ID NO: 1841030 - RNA, 19 nt, Artificial Sequence
  Description of Artificial Sequence: Synthetic oligonucleotide
  Antisense strand to SEQ ID NO: 1841029
auguauaugcacaaggaaa

SEQ ID NO: 1841031 - RNA, 19 nt, Artificial Sequence
  Description of Artificial Sequence: Synthetic oligonucleotide
  Sense strand starting at position 3618 of SEQ ID NO: 1563905
uguauacugcuuuaucuau

SEQ ID NO: 1841032 - RNA, 19 nt, Artificial Sequence
  Description of Artificial Sequence: Synthetic oligonucleotide
  Antisense strand to SEQ ID NO: 1841031
auagauaaagcaguauaca

SEQ ID NO: 1841033 - RNA, 19 nt, Artificial Sequence
  Description of Artificial Sequence: Synthetic oligonucleotide
  Sense strand starting at position 3703 of SEQ ID NO: 1563905
uggcaaaugaucgacaucu

SEQ ID NO: 1841034 - RNA, 19 nt, Artificial Sequence
  Description of Artificial Sequence: Synthetic oligonucleotide
  Antisense strand to SEQ ID NO: 1841033
agaugucgaucauuugcca

SEQ ID NO: 1841035 - RNA, 19 nt, Artificial Sequence
  Description of Artificial Sequence: Synthetic oligonucleotide
  Sense strand starting at position 3705 of SEQ ID NO: 1563905
gcaaaugaucgacaucuua

SEQ ID NO: 1841036 - RNA, 19 nt, Artificial Sequence
  Description of Artificial Sequence: Synthetic oligonucleotide
  Antisense strand to SEQ ID NO: 1841035
uaagaugucgaucauuugc

SEQ ID NO: 1841037 - RNA, 19 nt, Artificial Sequence
  Description of Artificial Sequence: Synthetic oligonucleotide
  Sense strand starting at position 3735 of SEQ ID NO: 1563905
gugcauauuccauggaaau

SEQ ID NO: 1841038 - RNA, 19 nt, Artificial Sequence
  Description of Artificial Sequence: Synthetic oligonucleotide
  Antisense strand to SEQ ID NO: 1841037
auuuccauggaauaugcac

SEQ ID NO: 1841039 - RNA, 19 nt, Artificial Sequence
  Description of Artificial Sequence: Synthetic oligonucleotide
  Sense strand starting at position 3736 of SEQ ID NO: 1563905
ugcauauuccauggaaaua

SEQ ID NO: 1841040 - RNA, 19 nt, Artificial Sequence
  Description of Artificial Sequence: Synthetic oligonucleotide
  Antisense strand to SEQ ID NO: 1841039
uauuuccauggaauaugca

SEQ ID NO: 1841041 - RNA, 19 nt, Artificial Sequence
  Description of Artificial Sequence: Synthetic oligonucleotide
  Sense strand starting at position 3747 of SEQ ID NO: 1563905
uggaaauaauugccuuaau

SEQ ID NO: 1841042 - RNA, 19 nt, Artificial Sequence
  Description of Artificial Sequence: Synthetic oligonucleotide
  Antisense strand to SEQ ID NO: 1841041
auuaaggcaauuauuucca

SEQ ID NO: 1841043 - RNA, 19 nt, Artificial Sequence
  Description of Artificial Sequence: Synthetic oligonucleotide
  Sense strand starting at position 3748 of SEQ ID NO: 1563905
ggaaauaauugccuuaauu

SEQ ID NO: 1841044 - RNA, 19 nt, Artificial Sequence
  Description of Artificial Sequence: Synthetic oligonucleotide
  Antisense strand to SEQ ID NO: 1841043
aauuaaggcaauuauuucc

SEQ ID NO: 1841045 - RNA, 19 nt, Artificial Sequence
  Description of Artificial Sequence: Synthetic oligonucleotide
  Sense strand starting at position 3770 of SEQ ID NO: 1563905
uugaccagauuccuguuau

SEQ ID NO: 1841046 - RNA, 19 nt, Artificial Sequence
  Description of Artificial Sequence: Synthetic oligonucleotide
  Antisense strand to SEQ ID NO: 1841045
auaacaggaaucuggucaa

SEQ ID NO: 1841047 - RNA, 19 nt, Artificial Sequence
  Description of Artificial Sequence: Synthetic oligonucleotide
  Sense strand starting at position 3846 of SEQ ID NO: 1563905
aucaaagugucccuggaua

SEQ ID NO: 1841048 - RNA, 19 nt, Artificial Sequence
  Description of Artificial Sequence: Synthetic oligonucleotide
  Antisense strand to SEQ ID NO: 1841047
uauccagggacacuuugau

SEQ ID NO: 1841049 - RNA, 19 nt, Artificial Sequence
  Description of Artificial Sequence: Synthetic oligonucleotide
  Sense strand starting at position 71 of SEQ ID NO: 1563906
ggcuuucuugacuaaugaa

SEQ ID NO: 1841050 - RNA, 19 nt, Artificial Sequence
  Description of Artificial Sequence: Synthetic oligonucleotide
  Antisense strand to SEQ ID NO: 1841049
uucauuagucaagaaagcc

SEQ ID NO: 1841051 - RNA, 19 nt, Artificial Sequence
  Description of Artificial Sequence: Synthetic oligonucleotide
  Sense strand starting at position 183 of SEQ ID NO: 1563906
gcauaaacuguguaccaau

SEQ ID NO: 1841052 - RNA, 19 nt, Artificial Sequence
  Description of Artificial Sequence: Synthetic oligonucleotide
  Antisense strand to SEQ ID NO: 1841051
auugguacacaguuuaugc

SEQ ID NO: 1841053 - RNA, 19 nt, Artificial Sequence
  Description of Artificial Sequence: Synthetic oligonucleotide
  Sense strand starting at position 249 of SEQ ID NO: 1563906
uaagacugaugagaagaaa

SEQ ID NO: 1841054 - RNA, 19 nt, Artificial Sequence
  Description of Artificial Sequence: Synthetic oligonucleotide
  Antisense strand to SEQ ID NO: 1841053
uuucuucucaucagucuua

SEQ ID NO: 1841055 - RNA, 19 nt, Artificial Sequence
  Description of Artificial Sequence: Synthetic oligonucleotide
  Sense strand starting at position 640 of SEQ ID NO: 1563906
guuacugggcguucugagu

SEQ ID NO: 1841056 - RNA, 19 nt, Artificial Sequence
  Description of Artificial Sequence: Synthetic oligonucleotide
  Antisense strand to SEQ ID NO: 1841055
acucagaacgcccaguaac

SEQ ID NO: 1841057 - RNA, 19 nt, Artificial Sequence
  Description of Artificial Sequence: Synthetic oligonucleotide
  Sense strand starting at position 747 of SEQ ID NO: 1563906
gagaacuuguauuccaaag

SEQ ID NO: 1841058 - RNA, 19 nt, Artificial Sequence
  Description of Artificial Sequence: Synthetic oligonucleotide
  Antisense strand to SEQ ID NO: 1841057
cuuuggaauacaaguucuc

SEQ ID NO: 1841059 - RNA, 19 nt, Artificial Sequence
  Description of Artificial Sequence: Synthetic oligonucleotide
  Sense strand starting at position 849 of SEQ ID NO: 1563906
cggucacuccuugaacauc

SEQ ID NO: 1841060 - RNA, 19 nt, Artificial Sequence
  Description of Artificial Sequence: Synthetic oligonucleotide
  Antisense strand to SEQ ID NO: 1841059
gauguucaaggagugaccg

SEQ ID NO: 1841061 - RNA, 19 nt, Artificial Sequence
  Description of Artificial Sequence: Synthetic oligonucleotide
  Sense strand starting at position 928 of SEQ ID NO: 1563906
gcaugcauuuccucggacu

SEQ ID NO: 1841062 - RNA, 19 nt, Artificial Sequence
  Description of Artificial Sequence: Synthetic oligonucleotide
  Antisense strand to SEQ ID NO: 1841061
aguccgaggaaaugcaugc

SEQ ID NO: 1841063 - RNA, 19 nt, Artificial Sequence
  Description of Artificial Sequence: Synthetic oligonucleotide
  Sense strand starting at position 929 of SEQ ID NO: 1563906
caugcauuuccucggacuu

SEQ ID NO: 1841064 - RNA, 19 nt, Artificial Sequence
  Description of Artificial Sequence: Synthetic oligonucleotide
  Antisense strand to SEQ ID NO: 1841063
aaguccgaggaaaugcaug

SEQ ID NO: 1841065 - RNA, 19 nt, Artificial Sequence
  Description of Artificial Sequence: Synthetic oligonucleotide
  Sense strand starting at position 930 of SEQ ID NO: 1563906
augcauuuccucggacuuu

SEQ ID NO: 1841066 - RNA, 19 nt, Artificial Sequence
  Description of Artificial Sequence: Synthetic oligonucleotide
  Antisense strand to SEQ ID NO: 1841065
aaaguccgaggaaaugcau

SEQ ID NO: 1841067 - RNA, 19 nt, Artificial Sequence
  Description of Artificial Sequence: Synthetic oligonucleotide
  Sense strand starting at position 1052 of SEQ ID NO: 1563906
ggagcaggauuccugcaaa

SEQ ID NO: 1841068 - RNA, 19 nt, Artificial Sequence
  Description of Artificial Sequence: Synthetic oligonucleotide
  Antisense strand to SEQ ID NO: 1841067
uuugcaggaauccugcucc

SEQ ID NO: 1841069 - RNA, 19 nt, Artificial Sequence
  Description of Artificial Sequence: Synthetic oligonucleotide
  Sense strand starting at position 1144 of SEQ ID NO: 1563906
gcaggagaucagcagcaua

SEQ ID NO: 1841070 - RNA, 19 nt, Artificial Sequence
  Description of Artificial Sequence: Synthetic oligonucleotide
  Antisense strand to SEQ ID NO: 1841069
uaugcugcugaucuccugc

SEQ ID NO: 1841071 - RNA, 19 nt, Artificial Sequence
  Description of Artificial Sequence: Synthetic oligonucleotide
  Sense strand starting at position 1147 of SEQ ID NO: 1563906
ggagaucagcagcauacau

SEQ ID NO: 1841072 - RNA, 19 nt, Artificial Sequence
  Description of Artificial Sequence: Synthetic oligonucleotide
  Antisense strand to SEQ ID NO: 1841071
auguaugcugcugaucucc

SEQ ID NO: 1841073 - RNA, 19 nt, Artificial Sequence
  Description of Artificial Sequence: Synthetic oligonucleotide
  Sense strand starting at position 1257 of SEQ ID NO: 1563906
ggaagauacugggcuccau

SEQ ID NO: 1841074 - RNA, 19 nt, Artificial Sequence
  Description of Artificial Sequence: Synthetic oligonucleotide
  Antisense strand to SEQ ID NO: 1841073
auggagcccaguaucuucc

SEQ ID NO: 1841075 - RNA, 19 nt, Artificial Sequence
  Description of Artificial Sequence: Synthetic oligonucleotide
  Sense strand starting at position 1351 of SEQ ID NO: 1563906
ucuaacuacgcagagaguu

SEQ ID NO: 1841076 - RNA, 19 nt, Artificial Sequence
  Description of Artificial Sequence: Synthetic oligonucleotide
  Antisense strand to SEQ ID NO: 1841075
aacucucugcguaguuaga

SEQ ID NO: 1841077 - RNA, 19 nt, Artificial Sequence
  Description of Artificial Sequence: Synthetic oligonucleotide
  Sense strand starting at position 1528 of SEQ ID NO: 1563906
guauuuaaagguugucucu

SEQ ID NO: 1841078 - RNA, 19 nt, Artificial Sequence
  Description of Artificial Sequence: Synthetic oligonucleotide
  Antisense strand to SEQ ID NO: 1841077
agagacaaccuuuaaauac

SEQ ID NO: 1841079 - RNA, 19 nt, Artificial Sequence
  Description of Artificial Sequence: Synthetic oligonucleotide
  Sense strand starting at position 1545 of SEQ ID NO: 1563906
cuuugucugagaggaggau

SEQ ID NO: 1841080 - RNA, 19 nt, Artificial Sequence
  Description of Artificial Sequence: Synthetic oligonucleotide
  Antisense strand to SEQ ID NO: 1841079
auccuccucucagacaaag

SEQ ID NO: 1841081 - RNA, 19 nt, Artificial Sequence
  Description of Artificial Sequence: Synthetic oligonucleotide
  Sense strand starting at position 1916 of SEQ ID NO: 1563906
augggaaugccacggaaau

SEQ ID NO: 1841082 - RNA, 19 nt, Artificial Sequence
  Description of Artificial Sequence: Synthetic oligonucleotide
  Antisense strand to SEQ ID NO: 1841081
auuuccguggcauucccau

SEQ ID NO: 1841083 - RNA, 19 nt, Artificial Sequence
  Description of Artificial Sequence: Synthetic oligonucleotide
  Sense strand starting at position 1918 of SEQ ID NO: 1563906
gggaaugccacggaaaugu

SEQ ID NO: 1841084 - RNA, 19 nt, Artificial Sequence
  Description of Artificial Sequence: Synthetic oligonucleotide
  Antisense strand to SEQ ID NO: 1841083
acauuuccguggcauuccc

SEQ ID NO: 1841085 - RNA, 19 nt, Artificial Sequence
  Description of Artificial Sequence: Synthetic oligonucleotide
  Sense strand starting at position 1931 of SEQ ID NO: 1563906
aaaugugaggcgcucguua

SEQ ID NO: 1841086 - RNA, 19 nt, Artificial Sequence
  Description of Artificial Sequence: Synthetic oligonucleotide
  Antisense strand to SEQ ID NO: 1841085
uaacgagcgccucacauuu

SEQ ID NO: 1841087 - RNA, 19 nt, Artificial Sequence
  Description of Artificial Sequence: Synthetic oligonucleotide
  Sense strand starting at position 1994 of SEQ ID NO: 1563906
gcaucuuacgaugggaaca

SEQ ID NO: 1841088 - RNA, 19 nt, Artificial Sequence
  Description of Artificial Sequence: Synthetic oligonucleotide
  Antisense strand to SEQ ID NO: 1841087
uguucccaucguaagaugc

SEQ ID NO: 1841089 - RNA, 19 nt, Artificial Sequence
  Description of Artificial Sequence: Synthetic oligonucleotide
  Sense strand starting at position 2135 of SEQ ID NO: 1563906
aaagaugugccguccgcaa

SEQ ID NO: 1841090 - RNA, 19 nt, Artificial Sequence
  Description of Artificial Sequence: Synthetic oligonucleotide
  Antisense strand to SEQ ID NO: 1841089
uugcggacggcacaucuuu

SEQ ID NO: 1841091 - RNA, 19 nt, Artificial Sequence
  Description of Artificial Sequence: Synthetic oligonucleotide
  Sense strand starting at position 2219 of SEQ ID NO: 1563906
cugugaugaaguugaaauu

SEQ ID NO: 1841092 - RNA, 19 nt, Artificial Sequence
  Description of Artificial Sequence: Synthetic oligonucleotide
  Antisense strand to SEQ ID NO: 1841091
aauuucaacuucaucacag

SEQ ID NO: 1841093 - RNA, 19 nt, Artificial Sequence
  Description of Artificial Sequence: Synthetic oligonucleotide
  Sense strand starting at position 2465 of SEQ ID NO: 1563906
aggucugauuuagaaacaa

SEQ ID NO: 1841094 - RNA, 19 nt, Artificial Sequence
  Description of Artificial Sequence: Synthetic oligonucleotide
  Antisense strand to SEQ ID NO: 1841093
uuguuucuaaaucagaccu

SEQ ID NO: 1841095 - RNA, 19 nt, Artificial Sequence
  Description of Artificial Sequence: Synthetic oligonucleotide
  Sense strand starting at position 2478 of SEQ ID NO: 1563906
aaacaaugagaacguguau

SEQ ID NO: 1841096 - RNA, 19 nt, Artificial Sequence
  Description of Artificial Sequence: Synthetic oligonucleotide
  Antisense strand to SEQ ID NO: 1841095
auacacguucucauuguuu

SEQ ID NO: 1841097 - RNA, 19 nt, Artificial Sequence
  Description of Artificial Sequence: Synthetic oligonucleotide
  Sense strand starting at position 2498 of SEQ ID NO: 1563906
ccuugacuccuugagcuau

SEQ ID NO: 1841098 - RNA, 19 nt, Artificial Sequence
  Description of Artificial Sequence: Synthetic oligonucleotide
  Antisense strand to SEQ ID NO: 1841097
auagcucaaggagucaagg

SEQ ID NO: 1841099 - RNA, 19 nt, Artificial Sequence
  Description of Artificial Sequence: Synthetic oligonucleotide
  Sense strand starting at position 2504 of SEQ ID NO: 1563906
cuccuugagcuauaugaag

SEQ ID NO: 1841100 - RNA, 19 nt, Artificial Sequence
  Description of Artificial Sequence: Synthetic oligonucleotide
  Antisense strand to SEQ ID NO: 1841099
cuucauauagcucaaggag

SEQ ID NO: 1841101 - RNA, 19 nt, Artificial Sequence
  Description of Artificial Sequence: Synthetic oligonucleotide
  Sense strand starting at position 2506 of SEQ ID NO: 1563906
ccuugagcuauaugaagga

SEQ ID NO: 1841102 - RNA, 19 nt, Artificial Sequence
  Description of Artificial Sequence: Synthetic oligonucleotide
  Antisense strand to SEQ ID NO: 1841101
uccuucauauagcucaagg

SEQ ID NO: 1841103 - RNA, 19 nt, Artificial Sequence
  Description of Artificial Sequence: Synthetic oligonucleotide
  Sense strand starting at position 2521 of SEQ ID NO: 1563906
aggagaaacuaauagauaa

SEQ ID NO: 1841104 - RNA, 19 nt, Artificial Sequence
  Description of Artificial Sequence: Synthetic oligonucleotide
  Antisense strand to SEQ ID NO: 1841103
uuaucuauuaguuucuccu

SEQ ID NO: 1841105 - RNA, 19 nt, Artificial Sequence
  Description of Artificial Sequence: Synthetic oligonucleotide
  Sense strand starting at position 2994 of SEQ ID NO: 1563906
uuacuccagucacugauau

SEQ ID NO: 1841106 - RNA, 19 nt, Artificial Sequence
  Description of Artificial Sequence: Synthetic oligonucleotide
  Antisense strand to SEQ ID NO: 1841105
auaucagugacuggaguaa

SEQ ID NO: 1841107 - RNA, 19 nt, Artificial Sequence
  Description of Artificial Sequence: Synthetic oligonucleotide
  Sense strand starting at position 3122 of SEQ ID NO: 1563906
agaauccaccugcgaagau

SEQ ID NO: 1841108 - RNA, 19 nt, Artificial Sequence
  Description of Artificial Sequence: Synthetic oligonucleotide
  Antisense strand to SEQ ID NO: 1841107
aucuucgcagguggauucu

SEQ ID NO: 1841109 - RNA, 19 nt, Artificial Sequence
  Description of Artificial Sequence: Synthetic oligonucleotide
  Sense strand starting at position 3194 of SEQ ID NO: 1563906
ugaugauauuggcuaaaua

SEQ ID NO: 1841110 - RNA, 19 nt, Artificial Sequence
  Description of Artificial Sequence: Synthetic oligonucleotide
  Antisense strand to SEQ ID NO: 1841109
uauuuagccaauaucauca

SEQ ID NO: 1841111 - RNA, 19 nt, Artificial Sequence
  Description of Artificial Sequence: Synthetic oligonucleotide
  Sense strand starting at position 3284 of SEQ ID NO: 1563906
ugacuuguagcugaguaag

SEQ ID NO: 1841112 - RNA, 19 nt, Artificial Sequence
  Description of Artificial Sequence: Synthetic oligonucleotide
  Antisense strand to SEQ ID NO: 1841111
cuuacucagcuacaaguca

SEQ ID NO: 1841113 - RNA, 19 nt, Artificial Sequence
  Description of Artificial Sequence: Synthetic oligonucleotide
  Sense strand starting at position 3296 of SEQ ID NO: 1563906
gaguaagagccauggaaac

SEQ ID NO: 1841114 - RNA, 19 nt, Artificial Sequence
  Description of Artificial Sequence: Synthetic oligonucleotide
  Antisense strand to SEQ ID NO: 1841113
guuuccauggcucuuacuc

SEQ ID NO: 1841115 - RNA, 19 nt, Artificial Sequence
  Description of Artificial Sequence: Synthetic oligonucleotide
  Sense strand starting at position 3364 of SEQ ID NO: 1563906
ggaauaaacucuuuggcca

SEQ ID NO: 1841116 - RNA, 19 nt, Artificial Sequence
  Description of Artificial Sequence: Synthetic oligonucleotide
  Antisense strand to SEQ ID NO: 1841115
uggccaaagaguuuauucc

SEQ ID NO: 1841117 - RNA, 19 nt, Artificial Sequence
  Description of Artificial Sequence: Synthetic oligonucleotide
  Sense strand starting at position 3526 of SEQ ID NO: 1563906
ccaguuccugggcagaauu

SEQ ID NO: 1841118 - RNA, 19 nt, Artificial Sequence
  Description of Artificial Sequence: Synthetic oligonucleotide
  Antisense strand to SEQ ID NO: 1841117
aauucugcccaggaacugg

SEQ ID NO: 1841119 - RNA, 19 nt, Artificial Sequence
  Description of Artificial Sequence: Synthetic oligonucleotide
  Sense strand starting at position 3613 of SEQ ID NO: 1563906
acugcuuggccacagaaga

SEQ ID NO: 1841120 - RNA, 19 nt, Artificial Sequence
  Description of Artificial Sequence: Synthetic oligonucleotide
  Antisense strand to SEQ ID NO: 1841119
ucuucuguggccaagcagu

SEQ ID NO: 1841121 - RNA, 19 nt, Artificial Sequence
  Description of Artificial Sequence: Synthetic oligonucleotide
  Sense strand starting at position 3658 of SEQ ID NO: 1563906
cugcuucuuccagccguua

SEQ ID NO: 1841122 - RNA, 19 nt, Artificial Sequence
  Description of Artificial Sequence: Synthetic oligonucleotide
  Antisense strand to SEQ ID NO: 1841121
uaacggcuggaagaagcag

SEQ ID NO: 1841123 - RNA, 19 nt, Artificial Sequence
  Description of Artificial Sequence: Synthetic oligonucleotide
  Sense strand starting at position 3659 of SEQ ID NO: 1563906
ugcuucuuccagccguuau

SEQ ID NO: 1841124 - RNA, 19 nt, Artificial Sequence
  Description of Artificial Sequence: Synthetic oligonucleotide
  Antisense strand to SEQ ID NO: 1841123
auaacggcuggaagaagca

SEQ ID NO: 1841125 - RNA, 19 nt, Artificial Sequence
  Description of Artificial Sequence: Synthetic oligonucleotide
  Sense strand starting at position 3941 of SEQ ID NO: 1563906
guauguauuaagggagaga

SEQ ID NO: 1841126 - RNA, 19 nt, Artificial Sequence
  Description of Artificial Sequence: Synthetic oligonucleotide
  Antisense strand to SEQ ID NO: 1841125
ucucucccuuaauacauac

SEQ ID NO: 1841127 - RNA, 19 nt, Artificial Sequence
  Description of Artificial Sequence: Synthetic oligonucleotide
  Sense strand starting at position 3966 of SEQ ID NO: 1563906
ugcagaaggagaugucuau

SEQ ID NO: 1841128 - RNA, 19 nt, Artificial Sequence
  Description of Artificial Sequence: Synthetic oligonucleotide
  Antisense strand to SEQ ID NO: 1841127
auagacaucuccuucugca

SEQ ID NO: 1841129 - RNA, 19 nt, Artificial Sequence
  Description of Artificial Sequence: Synthetic oligonucleotide
  Sense strand starting at position 189 of SEQ ID NO: 1563907
agaaauauaugacagaaga

SEQ ID NO: 1841130 - RNA, 19 nt, Artificial Sequence
  Description of Artificial Sequence: Synthetic oligonucleotide
  Antisense strand to SEQ ID NO: 1841129
ucuucugucauauauuucu

SEQ ID NO: 1841131 - RNA, 19 nt, Artificial Sequence
  Description of Artificial Sequence: Synthetic oligonucleotide
  Sense strand starting at position 291 of SEQ ID NO: 1563907
auauauuagcacuguauga

SEQ ID NO: 1841132 - RNA, 19 nt, Artificial Sequence
  Description of Artificial Sequence: Synthetic oligonucleotide
  Antisense strand to SEQ ID NO: 1841131
ucauacagugcuaauauau

SEQ ID NO: 1841133 - RNA, 19 nt, Artificial Sequence
  Description of Artificial Sequence: Synthetic oligonucleotide
  Sense strand starting at position 480 of SEQ ID NO: 1563907
agacaauuauuguugcagu

SEQ ID NO: 1841134 - RNA, 19 nt, Artificial Sequence
  Description of Artificial Sequence: Synthetic oligonucleotide
  Antisense strand to SEQ ID NO: 1841133
acugcaacaauaauugucu

SEQ ID NO: 1841135 - RNA, 19 nt, Artificial Sequence
  Description of Artificial Sequence: Synthetic oligonucleotide
  Sense strand starting at position 561 of SEQ ID NO: 1563907
auggaaucaucguuuaaau

SEQ ID NO: 1841136 - RNA, 19 nt, Artificial Sequence
  Description of Artificial Sequence: Synthetic oligonucleotide
  Antisense strand to SEQ ID NO: 1841135
auuuaaacgaugauuccau

SEQ ID NO: 1841137 - RNA, 19 nt, Artificial Sequence
  Description of Artificial Sequence: Synthetic oligonucleotide
  Sense strand starting at position 726 of SEQ ID NO: 1563907
agaaauaucuaguuguugu

SEQ ID NO: 1841138 - RNA, 19 nt, Artificial Sequence
  Description of Artificial Sequence: Synthetic oligonucleotide
  Antisense strand to SEQ ID NO: 1841137
acaacaacuagauauuucu

SEQ ID NO: 1841139 - RNA, 19 nt, Artificial Sequence
  Description of Artificial Sequence: Synthetic oligonucleotide
  Sense strand starting at position 772 of SEQ ID NO: 1563907
guagaucacacgugaagaa

SEQ ID NO: 1841140 - RNA, 19 nt, Artificial Sequence
  Description of Artificial Sequence: Synthetic oligonucleotide
  Antisense strand to SEQ ID NO: 1841139
uucuucacgugugaucuac

SEQ ID NO: 1841141 - RNA, 19 nt, Artificial Sequence
  Description of Artificial Sequence: Synthetic oligonucleotide
  Sense strand starting at position 824 of SEQ ID NO: 1563907
uccuguacucuugagauga

SEQ ID NO: 1841142 - RNA, 19 nt, Artificial Sequence
  Description of Artificial Sequence: Synthetic oligonucleotide
  Antisense strand to SEQ ID NO: 1841141
ucaucucaagaguacagga

SEQ ID NO: 1841143 - RNA, 19 nt, Artificial Sequence
  Description of Artificial Sequence: Synthetic oligonucleotide
  Sense strand starting at position 826 of SEQ ID NO: 1563907
cuguacucuugagaugaug

SEQ ID NO: 1841144 - RNA, 19 nt, Artificial Sequence
  Description of Artificial Sequence: Synthetic oligonucleotide
  Antisense strand to SEQ ID NO: 1841143
caucaucucaagaguacag

SEQ ID NO: 1841145 - RNA, 19 nt, Artificial Sequence
  Description of Artificial Sequence: Synthetic oligonucleotide
  Sense strand starting at position 828 of SEQ ID NO: 1563907
guacucuugagaugaugug

SEQ ID NO: 1841146 - RNA, 19 nt, Artificial Sequence
  Description of Artificial Sequence: Synthetic oligonucleotide
  Antisense strand to SEQ ID NO: 1841145
cacaucaucucaagaguac

SEQ ID NO: 1841147 - RNA, 19 nt, Artificial Sequence
  Description of Artificial Sequence: Synthetic oligonucleotide
  Sense strand starting at position 890 of SEQ ID NO: 1563907
aagaucucgcaguaaauuc

SEQ ID NO: 1841148 - RNA, 19 nt, Artificial Sequence
  Description of Artificial Sequence: Synthetic oligonucleotide
  Antisense strand to SEQ ID NO: 1841147
gaauuuacugcgagaucuu

SEQ ID NO: 1841149 - RNA, 19 nt, Artificial Sequence
  Description of Artificial Sequence: Synthetic oligonucleotide
  Sense strand starting at position 906 of SEQ ID NO: 1563907
uuccuaaaggcuugcaaga

SEQ ID NO: 1841150 - RNA, 19 nt, Artificial Sequence
  Description of Artificial Sequence: Synthetic oligonucleotide
  Antisense strand to SEQ ID NO: 1841149
ucuugcaagccuuuaggaa

SEQ ID NO: 1841151 - RNA, 19 nt, Artificial Sequence
  Description of Artificial Sequence: Synthetic oligonucleotide
  Sense strand starting at position 2359 of SEQ ID NO: 1563907
acagaagacccgugacagu

SEQ ID NO: 1841152 - RNA, 19 nt, Artificial Sequence
  Description of Artificial Sequence: Synthetic oligonucleotide
  Antisense strand to SEQ ID NO: 1841151
acugucacgggucuucugu

SEQ ID NO: 1841153 - RNA, 19 nt, Artificial Sequence
  Description of Artificial Sequence: Synthetic oligonucleotide
  Sense strand starting at position 2438 of SEQ ID NO: 1563907
gagagucucggcgugguuu

SEQ ID NO: 1841154 - RNA, 19 nt, Artificial Sequence
  Description of Artificial Sequence: Synthetic oligonucleotide
  Antisense strand to SEQ ID NO: 1841153
aaaccacgccgagacucuc

SEQ ID NO: 1841155 - RNA, 19 nt, Artificial Sequence
  Description of Artificial Sequence: Synthetic oligonucleotide
  Sense strand starting at position 2441 of SEQ ID NO: 1563907
agucucggcgugguuuaua

SEQ ID NO: 1841156 - RNA, 19 nt, Artificial Sequence
  Description of Artificial Sequence: Synthetic oligonucleotide
  Antisense strand to SEQ ID NO: 1841155
uauaaaccacgccgagacu

SEQ ID NO: 1841157 - RNA, 19 nt, Artificial Sequence
  Description of Artificial Sequence: Synthetic oligonucleotide
  Sense strand starting at position 2444 of SEQ ID NO: 1563907
cucggcgugguuuauaaau

SEQ ID NO: 1841158 - RNA, 19 nt, Artificial Sequence
  Description of Artificial Sequence: Synthetic oligonucleotide
  Antisense strand to SEQ ID NO: 1841157
auuuauaaaccacgccgag

SEQ ID NO: 1841159 - RNA, 19 nt, Artificial Sequence
  Description of Artificial Sequence: Synthetic oligonucleotide
  Sense strand starting at position 2512 of SEQ ID NO: 1563907
ugucuaugagcuggacaca

SEQ ID NO: 1841160 - RNA, 19 nt, Artificial Sequence
  Description of Artificial Sequence: Synthetic oligonucleotide
  Antisense strand to SEQ ID NO: 1841159
uguguccagcucauagaca

SEQ ID NO: 1841161 - RNA, 19 nt, Artificial Sequence
  Description of Artificial Sequence: Synthetic oligonucleotide
  Sense strand starting at position 2655 of SEQ ID NO: 1563907
aggauacgucuaugggcaa

SEQ ID NO: 1841162 - RNA, 19 nt, Artificial Sequence
  Description of Artificial Sequence: Synthetic oligonucleotide
  Antisense strand to SEQ ID NO: 1841161
uugcccauagacguauccu

SEQ ID NO: 1841163 - RNA, 19 nt, Artificial Sequence
  Description of Artificial Sequence: Synthetic oligonucleotide
  Sense strand starting at position 2752 of SEQ ID NO: 1563907
gcccgacaucuguaaggac

SEQ ID NO: 1841164 - RNA, 19 nt, Artificial Sequence
  Description of Artificial Sequence: Synthetic oligonucleotide
  Antisense strand to SEQ ID NO: 1841163
guccuuacagaugucgggc

SEQ ID NO: 1841165 - RNA, 19 nt, Artificial Sequence
  Description of Artificial Sequence: Synthetic oligonucleotide
  Sense strand starting at position 2795 of SEQ ID NO: 1563907
uucggagacagcugcaaau

SEQ ID NO: 1841166 - RNA, 19 nt, Artificial Sequence
  Description of Artificial Sequence: Synthetic oligonucleotide
  Antisense strand to SEQ ID NO: 1841165
auuugcagcugucuccgaa

SEQ ID NO: 1841167 - RNA, 19 nt, Artificial Sequence
  Description of Artificial Sequence: Synthetic oligonucleotide
  Sense strand starting at position 2805 of SEQ ID NO: 1563907
gcugcaaauuccuccauga

SEQ ID NO: 1841168 - RNA, 19 nt, Artificial Sequence
  Description of Artificial Sequence: Synthetic oligonucleotide
  Antisense strand to SEQ ID NO: 1841167
ucauggaggaauuugcagc

SEQ ID NO: 1841169 - RNA, 19 nt, Artificial Sequence
  Description of Artificial Sequence: Synthetic oligonucleotide
  Sense strand starting at position 2851 of SEQ ID NO: 1563907
gaucgaacgugagcuugau

SEQ ID NO: 1841170 - RNA, 19 nt, Artificial Sequence
  Description of Artificial Sequence: Synthetic oligonucleotide
  Antisense strand to SEQ ID NO: 1841169
aucaagcucacguucgauc

SEQ ID NO: 1841171 - RNA, 19 nt, Artificial Sequence
  Description of Artificial Sequence: Synthetic oligonucleotide
  Sense strand starting at position 2914 of SEQ ID NO: 1563907
aagcgaugaugaggaaaua

SEQ ID NO: 1841172 - RNA, 19 nt, Artificial Sequence
  Description of Artificial Sequence: Synthetic oligonucleotide
  Antisense strand to SEQ ID NO: 1841171
uauuuccucaucaucgcuu

SEQ ID NO: 1841173 - RNA, 19 nt, Artificial Sequence
  Description of Artificial Sequence: Synthetic oligonucleotide
  Sense strand starting at position 2995 of SEQ ID NO: 1563907
uuauuucugcgagagcugu

SEQ ID NO: 1841174 - RNA, 19 nt, Artificial Sequence
  Description of Artificial Sequence: Synthetic oligonucleotide
  Antisense strand to SEQ ID NO: 1841173
acagcucucgcagaaauaa

SEQ ID NO: 1841175 - RNA, 19 nt, Artificial Sequence
  Description of Artificial Sequence: Synthetic oligonucleotide
  Sense strand starting at position 3042 of SEQ ID NO: 1563907
gcugcuaugucugugacca

SEQ ID NO: 1841176 - RNA, 19 nt, Artificial Sequence
  Description of Artificial Sequence: Synthetic oligonucleotide
  Antisense strand to SEQ ID NO: 1841175
uggucacagacauagcagc

SEQ ID NO: 1841177 - RNA, 19 nt, Artificial Sequence
  Description of Artificial Sequence: Synthetic oligonucleotide
  Sense strand starting at position 3043 of SEQ ID NO: 1563907
cugcuaugucugugaccag

SEQ ID NO: 1841178 - RNA, 19 nt, Artificial Sequence
  Description of Artificial Sequence: Synthetic oligonucleotide
  Antisense strand to SEQ ID NO: 1841177
cuggucacagacauagcag

SEQ ID NO: 1841179 - RNA, 19 nt, Artificial Sequence
  Description of Artificial Sequence: Synthetic oligonucleotide
  Sense strand starting at position 3091 of SEQ ID NO: 1563907
agaauugauugcuaaacua

SEQ ID NO: 1841180 - RNA, 19 nt, Artificial Sequence
  Description of Artificial Sequence: Synthetic oligonucleotide
  Antisense strand to SEQ ID NO: 1841179
uaguuuagcaaucaauucu

SEQ ID NO: 1841181 - RNA, 19 nt, Artificial Sequence
  Description of Artificial Sequence: Synthetic oligonucleotide
  Sense strand starting at position 3381 of SEQ ID NO: 1563907
agaacacuuuggcauaaau

SEQ ID NO: 1841182 - RNA, 19 nt, Artificial Sequence
  Description of Artificial Sequence: Synthetic oligonucleotide
  Antisense strand to SEQ ID NO: 1841181
auuuaugccaaaguguucu

SEQ ID NO: 1841183 - RNA, 19 nt, Artificial Sequence
  Description of Artificial Sequence: Synthetic oligonucleotide
  Sense strand starting at position 3405 of SEQ ID NO: 1563907
gggugggaguaguuugaga

SEQ ID NO: 1841184 - RNA, 19 nt, Artificial Sequence
  Description of Artificial Sequence: Synthetic oligonucleotide
  Antisense strand to SEQ ID NO: 1841183
ucucaaacuacucccaccc

SEQ ID NO: 1841185 - RNA, 19 nt, Artificial Sequence
  Description of Artificial Sequence: Synthetic oligonucleotide
  Sense strand starting at position 3407 of SEQ ID NO: 1563907
gugggaguaguuugagaaa

SEQ ID NO: 1841186 - RNA, 19 nt, Artificial Sequence
  Description of Artificial Sequence: Synthetic oligonucleotide
  Antisense strand to SEQ ID NO: 1841185
uuucucaaacuacucccac

SEQ ID NO: 1841187 - RNA, 19 nt, Artificial Sequence
  Description of Artificial Sequence: Synthetic oligonucleotide
  Sense strand starting at position 3426 of SEQ ID NO: 1563907
agagcuauaauuugcucga

SEQ ID NO: 1841188 - RNA, 19 nt, Artificial Sequence
  Description of Artificial Sequence: Synthetic oligonucleotide
  Antisense strand to SEQ ID NO: 1841187
ucgagcaaauuauagcucu

SEQ ID NO: 1841189 - RNA, 19 nt, Artificial Sequence
  Description of Artificial Sequence: Synthetic oligonucleotide
  Sense strand starting at position 3427 of SEQ ID NO: 1563907
gagcuauaauuugcucgaa

SEQ ID NO: 1841190 - RNA, 19 nt, Artificial Sequence
  Description of Artificial Sequence: Synthetic oligonucleotide
  Antisense strand to SEQ ID NO: 1841189
uucgagcaaauuauagcuc

SEQ ID NO: 1841191 - RNA, 19 nt, Artificial Sequence
  Description of Artificial Sequence: Synthetic oligonucleotide
  Sense strand starting at position 3429 of SEQ ID NO: 1563907
gcuauaauuugcucgaagu

SEQ ID NO: 1841192 - RNA, 19 nt, Artificial Sequence
  Description of Artificial Sequence: Synthetic oligonucleotide
  Antisense strand to SEQ ID NO: 1841191
acuucgagcaaauuauagc

SEQ ID NO: 1841193 - RNA, 19 nt, Artificial Sequence
  Description of Artificial Sequence: Synthetic oligonucleotide
  Sense strand starting at position 3430 of SEQ ID NO: 1563907
cuauaauuugcucgaagua

SEQ ID NO: 1841194 - RNA, 19 nt, Artificial Sequence
  Description of Artificial Sequence: Synthetic oligonucleotide
  Antisense strand to SEQ ID NO: 1841193
uacuucgagcaaauuauag

SEQ ID NO: 1841195 - RNA, 19 nt, Artificial Sequence
  Description of Artificial Sequence: Synthetic oligonucleotide
  Sense strand starting at position 3471 of SEQ ID NO: 1563907
gaccucugagccuguuuau

SEQ ID NO: 1841196 - RNA, 19 nt, Artificial Sequence
  Description of Artificial Sequence: Synthetic oligonucleotide
  Antisense strand to SEQ ID NO: 1841195
auaaacaggcucagagguc

SEQ ID NO: 1841197 - RNA, 19 nt, Artificial Sequence
  Description of Artificial Sequence: Synthetic oligonucleotide
  Sense strand starting at position 3474 of SEQ ID NO: 1563907
cucugagccuguuuauuau

SEQ ID NO: 1841198 - RNA, 19 nt, Artificial Sequence
  Description of Artificial Sequence: Synthetic oligonucleotide
  Antisense strand to SEQ ID NO: 1841197
auaauaaacaggcucagag

SEQ ID NO: 1841199 - RNA, 19 nt, Artificial Sequence
  Description of Artificial Sequence: Synthetic oligonucleotide
  Sense strand starting at position 3535 of SEQ ID NO: 1563907
ugcauucuuucucuuggga

SEQ ID NO: 1841200 - RNA, 19 nt, Artificial Sequence
  Description of Artificial Sequence: Synthetic oligonucleotide
  Antisense strand to SEQ ID NO: 1841199
ucccaagagaaagaaugca

SEQ ID NO: 1841201 - RNA, 19 nt, Artificial Sequence
  Description of Artificial Sequence: Synthetic oligonucleotide
  Sense strand starting at position 3644 of SEQ ID NO: 1563907
gggaaauguuccuugcugu

SEQ ID NO: 1841202 - RNA, 19 nt, Artificial Sequence
  Description of Artificial Sequence: Synthetic oligonucleotide
  Antisense strand to SEQ ID NO: 1841201
acagcaaggaacauuuccc

SEQ ID NO: 1841203 - RNA, 19 nt, Artificial Sequence
  Description of Artificial Sequence: Synthetic oligonucleotide
  Sense strand starting at position 3645 of SEQ ID NO: 1563907
ggaaauguuccuugcuguc

SEQ ID NO: 1841204 - RNA, 19 nt, Artificial Sequence
  Description of Artificial Sequence: Synthetic oligonucleotide
  Antisense strand to SEQ ID NO: 1841203
gacagcaaggaacauuucc

SEQ ID NO: 1841205 - RNA, 19 nt, Artificial Sequence
  Description of Artificial Sequence: Synthetic oligonucleotide
  Sense strand starting at position 3654 of SEQ ID NO: 1563907
ccuugcugucuugguuauu

SEQ ID NO: 1841206 - RNA, 19 nt, Artificial Sequence
  Description of Artificial Sequence: Synthetic oligonucleotide
  Antisense strand to SEQ ID NO: 1841205
aauaaccaagacagcaagg

SEQ ID NO: 1841207 - RNA, 19 nt, Artificial Sequence
  Description of Artificial Sequence: Synthetic oligonucleotide
  Sense strand starting at position 3655 of SEQ ID NO: 1563907
cuugcugucuugguuauuu

SEQ ID NO: 1841208 - RNA, 19 nt, Artificial Sequence
  Description of Artificial Sequence: Synthetic oligonucleotide
  Antisense strand to SEQ ID NO: 1841207
aaauaaccaagacagcaag

SEQ ID NO: 1841209 - RNA, 19 nt, Artificial Sequence
  Description of Artificial Sequence: Synthetic oligonucleotide
  Sense strand starting at position 120 of SEQ ID NO: 1563908
ucauguaagcucuaugaga

SEQ ID NO: 1841210 - RNA, 19 nt, Artificial Sequence
  Description of Artificial Sequence: Synthetic oligonucleotide
  Antisense strand to SEQ ID NO: 1841209
ucucauagagcuuacauga

SEQ ID NO: 1841211 - RNA, 19 nt, Artificial Sequence
  Description of Artificial Sequence: Synthetic oligonucleotide
  Sense strand starting at position 144 of SEQ ID NO: 1563908
ggcuuugucugauuuccac

SEQ ID NO: 1841212 - RNA, 19 nt, Artificial Sequence
  Description of Artificial Sequence: Synthetic oligonucleotide
  Antisense strand to SEQ ID NO: 1841211
guggaaaucagacaaagcc

SEQ ID NO: 1841213 - RNA, 19 nt, Artificial Sequence
  Description of Artificial Sequence: Synthetic oligonucleotide
  Sense strand starting at position 153 of SEQ ID NO: 1563908
ugauuuccacacugcugua

SEQ ID NO: 1841214 - RNA, 19 nt, Artificial Sequence
  Description of Artificial Sequence: Synthetic oligonucleotide
  Antisense strand to SEQ ID NO: 1841213
uacagcaguguggaaauca

SEQ ID NO: 1841215 - RNA, 19 nt, Artificial Sequence
  Description of Artificial Sequence: Synthetic oligonucleotide
  Sense strand starting at position 270 of SEQ ID NO: 1563908
guuaguauugaugaaguac

SEQ ID NO: 1841216 - RNA, 19 nt, Artificial Sequence
  Description of Artificial Sequence: Synthetic oligonucleotide
  Antisense strand to SEQ ID NO: 1841215
guacuucaucaauacuaac

SEQ ID NO: 1841217 - RNA, 19 nt, Artificial Sequence
  Description of Artificial Sequence: Synthetic oligonucleotide
  Sense strand starting at position 324 of SEQ ID NO: 1563908
cacaauaucucagugaggu

SEQ ID NO: 1841218 - RNA, 19 nt, Artificial Sequence
  Description of Artificial Sequence: Synthetic oligonucleotide
  Antisense strand to SEQ ID NO: 1841217
accucacugagauauugug

SEQ ID NO: 1841219 - RNA, 19 nt, Artificial Sequence
  Description of Artificial Sequence: Synthetic oligonucleotide
  Sense strand starting at position 325 of SEQ ID NO: 1563908
acaauaucucagugaggug

SEQ ID NO: 1841220 - RNA, 19 nt, Artificial Sequence
  Description of Artificial Sequence: Synthetic oligonucleotide
  Antisense strand to SEQ ID NO: 1841219
caccucacugagauauugu

SEQ ID NO: 1841221 - RNA, 19 nt, Artificial Sequence
  Description of Artificial Sequence: Synthetic oligonucleotide
  Sense strand starting at position 330 of SEQ ID NO: 1563908
aucucagugaggugaaaca

SEQ ID NO: 1841222 - RNA, 19 nt, Artificial Sequence
  Description of Artificial Sequence: Synthetic oligonucleotide
  Antisense strand to SEQ ID NO: 1841221
uguuucaccucacugagau

SEQ ID NO: 1841223 - RNA, 19 nt, Artificial Sequence
  Description of Artificial Sequence: Synthetic oligonucleotide
  Sense strand starting at position 337 of SEQ ID NO: 1563908
ugaggugaaacauggcaau

SEQ ID NO: 1841224 - RNA, 19 nt, Artificial Sequence
  Description of Artificial Sequence: Synthetic oligonucleotide
  Antisense strand to SEQ ID NO: 1841223
auugccauguuucaccuca

SEQ ID NO: 1841225 - RNA, 19 nt, Artificial Sequence
  Description of Artificial Sequence: Synthetic oligonucleotide
  Sense strand starting at position 364 of SEQ ID NO: 1563908
cauucuagugcugaguaca

SEQ ID NO: 1841226 - RNA, 19 nt, Artificial Sequence
  Description of Artificial Sequence: Synthetic oligonucleotide
  Antisense strand to SEQ ID NO: 1841225
uguacucagcacuagaaug

SEQ ID NO: 1841227 - RNA, 19 nt, Artificial Sequence
  Description of Artificial Sequence: Synthetic oligonucleotide
  Sense strand starting at position 374 of SEQ ID NO: 1563908
cugaguacauacuuacgaa

SEQ ID NO: 1841228 - RNA, 19 nt, Artificial Sequence
  Description of Artificial Sequence: Synthetic oligonucleotide
  Antisense strand to SEQ ID NO: 1841227
uucguaaguauguacucag

SEQ ID NO: 1841229 - RNA, 19 nt, Artificial Sequence
  Description of Artificial Sequence: Synthetic oligonucleotide
  Sense strand starting at position 459 of SEQ ID NO: 1563908
uuuagaagguguccuauua

SEQ ID NO: 1841230 - RNA, 19 nt, Artificial Sequence
  Description of Artificial Sequence: Synthetic oligonucleotide
  Antisense strand to SEQ ID NO: 1841229
uaauaggacaccuucuaaa

SEQ ID NO: 1841231 - RNA, 19 nt, Artificial Sequence
  Description of Artificial Sequence: Synthetic oligonucleotide
  Sense strand starting at position 509 of SEQ ID NO: 1563908
gcaccaaggguuuaugcua

SEQ ID NO: 1841232 - RNA, 19 nt, Artificial Sequence
  Description of Artificial Sequence: Synthetic oligonucleotide
  Antisense strand to SEQ ID NO: 1841231
uagcauaaacccuuggugc

SEQ ID NO: 1841233 - RNA, 19 nt, Artificial Sequence
  Description of Artificial Sequence: Synthetic oligonucleotide
  Sense strand starting at position 550 of SEQ ID NO: 1563908
ccgucagugcugccugauu

SEQ ID NO: 1841234 - RNA, 19 nt, Artificial Sequence
  Description of Artificial Sequence: Synthetic oligonucleotide
  Antisense strand to SEQ ID NO: 1841233
aaucaggcagcacugacgg

SEQ ID NO: 1841235 - RNA, 19 nt, Artificial Sequence
  Description of Artificial Sequence: Synthetic oligonucleotide
  Sense strand starting at position 700 of SEQ ID NO: 1563908
ucaucuguaggaugaguau

SEQ ID NO: 1841236 - RNA, 19 nt, Artificial Sequence
  Description of Artificial Sequence: Synthetic oligonucleotide
  Antisense strand to SEQ ID NO: 1841235
auacucauccuacagauga

SEQ ID NO: 1841237 - RNA, 19 nt, Artificial Sequence
  Description of Artificial Sequence: Synthetic oligonucleotide
  Sense strand starting at position 703 of SEQ ID NO: 1563908
ucuguaggaugaguauaau

SEQ ID NO: 1841238 - RNA, 19 nt, Artificial Sequence
  Description of Artificial Sequence: Synthetic oligonucleotide
  Antisense strand to SEQ ID NO: 1841237
auuauacucauccuacaga

SEQ ID NO: 1841239 - RNA, 19 nt, Artificial Sequence
  Description of Artificial Sequence: Synthetic oligonucleotide
  Sense strand starting at position 745 of SEQ ID NO: 1563908
guuuguuucgaguauaaga

SEQ ID NO: 1841240 - RNA, 19 nt, Artificial Sequence
  Description of Artificial Sequence: Synthetic oligonucleotide
  Antisense strand to SEQ ID NO: 1841239
ucuuauacucgaaacaaac

SEQ ID NO: 1841241 - RNA, 19 nt, Artificial Sequence
  Description of Artificial Sequence: Synthetic oligonucleotide
  Sense strand starting at position 747 of SEQ ID NO: 1563908
uuguuucgaguauaagaug

SEQ ID NO: 1841242 - RNA, 19 nt, Artificial Sequence
  Description of Artificial Sequence: Synthetic oligonucleotide
  Antisense strand to SEQ ID NO: 1841241
caucuuauacucgaaacaa

SEQ ID NO: 1841243 - RNA, 19 nt, Artificial Sequence
  Description of Artificial Sequence: Synthetic oligonucleotide
  Sense strand starting at position 752 of SEQ ID NO: 1563908
ucgaguauaagaugagcua

SEQ ID NO: 1841244 - RNA, 19 nt, Artificial Sequence
  Description of Artificial Sequence: Synthetic oligonucleotide
  Antisense strand to SEQ ID NO: 1841243
uagcucaucuuauacucga

SEQ ID NO: 1841245 - RNA, 19 nt, Artificial Sequence
  Description of Artificial Sequence: Synthetic oligonucleotide
  Sense strand starting at position 753 of SEQ ID NO: 1563908
cgaguauaagaugagcuaa

SEQ ID NO: 1841246 - RNA, 19 nt, Artificial Sequence
  Description of Artificial Sequence: Synthetic oligonucleotide
  Antisense strand to SEQ ID NO: 1841245
uuagcucaucuuauacucg

SEQ ID NO: 1841247 - RNA, 19 nt, Artificial Sequence
  Description of Artificial Sequence: Synthetic oligonucleotide
  Sense strand starting at position 775 of SEQ ID NO: 1563908
augucaaguguuuagaaca

SEQ ID NO: 1841248 - RNA, 19 nt, Artificial Sequence
  Description of Artificial Sequence: Synthetic oligonucleotide
  Antisense strand to SEQ ID NO: 1841247
uguucuaaacacuugacau

SEQ ID NO: 1841249 - RNA, 19 nt, Artificial Sequence
  Description of Artificial Sequence: Synthetic oligonucleotide
  Sense strand starting at position 903 of SEQ ID NO: 1563908
gagaucucgucccuauaaa

SEQ ID NO: 1841250 - RNA, 19 nt, Artificial Sequence
  Description of Artificial Sequence: Synthetic oligonucleotide
  Antisense strand to SEQ ID NO: 1841249
uuuauagggacgagaucuc

SEQ ID NO: 1841251 - RNA, 19 nt, Artificial Sequence
  Description of Artificial Sequence: Synthetic oligonucleotide
  Sense strand starting at position 956 of SEQ ID NO: 1563908
ugccauaucgguguuuagu

SEQ ID NO: 1841252 - RNA, 19 nt, Artificial Sequence
  Description of Artificial Sequence: Synthetic oligonucleotide
  Antisense strand to SEQ ID NO: 1841251
acuaaacaccgauauggca

SEQ ID NO: 1841253 - RNA, 19 nt, Artificial Sequence
  Description of Artificial Sequence: Synthetic oligonucleotide
  Sense strand starting at position 964 of SEQ ID NO: 1563908
cgguguuuaguauuaucgu

SEQ ID NO: 1841254 - RNA, 19 nt, Artificial Sequence
  Description of Artificial Sequence: Synthetic oligonucleotide
  Antisense strand to SEQ ID NO: 1841253
acgauaauacuaaacaccg

SEQ ID NO: 1841255 - RNA, 19 nt, Artificial Sequence
  Description of Artificial Sequence: Synthetic oligonucleotide
  Sense strand starting at position 1029 of SEQ ID NO: 1563908
ugugauuucugucugcaaa

SEQ ID NO: 1841256 - RNA, 19 nt, Artificial Sequence
  Description of Artificial Sequence: Synthetic oligonucleotide
  Antisense strand to SEQ ID NO: 1841255
uuugcagacagaaaucaca

SEQ ID NO: 1841257 - RNA, 19 nt, Artificial Sequence
  Description of Artificial Sequence: Synthetic oligonucleotide
  Sense strand starting at position 1359 of SEQ ID NO: 1563908
cacaguccuggagaagcua

SEQ ID NO: 1841258 - RNA, 19 nt, Artificial Sequence
  Description of Artificial Sequence: Synthetic oligonucleotide
  Antisense strand to SEQ ID NO: 1841257
uagcuucuccaggacugug

SEQ ID NO: 1841259 - RNA, 19 nt, Artificial Sequence
  Description of Artificial Sequence: Synthetic oligonucleotide
  Sense strand starting at position 1721 of SEQ ID NO: 1563908
ggaagaaaucggugacauu

SEQ ID NO: 1841260 - RNA, 19 nt, Artificial Sequence
  Description of Artificial Sequence: Synthetic oligonucleotide
  Antisense strand to SEQ ID NO: 1841259
aaugucaccgauuucuucc

SEQ ID NO: 1841261 - RNA, 19 nt, Artificial Sequence
  Description of Artificial Sequence: Synthetic oligonucleotide
  Sense strand starting at position 2587 of SEQ ID NO: 1563908
guugucugcgacuuugagu

SEQ ID NO: 1841262 - RNA, 19 nt, Artificial Sequence
  Description of Artificial Sequence: Synthetic oligonucleotide
  Antisense strand to SEQ ID NO: 1841261
acucaaagucgcagacaac

SEQ ID NO: 1841263 - RNA, 19 nt, Artificial Sequence
  Description of Artificial Sequence: Synthetic oligonucleotide
  Sense strand starting at position 2594 of SEQ ID NO: 1563908
gcgacuuugaguuugugca

SEQ ID NO: 1841264 - RNA, 19 nt, Artificial Sequence
  Description of Artificial Sequence: Synthetic oligonucleotide
  Antisense strand to SEQ ID NO: 1841263
ugcacaaacucaaagucgc

SEQ ID NO: 1841265 - RNA, 19 nt, Artificial Sequence
  Description of Artificial Sequence: Synthetic oligonucleotide
  Sense strand starting at position 2601 of SEQ ID NO: 1563908
ugaguuugugcauaggaga

SEQ ID NO: 1841266 - RNA, 19 nt, Artificial Sequence
  Description of Artificial Sequence: Synthetic oligonucleotide
  Antisense strand to SEQ ID NO: 1841265
ucuccuaugcacaaacuca

SEQ ID NO: 1841267 - RNA, 19 nt, Artificial Sequence
  Description of Artificial Sequence: Synthetic oligonucleotide
  Sense strand starting at position 2662 of SEQ ID NO: 1563908
gggaaauauucugugguuc

SEQ ID NO: 1841268 - RNA, 19 nt, Artificial Sequence
  Description of Artificial Sequence: Synthetic oligonucleotide
  Antisense strand to SEQ ID NO: 1841267
gaaccacagaauauuuccc

SEQ ID NO: 1841269 - RNA, 19 nt, Artificial Sequence
  Description of Artificial Sequence: Synthetic oligonucleotide
  Sense strand starting at position 2663 of SEQ ID NO: 1563908
ggaaauauucugugguucu

SEQ ID NO: 1841270 - RNA, 19 nt, Artificial Sequence
  Description of Artificial Sequence: Synthetic oligonucleotide
  Antisense strand to SEQ ID NO: 1841269
agaaccacagaauauuucc

SEQ ID NO: 1841271 - RNA, 19 nt, Artificial Sequence
  Description of Artificial Sequence: Synthetic oligonucleotide
  Sense strand starting at position 2814 of SEQ ID NO: 1563908
cccacuuauugggugggaa

SEQ ID NO: 1841272 - RNA, 19 nt, Artificial Sequence
  Description of Artificial Sequence: Synthetic oligonucleotide
  Antisense strand to SEQ ID NO: 1841271
uucccacccaauaaguggg

SEQ ID NO: 1841273 - RNA, 19 nt, Artificial Sequence
  Description of Artificial Sequence: Synthetic oligonucleotide
  Sense strand starting at position 2815 of SEQ ID NO: 1563908
ccacuuauugggugggaag

SEQ ID NO: 1841274 - RNA, 19 nt, Artificial Sequence
  Description of Artificial Sequence: Synthetic oligonucleotide
  Antisense strand to SEQ ID NO: 1841273
cuucccacccaauaagugg

SEQ ID NO: 1841275 - RNA, 19 nt, Artificial Sequence
  Description of Artificial Sequence: Synthetic oligonucleotide
  Sense strand starting at position 2900 of SEQ ID NO: 1563908
gacgcucauccauggaaag

SEQ ID NO: 1841276 - RNA, 19 nt, Artificial Sequence
  Description of Artificial Sequence: Synthetic oligonucleotide
  Antisense strand to SEQ ID NO: 1841275
cuuuccauggaugagcguc

SEQ ID NO: 1841277 - RNA, 19 nt, Artificial Sequence
  Description of Artificial Sequence: Synthetic oligonucleotide
  Sense strand starting at position 3338 of SEQ ID NO: 1563908
ucaggacucccugaguucu

SEQ ID NO: 1841278 - RNA, 19 nt, Artificial Sequence
  Description of Artificial Sequence: Synthetic oligonucleotide
  Antisense strand to SEQ ID NO: 1841277
agaacucagggaguccuga

SEQ ID NO: 1841279 - RNA, 19 nt, Artificial Sequence
  Description of Artificial Sequence: Synthetic oligonucleotide
  Sense strand starting at position 3822 of SEQ ID NO: 1563908
gcuugaauuugucuaccug

SEQ ID NO: 1841280 - RNA, 19 nt, Artificial Sequence
  Description of Artificial Sequence: Synthetic oligonucleotide
  Antisense strand to SEQ ID NO: 1841279
cagguagacaaauucaagc

SEQ ID NO: 1841281 - RNA, 19 nt, Artificial Sequence
  Description of Artificial Sequence: Synthetic oligonucleotide
  Sense strand starting at position 3848 of SEQ ID NO: 1563908
uggcaaagcccugaucaca

SEQ ID NO: 1841282 - RNA, 19 nt, Artificial Sequence
  Description of Artificial Sequence: Synthetic oligonucleotide
  Antisense strand to SEQ ID NO: 1841281
ugugaucagggcuuugcca

SEQ ID NO: 1841283 - RNA, 19 nt, Artificial Sequence
  Description of Artificial Sequence: Synthetic oligonucleotide
  Sense strand starting at position 3879 of SEQ ID NO: 1563908
ccgccaggucucucugcaa

SEQ ID NO: 1841284 - RNA, 19 nt, Artificial Sequence
  Description of Artificial Sequence: Synthetic oligonucleotide
  Antisense strand to SEQ ID NO: 1841283
uugcagagagaccuggcgg

SEQ ID NO: 1841285 - RNA, 19 nt, Artificial Sequence
  Description of Artificial Sequence: Synthetic oligonucleotide
  Sense strand starting at position 3883 of SEQ ID NO: 1563908
caggucucucugcaagaug

SEQ ID NO: 1841286 - RNA, 19 nt, Artificial Sequence
  Description of Artificial Sequence: Synthetic oligonucleotide
  Antisense strand to SEQ ID NO: 1841285
caucuugcagagagaccug

SEQ ID NO: 1841287 - RNA, 19 nt, Artificial Sequence
  Description of Artificial Sequence: Synthetic oligonucleotide
  Sense strand starting at position 3912 of SEQ ID NO: 1563908
gcugaaguccuugcuguuu

SEQ ID NO: 1841288 - RNA, 19 nt, Artificial Sequence
  Description of Artificial Sequence: Synthetic oligonucleotide
  Antisense strand to SEQ ID NO: 1841287
aaacagcaaggacuucagc

SEQ ID NO: 1841289 - RNA, 19 nt, Artificial Sequence
  Description of Artificial Sequence: Synthetic oligonucleotide
  Sense strand starting at position 121 of SEQ ID NO: 1563909
aagugcugggauuaguuaa

SEQ ID NO: 1841290 - RNA, 19 nt, Artificial Sequence
  Description of Artificial Sequence: Synthetic oligonucleotide
  Antisense strand to SEQ ID NO: 1841289
uuaacuaaucccagcacuu

SEQ ID NO: 1841291 - RNA, 19 nt, Artificial Sequence
  Description of Artificial Sequence: Synthetic oligonucleotide
  Sense strand starting at position 2254 of SEQ ID NO: 1563909
aauuuagagugagggcuaa

SEQ ID NO: 1841292 - RNA, 19 nt, Artificial Sequence
  Description of Artificial Sequence: Synthetic oligonucleotide
  Antisense strand to SEQ ID NO: 1841291
uuagcccucacucuaaauu

SEQ ID NO: 1841293 - RNA, 19 nt, Artificial Sequence
  Description of Artificial Sequence: Synthetic oligonucleotide
  Sense strand starting at position 2286 of SEQ ID NO: 1563909
gagggcauuugucagaaag

SEQ ID NO: 1841294 - RNA, 19 nt, Artificial Sequence
  Description of Artificial Sequence: Synthetic oligonucleotide
  Antisense strand to SEQ ID NO: 1841293
cuuucugacaaaugcccuc

SEQ ID NO: 1841295 - RNA, 19 nt, Artificial Sequence
  Description of Artificial Sequence: Synthetic oligonucleotide
  Sense strand starting at position 2288 of SEQ ID NO: 1563909
gggcauuugucagaaagcg

SEQ ID NO: 1841296 - RNA, 19 nt, Artificial Sequence
  Description of Artificial Sequence: Synthetic oligonucleotide
  Antisense strand to SEQ ID NO: 1841295
cgcuuucugacaaaugccc

SEQ ID NO: 1841297 - RNA, 19 nt, Artificial Sequence
  Description of Artificial Sequence: Synthetic oligonucleotide
  Sense strand starting at position 2316 of SEQ ID NO: 1563909
aguggaguggacuguauau

SEQ ID NO: 1841298 - RNA, 19 nt, Artificial Sequence
  Description of Artificial Sequence: Synthetic oligonucleotide
  Antisense strand to SEQ ID NO: 1841297
auauacaguccacuccacu

SEQ ID NO: 1841299 - RNA, 19 nt, Artificial Sequence
  Description of Artificial Sequence: Synthetic oligonucleotide
  Sense strand starting at position 2318 of SEQ ID NO: 1563909
uggaguggacuguauauau

SEQ ID NO: 1841300 - RNA, 19 nt, Artificial Sequence
  Description of Artificial Sequence: Synthetic oligonucleotide
  Antisense strand to SEQ ID NO: 1841299
auauauacaguccacucca

SEQ ID NO: 1841301 - RNA, 19 nt, Artificial Sequence
  Description of Artificial Sequence: Synthetic oligonucleotide
  Sense strand starting at position 2722 of SEQ ID NO: 1563909
ggaaaugcuuuauccugca

SEQ ID NO: 1841302 - RNA, 19 nt, Artificial Sequence
  Description of Artificial Sequence: Synthetic oligonucleotide
  Antisense strand to SEQ ID NO: 1841301
ugcaggauaaagcauuucc

SEQ ID NO: 1841303 - RNA, 19 nt, Artificial Sequence
  Description of Artificial Sequence: Synthetic oligonucleotide
  Sense strand starting at position 2727 of SEQ ID NO: 1563909
ugcuuuauccugcacaaug

SEQ ID NO: 1841304 - RNA, 19 nt, Artificial Sequence
  Description of Artificial Sequence: Synthetic oligonucleotide
  Antisense strand to SEQ ID NO: 1841303
cauugugcaggauaaagca

SEQ ID NO: 1841305 - RNA, 19 nt, Artificial Sequence
  Description of Artificial Sequence: Synthetic oligonucleotide
  Sense strand starting at position 2826 of SEQ ID NO: 1563909
gauacauacuagcucguuu

SEQ ID NO: 1841306 - RNA, 19 nt, Artificial Sequence
  Description of Artificial Sequence: Synthetic oligonucleotide
  Antisense strand to SEQ ID NO: 1841305
aaacgagcuaguauguauc

SEQ ID NO: 1841307 - RNA, 19 nt, Artificial Sequence
  Description of Artificial Sequence: Synthetic oligonucleotide
  Sense strand starting at position 3349 of SEQ ID NO: 1563909
gcgggacucuuucugaaca

SEQ ID NO: 1841308 - RNA, 19 nt, Artificial Sequence
  Description of Artificial Sequence: Synthetic oligonucleotide
  Antisense strand to SEQ ID NO: 1841307
uguucagaaagagucccgc

SEQ ID NO: 1841309 - RNA, 19 nt, Artificial Sequence
  Description of Artificial Sequence: Synthetic oligonucleotide
  Sense strand starting at position 3351 of SEQ ID NO: 1563909
gggacucuuucugaacaca

SEQ ID NO: 1841310 - RNA, 19 nt, Artificial Sequence
  Description of Artificial Sequence: Synthetic oligonucleotide
  Antisense strand to SEQ ID NO: 1841309
uguguucagaaagaguccc

SEQ ID NO: 1841311 - RNA, 19 nt, Artificial Sequence
  Description of Artificial Sequence: Synthetic oligonucleotide
  Sense strand starting at position 3379 of SEQ ID NO: 1563909
uucgaaaugaucuguaaag

SEQ ID NO: 1841312 - RNA, 19 nt, Artificial Sequence
  Description of Artificial Sequence: Synthetic oligonucleotide
  Antisense strand to SEQ ID NO: 1841311
cuuuacagaucauuucgaa

SEQ ID NO: 1841313 - RNA, 19 nt, Artificial Sequence
  Description of Artificial Sequence: Synthetic oligonucleotide
  Sense strand starting at position 3380 of SEQ ID NO: 1563909
ucgaaaugaucuguaaagu

SEQ ID NO: 1841314 - RNA, 19 nt, Artificial Sequence
  Description of Artificial Sequence: Synthetic oligonucleotide
  Antisense strand to SEQ ID NO: 1841313
acuuuacagaucauuucga

SEQ ID NO: 1841315 - RNA, 19 nt, Artificial Sequence
  Description of Artificial Sequence: Synthetic oligonucleotide
  Sense strand starting at position 3381 of SEQ ID NO: 1563909
cgaaaugaucuguaaagug

SEQ ID NO: 1841316 - RNA, 19 nt, Artificial Sequence
  Description of Artificial Sequence: Synthetic oligonucleotide
  Antisense strand to SEQ ID NO: 1841315
cacuuuacagaucauuucg

SEQ ID NO: 1841317 - RNA, 19 nt, Artificial Sequence
  Description of Artificial Sequence: Synthetic oligonucleotide
  Sense strand starting at position 3396 of SEQ ID NO: 1563909
agugaaucuucagggagca

SEQ ID NO: 1841318 - RNA, 19 nt, Artificial Sequence
  Description of Artificial Sequence: Synthetic oligonucleotide
  Antisense strand to SEQ ID NO: 1841317
ugcucccugaagauucacu

SEQ ID NO: 1841319 - RNA, 19 nt, Artificial Sequence
  Description of Artificial Sequence: Synthetic oligonucleotide
  Sense strand starting at position 3412 of SEQ ID NO: 1563909
gcagucuggucgucagauc

SEQ ID NO: 1841320 - RNA, 19 nt, Artificial Sequence
  Description of Artificial Sequence: Synthetic oligonucleotide
  Antisense strand to SEQ ID NO: 1841319
gaucugacgaccagacugc

SEQ ID NO: 1841321 - RNA, 19 nt, Artificial Sequence
  Description of Artificial Sequence: Synthetic oligonucleotide
  Sense strand starting at position 3542 of SEQ ID NO: 1563909
uucuuaguaugagcucaga

SEQ ID NO: 1841322 - RNA, 19 nt, Artificial Sequence
  Description of Artificial Sequence: Synthetic oligonucleotide
  Antisense strand to SEQ ID NO: 1841321
ucugagcucauacuaagaa

SEQ ID NO: 1841323 - RNA, 19 nt, Artificial Sequence
  Description of Artificial Sequence: Synthetic oligonucleotide
  Sense strand starting at position 3545 of SEQ ID NO: 1563909
uuaguaugagcucagaagu

SEQ ID NO: 1841324 - RNA, 19 nt, Artificial Sequence
  Description of Artificial Sequence: Synthetic oligonucleotide
  Antisense strand to SEQ ID NO: 1841323
acuucugagcucauacuaa

SEQ ID NO: 1841325 - RNA, 19 nt, Artificial Sequence
  Description of Artificial Sequence: Synthetic oligonucleotide
  Sense strand starting at position 3555 of SEQ ID NO: 1563909
cucagaaguuaaguacaua

SEQ ID NO: 1841326 - RNA, 19 nt, Artificial Sequence
  Description of Artificial Sequence: Synthetic oligonucleotide
  Antisense strand to SEQ ID NO: 1841325
uauguacuuaacuucugag

SEQ ID NO: 1841327 - RNA, 19 nt, Artificial Sequence
  Description of Artificial Sequence: Synthetic oligonucleotide
  Sense strand starting at position 3566 of SEQ ID NO: 1563909
aguacauauuaugcagaaa

SEQ ID NO: 1841328 - RNA, 19 nt, Artificial Sequence
  Description of Artificial Sequence: Synthetic oligonucleotide
  Antisense strand to SEQ ID NO: 1841327
uuucugcauaauauguacu

SEQ ID NO: 1841329 - RNA, 19 nt, Artificial Sequence
  Description of Artificial Sequence: Synthetic oligonucleotide
  Sense strand starting at position 3647 of SEQ ID NO: 1563909
gggugugugaaacaacuua

SEQ ID NO: 1841330 - RNA, 19 nt, Artificial Sequence
  Description of Artificial Sequence: Synthetic oligonucleotide
  Antisense strand to SEQ ID NO: 1841329
uaaguuguuucacacaccc

SEQ ID NO: 1841331 - RNA, 19 nt, Artificial Sequence
  Description of Artificial Sequence: Synthetic oligonucleotide
  Sense strand starting at position 3676 of SEQ ID NO: 1563909
gaaccuuauccugagugca

SEQ ID NO: 1841332 - RNA, 19 nt, Artificial Sequence
  Description of Artificial Sequence: Synthetic oligonucleotide
  Antisense strand to SEQ ID NO: 1841331
ugcacucaggauaagguuc

SEQ ID NO: 1841333 - RNA, 19 nt, Artificial Sequence
  Description of Artificial Sequence: Synthetic oligonucleotide
  Sense strand starting at position 3678 of SEQ ID NO: 1563909
accuuauccugagugcaaa

SEQ ID NO: 1841334 - RNA, 19 nt, Artificial Sequence
  Description of Artificial Sequence: Synthetic oligonucleotide
  Antisense strand to SEQ ID NO: 1841333
uuugcacucaggauaaggu

SEQ ID NO: 1841335 - RNA, 19 nt, Artificial Sequence
  Description of Artificial Sequence: Synthetic oligonucleotide
  Sense strand starting at position 3793 of SEQ ID NO: 1563909
ugauaucuguuguuuauga

SEQ ID NO: 1841336 - RNA, 19 nt, Artificial Sequence
  Description of Artificial Sequence: Synthetic oligonucleotide
  Antisense strand to SEQ ID NO: 1841335
ucauaaacaacagauauca

SEQ ID NO: 1841337 - RNA, 19 nt, Artificial Sequence
  Description of Artificial Sequence: Synthetic oligonucleotide
  Sense strand starting at position 3794 of SEQ ID NO: 1563909
gauaucuguuguuuaugau

SEQ ID NO: 1841338 - RNA, 19 nt, Artificial Sequence
  Description of Artificial Sequence: Synthetic oligonucleotide
  Antisense strand to SEQ ID NO: 1841337
aucauaaacaacagauauc

SEQ ID NO: 1841339 - RNA, 19 nt, Artificial Sequence
  Description of Artificial Sequence: Synthetic oligonucleotide
  Sense strand starting at position 3797 of SEQ ID NO: 1563909
aucuguuguuuaugauaag

SEQ ID NO: 1841340 - RNA, 19 nt, Artificial Sequence
  Description of Artificial Sequence: Synthetic oligonucleotide
  Antisense strand to SEQ ID NO: 1841339
cuuaucauaaacaacagau

SEQ ID NO: 1841341 - RNA, 19 nt, Artificial Sequence
  Description of Artificial Sequence: Synthetic oligonucleotide
  Sense strand starting at position 3800 of SEQ ID NO: 1563909
uguuguuuaugauaaggaa

SEQ ID NO: 1841342 - RNA, 19 nt, Artificial Sequence
  Description of Artificial Sequence: Synthetic oligonucleotide
  Antisense strand to SEQ ID NO: 1841341
uuccuuaucauaaacaaca

SEQ ID NO: 1841343 - RNA, 19 nt, Artificial Sequence
  Description of Artificial Sequence: Synthetic oligonucleotide
  Sense strand starting at position 3955 of SEQ ID NO: 1563909
cccaguguguauguaguua

SEQ ID NO: 1841344 - RNA, 19 nt, Artificial Sequence
  Description of Artificial Sequence: Synthetic oligonucleotide
  Antisense strand to SEQ ID NO: 1841343
uaacuacauacacacuggg

SEQ ID NO: 1841345 - RNA, 19 nt, Artificial Sequence
  Description of Artificial Sequence: Synthetic oligonucleotide
  Sense strand starting at position 3960 of SEQ ID NO: 1563909
uguguauguaguuagacgu

SEQ ID NO: 1841346 - RNA, 19 nt, Artificial Sequence
  Description of Artificial Sequence: Synthetic oligonucleotide
  Antisense strand to SEQ ID NO: 1841345
acgucuaacuacauacaca

SEQ ID NO: 1841347 - RNA, 19 nt, Artificial Sequence
  Description of Artificial Sequence: Synthetic oligonucleotide
  Sense strand starting at position 3961 of SEQ ID NO: 1563909
guguauguaguuagacguu

SEQ ID NO: 1841348 - RNA, 19 nt, Artificial Sequence
  Description of Artificial Sequence: Synthetic oligonucleotide
  Antisense strand to SEQ ID NO: 1841347
aacgucuaacuacauacac

SEQ ID NO: 1841349 - RNA, 19 nt, Artificial Sequence
  Description of Artificial Sequence: Synthetic oligonucleotide
  Sense strand starting at position 3982 of SEQ ID NO: 1563909
ggagauauguauuccauau

SEQ ID NO: 1841350 - RNA, 19 nt, Artificial Sequence
  Description of Artificial Sequence: Synthetic oligonucleotide
  Antisense strand to SEQ ID NO: 1841349
auauggaauacauaucucc

SEQ ID NO: 1841351 - RNA, 19 nt, Artificial Sequence
  Description of Artificial Sequence: Synthetic oligonucleotide
  Sense strand starting at position 73 of SEQ ID NO: 1563910
aguuguacucaccaggaua

SEQ ID NO: 1841352 - RNA, 19 nt, Artificial Sequence
  Description of Artificial Sequence: Synthetic oligonucleotide
  Antisense strand to SEQ ID NO: 1841351
uauccuggugaguacaacu

SEQ ID NO: 1841353 - RNA, 19 nt, Artificial Sequence
  Description of Artificial Sequence: Synthetic oligonucleotide
  Sense strand starting at position 75 of SEQ ID NO: 1563910
uuguacucaccaggauaaa

SEQ ID NO: 1841354 - RNA, 19 nt, Artificial Sequence
  Description of Artificial Sequence: Synthetic oligonucleotide
  Antisense strand to SEQ ID NO: 1841353
uuuauccuggugaguacaa

SEQ ID NO: 1841355 - RNA, 19 nt, Artificial Sequence
  Description of Artificial Sequence: Synthetic oligonucleotide
  Sense strand starting at position 246 of SEQ ID NO: 1563910
gggaaaguguggccaauca

SEQ ID NO: 1841356 - RNA, 19 nt, Artificial Sequence
  Description of Artificial Sequence: Synthetic oligonucleotide
  Antisense strand to SEQ ID NO: 1841355
ugauuggccacacuuuccc

SEQ ID NO: 1841357 - RNA, 19 nt, Artificial Sequence
  Description of Artificial Sequence: Synthetic oligonucleotide
  Sense strand starting at position 285 of SEQ ID NO: 1563910
gcaggaggauugcaaauaa

SEQ ID NO: 1841358 - RNA, 19 nt, Artificial Sequence
  Description of Artificial Sequence: Synthetic oligonucleotide
  Antisense strand to SEQ ID NO: 1841357
uuauuugcaauccuccugc

SEQ ID NO: 1841359 - RNA, 19 nt, Artificial Sequence
  Description of Artificial Sequence: Synthetic oligonucleotide
  Sense strand starting at position 347 of SEQ ID NO: 1563910
uuguaaacaugagugauaa

SEQ ID NO: 1841360 - RNA, 19 nt, Artificial Sequence
  Description of Artificial Sequence: Synthetic oligonucleotide
  Antisense strand to SEQ ID NO: 1841359
uuaucacucauguuuacaa

SEQ ID NO: 1841361 - RNA, 19 nt, Artificial Sequence
  Description of Artificial Sequence: Synthetic oligonucleotide
  Sense strand starting at position 348 of SEQ ID NO: 1563910
uguaaacaugagugauaau

SEQ ID NO: 1841362 - RNA, 19 nt, Artificial Sequence
  Description of Artificial Sequence: Synthetic oligonucleotide
  Antisense strand to SEQ ID NO: 1841361
auuaucacucauguuuaca

SEQ ID NO: 1841363 - RNA, 19 nt, Artificial Sequence
  Description of Artificial Sequence: Synthetic oligonucleotide
  Sense strand starting at position 357 of SEQ ID NO: 1563910
gagugauaauuccuccagu

SEQ ID NO: 1841364 - RNA, 19 nt, Artificial Sequence
  Description of Artificial Sequence: Synthetic oligonucleotide
  Antisense strand to SEQ ID NO: 1841363
acuggaggaauuaucacuc

SEQ ID NO: 1841365 - RNA, 19 nt, Artificial Sequence
  Description of Artificial Sequence: Synthetic oligonucleotide
  Sense strand starting at position 358 of SEQ ID NO: 1563910
agugauaauuccuccaguc

SEQ ID NO: 1841366 - RNA, 19 nt, Artificial Sequence
  Description of Artificial Sequence: Synthetic oligonucleotide
  Antisense strand to SEQ ID NO: 1841365
gacuggaggaauuaucacu

SEQ ID NO: 1841367 - RNA, 19 nt, Artificial Sequence
  Description of Artificial Sequence: Synthetic oligonucleotide
  Sense strand starting at position 392 of SEQ ID NO: 1563910
gggucccgguccuguuaaa

SEQ ID NO: 1841368 - RNA, 19 nt, Artificial Sequence
  Description of Artificial Sequence: Synthetic oligonucleotide
  Antisense strand to SEQ ID NO: 1841367
uuuaacaggaccgggaccc

SEQ ID NO: 1841369 - RNA, 19 nt, Artificial Sequence
  Description of Artificial Sequence: Synthetic oligonucleotide
  Sense strand starting at position 532 of SEQ ID NO: 1563910
aggaaugcaucuguaauaa

SEQ ID NO: 1841370 - RNA, 19 nt, Artificial Sequence
  Description of Artificial Sequence: Synthetic oligonucleotide
  Antisense strand to SEQ ID NO: 1841369
uuauuacagaugcauuccu

SEQ ID NO: 1841371 - RNA, 19 nt, Artificial Sequence
  Description of Artificial Sequence: Synthetic oligonucleotide
  Sense strand starting at position 554 of SEQ ID NO: 1563910
gaagguuuauuauuccagu

SEQ ID NO: 1841372 - RNA, 19 nt, Artificial Sequence
  Description of Artificial Sequence: Synthetic oligonucleotide
  Antisense strand to SEQ ID NO: 1841371
acuggaauaauaaaccuuc

SEQ ID NO: 1841373 - RNA, 19 nt, Artificial Sequence
  Description of Artificial Sequence: Synthetic oligonucleotide
  Sense strand starting at position 557 of SEQ ID NO: 1563910
gguuuauuauuccaguuaa

SEQ ID NO: 1841374 - RNA, 19 nt, Artificial Sequence
  Description of Artificial Sequence: Synthetic oligonucleotide
  Antisense strand to SEQ ID NO: 1841373
uuaacuggaauaauaaacc

SEQ ID NO: 1841375 - RNA, 19 nt, Artificial Sequence
  Description of Artificial Sequence: Synthetic oligonucleotide
  Sense strand starting at position 577 of SEQ ID NO: 1563910
acugaaggauaguuagagu

SEQ ID NO: 1841376 - RNA, 19 nt, Artificial Sequence
  Description of Artificial Sequence: Synthetic oligonucleotide
  Antisense strand to SEQ ID NO: 1841375
acucuaacuauccuucagu

SEQ ID NO: 1841377 - RNA, 19 nt, Artificial Sequence
  Description of Artificial Sequence: Synthetic oligonucleotide
  Sense strand starting at position 580 of SEQ ID NO: 1563910
gaaggauaguuagaguuua

SEQ ID NO: 1841378 - RNA, 19 nt, Artificial Sequence
  Description of Artificial Sequence: Synthetic oligonucleotide
  Antisense strand to SEQ ID NO: 1841377
uaaacucuaacuauccuuc

SEQ ID NO: 1841379 - RNA, 19 nt, Artificial Sequence
  Description of Artificial Sequence: Synthetic oligonucleotide
  Sense strand starting at position 585 of SEQ ID NO: 1563910
auaguuagaguuuacucuu

SEQ ID NO: 1841380 - RNA, 19 nt, Artificial Sequence
  Description of Artificial Sequence: Synthetic oligonucleotide
  Antisense strand to SEQ ID NO: 1841379
aagaguaaacucuaacuau

SEQ ID NO: 1841381 - RNA, 19 nt, Artificial Sequence
  Description of Artificial Sequence: Synthetic oligonucleotide
  Sense strand starting at position 614 of SEQ ID NO: 1563910
gagccaguauuguuacgua

SEQ ID NO: 1841382 - RNA, 19 nt, Artificial Sequence
  Description of Artificial Sequence: Synthetic oligonucleotide
  Antisense strand to SEQ ID NO: 1841381
uacguaacaauacuggcuc

SEQ ID NO: 1841383 - RNA, 19 nt, Artificial Sequence
  Description of Artificial Sequence: Synthetic oligonucleotide
  Sense strand starting at position 617 of SEQ ID NO: 1563910
ccaguauuguuacguaucu

SEQ ID NO: 1841384 - RNA, 19 nt, Artificial Sequence
  Description of Artificial Sequence: Synthetic oligonucleotide
  Antisense strand to SEQ ID NO: 1841383
agauacguaacaauacugg

SEQ ID NO: 1841385 - RNA, 19 nt, Artificial Sequence
  Description of Artificial Sequence: Synthetic oligonucleotide
  Sense strand starting at position 979 of SEQ ID NO: 1563910
aagugcugggauuaguuaa

SEQ ID NO: 1841386 - RNA, 19 nt, Artificial Sequence
  Description of Artificial Sequence: Synthetic oligonucleotide
  Antisense strand to SEQ ID NO: 1841385
uuaacuaaucccagcacuu

SEQ ID NO: 1841387 - RNA, 19 nt, Artificial Sequence
  Description of Artificial Sequence: Synthetic oligonucleotide
  Sense strand starting at position 3112 of SEQ ID NO: 1563910
aauuuagagugagggcuaa

SEQ ID NO: 1841388 - RNA, 19 nt, Artificial Sequence
  Description of Artificial Sequence: Synthetic oligonucleotide
  Antisense strand to SEQ ID NO: 1841387
uuagcccucacucuaaauu

SEQ ID NO: 1841389 - RNA, 19 nt, Artificial Sequence
  Description of Artificial Sequence: Synthetic oligonucleotide
  Sense strand starting at position 3144 of SEQ ID NO: 1563910
gagggcauuugucagaaag

SEQ ID NO: 1841390 - RNA, 19 nt, Artificial Sequence
  Description of Artificial Sequence: Synthetic oligonucleotide
  Antisense strand to SEQ ID NO: 1841389
cuuucugacaaaugcccuc

SEQ ID NO: 1841391 - RNA, 19 nt, Artificial Sequence
  Description of Artificial Sequence: Synthetic oligonucleotide
  Sense strand starting at position 3146 of SEQ ID NO: 1563910
gggcauuugucagaaagcg

SEQ ID NO: 1841392 - RNA, 19 nt, Artificial Sequence
  Description of Artificial Sequence: Synthetic oligonucleotide
  Antisense strand to SEQ ID NO: 1841391
cgcuuucugacaaaugccc

SEQ ID NO: 1841393 - RNA, 19 nt, Artificial Sequence
  Description of Artificial Sequence: Synthetic oligonucleotide
  Sense strand starting at position 3174 of SEQ ID NO: 1563910
aguggaguggacuguauau

SEQ ID NO: 1841394 - RNA, 19 nt, Artificial Sequence
  Description of Artificial Sequence: Synthetic oligonucleotide
  Antisense strand to SEQ ID NO: 1841393
auauacaguccacuccacu

SEQ ID NO: 1841395 - RNA, 19 nt, Artificial Sequence
  Description of Artificial Sequence: Synthetic oligonucleotide
  Sense strand starting at position 3176 of SEQ ID NO: 1563910
uggaguggacuguauauau

SEQ ID NO: 1841396 - RNA, 19 nt, Artificial Sequence
  Description of Artificial Sequence: Synthetic oligonucleotide
  Antisense strand to SEQ ID NO: 1841395
auauauacaguccacucca

SEQ ID NO: 1841397 - RNA, 19 nt, Artificial Sequence
  Description of Artificial Sequence: Synthetic oligonucleotide
  Sense strand starting at position 3580 of SEQ ID NO: 1563910
ggaaaugcuuuauccugca

SEQ ID NO: 1841398 - RNA, 19 nt, Artificial Sequence
  Description of Artificial Sequence: Synthetic oligonucleotide
  Antisense strand to SEQ ID NO: 1841397
ugcaggauaaagcauuucc

SEQ ID NO: 1841399 - RNA, 19 nt, Artificial Sequence
  Description of Artificial Sequence: Synthetic oligonucleotide
  Sense strand starting at position 3585 of SEQ ID NO: 1563910
ugcuuuauccugcacaaug

SEQ ID NO: 1841400 - RNA, 19 nt, Artificial Sequence
  Description of Artificial Sequence: Synthetic oligonucleotide
  Antisense strand to SEQ ID NO: 1841399
cauugugcaggauaaagca

SEQ ID NO: 1841401 - RNA, 19 nt, Artificial Sequence
  Description of Artificial Sequence: Synthetic oligonucleotide
  Sense strand starting at position 3684 of SEQ ID NO: 1563910
gauacauacuagcucguuu

SEQ ID NO: 1841402 - RNA, 19 nt, Artificial Sequence
  Description of Artificial Sequence: Synthetic oligonucleotide
  Antisense strand to SEQ ID NO: 1841401
aaacgagcuaguauguauc

SEQ ID NO: 1841403 - RNA, 19 nt, Artificial Sequence
  Description of Artificial Sequence: Synthetic oligonucleotide
  Sense strand starting at position 29 of SEQ ID NO: 1563911
gggccuuauuucuuuggua

SEQ ID NO: 1841404 - RNA, 19 nt, Artificial Sequence
  Description of Artificial Sequence: Synthetic oligonucleotide
  Antisense strand to SEQ ID NO: 1841403
uaccaaagaaauaaggccc

SEQ ID NO: 1841405 - RNA, 19 nt, Artificial Sequence
  Description of Artificial Sequence: Synthetic oligonucleotide
  Sense strand starting at position 30 of SEQ ID NO: 1563911
ggccuuauuucuuugguac

SEQ ID NO: 1841406 - RNA, 19 nt, Artificial Sequence
  Description of Artificial Sequence: Synthetic oligonucleotide
  Antisense strand to SEQ ID NO: 1841405
guaccaaagaaauaaggcc

SEQ ID NO: 1841407 - RNA, 19 nt, Artificial Sequence
  Description of Artificial Sequence: Synthetic oligonucleotide
  Sense strand starting at position 31 of SEQ ID NO: 1563911
gccuuauuucuuugguacu

SEQ ID NO: 1841408 - RNA, 19 nt, Artificial Sequence
  Description of Artificial Sequence: Synthetic oligonucleotide
  Antisense strand to SEQ ID NO: 1841407
aguaccaaagaaauaaggc

SEQ ID NO: 1841409 - RNA, 19 nt, Artificial Sequence
  Description of Artificial Sequence: Synthetic oligonucleotide
  Sense strand starting at position 111 of SEQ ID NO: 1563911
uccugaauccacugaucug

SEQ ID NO: 1841410 - RNA, 19 nt, Artificial Sequence
  Description of Artificial Sequence: Synthetic oligonucleotide
  Antisense strand to SEQ ID NO: 1841409
cagaucaguggauucagga

SEQ ID NO: 1841411 - RNA, 19 nt, Artificial Sequence
  Description of Artificial Sequence: Synthetic oligonucleotide
  Sense strand starting at position 117 of SEQ ID NO: 1563911
auccacugaucuguaugaa

SEQ ID NO: 1841412 - RNA, 19 nt, Artificial Sequence
  Description of Artificial Sequence: Synthetic oligonucleotide
  Antisense strand to SEQ ID NO: 1841411
uucauacagaucaguggau

SEQ ID NO: 1841413 - RNA, 19 nt, Artificial Sequence
  Description of Artificial Sequence: Synthetic oligonucleotide
  Sense strand starting at position 332 of SEQ ID NO: 1563911
uggccugcccaucaaauaa

SEQ ID NO: 1841414 - RNA, 19 nt, Artificial Sequence
  Description of Artificial Sequence: Synthetic oligonucleotide
  Antisense strand to SEQ ID NO: 1841413
uuauuugaugggcaggcca

SEQ ID NO: 1841415 - RNA, 19 nt, Artificial Sequence
  Description of Artificial Sequence: Synthetic oligonucleotide
  Sense strand starting at position 510 of SEQ ID NO: 1563911
gagcgaucuuaaguaacaa

SEQ ID NO: 1841416 - RNA, 19 nt, Artificial Sequence
  Description of Artificial Sequence: Synthetic oligonucleotide
  Antisense strand to SEQ ID NO: 1841415
uuguuacuuaagaucgcuc

SEQ ID NO: 1841417 - RNA, 19 nt, Artificial Sequence
  Description of Artificial Sequence: Synthetic oligonucleotide
  Sense strand starting at position 580 of SEQ ID NO: 1563911
gagagaguguucucagaca

SEQ ID NO: 1841418 - RNA, 19 nt, Artificial Sequence
  Description of Artificial Sequence: Synthetic oligonucleotide
  Antisense strand to SEQ ID NO: 1841417
ugucugagaacacucucuc

SEQ ID NO: 1841419 - RNA, 19 nt, Artificial Sequence
  Description of Artificial Sequence: Synthetic oligonucleotide
  Sense strand starting at position 712 of SEQ ID NO: 1563911
gaggcaaaugugcagugaa

SEQ ID NO: 1841420 - RNA, 19 nt, Artificial Sequence
  Description of Artificial Sequence: Synthetic oligonucleotide
  Antisense strand to SEQ ID NO: 1841419
uucacugcacauuugccuc

SEQ ID NO: 1841421 - RNA, 19 nt, Artificial Sequence
  Description of Artificial Sequence: Synthetic oligonucleotide
  Sense strand starting at position 804 of SEQ ID NO: 1563911
agcgcauagcaagaaauga

SEQ ID NO: 1841422 - RNA, 19 nt, Artificial Sequence
  Description of Artificial Sequence: Synthetic oligonucleotide
  Antisense strand to SEQ ID NO: 1841421
ucauuucuugcuaugcgcu

SEQ ID NO: 1841423 - RNA, 19 nt, Artificial Sequence
  Description of Artificial Sequence: Synthetic oligonucleotide
  Sense strand starting at position 829 of SEQ ID NO: 1563911
ggcacuguccuugacauua

SEQ ID NO: 1841424 - RNA, 19 nt, Artificial Sequence
  Description of Artificial Sequence: Synthetic oligonucleotide
  Antisense strand to SEQ ID NO: 1841423
uaaugucaaggacagugcc

SEQ ID NO: 1841425 - RNA, 19 nt, Artificial Sequence
  Description of Artificial Sequence: Synthetic oligonucleotide
  Sense strand starting at position 843 of SEQ ID NO: 1563911
cauuaaggagccugaguua

SEQ ID NO: 1841426 - RNA, 19 nt, Artificial Sequence
  Description of Artificial Sequence: Synthetic oligonucleotide
  Antisense strand to SEQ ID NO: 1841425
uaacucaggcuccuuaaug

SEQ ID NO: 1841427 - RNA, 19 nt, Artificial Sequence
  Description of Artificial Sequence: Synthetic oligonucleotide
  Sense strand starting at position 846 of SEQ ID NO: 1563911
uaaggagccugaguuacaa

SEQ ID NO: 1841428 - RNA, 19 nt, Artificial Sequence
  Description of Artificial Sequence: Synthetic oligonucleotide
  Antisense strand to SEQ ID NO: 1841427
uuguaacucaggcuccuua

SEQ ID NO: 1841429 - RNA, 19 nt, Artificial Sequence
  Description of Artificial Sequence: Synthetic oligonucleotide
  Sense strand starting at position 941 of SEQ ID NO: 1563911
ggccaaacuuaugugauaa

SEQ ID NO: 1841430 - RNA, 19 nt, Artificial Sequence
  Description of Artificial Sequence: Synthetic oligonucleotide
  Antisense strand to SEQ ID NO: 1841429
uuaucacauaaguuuggcc

SEQ ID NO: 1841431 - RNA, 19 nt, Artificial Sequence
  Description of Artificial Sequence: Synthetic oligonucleotide
  Sense strand starting at position 1009 of SEQ ID NO: 1563911
cccacagugguuuaacaga

SEQ ID NO: 1841432 - RNA, 19 nt, Artificial Sequence
  Description of Artificial Sequence: Synthetic oligonucleotide
  Antisense strand to SEQ ID NO: 1841431
ucuguuaaaccacuguggg

SEQ ID NO: 1841433 - RNA, 19 nt, Artificial Sequence
  Description of Artificial Sequence: Synthetic oligonucleotide
  Sense strand starting at position 1031 of SEQ ID NO: 1563911
guguaaggccauugaagau

SEQ ID NO: 1841434 - RNA, 19 nt, Artificial Sequence
  Description of Artificial Sequence: Synthetic oligonucleotide
  Antisense strand to SEQ ID NO: 1841433
aucuucaauggccuuacac

SEQ ID NO: 1841435 - RNA, 19 nt, Artificial Sequence
  Description of Artificial Sequence: Synthetic oligonucleotide
  Sense strand starting at position 1037 of SEQ ID NO: 1563911
ggccauugaagauguaaca

SEQ ID NO: 1841436 - RNA, 19 nt, Artificial Sequence
  Description of Artificial Sequence: Synthetic oligonucleotide
  Antisense strand to SEQ ID NO: 1841435
uguuacaucuucaauggcc

SEQ ID NO: 1841437 - RNA, 19 nt, Artificial Sequence
  Description of Artificial Sequence: Synthetic oligonucleotide
  Sense strand starting at position 1142 of SEQ ID NO: 1563911
guaaucucaggaugaaggu

SEQ ID NO: 1841438 - RNA, 19 nt, Artificial Sequence
  Description of Artificial Sequence: Synthetic oligonucleotide
  Antisense strand to SEQ ID NO: 1841437
accuucauccugagauuac

SEQ ID NO: 1841439 - RNA, 19 nt, Artificial Sequence
  Description of Artificial Sequence: Synthetic oligonucleotide
  Sense strand starting at position 1298 of SEQ ID NO: 1563911
ggaaucucuacuggagcua

SEQ ID NO: 1841440 - RNA, 19 nt, Artificial Sequence
  Description of Artificial Sequence: Synthetic oligonucleotide
  Antisense strand to SEQ ID NO: 1841439
uagcuccaguagagauucc

SEQ ID NO: 1841441 - RNA, 19 nt, Artificial Sequence
  Description of Artificial Sequence: Synthetic oligonucleotide
  Sense strand starting at position 1369 of SEQ ID NO: 1563911
aagaaaggguuguccucuu

SEQ ID NO: 1841442 - RNA, 19 nt, Artificial Sequence
  Description of Artificial Sequence: Synthetic oligonucleotide
  Antisense strand to SEQ ID NO: 1841441
aagaggacaacccuuucuu

SEQ ID NO: 1841443 - RNA, 19 nt, Artificial Sequence
  Description of Artificial Sequence: Synthetic oligonucleotide
  Sense strand starting at position 1573 of SEQ ID NO: 1563911
ugggaaacauaguuaucuu

SEQ ID NO: 1841444 - RNA, 19 nt, Artificial Sequence
  Description of Artificial Sequence: Synthetic oligonucleotide
  Antisense strand to SEQ ID NO: 1841443
aagauaacuauguuuccca

SEQ ID NO: 1841445 - RNA, 19 nt, Artificial Sequence
  Description of Artificial Sequence: Synthetic oligonucleotide
  Sense strand starting at position 2456 of SEQ ID NO: 1563911
gcaaauauuugcgcacaca

SEQ ID NO: 1841446 - RNA, 19 nt, Artificial Sequence
  Description of Artificial Sequence: Synthetic oligonucleotide
  Antisense strand to SEQ ID NO: 1841445
ugugugcgcaaauauuugc

SEQ ID NO: 1841447 - RNA, 19 nt, Artificial Sequence
  Description of Artificial Sequence: Synthetic oligonucleotide
  Sense strand starting at position 2502 of SEQ ID NO: 1563911
aggcgauacaacuggaguu

SEQ ID NO: 1841448 - RNA, 19 nt, Artificial Sequence
  Description of Artificial Sequence: Synthetic oligonucleotide
  Antisense strand to SEQ ID NO: 1841447
aacuccaguuguaucgccu

SEQ ID NO: 1841449 - RNA, 19 nt, Artificial Sequence
  Description of Artificial Sequence: Synthetic oligonucleotide
  Sense strand starting at position 2523 of SEQ ID NO: 1563911
cucuuugcagguuacaaau

SEQ ID NO: 1841450 - RNA, 19 nt, Artificial Sequence
  Description of Artificial Sequence: Synthetic oligonucleotide
  Antisense strand to SEQ ID NO: 1841449
auuuguaaccugcaaagag

SEQ ID NO: 1841451 - RNA, 19 nt, Artificial Sequence
  Description of Artificial Sequence: Synthetic oligonucleotide
  Sense strand starting at position 2606 of SEQ ID NO: 1563911
ucucgugaugcugauaaca

SEQ ID NO: 1841452 - RNA, 19 nt, Artificial Sequence
  Description of Artificial Sequence: Synthetic oligonucleotide
  Antisense strand to SEQ ID NO: 1841451
uguuaucagcaucacgaga

SEQ ID NO: 1841453 - RNA, 19 nt, Artificial Sequence
  Description of Artificial Sequence: Synthetic oligonucleotide
  Sense strand starting at position 2614 of SEQ ID NO: 1563911
ugcugauaacagcaguaau

SEQ ID NO: 1841454 - RNA, 19 nt, Artificial Sequence
  Description of Artificial Sequence: Synthetic oligonucleotide
  Antisense strand to SEQ ID NO: 1841453
auuacugcuguuaucagca

SEQ ID NO: 1841455 - RNA, 19 nt, Artificial Sequence
  Description of Artificial Sequence: Synthetic oligonucleotide
  Sense strand starting at position 2694 of SEQ ID NO: 1563911
aucuuccucuuggcaagaa

SEQ ID NO: 1841456 - RNA, 19 nt, Artificial Sequence
  Description of Artificial Sequence: Synthetic oligonucleotide
  Antisense strand to SEQ ID NO: 1841455
uucuugccaagaggaagau

SEQ ID NO: 1841457 - RNA, 19 nt, Artificial Sequence
  Description of Artificial Sequence: Synthetic oligonucleotide
  Sense strand starting at position 2718 of SEQ ID NO: 1563911
gaguuuagguacuuccaca

SEQ ID NO: 1841458 - RNA, 19 nt, Artificial Sequence
  Description of Artificial Sequence: Synthetic oligonucleotide
  Antisense strand to SEQ ID NO: 1841457
uguggaaguaccuaaacuc

SEQ ID NO: 1841459 - RNA, 19 nt, Artificial Sequence
  Description of Artificial Sequence: Synthetic oligonucleotide
  Sense strand starting at position 2743 of SEQ ID NO: 1563911
cccuaauagccuuauguug

SEQ ID NO: 1841460 - RNA, 19 nt, Artificial Sequence
  Description of Artificial Sequence: Synthetic oligonucleotide
  Antisense strand to SEQ ID NO: 1841459
caacauaaggcuauuaggg

SEQ ID NO: 1841461 - RNA, 19 nt, Artificial Sequence
  Description of Artificial Sequence: Synthetic oligonucleotide
  Sense strand starting at position 2758 of SEQ ID NO: 1563911
guugucauggcacaugauu

SEQ ID NO: 1841462 - RNA, 19 nt, Artificial Sequence
  Description of Artificial Sequence: Synthetic oligonucleotide
  Antisense strand to SEQ ID NO: 1841461
aaucaugugccaugacaac

SEQ ID NO: 1841463 - RNA, 19 nt, Artificial Sequence
  Description of Artificial Sequence: Synthetic oligonucleotide
  Sense strand starting at position 2879 of SEQ ID NO: 1563911
cucugcaguccagagagaa

SEQ ID NO: 1841464 - RNA, 19 nt, Artificial Sequence
  Description of Artificial Sequence: Synthetic oligonucleotide
  Antisense strand to SEQ ID NO: 1841463
uucucucuggacugcagag

SEQ ID NO: 1841465 - RNA, 19 nt, Artificial Sequence
  Description of Artificial Sequence: Synthetic oligonucleotide
  Sense strand starting at position 2967 of SEQ ID NO: 1563911
ugugacucccuguauugga

SEQ ID NO: 1841466 - RNA, 19 nt, Artificial Sequence
  Description of Artificial Sequence: Synthetic oligonucleotide
  Antisense strand to SEQ ID NO: 1841465
uccaauacagggagucaca

SEQ ID NO: 1841467 - RNA, 19 nt, Artificial Sequence
  Description of Artificial Sequence: Synthetic oligonucleotide
  Sense strand starting at position 2983 of SEQ ID NO: 1563911
ggauacuucugcuccuuaa

SEQ ID NO: 1841468 - RNA, 19 nt, Artificial Sequence
  Description of Artificial Sequence: Synthetic oligonucleotide
  Antisense strand to SEQ ID NO: 1841467
uuaaggagcagaaguaucc

SEQ ID NO: 1841469 - RNA, 19 nt, Artificial Sequence
  Description of Artificial Sequence: Synthetic oligonucleotide
  Sense strand starting at position 3333 of SEQ ID NO: 1563911
gggauuuguguggguucuu

SEQ ID NO: 1841470 - RNA, 19 nt, Artificial Sequence
  Description of Artificial Sequence: Synthetic oligonucleotide
  Antisense strand to SEQ ID NO: 1841469
aagaacccacacaaauccc

SEQ ID NO: 1841471 - RNA, 19 nt, Artificial Sequence
  Description of Artificial Sequence: Synthetic oligonucleotide
  Sense strand starting at position 3334 of SEQ ID NO: 1563911
ggauuuguguggguucuua

SEQ ID NO: 1841472 - RNA, 19 nt, Artificial Sequence
  Description of Artificial Sequence: Synthetic oligonucleotide
  Antisense strand to SEQ ID NO: 1841471
uaagaacccacacaaaucc

SEQ ID NO: 1841473 - RNA, 19 nt, Artificial Sequence
  Description of Artificial Sequence: Synthetic oligonucleotide
  Sense strand starting at position 3455 of SEQ ID NO: 1563911
aaagacugucgcgaaugaa

SEQ ID NO: 1841474 - RNA, 19 nt, Artificial Sequence
  Description of Artificial Sequence: Synthetic oligonucleotide
  Antisense strand to SEQ ID NO: 1841473
uucauucgcgacagucuuu

SEQ ID NO: 1841475 - RNA, 19 nt, Artificial Sequence
  Description of Artificial Sequence: Synthetic oligonucleotide
  Sense strand starting at position 3779 of SEQ ID NO: 1563911
gaguuuggugcucaacaaa

SEQ ID NO: 1841476 - RNA, 19 nt, Artificial Sequence
  Description of Artificial Sequence: Synthetic oligonucleotide
  Antisense strand to SEQ ID NO: 1841475
uuuguugagcaccaaacuc

SEQ ID NO: 1841477 - RNA, 19 nt, Artificial Sequence
  Description of Artificial Sequence: Synthetic oligonucleotide
  Sense strand starting at position 3852 of SEQ ID NO: 1563911
guaggucuagaauguaaca

SEQ ID NO: 1841478 - RNA, 19 nt, Artificial Sequence
  Description of Artificial Sequence: Synthetic oligonucleotide
  Antisense strand to SEQ ID NO: 1841477
uguuacauucuagaccuac

SEQ ID NO: 1841479 - RNA, 19 nt, Artificial Sequence
  Description of Artificial Sequence: Synthetic oligonucleotide
  Sense strand starting at position 3941 of SEQ ID NO: 1563911
gcccuauucccauagguag

SEQ ID NO: 1841480 - RNA, 19 nt, Artificial Sequence
  Description of Artificial Sequence: Synthetic oligonucleotide
  Antisense strand to SEQ ID NO: 1841479
cuaccuaugggaauagggc

SEQ ID NO: 1841481 - RNA, 19 nt, Artificial Sequence
  Description of Artificial Sequence: Synthetic oligonucleotide
  Sense strand starting at position 3976 of SEQ ID NO: 1563911
agaagagaauuagaagaca

SEQ ID NO: 1841482 - RNA, 19 nt, Artificial Sequence
  Description of Artificial Sequence: Synthetic oligonucleotide
  Antisense strand to SEQ ID NO: 1841481
ugucuucuaauucucuucu

SEQ ID NO: 1841483 - RNA, 19 nt, Artificial Sequence
  Description of Artificial Sequence: Synthetic oligonucleotide
  Sense strand starting at position 36 of SEQ ID NO: 1563912
cugggucguuccuaaauga

SEQ ID NO: 1841484 - RNA, 19 nt, Artificial Sequence
  Description of Artificial Sequence: Synthetic oligonucleotide
  Antisense strand to SEQ ID NO: 1841483
ucauuuaggaacgacccag

SEQ ID NO: 1841485 - RNA, 19 nt, Artificial Sequence
  Description of Artificial Sequence: Synthetic oligonucleotide
  Sense strand starting at position 264 of SEQ ID NO: 1563912
ccaguaaauuugggcgaca

SEQ ID NO: 1841486 - RNA, 19 nt, Artificial Sequence
  Description of Artificial Sequence: Synthetic oligonucleotide
  Antisense strand to SEQ ID NO: 1841485
ugucgcccaaauuuacugg

SEQ ID NO: 1841487 - RNA, 19 nt, Artificial Sequence
  Description of Artificial Sequence: Synthetic oligonucleotide
  Sense strand starting at position 266 of SEQ ID NO: 1563912
aguaaauuugggcgacagu

SEQ ID NO: 1841488 - RNA, 19 nt, Artificial Sequence
  Description of Artificial Sequence: Synthetic oligonucleotide
  Antisense strand to SEQ ID NO: 1841487
acugucgcccaaauuuacu

SEQ ID NO: 1841489 - RNA, 19 nt, Artificial Sequence
  Description of Artificial Sequence: Synthetic oligonucleotide
  Sense strand starting at position 298 of SEQ ID NO: 1563912
ggaagauagucugugggau

SEQ ID NO: 1841490 - RNA, 19 nt, Artificial Sequence
  Description of Artificial Sequence: Synthetic oligonucleotide
  Antisense strand to SEQ ID NO: 1841489
aucccacagacuaucuucc

SEQ ID NO: 1841491 - RNA, 19 nt, Artificial Sequence
  Description of Artificial Sequence: Synthetic oligonucleotide
  Sense strand starting at position 299 of SEQ ID NO: 1563912
gaagauagucugugggauc

SEQ ID NO: 1841492 - RNA, 19 nt, Artificial Sequence
  Description of Artificial Sequence: Synthetic oligonucleotide
  Antisense strand to SEQ ID NO: 1841491
gaucccacagacuaucuuc

SEQ ID NO: 1841493 - RNA, 19 nt, Artificial Sequence
  Description of Artificial Sequence: Synthetic oligonucleotide
  Sense strand starting at position 2158 of SEQ ID NO: 1563912
gagcgauugcgcccgggau

SEQ ID NO: 1841494 - RNA, 19 nt, Artificial Sequence
  Description of Artificial Sequence: Synthetic oligonucleotide
  Antisense strand to SEQ ID NO: 1841493
aucccgggcgcaaucgcuc

SEQ ID NO: 1841495 - RNA, 19 nt, Artificial Sequence
  Description of Artificial Sequence: Synthetic oligonucleotide
  Sense strand starting at position 2372 of SEQ ID NO: 1563912
gcgcguucaggcgcaaaga

SEQ ID NO: 1841496 - RNA, 19 nt, Artificial Sequence
  Description of Artificial Sequence: Synthetic oligonucleotide
  Antisense strand to SEQ ID NO: 1841495
ucuuugcgccugaacgcgc

SEQ ID NO: 1841497 - RNA, 19 nt, Artificial Sequence
  Description of Artificial Sequence: Synthetic oligonucleotide
  Sense strand starting at position 2517 of SEQ ID NO: 1563912
gcagauuuggcguguugga

SEQ ID NO: 1841498 - RNA, 19 nt, Artificial Sequence
  Description of Artificial Sequence: Synthetic oligonucleotide
  Antisense strand to SEQ ID NO: 1841497
uccaacacgccaaaucugc

SEQ ID NO: 1841499 - RNA, 19 nt, Artificial Sequence
  Description of Artificial Sequence: Synthetic oligonucleotide
  Sense strand starting at position 2525 of SEQ ID NO: 1563912
ggcguguuggagcaaguuu

SEQ ID NO: 1841500 - RNA, 19 nt, Artificial Sequence
  Description of Artificial Sequence: Synthetic oligonucleotide
  Antisense strand to SEQ ID NO: 1841499
aaacuugcuccaacacgcc

SEQ ID NO: 1841501 - RNA, 19 nt, Artificial Sequence
  Description of Artificial Sequence: Synthetic oligonucleotide
  Sense strand starting at position 2546 of SEQ ID NO: 1563912
cgccgaauuccagcucugu

SEQ ID NO: 1841502 - RNA, 19 nt, Artificial Sequence
  Description of Artificial Sequence: Synthetic oligonucleotide
  Antisense strand to SEQ ID NO: 1841501
acagagcuggaauucggcg

SEQ ID NO: 1841503 - RNA, 19 nt, Artificial Sequence
  Description of Artificial Sequence: Synthetic oligonucleotide
  Sense strand starting at position 2552 of SEQ ID NO: 1563912
auuccagcucuguacaaga

SEQ ID NO: 1841504 - RNA, 19 nt, Artificial Sequence
  Description of Artificial Sequence: Synthetic oligonucleotide
  Antisense strand to SEQ ID NO: 1841503
ucuuguacagagcuggaau

SEQ ID NO: 1841505 - RNA, 19 nt, Artificial Sequence
  Description of Artificial Sequence: Synthetic oligonucleotide
  Sense strand starting at position 2595 of SEQ ID NO: 1563912
ugggcugcuccuuggagau

SEQ ID NO: 1841506 - RNA, 19 nt, Artificial Sequence
  Description of Artificial Sequence: Synthetic oligonucleotide
  Antisense strand to SEQ ID NO: 1841505
aucuccaaggagcagccca

SEQ ID NO: 1841507 - RNA, 19 nt, Artificial Sequence
  Description of Artificial Sequence: Synthetic oligonucleotide
  Sense strand starting at position 2740 of SEQ ID NO: 1563912
gggcacgggcucuauagaa

SEQ ID NO: 1841508 - RNA, 19 nt, Artificial Sequence
  Description of Artificial Sequence: Synthetic oligonucleotide
  Antisense strand to SEQ ID NO: 1841507
uucuauagagcccgugccc

SEQ ID NO: 1841509 - RNA, 19 nt, Artificial Sequence
  Description of Artificial Sequence: Synthetic oligonucleotide
  Sense strand starting at position 2750 of SEQ ID NO: 1563912
ucuauagaauaucgugaau

SEQ ID NO: 1841510 - RNA, 19 nt, Artificial Sequence
  Description of Artificial Sequence: Synthetic oligonucleotide
  Antisense strand to SEQ ID NO: 1841509
auucacgauauucuauaga

SEQ ID NO: 1841511 - RNA, 19 nt, Artificial Sequence
  Description of Artificial Sequence: Synthetic oligonucleotide
  Sense strand starting at position 2752 of SEQ ID NO: 1563912
uauagaauaucgugaauga

SEQ ID NO: 1841512 - RNA, 19 nt, Artificial Sequence
  Description of Artificial Sequence: Synthetic oligonucleotide
  Antisense strand to SEQ ID NO: 1841511
ucauucacgauauucuaua

SEQ ID NO: 1841513 - RNA, 19 nt, Artificial Sequence
  Description of Artificial Sequence: Synthetic oligonucleotide
  Sense strand starting at position 2822 of SEQ ID NO: 1563912
uugcacguugggugagaua

SEQ ID NO: 1841514 - RNA, 19 nt, Artificial Sequence
  Description of Artificial Sequence: Synthetic oligonucleotide
  Antisense strand to SEQ ID NO: 1841513
uaucucacccaacgugcaa

SEQ ID NO: 1841515 - RNA, 19 nt, Artificial Sequence
  Description of Artificial Sequence: Synthetic oligonucleotide
  Sense strand starting at position 2831 of SEQ ID NO: 1563912
gggugagauaaacggcauu

SEQ ID NO: 1841516 - RNA, 19 nt, Artificial Sequence
  Description of Artificial Sequence: Synthetic oligonucleotide
  Antisense strand to SEQ ID NO: 1841515
aaugccguuuaucucaccc

SEQ ID NO: 1841517 - RNA, 19 nt, Artificial Sequence
  Description of Artificial Sequence: Synthetic oligonucleotide
  Sense strand starting at position 2862 of SEQ ID NO: 1563912
cccuacugugcugaucaua

SEQ ID NO: 1841518 - RNA, 19 nt, Artificial Sequence
  Description of Artificial Sequence: Synthetic oligonucleotide
  Antisense strand to SEQ ID NO: 1841517
uaugaucagcacaguaggg

SEQ ID NO: 1841519 - RNA, 19 nt, Artificial Sequence
  Description of Artificial Sequence: Synthetic oligonucleotide
  Sense strand starting at position 2895 of SEQ ID NO: 1563912
aguucuccaucagagagau

SEQ ID NO: 1841520 - RNA, 19 nt, Artificial Sequence
  Description of Artificial Sequence: Synthetic oligonucleotide
  Antisense strand to SEQ ID NO: 1841519
aucucucugauggagaacu

SEQ ID NO: 1841521 - RNA, 19 nt, Artificial Sequence
  Description of Artificial Sequence: Synthetic oligonucleotide
  Sense strand starting at position 3008 of SEQ ID NO: 1563912
ggcuguaugccgucaguaa

SEQ ID NO: 1841522 - RNA, 19 nt, Artificial Sequence
  Description of Artificial Sequence: Synthetic oligonucleotide
  Antisense strand to SEQ ID NO: 1841521
uuacugacggcauacagcc

SEQ ID NO: 1841523 - RNA, 19 nt, Artificial Sequence
  Description of Artificial Sequence: Synthetic oligonucleotide
  Sense strand starting at position 3009 of SEQ ID NO: 1563912
gcuguaugccgucaguaaa

SEQ ID NO: 1841524 - RNA, 19 nt, Artificial Sequence
  Description of Artificial Sequence: Synthetic oligonucleotide
  Antisense strand to SEQ ID NO: 1841523
uuuacugacggcauacagc

SEQ ID NO: 1841525 - RNA, 19 nt, Artificial Sequence
  Description of Artificial Sequence: Synthetic oligonucleotide
  Sense strand starting at position 3111 of SEQ ID NO: 1563912
caagccagaucuugggaau

SEQ ID NO: 1841526 - RNA, 19 nt, Artificial Sequence
  Description of Artificial Sequence: Synthetic oligonucleotide
  Antisense strand to SEQ ID NO: 1841525
auucccaagaucuggcuug

SEQ ID NO: 1841527 - RNA, 19 nt, Artificial Sequence
  Description of Artificial Sequence: Synthetic oligonucleotide
  Sense strand starting at position 3112 of SEQ ID NO: 1563912
aagccagaucuugggaaug

SEQ ID NO: 1841528 - RNA, 19 nt, Artificial Sequence
  Description of Artificial Sequence: Synthetic oligonucleotide
  Antisense strand to SEQ ID NO: 1841527
cauucccaagaucuggcuu

SEQ ID NO: 1841529 - RNA, 19 nt, Artificial Sequence
  Description of Artificial Sequence: Synthetic oligonucleotide
  Sense strand starting at position 3114 of SEQ ID NO: 1563912
gccagaucuugggaaugca

SEQ ID NO: 1841530 - RNA, 19 nt, Artificial Sequence
  Description of Artificial Sequence: Synthetic oligonucleotide
  Antisense strand to SEQ ID NO: 1841529
ugcauucccaagaucuggc

SEQ ID NO: 1841531 - RNA, 19 nt, Artificial Sequence
  Description of Artificial Sequence: Synthetic oligonucleotide
  Sense strand starting at position 3142 of SEQ ID NO: 1563912
cguguuucuaaagagaaca

SEQ ID NO: 1841532 - RNA, 19 nt, Artificial Sequence
  Description of Artificial Sequence: Synthetic oligonucleotide
  Antisense strand to SEQ ID NO: 1841531
uguucucuuuagaaacacg

SEQ ID NO: 1841533 - RNA, 19 nt, Artificial Sequence
  Description of Artificial Sequence: Synthetic oligonucleotide
  Sense strand starting at position 3306 of SEQ ID NO: 1563912
agacccuugucuuauucua

SEQ ID NO: 1841534 - RNA, 19 nt, Artificial Sequence
  Description of Artificial Sequence: Synthetic oligonucleotide
  Antisense strand to SEQ ID NO: 1841533
uagaauaagacaagggucu

SEQ ID NO: 1841535 - RNA, 19 nt, Artificial Sequence
  Description of Artificial Sequence: Synthetic oligonucleotide
  Sense strand starting at position 3419 of SEQ ID NO: 1563912
gggccaugaugucugcaaa

SEQ ID NO: 1841536 - RNA, 19 nt, Artificial Sequence
  Description of Artificial Sequence: Synthetic oligonucleotide
  Antisense strand to SEQ ID NO: 1841535
uuugcagacaucauggccc

SEQ ID NO: 1841537 - RNA, 19 nt, Artificial Sequence
  Description of Artificial Sequence: Synthetic oligonucleotide
  Sense strand starting at position 3420 of SEQ ID NO: 1563912
ggccaugaugucugcaaag

SEQ ID NO: 1841538 - RNA, 19 nt, Artificial Sequence
  Description of Artificial Sequence: Synthetic oligonucleotide
  Antisense strand to SEQ ID NO: 1841537
cuuugcagacaucauggcc

SEQ ID NO: 1841539 - RNA, 19 nt, Artificial Sequence
  Description of Artificial Sequence: Synthetic oligonucleotide
  Sense strand starting at position 3422 of SEQ ID NO: 1563912
ccaugaugucugcaaagua

SEQ ID NO: 1841540 - RNA, 19 nt, Artificial Sequence
  Description of Artificial Sequence: Synthetic oligonucleotide
  Antisense strand to SEQ ID NO: 1841539
uacuuugcagacaucaugg

SEQ ID NO: 1841541 - RNA, 19 nt, Artificial Sequence
  Description of Artificial Sequence: Synthetic oligonucleotide
  Sense strand starting at position 3484 of SEQ ID NO: 1563912
uaaagauguguauguauga

SEQ ID NO: 1841542 - RNA, 19 nt, Artificial Sequence
  Description of Artificial Sequence: Synthetic oligonucleotide
  Antisense strand to SEQ ID NO: 1841541
ucauacauacacaucuuua

SEQ ID NO: 1841543 - RNA, 19 nt, Artificial Sequence
  Description of Artificial Sequence: Synthetic oligonucleotide
  Sense strand starting at position 3485 of SEQ ID NO: 1563912
aaagauguguauguaugaa

SEQ ID NO: 1841544 - RNA, 19 nt, Artificial Sequence
  Description of Artificial Sequence: Synthetic oligonucleotide
  Antisense strand to SEQ ID NO: 1841543
uucauacauacacaucuuu

SEQ ID NO: 1841545 - RNA, 19 nt, Artificial Sequence
  Description of Artificial Sequence: Synthetic oligonucleotide
  Sense strand starting at position 3489 of SEQ ID NO: 1563912
auguguauguaugaaggga

SEQ ID NO: 1841546 - RNA, 19 nt, Artificial Sequence
  Description of Artificial Sequence: Synthetic oligonucleotide
  Antisense strand to SEQ ID NO: 1841545
ucccuucauacauacacau

SEQ ID NO: 1841547 - RNA, 19 nt, Artificial Sequence
  Description of Artificial Sequence: Synthetic oligonucleotide
  Sense strand starting at position 3491 of SEQ ID NO: 1563912
guguauguaugaagggaga

SEQ ID NO: 1841548 - RNA, 19 nt, Artificial Sequence
  Description of Artificial Sequence: Synthetic oligonucleotide
  Antisense strand to SEQ ID NO: 1841547
ucucccuucauacauacac

SEQ ID NO: 1841549 - RNA, 19 nt, Artificial Sequence
  Description of Artificial Sequence: Synthetic oligonucleotide
  Sense strand starting at position 3552 of SEQ ID NO: 1563912
agggcauaucaggguucau

SEQ ID NO: 1841550 - RNA, 19 nt, Artificial Sequence
  Description of Artificial Sequence: Synthetic oligonucleotide
  Antisense strand to SEQ ID NO: 1841549
augaacccugauaugcccu

SEQ ID NO: 1841551 - RNA, 19 nt, Artificial Sequence
  Description of Artificial Sequence: Synthetic oligonucleotide
  Sense strand starting at position 3703 of SEQ ID NO: 1563912
uuaaauugagcuugacuuu

SEQ ID NO: 1841552 - RNA, 19 nt, Artificial Sequence
  Description of Artificial Sequence: Synthetic oligonucleotide
  Antisense strand to SEQ ID NO: 1841551
aaagucaagcucaauuuaa

SEQ ID NO: 1841553 - RNA, 19 nt, Artificial Sequence
  Description of Artificial Sequence: Synthetic oligonucleotide
  Sense strand starting at position 3800 of SEQ ID NO: 1563912
ggagaacaaugagggauau

SEQ ID NO: 1841554 - RNA, 19 nt, Artificial Sequence
  Description of Artificial Sequence: Synthetic oligonucleotide
  Antisense strand to SEQ ID NO: 1841553
auaucccucauuguucucc

SEQ ID NO: 1841555 - RNA, 19 nt, Artificial Sequence
  Description of Artificial Sequence: Synthetic oligonucleotide
  Sense strand starting at position 3820 of SEQ ID NO: 1563912
aaaggcaucugguuagcaa

SEQ ID NO: 1841556 - RNA, 19 nt, Artificial Sequence
  Description of Artificial Sequence: Synthetic oligonucleotide
  Antisense strand to SEQ ID NO: 1841555
uugcuaaccagaugccuuu

SEQ ID NO: 1841557 - RNA, 19 nt, Artificial Sequence
  Description of Artificial Sequence: Synthetic oligonucleotide
  Sense strand starting at position 3947 of SEQ ID NO: 1563912
augaauaagugguguggga

SEQ ID NO: 1841558 - RNA, 19 nt, Artificial Sequence
  Description of Artificial Sequence: Synthetic oligonucleotide
  Antisense strand to SEQ ID NO: 1841557
ucccacaccacuuauucau

SEQ ID NO: 1841559 - RNA, 19 nt, Artificial Sequence
  Description of Artificial Sequence: Synthetic oligonucleotide
  Sense strand starting at position 3949 of SEQ ID NO: 1563912
gaauaaguggugugggacu

SEQ ID NO: 1841560 - RNA, 19 nt, Artificial Sequence
  Description of Artificial Sequence: Synthetic oligonucleotide
  Antisense strand to SEQ ID NO: 1841559
agucccacaccacuuauuc

SEQ ID NO: 1841561 - RNA, 19 nt, Artificial Sequence
  Description of Artificial Sequence: Synthetic oligonucleotide
  Sense strand starting at position 3960 of SEQ ID NO: 1563912
gugggacucucacuccuaa

SEQ ID NO: 1841562 - RNA, 19 nt, Artificial Sequence
  Description of Artificial Sequence: Synthetic oligonucleotide
  Antisense strand to SEQ ID NO: 1841561
uuaggagugagagucccac

SEQ ID NO: 1841563 - RNA, 19 nt, Artificial Sequence
  Description of Artificial Sequence: Synthetic oligonucleotide
  Sense strand starting at position 27 of SEQ ID NO: 1563913
aagccaaaccagugguaau

SEQ ID NO: 1841564 - RNA, 19 nt, Artificial Sequence
  Description of Artificial Sequence: Synthetic oligonucleotide
  Antisense strand to SEQ ID NO: 1841563
auuaccacugguuuggcuu

SEQ ID NO: 1841565 - RNA, 19 nt, Artificial Sequence
  Description of Artificial Sequence: Synthetic oligonucleotide
  Sense strand starting at position 174 of SEQ ID NO: 1563913
acagaaagggcuugcuaau

SEQ ID NO: 1841566 - RNA, 19 nt, Artificial Sequence
  Description of Artificial Sequence: Synthetic oligonucleotide
  Antisense strand to SEQ ID NO: 1841565
auuagcaagcccuuucugu

SEQ ID NO: 1841567 - RNA, 19 nt, Artificial Sequence
  Description of Artificial Sequence: Synthetic oligonucleotide
  Sense strand starting at position 251 of SEQ ID NO: 1563913
guagguggcucucugcaaa

SEQ ID NO: 1841568 - RNA, 19 nt, Artificial Sequence
  Description of Artificial Sequence: Synthetic oligonucleotide
  Antisense strand to SEQ ID NO: 1841567
uuugcagagagccaccuac

SEQ ID NO: 1841569 - RNA, 19 nt, Artificial Sequence
  Description of Artificial Sequence: Synthetic oligonucleotide
  Sense strand starting at position 263 of SEQ ID NO: 1563913
cugcaaacuguguagggau

SEQ ID NO: 1841570 - RNA, 19 nt, Artificial Sequence
  Description of Artificial Sequence: Synthetic oligonucleotide
  Antisense strand to SEQ ID NO: 1841569
aucccuacacaguuugcag

SEQ ID NO: 1841571 - RNA, 19 nt, Artificial Sequence
  Description of Artificial Sequence: Synthetic oligonucleotide
  Sense strand starting at position 500 of SEQ ID NO: 1563913
agagaccuuuaugaagaga

SEQ ID NO: 1841572 - RNA, 19 nt, Artificial Sequence
  Description of Artificial Sequence: Synthetic oligonucleotide
  Antisense strand to SEQ ID NO: 1841571
ucucuucauaaaggucucu

SEQ ID NO: 1841573 - RNA, 19 nt, Artificial Sequence
  Description of Artificial Sequence: Synthetic oligonucleotide
  Sense strand starting at position 595 of SEQ ID NO: 1563913
aggcaauucuuucccaagu

SEQ ID NO: 1841574 - RNA, 19 nt, Artificial Sequence
  Description of Artificial Sequence: Synthetic oligonucleotide
  Antisense strand to SEQ ID NO: 1841573
acuugggaaagaauugccu

SEQ ID NO: 1841575 - RNA, 19 nt, Artificial Sequence
  Description of Artificial Sequence: Synthetic oligonucleotide
  Sense strand starting at position 596 of SEQ ID NO: 1563913
ggcaauucuuucccaaguu

SEQ ID NO: 1841576 - RNA, 19 nt, Artificial Sequence
  Description of Artificial Sequence: Synthetic oligonucleotide
  Antisense strand to SEQ ID NO: 1841575
aacuugggaaagaauugcc

SEQ ID NO: 1841577 - RNA, 19 nt, Artificial Sequence
  Description of Artificial Sequence: Synthetic oligonucleotide
  Sense strand starting at position 608 of SEQ ID NO: 1563913
ccaaguuagcuggaagcuu

SEQ ID NO: 1841578 - RNA, 19 nt, Artificial Sequence
  Description of Artificial Sequence: Synthetic oligonucleotide
  Antisense strand to SEQ ID NO: 1841577
aagcuuccagcuaacuugg

SEQ ID NO: 1841579 - RNA, 19 nt, Artificial Sequence
  Description of Artificial Sequence: Synthetic oligonucleotide
  Sense strand starting at position 634 of SEQ ID NO: 1563913
gaaaucagccagcagucau

SEQ ID NO: 1841580 - RNA, 19 nt, Artificial Sequence
  Description of Artificial Sequence: Synthetic oligonucleotide
  Antisense strand to SEQ ID NO: 1841579
augacugcuggcugauuuc

SEQ ID NO: 1841581 - RNA, 19 nt, Artificial Sequence
  Description of Artificial Sequence: Synthetic oligonucleotide
  Sense strand starting at position 954 of SEQ ID NO: 1563913
aggcauggcugauuccuaa

SEQ ID NO: 1841582 - RNA, 19 nt, Artificial Sequence
  Description of Artificial Sequence: Synthetic oligonucleotide
  Antisense strand to SEQ ID NO: 1841581
uuaggaaucagccaugccu

SEQ ID NO: 1841583 - RNA, 19 nt, Artificial Sequence
  Description of Artificial Sequence: Synthetic oligonucleotide
  Sense strand starting at position 957 of SEQ ID NO: 1563913
cauggcugauuccuaaagu

SEQ ID NO: 1841584 - RNA, 19 nt, Artificial Sequence
  Description of Artificial Sequence: Synthetic oligonucleotide
  Antisense strand to SEQ ID NO: 1841583
acuuuaggaaucagccaug

SEQ ID NO: 1841585 - RNA, 19 nt, Artificial Sequence
  Description of Artificial Sequence: Synthetic oligonucleotide
  Sense strand starting at position 974 of SEQ ID NO: 1563913
gugaaugcgcuucaggaaa

SEQ ID NO: 1841586 - RNA, 19 nt, Artificial Sequence
  Description of Artificial Sequence: Synthetic oligonucleotide
  Antisense strand to SEQ ID NO: 1841585
uuuccugaagcgcauucac

SEQ ID NO: 1841587 - RNA, 19 nt, Artificial Sequence
  Description of Artificial Sequence: Synthetic oligonucleotide
  Sense strand starting at position 2369 of SEQ ID NO: 1563913
cggucagagauucgcagau

SEQ ID NO: 1841588 - RNA, 19 nt, Artificial Sequence
  Description of Artificial Sequence: Synthetic oligonucleotide
  Antisense strand to SEQ ID NO: 1841587
aucugcgaaucucugaccg

SEQ ID NO: 1841589 - RNA, 19 nt, Artificial Sequence
  Description of Artificial Sequence: Synthetic oligonucleotide
  Sense strand starting at position 2373 of SEQ ID NO: 1563913
cagagauucgcagauuaac

SEQ ID NO: 1841590 - RNA, 19 nt, Artificial Sequence
  Description of Artificial Sequence: Synthetic oligonucleotide
  Antisense strand to SEQ ID NO: 1841589
guuaaucugcgaaucucug

SEQ ID NO: 1841591 - RNA, 19 nt, Artificial Sequence
  Description of Artificial Sequence: Synthetic oligonucleotide
  Sense strand starting at position 2388 of SEQ ID NO: 1563913
uaacgcuugauccgggaga

SEQ ID NO: 1841592 - RNA, 19 nt, Artificial Sequence
  Description of Artificial Sequence: Synthetic oligonucleotide
  Antisense strand to SEQ ID NO: 1841591
ucucccggaucaagcguua

SEQ ID NO: 1841593 - RNA, 19 nt, Artificial Sequence
  Description of Artificial Sequence: Synthetic oligonucleotide
  Sense strand starting at position 2453 of SEQ ID NO: 1563913
gaaggaaugucugcgugag

SEQ ID NO: 1841594 - RNA, 19 nt, Artificial Sequence
  Description of Artificial Sequence: Synthetic oligonucleotide
  Antisense strand to SEQ ID NO: 1841593
cucacgcagacauuccuuc

SEQ ID NO: 1841595 - RNA, 19 nt, Artificial Sequence
  Description of Artificial Sequence: Synthetic oligonucleotide
  Sense strand starting at position 2478 of SEQ ID NO: 1563913
cguaagguacgguguagaa

SEQ ID NO: 1841596 - RNA, 19 nt, Artificial Sequence
  Description of Artificial Sequence: Synthetic oligonucleotide
  Antisense strand to SEQ ID NO: 1841595
uucuacaccguaccuuacg

SEQ ID NO: 1841597 - RNA, 19 nt, Artificial Sequence
  Description of Artificial Sequence: Synthetic oligonucleotide
  Sense strand starting at position 2529 of SEQ ID NO: 1563913
cccaguucugaugguuaaa

SEQ ID NO: 1841598 - RNA, 19 nt, Artificial Sequence
  Description of Artificial Sequence: Synthetic oligonucleotide
  Antisense strand to SEQ ID NO: 1841597
uuuaaccaucagaacuggg

SEQ ID NO: 1841599 - RNA, 19 nt, Artificial Sequence
  Description of Artificial Sequence: Synthetic oligonucleotide
  Sense strand starting at position 2531 of SEQ ID NO: 1563913
caguucugaugguuaaagu

SEQ ID NO: 1841600 - RNA, 19 nt, Artificial Sequence
  Description of Artificial Sequence: Synthetic oligonucleotide
  Antisense strand to SEQ ID NO: 1841599
acuuuaaccaucagaacug

SEQ ID NO: 1841601 - RNA, 19 nt, Artificial Sequence
  Description of Artificial Sequence: Synthetic oligonucleotide
  Sense strand starting at position 2532 of SEQ ID NO: 1563913
aguucugaugguuaaaguu

SEQ ID NO: 1841602 - RNA, 19 nt, Artificial Sequence
  Description of Artificial Sequence: Synthetic oligonucleotide
  Antisense strand to SEQ ID NO: 1841601
aacuuuaaccaucagaacu

SEQ ID NO: 1841603 - RNA, 19 nt, Artificial Sequence
  Description of Artificial Sequence: Synthetic oligonucleotide
  Sense strand starting at position 2638 of SEQ ID NO: 1563913
gcggguaaucagcgaagac

SEQ ID NO: 1841604 - RNA, 19 nt, Artificial Sequence
  Description of Artificial Sequence: Synthetic oligonucleotide
  Antisense strand to SEQ ID NO: 1841603
gucuucgcugauuacccgc

SEQ ID NO: 1841605 - RNA, 19 nt, Artificial Sequence
  Description of Artificial Sequence: Synthetic oligonucleotide
  Sense strand starting at position 2658 of SEQ ID NO: 1563913
gaccgaauaguuugacuuu

SEQ ID NO: 1841606 - RNA, 19 nt, Artificial Sequence
  Description of Artificial Sequence: Synthetic oligonucleotide
  Antisense strand to SEQ ID NO: 1841605
aaagucaaacuauucgguc

SEQ ID NO: 1841607 - RNA, 19 nt, Artificial Sequence
  Description of Artificial Sequence: Synthetic oligonucleotide
  Sense strand starting at position 2670 of SEQ ID NO: 1563913
ugacuuuauugaucuagau

SEQ ID NO: 1841608 - RNA, 19 nt, Artificial Sequence
  Description of Artificial Sequence: Synthetic oligonucleotide
  Antisense strand to SEQ ID NO: 1841607
aucuagaucaauaaaguca

SEQ ID NO: 1841609 - RNA, 19 nt, Artificial Sequence
  Description of Artificial Sequence: Synthetic oligonucleotide
  Sense strand starting at position 2723 of SEQ ID NO: 1563913
gcuagacuaggcugugaau

SEQ ID NO: 1841610 - RNA, 19 nt, Artificial Sequence
  Description of Artificial Sequence: Synthetic oligonucleotide
  Antisense strand to SEQ ID NO: 1841609
auucacagccuagucuagc

SEQ ID NO: 1841611 - RNA, 19 nt, Artificial Sequence
  Description of Artificial Sequence: Synthetic oligonucleotide
  Sense strand starting at position 2754 of SEQ ID NO: 1563913
cacccaggagcuuggaaau

SEQ ID NO: 1841612 - RNA, 19 nt, Artificial Sequence
  Description of Artificial Sequence: Synthetic oligonucleotide
  Antisense strand to SEQ ID NO: 1841611
auuuccaagcuccugggug

SEQ ID NO: 1841613 - RNA, 19 nt, Artificial Sequence
  Description of Artificial Sequence: Synthetic oligonucleotide
  Sense strand starting at position 2856 of SEQ ID NO: 1563913
agccauuggaguggaugaa

SEQ ID NO: 1841614 - RNA, 19 nt, Artificial Sequence
  Description of Artificial Sequence: Synthetic oligonucleotide
  Antisense strand to SEQ ID NO: 1841613
uucauccacuccaauggcu

SEQ ID NO: 1841615 - RNA, 19 nt, Artificial Sequence
  Description of Artificial Sequence: Synthetic oligonucleotide
  Sense strand starting at position 2857 of SEQ ID NO: 1563913
gccauuggaguggaugaau

SEQ ID NO: 1841616 - RNA, 19 nt, Artificial Sequence
  Description of Artificial Sequence: Synthetic oligonucleotide
  Antisense strand to SEQ ID NO: 1841615
auucauccacuccaauggc

SEQ ID NO: 1841617 - RNA, 19 nt, Artificial Sequence
  Description of Artificial Sequence: Synthetic oligonucleotide
  Sense strand starting at position 2923 of SEQ ID NO: 1563913
gacgccacuccauaguuua

SEQ ID NO: 1841618 - RNA, 19 nt, Artificial Sequence
  Description of Artificial Sequence: Synthetic oligonucleotide
  Antisense strand to SEQ ID NO: 1841617
uaaacuauggaguggcguc

SEQ ID NO: 1841619 - RNA, 19 nt, Artificial Sequence
  Description of Artificial Sequence: Synthetic oligonucleotide
  Sense strand starting at position 3024 of SEQ ID NO: 1563913
cugggaugcucuccgaaga

SEQ ID NO: 1841620 - RNA, 19 nt, Artificial Sequence
  Description of Artificial Sequence: Synthetic oligonucleotide
  Antisense strand to SEQ ID NO: 1841619
ucuucggagagcaucccag

SEQ ID NO: 1841621 - RNA, 19 nt, Artificial Sequence
  Description of Artificial Sequence: Synthetic oligonucleotide
  Sense strand starting at position 3092 of SEQ ID NO: 1563913
cggccugauuucucuccau

SEQ ID NO: 1841622 - RNA, 19 nt, Artificial Sequence
  Description of Artificial Sequence: Synthetic oligonucleotide
  Antisense strand to SEQ ID NO: 1841621
auggagagaaaucaggccg

SEQ ID NO: 1841623 - RNA, 19 nt, Artificial Sequence
  Description of Artificial Sequence: Synthetic oligonucleotide
  Sense strand starting at position 3133 of SEQ ID NO: 1563913
gcacauuauuguccucaga

SEQ ID NO: 1841624 - RNA, 19 nt, Artificial Sequence
  Description of Artificial Sequence: Synthetic oligonucleotide
  Antisense strand to SEQ ID NO: 1841623
ucugaggacaauaaugugc

SEQ ID NO: 1841625 - RNA, 19 nt, Artificial Sequence
  Description of Artificial Sequence: Synthetic oligonucleotide
  Sense strand starting at position 3154 of SEQ ID NO: 1563913
accagaguacgugagcaua

SEQ ID NO: 1841626 - RNA, 19 nt, Artificial Sequence
  Description of Artificial Sequence: Synthetic oligonucleotide
  Antisense strand to SEQ ID NO: 1841625
uaugcucacguacucuggu

SEQ ID NO: 1841627 - RNA, 19 nt, Artificial Sequence
  Description of Artificial Sequence: Synthetic oligonucleotide
  Sense strand starting at position 3166 of SEQ ID NO: 1563913
gagcauauguccucaugca

SEQ ID NO: 1841628 - RNA, 19 nt, Artificial Sequence
  Description of Artificial Sequence: Synthetic oligonucleotide
  Antisense strand to SEQ ID NO: 1841627
ugcaugaggacauaugcuc

SEQ ID NO: 1841629 - RNA, 19 nt, Artificial Sequence
  Description of Artificial Sequence: Synthetic oligonucleotide
  Sense strand starting at position 3255 of SEQ ID NO: 1563913
cuucuuugacuuuggugua

SEQ ID NO: 1841630 - RNA, 19 nt, Artificial Sequence
  Description of Artificial Sequence: Synthetic oligonucleotide
  Antisense strand to SEQ ID NO: 1841629
uacaccaaagucaaagaag

SEQ ID NO: 1841631 - RNA, 19 nt, Artificial Sequence
  Description of Artificial Sequence: Synthetic oligonucleotide
  Sense strand starting at position 3552 of SEQ ID NO: 1563913
gacggaaucucccuauguu

SEQ ID NO: 1841632 - RNA, 19 nt, Artificial Sequence
  Description of Artificial Sequence: Synthetic oligonucleotide
  Antisense strand to SEQ ID NO: 1841631
aacauagggagauuccguc

SEQ ID NO: 1841633 - RNA, 19 nt, Artificial Sequence
  Description of Artificial Sequence: Synthetic oligonucleotide
  Sense strand starting at position 3553 of SEQ ID NO: 1563913
acggaaucucccuauguug

SEQ ID NO: 1841634 - RNA, 19 nt, Artificial Sequence
  Description of Artificial Sequence: Synthetic oligonucleotide
  Antisense strand to SEQ ID NO: 1841633
caacauagggagauuccgu

SEQ ID NO: 1841635 - RNA, 19 nt, Artificial Sequence
  Description of Artificial Sequence: Synthetic oligonucleotide
  Sense strand starting at position 3746 of SEQ ID NO: 1563913
auuaauugucccugaagca

SEQ ID NO: 1841636 - RNA, 19 nt, Artificial Sequence
  Description of Artificial Sequence: Synthetic oligonucleotide
  Antisense strand to SEQ ID NO: 1841635
ugcuucagggacaauuaau

SEQ ID NO: 1841637 - RNA, 19 nt, Artificial Sequence
  Description of Artificial Sequence: Synthetic oligonucleotide
  Sense strand starting at position 3747 of SEQ ID NO: 1563913
uuaauugucccugaagcag

SEQ ID NO: 1841638 - RNA, 19 nt, Artificial Sequence
  Description of Artificial Sequence: Synthetic oligonucleotide
  Antisense strand to SEQ ID NO: 1841637
cugcuucagggacaauuaa

SEQ ID NO: 1841639 - RNA, 19 nt, Artificial Sequence
  Description of Artificial Sequence: Synthetic oligonucleotide
  Sense strand starting at position 3856 of SEQ ID NO: 1563913
uggauauguuaacuaguuu

SEQ ID NO: 1841640 - RNA, 19 nt, Artificial Sequence
  Description of Artificial Sequence: Synthetic oligonucleotide
  Antisense strand to SEQ ID NO: 1841639
aaacuaguuaacauaucca

SEQ ID NO: 1841641 - RNA, 19 nt, Artificial Sequence
  Description of Artificial Sequence: Synthetic oligonucleotide
  Sense strand starting at position 3857 of SEQ ID NO: 1563913
ggauauguuaacuaguuug

SEQ ID NO: 1841642 - RNA, 19 nt, Artificial Sequence
  Description of Artificial Sequence: Synthetic oligonucleotide
  Antisense strand to SEQ ID NO: 1841641
caaacuaguuaacauaucc

SEQ ID NO: 1841643 - RNA, 19 nt, Artificial Sequence
  Description of Artificial Sequence: Synthetic oligonucleotide
  Sense strand starting at position 192 of SEQ ID NO: 1563914
ucauaauuauugcugugua

SEQ ID NO: 1841644 - RNA, 19 nt, Artificial Sequence
  Description of Artificial Sequence: Synthetic oligonucleotide
  Antisense strand to SEQ ID NO: 1841643
uacacagcaauaauuauga

SEQ ID NO: 1841645 - RNA, 19 nt, Artificial Sequence
  Description of Artificial Sequence: Synthetic oligonucleotide
  Sense strand starting at position 196 of SEQ ID NO: 1563914
aauuauugcuguguaaguc

SEQ ID NO: 1841646 - RNA, 19 nt, Artificial Sequence
  Description of Artificial Sequence: Synthetic oligonucleotide
  Antisense strand to SEQ ID NO: 1841645
gacuuacacagcaauaauu

SEQ ID NO: 1841647 - RNA, 19 nt, Artificial Sequence
  Description of Artificial Sequence: Synthetic oligonucleotide
  Sense strand starting at position 200 of SEQ ID NO: 1563914
auugcuguguaagucuuaa

SEQ ID NO: 1841648 - RNA, 19 nt, Artificial Sequence
  Description of Artificial Sequence: Synthetic oligonucleotide
  Antisense strand to SEQ ID NO: 1841647
uuaagacuuacacagcaau

SEQ ID NO: 1841649 - RNA, 19 nt, Artificial Sequence
  Description of Artificial Sequence: Synthetic oligonucleotide
  Sense strand starting at position 258 of SEQ ID NO: 1563914
uaaguuauuuacgugcacu

SEQ ID NO: 1841650 - RNA, 19 nt, Artificial Sequence
  Description of Artificial Sequence: Synthetic oligonucleotide
  Antisense strand to SEQ ID NO: 1841649
agugcacguaaauaacuua

SEQ ID NO: 1841651 - RNA, 19 nt, Artificial Sequence
  Description of Artificial Sequence: Synthetic oligonucleotide
  Sense strand starting at position 261 of SEQ ID NO: 1563914
guuauuuacgugcacuuau

SEQ ID NO: 1841652 - RNA, 19 nt, Artificial Sequence
  Description of Artificial Sequence: Synthetic oligonucleotide
  Antisense strand to SEQ ID NO: 1841651
auaagugcacguaaauaac

SEQ ID NO: 1841653 - RNA, 19 nt, Artificial Sequence
  Description of Artificial Sequence: Synthetic oligonucleotide
  Sense strand starting at position 315 of SEQ ID NO: 1563914
ggcauugagagguagguua

SEQ ID NO: 1841654 - RNA, 19 nt, Artificial Sequence
  Description of Artificial Sequence: Synthetic oligonucleotide
  Antisense strand to SEQ ID NO: 1841653
uaaccuaccucucaaugcc

SEQ ID NO: 1841655 - RNA, 19 nt, Artificial Sequence
  Description of Artificial Sequence: Synthetic oligonucleotide
  Sense strand starting at position 317 of SEQ ID NO: 1563914
cauugagagguagguuaaa

SEQ ID NO: 1841656 - RNA, 19 nt, Artificial Sequence
  Description of Artificial Sequence: Synthetic oligonucleotide
  Antisense strand to SEQ ID NO: 1841655
uuuaaccuaccucucaaug

SEQ ID NO: 1841657 - RNA, 19 nt, Artificial Sequence
  Description of Artificial Sequence: Synthetic oligonucleotide
  Sense strand starting at position 348 of SEQ ID NO: 1563914
gggagaugucuugagucuu

SEQ ID NO: 1841658 - RNA, 19 nt, Artificial Sequence
  Description of Artificial Sequence: Synthetic oligonucleotide
  Antisense strand to SEQ ID NO: 1841657
aagacucaagacaucuccc

SEQ ID NO: 1841659 - RNA, 19 nt, Artificial Sequence
  Description of Artificial Sequence: Synthetic oligonucleotide
  Sense strand starting at position 840 of SEQ ID NO: 1563914
ggucaucuauagcuuauca

SEQ ID NO: 1841660 - RNA, 19 nt, Artificial Sequence
  Description of Artificial Sequence: Synthetic oligonucleotide
  Antisense strand to SEQ ID NO: 1841659
ugauaagcuauagaugacc

SEQ ID NO: 1841661 - RNA, 19 nt, Artificial Sequence
  Description of Artificial Sequence: Synthetic oligonucleotide
  Sense strand starting at position 985 of SEQ ID NO: 1563914
aucucagaccuguaaguuc

SEQ ID NO: 1841662 - RNA, 19 nt, Artificial Sequence
  Description of Artificial Sequence: Synthetic oligonucleotide
  Antisense strand to SEQ ID NO: 1841661
gaacuuacaggucugagau

SEQ ID NO: 1841663 - RNA, 19 nt, Artificial Sequence
  Description of Artificial Sequence: Synthetic oligonucleotide
  Sense strand starting at position 1049 of SEQ ID NO: 1563914
cuuagaauucugugaucag

SEQ ID NO: 1841664 - RNA, 19 nt, Artificial Sequence
  Description of Artificial Sequence: Synthetic oligonucleotide
  Antisense strand to SEQ ID NO: 1841663
cugaucacagaauucuaag

SEQ ID NO: 1841665 - RNA, 19 nt, Artificial Sequence
  Description of Artificial Sequence: Synthetic oligonucleotide
  Sense strand starting at position 1052 of SEQ ID NO: 1563914
agaauucugugaucagaau

SEQ ID NO: 1841666 - RNA, 19 nt, Artificial Sequence
  Description of Artificial Sequence: Synthetic oligonucleotide
  Antisense strand to SEQ ID NO: 1841665
auucugaucacagaauucu

SEQ ID NO: 1841667 - RNA, 19 nt, Artificial Sequence
  Description of Artificial Sequence: Synthetic oligonucleotide
  Sense strand starting at position 1064 of SEQ ID NO: 1563914
ucagaauucuccuccguuc

SEQ ID NO: 1841668 - RNA, 19 nt, Artificial Sequence
  Description of Artificial Sequence: Synthetic oligonucleotide
  Antisense strand to SEQ ID NO: 1841667
gaacggaggagaauucuga

SEQ ID NO: 1841669 - RNA, 19 nt, Artificial Sequence
  Description of Artificial Sequence: Synthetic oligonucleotide
  Sense strand starting at position 1180 of SEQ ID NO: 1563914
gucugaacucucggcaaua

SEQ ID NO: 1841670 - RNA, 19 nt, Artificial Sequence
  Description of Artificial Sequence: Synthetic oligonucleotide
  Antisense strand to SEQ ID NO: 1841669
uauugccgagaguucagac

SEQ ID NO: 1841671 - RNA, 19 nt, Artificial Sequence
  Description of Artificial Sequence: Synthetic oligonucleotide
  Sense strand starting at position 1181 of SEQ ID NO: 1563914
ucugaacucucggcaauau

SEQ ID NO: 1841672 - RNA, 19 nt, Artificial Sequence
  Description of Artificial Sequence: Synthetic oligonucleotide
  Antisense strand to SEQ ID NO: 1841671
auauugccgagaguucaga

SEQ ID NO: 1841673 - RNA, 19 nt, Artificial Sequence
  Description of Artificial Sequence: Synthetic oligonucleotide
  Sense strand starting at position 1182 of SEQ ID NO: 1563914
cugaacucucggcaauauu

SEQ ID NO: 1841674 - RNA, 19 nt, Artificial Sequence
  Description of Artificial Sequence: Synthetic oligonucleotide
  Antisense strand to SEQ ID NO: 1841673
aauauugccgagaguucag

SEQ ID NO: 1841675 - RNA, 19 nt, Artificial Sequence
  Description of Artificial Sequence: Synthetic oligonucleotide
  Sense strand starting at position 1191 of SEQ ID NO: 1563914
cggcaauauucgcuaacaa

SEQ ID NO: 1841676 - RNA, 19 nt, Artificial Sequence
  Description of Artificial Sequence: Synthetic oligonucleotide
  Antisense strand to SEQ ID NO: 1841675
uuguuagcgaauauugccg

SEQ ID NO: 1841677 - RNA, 19 nt, Artificial Sequence
  Description of Artificial Sequence: Synthetic oligonucleotide
  Sense strand starting at position 1192 of SEQ ID NO: 1563914
ggcaauauucgcuaacaag

SEQ ID NO: 1841678 - RNA, 19 nt, Artificial Sequence
  Description of Artificial Sequence: Synthetic oligonucleotide
  Antisense strand to SEQ ID NO: 1841677
cuuguuagcgaauauugcc

SEQ ID NO: 1841679 - RNA, 19 nt, Artificial Sequence
  Description of Artificial Sequence: Synthetic oligonucleotide
  Sense strand starting at position 1348 of SEQ ID NO: 1563914
gagugagcgaaaugcgaau

SEQ ID NO: 1841680 - RNA, 19 nt, Artificial Sequence
  Description of Artificial Sequence: Synthetic oligonucleotide
  Antisense strand to SEQ ID NO: 1841679
auucgcauuucgcucacuc

SEQ ID NO: 1841681 - RNA, 19 nt, Artificial Sequence
  Description of Artificial Sequence: Synthetic oligonucleotide
  Sense strand starting at position 1517 of SEQ ID NO: 1563914
cgcgaguagcugccguaau

SEQ ID NO: 1841682 - RNA, 19 nt, Artificial Sequence
  Description of Artificial Sequence: Synthetic oligonucleotide
  Antisense strand to SEQ ID NO: 1841681
auuacggcagcuacucgcg

SEQ ID NO: 1841683 - RNA, 19 nt, Artificial Sequence
  Description of Artificial Sequence: Synthetic oligonucleotide
  Sense strand starting at position 1957 of SEQ ID NO: 1563914
gacacaguucuggguacuu

SEQ ID NO: 1841684 - RNA, 19 nt, Artificial Sequence
  Description of Artificial Sequence: Synthetic oligonucleotide
  Antisense strand to SEQ ID NO: 1841683
aaguacccagaacuguguc

SEQ ID NO: 1841685 - RNA, 19 nt, Artificial Sequence
  Description of Artificial Sequence: Synthetic oligonucleotide
  Sense strand starting at position 2019 of SEQ ID NO: 1563914
aagcgaugugugcaucaau

SEQ ID NO: 1841686 - RNA, 19 nt, Artificial Sequence
  Description of Artificial Sequence: Synthetic oligonucleotide
  Antisense strand to SEQ ID NO: 1841685
auugaugcacacaucgcuu

SEQ ID NO: 1841687 - RNA, 19 nt, Artificial Sequence
  Description of Artificial Sequence: Synthetic oligonucleotide
  Sense strand starting at position 2022 of SEQ ID NO: 1563914
cgaugugugcaucaauaua

SEQ ID NO: 1841688 - RNA, 19 nt, Artificial Sequence
  Description of Artificial Sequence: Synthetic oligonucleotide
  Antisense strand to SEQ ID NO: 1841687
uauauugaugcacacaucg

SEQ ID NO: 1841689 - RNA, 19 nt, Artificial Sequence
  Description of Artificial Sequence: Synthetic oligonucleotide
  Sense strand starting at position 2086 of SEQ ID NO: 1563914
gagugaggcuccucaaguc

SEQ ID NO: 1841690 - RNA, 19 nt, Artificial Sequence
  Description of Artificial Sequence: Synthetic oligonucleotide
  Antisense strand to SEQ ID NO: 1841689
gacuugaggagccucacuc

SEQ ID NO: 1841691 - RNA, 19 nt, Artificial Sequence
  Description of Artificial Sequence: Synthetic oligonucleotide
  Sense strand starting at position 2093 of SEQ ID NO: 1563914
gcuccucaagucuaagcaa

SEQ ID NO: 1841692 - RNA, 19 nt, Artificial Sequence
  Description of Artificial Sequence: Synthetic oligonucleotide
  Antisense strand to SEQ ID NO: 1841691
uugcuuagacuugaggagc

SEQ ID NO: 1841693 - RNA, 19 nt, Artificial Sequence
  Description of Artificial Sequence: Synthetic oligonucleotide
  Sense strand starting at position 2119 of SEQ ID NO: 1563914
aguucuuucucagccuuga

SEQ ID NO: 1841694 - RNA, 19 nt, Artificial Sequence
  Description of Artificial Sequence: Synthetic oligonucleotide
  Antisense strand to SEQ ID NO: 1841693
ucaaggcugagaaagaacu

SEQ ID NO: 1841695 - RNA, 19 nt, Artificial Sequence
  Description of Artificial Sequence: Synthetic oligonucleotide
  Sense strand starting at position 2242 of SEQ ID NO: 1563914
gugcuuucuguguguauuu

SEQ ID NO: 1841696 - RNA, 19 nt, Artificial Sequence
  Description of Artificial Sequence: Synthetic oligonucleotide
  Antisense strand to SEQ ID NO: 1841695
aaauacacacagaaagcac

SEQ ID NO: 1841697 - RNA, 19 nt, Artificial Sequence
  Description of Artificial Sequence: Synthetic oligonucleotide
  Sense strand starting at position 2243 of SEQ ID NO: 1563914
ugcuuucuguguguauuua

SEQ ID NO: 1841698 - RNA, 19 nt, Artificial Sequence
  Description of Artificial Sequence: Synthetic oligonucleotide
  Antisense strand to SEQ ID NO: 1841697
uaaauacacacagaaagca

SEQ ID NO: 1841699 - RNA, 19 nt, Artificial Sequence
  Description of Artificial Sequence: Synthetic oligonucleotide
  Sense strand starting at position 2283 of SEQ ID NO: 1563914
guguaugucauguaugaaa

SEQ ID NO: 1841700 - RNA, 19 nt, Artificial Sequence
  Description of Artificial Sequence: Synthetic oligonucleotide
  Antisense strand to SEQ ID NO: 1841699
uuucauacaugacauacac

SEQ ID NO: 1841701 - RNA, 19 nt, Artificial Sequence
  Description of Artificial Sequence: Synthetic oligonucleotide
  Sense strand starting at position 2285 of SEQ ID NO: 1563914
guaugucauguaugaaagu

SEQ ID NO: 1841702 - RNA, 19 nt, Artificial Sequence
  Description of Artificial Sequence: Synthetic oligonucleotide
  Antisense strand to SEQ ID NO: 1841701
acuuucauacaugacauac

SEQ ID NO: 1841703 - RNA, 19 nt, Artificial Sequence
  Description of Artificial Sequence: Synthetic oligonucleotide
  Sense strand starting at position 2390 of SEQ ID NO: 1563914
ccauauugccguguuagcu

SEQ ID NO: 1841704 - RNA, 19 nt, Artificial Sequence
  Description of Artificial Sequence: Synthetic oligonucleotide
  Antisense strand to SEQ ID NO: 1841703
agcuaacacggcaauaugg

SEQ ID NO: 1841705 - RNA, 19 nt, Artificial Sequence
  Description of Artificial Sequence: Synthetic oligonucleotide
  Sense strand starting at position 2391 of SEQ ID NO: 1563914
cauauugccguguuagcuu

SEQ ID NO: 1841706 - RNA, 19 nt, Artificial Sequence
  Description of Artificial Sequence: Synthetic oligonucleotide
  Antisense strand to SEQ ID NO: 1841705
aagcuaacacggcaauaug

SEQ ID NO: 1841707 - RNA, 19 nt, Artificial Sequence
  Description of Artificial Sequence: Synthetic oligonucleotide
  Sense strand starting at position 2430 of SEQ ID NO: 1563914
augacucgcgccugauaaa

SEQ ID NO: 1841708 - RNA, 19 nt, Artificial Sequence
  Description of Artificial Sequence: Synthetic oligonucleotide
  Antisense strand to SEQ ID NO: 1841707
uuuaucaggcgcgagucau

SEQ ID NO: 1841709 - RNA, 19 nt, Artificial Sequence
  Description of Artificial Sequence: Synthetic oligonucleotide
  Sense strand starting at position 2457 of SEQ ID NO: 1563914
aaguuucccgccuagagaa

SEQ ID NO: 1841710 - RNA, 19 nt, Artificial Sequence
  Description of Artificial Sequence: Synthetic oligonucleotide
  Antisense strand to SEQ ID NO: 1841709
uucucuaggcgggaaacuu

SEQ ID NO: 1841711 - RNA, 19 nt, Artificial Sequence
  Description of Artificial Sequence: Synthetic oligonucleotide
  Sense strand starting at position 2835 of SEQ ID NO: 1563914
cugcgucuggcuuguauuu

SEQ ID NO: 1841712 - RNA, 19 nt, Artificial Sequence
  Description of Artificial Sequence: Synthetic oligonucleotide
  Antisense strand to SEQ ID NO: 1841711
aaauacaagccagacgcag

SEQ ID NO: 1841713 - RNA, 19 nt, Artificial Sequence
  Description of Artificial Sequence: Synthetic oligonucleotide
  Sense strand starting at position 3117 of SEQ ID NO: 1563914
uagugaugacgucagggua

SEQ ID NO: 1841714 - RNA, 19 nt, Artificial Sequence
  Description of Artificial Sequence: Synthetic oligonucleotide
  Antisense strand to SEQ ID NO: 1841713
uacccugacgucaucacua

SEQ ID NO: 1841715 - RNA, 19 nt, Artificial Sequence
  Description of Artificial Sequence: Synthetic oligonucleotide
  Sense strand starting at position 3138 of SEQ ID NO: 1563914
uaagguguccauuaucuga

SEQ ID NO: 1841716 - RNA, 19 nt, Artificial Sequence
  Description of Artificial Sequence: Synthetic oligonucleotide
  Antisense strand to SEQ ID NO: 1841715
ucagauaauggacaccuua

SEQ ID NO: 1841717 - RNA, 19 nt, Artificial Sequence
  Description of Artificial Sequence: Synthetic oligonucleotide
  Sense strand starting at position 3177 of SEQ ID NO: 1563914
guguacucucggccuggua

SEQ ID NO: 1841718 - RNA, 19 nt, Artificial Sequence
  Description of Artificial Sequence: Synthetic oligonucleotide
  Antisense strand to SEQ ID NO: 1841717
uaccaggccgagaguacac

SEQ ID NO: 1841719 - RNA, 19 nt, Artificial Sequence
  Description of Artificial Sequence: Synthetic oligonucleotide
  Sense strand starting at position 3723 of SEQ ID NO: 1563914
cuuacuugagcccggaaau

SEQ ID NO: 1841720 - RNA, 19 nt, Artificial Sequence
  Description of Artificial Sequence: Synthetic oligonucleotide
  Antisense strand to SEQ ID NO: 1841719
auuuccgggcucaaguaag

SEQ ID NO: 1841721 - RNA, 19 nt, Artificial Sequence
  Description of Artificial Sequence: Synthetic oligonucleotide
  Sense strand starting at position 3724 of SEQ ID NO: 1563914
uuacuugagcccggaaauc

SEQ ID NO: 1841722 - RNA, 19 nt, Artificial Sequence
  Description of Artificial Sequence: Synthetic oligonucleotide
  Antisense strand to SEQ ID NO: 1841721
gauuuccgggcucaaguaa

SEQ ID NO: 1841723 - RNA, 19 nt, Artificial Sequence
  Description of Artificial Sequence: Synthetic oligonucleotide
  Sense strand starting at position 35 of SEQ ID NO: 1563915
agagcaucagucuggguau

SEQ ID NO: 1841724 - RNA, 19 nt, Artificial Sequence
  Description of Artificial Sequence: Synthetic oligonucleotide
  Antisense strand to SEQ ID NO: 1841723
auacccagacugaugcucu

SEQ ID NO: 1841725 - RNA, 19 nt, Artificial Sequence
  Description of Artificial Sequence: Synthetic oligonucleotide
  Sense strand starting at position 78 of SEQ ID NO: 1563915
gcuguaagaccuuggaaac

SEQ ID NO: 1841726 - RNA, 19 nt, Artificial Sequence
  Description of Artificial Sequence: Synthetic oligonucleotide
  Antisense strand to SEQ ID NO: 1841725
guuuccaaggucuuacagc

SEQ ID NO: 1841727 - RNA, 19 nt, Artificial Sequence
  Description of Artificial Sequence: Synthetic oligonucleotide
  Sense strand starting at position 89 of SEQ ID NO: 1563915
uuggaaacgucacuuaacu

SEQ ID NO: 1841728 - RNA, 19 nt, Artificial Sequence
  Description of Artificial Sequence: Synthetic oligonucleotide
  Antisense strand to SEQ ID NO: 1841727
aguuaagugacguuuccaa

SEQ ID NO: 1841729 - RNA, 19 nt, Artificial Sequence
  Description of Artificial Sequence: Synthetic oligonucleotide
  Sense strand starting at position 158 of SEQ ID NO: 1563915
aaaguuguuguaggaaaug

SEQ ID NO: 1841730 - RNA, 19 nt, Artificial Sequence
  Description of Artificial Sequence: Synthetic oligonucleotide
  Antisense strand to SEQ ID NO: 1841729
cauuuccuacaacaacuuu

SEQ ID NO: 1841731 - RNA, 19 nt, Artificial Sequence
  Description of Artificial Sequence: Synthetic oligonucleotide
  Sense strand starting at position 163 of SEQ ID NO: 1563915
uguuguaggaaaugaaaua

SEQ ID NO: 1841732 - RNA, 19 nt, Artificial Sequence
  Description of Artificial Sequence: Synthetic oligonucleotide
  Antisense strand to SEQ ID NO: 1841731
uauuucauuuccuacaaca

SEQ ID NO: 1841733 - RNA, 19 nt, Artificial Sequence
  Description of Artificial Sequence: Synthetic oligonucleotide
  Sense strand starting at position 196 of SEQ ID NO: 1563915
uguguuguacaucauaaag

SEQ ID NO: 1841734 - RNA, 19 nt, Artificial Sequence
  Description of Artificial Sequence: Synthetic oligonucleotide
  Antisense strand to SEQ ID NO: 1841733
cuuuaugauguacaacaca

SEQ ID NO: 1841735 - RNA, 19 nt, Artificial Sequence
  Description of Artificial Sequence: Synthetic oligonucleotide
  Sense strand starting at position 269 of SEQ ID NO: 1563915
gcaaucuucuaggcacuga

SEQ ID NO: 1841736 - RNA, 19 nt, Artificial Sequence
  Description of Artificial Sequence: Synthetic oligonucleotide
  Antisense strand to SEQ ID NO: 1841735
ucagugccuagaagauugc

SEQ ID NO: 1841737 - RNA, 19 nt, Artificial Sequence
  Description of Artificial Sequence: Synthetic oligonucleotide
  Sense strand starting at position 345 of SEQ ID NO: 1563915
gugggaagguaagauuuau

SEQ ID NO: 1841738 - RNA, 19 nt, Artificial Sequence
  Description of Artificial Sequence: Synthetic oligonucleotide
  Antisense strand to SEQ ID NO: 1841737
auaaaucuuaccuucccac

SEQ ID NO: 1841739 - RNA, 19 nt, Artificial Sequence
  Description of Artificial Sequence: Synthetic oligonucleotide
  Sense strand starting at position 561 of SEQ ID NO: 1563915
guaaccaguuccuccuaau

SEQ ID NO: 1841740 - RNA, 19 nt, Artificial Sequence
  Description of Artificial Sequence: Synthetic oligonucleotide
  Antisense strand to SEQ ID NO: 1841739
auuaggaggaacugguuac

SEQ ID NO: 1841741 - RNA, 19 nt, Artificial Sequence
  Description of Artificial Sequence: Synthetic oligonucleotide
  Sense strand starting at position 577 of SEQ ID NO: 1563915
aaucauuaucucuggaggu

SEQ ID NO: 1841742 - RNA, 19 nt, Artificial Sequence
  Description of Artificial Sequence: Synthetic oligonucleotide
  Antisense strand to SEQ ID NO: 1841741
accuccagagauaaugauu

SEQ ID NO: 1841743 - RNA, 19 nt, Artificial Sequence
  Description of Artificial Sequence: Synthetic oligonucleotide
  Sense strand starting at position 581 of SEQ ID NO: 1563915
auuaucucuggagguagaa

SEQ ID NO: 1841744 - RNA, 19 nt, Artificial Sequence
  Description of Artificial Sequence: Synthetic oligonucleotide
  Antisense strand to SEQ ID NO: 1841743
uucuaccuccagagauaau

SEQ ID NO: 1841745 - RNA, 19 nt, Artificial Sequence
  Description of Artificial Sequence: Synthetic oligonucleotide
  Sense strand starting at position 601 of SEQ ID NO: 1563915
uuaugcuaaccuugagaag

SEQ ID NO: 1841746 - RNA, 19 nt, Artificial Sequence
  Description of Artificial Sequence: Synthetic oligonucleotide
  Antisense strand to SEQ ID NO: 1841745
cuucucaagguuagcauaa

SEQ ID NO: 1841747 - RNA, 19 nt, Artificial Sequence
  Description of Artificial Sequence: Synthetic oligonucleotide
  Sense strand starting at position 625 of SEQ ID NO: 1563915
aaaguaaugucugugauga

SEQ ID NO: 1841748 - RNA, 19 nt, Artificial Sequence
  Description of Artificial Sequence: Synthetic oligonucleotide
  Antisense strand to SEQ ID NO: 1841747
ucaucacagacauuacuuu

SEQ ID NO: 1841749 - RNA, 19 nt, Artificial Sequence
  Description of Artificial Sequence: Synthetic oligonucleotide
  Sense strand starting at position 626 of SEQ ID NO: 1563915
aaguaaugucugugaugag

SEQ ID NO: 1841750 - RNA, 19 nt, Artificial Sequence
  Description of Artificial Sequence: Synthetic oligonucleotide
  Antisense strand to SEQ ID NO: 1841749
cucaucacagacauuacuu

SEQ ID NO: 1841751 - RNA, 19 nt, Artificial Sequence
  Description of Artificial Sequence: Synthetic oligonucleotide
  Sense strand starting at position 635 of SEQ ID NO: 1563915
cugugaugagagcaaagua

SEQ ID NO: 1841752 - RNA, 19 nt, Artificial Sequence
  Description of Artificial Sequence: Synthetic oligonucleotide
  Antisense strand to SEQ ID NO: 1841751
uacuuugcucucaucacag

SEQ ID NO: 1841753 - RNA, 19 nt, Artificial Sequence
  Description of Artificial Sequence: Synthetic oligonucleotide
  Sense strand starting at position 829 of SEQ ID NO: 1563915
cuaugauugcaggaauguc

SEQ ID NO: 1841754 - RNA, 19 nt, Artificial Sequence
  Description of Artificial Sequence: Synthetic oligonucleotide
  Antisense strand to SEQ ID NO: 1841753
gacauuccugcaaucauag

SEQ ID NO: 1841755 - RNA, 19 nt, Artificial Sequence
  Description of Artificial Sequence: Synthetic oligonucleotide
  Sense strand starting at position 1190 of SEQ ID NO: 1563915
uccauuucuuuguuugagu

SEQ ID NO: 1841756 - RNA, 19 nt, Artificial Sequence
  Description of Artificial Sequence: Synthetic oligonucleotide
  Antisense strand to SEQ ID NO: 1841755
acucaaacaaagaaaugga

SEQ ID NO: 1841757 - RNA, 19 nt, Artificial Sequence
  Description of Artificial Sequence: Synthetic oligonucleotide
  Sense strand starting at position 1195 of SEQ ID NO: 1563915
uucuuuguuugaguccaga

SEQ ID NO: 1841758 - RNA, 19 nt, Artificial Sequence
  Description of Artificial Sequence: Synthetic oligonucleotide
  Antisense strand to SEQ ID NO: 1841757
ucuggacucaaacaaagaa

SEQ ID NO: 1841759 - RNA, 19 nt, Artificial Sequence
  Description of Artificial Sequence: Synthetic oligonucleotide
  Sense strand starting at position 1213 of SEQ ID NO: 1563915
acacauuaugcgcaaaucu

SEQ ID NO: 1841760 - RNA, 19 nt, Artificial Sequence
  Description of Artificial Sequence: Synthetic oligonucleotide
  Antisense strand to SEQ ID NO: 1841759
agauuugcgcauaaugugu

SEQ ID NO: 1841761 - RNA, 19 nt, Artificial Sequence
  Description of Artificial Sequence: Synthetic oligonucleotide
  Sense strand starting at position 1408 of SEQ ID NO: 1563915
acuccaacugucgaauaua

SEQ ID NO: 1841762 - RNA, 19 nt, Artificial Sequence
  Description of Artificial Sequence: Synthetic oligonucleotide
  Antisense strand to SEQ ID NO: 1841761
uauauucgacaguuggagu

SEQ ID NO: 1841763 - RNA, 19 nt, Artificial Sequence
  Description of Artificial Sequence: Synthetic oligonucleotide
  Sense strand starting at position 1411 of SEQ ID NO: 1563915
ccaacugucgaauauauuc

SEQ ID NO: 1841764 - RNA, 19 nt, Artificial Sequence
  Description of Artificial Sequence: Synthetic oligonucleotide
  Antisense strand to SEQ ID NO: 1841763
gaauauauucgacaguugg

SEQ ID NO: 1841765 - RNA, 19 nt, Artificial Sequence
  Description of Artificial Sequence: Synthetic oligonucleotide
  Sense strand starting at position 1661 of SEQ ID NO: 1563915
ggccaauagugaucccucu

SEQ ID NO: 1841766 - RNA, 19 nt, Artificial Sequence
  Description of Artificial Sequence: Synthetic oligonucleotide
  Antisense strand to SEQ ID NO: 1841765
agagggaucacuauuggcc

SEQ ID NO: 1841767 - RNA, 19 nt, Artificial Sequence
  Description of Artificial Sequence: Synthetic oligonucleotide
  Sense strand starting at position 2681 of SEQ ID NO: 1563915
aagggaauuuaggaagguu

SEQ ID NO: 1841768 - RNA, 19 nt, Artificial Sequence
  Description of Artificial Sequence: Synthetic oligonucleotide
  Antisense strand to SEQ ID NO: 1841767
aaccuuccuaaauucccuu

SEQ ID NO: 1841769 - RNA, 19 nt, Artificial Sequence
  Description of Artificial Sequence: Synthetic oligonucleotide
  Sense strand starting at position 2698 of SEQ ID NO: 1563915
uucucugagguucgagaau

SEQ ID NO: 1841770 - RNA, 19 nt, Artificial Sequence
  Description of Artificial Sequence: Synthetic oligonucleotide
  Antisense strand to SEQ ID NO: 1841769
auucucgaaccucagagaa

SEQ ID NO: 1841771 - RNA, 19 nt, Artificial Sequence
  Description of Artificial Sequence: Synthetic oligonucleotide
  Sense strand starting at position 2704 of SEQ ID NO: 1563915
gagguucgagaauaugguu

SEQ ID NO: 1841772 - RNA, 19 nt, Artificial Sequence
  Description of Artificial Sequence: Synthetic oligonucleotide
  Antisense strand to SEQ ID NO: 1841771
aaccauauucucgaaccuc

SEQ ID NO: 1841773 - RNA, 19 nt, Artificial Sequence
  Description of Artificial Sequence: Synthetic oligonucleotide
  Sense strand starting at position 2709 of SEQ ID NO: 1563915
ucgagaauaugguuagaag

SEQ ID NO: 1841774 - RNA, 19 nt, Artificial Sequence
  Description of Artificial Sequence: Synthetic oligonucleotide
  Antisense strand to SEQ ID NO: 1841773
cuucuaaccauauucucga

SEQ ID NO: 1841775 - RNA, 19 nt, Artificial Sequence
  Description of Artificial Sequence: Synthetic oligonucleotide
  Sense strand starting at position 2802 of SEQ ID NO: 1563915
gagaccauguuccuuguaa

SEQ ID NO: 1841776 - RNA, 19 nt, Artificial Sequence
  Description of Artificial Sequence: Synthetic oligonucleotide
  Antisense strand to SEQ ID NO: 1841775
uuacaaggaacauggucuc

SEQ ID NO: 1841777 - RNA, 19 nt, Artificial Sequence
  Description of Artificial Sequence: Synthetic oligonucleotide
  Sense strand starting at position 2803 of SEQ ID NO: 1563915
agaccauguuccuuguaag

SEQ ID NO: 1841778 - RNA, 19 nt, Artificial Sequence
  Description of Artificial Sequence: Synthetic oligonucleotide
  Antisense strand to SEQ ID NO: 1841777
cuuacaaggaacauggucu

SEQ ID NO: 1841779 - RNA, 19 nt, Artificial Sequence
  Description of Artificial Sequence: Synthetic oligonucleotide
  Sense strand starting at position 2893 of SEQ ID NO: 1563915
cagagaguagcuugaaaug

SEQ ID NO: 1841780 - RNA, 19 nt, Artificial Sequence
  Description of Artificial Sequence: Synthetic oligonucleotide
  Antisense strand to SEQ ID NO: 1841779
cauuucaagcuacucucug

SEQ ID NO: 1841781 - RNA, 19 nt, Artificial Sequence
  Description of Artificial Sequence: Synthetic oligonucleotide
  Sense strand starting at position 3070 of SEQ ID NO: 1563915
cacaguucugaucacgauu

SEQ ID NO: 1841782 - RNA, 19 nt, Artificial Sequence
  Description of Artificial Sequence: Synthetic oligonucleotide
  Antisense strand to SEQ ID NO: 1841781
aaucgugaucagaacugug

SEQ ID NO: 1841783 - RNA, 19 nt, Artificial Sequence
  Description of Artificial Sequence: Synthetic oligonucleotide
  Sense strand starting at position 3073 of SEQ ID NO: 1563915
aguucugaucacgauugca

SEQ ID NO: 1841784 - RNA, 19 nt, Artificial Sequence
  Description of Artificial Sequence: Synthetic oligonucleotide
  Antisense strand to SEQ ID NO: 1841783
ugcaaucgugaucagaacu

SEQ ID NO: 1841785 - RNA, 19 nt, Artificial Sequence
  Description of Artificial Sequence: Synthetic oligonucleotide
  Sense strand starting at position 3106 of SEQ ID NO: 1563915
guaucaacuuaagugcaaa

SEQ ID NO: 1841786 - RNA, 19 nt, Artificial Sequence
  Description of Artificial Sequence: Synthetic oligonucleotide
  Antisense strand to SEQ ID NO: 1841785
uuugcacuuaaguugauac

SEQ ID NO: 1841787 - RNA, 19 nt, Artificial Sequence
  Description of Artificial Sequence: Synthetic oligonucleotide
  Sense strand starting at position 3178 of SEQ ID NO: 1563915
gcucaaucacuguagccaa

SEQ ID NO: 1841788 - RNA, 19 nt, Artificial Sequence
  Description of Artificial Sequence: Synthetic oligonucleotide
  Antisense strand to SEQ ID NO: 1841787
uuggcuacagugauugagc

SEQ ID NO: 1841789 - RNA, 19 nt, Artificial Sequence
  Description of Artificial Sequence: Synthetic oligonucleotide
  Sense strand starting at position 3284 of SEQ ID NO: 1563915
ugucugucggcgggaauuu

SEQ ID NO: 1841790 - RNA, 19 nt, Artificial Sequence
  Description of Artificial Sequence: Synthetic oligonucleotide
  Antisense strand to SEQ ID NO: 1841789
aaauucccgccgacagaca

SEQ ID NO: 1841791 - RNA, 19 nt, Artificial Sequence
  Description of Artificial Sequence: Synthetic oligonucleotide
  Sense strand starting at position 3285 of SEQ ID NO: 1563915
gucugucggcgggaauuua

SEQ ID NO: 1841792 - RNA, 19 nt, Artificial Sequence
  Description of Artificial Sequence: Synthetic oligonucleotide
  Antisense strand to SEQ ID NO: 1841791
uaaauucccgccgacagac

SEQ ID NO: 1841793 - RNA, 19 nt, Artificial Sequence
  Description of Artificial Sequence: Synthetic oligonucleotide
  Sense strand starting at position 3320 of SEQ ID NO: 1563915
ugcucaauacagcaagagu

SEQ ID NO: 1841794 - RNA, 19 nt, Artificial Sequence
  Description of Artificial Sequence: Synthetic oligonucleotide
  Antisense strand to SEQ ID NO: 1841793
acucuugcuguauugagca

SEQ ID NO: 1841795 - RNA, 19 nt, Artificial Sequence
  Description of Artificial Sequence: Synthetic oligonucleotide
  Sense strand starting at position 3369 of SEQ ID NO: 1563915
ucuguuguccuggaauuga

SEQ ID NO: 1841796 - RNA, 19 nt, Artificial Sequence
  Description of Artificial Sequence: Synthetic oligonucleotide
  Antisense strand to SEQ ID NO: 1841795
ucaauuccaggacaacaga

SEQ ID NO: 1841797 - RNA, 19 nt, Artificial Sequence
  Description of Artificial Sequence: Synthetic oligonucleotide
  Sense strand starting at position 3532 of SEQ ID NO: 1563915
gguguauuagacugagagg

SEQ ID NO: 1841798 - RNA, 19 nt, Artificial Sequence
  Description of Artificial Sequence: Synthetic oligonucleotide
  Antisense strand to SEQ ID NO: 1841797
ccucucagucuaauacacc

SEQ ID NO: 1841799 - RNA, 19 nt, Artificial Sequence
  Description of Artificial Sequence: Synthetic oligonucleotide
  Sense strand starting at position 3610 of SEQ ID NO: 1563915
cguggugggcauucauguu

SEQ ID NO: 1841800 - RNA, 19 nt, Artificial Sequence
  Description of Artificial Sequence: Synthetic oligonucleotide
  Antisense strand to SEQ ID NO: 1841799
aacaugaaugcccaccacg

SEQ ID NO: 1841801 - RNA, 19 nt, Artificial Sequence
  Description of Artificial Sequence: Synthetic oligonucleotide
  Sense strand starting at position 3671 of SEQ ID NO: 1563915
ugauacaugcugugaagaa

SEQ ID NO: 1841802 - RNA, 19 nt, Artificial Sequence
  Description of Artificial Sequence: Synthetic oligonucleotide
  Antisense strand to SEQ ID NO: 1841801
uucuucacagcauguauca

SEQ ID NO: 1841803 - RNA, 19 nt, Artificial Sequence
  Description of Artificial Sequence: Synthetic oligonucleotide
  Sense strand starting at position 36 of SEQ ID NO: 1563916
guuugagggccauaaggau

SEQ ID NO: 1841804 - RNA, 19 nt, Artificial Sequence
  Description of Artificial Sequence: Synthetic oligonucleotide
  Antisense strand to SEQ ID NO: 1841803
auccuuauggcccucaaac

SEQ ID NO: 1841805 - RNA, 19 nt, Artificial Sequence
  Description of Artificial Sequence: Synthetic oligonucleotide
  Sense strand starting at position 108 of SEQ ID NO: 1563916
cgaggucucgcauggaauu

SEQ ID NO: 1841806 - RNA, 19 nt, Artificial Sequence
  Description of Artificial Sequence: Synthetic oligonucleotide
  Antisense strand to SEQ ID NO: 1841805
aauuccaugcgagaccucg

SEQ ID NO: 1841807 - RNA, 19 nt, Artificial Sequence
  Description of Artificial Sequence: Synthetic oligonucleotide
  Sense strand starting at position 109 of SEQ ID NO: 1563916
gaggucucgcauggaauuu

SEQ ID NO: 1841808 - RNA, 19 nt, Artificial Sequence
  Description of Artificial Sequence: Synthetic oligonucleotide
  Antisense strand to SEQ ID NO: 1841807
aaauuccaugcgagaccuc

SEQ ID NO: 1841809 - RNA, 19 nt, Artificial Sequence
  Description of Artificial Sequence: Synthetic oligonucleotide
  Sense strand starting at position 264 of SEQ ID NO: 1563916
acgagauacuuccaucaca

SEQ ID NO: 1841810 - RNA, 19 nt, Artificial Sequence
  Description of Artificial Sequence: Synthetic oligonucleotide
  Antisense strand to SEQ ID NO: 1841809
ugugauggaaguaucucgu

SEQ ID NO: 1841811 - RNA, 19 nt, Artificial Sequence
  Description of Artificial Sequence: Synthetic oligonucleotide
  Sense strand starting at position 342 of SEQ ID NO: 1563916
gagggaugcucccugucuu

SEQ ID NO: 1841812 - RNA, 19 nt, Artificial Sequence
  Description of Artificial Sequence: Synthetic oligonucleotide
  Antisense strand to SEQ ID NO: 1841811
aagacagggagcaucccuc

SEQ ID NO: 1841813 - RNA, 19 nt, Artificial Sequence
  Description of Artificial Sequence: Synthetic oligonucleotide
  Sense strand starting at position 343 of SEQ ID NO: 1563916
agggaugcucccugucuuu

SEQ ID NO: 1841814 - RNA, 19 nt, Artificial Sequence
  Description of Artificial Sequence: Synthetic oligonucleotide
  Antisense strand to SEQ ID NO: 1841813
aaagacagggagcaucccu

SEQ ID NO: 1841815 - RNA, 19 nt, Artificial Sequence
  Description of Artificial Sequence: Synthetic oligonucleotide
  Sense strand starting at position 353 of SEQ ID NO: 1563916
ccugucuuuccacauguaa

SEQ ID NO: 1841816 - RNA, 19 nt, Artificial Sequence
  Description of Artificial Sequence: Synthetic oligonucleotide
  Antisense strand to SEQ ID NO: 1841815
uuacauguggaaagacagg

SEQ ID NO: 1841817 - RNA, 19 nt, Artificial Sequence
  Description of Artificial Sequence: Synthetic oligonucleotide
  Sense strand starting at position 511 of SEQ ID NO: 1563916
acuggaagauuguuccagu

SEQ ID NO: 1841818 - RNA, 19 nt, Artificial Sequence
  Description of Artificial Sequence: Synthetic oligonucleotide
  Antisense strand to SEQ ID NO: 1841817
acuggaacaaucuuccagu

SEQ ID NO: 1841819 - RNA, 19 nt, Artificial Sequence
  Description of Artificial Sequence: Synthetic oligonucleotide
  Sense strand starting at position 512 of SEQ ID NO: 1563916
cuggaagauuguuccagua

SEQ ID NO: 1841820 - RNA, 19 nt, Artificial Sequence
  Description of Artificial Sequence: Synthetic oligonucleotide
  Antisense strand to SEQ ID NO: 1841819
uacuggaacaaucuuccag

SEQ ID NO: 1841821 - RNA, 19 nt, Artificial Sequence
  Description of Artificial Sequence: Synthetic oligonucleotide
  Sense strand starting at position 577 of SEQ ID NO: 1563916
uggaacagauggcucuaau

SEQ ID NO: 1841822 - RNA, 19 nt, Artificial Sequence
  Description of Artificial Sequence: Synthetic oligonucleotide
  Antisense strand to SEQ ID NO: 1841821
auuagagccaucuguucca

SEQ ID NO: 1841823 - RNA, 19 nt, Artificial Sequence
  Description of Artificial Sequence: Synthetic oligonucleotide
  Sense strand starting at position 588 of SEQ ID NO: 1563916
gcucuaaugcaagacagau

SEQ ID NO: 1841824 - RNA, 19 nt, Artificial Sequence
  Description of Artificial Sequence: Synthetic oligonucleotide
  Antisense strand to SEQ ID NO: 1841823
aucugucuugcauuagagc

SEQ ID NO: 1841825 - RNA, 19 nt, Artificial Sequence
  Description of Artificial Sequence: Synthetic oligonucleotide
  Sense strand starting at position 640 of SEQ ID NO: 1563916
uuguaucagaggugaguga

SEQ ID NO: 1841826 - RNA, 19 nt, Artificial Sequence
  Description of Artificial Sequence: Synthetic oligonucleotide
  Antisense strand to SEQ ID NO: 1841825
ucacucaccucugauacaa

SEQ ID NO: 1841827 - RNA, 19 nt, Artificial Sequence
  Description of Artificial Sequence: Synthetic oligonucleotide
  Sense strand starting at position 809 of SEQ ID NO: 1563916
gcuggaaacuaaugauuua

SEQ ID NO: 1841828 - RNA, 19 nt, Artificial Sequence
  Description of Artificial Sequence: Synthetic oligonucleotide
  Antisense strand to SEQ ID NO: 1841827
uaaaucauuaguuuccagc

SEQ ID NO: 1841829 - RNA, 19 nt, Artificial Sequence
  Description of Artificial Sequence: Synthetic oligonucleotide
  Sense strand starting at position 816 of SEQ ID NO: 1563916
acuaaugauuuaugugaga

SEQ ID NO: 1841830 - RNA, 19 nt, Artificial Sequence
  Description of Artificial Sequence: Synthetic oligonucleotide
  Antisense strand to SEQ ID NO: 1841829
ucucacauaaaucauuagu

SEQ ID NO: 1841831 - RNA, 19 nt, Artificial Sequence
  Description of Artificial Sequence: Synthetic oligonucleotide
  Sense strand starting at position 821 of SEQ ID NO: 1563916
ugauuuaugugagaugcca

SEQ ID NO: 1841832 - RNA, 19 nt, Artificial Sequence
  Description of Artificial Sequence: Synthetic oligonucleotide
  Antisense strand to SEQ ID NO: 1841831
uggcaucucacauaaauca

SEQ ID NO: 1841833 - RNA, 19 nt, Artificial Sequence
  Description of Artificial Sequence: Synthetic oligonucleotide
  Sense strand starting at position 955 of SEQ ID NO: 1563916
gacuuagaugcucaaguga

SEQ ID NO: 1841834 - RNA, 19 nt, Artificial Sequence
  Description of Artificial Sequence: Synthetic oligonucleotide
  Antisense strand to SEQ ID NO: 1841833
ucacuugagcaucuaaguc

SEQ ID NO: 1841835 - RNA, 19 nt, Artificial Sequence
  Description of Artificial Sequence: Synthetic oligonucleotide
  Sense strand starting at position 962 of SEQ ID NO: 1563916
augcucaagugaucacagu

SEQ ID NO: 1841836 - RNA, 19 nt, Artificial Sequence
  Description of Artificial Sequence: Synthetic oligonucleotide
  Antisense strand to SEQ ID NO: 1841835
acugugaucacuugagcau

SEQ ID NO: 1841837 - RNA, 19 nt, Artificial Sequence
  Description of Artificial Sequence: Synthetic oligonucleotide
  Sense strand starting at position 963 of SEQ ID NO: 1563916
ugcucaagugaucacagua

SEQ ID NO: 1841838 - RNA, 19 nt, Artificial Sequence
  Description of Artificial Sequence: Synthetic oligonucleotide
  Antisense strand to SEQ ID NO: 1841837
uacugugaucacuugagca

SEQ ID NO: 1841839 - RNA, 19 nt, Artificial Sequence
  Description of Artificial Sequence: Synthetic oligonucleotide
  Sense strand starting at position 1356 of SEQ ID NO: 1563916
ggcuguaccuauuuaaguu

SEQ ID NO: 1841840 - RNA, 19 nt, Artificial Sequence
  Description of Artificial Sequence: Synthetic oligonucleotide
  Antisense strand to SEQ ID NO: 1841839
aacuuaaauagguacagcc

SEQ ID NO: 1841841 - RNA, 19 nt, Artificial Sequence
  Description of Artificial Sequence: Synthetic oligonucleotide
  Sense strand starting at position 1468 of SEQ ID NO: 1563916
caggguaucuuggcuauaa

SEQ ID NO: 1841842 - RNA, 19 nt, Artificial Sequence
  Description of Artificial Sequence: Synthetic oligonucleotide
  Antisense strand to SEQ ID NO: 1841841
uuauagccaagauacccug

SEQ ID NO: 1841843 - RNA, 19 nt, Artificial Sequence
  Description of Artificial Sequence: Synthetic oligonucleotide
  Sense strand starting at position 1469 of SEQ ID NO: 1563916
aggguaucuuggcuauaaa

SEQ ID NO: 1841844 - RNA, 19 nt, Artificial Sequence
  Description of Artificial Sequence: Synthetic oligonucleotide
  Antisense strand to SEQ ID NO: 1841843
uuuauagccaagauacccu

SEQ ID NO: 1841845 - RNA, 19 nt, Artificial Sequence
  Description of Artificial Sequence: Synthetic oligonucleotide
  Sense strand starting at position 1535 of SEQ ID NO: 1563916
guuacuaauuaggaaacaa

SEQ ID NO: 1841846 - RNA, 19 nt, Artificial Sequence
  Description of Artificial Sequence: Synthetic oligonucleotide
  Antisense strand to SEQ ID NO: 1841845
uuguuuccuaauuaguaac

SEQ ID NO: 1841847 - RNA, 19 nt, Artificial Sequence
  Description of Artificial Sequence: Synthetic oligonucleotide
  Sense strand starting at position 1658 of SEQ ID NO: 1563916
gauuguggucucuaucauu

SEQ ID NO: 1841848 - RNA, 19 nt, Artificial Sequence
  Description of Artificial Sequence: Synthetic oligonucleotide
  Antisense strand to SEQ ID NO: 1841847
aaugauagagaccacaauc

SEQ ID NO: 1841849 - RNA, 19 nt, Artificial Sequence
  Description of Artificial Sequence: Synthetic oligonucleotide
  Sense strand starting at position 1726 of SEQ ID NO: 1563916
uguggcaggaaaugucuaa

SEQ ID NO: 1841850 - RNA, 19 nt, Artificial Sequence
  Description of Artificial Sequence: Synthetic oligonucleotide
  Antisense strand to SEQ ID NO: 1841849
uuagacauuuccugccaca

SEQ ID NO: 1841851 - RNA, 19 nt, Artificial Sequence
  Description of Artificial Sequence: Synthetic oligonucleotide
  Sense strand starting at position 1730 of SEQ ID NO: 1563916
gcaggaaaugucuaaggug

SEQ ID NO: 1841852 - RNA, 19 nt, Artificial Sequence
  Description of Artificial Sequence: Synthetic oligonucleotide
  Antisense strand to SEQ ID NO: 1841851
caccuuagacauuuccugc

SEQ ID NO: 1841853 - RNA, 19 nt, Artificial Sequence
  Description of Artificial Sequence: Synthetic oligonucleotide
  Sense strand starting at position 1744 of SEQ ID NO: 1563916
aggugagccugagaaauca

SEQ ID NO: 1841854 - RNA, 19 nt, Artificial Sequence
  Description of Artificial Sequence: Synthetic oligonucleotide
  Antisense strand to SEQ ID NO: 1841853
ugauuucucaggcucaccu

SEQ ID NO: 1841855 - RNA, 19 nt, Artificial Sequence
  Description of Artificial Sequence: Synthetic oligonucleotide
  Sense strand starting at position 1801 of SEQ ID NO: 1563916
gguguugugucaaauggac

SEQ ID NO: 1841856 - RNA, 19 nt, Artificial Sequence
  Description of Artificial Sequence: Synthetic oligonucleotide
  Antisense strand to SEQ ID NO: 1841855
guccauuugacacaacacc

SEQ ID NO: 1841857 - RNA, 19 nt, Artificial Sequence
  Description of Artificial Sequence: Synthetic oligonucleotide
  Sense strand starting at position 1951 of SEQ ID NO: 1563916
acuauuauuggucaccuuu

SEQ ID NO: 1841858 - RNA, 19 nt, Artificial Sequence
  Description of Artificial Sequence: Synthetic oligonucleotide
  Antisense strand to SEQ ID NO: 1841857
aaaggugaccaauaauagu

SEQ ID NO: 1841859 - RNA, 19 nt, Artificial Sequence
  Description of Artificial Sequence: Synthetic oligonucleotide
  Sense strand starting at position 1981 of SEQ ID NO: 1563916
ggaaccaugucauuauucu

SEQ ID NO: 1841860 - RNA, 19 nt, Artificial Sequence
  Description of Artificial Sequence: Synthetic oligonucleotide
  Antisense strand to SEQ ID NO: 1841859
agaauaaugacaugguucc

SEQ ID NO: 1841861 - RNA, 19 nt, Artificial Sequence
  Description of Artificial Sequence: Synthetic oligonucleotide
  Sense strand starting at position 1989 of SEQ ID NO: 1563916
gucauuauucugcaaacag

SEQ ID NO: 1841862 - RNA, 19 nt, Artificial Sequence
  Description of Artificial Sequence: Synthetic oligonucleotide
  Antisense strand to SEQ ID NO: 1841861
cuguuugcagaauaaugac

SEQ ID NO: 1841863 - RNA, 19 nt, Artificial Sequence
  Description of Artificial Sequence: Synthetic oligonucleotide
  Sense strand starting at position 2042 of SEQ ID NO: 1563916
uguauucuccuguauaaau

SEQ ID NO: 1841864 - RNA, 19 nt, Artificial Sequence
  Description of Artificial Sequence: Synthetic oligonucleotide
  Antisense strand to SEQ ID NO: 1841863
auuuauacaggagaauaca

SEQ ID NO: 1841865 - RNA, 19 nt, Artificial Sequence
  Description of Artificial Sequence: Synthetic oligonucleotide
  Sense strand starting at position 2491 of SEQ ID NO: 1563916
auuaucaauggcugcuaaa

SEQ ID NO: 1841866 - RNA, 19 nt, Artificial Sequence
  Description of Artificial Sequence: Synthetic oligonucleotide
  Antisense strand to SEQ ID NO: 1841865
uuuagcagccauugauaau

SEQ ID NO: 1841867 - RNA, 19 nt, Artificial Sequence
  Description of Artificial Sequence: Synthetic oligonucleotide
  Sense strand starting at position 2612 of SEQ ID NO: 1563916
aggauagccuucucaacaa

SEQ ID NO: 1841868 - RNA, 19 nt, Artificial Sequence
  Description of Artificial Sequence: Synthetic oligonucleotide
  Antisense strand to SEQ ID NO: 1841867
uuguugagaaggcuauccu

SEQ ID NO: 1841869 - RNA, 19 nt, Artificial Sequence
  Description of Artificial Sequence: Synthetic oligonucleotide
  Sense strand starting at position 2822 of SEQ ID NO: 1563916
aacaguucuuaggcuugau

SEQ ID NO: 1841870 - RNA, 19 nt, Artificial Sequence
  Description of Artificial Sequence: Synthetic oligonucleotide
  Antisense strand to SEQ ID NO: 1841869
aucaagccuaagaacuguu

SEQ ID NO: 1841871 - RNA, 19 nt, Artificial Sequence
  Description of Artificial Sequence: Synthetic oligonucleotide
  Sense strand starting at position 2826 of SEQ ID NO: 1563916
guucuuaggcuugauacca

SEQ ID NO: 1841872 - RNA, 19 nt, Artificial Sequence
  Description of Artificial Sequence: Synthetic oligonucleotide
  Antisense strand to SEQ ID NO: 1841871
ugguaucaagccuaagaac

SEQ ID NO: 1841873 - RNA, 19 nt, Artificial Sequence
  Description of Artificial Sequence: Synthetic oligonucleotide
  Sense strand starting at position 2874 of SEQ ID NO: 1563916
aauggacgucauugaaauu

SEQ ID NO: 1841874 - RNA, 19 nt, Artificial Sequence
  Description of Artificial Sequence: Synthetic oligonucleotide
  Antisense strand to SEQ ID NO: 1841873
aauuucaaugacguccauu

SEQ ID NO: 1841875 - RNA, 19 nt, Artificial Sequence
  Description of Artificial Sequence: Synthetic oligonucleotide
  Sense strand starting at position 3159 of SEQ ID NO: 1563916
agucuaggucugggugaca

SEQ ID NO: 1841876 - RNA, 19 nt, Artificial Sequence
  Description of Artificial Sequence: Synthetic oligonucleotide
  Antisense strand to SEQ ID NO: 1841875
ugucacccagaccuagacu

SEQ ID NO: 1841877 - RNA, 19 nt, Artificial Sequence
  Description of Artificial Sequence: Synthetic oligonucleotide
  Sense strand starting at position 3288 of SEQ ID NO: 1563916
acacgcuugacagaagacu

SEQ ID NO: 1841878 - RNA, 19 nt, Artificial Sequence
  Description of Artificial Sequence: Synthetic oligonucleotide
  Antisense strand to SEQ ID NO: 1841877
agucuucugucaagcgugu

SEQ ID NO: 1841879 - RNA, 19 nt, Artificial Sequence
  Description of Artificial Sequence: Synthetic oligonucleotide
  Sense strand starting at position 3300 of SEQ ID NO: 1563916
gaagacuaguaguaccuaa

SEQ ID NO: 1841880 - RNA, 19 nt, Artificial Sequence
  Description of Artificial Sequence: Synthetic oligonucleotide
  Antisense strand to SEQ ID NO: 1841879
uuagguacuacuagucuuc

SEQ ID NO: 1841881 - RNA, 19 nt, Artificial Sequence
  Description of Artificial Sequence: Synthetic oligonucleotide
  Sense strand starting at position 3389 of SEQ ID NO: 1563916
auagacagauugcaaauaa

SEQ ID NO: 1841882 - RNA, 19 nt, Artificial Sequence
  Description of Artificial Sequence: Synthetic oligonucleotide
  Antisense strand to SEQ ID NO: 1841881
uuauuugcaaucugucuau

SEQ ID NO: 1841883 - RNA, 19 nt, Artificial Sequence
  Description of Artificial Sequence: Synthetic oligonucleotide
  Sense strand starting at position 3 of SEQ ID NO: 1563917
ugcucuuccgguguauuau

SEQ ID NO: 1841884 - RNA, 19 nt, Artificial Sequence
  Description of Artificial Sequence: Synthetic oligonucleotide
  Antisense strand to SEQ ID NO: 1841883
auaauacaccggaagagca

SEQ ID NO: 1841885 - RNA, 19 nt, Artificial Sequence
  Description of Artificial Sequence: Synthetic oligonucleotide
  Sense strand starting at position 4 of SEQ ID NO: 1563917
gcucuuccgguguauuaua

SEQ ID NO: 1841886 - RNA, 19 nt, Artificial Sequence
  Description of Artificial Sequence: Synthetic oligonucleotide
  Antisense strand to SEQ ID NO: 1841885
uauaauacaccggaagagc

SEQ ID NO: 1841887 - RNA, 19 nt, Artificial Sequence
  Description of Artificial Sequence: Synthetic oligonucleotide
  Sense strand starting at position 1113 of SEQ ID NO: 1563917
gccaaauucuccuuugagu

SEQ ID NO: 1841888 - RNA, 19 nt, Artificial Sequence
  Description of Artificial Sequence: Synthetic oligonucleotide
  Antisense strand to SEQ ID NO: 1841887
acucaaaggagaauuuggc

SEQ ID NO: 1841889 - RNA, 19 nt, Artificial Sequence
  Description of Artificial Sequence: Synthetic oligonucleotide
  Sense strand starting at position 1250 of SEQ ID NO: 1563917
cuugcaauuugggagaaga

SEQ ID NO: 1841890 - RNA, 19 nt, Artificial Sequence
  Description of Artificial Sequence: Synthetic oligonucleotide
  Antisense strand to SEQ ID NO: 1841889
ucuucucccaaauugcaag

SEQ ID NO: 1841891 - RNA, 19 nt, Artificial Sequence
  Description of Artificial Sequence: Synthetic oligonucleotide
  Sense strand starting at position 1505 of SEQ ID NO: 1563917
augagaugcuaugauggaa

SEQ ID NO: 1841892 - RNA, 19 nt, Artificial Sequence
  Description of Artificial Sequence: Synthetic oligonucleotide
  Antisense strand to SEQ ID NO: 1841891
uuccaucauagcaucucau

SEQ ID NO: 1841893 - RNA, 19 nt, Artificial Sequence
  Description of Artificial Sequence: Synthetic oligonucleotide
  Sense strand starting at position 1620 of SEQ ID NO: 1563917
cgggaugggcuguggaaau

SEQ ID NO: 1841894 - RNA, 19 nt, Artificial Sequence
  Description of Artificial Sequence: Synthetic oligonucleotide
  Antisense strand to SEQ ID NO: 1841893
auuuccacagcccaucccg

SEQ ID NO: 1841895 - RNA, 19 nt, Artificial Sequence
  Description of Artificial Sequence: Synthetic oligonucleotide
  Sense strand starting at position 2166 of SEQ ID NO: 1563917
agcuaucagacaggugauc

SEQ ID NO: 1841896 - RNA, 19 nt, Artificial Sequence
  Description of Artificial Sequence: Synthetic oligonucleotide
  Antisense strand to SEQ ID NO: 1841895
gaucaccugucugauagcu

SEQ ID NO: 1841897 - RNA, 19 nt, Artificial Sequence
  Description of Artificial Sequence: Synthetic oligonucleotide
  Sense strand starting at position 2219 of SEQ ID NO: 1563917
gcuugagacuuugucccaa

SEQ ID NO: 1841898 - RNA, 19 nt, Artificial Sequence
  Description of Artificial Sequence: Synthetic oligonucleotide
  Antisense strand to SEQ ID NO: 1841897
uugggacaaagucucaagc

SEQ ID NO: 1841899 - RNA, 19 nt, Artificial Sequence
  Description of Artificial Sequence: Synthetic oligonucleotide
  Sense strand starting at position 2445 of SEQ ID NO: 1563917
augccaguugucugaccau

SEQ ID NO: 1841900 - RNA, 19 nt, Artificial Sequence
  Description of Artificial Sequence: Synthetic oligonucleotide
  Antisense strand to SEQ ID NO: 1841899
auggucagacaacuggcau

SEQ ID NO: 1841901 - RNA, 19 nt, Artificial Sequence
  Description of Artificial Sequence: Synthetic oligonucleotide
  Sense strand starting at position 2523 of SEQ ID NO: 1563917
ccugccauuuguuuagcaa

SEQ ID NO: 1841902 - RNA, 19 nt, Artificial Sequence
  Description of Artificial Sequence: Synthetic oligonucleotide
  Antisense strand to SEQ ID NO: 1841901
uugcuaaacaaauggcagg

SEQ ID NO: 1841903 - RNA, 19 nt, Artificial Sequence
  Description of Artificial Sequence: Synthetic oligonucleotide
  Sense strand starting at position 2587 of SEQ ID NO: 1563917
uccuguggcuccucagaau

SEQ ID NO: 1841904 - RNA, 19 nt, Artificial Sequence
  Description of Artificial Sequence: Synthetic oligonucleotide
  Antisense strand to SEQ ID NO: 1841903
auucugaggagccacagga

SEQ ID NO: 1841905 - RNA, 19 nt, Artificial Sequence
  Description of Artificial Sequence: Synthetic oligonucleotide
  Sense strand starting at position 2593 of SEQ ID NO: 1563917
ggcuccucagaauguuuau

SEQ ID NO: 1841906 - RNA, 19 nt, Artificial Sequence
  Description of Artificial Sequence: Synthetic oligonucleotide
  Antisense strand to SEQ ID NO: 1841905
auaaacauucugaggagcc

SEQ ID NO: 1841907 - RNA, 19 nt, Artificial Sequence
  Description of Artificial Sequence: Synthetic oligonucleotide
  Sense strand starting at position 2600 of SEQ ID NO: 1563917
cagaauguuuaugucagga

SEQ ID NO: 1841908 - RNA, 19 nt, Artificial Sequence
  Description of Artificial Sequence: Synthetic oligonucleotide
  Antisense strand to SEQ ID NO: 1841907
uccugacauaaacauucug

SEQ ID NO: 1841909 - RNA, 19 nt, Artificial Sequence
  Description of Artificial Sequence: Synthetic oligonucleotide
  Sense strand starting at position 2619 of SEQ ID NO: 1563917
uagaauaagugagaagaaa

SEQ ID NO: 1841910 - RNA, 19 nt, Artificial Sequence
  Description of Artificial Sequence: Synthetic oligonucleotide
  Antisense strand to SEQ ID NO: 1841909
uuucuucucacuuauucua

SEQ ID NO: 1841911 - RNA, 19 nt, Artificial Sequence
  Description of Artificial Sequence: Synthetic oligonucleotide
  Sense strand starting at position 2641 of SEQ ID NO: 1563917
ucagucauguuugccuuua

SEQ ID NO: 1841912 - RNA, 19 nt, Artificial Sequence
  Description of Artificial Sequence: Synthetic oligonucleotide
  Antisense strand to SEQ ID NO: 1841911
uaaaggcaaacaugacuga

SEQ ID NO: 1841913 - RNA, 19 nt, Artificial Sequence
  Description of Artificial Sequence: Synthetic oligonucleotide
  Sense strand starting at position 2643 of SEQ ID NO: 1563917
agucauguuugccuuuaca

SEQ ID NO: 1841914 - RNA, 19 nt, Artificial Sequence
  Description of Artificial Sequence: Synthetic oligonucleotide
  Antisense strand to SEQ ID NO: 1841913
uguaaaggcaaacaugacu

SEQ ID NO: 1841915 - RNA, 19 nt, Artificial Sequence
  Description of Artificial Sequence: Synthetic oligonucleotide
  Sense strand starting at position 2693 of SEQ ID NO: 1563917
acucuuaaacuugguaagu

SEQ ID NO: 1841916 - RNA, 19 nt, Artificial Sequence
  Description of Artificial Sequence: Synthetic oligonucleotide
  Antisense strand to SEQ ID NO: 1841915
acuuaccaaguuuaagagu

SEQ ID NO: 1841917 - RNA, 19 nt, Artificial Sequence
  Description of Artificial Sequence: Synthetic oligonucleotide
  Sense strand starting at position 2704 of SEQ ID NO: 1563917
ugguaagucccauauaagc

SEQ ID NO: 1841918 - RNA, 19 nt, Artificial Sequence
  Description of Artificial Sequence: Synthetic oligonucleotide
  Antisense strand to SEQ ID NO: 1841917
gcuuauaugggacuuacca

SEQ ID NO: 1841919 - RNA, 19 nt, Artificial Sequence
  Description of Artificial Sequence: Synthetic oligonucleotide
  Sense strand starting at position 2760 of SEQ ID NO: 1563917
uuuauaacuuggguacuga

SEQ ID NO: 1841920 - RNA, 19 nt, Artificial Sequence
  Description of Artificial Sequence: Synthetic oligonucleotide
  Antisense strand to SEQ ID NO: 1841919
ucaguacccaaguuauaaa

SEQ ID NO: 1841921 - RNA, 19 nt, Artificial Sequence
  Description of Artificial Sequence: Synthetic oligonucleotide
  Sense strand starting at position 2816 of SEQ ID NO: 1563917
ccaguaauagggugcaacu

SEQ ID NO: 1841922 - RNA, 19 nt, Artificial Sequence
  Description of Artificial Sequence: Synthetic oligonucleotide
  Antisense strand to SEQ ID NO: 1841921
aguugcacccuauuacugg

SEQ ID NO: 1841923 - RNA, 19 nt, Artificial Sequence
  Description of Artificial Sequence: Synthetic oligonucleotide
  Sense strand starting at position 2818 of SEQ ID NO: 1563917
aguaauagggugcaacuau

SEQ ID NO: 1841924 - RNA, 19 nt, Artificial Sequence
  Description of Artificial Sequence: Synthetic oligonucleotide
  Antisense strand to SEQ ID NO: 1841923
auaguugcacccuauuacu

SEQ ID NO: 1841925 - RNA, 19 nt, Artificial Sequence
  Description of Artificial Sequence: Synthetic oligonucleotide
  Sense strand starting at position 2838 of SEQ ID NO: 1563917
gcuugcauguuauccuuaa

SEQ ID NO: 1841926 - RNA, 19 nt, Artificial Sequence
  Description of Artificial Sequence: Synthetic oligonucleotide
  Antisense strand to SEQ ID NO: 1841925
uuaaggauaacaugcaagc

SEQ ID NO: 1841927 - RNA, 19 nt, Artificial Sequence
  Description of Artificial Sequence: Synthetic oligonucleotide
  Sense strand starting at position 2839 of SEQ ID NO: 1563917
cuugcauguuauccuuaag

SEQ ID NO: 1841928 - RNA, 19 nt, Artificial Sequence
  Description of Artificial Sequence: Synthetic oligonucleotide
  Antisense strand to SEQ ID NO: 1841927
cuuaaggauaacaugcaag

SEQ ID NO: 1841929 - RNA, 19 nt, Artificial Sequence
  Description of Artificial Sequence: Synthetic oligonucleotide
  Sense strand starting at position 2842 of SEQ ID NO: 1563917
gcauguuauccuuaaguug

SEQ ID NO: 1841930 - RNA, 19 nt, Artificial Sequence
  Description of Artificial Sequence: Synthetic oligonucleotide
  Antisense strand to SEQ ID NO: 1841929
caacuuaaggauaacaugc

SEQ ID NO: 1841931 - RNA, 19 nt, Artificial Sequence
  Description of Artificial Sequence: Synthetic oligonucleotide
  Sense strand starting at position 2849 of SEQ ID NO: 1563917
auccuuaaguugucaaauc

SEQ ID NO: 1841932 - RNA, 19 nt, Artificial Sequence
  Description of Artificial Sequence: Synthetic oligonucleotide
  Antisense strand to SEQ ID NO: 1841931
gauuugacaacuuaaggau

SEQ ID NO: 1841933 - RNA, 19 nt, Artificial Sequence
  Description of Artificial Sequence: Synthetic oligonucleotide
  Sense strand starting at position 2857 of SEQ ID NO: 1563917
guugucaaaucauccugua

SEQ ID NO: 1841934 - RNA, 19 nt, Artificial Sequence
  Description of Artificial Sequence: Synthetic oligonucleotide
  Antisense strand to SEQ ID NO: 1841933
uacaggaugauuugacaac

SEQ ID NO: 1841935 - RNA, 19 nt, Artificial Sequence
  Description of Artificial Sequence: Synthetic oligonucleotide
  Sense strand starting at position 2938 of SEQ ID NO: 1563917
ccaagacuccauuguagua

SEQ ID NO: 1841936 - RNA, 19 nt, Artificial Sequence
  Description of Artificial Sequence: Synthetic oligonucleotide
  Antisense strand to SEQ ID NO: 1841935
uacuacaauggagucuugg

SEQ ID NO: 1841937 - RNA, 19 nt, Artificial Sequence
  Description of Artificial Sequence: Synthetic oligonucleotide
  Sense strand starting at position 3095 of SEQ ID NO: 1563917
gcaagucauccuggguaac

SEQ ID NO: 1841938 - RNA, 19 nt, Artificial Sequence
  Description of Artificial Sequence: Synthetic oligonucleotide
  Antisense strand to SEQ ID NO: 1841937
guuacccaggaugacuugc

SEQ ID NO: 1841939 - RNA, 19 nt, Artificial Sequence
  Description of Artificial Sequence: Synthetic oligonucleotide
  Sense strand starting at position 3120 of SEQ ID NO: 1563917
ggugggucacgugagaaca

SEQ ID NO: 1841940 - RNA, 19 nt, Artificial Sequence
  Description of Artificial Sequence: Synthetic oligonucleotide
  Antisense strand to SEQ ID NO: 1841939
uguucucacgugacccacc

SEQ ID NO: 1841941 - RNA, 19 nt, Artificial Sequence
  Description of Artificial Sequence: Synthetic oligonucleotide
  Sense strand starting at position 3187 of SEQ ID NO: 1563917
ggucucucuuccuccuaga

SEQ ID NO: 1841942 - RNA, 19 nt, Artificial Sequence
  Description of Artificial Sequence: Synthetic oligonucleotide
  Antisense strand to SEQ ID NO: 1841941
ucuaggaggaagagagacc

SEQ ID NO: 1841943 - RNA, 19 nt, Artificial Sequence
  Description of Artificial Sequence: Synthetic oligonucleotide
  Sense strand starting at position 3273 of SEQ ID NO: 1563917
gaaugugacucucagggaa

SEQ ID NO: 1841944 - RNA, 19 nt, Artificial Sequence
  Description of Artificial Sequence: Synthetic oligonucleotide
  Antisense strand to SEQ ID NO: 1841943
uucccugagagucacauuc

SEQ ID NO: 1841945 - RNA, 19 nt, Artificial Sequence
  Description of Artificial Sequence: Synthetic oligonucleotide
  Sense strand starting at position 3276 of SEQ ID NO: 1563917
ugugacucucagggaaguu

SEQ ID NO: 1841946 - RNA, 19 nt, Artificial Sequence
  Description of Artificial Sequence: Synthetic oligonucleotide
  Antisense strand to SEQ ID NO: 1841945
aacuucccugagagucaca

SEQ ID NO: 1841947 - RNA, 19 nt, Artificial Sequence
  Description of Artificial Sequence: Synthetic oligonucleotide
  Sense strand starting at position 3289 of SEQ ID NO: 1563917
gaaguucucuguccuauga

SEQ ID NO: 1841948 - RNA, 19 nt, Artificial Sequence
  Description of Artificial Sequence: Synthetic oligonucleotide
  Antisense strand to SEQ ID NO: 1841947
ucauaggacagagaacuuc

SEQ ID NO: 1841949 - RNA, 19 nt, Artificial Sequence
  Description of Artificial Sequence: Synthetic oligonucleotide
  Sense strand starting at position 3302 of SEQ ID NO: 1563917
cuaugaaagguaugccacu

SEQ ID NO: 1841950 - RNA, 19 nt, Artificial Sequence
  Description of Artificial Sequence: Synthetic oligonucleotide
  Antisense strand to SEQ ID NO: 1841949
aguggcauaccuuucauag

SEQ ID NO: 1841951 - RNA, 19 nt, Artificial Sequence
  Description of Artificial Sequence: Synthetic oligonucleotide
  Sense strand starting at position 3423 of SEQ ID NO: 1563917
gaagaagaaucagguucua

SEQ ID NO: 1841952 - RNA, 19 nt, Artificial Sequence
  Description of Artificial Sequence: Synthetic oligonucleotide
  Antisense strand to SEQ ID NO: 1841951
uagaaccugauucuucuuc

SEQ ID NO: 1841953 - RNA, 19 nt, Artificial Sequence
  Description of Artificial Sequence: Synthetic oligonucleotide
  Sense strand starting at position 3428 of SEQ ID NO: 1563917
agaaucagguucuauugau

SEQ ID NO: 1841954 - RNA, 19 nt, Artificial Sequence
  Description of Artificial Sequence: Synthetic oligonucleotide
  Antisense strand to SEQ ID NO: 1841953
aucaauagaaccugauucu

SEQ ID NO: 1841955 - RNA, 19 nt, Artificial Sequence
  Description of Artificial Sequence: Synthetic oligonucleotide
  Sense strand starting at position 3471 of SEQ ID NO: 1563917
ccucaaucccagcgguaua

SEQ ID NO: 1841956 - RNA, 19 nt, Artificial Sequence
  Description of Artificial Sequence: Synthetic oligonucleotide
  Antisense strand to SEQ ID NO: 1841955
uauaccgcugggauugagg

SEQ ID NO: 1841957 - RNA, 19 nt, Artificial Sequence
  Description of Artificial Sequence: Synthetic oligonucleotide
  Sense strand starting at position 3523 of SEQ ID NO: 1563917
acauuuaguugagaauguu

SEQ ID NO: 1841958 - RNA, 19 nt, Artificial Sequence
  Description of Artificial Sequence: Synthetic oligonucleotide
  Antisense strand to SEQ ID NO: 1841957
aacauucucaacuaaaugu

SEQ ID NO: 1841959 - RNA, 19 nt, Artificial Sequence
  Description of Artificial Sequence: Synthetic oligonucleotide
  Sense strand starting at position 3747 of SEQ ID NO: 1563917
ggcucugaggcaggauaau

SEQ ID NO: 1841960 - RNA, 19 nt, Artificial Sequence
  Description of Artificial Sequence: Synthetic oligonucleotide
  Antisense strand to SEQ ID NO: 1841959
auuauccugccucagagcc

SEQ ID NO: 1841961 - RNA, 19 nt, Artificial Sequence
  Description of Artificial Sequence: Synthetic oligonucleotide
  Sense strand starting at position 3886 of SEQ ID NO: 1563917
cuuaauguguugccauguu

SEQ ID NO: 1841962 - RNA, 19 nt, Artificial Sequence
  Description of Artificial Sequence: Synthetic oligonucleotide
  Antisense strand to SEQ ID NO: 1841961
aacauggcaacacauuaag

SEQ ID NO: 1841963 - RNA, 19 nt, Artificial Sequence
  Description of Artificial Sequence: Synthetic oligonucleotide
  Sense strand starting at position 659 of SEQ ID NO: 1563918
acucaaaggcuccgaaaga

SEQ ID NO: 1841964 - RNA, 19 nt, Artificial Sequence
  Description of Artificial Sequence: Synthetic oligonucleotide
  Antisense strand to SEQ ID NO: 1841963
ucuuucggagccuuugagu

SEQ ID NO: 1841965 - RNA, 19 nt, Artificial Sequence
  Description of Artificial Sequence: Synthetic oligonucleotide
  Sense strand starting at position 798 of SEQ ID NO: 1563918
cggagcuaccgucauuuca

SEQ ID NO: 1841966 - RNA, 19 nt, Artificial Sequence
  Description of Artificial Sequence: Synthetic oligonucleotide
  Antisense strand to SEQ ID NO: 1841965
ugaaaugacgguagcuccg

SEQ ID NO: 1841967 - RNA, 19 nt, Artificial Sequence
  Description of Artificial Sequence: Synthetic oligonucleotide
  Sense strand starting at position 1192 of SEQ ID NO: 1563918
cccuguacugcagauacau

SEQ ID NO: 1841968 - RNA, 19 nt, Artificial Sequence
  Description of Artificial Sequence: Synthetic oligonucleotide
  Antisense strand to SEQ ID NO: 1841967
auguaucugcaguacaggg

SEQ ID NO: 1841969 - RNA, 19 nt, Artificial Sequence
  Description of Artificial Sequence: Synthetic oligonucleotide
  Sense strand starting at position 1246 of SEQ ID NO: 1563918
cuguuuauuuguguggaag

SEQ ID NO: 1841970 - RNA, 19 nt, Artificial Sequence
  Description of Artificial Sequence: Synthetic oligonucleotide
  Antisense strand to SEQ ID NO: 1841969
cuuccacacaaauaaacag

SEQ ID NO: 1841971 - RNA, 19 nt, Artificial Sequence
  Description of Artificial Sequence: Synthetic oligonucleotide
  Sense strand starting at position 1264 of SEQ ID NO: 1563918
ggcagcgcuacuuuguaaa

SEQ ID NO: 1841972 - RNA, 19 nt, Artificial Sequence
  Description of Artificial Sequence: Synthetic oligonucleotide
  Antisense strand to SEQ ID NO: 1841971
uuuacaaaguagcgcugcc

SEQ ID NO: 1841973 - RNA, 19 nt, Artificial Sequence
  Description of Artificial Sequence: Synthetic oligonucleotide
  Sense strand starting at position 1447 of SEQ ID NO: 1563918
uaagaaaugcagcgagaca

SEQ ID NO: 1841974 - RNA, 19 nt, Artificial Sequence
  Description of Artificial Sequence: Synthetic oligonucleotide
  Antisense strand to SEQ ID NO: 1841973
ugucucgcugcauuucuua

SEQ ID NO: 1841975 - RNA, 19 nt, Artificial Sequence
  Description of Artificial Sequence: Synthetic oligonucleotide
  Sense strand starting at position 1539 of SEQ ID NO: 1563918
ugaagugaagcucaaguau

SEQ ID NO: 1841976 - RNA, 19 nt, Artificial Sequence
  Description of Artificial Sequence: Synthetic oligonucleotide
  Antisense strand to SEQ ID NO: 1841975
auacuugagcuucacuuca

SEQ ID NO: 1841977 - RNA, 19 nt, Artificial Sequence
  Description of Artificial Sequence: Synthetic oligonucleotide
  Sense strand starting at position 1655 of SEQ ID NO: 1563918
cuaccuuagcuuuggaaga

SEQ ID NO: 1841978 - RNA, 19 nt, Artificial Sequence
  Description of Artificial Sequence: Synthetic oligonucleotide
  Antisense strand to SEQ ID NO: 1841977
ucuuccaaagcuaagguag

SEQ ID NO: 1841979 - RNA, 19 nt, Artificial Sequence
  Description of Artificial Sequence: Synthetic oligonucleotide
  Sense strand starting at position 1674 of SEQ ID NO: 1563918
gcugcaucggccguuaaga

SEQ ID NO: 1841980 - RNA, 19 nt, Artificial Sequence
  Description of Artificial Sequence: Synthetic oligonucleotide
  Antisense strand to SEQ ID NO: 1841979
ucuuaacggccgaugcagc

SEQ ID NO: 1841981 - RNA, 19 nt, Artificial Sequence
  Description of Artificial Sequence: Synthetic oligonucleotide
  Sense strand starting at position 1726 of SEQ ID NO: 1563918
cccgaaacgagguaugauu

SEQ ID NO: 1841982 - RNA, 19 nt, Artificial Sequence
  Description of Artificial Sequence: Synthetic oligonucleotide
  Antisense strand to SEQ ID NO: 1841981
aaucauaccucguuucggg

SEQ ID NO: 1841983 - RNA, 19 nt, Artificial Sequence
  Description of Artificial Sequence: Synthetic oligonucleotide
  Sense strand starting at position 1858 of SEQ ID NO: 1563918
guuguuucugccgccaaua

SEQ ID NO: 1841984 - RNA, 19 nt, Artificial Sequence
  Description of Artificial Sequence: Synthetic oligonucleotide
  Antisense strand to SEQ ID NO: 1841983
uauuggcggcagaaacaac

SEQ ID NO: 1841985 - RNA, 19 nt, Artificial Sequence
  Description of Artificial Sequence: Synthetic oligonucleotide
  Sense strand starting at position 1972 of SEQ ID NO: 1563918
agagacgguucugcaagaa

SEQ ID NO: 1841986 - RNA, 19 nt, Artificial Sequence
  Description of Artificial Sequence: Synthetic oligonucleotide
  Antisense strand to SEQ ID NO: 1841985
uucuugcagaaccgucucu

SEQ ID NO: 1841987 - RNA, 19 nt, Artificial Sequence
  Description of Artificial Sequence: Synthetic oligonucleotide
  Sense strand starting at position 2169 of SEQ ID NO: 1563918
ccagcuguaacggagagau

SEQ ID NO: 1841988 - RNA, 19 nt, Artificial Sequence
  Description of Artificial Sequence: Synthetic oligonucleotide
  Antisense strand to SEQ ID NO: 1841987
aucucuccguuacagcugg

SEQ ID NO: 1841989 - RNA, 19 nt, Artificial Sequence
  Description of Artificial Sequence: Synthetic oligonucleotide
  Sense strand starting at position 2304 of SEQ ID NO: 1563918
ccaaacaugcugcaguaua

SEQ ID NO: 1841990 - RNA, 19 nt, Artificial Sequence
  Description of Artificial Sequence: Synthetic oligonucleotide
  Antisense strand to SEQ ID NO: 1841989
uauacugcagcauguuugg

SEQ ID NO: 1841991 - RNA, 19 nt, Artificial Sequence
  Description of Artificial Sequence: Synthetic oligonucleotide
  Sense strand starting at position 2439 of SEQ ID NO: 1563918
gaauacaguucuguaaagu

SEQ ID NO: 1841992 - RNA, 19 nt, Artificial Sequence
  Description of Artificial Sequence: Synthetic oligonucleotide
  Antisense strand to SEQ ID NO: 1841991
acuuuacagaacuguauuc

SEQ ID NO: 1841993 - RNA, 19 nt, Artificial Sequence
  Description of Artificial Sequence: Synthetic oligonucleotide
  Sense strand starting at position 2556 of SEQ ID NO: 1563918
uggaauugugcccaggaug

SEQ ID NO: 1841994 - RNA, 19 nt, Artificial Sequence
  Description of Artificial Sequence: Synthetic oligonucleotide
  Antisense strand to SEQ ID NO: 1841993
cauccugggcacaauucca

SEQ ID NO: 1841995 - RNA, 19 nt, Artificial Sequence
  Description of Artificial Sequence: Synthetic oligonucleotide
  Sense strand starting at position 2611 of SEQ ID NO: 1563918
gguccaggagguuaucuuu

SEQ ID NO: 1841996 - RNA, 19 nt, Artificial Sequence
  Description of Artificial Sequence: Synthetic oligonucleotide
  Antisense strand to SEQ ID NO: 1841995
aaagauaaccuccuggacc

SEQ ID NO: 1841997 - RNA, 19 nt, Artificial Sequence
  Description of Artificial Sequence: Synthetic oligonucleotide
  Sense strand starting at position 2619 of SEQ ID NO: 1563918
agguuaucuuucccaggga

SEQ ID NO: 1841998 - RNA, 19 nt, Artificial Sequence
  Description of Artificial Sequence: Synthetic oligonucleotide
  Antisense strand to SEQ ID NO: 1841997
ucccugggaaagauaaccu

SEQ ID NO: 1841999 - RNA, 19 nt, Artificial Sequence
  Description of Artificial Sequence: Synthetic oligonucleotide
  Sense strand starting at position 2686 of SEQ ID NO: 1563918
aguugaguuggagaaaguu

SEQ ID NO: 1842000 - RNA, 19 nt, Artificial Sequence
  Description of Artificial Sequence: Synthetic oligonucleotide
  Antisense strand to SEQ ID NO: 1841999
aacuuucuccaacucaacu

SEQ ID NO: 1842001 - RNA, 19 nt, Artificial Sequence
  Description of Artificial Sequence: Synthetic oligonucleotide
  Sense strand starting at position 2694 of SEQ ID NO: 1563918
uggagaaaguuggauuuaa

SEQ ID NO: 1842002 - RNA, 19 nt, Artificial Sequence
  Description of Artificial Sequence: Synthetic oligonucleotide
  Antisense strand to SEQ ID NO: 1842001
uuaaauccaacuuucucca

SEQ ID NO: 1842003 - RNA, 19 nt, Artificial Sequence
  Description of Artificial Sequence: Synthetic oligonucleotide
  Sense strand starting at position 2773 of SEQ ID NO: 1563918
aaaugagauugcuuggguu

SEQ ID NO: 1842004 - RNA, 19 nt, Artificial Sequence
  Description of Artificial Sequence: Synthetic oligonucleotide
  Antisense strand to SEQ ID NO: 1842003
aacccaagcaaucucauuu

SEQ ID NO: 1842005 - RNA, 19 nt, Artificial Sequence
  Description of Artificial Sequence: Synthetic oligonucleotide
  Sense strand starting at position 2803 of SEQ ID NO: 1563918
ugaccuuagguguguauuu

SEQ ID NO: 1842006 - RNA, 19 nt, Artificial Sequence
  Description of Artificial Sequence: Synthetic oligonucleotide
  Antisense strand to SEQ ID NO: 1842005
aaauacacaccuaagguca

SEQ ID NO: 1842007 - RNA, 19 nt, Artificial Sequence
  Description of Artificial Sequence: Synthetic oligonucleotide
  Sense strand starting at position 2858 of SEQ ID NO: 1563918
aacagauaaucaccgugua

SEQ ID NO: 1842008 - RNA, 19 nt, Artificial Sequence
  Description of Artificial Sequence: Synthetic oligonucleotide
  Antisense strand to SEQ ID NO: 1842007
uacacggugauuaucuguu

SEQ ID NO: 1842009 - RNA, 19 nt, Artificial Sequence
  Description of Artificial Sequence: Synthetic oligonucleotide
  Sense strand starting at position 2859 of SEQ ID NO: 1563918
acagauaaucaccguguaa

SEQ ID NO: 1842010 - RNA, 19 nt, Artificial Sequence
  Description of Artificial Sequence: Synthetic oligonucleotide
  Antisense strand to SEQ ID NO: 1842009
uuacacggugauuaucugu

SEQ ID NO: 1842011 - RNA, 19 nt, Artificial Sequence
  Description of Artificial Sequence: Synthetic oligonucleotide
  Sense strand starting at position 2861 of SEQ ID NO: 1563918
agauaaucaccguguaaua

SEQ ID NO: 1842012 - RNA, 19 nt, Artificial Sequence
  Description of Artificial Sequence: Synthetic oligonucleotide
  Antisense strand to SEQ ID NO: 1842011
uauuacacggugauuaucu

SEQ ID NO: 1842013 - RNA, 19 nt, Artificial Sequence
  Description of Artificial Sequence: Synthetic oligonucleotide
  Sense strand starting at position 2863 of SEQ ID NO: 1563918
auaaucaccguguaauacu

SEQ ID NO: 1842014 - RNA, 19 nt, Artificial Sequence
  Description of Artificial Sequence: Synthetic oligonucleotide
  Antisense strand to SEQ ID NO: 1842013
aguauuacacggugauuau

SEQ ID NO: 1842015 - RNA, 19 nt, Artificial Sequence
  Description of Artificial Sequence: Synthetic oligonucleotide
  Sense strand starting at position 2878 of SEQ ID NO: 1563918
uacuguaaugauuagcuga

SEQ ID NO: 1842016 - RNA, 19 nt, Artificial Sequence
  Description of Artificial Sequence: Synthetic oligonucleotide
  Antisense strand to SEQ ID NO: 1842015
ucagcuaaucauuacagua

SEQ ID NO: 1842017 - RNA, 19 nt, Artificial Sequence
  Description of Artificial Sequence: Synthetic oligonucleotide
  Sense strand starting at position 2883 of SEQ ID NO: 1563918
uaaugauuagcugaguuaa

SEQ ID NO: 1842018 - RNA, 19 nt, Artificial Sequence
  Description of Artificial Sequence: Synthetic oligonucleotide
  Antisense strand to SEQ ID NO: 1842017
uuaacucagcuaaucauua

SEQ ID NO: 1842019 - RNA, 19 nt, Artificial Sequence
  Description of Artificial Sequence: Synthetic oligonucleotide
  Sense strand starting at position 2885 of SEQ ID NO: 1563918
augauuagcugaguuaaug

SEQ ID NO: 1842020 - RNA, 19 nt, Artificial Sequence
  Description of Artificial Sequence: Synthetic oligonucleotide
  Antisense strand to SEQ ID NO: 1842019
cauuaacucagcuaaucau

SEQ ID NO: 1842021 - RNA, 19 nt, Artificial Sequence
  Description of Artificial Sequence: Synthetic oligonucleotide
  Sense strand starting at position 2927 of SEQ ID NO: 1563918
acaauauuacauggugauu

SEQ ID NO: 1842022 - RNA, 19 nt, Artificial Sequence
  Description of Artificial Sequence: Synthetic oligonucleotide
  Antisense strand to SEQ ID NO: 1842021
aaucaccauguaauauugu

SEQ ID NO: 1842023 - RNA, 19 nt, Artificial Sequence
  Description of Artificial Sequence: Synthetic oligonucleotide
  Sense strand starting at position 2932 of SEQ ID NO: 1563918
auuacauggugauuacuuu

SEQ ID NO: 1842024 - RNA, 19 nt, Artificial Sequence
  Description of Artificial Sequence: Synthetic oligonucleotide
  Antisense strand to SEQ ID NO: 1842023
aaaguaaucaccauguaau

SEQ ID NO: 1842025 - RNA, 19 nt, Artificial Sequence
  Description of Artificial Sequence: Synthetic oligonucleotide
  Sense strand starting at position 3036 of SEQ ID NO: 1563918
guccgcaacacauaggaua

SEQ ID NO: 1842026 - RNA, 19 nt, Artificial Sequence
  Description of Artificial Sequence: Synthetic oligonucleotide
  Antisense strand to SEQ ID NO: 1842025
uauccuauguguugcggac

SEQ ID NO: 1842027 - RNA, 19 nt, Artificial Sequence
  Description of Artificial Sequence: Synthetic oligonucleotide
  Sense strand starting at position 3071 of SEQ ID NO: 1563918
ggcuuuaggcaguaaacca

SEQ ID NO: 1842028 - RNA, 19 nt, Artificial Sequence
  Description of Artificial Sequence: Synthetic oligonucleotide
  Antisense strand to SEQ ID NO: 1842027
ugguuuacugccuaaagcc

SEQ ID NO: 1842029 - RNA, 19 nt, Artificial Sequence
  Description of Artificial Sequence: Synthetic oligonucleotide
  Sense strand starting at position 3107 of SEQ ID NO: 1563918
uggugaugugaaggauauu

SEQ ID NO: 1842030 - RNA, 19 nt, Artificial Sequence
  Description of Artificial Sequence: Synthetic oligonucleotide
  Antisense strand to SEQ ID NO: 1842029
aauauccuucacaucacca

SEQ ID NO: 1842031 - RNA, 19 nt, Artificial Sequence
  Description of Artificial Sequence: Synthetic oligonucleotide
  Sense strand starting at position 3420 of SEQ ID NO: 1563918
guguuccaauuauuggaua

SEQ ID NO: 1842032 - RNA, 19 nt, Artificial Sequence
  Description of Artificial Sequence: Synthetic oligonucleotide
  Antisense strand to SEQ ID NO: 1842031
uauccaauaauuggaacac

SEQ ID NO: 1842033 - RNA, 19 nt, Artificial Sequence
  Description of Artificial Sequence: Synthetic oligonucleotide
  Sense strand starting at position 3466 of SEQ ID NO: 1563918
uccguuauuguauagauau

SEQ ID NO: 1842034 - RNA, 19 nt, Artificial Sequence
  Description of Artificial Sequence: Synthetic oligonucleotide
  Antisense strand to SEQ ID NO: 1842033
auaucuauacaauaacgga

SEQ ID NO: 1842035 - RNA, 19 nt, Artificial Sequence
  Description of Artificial Sequence: Synthetic oligonucleotide
  Sense strand starting at position 3468 of SEQ ID NO: 1563918
cguuauuguauagauauug

SEQ ID NO: 1842036 - RNA, 19 nt, Artificial Sequence
  Description of Artificial Sequence: Synthetic oligonucleotide
  Antisense strand to SEQ ID NO: 1842035
caauaucuauacaauaacg

SEQ ID NO: 1842037 - RNA, 19 nt, Artificial Sequence
  Description of Artificial Sequence: Synthetic oligonucleotide
  Sense strand starting at position 3559 of SEQ ID NO: 1563918
gauauauagcugcagauau

SEQ ID NO: 1842038 - RNA, 19 nt, Artificial Sequence
  Description of Artificial Sequence: Synthetic oligonucleotide
  Antisense strand to SEQ ID NO: 1842037
auaucugcagcuauauauc

SEQ ID NO: 1842039 - RNA, 19 nt, Artificial Sequence
  Description of Artificial Sequence: Synthetic oligonucleotide
  Sense strand starting at position 3614 of SEQ ID NO: 1563918
agcagaaucucaccuugaa

SEQ ID NO: 1842040 - RNA, 19 nt, Artificial Sequence
  Description of Artificial Sequence: Synthetic oligonucleotide
  Antisense strand to SEQ ID NO: 1842039
uucaaggugagauucugcu

SEQ ID NO: 1842041 - RNA, 19 nt, Artificial Sequence
  Description of Artificial Sequence: Synthetic oligonucleotide
  Sense strand starting at position 3756 of SEQ ID NO: 1563918
gcaucugugagugaaacuc

SEQ ID NO: 1842042 - RNA, 19 nt, Artificial Sequence
  Description of Artificial Sequence: Synthetic oligonucleotide
  Antisense strand to SEQ ID NO: 1842041
gaguuucacucacagaugc

SEQ ID NO: 1842043 - RNA, 19 nt, Artificial Sequence
  Description of Artificial Sequence: Synthetic oligonucleotide
  Sense strand starting at position 187 of SEQ ID NO: 1563919
acggcagauuucuuugcua

SEQ ID NO: 1842044 - RNA, 19 nt, Artificial Sequence
  Description of Artificial Sequence: Synthetic oligonucleotide
  Antisense strand to SEQ ID NO: 1842043
uagcaaagaaaucugccgu

SEQ ID NO: 1842045 - RNA, 19 nt, Artificial Sequence
  Description of Artificial Sequence: Synthetic oligonucleotide
  Sense strand starting at position 189 of SEQ ID NO: 1563919
ggcagauuucuuugcuauc

SEQ ID NO: 1842046 - RNA, 19 nt, Artificial Sequence
  Description of Artificial Sequence: Synthetic oligonucleotide
  Antisense strand to SEQ ID NO: 1842045
gauagcaaagaaaucugcc

SEQ ID NO: 1842047 - RNA, 19 nt, Artificial Sequence
  Description of Artificial Sequence: Synthetic oligonucleotide
  Sense strand starting at position 190 of SEQ ID NO: 1563919
gcagauuucuuugcuaucu

SEQ ID NO: 1842048 - RNA, 19 nt, Artificial Sequence
  Description of Artificial Sequence: Synthetic oligonucleotide
  Antisense strand to SEQ ID NO: 1842047
agauagcaaagaaaucugc

SEQ ID NO: 1842049 - RNA, 19 nt, Artificial Sequence
  Description of Artificial Sequence: Synthetic oligonucleotide
  Sense strand starting at position 192 of SEQ ID NO: 1563919
agauuucuuugcuaucuga

SEQ ID NO: 1842050 - RNA, 19 nt, Artificial Sequence
  Description of Artificial Sequence: Synthetic oligonucleotide
  Antisense strand to SEQ ID NO: 1842049
ucagauagcaaagaaaucu

SEQ ID NO: 1842051 - RNA, 19 nt, Artificial Sequence
  Description of Artificial Sequence: Synthetic oligonucleotide
  Sense strand starting at position 291 of SEQ ID NO: 1563919
cuuuguucucaucaaaguc

SEQ ID NO: 1842052 - RNA, 19 nt, Artificial Sequence
  Description of Artificial Sequence: Synthetic oligonucleotide
  Antisense strand to SEQ ID NO: 1842051
gacuuugaugagaacaaag

SEQ ID NO: 1842053 - RNA, 19 nt, Artificial Sequence
  Description of Artificial Sequence: Synthetic oligonucleotide
  Sense strand starting at position 361 of SEQ ID NO: 1563919
cggauuucuuaagcaugca

SEQ ID NO: 1842054 - RNA, 19 nt, Artificial Sequence
  Description of Artificial Sequence: Synthetic oligonucleotide
  Antisense strand to SEQ ID NO: 1842053
ugcaugcuuaagaaauccg

SEQ ID NO: 1842055 - RNA, 19 nt, Artificial Sequence
  Description of Artificial Sequence: Synthetic oligonucleotide
  Sense strand starting at position 417 of SEQ ID NO: 1563919
aauucugcuucgucaggau

SEQ ID NO: 1842056 - RNA, 19 nt, Artificial Sequence
  Description of Artificial Sequence: Synthetic oligonucleotide
  Antisense strand to SEQ ID NO: 1842055
auccugacgaagcagaauu

SEQ ID NO: 1842057 - RNA, 19 nt, Artificial Sequence
  Description of Artificial Sequence: Synthetic oligonucleotide
  Sense strand starting at position 827 of SEQ ID NO: 1563919
uucuuaaguuggguccaaa

SEQ ID NO: 1842058 - RNA, 19 nt, Artificial Sequence
  Description of Artificial Sequence: Synthetic oligonucleotide
  Antisense strand to SEQ ID NO: 1842057
uuuggacccaacuuaagaa

SEQ ID NO: 1842059 - RNA, 19 nt, Artificial Sequence
  Description of Artificial Sequence: Synthetic oligonucleotide
  Sense strand starting at position 1851 of SEQ ID NO: 1563919
gcggaucuucuccaucagu

SEQ ID NO: 1842060 - RNA, 19 nt, Artificial Sequence
  Description of Artificial Sequence: Synthetic oligonucleotide
  Antisense strand to SEQ ID NO: 1842059
acugauggagaagauccgc

SEQ ID NO: 1842061 - RNA, 19 nt, Artificial Sequence
  Description of Artificial Sequence: Synthetic oligonucleotide
  Sense strand starting at position 2338 of SEQ ID NO: 1563919
acucaaaggcuccgaaaga

SEQ ID NO: 1842062 - RNA, 19 nt, Artificial Sequence
  Description of Artificial Sequence: Synthetic oligonucleotide
  Antisense strand to SEQ ID NO: 1842061
ucuuucggagccuuugagu

SEQ ID NO: 1842063 - RNA, 19 nt, Artificial Sequence
  Description of Artificial Sequence: Synthetic oligonucleotide
  Sense strand starting at position 2477 of SEQ ID NO: 1563919
cggagcuaccgucauuuca

SEQ ID NO: 1842064 - RNA, 19 nt, Artificial Sequence
  Description of Artificial Sequence: Synthetic oligonucleotide
  Antisense strand to SEQ ID NO: 1842063
ugaaaugacgguagcuccg

SEQ ID NO: 1842065 - RNA, 19 nt, Artificial Sequence
  Description of Artificial Sequence: Synthetic oligonucleotide
  Sense strand starting at position 2522 of SEQ ID NO: 1563919
uggaucguucccuagccaa

SEQ ID NO: 1842066 - RNA, 19 nt, Artificial Sequence
  Description of Artificial Sequence: Synthetic oligonucleotide
  Antisense strand to SEQ ID NO: 1842065
uuggcuagggaacgaucca

SEQ ID NO: 1842067 - RNA, 19 nt, Artificial Sequence
  Description of Artificial Sequence: Synthetic oligonucleotide
  Sense strand starting at position 2557 of SEQ ID NO: 1563919
ucaaucacgugcguuauuu

SEQ ID NO: 1842068 - RNA, 19 nt, Artificial Sequence
  Description of Artificial Sequence: Synthetic oligonucleotide
  Antisense strand to SEQ ID NO: 1842067
aaauaacgcacgugauuga

SEQ ID NO: 1842069 - RNA, 19 nt, Artificial Sequence
  Description of Artificial Sequence: Synthetic oligonucleotide
  Sense strand starting at position 2871 of SEQ ID NO: 1563919
cccuguacugcagauacau

SEQ ID NO: 1842070 - RNA, 19 nt, Artificial Sequence
  Description of Artificial Sequence: Synthetic oligonucleotide
  Antisense strand to SEQ ID NO: 1842069
auguaucugcaguacaggg

SEQ ID NO: 1842071 - RNA, 19 nt, Artificial Sequence
  Description of Artificial Sequence: Synthetic oligonucleotide
  Sense strand starting at position 2925 of SEQ ID NO: 1563919
cuguuuauuuguguggaag

SEQ ID NO: 1842072 - RNA, 19 nt, Artificial Sequence
  Description of Artificial Sequence: Synthetic oligonucleotide
  Antisense strand to SEQ ID NO: 1842071
cuuccacacaaauaaacag

SEQ ID NO: 1842073 - RNA, 19 nt, Artificial Sequence
  Description of Artificial Sequence: Synthetic oligonucleotide
  Sense strand starting at position 2943 of SEQ ID NO: 1563919
ggcagcgcuacuuuguaaa

SEQ ID NO: 1842074 - RNA, 19 nt, Artificial Sequence
  Description of Artificial Sequence: Synthetic oligonucleotide
  Antisense strand to SEQ ID NO: 1842073
uuuacaaaguagcgcugcc

SEQ ID NO: 1842075 - RNA, 19 nt, Artificial Sequence
  Description of Artificial Sequence: Synthetic oligonucleotide
  Sense strand starting at position 2945 of SEQ ID NO: 1563919
cagcgcuacuuuguaaaca

SEQ ID NO: 1842076 - RNA, 19 nt, Artificial Sequence
  Description of Artificial Sequence: Synthetic oligonucleotide
  Antisense strand to SEQ ID NO: 1842075
uguuuacaaaguagcgcug

SEQ ID NO: 1842077 - RNA, 19 nt, Artificial Sequence
  Description of Artificial Sequence: Synthetic oligonucleotide
  Sense strand starting at position 3060 of SEQ ID NO: 1563919
accaaauauuucuguggag

SEQ ID NO: 1842078 - RNA, 19 nt, Artificial Sequence
  Description of Artificial Sequence: Synthetic oligonucleotide
  Antisense strand to SEQ ID NO: 1842077
cuccacagaaauauuuggu

SEQ ID NO: 1842079 - RNA, 19 nt, Artificial Sequence
  Description of Artificial Sequence: Synthetic oligonucleotide
  Sense strand starting at position 3063 of SEQ ID NO: 1563919
aaauauuucuguggagagg

SEQ ID NO: 1842080 - RNA, 19 nt, Artificial Sequence
  Description of Artificial Sequence: Synthetic oligonucleotide
  Antisense strand to SEQ ID NO: 1842079
ccucuccacagaaauauuu

SEQ ID NO: 1842081 - RNA, 19 nt, Artificial Sequence
  Description of Artificial Sequence: Synthetic oligonucleotide
  Sense strand starting at position 3126 of SEQ ID NO: 1563919
uaagaaaugcagcgagaca

SEQ ID NO: 1842082 - RNA, 19 nt, Artificial Sequence
  Description of Artificial Sequence: Synthetic oligonucleotide
  Antisense strand to SEQ ID NO: 1842081
ugucucgcugcauuucuua

SEQ ID NO: 1842083 - RNA, 19 nt, Artificial Sequence
  Description of Artificial Sequence: Synthetic oligonucleotide
  Sense strand starting at position 3218 of SEQ ID NO: 1563919
ugaagugaagcucaaguau

SEQ ID NO: 1842084 - RNA, 19 nt, Artificial Sequence
  Description of Artificial Sequence: Synthetic oligonucleotide
  Antisense strand to SEQ ID NO: 1842083
auacuugagcuucacuuca

SEQ ID NO: 1842085 - RNA, 19 nt, Artificial Sequence
  Description of Artificial Sequence: Synthetic oligonucleotide
  Sense strand starting at position 3227 of SEQ ID NO: 1563919
gcucaaguaucugcaguga

SEQ ID NO: 1842086 - RNA, 19 nt, Artificial Sequence
  Description of Artificial Sequence: Synthetic oligonucleotide
  Antisense strand to SEQ ID NO: 1842085
ucacugcagauacuugagc

SEQ ID NO: 1842087 - RNA, 19 nt, Artificial Sequence
  Description of Artificial Sequence: Synthetic oligonucleotide
  Sense strand starting at position 3298 of SEQ ID NO: 1563919
agaauaaugucccagagac

SEQ ID NO: 1842088 - RNA, 19 nt, Artificial Sequence
  Description of Artificial Sequence: Synthetic oligonucleotide
  Antisense strand to SEQ ID NO: 1842087
gucucugggacauuauucu

SEQ ID NO: 1842089 - RNA, 19 nt, Artificial Sequence
  Description of Artificial Sequence: Synthetic oligonucleotide
  Sense strand starting at position 3334 of SEQ ID NO: 1563919
cuaccuuagcuuuggaaga

SEQ ID NO: 1842090 - RNA, 19 nt, Artificial Sequence
  Description of Artificial Sequence: Synthetic oligonucleotide
  Antisense strand to SEQ ID NO: 1842089
ucuuccaaagcuaagguag

SEQ ID NO: 1842091 - RNA, 19 nt, Artificial Sequence
  Description of Artificial Sequence: Synthetic oligonucleotide
  Sense strand starting at position 3353 of SEQ ID NO: 1563919
gcugcaucggccguuaaga

SEQ ID NO: 1842092 - RNA, 19 nt, Artificial Sequence
  Description of Artificial Sequence: Synthetic oligonucleotide
  Antisense strand to SEQ ID NO: 1842091
ucuuaacggccgaugcagc

SEQ ID NO: 1842093 - RNA, 19 nt, Artificial Sequence
  Description of Artificial Sequence: Synthetic oligonucleotide
  Sense strand starting at position 3405 of SEQ ID NO: 1563919
cccgaaacgagguaugauu

SEQ ID NO: 1842094 - RNA, 19 nt, Artificial Sequence
  Description of Artificial Sequence: Synthetic oligonucleotide
  Antisense strand to SEQ ID NO: 1842093
aaucauaccucguuucggg

SEQ ID NO: 1842095 - RNA, 19 nt, Artificial Sequence
  Description of Artificial Sequence: Synthetic oligonucleotide
  Sense strand starting at position 3526 of SEQ ID NO: 1563919
ggaggaaauucguuguuuc

SEQ ID NO: 1842096 - RNA, 19 nt, Artificial Sequence
  Description of Artificial Sequence: Synthetic oligonucleotide
  Antisense strand to SEQ ID NO: 1842095
gaaacaacgaauuuccucc

SEQ ID NO: 1842097 - RNA, 19 nt, Artificial Sequence
  Description of Artificial Sequence: Synthetic oligonucleotide
  Sense strand starting at position 3527 of SEQ ID NO: 1563919
gaggaaauucguuguuucu

SEQ ID NO: 1842098 - RNA, 19 nt, Artificial Sequence
  Description of Artificial Sequence: Synthetic oligonucleotide
  Antisense strand to SEQ ID NO: 1842097
agaaacaacgaauuuccuc

SEQ ID NO: 1842099 - RNA, 19 nt, Artificial Sequence
  Description of Artificial Sequence: Synthetic oligonucleotide
  Sense strand starting at position 3537 of SEQ ID NO: 1563919
guuguuucugccgccaaua

SEQ ID NO: 1842100 - RNA, 19 nt, Artificial Sequence
  Description of Artificial Sequence: Synthetic oligonucleotide
  Antisense strand to SEQ ID NO: 1842099
uauuggcggcagaaacaac

SEQ ID NO: 1842101 - RNA, 19 nt, Artificial Sequence
  Description of Artificial Sequence: Synthetic oligonucleotide
  Sense strand starting at position 3601 of SEQ ID NO: 1563919
ccaagcuaguggcugaaua

SEQ ID NO: 1842102 - RNA, 19 nt, Artificial Sequence
  Description of Artificial Sequence: Synthetic oligonucleotide
  Antisense strand to SEQ ID NO: 1842101
uauucagccacuagcuugg

SEQ ID NO: 1842103 - RNA, 19 nt, Artificial Sequence
  Description of Artificial Sequence: Synthetic oligonucleotide
  Sense strand starting at position 3602 of SEQ ID NO: 1563919
caagcuaguggcugaauaa

SEQ ID NO: 1842104 - RNA, 19 nt, Artificial Sequence
  Description of Artificial Sequence: Synthetic oligonucleotide
  Antisense strand to SEQ ID NO: 1842103
uuauucagccacuagcuug

SEQ ID NO: 1842105 - RNA, 19 nt, Artificial Sequence
  Description of Artificial Sequence: Synthetic oligonucleotide
  Sense strand starting at position 3615 of SEQ ID NO: 1563919
gaauaagagcucugugcua

SEQ ID NO: 1842106 - RNA, 19 nt, Artificial Sequence
  Description of Artificial Sequence: Synthetic oligonucleotide
  Antisense strand to SEQ ID NO: 1842105
uagcacagagcucuuauuc

SEQ ID NO: 1842107 - RNA, 19 nt, Artificial Sequence
  Description of Artificial Sequence: Synthetic oligonucleotide
  Sense strand starting at position 3617 of SEQ ID NO: 1563919
auaagagcucugugcuaag

SEQ ID NO: 1842108 - RNA, 19 nt, Artificial Sequence
  Description of Artificial Sequence: Synthetic oligonucleotide
  Antisense strand to SEQ ID NO: 1842107
cuuagcacagagcucuuau

SEQ ID NO: 1842109 - RNA, 19 nt, Artificial Sequence
  Description of Artificial Sequence: Synthetic oligonucleotide
  Sense strand starting at position 3651 of SEQ ID NO: 1563919
agagacgguucugcaagaa

SEQ ID NO: 1842110 - RNA, 19 nt, Artificial Sequence
  Description of Artificial Sequence: Synthetic oligonucleotide
  Antisense strand to SEQ ID NO: 1842109
uucuugcagaaccgucucu

SEQ ID NO: 1842111 - RNA, 19 nt, Artificial Sequence
  Description of Artificial Sequence: Synthetic oligonucleotide
  Sense strand starting at position 3671 of SEQ ID NO: 1563919
aagagagauugaggagaga

SEQ ID NO: 1842112 - RNA, 19 nt, Artificial Sequence
  Description of Artificial Sequence: Synthetic oligonucleotide
  Antisense strand to SEQ ID NO: 1842111
ucucuccucaaucucucuu

SEQ ID NO: 1842113 - RNA, 19 nt, Artificial Sequence
  Description of Artificial Sequence: Synthetic oligonucleotide
  Sense strand starting at position 3758 of SEQ ID NO: 1563919
gccaauagaucuccggagu

SEQ ID NO: 1842114 - RNA, 19 nt, Artificial Sequence
  Description of Artificial Sequence: Synthetic oligonucleotide
  Antisense strand to SEQ ID NO: 1842113
acuccggagaucuauuggc

SEQ ID NO: 1842115 - RNA, 19 nt, Artificial Sequence
  Description of Artificial Sequence: Synthetic oligonucleotide
  Sense strand starting at position 3759 of SEQ ID NO: 1563919
ccaauagaucuccggaguc

SEQ ID NO: 1842116 - RNA, 19 nt, Artificial Sequence
  Description of Artificial Sequence: Synthetic oligonucleotide
  Antisense strand to SEQ ID NO: 1842115
gacuccggagaucuauugg

SEQ ID NO: 1842117 - RNA, 19 nt, Artificial Sequence
  Description of Artificial Sequence: Synthetic oligonucleotide
  Sense strand starting at position 3848 of SEQ ID NO: 1563919
ccagcuguaacggagagau

SEQ ID NO: 1842118 - RNA, 19 nt, Artificial Sequence
  Description of Artificial Sequence: Synthetic oligonucleotide
  Antisense strand to SEQ ID NO: 1842117
aucucuccguuacagcugg

SEQ ID NO: 1842119 - RNA, 19 nt, Artificial Sequence
  Description of Artificial Sequence: Synthetic oligonucleotide
  Sense strand starting at position 3858 of SEQ ID NO: 1563919
cggagagaucccggguacu

SEQ ID NO: 1842120 - RNA, 19 nt, Artificial Sequence
  Description of Artificial Sequence: Synthetic oligonucleotide
  Antisense strand to SEQ ID NO: 1842119
aguacccgggaucucuccg

SEQ ID NO: 1842121 - RNA, 19 nt, Artificial Sequence
  Description of Artificial Sequence: Synthetic oligonucleotide
  Sense strand starting at position 3983 of SEQ ID NO: 1563919
ccaaacaugcugcaguaua

SEQ ID NO: 1842122 - RNA, 19 nt, Artificial Sequence
  Description of Artificial Sequence: Synthetic oligonucleotide
  Antisense strand to SEQ ID NO: 1842121
uauacugcagcauguuugg

SEQ ID NO: 1842123 - RNA, 19 nt, Artificial Sequence
  Description of Artificial Sequence: Synthetic oligonucleotide
  Sense strand starting at position 183 of SEQ ID NO: 1563920
uucuuaaguuggguccaaa

SEQ ID NO: 1842124 - RNA, 19 nt, Artificial Sequence
  Description of Artificial Sequence: Synthetic oligonucleotide
  Antisense strand to SEQ ID NO: 1842123
uuuggacccaacuuaagaa

SEQ ID NO: 1842125 - RNA, 19 nt, Artificial Sequence
  Description of Artificial Sequence: Synthetic oligonucleotide
  Sense strand starting at position 1694 of SEQ ID NO: 1563920
acucaaaggcuccgaaaga

SEQ ID NO: 1842126 - RNA, 19 nt, Artificial Sequence
  Description of Artificial Sequence: Synthetic oligonucleotide
  Antisense strand to SEQ ID NO: 1842125
ucuuucggagccuuugagu

SEQ ID NO: 1842127 - RNA, 19 nt, Artificial Sequence
  Description of Artificial Sequence: Synthetic oligonucleotide
  Sense strand starting at position 1833 of SEQ ID NO: 1563920
cggagcuaccgucauuuca

SEQ ID NO: 1842128 - RNA, 19 nt, Artificial Sequence
  Description of Artificial Sequence: Synthetic oligonucleotide
  Antisense strand to SEQ ID NO: 1842127
ugaaaugacgguagcuccg

SEQ ID NO: 1842129 - RNA, 19 nt, Artificial Sequence
  Description of Artificial Sequence: Synthetic oligonucleotide
  Sense strand starting at position 2227 of SEQ ID NO: 1563920
cccuguacugcagauacau

SEQ ID NO: 1842130 - RNA, 19 nt, Artificial Sequence
  Description of Artificial Sequence: Synthetic oligonucleotide
  Antisense strand to SEQ ID NO: 1842129
auguaucugcaguacaggg

SEQ ID NO: 1842131 - RNA, 19 nt, Artificial Sequence
  Description of Artificial Sequence: Synthetic oligonucleotide
  Sense strand starting at position 2281 of SEQ ID NO: 1563920
cuguuuauuuguguggaag

SEQ ID NO: 1842132 - RNA, 19 nt, Artificial Sequence
  Description of Artificial Sequence: Synthetic oligonucleotide
  Antisense strand to SEQ ID NO: 1842131
cuuccacacaaauaaacag

SEQ ID NO: 1842133 - RNA, 19 nt, Artificial Sequence
  Description of Artificial Sequence: Synthetic oligonucleotide
  Sense strand starting at position 2299 of SEQ ID NO: 1563920
ggcagcgcuacuuuguaaa

SEQ ID NO: 1842134 - RNA, 19 nt, Artificial Sequence
  Description of Artificial Sequence: Synthetic oligonucleotide
  Antisense strand to SEQ ID NO: 1842133
uuuacaaaguagcgcugcc

SEQ ID NO: 1842135 - RNA, 19 nt, Artificial Sequence
  Description of Artificial Sequence: Synthetic oligonucleotide
  Sense strand starting at position 2419 of SEQ ID NO: 1563920
aaauauuucuguggagagg

SEQ ID NO: 1842136 - RNA, 19 nt, Artificial Sequence
  Description of Artificial Sequence: Synthetic oligonucleotide
  Antisense strand to SEQ ID NO: 1842135
ccucuccacagaaauauuu

SEQ ID NO: 1842137 - RNA, 19 nt, Artificial Sequence
  Description of Artificial Sequence: Synthetic oligonucleotide
  Sense strand starting at position 2482 of SEQ ID NO: 1563920
uaagaaaugcagcgagaca

SEQ ID NO: 1842138 - RNA, 19 nt, Artificial Sequence
  Description of Artificial Sequence: Synthetic oligonucleotide
  Antisense strand to SEQ ID NO: 1842137
ugucucgcugcauuucuua

SEQ ID NO: 1842139 - RNA, 19 nt, Artificial Sequence
  Description of Artificial Sequence: Synthetic oligonucleotide
  Sense strand starting at position 2574 of SEQ ID NO: 1563920
ugaagugaagcucaaguau

SEQ ID NO: 1842140 - RNA, 19 nt, Artificial Sequence
  Description of Artificial Sequence: Synthetic oligonucleotide
  Antisense strand to SEQ ID NO: 1842139
auacuugagcuucacuuca

SEQ ID NO: 1842141 - RNA, 19 nt, Artificial Sequence
  Description of Artificial Sequence: Synthetic oligonucleotide
  Sense strand starting at position 2690 of SEQ ID NO: 1563920
cuaccuuagcuuuggaaga

SEQ ID NO: 1842142 - RNA, 19 nt, Artificial Sequence
  Description of Artificial Sequence: Synthetic oligonucleotide
  Antisense strand to SEQ ID NO: 1842141
ucuuccaaagcuaagguag

SEQ ID NO: 1842143 - RNA, 19 nt, Artificial Sequence
  Description of Artificial Sequence: Synthetic oligonucleotide
  Sense strand starting at position 2709 of SEQ ID NO: 1563920
gcugcaucggccguuaaga

SEQ ID NO: 1842144 - RNA, 19 nt, Artificial Sequence
  Description of Artificial Sequence: Synthetic oligonucleotide
  Antisense strand to SEQ ID NO: 1842143
ucuuaacggccgaugcagc

SEQ ID NO: 1842145 - RNA, 19 nt, Artificial Sequence
  Description of Artificial Sequence: Synthetic oligonucleotide
  Sense strand starting at position 2761 of SEQ ID NO: 1563920
cccgaaacgagguaugauu

SEQ ID NO: 1842146 - RNA, 19 nt, Artificial Sequence
  Description of Artificial Sequence: Synthetic oligonucleotide
  Antisense strand to SEQ ID NO: 1842145
aaucauaccucguuucggg

SEQ ID NO: 1842147 - RNA, 19 nt, Artificial Sequence
  Description of Artificial Sequence: Synthetic oligonucleotide
  Sense strand starting at position 2893 of SEQ ID NO: 1563920
guuguuucugccgccaaua

SEQ ID NO: 1842148 - RNA, 19 nt, Artificial Sequence
  Description of Artificial Sequence: Synthetic oligonucleotide
  Antisense strand to SEQ ID NO: 1842147
uauuggcggcagaaacaac

SEQ ID NO: 1842149 - RNA, 19 nt, Artificial Sequence
  Description of Artificial Sequence: Synthetic oligonucleotide
  Sense strand starting at position 3007 of SEQ ID NO: 1563920
agagacgguucugcaagaa

SEQ ID NO: 1842150 - RNA, 19 nt, Artificial Sequence
  Description of Artificial Sequence: Synthetic oligonucleotide
  Antisense strand to SEQ ID NO: 1842149
uucuugcagaaccgucucu

SEQ ID NO: 1842151 - RNA, 19 nt, Artificial Sequence
  Description of Artificial Sequence: Synthetic oligonucleotide
  Sense strand starting at position 3115 of SEQ ID NO: 1563920
ccaauagaucuccggaguc

SEQ ID NO: 1842152 - RNA, 19 nt, Artificial Sequence
  Description of Artificial Sequence: Synthetic oligonucleotide
  Antisense strand to SEQ ID NO: 1842151
gacuccggagaucuauugg

SEQ ID NO: 1842153 - RNA, 19 nt, Artificial Sequence
  Description of Artificial Sequence: Synthetic oligonucleotide
  Sense strand starting at position 3204 of SEQ ID NO: 1563920
ccagcuguaacggagagau

SEQ ID NO: 1842154 - RNA, 19 nt, Artificial Sequence
  Description of Artificial Sequence: Synthetic oligonucleotide
  Antisense strand to SEQ ID NO: 1842153
aucucuccguuacagcugg

SEQ ID NO: 1842155 - RNA, 19 nt, Artificial Sequence
  Description of Artificial Sequence: Synthetic oligonucleotide
  Sense strand starting at position 3339 of SEQ ID NO: 1563920
ccaaacaugcugcaguaua

SEQ ID NO: 1842156 - RNA, 19 nt, Artificial Sequence
  Description of Artificial Sequence: Synthetic oligonucleotide
  Antisense strand to SEQ ID NO: 1842155
uauacugcagcauguuugg

SEQ ID NO: 1842157 - RNA, 19 nt, Artificial Sequence
  Description of Artificial Sequence: Synthetic oligonucleotide
  Sense strand starting at position 3365 of SEQ ID NO: 1563920
aucuuuaacuguuuaaggu

SEQ ID NO: 1842158 - RNA, 19 nt, Artificial Sequence
  Description of Artificial Sequence: Synthetic oligonucleotide
  Antisense strand to SEQ ID NO: 1842157
accuuaaacaguuaaagau

SEQ ID NO: 1842159 - RNA, 19 nt, Artificial Sequence
  Description of Artificial Sequence: Synthetic oligonucleotide
  Sense strand starting at position 3474 of SEQ ID NO: 1563920
gaauacaguucuguaaagu

SEQ ID NO: 1842160 - RNA, 19 nt, Artificial Sequence
  Description of Artificial Sequence: Synthetic oligonucleotide
  Antisense strand to SEQ ID NO: 1842159
acuuuacagaacuguauuc

SEQ ID NO: 1842161 - RNA, 19 nt, Artificial Sequence
  Description of Artificial Sequence: Synthetic oligonucleotide
  Sense strand starting at position 3590 of SEQ ID NO: 1563920
uuggaauugugcccaggau

SEQ ID NO: 1842162 - RNA, 19 nt, Artificial Sequence
  Description of Artificial Sequence: Synthetic oligonucleotide
  Antisense strand to SEQ ID NO: 1842161
auccugggcacaauuccaa

SEQ ID NO: 1842163 - RNA, 19 nt, Artificial Sequence
  Description of Artificial Sequence: Synthetic oligonucleotide
  Sense strand starting at position 3591 of SEQ ID NO: 1563920
uggaauugugcccaggaug

SEQ ID NO: 1842164 - RNA, 19 nt, Artificial Sequence
  Description of Artificial Sequence: Synthetic oligonucleotide
  Antisense strand to SEQ ID NO: 1842163
cauccugggcacaauucca

SEQ ID NO: 1842165 - RNA, 19 nt, Artificial Sequence
  Description of Artificial Sequence: Synthetic oligonucleotide
  Sense strand starting at position 3646 of SEQ ID NO: 1563920
gguccaggagguuaucuuu

SEQ ID NO: 1842166 - RNA, 19 nt, Artificial Sequence
  Description of Artificial Sequence: Synthetic oligonucleotide
  Antisense strand to SEQ ID NO: 1842165
aaagauaaccuccuggacc

SEQ ID NO: 1842167 - RNA, 19 nt, Artificial Sequence
  Description of Artificial Sequence: Synthetic oligonucleotide
  Sense strand starting at position 3654 of SEQ ID NO: 1563920
agguuaucuuucccaggga

SEQ ID NO: 1842168 - RNA, 19 nt, Artificial Sequence
  Description of Artificial Sequence: Synthetic oligonucleotide
  Antisense strand to SEQ ID NO: 1842167
ucccugggaaagauaaccu

SEQ ID NO: 1842169 - RNA, 19 nt, Artificial Sequence
  Description of Artificial Sequence: Synthetic oligonucleotide
  Sense strand starting at position 3657 of SEQ ID NO: 1563920
uuaucuuucccagggaguu

SEQ ID NO: 1842170 - RNA, 19 nt, Artificial Sequence
  Description of Artificial Sequence: Synthetic oligonucleotide
  Antisense strand to SEQ ID NO: 1842169
aacucccugggaaagauaa

SEQ ID NO: 1842171 - RNA, 19 nt, Artificial Sequence
  Description of Artificial Sequence: Synthetic oligonucleotide
  Sense strand starting at position 3658 of SEQ ID NO: 1563920
uaucuuucccagggaguuu

SEQ ID NO: 1842172 - RNA, 19 nt, Artificial Sequence
  Description of Artificial Sequence: Synthetic oligonucleotide
  Antisense strand to SEQ ID NO: 1842171
aaacucccugggaaagaua

SEQ ID NO: 1842173 - RNA, 19 nt, Artificial Sequence
  Description of Artificial Sequence: Synthetic oligonucleotide
  Sense strand starting at position 3721 of SEQ ID NO: 1563920
aguugaguuggagaaaguu

SEQ ID NO: 1842174 - RNA, 19 nt, Artificial Sequence
  Description of Artificial Sequence: Synthetic oligonucleotide
  Antisense strand to SEQ ID NO: 1842173
aacuuucuccaacucaacu

SEQ ID NO: 1842175 - RNA, 19 nt, Artificial Sequence
  Description of Artificial Sequence: Synthetic oligonucleotide
  Sense strand starting at position 3729 of SEQ ID NO: 1563920
uggagaaaguuggauuuaa

SEQ ID NO: 1842176 - RNA, 19 nt, Artificial Sequence
  Description of Artificial Sequence: Synthetic oligonucleotide
  Antisense strand to SEQ ID NO: 1842175
uuaaauccaacuuucucca

SEQ ID NO: 1842177 - RNA, 19 nt, Artificial Sequence
  Description of Artificial Sequence: Synthetic oligonucleotide
  Sense strand starting at position 3808 of SEQ ID NO: 1563920
aaaugagauugcuuggguu

SEQ ID NO: 1842178 - RNA, 19 nt, Artificial Sequence
  Description of Artificial Sequence: Synthetic oligonucleotide
  Antisense strand to SEQ ID NO: 1842177
aacccaagcaaucucauuu

SEQ ID NO: 1842179 - RNA, 19 nt, Artificial Sequence
  Description of Artificial Sequence: Synthetic oligonucleotide
  Sense strand starting at position 3810 of SEQ ID NO: 1563920
augagauugcuuggguuca

SEQ ID NO: 1842180 - RNA, 19 nt, Artificial Sequence
  Description of Artificial Sequence: Synthetic oligonucleotide
  Antisense strand to SEQ ID NO: 1842179
ugaacccaagcaaucucau

SEQ ID NO: 1842181 - RNA, 19 nt, Artificial Sequence
  Description of Artificial Sequence: Synthetic oligonucleotide
  Sense strand starting at position 3838 of SEQ ID NO: 1563920
ugaccuuagguguguauuu

SEQ ID NO: 1842182 - RNA, 19 nt, Artificial Sequence
  Description of Artificial Sequence: Synthetic oligonucleotide
  Antisense strand to SEQ ID NO: 1842181
aaauacacaccuaagguca

SEQ ID NO: 1842183 - RNA, 19 nt, Artificial Sequence
  Description of Artificial Sequence: Synthetic oligonucleotide
  Sense strand starting at position 3893 of SEQ ID NO: 1563920
aacagauaaucaccgugua

SEQ ID NO: 1842184 - RNA, 19 nt, Artificial Sequence
  Description of Artificial Sequence: Synthetic oligonucleotide
  Antisense strand to SEQ ID NO: 1842183
uacacggugauuaucuguu

SEQ ID NO: 1842185 - RNA, 19 nt, Artificial Sequence
  Description of Artificial Sequence: Synthetic oligonucleotide
  Sense strand starting at position 3894 of SEQ ID NO: 1563920
acagauaaucaccguguaa

SEQ ID NO: 1842186 - RNA, 19 nt, Artificial Sequence
  Description of Artificial Sequence: Synthetic oligonucleotide
  Antisense strand to SEQ ID NO: 1842185
uuacacggugauuaucugu

SEQ ID NO: 1842187 - RNA, 19 nt, Artificial Sequence
  Description of Artificial Sequence: Synthetic oligonucleotide
  Sense strand starting at position 3896 of SEQ ID NO: 1563920
agauaaucaccguguaaua

SEQ ID NO: 1842188 - RNA, 19 nt, Artificial Sequence
  Description of Artificial Sequence: Synthetic oligonucleotide
  Antisense strand to SEQ ID NO: 1842187
uauuacacggugauuaucu

SEQ ID NO: 1842189 - RNA, 19 nt, Artificial Sequence
  Description of Artificial Sequence: Synthetic oligonucleotide
  Sense strand starting at position 3898 of SEQ ID NO: 1563920
auaaucaccguguaauacu

SEQ ID NO: 1842190 - RNA, 19 nt, Artificial Sequence
  Description of Artificial Sequence: Synthetic oligonucleotide
  Antisense strand to SEQ ID NO: 1842189
aguauuacacggugauuau

SEQ ID NO: 1842191 - RNA, 19 nt, Artificial Sequence
  Description of Artificial Sequence: Synthetic oligonucleotide
  Sense strand starting at position 3906 of SEQ ID NO: 1563920
cguguaauacuguaaugau

SEQ ID NO: 1842192 - RNA, 19 nt, Artificial Sequence
  Description of Artificial Sequence: Synthetic oligonucleotide
  Antisense strand to SEQ ID NO: 1842191
aucauuacaguauuacacg

SEQ ID NO: 1842193 - RNA, 19 nt, Artificial Sequence
  Description of Artificial Sequence: Synthetic oligonucleotide
  Sense strand starting at position 3913 of SEQ ID NO: 1563920
uacuguaaugauuagcuga

SEQ ID NO: 1842194 - RNA, 19 nt, Artificial Sequence
  Description of Artificial Sequence: Synthetic oligonucleotide
  Antisense strand to SEQ ID NO: 1842193
ucagcuaaucauuacagua

SEQ ID NO: 1842195 - RNA, 19 nt, Artificial Sequence
  Description of Artificial Sequence: Synthetic oligonucleotide
  Sense strand starting at position 3918 of SEQ ID NO: 1563920
uaaugauuagcugaguuaa

SEQ ID NO: 1842196 - RNA, 19 nt, Artificial Sequence
  Description of Artificial Sequence: Synthetic oligonucleotide
  Antisense strand to SEQ ID NO: 1842195
uuaacucagcuaaucauua

SEQ ID NO: 1842197 - RNA, 19 nt, Artificial Sequence
  Description of Artificial Sequence: Synthetic oligonucleotide
  Sense strand starting at position 3920 of SEQ ID NO: 1563920
augauuagcugaguuaaug

SEQ ID NO: 1842198 - RNA, 19 nt, Artificial Sequence
  Description of Artificial Sequence: Synthetic oligonucleotide
  Antisense strand to SEQ ID NO: 1842197
cauuaacucagcuaaucau

SEQ ID NO: 1842199 - RNA, 19 nt, Artificial Sequence
  Description of Artificial Sequence: Synthetic oligonucleotide
  Sense strand starting at position 3962 of SEQ ID NO: 1563920
acaauauuacauggugauu

SEQ ID NO: 1842200 - RNA, 19 nt, Artificial Sequence
  Description of Artificial Sequence: Synthetic oligonucleotide
  Antisense strand to SEQ ID NO: 1842199
aaucaccauguaauauugu

SEQ ID NO: 1842201 - RNA, 19 nt, Artificial Sequence
  Description of Artificial Sequence: Synthetic oligonucleotide
  Sense strand starting at position 3967 of SEQ ID NO: 1563920
auuacauggugauuacuuu

SEQ ID NO: 1842202 - RNA, 19 nt, Artificial Sequence
  Description of Artificial Sequence: Synthetic oligonucleotide
  Antisense strand to SEQ ID NO: 1842201
aaaguaaucaccauguaau

SEQ ID NO: 1842203 - RNA, 19 nt, Artificial Sequence
  Description of Artificial Sequence: Synthetic oligonucleotide
  Sense strand starting at position 86 of SEQ ID NO: 1563921
uagcaaguaccuugagaag

SEQ ID NO: 1842204 - RNA, 19 nt, Artificial Sequence
  Description of Artificial Sequence: Synthetic oligonucleotide
  Antisense strand to SEQ ID NO: 1842203
cuucucaagguacuugcua

SEQ ID NO: 1842205 - RNA, 19 nt, Artificial Sequence
  Description of Artificial Sequence: Synthetic oligonucleotide
  Sense strand starting at position 255 of SEQ ID NO: 1563921
cuacuugugucccugagac

SEQ ID NO: 1842206 - RNA, 19 nt, Artificial Sequence
  Description of Artificial Sequence: Synthetic oligonucleotide
  Antisense strand to SEQ ID NO: 1842205
gucucagggacacaaguag

SEQ ID NO: 1842207 - RNA, 19 nt, Artificial Sequence
  Description of Artificial Sequence: Synthetic oligonucleotide
  Sense strand starting at position 257 of SEQ ID NO: 1563921
acuugugucccugagacua

SEQ ID NO: 1842208 - RNA, 19 nt, Artificial Sequence
  Description of Artificial Sequence: Synthetic oligonucleotide
  Antisense strand to SEQ ID NO: 1842207
uagucucagggacacaagu

SEQ ID NO: 1842209 - RNA, 19 nt, Artificial Sequence
  Description of Artificial Sequence: Synthetic oligonucleotide
  Sense strand starting at position 414 of SEQ ID NO: 1563921
gguauaaauuuacaagacu

SEQ ID NO: 1842210 - RNA, 19 nt, Artificial Sequence
  Description of Artificial Sequence: Synthetic oligonucleotide
  Antisense strand to SEQ ID NO: 1842209
agucuuguaaauuuauacc

SEQ ID NO: 1842211 - RNA, 19 nt, Artificial Sequence
  Description of Artificial Sequence: Synthetic oligonucleotide
  Sense strand starting at position 478 of SEQ ID NO: 1563921
aagguccuucucuaagagu

SEQ ID NO: 1842212 - RNA, 19 nt, Artificial Sequence
  Description of Artificial Sequence: Synthetic oligonucleotide
  Antisense strand to SEQ ID NO: 1842211
acucuuagagaaggaccuu

SEQ ID NO: 1842213 - RNA, 19 nt, Artificial Sequence
  Description of Artificial Sequence: Synthetic oligonucleotide
  Sense strand starting at position 487 of SEQ ID NO: 1563921
cucuaagaguuucuuagga

SEQ ID NO: 1842214 - RNA, 19 nt, Artificial Sequence
  Description of Artificial Sequence: Synthetic oligonucleotide
  Antisense strand to SEQ ID NO: 1842213
uccuaagaaacucuuagag

SEQ ID NO: 1842215 - RNA, 19 nt, Artificial Sequence
  Description of Artificial Sequence: Synthetic oligonucleotide
  Sense strand starting at position 567 of SEQ ID NO: 1563921
ccacuagaguugccagauu

SEQ ID NO: 1842216 - RNA, 19 nt, Artificial Sequence
  Description of Artificial Sequence: Synthetic oligonucleotide
  Antisense strand to SEQ ID NO: 1842215
aaucuggcaacucuagugg

SEQ ID NO: 1842217 - RNA, 19 nt, Artificial Sequence
  Description of Artificial Sequence: Synthetic oligonucleotide
  Sense strand starting at position 660 of SEQ ID NO: 1563921
auugguuguguaggugaaa

SEQ ID NO: 1842218 - RNA, 19 nt, Artificial Sequence
  Description of Artificial Sequence: Synthetic oligonucleotide
  Antisense strand to SEQ ID NO: 1842217
uuucaccuacacaaccaau

SEQ ID NO: 1842219 - RNA, 19 nt, Artificial Sequence
  Description of Artificial Sequence: Synthetic oligonucleotide
  Sense strand starting at position 663 of SEQ ID NO: 1563921
gguuguguaggugaaauuc

SEQ ID NO: 1842220 - RNA, 19 nt, Artificial Sequence
  Description of Artificial Sequence: Synthetic oligonucleotide
  Antisense strand to SEQ ID NO: 1842219
gaauuucaccuacacaacc

SEQ ID NO: 1842221 - RNA, 19 nt, Artificial Sequence
  Description of Artificial Sequence: Synthetic oligonucleotide
  Sense strand starting at position 786 of SEQ ID NO: 1563921
ccucgacuucucuguuaaa

SEQ ID NO: 1842222 - RNA, 19 nt, Artificial Sequence
  Description of Artificial Sequence: Synthetic oligonucleotide
  Antisense strand to SEQ ID NO: 1842221
uuuaacagagaagucgagg

SEQ ID NO: 1842223 - RNA, 19 nt, Artificial Sequence
  Description of Artificial Sequence: Synthetic oligonucleotide
  Sense strand starting at position 829 of SEQ ID NO: 1563921
ugguaagaguuucucaaac

SEQ ID NO: 1842224 - RNA, 19 nt, Artificial Sequence
  Description of Artificial Sequence: Synthetic oligonucleotide
  Antisense strand to SEQ ID NO: 1842223
guuugagaaacucuuacca

SEQ ID NO: 1842225 - RNA, 19 nt, Artificial Sequence
  Description of Artificial Sequence: Synthetic oligonucleotide
  Sense strand starting at position 910 of SEQ ID NO: 1563921
auauaaaugcgucaaggag

SEQ ID NO: 1842226 - RNA, 19 nt, Artificial Sequence
  Description of Artificial Sequence: Synthetic oligonucleotide
  Antisense strand to SEQ ID NO: 1842225
cuccuugacgcauuuauau

SEQ ID NO: 1842227 - RNA, 19 nt, Artificial Sequence
  Description of Artificial Sequence: Synthetic oligonucleotide
  Sense strand starting at position 991 of SEQ ID NO: 1563921
uggauaugcagaggaacuu

SEQ ID NO: 1842228 - RNA, 19 nt, Artificial Sequence
  Description of Artificial Sequence: Synthetic oligonucleotide
  Antisense strand to SEQ ID NO: 1842227
aaguuccucugcauaucca

SEQ ID NO: 1842229 - RNA, 19 nt, Artificial Sequence
  Description of Artificial Sequence: Synthetic oligonucleotide
  Sense strand starting at position 1029 of SEQ ID NO: 1563921
aaagaaauaucgcuugagg

SEQ ID NO: 1842230 - RNA, 19 nt, Artificial Sequence
  Description of Artificial Sequence: Synthetic oligonucleotide
  Antisense strand to SEQ ID NO: 1842229
ccucaagcgauauuucuuu

SEQ ID NO: 1842231 - RNA, 19 nt, Artificial Sequence
  Description of Artificial Sequence: Synthetic oligonucleotide
  Sense strand starting at position 1200 of SEQ ID NO: 1563921
cuuacugacacggguaaga

SEQ ID NO: 1842232 - RNA, 19 nt, Artificial Sequence
  Description of Artificial Sequence: Synthetic oligonucleotide
  Antisense strand to SEQ ID NO: 1842231
ucuuacccgugucaguaag

SEQ ID NO: 1842233 - RNA, 19 nt, Artificial Sequence
  Description of Artificial Sequence: Synthetic oligonucleotide
  Sense strand starting at position 1209 of SEQ ID NO: 1563921
acggguaagauucggagau

SEQ ID NO: 1842234 - RNA, 19 nt, Artificial Sequence
  Description of Artificial Sequence: Synthetic oligonucleotide
  Antisense strand to SEQ ID NO: 1842233
aucuccgaaucuuacccgu

SEQ ID NO: 1842235 - RNA, 19 nt, Artificial Sequence
  Description of Artificial Sequence: Synthetic oligonucleotide
  Sense strand starting at position 1213 of SEQ ID NO: 1563921
guaagauucggagaugagu

SEQ ID NO: 1842236 - RNA, 19 nt, Artificial Sequence
  Description of Artificial Sequence: Synthetic oligonucleotide
  Antisense strand to SEQ ID NO: 1842235
acucaucuccgaaucuuac

SEQ ID NO: 1842237 - RNA, 19 nt, Artificial Sequence
  Description of Artificial Sequence: Synthetic oligonucleotide
  Sense strand starting at position 1275 of SEQ ID NO: 1563921
agcgaagcgaguugagaaa

SEQ ID NO: 1842238 - RNA, 19 nt, Artificial Sequence
  Description of Artificial Sequence: Synthetic oligonucleotide
  Antisense strand to SEQ ID NO: 1842237
uuucucaacucgcuucgcu

SEQ ID NO: 1842239 - RNA, 19 nt, Artificial Sequence
  Description of Artificial Sequence: Synthetic oligonucleotide
  Sense strand starting at position 2016 of SEQ ID NO: 1563921
guaacaaugucauuguauu

SEQ ID NO: 1842240 - RNA, 19 nt, Artificial Sequence
  Description of Artificial Sequence: Synthetic oligonucleotide
  Antisense strand to SEQ ID NO: 1842239
aauacaaugacauuguuac

SEQ ID NO: 1842241 - RNA, 19 nt, Artificial Sequence
  Description of Artificial Sequence: Synthetic oligonucleotide
  Sense strand starting at position 2177 of SEQ ID NO: 1563921
gggaaacgcaacugaaaua

SEQ ID NO: 1842242 - RNA, 19 nt, Artificial Sequence
  Description of Artificial Sequence: Synthetic oligonucleotide
  Antisense strand to SEQ ID NO: 1842241
uauuucaguugcguuuccc

SEQ ID NO: 1842243 - RNA, 19 nt, Artificial Sequence
  Description of Artificial Sequence: Synthetic oligonucleotide
  Sense strand starting at position 2193 of SEQ ID NO: 1563921
auagucaacucuuugguca

SEQ ID NO: 1842244 - RNA, 19 nt, Artificial Sequence
  Description of Artificial Sequence: Synthetic oligonucleotide
  Antisense strand to SEQ ID NO: 1842243
ugaccaaagaguugacuau

SEQ ID NO: 1842245 - RNA, 19 nt, Artificial Sequence
  Description of Artificial Sequence: Synthetic oligonucleotide
  Sense strand starting at position 2201 of SEQ ID NO: 1563921
cucuuuggucaugguuaca

SEQ ID NO: 1842246 - RNA, 19 nt, Artificial Sequence
  Description of Artificial Sequence: Synthetic oligonucleotide
  Antisense strand to SEQ ID NO: 1842245
uguaaccaugaccaaagag

SEQ ID NO: 1842247 - RNA, 19 nt, Artificial Sequence
  Description of Artificial Sequence: Synthetic oligonucleotide
  Sense strand starting at position 2263 of SEQ ID NO: 1563921
cgugauuacacagaauugu

SEQ ID NO: 1842248 - RNA, 19 nt, Artificial Sequence
  Description of Artificial Sequence: Synthetic oligonucleotide
  Antisense strand to SEQ ID NO: 1842247
acaauucuguguaaucacg

SEQ ID NO: 1842249 - RNA, 19 nt, Artificial Sequence
  Description of Artificial Sequence: Synthetic oligonucleotide
  Sense strand starting at position 2323 of SEQ ID NO: 1563921
guccaaacaucacuauugu

SEQ ID NO: 1842250 - RNA, 19 nt, Artificial Sequence
  Description of Artificial Sequence: Synthetic oligonucleotide
  Antisense strand to SEQ ID NO: 1842249
acaauagugauguuuggac

SEQ ID NO: 1842251 - RNA, 19 nt, Artificial Sequence
  Description of Artificial Sequence: Synthetic oligonucleotide
  Sense strand starting at position 2332 of SEQ ID NO: 1563921
ucacuauuguuccuaugau

SEQ ID NO: 1842252 - RNA, 19 nt, Artificial Sequence
  Description of Artificial Sequence: Synthetic oligonucleotide
  Antisense strand to SEQ ID NO: 1842251
aucauaggaacaauaguga

SEQ ID NO: 1842253 - RNA, 19 nt, Artificial Sequence
  Description of Artificial Sequence: Synthetic oligonucleotide
  Sense strand starting at position 2346 of SEQ ID NO: 1563921
augauuuacugagagauuc

SEQ ID NO: 1842254 - RNA, 19 nt, Artificial Sequence
  Description of Artificial Sequence: Synthetic oligonucleotide
  Antisense strand to SEQ ID NO: 1842253
gaaucucucaguaaaucau

SEQ ID NO: 1842255 - RNA, 19 nt, Artificial Sequence
  Description of Artificial Sequence: Synthetic oligonucleotide
  Sense strand starting at position 2387 of SEQ ID NO: 1563921
gauauauuguaggccucua

SEQ ID NO: 1842256 - RNA, 19 nt, Artificial Sequence
  Description of Artificial Sequence: Synthetic oligonucleotide
  Antisense strand to SEQ ID NO: 1842255
uagaggccuacaauauauc

SEQ ID NO: 1842257 - RNA, 19 nt, Artificial Sequence
  Description of Artificial Sequence: Synthetic oligonucleotide
  Sense strand starting at position 2392 of SEQ ID NO: 1563921
auuguaggccucuagauca

SEQ ID NO: 1842258 - RNA, 19 nt, Artificial Sequence
  Description of Artificial Sequence: Synthetic oligonucleotide
  Antisense strand to SEQ ID NO: 1842257
ugaucuagaggccuacaau

SEQ ID NO: 1842259 - RNA, 19 nt, Artificial Sequence
  Description of Artificial Sequence: Synthetic oligonucleotide
  Sense strand starting at position 2402 of SEQ ID NO: 1563921
ucuagaucagacuguauau

SEQ ID NO: 1842260 - RNA, 19 nt, Artificial Sequence
  Description of Artificial Sequence: Synthetic oligonucleotide
  Antisense strand to SEQ ID NO: 1842259
auauacagucugaucuaga

SEQ ID NO: 1842261 - RNA, 19 nt, Artificial Sequence
  Description of Artificial Sequence: Synthetic oligonucleotide
  Sense strand starting at position 2427 of SEQ ID NO: 1563921
ggaggccuaucaguaacua

SEQ ID NO: 1842262 - RNA, 19 nt, Artificial Sequence
  Description of Artificial Sequence: Synthetic oligonucleotide
  Antisense strand to SEQ ID NO: 1842261
uaguuacugauaggccucc

SEQ ID NO: 1842263 - RNA, 19 nt, Artificial Sequence
  Description of Artificial Sequence: Synthetic oligonucleotide
  Sense strand starting at position 2428 of SEQ ID NO: 1563921
gaggccuaucaguaacuaa

SEQ ID NO: 1842264 - RNA, 19 nt, Artificial Sequence
  Description of Artificial Sequence: Synthetic oligonucleotide
  Antisense strand to SEQ ID NO: 1842263
uuaguuacugauaggccuc

SEQ ID NO: 1842265 - RNA, 19 nt, Artificial Sequence
  Description of Artificial Sequence: Synthetic oligonucleotide
  Sense strand starting at position 2526 of SEQ ID NO: 1563921
uguuguuaauucccauuaa

SEQ ID NO: 1842266 - RNA, 19 nt, Artificial Sequence
  Description of Artificial Sequence: Synthetic oligonucleotide
  Antisense strand to SEQ ID NO: 1842265
uuaaugggaauuaacaaca

SEQ ID NO: 1842267 - RNA, 19 nt, Artificial Sequence
  Description of Artificial Sequence: Synthetic oligonucleotide
  Sense strand starting at position 2624 of SEQ ID NO: 1563921
ucaauagaacugugugcaa

SEQ ID NO: 1842268 - RNA, 19 nt, Artificial Sequence
  Description of Artificial Sequence: Synthetic oligonucleotide
  Antisense strand to SEQ ID NO: 1842267
uugcacacaguucuauuga

SEQ ID NO: 1842269 - RNA, 19 nt, Artificial Sequence
  Description of Artificial Sequence: Synthetic oligonucleotide
  Sense strand starting at position 2626 of SEQ ID NO: 1563921
aauagaacugugugcaaug

SEQ ID NO: 1842270 - RNA, 19 nt, Artificial Sequence
  Description of Artificial Sequence: Synthetic oligonucleotide
  Antisense strand to SEQ ID NO: 1842269
cauugcacacaguucuauu

SEQ ID NO: 1842271 - RNA, 19 nt, Artificial Sequence
  Description of Artificial Sequence: Synthetic oligonucleotide
  Sense strand starting at position 2627 of SEQ ID NO: 1563921
auagaacugugugcaauga

SEQ ID NO: 1842272 - RNA, 19 nt, Artificial Sequence
  Description of Artificial Sequence: Synthetic oligonucleotide
  Antisense strand to SEQ ID NO: 1842271
ucauugcacacaguucuau

SEQ ID NO: 1842273 - RNA, 19 nt, Artificial Sequence
  Description of Artificial Sequence: Synthetic oligonucleotide
  Sense strand starting at position 2628 of SEQ ID NO: 1563921
uagaacugugugcaaugau

SEQ ID NO: 1842274 - RNA, 19 nt, Artificial Sequence
  Description of Artificial Sequence: Synthetic oligonucleotide
  Antisense strand to SEQ ID NO: 1842273
aucauugcacacaguucua

SEQ ID NO: 1842275 - RNA, 19 nt, Artificial Sequence
  Description of Artificial Sequence: Synthetic oligonucleotide
  Sense strand starting at position 2631 of SEQ ID NO: 1563921
aacugugugcaaugaugga

SEQ ID NO: 1842276 - RNA, 19 nt, Artificial Sequence
  Description of Artificial Sequence: Synthetic oligonucleotide
  Antisense strand to SEQ ID NO: 1842275
uccaucauugcacacaguu

SEQ ID NO: 1842277 - RNA, 19 nt, Artificial Sequence
  Description of Artificial Sequence: Synthetic oligonucleotide
  Sense strand starting at position 2653 of SEQ ID NO: 1563921
guccuaugucugcuguguu

SEQ ID NO: 1842278 - RNA, 19 nt, Artificial Sequence
  Description of Artificial Sequence: Synthetic oligonucleotide
  Antisense strand to SEQ ID NO: 1842277
aacacagcagacauaggac

SEQ ID NO: 1842279 - RNA, 19 nt, Artificial Sequence
  Description of Artificial Sequence: Synthetic oligonucleotide
  Sense strand starting at position 2689 of SEQ ID NO: 1563921
acuauaaguggccauugaa

SEQ ID NO: 1842280 - RNA, 19 nt, Artificial Sequence
  Description of Artificial Sequence: Synthetic oligonucleotide
  Antisense strand to SEQ ID NO: 1842279
uucaauggccacuuauagu

SEQ ID NO: 1842281 - RNA, 19 nt, Artificial Sequence
  Description of Artificial Sequence: Synthetic oligonucleotide
  Sense strand starting at position 2692 of SEQ ID NO: 1563921
auaaguggccauugaaaua

SEQ ID NO: 1842282 - RNA, 19 nt, Artificial Sequence
  Description of Artificial Sequence: Synthetic oligonucleotide
  Antisense strand to SEQ ID NO: 1842281
uauuucaauggccacuuau

SEQ ID NO: 1842283 - RNA, 19 nt, Artificial Sequence
  Description of Artificial Sequence: Synthetic oligonucleotide
  Sense strand starting at position 68 of SEQ ID NO: 1563922
gcugucauuuccuccacua

SEQ ID NO: 1842284 - RNA, 19 nt, Artificial Sequence
  Description of Artificial Sequence: Synthetic oligonucleotide
  Antisense strand to SEQ ID NO: 1842283
uaguggaggaaaugacagc

SEQ ID NO: 1842285 - RNA, 19 nt, Artificial Sequence
  Description of Artificial Sequence: Synthetic oligonucleotide
  Sense strand starting at position 252 of SEQ ID NO: 1563922
uagagaguuaaaugugagu

SEQ ID NO: 1842286 - RNA, 19 nt, Artificial Sequence
  Description of Artificial Sequence: Synthetic oligonucleotide
  Antisense strand to SEQ ID NO: 1842285
acucacauuuaacucucua

SEQ ID NO: 1842287 - RNA, 19 nt, Artificial Sequence
  Description of Artificial Sequence: Synthetic oligonucleotide
  Sense strand starting at position 254 of SEQ ID NO: 1563922
gagaguuaaaugugaguca

SEQ ID NO: 1842288 - RNA, 19 nt, Artificial Sequence
  Description of Artificial Sequence: Synthetic oligonucleotide
  Antisense strand to SEQ ID NO: 1842287
ugacucacauuuaacucuc

SEQ ID NO: 1842289 - RNA, 19 nt, Artificial Sequence
  Description of Artificial Sequence: Synthetic oligonucleotide
  Sense strand starting at position 257 of SEQ ID NO: 1563922
aguuaaaugugagucacca

SEQ ID NO: 1842290 - RNA, 19 nt, Artificial Sequence
  Description of Artificial Sequence: Synthetic oligonucleotide
  Antisense strand to SEQ ID NO: 1842289
uggugacucacauuuaacu

SEQ ID NO: 1842291 - RNA, 19 nt, Artificial Sequence
  Description of Artificial Sequence: Synthetic oligonucleotide
  Sense strand starting at position 460 of SEQ ID NO: 1563922
gauaaauaauuugaucgag

SEQ ID NO: 1842292 - RNA, 19 nt, Artificial Sequence
  Description of Artificial Sequence: Synthetic oligonucleotide
  Antisense strand to SEQ ID NO: 1842291
cucgaucaaauuauuuauc

SEQ ID NO: 1842293 - RNA, 19 nt, Artificial Sequence
  Description of Artificial Sequence: Synthetic oligonucleotide
  Sense strand starting at position 845 of SEQ ID NO: 1563922
ucaacuguggcucagaaau

SEQ ID NO: 1842294 - RNA, 19 nt, Artificial Sequence
  Description of Artificial Sequence: Synthetic oligonucleotide
  Antisense strand to SEQ ID NO: 1842293
auuucugagccacaguuga

SEQ ID NO: 1842295 - RNA, 19 nt, Artificial Sequence
  Description of Artificial Sequence: Synthetic oligonucleotide
  Sense strand starting at position 851 of SEQ ID NO: 1563922
guggcucagaaauggaaga

SEQ ID NO: 1842296 - RNA, 19 nt, Artificial Sequence
  Description of Artificial Sequence: Synthetic oligonucleotide
  Antisense strand to SEQ ID NO: 1842295
ucuuccauuucugagccac

SEQ ID NO: 1842297 - RNA, 19 nt, Artificial Sequence
  Description of Artificial Sequence: Synthetic oligonucleotide
  Sense strand starting at position 875 of SEQ ID NO: 1563922
aguggagagagguguuaga

SEQ ID NO: 1842298 - RNA, 19 nt, Artificial Sequence
  Description of Artificial Sequence: Synthetic oligonucleotide
  Antisense strand to SEQ ID NO: 1842297
ucuaacaccucucuccacu

SEQ ID NO: 1842299 - RNA, 19 nt, Artificial Sequence
  Description of Artificial Sequence: Synthetic oligonucleotide
  Sense strand starting at position 900 of SEQ ID NO: 1563922
ggagaaagggauugugcau

SEQ ID NO: 1842300 - RNA, 19 nt, Artificial Sequence
  Description of Artificial Sequence: Synthetic oligonucleotide
  Antisense strand to SEQ ID NO: 1842299
augcacaaucccuuucucc

SEQ ID NO: 1842301 - RNA, 19 nt, Artificial Sequence
  Description of Artificial Sequence: Synthetic oligonucleotide
  Sense strand starting at position 913 of SEQ ID NO: 1563922
gugcauacaaagggugaua

SEQ ID NO: 1842302 - RNA, 19 nt, Artificial Sequence
  Description of Artificial Sequence: Synthetic oligonucleotide
  Antisense strand to SEQ ID NO: 1842301
uaucacccuuuguaugcac

SEQ ID NO: 1842303 - RNA, 19 nt, Artificial Sequence
  Description of Artificial Sequence: Synthetic oligonucleotide
  Sense strand starting at position 915 of SEQ ID NO: 1563922
gcauacaaagggugauaaa

SEQ ID NO: 1842304 - RNA, 19 nt, Artificial Sequence
  Description of Artificial Sequence: Synthetic oligonucleotide
  Antisense strand to SEQ ID NO: 1842303
uuuaucacccuuuguaugc

SEQ ID NO: 1842305 - RNA, 19 nt, Artificial Sequence
  Description of Artificial Sequence: Synthetic oligonucleotide
  Sense strand starting at position 1031 of SEQ ID NO: 1563922
aucaauaaguugguuuaca

SEQ ID NO: 1842306 - RNA, 19 nt, Artificial Sequence
  Description of Artificial Sequence: Synthetic oligonucleotide
  Antisense strand to SEQ ID NO: 1842305
uguaaaccaacuuauugau

SEQ ID NO: 1842307 - RNA, 19 nt, Artificial Sequence
  Description of Artificial Sequence: Synthetic oligonucleotide
  Sense strand starting at position 1032 of SEQ ID NO: 1563922
ucaauaaguugguuuacau

SEQ ID NO: 1842308 - RNA, 19 nt, Artificial Sequence
  Description of Artificial Sequence: Synthetic oligonucleotide
  Antisense strand to SEQ ID NO: 1842307
auguaaaccaacuuauuga

SEQ ID NO: 1842309 - RNA, 19 nt, Artificial Sequence
  Description of Artificial Sequence: Synthetic oligonucleotide
  Sense strand starting at position 1042 of SEQ ID NO: 1563922
gguuuacaucugcacuaug

SEQ ID NO: 1842310 - RNA, 19 nt, Artificial Sequence
  Description of Artificial Sequence: Synthetic oligonucleotide
  Antisense strand to SEQ ID NO: 1842309
cauagugcagauguaaacc

SEQ ID NO: 1842311 - RNA, 19 nt, Artificial Sequence
  Description of Artificial Sequence: Synthetic oligonucleotide
  Sense strand starting at position 1326 of SEQ ID NO: 1563922
gaauuacauuaugugguuu

SEQ ID NO: 1842312 - RNA, 19 nt, Artificial Sequence
  Description of Artificial Sequence: Synthetic oligonucleotide
  Antisense strand to SEQ ID NO: 1842311
aaaccacauaauguaauuc

SEQ ID NO: 1842313 - RNA, 19 nt, Artificial Sequence
  Description of Artificial Sequence: Synthetic oligonucleotide
  Sense strand starting at position 1368 of SEQ ID NO: 1563922
ugggccagaugaucucuaa

SEQ ID NO: 1842314 - RNA, 19 nt, Artificial Sequence
  Description of Artificial Sequence: Synthetic oligonucleotide
  Antisense strand to SEQ ID NO: 1842313
uuagagaucaucuggccca

SEQ ID NO: 1842315 - RNA, 19 nt, Artificial Sequence
  Description of Artificial Sequence: Synthetic oligonucleotide
  Sense strand starting at position 1371 of SEQ ID NO: 1563922
gccagaugaucucuaagau

SEQ ID NO: 1842316 - RNA, 19 nt, Artificial Sequence
  Description of Artificial Sequence: Synthetic oligonucleotide
  Antisense strand to SEQ ID NO: 1842315
aucuuagagaucaucuggc

SEQ ID NO: 1842317 - RNA, 19 nt, Artificial Sequence
  Description of Artificial Sequence: Synthetic oligonucleotide
  Sense strand starting at position 1469 of SEQ ID NO: 1563922
caugguaguaguuagaagu

SEQ ID NO: 1842318 - RNA, 19 nt, Artificial Sequence
  Description of Artificial Sequence: Synthetic oligonucleotide
  Antisense strand to SEQ ID NO: 1842317
acuucuaacuacuaccaug

SEQ ID NO: 1842319 - RNA, 19 nt, Artificial Sequence
  Description of Artificial Sequence: Synthetic oligonucleotide
  Sense strand starting at position 1475 of SEQ ID NO: 1563922
aguaguuagaagugagaug

SEQ ID NO: 1842320 - RNA, 19 nt, Artificial Sequence
  Description of Artificial Sequence: Synthetic oligonucleotide
  Antisense strand to SEQ ID NO: 1842319
caucucacuucuaacuacu

SEQ ID NO: 1842321 - RNA, 19 nt, Artificial Sequence
  Description of Artificial Sequence: Synthetic oligonucleotide
  Sense strand starting at position 1617 of SEQ ID NO: 1563922
uuaacuaacuggucuugau

SEQ ID NO: 1842322 - RNA, 19 nt, Artificial Sequence
  Description of Artificial Sequence: Synthetic oligonucleotide
  Antisense strand to SEQ ID NO: 1842321
aucaagaccaguuaguuaa

SEQ ID NO: 1842323 - RNA, 19 nt, Artificial Sequence
  Description of Artificial Sequence: Synthetic oligonucleotide
  Sense strand starting at position 1629 of SEQ ID NO: 1563922
ucuugaugagcccaauaau

SEQ ID NO: 1842324 - RNA, 19 nt, Artificial Sequence
  Description of Artificial Sequence: Synthetic oligonucleotide
  Antisense strand to SEQ ID NO: 1842323
auuauugggcucaucaaga

SEQ ID NO: 1842325 - RNA, 19 nt, Artificial Sequence
  Description of Artificial Sequence: Synthetic oligonucleotide
  Sense strand starting at position 1639 of SEQ ID NO: 1563922
cccaauaaucggcauggaa

SEQ ID NO: 1842326 - RNA, 19 nt, Artificial Sequence
  Description of Artificial Sequence: Synthetic oligonucleotide
  Antisense strand to SEQ ID NO: 1842325
uuccaugccgauuauuggg

SEQ ID NO: 1842327 - RNA, 19 nt, Artificial Sequence
  Description of Artificial Sequence: Synthetic oligonucleotide
  Sense strand starting at position 1641 of SEQ ID NO: 1563922
caauaaucggcauggaauc

SEQ ID NO: 1842328 - RNA, 19 nt, Artificial Sequence
  Description of Artificial Sequence: Synthetic oligonucleotide
  Antisense strand to SEQ ID NO: 1842327
gauuccaugccgauuauug

SEQ ID NO: 1842329 - RNA, 19 nt, Artificial Sequence
  Description of Artificial Sequence: Synthetic oligonucleotide
  Sense strand starting at position 1934 of SEQ ID NO: 1563922
ccaagaguuccugggaaug

SEQ ID NO: 1842330 - RNA, 19 nt, Artificial Sequence
  Description of Artificial Sequence: Synthetic oligonucleotide
  Antisense strand to SEQ ID NO: 1842329
cauucccaggaacucuugg

SEQ ID NO: 1842331 - RNA, 19 nt, Artificial Sequence
  Description of Artificial Sequence: Synthetic oligonucleotide
  Sense strand starting at position 2072 of SEQ ID NO: 1563922
agcaacauucuuggaugaa

SEQ ID NO: 1842332 - RNA, 19 nt, Artificial Sequence
  Description of Artificial Sequence: Synthetic oligonucleotide
  Antisense strand to SEQ ID NO: 1842331
uucauccaagaauguugcu

SEQ ID NO: 1842333 - RNA, 19 nt, Artificial Sequence
  Description of Artificial Sequence: Synthetic oligonucleotide
  Sense strand starting at position 2177 of SEQ ID NO: 1563922
aaagauuauuagucugggu

SEQ ID NO: 1842334 - RNA, 19 nt, Artificial Sequence
  Description of Artificial Sequence: Synthetic oligonucleotide
  Antisense strand to SEQ ID NO: 1842333
acccagacuaauaaucuuu

SEQ ID NO: 1842335 - RNA, 19 nt, Artificial Sequence
  Description of Artificial Sequence: Synthetic oligonucleotide
  Sense strand starting at position 2350 of SEQ ID NO: 1563922
ggaggaugaucugugguug

SEQ ID NO: 1842336 - RNA, 19 nt, Artificial Sequence
  Description of Artificial Sequence: Synthetic oligonucleotide
  Antisense strand to SEQ ID NO: 1842335
caaccacagaucauccucc

SEQ ID NO: 1842337 - RNA, 19 nt, Artificial Sequence
  Description of Artificial Sequence: Synthetic oligonucleotide
  Sense strand starting at position 2351 of SEQ ID NO: 1563922
gaggaugaucugugguuga

SEQ ID NO: 1842338 - RNA, 19 nt, Artificial Sequence
  Description of Artificial Sequence: Synthetic oligonucleotide
  Antisense strand to SEQ ID NO: 1842337
ucaaccacagaucauccuc

SEQ ID NO: 1842339 - RNA, 19 nt, Artificial Sequence
  Description of Artificial Sequence: Synthetic oligonucleotide
  Sense strand starting at position 2354 of SEQ ID NO: 1563922
gaugaucugugguugacau

SEQ ID NO: 1842340 - RNA, 19 nt, Artificial Sequence
  Description of Artificial Sequence: Synthetic oligonucleotide
  Antisense strand to SEQ ID NO: 1842339
augucaaccacagaucauc

SEQ ID NO: 1842341 - RNA, 19 nt, Artificial Sequence
  Description of Artificial Sequence: Synthetic oligonucleotide
  Sense strand starting at position 2355 of SEQ ID NO: 1563922
augaucugugguugacaua

SEQ ID NO: 1842342 - RNA, 19 nt, Artificial Sequence
  Description of Artificial Sequence: Synthetic oligonucleotide
  Antisense strand to SEQ ID NO: 1842341
uaugucaaccacagaucau

SEQ ID NO: 1842343 - RNA, 19 nt, Artificial Sequence
  Description of Artificial Sequence: Synthetic oligonucleotide
  Sense strand starting at position 2356 of SEQ ID NO: 1563922
ugaucugugguugacauau

SEQ ID NO: 1842344 - RNA, 19 nt, Artificial Sequence
  Description of Artificial Sequence: Synthetic oligonucleotide
  Antisense strand to SEQ ID NO: 1842343
auaugucaaccacagauca

SEQ ID NO: 1842345 - RNA, 19 nt, Artificial Sequence
  Description of Artificial Sequence: Synthetic oligonucleotide
  Sense strand starting at position 2362 of SEQ ID NO: 1563922
gugguugacauauaugaug

SEQ ID NO: 1842346 - RNA, 19 nt, Artificial Sequence
  Description of Artificial Sequence: Synthetic oligonucleotide
  Antisense strand to SEQ ID NO: 1842345
caucauauaugucaaccac

SEQ ID NO: 1842347 - RNA, 19 nt, Artificial Sequence
  Description of Artificial Sequence: Synthetic oligonucleotide
  Sense strand starting at position 2364 of SEQ ID NO: 1563922
gguugacauauaugaugau

SEQ ID NO: 1842348 - RNA, 19 nt, Artificial Sequence
  Description of Artificial Sequence: Synthetic oligonucleotide
  Antisense strand to SEQ ID NO: 1842347
aucaucauauaugucaacc

SEQ ID NO: 1842349 - RNA, 19 nt, Artificial Sequence
  Description of Artificial Sequence: Synthetic oligonucleotide
  Sense strand starting at position 2512 of SEQ ID NO: 1563922
uggagaugauugucuucua

SEQ ID NO: 1842350 - RNA, 19 nt, Artificial Sequence
  Description of Artificial Sequence: Synthetic oligonucleotide
  Antisense strand to SEQ ID NO: 1842349
uagaagacaaucaucucca

SEQ ID NO: 1842351 - RNA, 19 nt, Artificial Sequence
  Description of Artificial Sequence: Synthetic oligonucleotide
  Sense strand starting at position 2513 of SEQ ID NO: 1563922
ggagaugauugucuucuag

SEQ ID NO: 1842352 - RNA, 19 nt, Artificial Sequence
  Description of Artificial Sequence: Synthetic oligonucleotide
  Antisense strand to SEQ ID NO: 1842351
cuagaagacaaucaucucc

SEQ ID NO: 1842353 - RNA, 19 nt, Artificial Sequence
  Description of Artificial Sequence: Synthetic oligonucleotide
  Sense strand starting at position 2515 of SEQ ID NO: 1563922
agaugauugucuucuagua

SEQ ID NO: 1842354 - RNA, 19 nt, Artificial Sequence
  Description of Artificial Sequence: Synthetic oligonucleotide
  Antisense strand to SEQ ID NO: 1842353
uacuagaagacaaucaucu

SEQ ID NO: 1842355 - RNA, 19 nt, Artificial Sequence
  Description of Artificial Sequence: Synthetic oligonucleotide
  Sense strand starting at position 2659 of SEQ ID NO: 1563922
ggaauaaguaucuaugugu

SEQ ID NO: 1842356 - RNA, 19 nt, Artificial Sequence
  Description of Artificial Sequence: Synthetic oligonucleotide
  Antisense strand to SEQ ID NO: 1842355
acacauagauacuuauucc

SEQ ID NO: 1842357 - RNA, 19 nt, Artificial Sequence
  Description of Artificial Sequence: Synthetic oligonucleotide
  Sense strand starting at position 2927 of SEQ ID NO: 1563922
guauguaugcuucuguggu

SEQ ID NO: 1842358 - RNA, 19 nt, Artificial Sequence
  Description of Artificial Sequence: Synthetic oligonucleotide
  Antisense strand to SEQ ID NO: 1842357
accacagaagcauacauac

SEQ ID NO: 1842359 - RNA, 19 nt, Artificial Sequence
  Description of Artificial Sequence: Synthetic oligonucleotide
  Sense strand starting at position 3241 of SEQ ID NO: 1563922
gagaguuaugaaugagagu

SEQ ID NO: 1842360 - RNA, 19 nt, Artificial Sequence
  Description of Artificial Sequence: Synthetic oligonucleotide
  Antisense strand to SEQ ID NO: 1842359
acucucauucauaacucuc

SEQ ID NO: 1842361 - RNA, 19 nt, Artificial Sequence
  Description of Artificial Sequence: Synthetic oligonucleotide
  Sense strand starting at position 3508 of SEQ ID NO: 1563922
uaggguucuguuuauaauc

SEQ ID NO: 1842362 - RNA, 19 nt, Artificial Sequence
  Description of Artificial Sequence: Synthetic oligonucleotide
  Antisense strand to SEQ ID NO: 1842361
gauuauaaacagaacccua

SEQ ID NO: 1842363 - RNA, 19 nt, Artificial Sequence
  Description of Artificial Sequence: Synthetic oligonucleotide
  Sense strand starting at position 107 of SEQ ID NO: 1563923
gguugauuagcaggucucu

SEQ ID NO: 1842364 - RNA, 19 nt, Artificial Sequence
  Description of Artificial Sequence: Synthetic oligonucleotide
  Antisense strand to SEQ ID NO: 1842363
agagaccugcuaaucaacc

SEQ ID NO: 1842365 - RNA, 19 nt, Artificial Sequence
  Description of Artificial Sequence: Synthetic oligonucleotide
  Sense strand starting at position 112 of SEQ ID NO: 1563923
auuagcaggucucuaaagu

SEQ ID NO: 1842366 - RNA, 19 nt, Artificial Sequence
  Description of Artificial Sequence: Synthetic oligonucleotide
  Antisense strand to SEQ ID NO: 1842365
acuuuagagaccugcuaau

SEQ ID NO: 1842367 - RNA, 19 nt, Artificial Sequence
  Description of Artificial Sequence: Synthetic oligonucleotide
  Sense strand starting at position 233 of SEQ ID NO: 1563923
agggauaguccagaugcuu

SEQ ID NO: 1842368 - RNA, 19 nt, Artificial Sequence
  Description of Artificial Sequence: Synthetic oligonucleotide
  Antisense strand to SEQ ID NO: 1842367
aagcaucuggacuaucccu

SEQ ID NO: 1842369 - RNA, 19 nt, Artificial Sequence
  Description of Artificial Sequence: Synthetic oligonucleotide
  Sense strand starting at position 306 of SEQ ID NO: 1563923
ucuugugugucccuaggga

SEQ ID NO: 1842370 - RNA, 19 nt, Artificial Sequence
  Description of Artificial Sequence: Synthetic oligonucleotide
  Antisense strand to SEQ ID NO: 1842369
ucccuagggacacacaaga

SEQ ID NO: 1842371 - RNA, 19 nt, Artificial Sequence
  Description of Artificial Sequence: Synthetic oligonucleotide
  Sense strand starting at position 320 of SEQ ID NO: 1563923
agggaauagucucucuaug

SEQ ID NO: 1842372 - RNA, 19 nt, Artificial Sequence
  Description of Artificial Sequence: Synthetic oligonucleotide
  Antisense strand to SEQ ID NO: 1842371
cauagagagacuauucccu

SEQ ID NO: 1842373 - RNA, 19 nt, Artificial Sequence
  Description of Artificial Sequence: Synthetic oligonucleotide
  Sense strand starting at position 553 of SEQ ID NO: 1563923
ugguaagaaauguguagag

SEQ ID NO: 1842374 - RNA, 19 nt, Artificial Sequence
  Description of Artificial Sequence: Synthetic oligonucleotide
  Antisense strand to SEQ ID NO: 1842373
cucuacacauuucuuacca

SEQ ID NO: 1842375 - RNA, 19 nt, Artificial Sequence
  Description of Artificial Sequence: Synthetic oligonucleotide
  Sense strand starting at position 674 of SEQ ID NO: 1563923
ugcugaguuagucacgauu

SEQ ID NO: 1842376 - RNA, 19 nt, Artificial Sequence
  Description of Artificial Sequence: Synthetic oligonucleotide
  Antisense strand to SEQ ID NO: 1842375
aaucgugacuaacucagca

SEQ ID NO: 1842377 - RNA, 19 nt, Artificial Sequence
  Description of Artificial Sequence: Synthetic oligonucleotide
  Sense strand starting at position 708 of SEQ ID NO: 1563923
cgacacucuccugaucacu

SEQ ID NO: 1842378 - RNA, 19 nt, Artificial Sequence
  Description of Artificial Sequence: Synthetic oligonucleotide
  Antisense strand to SEQ ID NO: 1842377
agugaucaggagagugucg

SEQ ID NO: 1842379 - RNA, 19 nt, Artificial Sequence
  Description of Artificial Sequence: Synthetic oligonucleotide
  Sense strand starting at position 809 of SEQ ID NO: 1563923
uacccuuacccggguuaaa

SEQ ID NO: 1842380 - RNA, 19 nt, Artificial Sequence
  Description of Artificial Sequence: Synthetic oligonucleotide
  Antisense strand to SEQ ID NO: 1842379
uuuaacccggguaagggua

SEQ ID NO: 1842381 - RNA, 19 nt, Artificial Sequence
  Description of Artificial Sequence: Synthetic oligonucleotide
  Sense strand starting at position 1022 of SEQ ID NO: 1563923
ugaggaucuucugcagcau

SEQ ID NO: 1842382 - RNA, 19 nt, Artificial Sequence
  Description of Artificial Sequence: Synthetic oligonucleotide
  Antisense strand to SEQ ID NO: 1842381
augcugcagaagauccuca

SEQ ID NO: 1842383 - RNA, 19 nt, Artificial Sequence
  Description of Artificial Sequence: Synthetic oligonucleotide
  Sense strand starting at position 1166 of SEQ ID NO: 1563923
agggcaaguacuugacgaa

SEQ ID NO: 1842384 - RNA, 19 nt, Artificial Sequence
  Description of Artificial Sequence: Synthetic oligonucleotide
  Antisense strand to SEQ ID NO: 1842383
uucgucaaguacuugcccu

SEQ ID NO: 1842385 - RNA, 19 nt, Artificial Sequence
  Description of Artificial Sequence: Synthetic oligonucleotide
  Sense strand starting at position 1918 of SEQ ID NO: 1563923
guuugcuucgcgcucauaa

SEQ ID NO: 1842386 - RNA, 19 nt, Artificial Sequence
  Description of Artificial Sequence: Synthetic oligonucleotide
  Antisense strand to SEQ ID NO: 1842385
uuaugagcgcgaagcaaac

SEQ ID NO: 1842387 - RNA, 19 nt, Artificial Sequence
  Description of Artificial Sequence: Synthetic oligonucleotide
  Sense strand starting at position 2414 of SEQ ID NO: 1563923
caguuugugugacuuauau

SEQ ID NO: 1842388 - RNA, 19 nt, Artificial Sequence
  Description of Artificial Sequence: Synthetic oligonucleotide
  Antisense strand to SEQ ID NO: 1842387
auauaagucacacaaacug

SEQ ID NO: 1842389 - RNA, 19 nt, Artificial Sequence
  Description of Artificial Sequence: Synthetic oligonucleotide
  Sense strand starting at position 2500 of SEQ ID NO: 1563923
augggaacucgguggaaau

SEQ ID NO: 1842390 - RNA, 19 nt, Artificial Sequence
  Description of Artificial Sequence: Synthetic oligonucleotide
  Antisense strand to SEQ ID NO: 1842389
auuuccaccgaguucccau

SEQ ID NO: 1842391 - RNA, 19 nt, Artificial Sequence
  Description of Artificial Sequence: Synthetic oligonucleotide
  Sense strand starting at position 2630 of SEQ ID NO: 1563923
aucauaagcgcucaguuua

SEQ ID NO: 1842392 - RNA, 19 nt, Artificial Sequence
  Description of Artificial Sequence: Synthetic oligonucleotide
  Antisense strand to SEQ ID NO: 1842391
uaaacugagcgcuuaugau

SEQ ID NO: 1842393 - RNA, 19 nt, Artificial Sequence
  Description of Artificial Sequence: Synthetic oligonucleotide
  Sense strand starting at position 2644 of SEQ ID NO: 1563923
guuuaaugccaucaguauu

SEQ ID NO: 1842394 - RNA, 19 nt, Artificial Sequence
  Description of Artificial Sequence: Synthetic oligonucleotide
  Antisense strand to SEQ ID NO: 1842393
aauacugauggcauuaaac

SEQ ID NO: 1842395 - RNA, 19 nt, Artificial Sequence
  Description of Artificial Sequence: Synthetic oligonucleotide
  Sense strand starting at position 2672 of SEQ ID NO: 1563923
ccacuauguccuggaugcu

SEQ ID NO: 1842396 - RNA, 19 nt, Artificial Sequence
  Description of Artificial Sequence: Synthetic oligonucleotide
  Antisense strand to SEQ ID NO: 1842395
agcauccaggacauagugg

SEQ ID NO: 1842397 - RNA, 19 nt, Artificial Sequence
  Description of Artificial Sequence: Synthetic oligonucleotide
  Sense strand starting at position 2681 of SEQ ID NO: 1563923
ccuggaugcuguguuaaga

SEQ ID NO: 1842398 - RNA, 19 nt, Artificial Sequence
  Description of Artificial Sequence: Synthetic oligonucleotide
  Antisense strand to SEQ ID NO: 1842397
ucuuaacacagcauccagg

SEQ ID NO: 1842399 - RNA, 19 nt, Artificial Sequence
  Description of Artificial Sequence: Synthetic oligonucleotide
  Sense strand starting at position 2762 of SEQ ID NO: 1563923
gggauaauauuguuacagu

SEQ ID NO: 1842400 - RNA, 19 nt, Artificial Sequence
  Description of Artificial Sequence: Synthetic oligonucleotide
  Antisense strand to SEQ ID NO: 1842399
acuguaacaauauuauccc

SEQ ID NO: 1842401 - RNA, 19 nt, Artificial Sequence
  Description of Artificial Sequence: Synthetic oligonucleotide
  Sense strand starting at position 2848 of SEQ ID NO: 1563923
ggguuuguuauauaaguga

SEQ ID NO: 1842402 - RNA, 19 nt, Artificial Sequence
  Description of Artificial Sequence: Synthetic oligonucleotide
  Antisense strand to SEQ ID NO: 1842401
ucacuuauauaacaaaccc

SEQ ID NO: 1842403 - RNA, 19 nt, Artificial Sequence
  Description of Artificial Sequence: Synthetic oligonucleotide
  Sense strand starting at position 2911 of SEQ ID NO: 1563923
agguaauaguauccaauag

SEQ ID NO: 1842404 - RNA, 19 nt, Artificial Sequence
  Description of Artificial Sequence: Synthetic oligonucleotide
  Antisense strand to SEQ ID NO: 1842403
cuauuggauacuauuaccu

SEQ ID NO: 1842405 - RNA, 19 nt, Artificial Sequence
  Description of Artificial Sequence: Synthetic oligonucleotide
  Sense strand starting at position 3013 of SEQ ID NO: 1563923
gugaucucuuuauuuagcu

SEQ ID NO: 1842406 - RNA, 19 nt, Artificial Sequence
  Description of Artificial Sequence: Synthetic oligonucleotide
  Antisense strand to SEQ ID NO: 1842405
agcuaaauaaagagaucac

SEQ ID NO: 1842407 - RNA, 19 nt, Artificial Sequence
  Description of Artificial Sequence: Synthetic oligonucleotide
  Sense strand starting at position 3079 of SEQ ID NO: 1563923
uuacuuugcuaagcaugau

SEQ ID NO: 1842408 - RNA, 19 nt, Artificial Sequence
  Description of Artificial Sequence: Synthetic oligonucleotide
  Antisense strand to SEQ ID NO: 1842407
aucaugcuuagcaaaguaa

SEQ ID NO: 1842409 - RNA, 19 nt, Artificial Sequence
  Description of Artificial Sequence: Synthetic oligonucleotide
  Sense strand starting at position 3153 of SEQ ID NO: 1563923
aaaguauuccauugguaag

SEQ ID NO: 1842410 - RNA, 19 nt, Artificial Sequence
  Description of Artificial Sequence: Synthetic oligonucleotide
  Antisense strand to SEQ ID NO: 1842409
cuuaccaauggaauacuuu

SEQ ID NO: 1842411 - RNA, 19 nt, Artificial Sequence
  Description of Artificial Sequence: Synthetic oligonucleotide
  Sense strand starting at position 3160 of SEQ ID NO: 1563923
uccauugguaaguguguaa

SEQ ID NO: 1842412 - RNA, 19 nt, Artificial Sequence
  Description of Artificial Sequence: Synthetic oligonucleotide
  Antisense strand to SEQ ID NO: 1842411
uuacacacuuaccaaugga

SEQ ID NO: 1842413 - RNA, 19 nt, Artificial Sequence
  Description of Artificial Sequence: Synthetic oligonucleotide
  Sense strand starting at position 3163 of SEQ ID NO: 1563923
auugguaaguguguaauua

SEQ ID NO: 1842414 - RNA, 19 nt, Artificial Sequence
  Description of Artificial Sequence: Synthetic oligonucleotide
  Antisense strand to SEQ ID NO: 1842413
uaauuacacacuuaccaau

SEQ ID NO: 1842415 - RNA, 19 nt, Artificial Sequence
  Description of Artificial Sequence: Synthetic oligonucleotide
  Sense strand starting at position 3164 of SEQ ID NO: 1563923
uugguaaguguguaauuag

SEQ ID NO: 1842416 - RNA, 19 nt, Artificial Sequence
  Description of Artificial Sequence: Synthetic oligonucleotide
  Antisense strand to SEQ ID NO: 1842415
cuaauuacacacuuaccaa

SEQ ID NO: 1842417 - RNA, 19 nt, Artificial Sequence
  Description of Artificial Sequence: Synthetic oligonucleotide
  Sense strand starting at position 3288 of SEQ ID NO: 1563923
gggaaggguguugguauau

SEQ ID NO: 1842418 - RNA, 19 nt, Artificial Sequence
  Description of Artificial Sequence: Synthetic oligonucleotide
  Antisense strand to SEQ ID NO: 1842417
auauaccaacacccuuccc

SEQ ID NO: 1842419 - RNA, 19 nt, Artificial Sequence
  Description of Artificial Sequence: Synthetic oligonucleotide
  Sense strand starting at position 3560 of SEQ ID NO: 1563923
cuggaauucucagcauaag

SEQ ID NO: 1842420 - RNA, 19 nt, Artificial Sequence
  Description of Artificial Sequence: Synthetic oligonucleotide
  Antisense strand to SEQ ID NO: 1842419
cuuaugcugagaauuccag

SEQ ID NO: 1842421 - RNA, 19 nt, Artificial Sequence
  Description of Artificial Sequence: Synthetic oligonucleotide
  Sense strand starting at position 3602 of SEQ ID NO: 1563923
uuugcuugcagcguuaaau

SEQ ID NO: 1842422 - RNA, 19 nt, Artificial Sequence
  Description of Artificial Sequence: Synthetic oligonucleotide
  Antisense strand to SEQ ID NO: 1842421
auuuaacgcugcaagcaaa

SEQ ID NO: 1842423 - RNA, 19 nt, Artificial Sequence
  Description of Artificial Sequence: Synthetic oligonucleotide
  Sense strand starting at position 3603 of SEQ ID NO: 1563923
uugcuugcagcguuaaauu

SEQ ID NO: 1842424 - RNA, 19 nt, Artificial Sequence
  Description of Artificial Sequence: Synthetic oligonucleotide
  Antisense strand to SEQ ID NO: 1842423
aauuuaacgcugcaagcaa

SEQ ID NO: 1842425 - RNA, 19 nt, Artificial Sequence
  Description of Artificial Sequence: Synthetic oligonucleotide
  Sense strand starting at position 3644 of SEQ ID NO: 1563923
uaaauagcacagugguuaa

SEQ ID NO: 1842426 - RNA, 19 nt, Artificial Sequence
  Description of Artificial Sequence: Synthetic oligonucleotide
  Antisense strand to SEQ ID NO: 1842425
uuaaccacugugcuauuua

SEQ ID NO: 1842427 - RNA, 19 nt, Artificial Sequence
  Description of Artificial Sequence: Synthetic oligonucleotide
  Sense strand starting at position 3655 of SEQ ID NO: 1563923
gugguuaaaucccuggaac

SEQ ID NO: 1842428 - RNA, 19 nt, Artificial Sequence
  Description of Artificial Sequence: Synthetic oligonucleotide
  Antisense strand to SEQ ID NO: 1842427
guuccagggauuuaaccac

SEQ ID NO: 1842429 - RNA, 19 nt, Artificial Sequence
  Description of Artificial Sequence: Synthetic oligonucleotide
  Sense strand starting at position 3656 of SEQ ID NO: 1563923
ugguuaaaucccuggaacu

SEQ ID NO: 1842430 - RNA, 19 nt, Artificial Sequence
  Description of Artificial Sequence: Synthetic oligonucleotide
  Antisense strand to SEQ ID NO: 1842429
aguuccagggauuuaacca

SEQ ID NO: 1842431 - RNA, 19 nt, Artificial Sequence
  Description of Artificial Sequence: Synthetic oligonucleotide
  Sense strand starting at position 3657 of SEQ ID NO: 1563923
gguuaaaucccuggaacua

SEQ ID NO: 1842432 - RNA, 19 nt, Artificial Sequence
  Description of Artificial Sequence: Synthetic oligonucleotide
  Antisense strand to SEQ ID NO: 1842431
uaguuccagggauuuaacc

SEQ ID NO: 1842433 - RNA, 19 nt, Artificial Sequence
  Description of Artificial Sequence: Synthetic oligonucleotide
  Sense strand starting at position 3720 of SEQ ID NO: 1563923
gcaucauaaccuugggcaa

SEQ ID NO: 1842434 - RNA, 19 nt, Artificial Sequence
  Description of Artificial Sequence: Synthetic oligonucleotide
  Antisense strand to SEQ ID NO: 1842433
uugcccaagguuaugaugc

SEQ ID NO: 1842435 - RNA, 19 nt, Artificial Sequence
  Description of Artificial Sequence: Synthetic oligonucleotide
  Sense strand starting at position 3727 of SEQ ID NO: 1563923
aaccuugggcaauguguua

SEQ ID NO: 1842436 - RNA, 19 nt, Artificial Sequence
  Description of Artificial Sequence: Synthetic oligonucleotide
  Antisense strand to SEQ ID NO: 1842435
uaacacauugcccaagguu

SEQ ID NO: 1842437 - RNA, 19 nt, Artificial Sequence
  Description of Artificial Sequence: Synthetic oligonucleotide
  Sense strand starting at position 3775 of SEQ ID NO: 1563923
aauguaguggcuuaaguca

SEQ ID NO: 1842438 - RNA, 19 nt, Artificial Sequence
  Description of Artificial Sequence: Synthetic oligonucleotide
  Antisense strand to SEQ ID NO: 1842437
ugacuuaagccacuacauu

SEQ ID NO: 1842439 - RNA, 19 nt, Artificial Sequence
  Description of Artificial Sequence: Synthetic oligonucleotide
  Sense strand starting at position 3783 of SEQ ID NO: 1563923
ggcuuaagucaacacaaac

SEQ ID NO: 1842440 - RNA, 19 nt, Artificial Sequence
  Description of Artificial Sequence: Synthetic oligonucleotide
  Antisense strand to SEQ ID NO: 1842439
guuuguguugacuuaagcc

SEQ ID NO: 1842441 - RNA, 19 nt, Artificial Sequence
  Description of Artificial Sequence: Synthetic oligonucleotide
  Sense strand starting at position 3818 of SEQ ID NO: 1563923
guuauaauucuggaagcca

SEQ ID NO: 1842442 - RNA, 19 nt, Artificial Sequence
  Description of Artificial Sequence: Synthetic oligonucleotide
  Antisense strand to SEQ ID NO: 1842441
uggcuuccagaauuauaac

SEQ ID NO: 1842443 - RNA, 19 nt, Artificial Sequence
  Description of Artificial Sequence: Synthetic oligonucleotide
  Sense strand starting at position 15 of SEQ ID NO: 1563924
uagucauauuuagaaggga

SEQ ID NO: 1842444 - RNA, 19 nt, Artificial Sequence
  Description of Artificial Sequence: Synthetic oligonucleotide
  Antisense strand to SEQ ID NO: 1842443
ucccuucuaaauaugacua

SEQ ID NO: 1842445 - RNA, 19 nt, Artificial Sequence
  Description of Artificial Sequence: Synthetic oligonucleotide
  Sense strand starting at position 104 of SEQ ID NO: 1563924
ucccaaucauaggcagaga

SEQ ID NO: 1842446 - RNA, 19 nt, Artificial Sequence
  Description of Artificial Sequence: Synthetic oligonucleotide
  Antisense strand to SEQ ID NO: 1842445
ucucugccuaugauuggga

SEQ ID NO: 1842447 - RNA, 19 nt, Artificial Sequence
  Description of Artificial Sequence: Synthetic oligonucleotide
  Sense strand starting at position 174 of SEQ ID NO: 1563924
gugcaaaucuagucugaau

SEQ ID NO: 1842448 - RNA, 19 nt, Artificial Sequence
  Description of Artificial Sequence: Synthetic oligonucleotide
  Antisense strand to SEQ ID NO: 1842447
auucagacuagauuugcac

SEQ ID NO: 1842449 - RNA, 19 nt, Artificial Sequence
  Description of Artificial Sequence: Synthetic oligonucleotide
  Sense strand starting at position 176 of SEQ ID NO: 1563924
gcaaaucuagucugaauau

SEQ ID NO: 1842450 - RNA, 19 nt, Artificial Sequence
  Description of Artificial Sequence: Synthetic oligonucleotide
  Antisense strand to SEQ ID NO: 1842449
auauucagacuagauuugc

SEQ ID NO: 1842451 - RNA, 19 nt, Artificial Sequence
  Description of Artificial Sequence: Synthetic oligonucleotide
  Sense strand starting at position 192 of SEQ ID NO: 1563924
uaugaaaguucugcuuaga

SEQ ID NO: 1842452 - RNA, 19 nt, Artificial Sequence
  Description of Artificial Sequence: Synthetic oligonucleotide
  Antisense strand to SEQ ID NO: 1842451
ucuaagcagaacuuucaua

SEQ ID NO: 1842453 - RNA, 19 nt, Artificial Sequence
  Description of Artificial Sequence: Synthetic oligonucleotide
  Sense strand starting at position 270 of SEQ ID NO: 1563924
gaagaaauucugggugcau

SEQ ID NO: 1842454 - RNA, 19 nt, Artificial Sequence
  Description of Artificial Sequence: Synthetic oligonucleotide
  Antisense strand to SEQ ID NO: 1842453
augcacccagaauuucuuc

SEQ ID NO: 1842455 - RNA, 19 nt, Artificial Sequence
  Description of Artificial Sequence: Synthetic oligonucleotide
  Sense strand starting at position 271 of SEQ ID NO: 1563924
aagaaauucugggugcaug

SEQ ID NO: 1842456 - RNA, 19 nt, Artificial Sequence
  Description of Artificial Sequence: Synthetic oligonucleotide
  Antisense strand to SEQ ID NO: 1842455
caugcacccagaauuucuu

SEQ ID NO: 1842457 - RNA, 19 nt, Artificial Sequence
  Description of Artificial Sequence: Synthetic oligonucleotide
  Sense strand starting at position 283 of SEQ ID NO: 1563924
gugcaugcagaaugagaaa

SEQ ID NO: 1842458 - RNA, 19 nt, Artificial Sequence
  Description of Artificial Sequence: Synthetic oligonucleotide
  Antisense strand to SEQ ID NO: 1842457
uuucucauucugcaugcac

SEQ ID NO: 1842459 - RNA, 19 nt, Artificial Sequence
  Description of Artificial Sequence: Synthetic oligonucleotide
  Sense strand starting at position 482 of SEQ ID NO: 1563924
uagggaaggcuuugggaau

SEQ ID NO: 1842460 - RNA, 19 nt, Artificial Sequence
  Description of Artificial Sequence: Synthetic oligonucleotide
  Antisense strand to SEQ ID NO: 1842459
auucccaaagccuucccua

SEQ ID NO: 1842461 - RNA, 19 nt, Artificial Sequence
  Description of Artificial Sequence: Synthetic oligonucleotide
  Sense strand starting at position 578 of SEQ ID NO: 1563924
gucaaucgacuuugaauag

SEQ ID NO: 1842462 - RNA, 19 nt, Artificial Sequence
  Description of Artificial Sequence: Synthetic oligonucleotide
  Antisense strand to SEQ ID NO: 1842461
cuauucaaagucgauugac

SEQ ID NO: 1842463 - RNA, 19 nt, Artificial Sequence
  Description of Artificial Sequence: Synthetic oligonucleotide
  Sense strand starting at position 596 of SEQ ID NO: 1563924
guccuauaaccuuaagguu

SEQ ID NO: 1842464 - RNA, 19 nt, Artificial Sequence
  Description of Artificial Sequence: Synthetic oligonucleotide
  Antisense strand to SEQ ID NO: 1842463
aaccuuaagguuauaggac

SEQ ID NO: 1842465 - RNA, 19 nt, Artificial Sequence
  Description of Artificial Sequence: Synthetic oligonucleotide
  Sense strand starting at position 698 of SEQ ID NO: 1563924
uucccuuucggagaaucca

SEQ ID NO: 1842466 - RNA, 19 nt, Artificial Sequence
  Description of Artificial Sequence: Synthetic oligonucleotide
  Antisense strand to SEQ ID NO: 1842465
uggauucuccgaaagggaa

SEQ ID NO: 1842467 - RNA, 19 nt, Artificial Sequence
  Description of Artificial Sequence: Synthetic oligonucleotide
  Sense strand starting at position 860 of SEQ ID NO: 1563924
uaauuacgacggcgauaau

SEQ ID NO: 1842468 - RNA, 19 nt, Artificial Sequence
  Description of Artificial Sequence: Synthetic oligonucleotide
  Antisense strand to SEQ ID NO: 1842467
auuaucgccgucguaauua

SEQ ID NO: 1842469 - RNA, 19 nt, Artificial Sequence
  Description of Artificial Sequence: Synthetic oligonucleotide
  Sense strand starting at position 861 of SEQ ID NO: 1563924
aauuacgacggcgauaaua

SEQ ID NO: 1842470 - RNA, 19 nt, Artificial Sequence
  Description of Artificial Sequence: Synthetic oligonucleotide
  Antisense strand to SEQ ID NO: 1842469
uauuaucgccgucguaauu

SEQ ID NO: 1842471 - RNA, 19 nt, Artificial Sequence
  Description of Artificial Sequence: Synthetic oligonucleotide
  Sense strand starting at position 871 of SEQ ID NO: 1563924
gcgauaauagcuuaccaau

SEQ ID NO: 1842472 - RNA, 19 nt, Artificial Sequence
  Description of Artificial Sequence: Synthetic oligonucleotide
  Antisense strand to SEQ ID NO: 1842471
auugguaagcuauuaucgc

SEQ ID NO: 1842473 - RNA, 19 nt, Artificial Sequence
  Description of Artificial Sequence: Synthetic oligonucleotide
  Sense strand starting at position 960 of SEQ ID NO: 1563924
agcuaaaucugguugggua

SEQ ID NO: 1842474 - RNA, 19 nt, Artificial Sequence
  Description of Artificial Sequence: Synthetic oligonucleotide
  Antisense strand to SEQ ID NO: 1842473
uacccaaccagauuuagcu

SEQ ID NO: 1842475 - RNA, 19 nt, Artificial Sequence
  Description of Artificial Sequence: Synthetic oligonucleotide
  Sense strand starting at position 961 of SEQ ID NO: 1563924
gcuaaaucugguuggguaa

SEQ ID NO: 1842476 - RNA, 19 nt, Artificial Sequence
  Description of Artificial Sequence: Synthetic oligonucleotide
  Antisense strand to SEQ ID NO: 1842475
uuacccaaccagauuuagc

SEQ ID NO: 1842477 - RNA, 19 nt, Artificial Sequence
  Description of Artificial Sequence: Synthetic oligonucleotide
  Sense strand starting at position 1075 of SEQ ID NO: 1563924
ggaacauugcccuggcaag

SEQ ID NO: 1842478 - RNA, 19 nt, Artificial Sequence
  Description of Artificial Sequence: Synthetic oligonucleotide
  Antisense strand to SEQ ID NO: 1842477
cuugccagggcaauguucc

SEQ ID NO: 1842479 - RNA, 19 nt, Artificial Sequence
  Description of Artificial Sequence: Synthetic oligonucleotide
  Sense strand starting at position 1076 of SEQ ID NO: 1563924
gaacauugcccuggcaaga

SEQ ID NO: 1842480 - RNA, 19 nt, Artificial Sequence
  Description of Artificial Sequence: Synthetic oligonucleotide
  Antisense strand to SEQ ID NO: 1842479
ucuugccagggcaauguuc

SEQ ID NO: 1842481 - RNA, 19 nt, Artificial Sequence
  Description of Artificial Sequence: Synthetic oligonucleotide
  Sense strand starting at position 1254 of SEQ ID NO: 1563924
gaguacucucaggaagcca

SEQ ID NO: 1842482 - RNA, 19 nt, Artificial Sequence
  Description of Artificial Sequence: Synthetic oligonucleotide
  Antisense strand to SEQ ID NO: 1842481
uggcuuccugagaguacuc

SEQ ID NO: 1842483 - RNA, 19 nt, Artificial Sequence
  Description of Artificial Sequence: Synthetic oligonucleotide
  Sense strand starting at position 2274 of SEQ ID NO: 1563924
gcgaguguuccacaggaaa

SEQ ID NO: 1842484 - RNA, 19 nt, Artificial Sequence
  Description of Artificial Sequence: Synthetic oligonucleotide
  Antisense strand to SEQ ID NO: 1842483
uuuccuguggaacacucgc

SEQ ID NO: 1842485 - RNA, 19 nt, Artificial Sequence
  Description of Artificial Sequence: Synthetic oligonucleotide
  Sense strand starting at position 2277 of SEQ ID NO: 1563924
aguguuccacaggaaacuu

SEQ ID NO: 1842486 - RNA, 19 nt, Artificial Sequence
  Description of Artificial Sequence: Synthetic oligonucleotide
  Antisense strand to SEQ ID NO: 1842485
aaguuuccuguggaacacu

SEQ ID NO: 1842487 - RNA, 19 nt, Artificial Sequence
  Description of Artificial Sequence: Synthetic oligonucleotide
  Sense strand starting at position 2461 of SEQ ID NO: 1563924
ucgcuccauuucuugcaaa

SEQ ID NO: 1842488 - RNA, 19 nt, Artificial Sequence
  Description of Artificial Sequence: Synthetic oligonucleotide
  Antisense strand to SEQ ID NO: 1842487
uuugcaagaaauggagcga

SEQ ID NO: 1842489 - RNA, 19 nt, Artificial Sequence
  Description of Artificial Sequence: Synthetic oligonucleotide
  Sense strand starting at position 2535 of SEQ ID NO: 1563924
gcgagcaccuauuugaaca

SEQ ID NO: 1842490 - RNA, 19 nt, Artificial Sequence
  Description of Artificial Sequence: Synthetic oligonucleotide
  Antisense strand to SEQ ID NO: 1842489
uguucaaauaggugcucgc

SEQ ID NO: 1842491 - RNA, 19 nt, Artificial Sequence
  Description of Artificial Sequence: Synthetic oligonucleotide
  Sense strand starting at position 2753 of SEQ ID NO: 1563924
aagacugacucgucuccaa

SEQ ID NO: 1842492 - RNA, 19 nt, Artificial Sequence
  Description of Artificial Sequence: Synthetic oligonucleotide
  Antisense strand to SEQ ID NO: 1842491
uuggagacgagucagucuu

SEQ ID NO: 1842493 - RNA, 19 nt, Artificial Sequence
  Description of Artificial Sequence: Synthetic oligonucleotide
  Sense strand starting at position 2950 of SEQ ID NO: 1563924
gggacugacauauggcuua

SEQ ID NO: 1842494 - RNA, 19 nt, Artificial Sequence
  Description of Artificial Sequence: Synthetic oligonucleotide
  Antisense strand to SEQ ID NO: 1842493
uaagccauaugucaguccc

SEQ ID NO: 1842495 - RNA, 19 nt, Artificial Sequence
  Description of Artificial Sequence: Synthetic oligonucleotide
  Sense strand starting at position 3031 of SEQ ID NO: 1563924
ggagucggugcauaaacua

SEQ ID NO: 1842496 - RNA, 19 nt, Artificial Sequence
  Description of Artificial Sequence: Synthetic oligonucleotide
  Antisense strand to SEQ ID NO: 1842495
uaguuuaugcaccgacucc

SEQ ID NO: 1842497 - RNA, 19 nt, Artificial Sequence
  Description of Artificial Sequence: Synthetic oligonucleotide
  Sense strand starting at position 3076 of SEQ ID NO: 1563924
gagagcacuuuaguaaaug

SEQ ID NO: 1842498 - RNA, 19 nt, Artificial Sequence
  Description of Artificial Sequence: Synthetic oligonucleotide
  Antisense strand to SEQ ID NO: 1842497
cauuuacuaaagugcucuc

SEQ ID NO: 1842499 - RNA, 19 nt, Artificial Sequence
  Description of Artificial Sequence: Synthetic oligonucleotide
  Sense strand starting at position 3084 of SEQ ID NO: 1563924
uuuaguaaaugucccgaca

SEQ ID NO: 1842500 - RNA, 19 nt, Artificial Sequence
  Description of Artificial Sequence: Synthetic oligonucleotide
  Antisense strand to SEQ ID NO: 1842499
ugucgggacauuuacuaaa

SEQ ID NO: 1842501 - RNA, 19 nt, Artificial Sequence
  Description of Artificial Sequence: Synthetic oligonucleotide
  Sense strand starting at position 3087 of SEQ ID NO: 1563924
aguaaaugucccgacacug

SEQ ID NO: 1842502 - RNA, 19 nt, Artificial Sequence
  Description of Artificial Sequence: Synthetic oligonucleotide
  Antisense strand to SEQ ID NO: 1842501
cagugucgggacauuuacu

SEQ ID NO: 1842503 - RNA, 19 nt, Artificial Sequence
  Description of Artificial Sequence: Synthetic oligonucleotide
  Sense strand starting at position 3311 of SEQ ID NO: 1563924
cuuuacauauugguagauu

SEQ ID NO: 1842504 - RNA, 19 nt, Artificial Sequence
  Description of Artificial Sequence: Synthetic oligonucleotide
  Antisense strand to SEQ ID NO: 1842503
aaucuaccaauauguaaag

SEQ ID NO: 1842505 - RNA, 19 nt, Artificial Sequence
  Description of Artificial Sequence: Synthetic oligonucleotide
  Sense strand starting at position 3355 of SEQ ID NO: 1563924
gccagaguuugaccucuuu

SEQ ID NO: 1842506 - RNA, 19 nt, Artificial Sequence
  Description of Artificial Sequence: Synthetic oligonucleotide
  Antisense strand to SEQ ID NO: 1842505
aaagaggucaaacucuggc

SEQ ID NO: 1842507 - RNA, 19 nt, Artificial Sequence
  Description of Artificial Sequence: Synthetic oligonucleotide
  Sense strand starting at position 3361 of SEQ ID NO: 1563924
guuugaccucuuuacauuc

SEQ ID NO: 1842508 - RNA, 19 nt, Artificial Sequence
  Description of Artificial Sequence: Synthetic oligonucleotide
  Antisense strand to SEQ ID NO: 1842507
gaauguaaagaggucaaac

SEQ ID NO: 1842509 - RNA, 19 nt, Artificial Sequence
  Description of Artificial Sequence: Synthetic oligonucleotide
  Sense strand starting at position 3436 of SEQ ID NO: 1563924
ggucucgcuaaauaaagaa

SEQ ID NO: 1842510 - RNA, 19 nt, Artificial Sequence
  Description of Artificial Sequence: Synthetic oligonucleotide
  Antisense strand to SEQ ID NO: 1842509
uucuuuauuuagcgagacc

SEQ ID NO: 1842511 - RNA, 19 nt, Artificial Sequence
  Description of Artificial Sequence: Synthetic oligonucleotide
  Sense strand starting at position 3647 of SEQ ID NO: 1563924
cuuuaagaauuccuggaug

SEQ ID NO: 1842512 - RNA, 19 nt, Artificial Sequence
  Description of Artificial Sequence: Synthetic oligonucleotide
  Antisense strand to SEQ ID NO: 1842511
cauccaggaauucuuaaag

SEQ ID NO: 1842513 - RNA, 19 nt, Artificial Sequence
  Description of Artificial Sequence: Synthetic oligonucleotide
  Sense strand starting at position 3655 of SEQ ID NO: 1563924
auuccuggaugaucaguaa

SEQ ID NO: 1842514 - RNA, 19 nt, Artificial Sequence
  Description of Artificial Sequence: Synthetic oligonucleotide
  Antisense strand to SEQ ID NO: 1842513
uuacugaucauccaggaau

SEQ ID NO: 1842515 - RNA, 19 nt, Artificial Sequence
  Description of Artificial Sequence: Synthetic oligonucleotide
  Sense strand starting at position 3689 of SEQ ID NO: 1563924
uccuaaaugugagucugaa

SEQ ID NO: 1842516 - RNA, 19 nt, Artificial Sequence
  Description of Artificial Sequence: Synthetic oligonucleotide
  Antisense strand to SEQ ID NO: 1842515
uucagacucacauuuagga

SEQ ID NO: 1842517 - RNA, 19 nt, Artificial Sequence
  Description of Artificial Sequence: Synthetic oligonucleotide
  Sense strand starting at position 3831 of SEQ ID NO: 1563924
ugaagagaaucuuugcuaa

SEQ ID NO: 1842518 - RNA, 19 nt, Artificial Sequence
  Description of Artificial Sequence: Synthetic oligonucleotide
  Antisense strand to SEQ ID NO: 1842517
uuagcaaagauucucuuca

SEQ ID NO: 1842519 - RNA, 19 nt, Artificial Sequence
  Description of Artificial Sequence: Synthetic oligonucleotide
  Sense strand starting at position 3834 of SEQ ID NO: 1563924
agagaaucuuugcuaaagg

SEQ ID NO: 1842520 - RNA, 19 nt, Artificial Sequence
  Description of Artificial Sequence: Synthetic oligonucleotide
  Antisense strand to SEQ ID NO: 1842519
ccuuuagcaaagauucucu

SEQ ID NO: 1842521 - RNA, 19 nt, Artificial Sequence
  Description of Artificial Sequence: Synthetic oligonucleotide
  Sense strand starting at position 3852 of SEQ ID NO: 1563924
ggaagagcuguucauaagu

SEQ ID NO: 1842522 - RNA, 19 nt, Artificial Sequence
  Description of Artificial Sequence: Synthetic oligonucleotide
  Antisense strand to SEQ ID NO: 1842521
acuuaugaacagcucuucc

SEQ ID NO: 1842523 - RNA, 19 nt, Artificial Sequence
  Description of Artificial Sequence: Synthetic oligonucleotide
  Sense strand starting at position 81 of SEQ ID NO: 1563925
cuguaauacugccugaaga

SEQ ID NO: 1842524 - RNA, 19 nt, Artificial Sequence
  Description of Artificial Sequence: Synthetic oligonucleotide
  Antisense strand to SEQ ID NO: 1842523
ucuucaggcaguauuacag

SEQ ID NO: 1842525 - RNA, 19 nt, Artificial Sequence
  Description of Artificial Sequence: Synthetic oligonucleotide
  Sense strand starting at position 82 of SEQ ID NO: 1563925
uguaauacugccugaagac

SEQ ID NO: 1842526 - RNA, 19 nt, Artificial Sequence
  Description of Artificial Sequence: Synthetic oligonucleotide
  Antisense strand to SEQ ID NO: 1842525
gucuucaggcaguauuaca

SEQ ID NO: 1842527 - RNA, 19 nt, Artificial Sequence
  Description of Artificial Sequence: Synthetic oligonucleotide
  Sense strand starting at position 429 of SEQ ID NO: 1563925
gguuuaagagcagggagau

SEQ ID NO: 1842528 - RNA, 19 nt, Artificial Sequence
  Description of Artificial Sequence: Synthetic oligonucleotide
  Antisense strand to SEQ ID NO: 1842527
aucucccugcucuuaaacc

SEQ ID NO: 1842529 - RNA, 19 nt, Artificial Sequence
  Description of Artificial Sequence: Synthetic oligonucleotide
  Sense strand starting at position 471 of SEQ ID NO: 1563925
cgaagauuaaccugguaga

SEQ ID NO: 1842530 - RNA, 19 nt, Artificial Sequence
  Description of Artificial Sequence: Synthetic oligonucleotide
  Antisense strand to SEQ ID NO: 1842529
ucuaccagguuaaucuucg

SEQ ID NO: 1842531 - RNA, 19 nt, Artificial Sequence
  Description of Artificial Sequence: Synthetic oligonucleotide
  Sense strand starting at position 504 of SEQ ID NO: 1563925
cuaggugagagcugggaaa

SEQ ID NO: 1842532 - RNA, 19 nt, Artificial Sequence
  Description of Artificial Sequence: Synthetic oligonucleotide
  Antisense strand to SEQ ID NO: 1842531
uuucccagcucucaccuag

SEQ ID NO: 1842533 - RNA, 19 nt, Artificial Sequence
  Description of Artificial Sequence: Synthetic oligonucleotide
  Sense strand starting at position 533 of SEQ ID NO: 1563925
acucaucaguugucuaaua

SEQ ID NO: 1842534 - RNA, 19 nt, Artificial Sequence
  Description of Artificial Sequence: Synthetic oligonucleotide
  Antisense strand to SEQ ID NO: 1842533
uauuagacaacugaugagu

SEQ ID NO: 1842535 - RNA, 19 nt, Artificial Sequence
  Description of Artificial Sequence: Synthetic oligonucleotide
  Sense strand starting at position 534 of SEQ ID NO: 1563925
cucaucaguugucuaauau

SEQ ID NO: 1842536 - RNA, 19 nt, Artificial Sequence
  Description of Artificial Sequence: Synthetic oligonucleotide
  Antisense strand to SEQ ID NO: 1842535
auauuagacaacugaugag

SEQ ID NO: 1842537 - RNA, 19 nt, Artificial Sequence
  Description of Artificial Sequence: Synthetic oligonucleotide
  Sense strand starting at position 535 of SEQ ID NO: 1563925
ucaucaguugucuaauaug

SEQ ID NO: 1842538 - RNA, 19 nt, Artificial Sequence
  Description of Artificial Sequence: Synthetic oligonucleotide
  Antisense strand to SEQ ID NO: 1842537
cauauuagacaacugauga

SEQ ID NO: 1842539 - RNA, 19 nt, Artificial Sequence
  Description of Artificial Sequence: Synthetic oligonucleotide
  Sense strand starting at position 886 of SEQ ID NO: 1563925
agaagaguuguggagcgau

SEQ ID NO: 1842540 - RNA, 19 nt, Artificial Sequence
  Description of Artificial Sequence: Synthetic oligonucleotide
  Antisense strand to SEQ ID NO: 1842539
aucgcuccacaacucuucu

SEQ ID NO: 1842541 - RNA, 19 nt, Artificial Sequence
  Description of Artificial Sequence: Synthetic oligonucleotide
  Sense strand starting at position 1070 of SEQ ID NO: 1563925
ccuuucucugucugagaaa

SEQ ID NO: 1842542 - RNA, 19 nt, Artificial Sequence
  Description of Artificial Sequence: Synthetic oligonucleotide
  Antisense strand to SEQ ID NO: 1842541
uuucucagacagagaaagg

SEQ ID NO: 1842543 - RNA, 19 nt, Artificial Sequence
  Description of Artificial Sequence: Synthetic oligonucleotide
  Sense strand starting at position 1103 of SEQ ID NO: 1563925
ucugucucccuagauuacu

SEQ ID NO: 1842544 - RNA, 19 nt, Artificial Sequence
  Description of Artificial Sequence: Synthetic oligonucleotide
  Antisense strand to SEQ ID NO: 1842543
aguaaucuagggagacaga

SEQ ID NO: 1842545 - RNA, 19 nt, Artificial Sequence
  Description of Artificial Sequence: Synthetic oligonucleotide
  Sense strand starting at position 1211 of SEQ ID NO: 1563925
aggucuaugucaguccaca

SEQ ID NO: 1842546 - RNA, 19 nt, Artificial Sequence
  Description of Artificial Sequence: Synthetic oligonucleotide
  Antisense strand to SEQ ID NO: 1842545
uguggacugacauagaccu

SEQ ID NO: 1842547 - RNA, 19 nt, Artificial Sequence
  Description of Artificial Sequence: Synthetic oligonucleotide
  Sense strand starting at position 1482 of SEQ ID NO: 1563925
aagugauccucucuuggaa

SEQ ID NO: 1842548 - RNA, 19 nt, Artificial Sequence
  Description of Artificial Sequence: Synthetic oligonucleotide
  Antisense strand to SEQ ID NO: 1842547
uuccaagagaggaucacuu

SEQ ID NO: 1842549 - RNA, 19 nt, Artificial Sequence
  Description of Artificial Sequence: Synthetic oligonucleotide
  Sense strand starting at position 1511 of SEQ ID NO: 1563925
ggccuauacaucuggguca

SEQ ID NO: 1842550 - RNA, 19 nt, Artificial Sequence
  Description of Artificial Sequence: Synthetic oligonucleotide
  Antisense strand to SEQ ID NO: 1842549
ugacccagauguauaggcc

SEQ ID NO: 1842551 - RNA, 19 nt, Artificial Sequence
  Description of Artificial Sequence: Synthetic oligonucleotide
  Sense strand starting at position 1513 of SEQ ID NO: 1563925
ccuauacaucugggucagu

SEQ ID NO: 1842552 - RNA, 19 nt, Artificial Sequence
  Description of Artificial Sequence: Synthetic oligonucleotide
  Antisense strand to SEQ ID NO: 1842551
acugacccagauguauagg

SEQ ID NO: 1842553 - RNA, 19 nt, Artificial Sequence
  Description of Artificial Sequence: Synthetic oligonucleotide
  Sense strand starting at position 2025 of SEQ ID NO: 1563925
cggcgugaucuugcccaau

SEQ ID NO: 1842554 - RNA, 19 nt, Artificial Sequence
  Description of Artificial Sequence: Synthetic oligonucleotide
  Antisense strand to SEQ ID NO: 1842553
auugggcaagaucacgccg

SEQ ID NO: 1842555 - RNA, 19 nt, Artificial Sequence
  Description of Artificial Sequence: Synthetic oligonucleotide
  Sense strand starting at position 2028 of SEQ ID NO: 1563925
cgugaucuugcccaauaaa

SEQ ID NO: 1842556 - RNA, 19 nt, Artificial Sequence
  Description of Artificial Sequence: Synthetic oligonucleotide
  Antisense strand to SEQ ID NO: 1842555
uuuauugggcaagaucacg

SEQ ID NO: 1842557 - RNA, 19 nt, Artificial Sequence
  Description of Artificial Sequence: Synthetic oligonucleotide
  Sense strand starting at position 2381 of SEQ ID NO: 1563925
gcucuuucccgggagagua

SEQ ID NO: 1842558 - RNA, 19 nt, Artificial Sequence
  Description of Artificial Sequence: Synthetic oligonucleotide
  Antisense strand to SEQ ID NO: 1842557
uacucucccgggaaagagc

SEQ ID NO: 1842559 - RNA, 19 nt, Artificial Sequence
  Description of Artificial Sequence: Synthetic oligonucleotide
  Sense strand starting at position 2625 of SEQ ID NO: 1563925
agguguaucguguucuguu

SEQ ID NO: 1842560 - RNA, 19 nt, Artificial Sequence
  Description of Artificial Sequence: Synthetic oligonucleotide
  Antisense strand to SEQ ID NO: 1842559
aacagaacacgauacaccu

SEQ ID NO: 1842561 - RNA, 19 nt, Artificial Sequence
  Description of Artificial Sequence: Synthetic oligonucleotide
  Sense strand starting at position 2791 of SEQ ID NO: 1563925
cuagaaguaauugggaagu

SEQ ID NO: 1842562 - RNA, 19 nt, Artificial Sequence
  Description of Artificial Sequence: Synthetic oligonucleotide
  Antisense strand to SEQ ID NO: 1842561
acuucccaauuacuucuag

SEQ ID NO: 1842563 - RNA, 19 nt, Artificial Sequence
  Description of Artificial Sequence: Synthetic oligonucleotide
  Sense strand starting at position 2838 of SEQ ID NO: 1563925
gggagugggcaucguaaga

SEQ ID NO: 1842564 - RNA, 19 nt, Artificial Sequence
  Description of Artificial Sequence: Synthetic oligonucleotide
  Antisense strand to SEQ ID NO: 1842563
ucuuacgaugcccacuccc

SEQ ID NO: 1842565 - RNA, 19 nt, Artificial Sequence
  Description of Artificial Sequence: Synthetic oligonucleotide
  Sense strand starting at position 2884 of SEQ ID NO: 1563925
ucgggaagagcugauuauc

SEQ ID NO: 1842566 - RNA, 19 nt, Artificial Sequence
  Description of Artificial Sequence: Synthetic oligonucleotide
  Antisense strand to SEQ ID NO: 1842565
gauaaucagcucuucccga

SEQ ID NO: 1842567 - RNA, 19 nt, Artificial Sequence
  Description of Artificial Sequence: Synthetic oligonucleotide
  Sense strand starting at position 2890 of SEQ ID NO: 1563925
agagcugauuaucucuagu

SEQ ID NO: 1842568 - RNA, 19 nt, Artificial Sequence
  Description of Artificial Sequence: Synthetic oligonucleotide
  Antisense strand to SEQ ID NO: 1842567
acuagagauaaucagcucu

SEQ ID NO: 1842569 - RNA, 19 nt, Artificial Sequence
  Description of Artificial Sequence: Synthetic oligonucleotide
  Sense strand starting at position 2892 of SEQ ID NO: 1563925
agcugauuaucucuaguua

SEQ ID NO: 1842570 - RNA, 19 nt, Artificial Sequence
  Description of Artificial Sequence: Synthetic oligonucleotide
  Antisense strand to SEQ ID NO: 1842569
uaacuagagauaaucagcu

SEQ ID NO: 1842571 - RNA, 19 nt, Artificial Sequence
  Description of Artificial Sequence: Synthetic oligonucleotide
  Sense strand starting at position 2893 of SEQ ID NO: 1563925
gcugauuaucucuaguuau

SEQ ID NO: 1842572 - RNA, 19 nt, Artificial Sequence
  Description of Artificial Sequence: Synthetic oligonucleotide
  Antisense strand to SEQ ID NO: 1842571
auaacuagagauaaucagc

SEQ ID NO: 1842573 - RNA, 19 nt, Artificial Sequence
  Description of Artificial Sequence: Synthetic oligonucleotide
  Sense strand starting at position 2965 of SEQ ID NO: 1563925
guccuuacugaacaaguga

SEQ ID NO: 1842574 - RNA, 19 nt, Artificial Sequence
  Description of Artificial Sequence: Synthetic oligonucleotide
  Antisense strand to SEQ ID NO: 1842573
ucacuuguucaguaaggac

SEQ ID NO: 1842575 - RNA, 19 nt, Artificial Sequence
  Description of Artificial Sequence: Synthetic oligonucleotide
  Sense strand starting at position 2981 of SEQ ID NO: 1563925
ugaucucccugcuucuaga

SEQ ID NO: 1842576 - RNA, 19 nt, Artificial Sequence
  Description of Artificial Sequence: Synthetic oligonucleotide
  Antisense strand to SEQ ID NO: 1842575
ucuagaagcagggagauca

SEQ ID NO: 1842577 - RNA, 19 nt, Artificial Sequence
  Description of Artificial Sequence: Synthetic oligonucleotide
  Sense strand starting at position 3089 of SEQ ID NO: 1563925
agcuuuggaauugguuaua

SEQ ID NO: 1842578 - RNA, 19 nt, Artificial Sequence
  Description of Artificial Sequence: Synthetic oligonucleotide
  Antisense strand to SEQ ID NO: 1842577
uauaaccaauuccaaagcu

SEQ ID NO: 1842579 - RNA, 19 nt, Artificial Sequence
  Description of Artificial Sequence: Synthetic oligonucleotide
  Sense strand starting at position 3132 of SEQ ID NO: 1563925
ggugucuguaacuauguua

SEQ ID NO: 1842580 - RNA, 19 nt, Artificial Sequence
  Description of Artificial Sequence: Synthetic oligonucleotide
  Antisense strand to SEQ ID NO: 1842579
uaacauaguuacagacacc

SEQ ID NO: 1842581 - RNA, 19 nt, Artificial Sequence
  Description of Artificial Sequence: Synthetic oligonucleotide
  Sense strand starting at position 3152 of SEQ ID NO: 1563925
guaaauauggacuguauga

SEQ ID NO: 1842582 - RNA, 19 nt, Artificial Sequence
  Description of Artificial Sequence: Synthetic oligonucleotide
  Antisense strand to SEQ ID NO: 1842581
ucauacaguccauauuuac

SEQ ID NO: 1842583 - RNA, 19 nt, Artificial Sequence
  Description of Artificial Sequence: Synthetic oligonucleotide
  Sense strand starting at position 3179 of SEQ ID NO: 1563925
ugugcuuguguauugcaua

SEQ ID NO: 1842584 - RNA, 19 nt, Artificial Sequence
  Description of Artificial Sequence: Synthetic oligonucleotide
  Antisense strand to SEQ ID NO: 1842583
uaugcaauacacaagcaca

SEQ ID NO: 1842585 - RNA, 19 nt, Artificial Sequence
  Description of Artificial Sequence: Synthetic oligonucleotide
  Sense strand starting at position 3184 of SEQ ID NO: 1563925
uuguguauugcauaacaua

SEQ ID NO: 1842586 - RNA, 19 nt, Artificial Sequence
  Description of Artificial Sequence: Synthetic oligonucleotide
  Antisense strand to SEQ ID NO: 1842585
uauguuaugcaauacacaa

SEQ ID NO: 1842587 - RNA, 19 nt, Artificial Sequence
  Description of Artificial Sequence: Synthetic oligonucleotide
  Sense strand starting at position 3262 of SEQ ID NO: 1563925
agcccuaagccugagcuua

SEQ ID NO: 1842588 - RNA, 19 nt, Artificial Sequence
  Description of Artificial Sequence: Synthetic oligonucleotide
  Antisense strand to SEQ ID NO: 1842587
uaagcucaggcuuagggcu

SEQ ID NO: 1842589 - RNA, 19 nt, Artificial Sequence
  Description of Artificial Sequence: Synthetic oligonucleotide
  Sense strand starting at position 3375 of SEQ ID NO: 1563925
ugugcauuccugccguacu

SEQ ID NO: 1842590 - RNA, 19 nt, Artificial Sequence
  Description of Artificial Sequence: Synthetic oligonucleotide
  Antisense strand to SEQ ID NO: 1842589
aguacggcaggaaugcaca

SEQ ID NO: 1842591 - RNA, 19 nt, Artificial Sequence
  Description of Artificial Sequence: Synthetic oligonucleotide
  Sense strand starting at position 3508 of SEQ ID NO: 1563925
cuuuacuuacuuugaguau

SEQ ID NO: 1842592 - RNA, 19 nt, Artificial Sequence
  Description of Artificial Sequence: Synthetic oligonucleotide
  Antisense strand to SEQ ID NO: 1842591
auacucaaaguaaguaaag

SEQ ID NO: 1842593 - RNA, 19 nt, Artificial Sequence
  Description of Artificial Sequence: Synthetic oligonucleotide
  Sense strand starting at position 3601 of SEQ ID NO: 1563925
aucagaugcuggcuuaaug

SEQ ID NO: 1842594 - RNA, 19 nt, Artificial Sequence
  Description of Artificial Sequence: Synthetic oligonucleotide
  Antisense strand to SEQ ID NO: 1842593
cauuaagccagcaucugau

SEQ ID NO: 1842595 - RNA, 19 nt, Artificial Sequence
  Description of Artificial Sequence: Synthetic oligonucleotide
  Sense strand starting at position 3651 of SEQ ID NO: 1563925
uuuagaugugcuuauugag

SEQ ID NO: 1842596 - RNA, 19 nt, Artificial Sequence
  Description of Artificial Sequence: Synthetic oligonucleotide
  Antisense strand to SEQ ID NO: 1842595
cucaauaagcacaucuaaa

SEQ ID NO: 1842597 - RNA, 19 nt, Artificial Sequence
  Description of Artificial Sequence: Synthetic oligonucleotide
  Sense strand starting at position 3747 of SEQ ID NO: 1563925
aagugaaauugauaaggaa

SEQ ID NO: 1842598 - RNA, 19 nt, Artificial Sequence
  Description of Artificial Sequence: Synthetic oligonucleotide
  Antisense strand to SEQ ID NO: 1842597
uuccuuaucaauuucacuu

SEQ ID NO: 1842599 - RNA, 19 nt, Artificial Sequence
  Description of Artificial Sequence: Synthetic oligonucleotide
  Sense strand starting at position 3817 of SEQ ID NO: 1563925
augguaaguagcuaagaca

SEQ ID NO: 1842600 - RNA, 19 nt, Artificial Sequence
  Description of Artificial Sequence: Synthetic oligonucleotide
  Antisense strand to SEQ ID NO: 1842599
ugucuuagcuacuuaccau

SEQ ID NO: 1842601 - RNA, 19 nt, Artificial Sequence
  Description of Artificial Sequence: Synthetic oligonucleotide
  Sense strand starting at position 3894 of SEQ ID NO: 1563925
acagucaugugaccacaga

SEQ ID NO: 1842602 - RNA, 19 nt, Artificial Sequence
  Description of Artificial Sequence: Synthetic oligonucleotide
  Antisense strand to SEQ ID NO: 1842601
ucuguggucacaugacugu

SEQ ID NO: 1842603 - RNA, 19 nt, Artificial Sequence
  Description of Artificial Sequence: Synthetic oligonucleotide
  Sense strand starting at position 10 of SEQ ID NO: 1563926
gcgauuuaaagucagcagu

SEQ ID NO: 1842604 - RNA, 19 nt, Artificial Sequence
  Description of Artificial Sequence: Synthetic oligonucleotide
  Antisense strand to SEQ ID NO: 1842603
acugcugacuuuaaaucgc

SEQ ID NO: 1842605 - RNA, 19 nt, Artificial Sequence
  Description of Artificial Sequence: Synthetic oligonucleotide
  Sense strand starting at position 248 of SEQ ID NO: 1563926
gaacgcugugaaggagaaa

SEQ ID NO: 1842606 - RNA, 19 nt, Artificial Sequence
  Description of Artificial Sequence: Synthetic oligonucleotide
  Antisense strand to SEQ ID NO: 1842605
uuucuccuucacagcguuc

SEQ ID NO: 1842607 - RNA, 19 nt, Artificial Sequence
  Description of Artificial Sequence: Synthetic oligonucleotide
  Sense strand starting at position 379 of SEQ ID NO: 1563926
ccacgaauaugugugaaau

SEQ ID NO: 1842608 - RNA, 19 nt, Artificial Sequence
  Description of Artificial Sequence: Synthetic oligonucleotide
  Antisense strand to SEQ ID NO: 1842607
auuucacacauauucgugg

SEQ ID NO: 1842609 - RNA, 19 nt, Artificial Sequence
  Description of Artificial Sequence: Synthetic oligonucleotide
  Sense strand starting at position 380 of SEQ ID NO: 1563926
cacgaauaugugugaaaua

SEQ ID NO: 1842610 - RNA, 19 nt, Artificial Sequence
  Description of Artificial Sequence: Synthetic oligonucleotide
  Antisense strand to SEQ ID NO: 1842609
uauuucacacauauucgug

SEQ ID NO: 1842611 - RNA, 19 nt, Artificial Sequence
  Description of Artificial Sequence: Synthetic oligonucleotide
  Sense strand starting at position 527 of SEQ ID NO: 1563926
ggcauaggcuucuccgaaa

SEQ ID NO: 1842612 - RNA, 19 nt, Artificial Sequence
  Description of Artificial Sequence: Synthetic oligonucleotide
  Antisense strand to SEQ ID NO: 1842611
uuucggagaagccuaugcc

SEQ ID NO: 1842613 - RNA, 19 nt, Artificial Sequence
  Description of Artificial Sequence: Synthetic oligonucleotide
  Sense strand starting at position 630 of SEQ ID NO: 1563926
gcgugauucagagggucug

SEQ ID NO: 1842614 - RNA, 19 nt, Artificial Sequence
  Description of Artificial Sequence: Synthetic oligonucleotide
  Antisense strand to SEQ ID NO: 1842613
cagacccucugaaucacgc

SEQ ID NO: 1842615 - RNA, 19 nt, Artificial Sequence
  Description of Artificial Sequence: Synthetic oligonucleotide
  Sense strand starting at position 1592 of SEQ ID NO: 1563926
cccgcuucugcgaggugaa

SEQ ID NO: 1842616 - RNA, 19 nt, Artificial Sequence
  Description of Artificial Sequence: Synthetic oligonucleotide
  Antisense strand to SEQ ID NO: 1842615
uucaccucgcagaagcggg

SEQ ID NO: 1842617 - RNA, 19 nt, Artificial Sequence
  Description of Artificial Sequence: Synthetic oligonucleotide
  Sense strand starting at position 1815 of SEQ ID NO: 1563926
ugugacuuuggccaagacu

SEQ ID NO: 1842618 - RNA, 19 nt, Artificial Sequence
  Description of Artificial Sequence: Synthetic oligonucleotide
  Antisense strand to SEQ ID NO: 1842617
agucuuggccaaagucaca

SEQ ID NO: 1842619 - RNA, 19 nt, Artificial Sequence
  Description of Artificial Sequence: Synthetic oligonucleotide
  Sense strand starting at position 2036 of SEQ ID NO: 1563926
acgggauucuuggcacagu

SEQ ID NO: 1842620 - RNA, 19 nt, Artificial Sequence
  Description of Artificial Sequence: Synthetic oligonucleotide
  Antisense strand to SEQ ID NO: 1842619
acugugccaagaaucccgu

SEQ ID NO: 1842621 - RNA, 19 nt, Artificial Sequence
  Description of Artificial Sequence: Synthetic oligonucleotide
  Sense strand starting at position 2068 of SEQ ID NO: 1563926
ugcugagucacaugaugca

SEQ ID NO: 1842622 - RNA, 19 nt, Artificial Sequence
  Description of Artificial Sequence: Synthetic oligonucleotide
  Antisense strand to SEQ ID NO: 1842621
ugcaucaugugacucagca

SEQ ID NO: 1842623 - RNA, 19 nt, Artificial Sequence
  Description of Artificial Sequence: Synthetic oligonucleotide
  Sense strand starting at position 2127 of SEQ ID NO: 1563926
uggcgcagccaguaauuua

SEQ ID NO: 1842624 - RNA, 19 nt, Artificial Sequence
  Description of Artificial Sequence: Synthetic oligonucleotide
  Antisense strand to SEQ ID NO: 1842623
uaaauuacuggcugcgcca

SEQ ID NO: 1842625 - RNA, 19 nt, Artificial Sequence
  Description of Artificial Sequence: Synthetic oligonucleotide
  Sense strand starting at position 2195 of SEQ ID NO: 1563926
caguuuccucauggguaca

SEQ ID NO: 1842626 - RNA, 19 nt, Artificial Sequence
  Description of Artificial Sequence: Synthetic oligonucleotide
  Antisense strand to SEQ ID NO: 1842625
uguacccaugaggaaacug

SEQ ID NO: 1842627 - RNA, 19 nt, Artificial Sequence
  Description of Artificial Sequence: Synthetic oligonucleotide
  Sense strand starting at position 2283 of SEQ ID NO: 1563926
ucuaguaguccugcguuaa

SEQ ID NO: 1842628 - RNA, 19 nt, Artificial Sequence
  Description of Artificial Sequence: Synthetic oligonucleotide
  Antisense strand to SEQ ID NO: 1842627
uuaacgcaggacuacuaga

SEQ ID NO: 1842629 - RNA, 19 nt, Artificial Sequence
  Description of Artificial Sequence: Synthetic oligonucleotide
  Sense strand starting at position 2306 of SEQ ID NO: 1563926
cagagacguucuccuauuc

SEQ ID NO: 1842630 - RNA, 19 nt, Artificial Sequence
  Description of Artificial Sequence: Synthetic oligonucleotide
  Antisense strand to SEQ ID NO: 1842629
gaauaggagaacgucucug

SEQ ID NO: 1842631 - RNA, 19 nt, Artificial Sequence
  Description of Artificial Sequence: Synthetic oligonucleotide
  Sense strand starting at position 2366 of SEQ ID NO: 1563926
accacuugguguuugggaa

SEQ ID NO: 1842632 - RNA, 19 nt, Artificial Sequence
  Description of Artificial Sequence: Synthetic oligonucleotide
  Antisense strand to SEQ ID NO: 1842631
uucccaaacaccaaguggu

SEQ ID NO: 1842633 - RNA, 19 nt, Artificial Sequence
  Description of Artificial Sequence: Synthetic oligonucleotide
  Sense strand starting at position 2367 of SEQ ID NO: 1563926
ccacuugguguuugggaaa

SEQ ID NO: 1842634 - RNA, 19 nt, Artificial Sequence
  Description of Artificial Sequence: Synthetic oligonucleotide
  Antisense strand to SEQ ID NO: 1842633
uuucccaaacaccaagugg

SEQ ID NO: 1842635 - RNA, 19 nt, Artificial Sequence
  Description of Artificial Sequence: Synthetic oligonucleotide
  Sense strand starting at position 2742 of SEQ ID NO: 1563926
gugguuaggacuuaguagu

SEQ ID NO: 1842636 - RNA, 19 nt, Artificial Sequence
  Description of Artificial Sequence: Synthetic oligonucleotide
  Antisense strand to SEQ ID NO: 1842635
acuacuaaguccuaaccac

SEQ ID NO: 1842637 - RNA, 19 nt, Artificial Sequence
  Description of Artificial Sequence: Synthetic oligonucleotide
  Sense strand starting at position 2934 of SEQ ID NO: 1563926
acaagaaagaggugccauu

SEQ ID NO: 1842638 - RNA, 19 nt, Artificial Sequence
  Description of Artificial Sequence: Synthetic oligonucleotide
  Antisense strand to SEQ ID NO: 1842637
aauggcaccucuuucuugu

SEQ ID NO: 1842639 - RNA, 19 nt, Artificial Sequence
  Description of Artificial Sequence: Synthetic oligonucleotide
  Sense strand starting at position 2957 of SEQ ID NO: 1563926
agucuauuccaucaguauc

SEQ ID NO: 1842640 - RNA, 19 nt, Artificial Sequence
  Description of Artificial Sequence: Synthetic oligonucleotide
  Antisense strand to SEQ ID NO: 1842639
gauacugauggaauagacu

SEQ ID NO: 1842641 - RNA, 19 nt, Artificial Sequence
  Description of Artificial Sequence: Synthetic oligonucleotide
  Sense strand starting at position 2971 of SEQ ID NO: 1563926
guaucaguucuacaucaca

SEQ ID NO: 1842642 - RNA, 19 nt, Artificial Sequence
  Description of Artificial Sequence: Synthetic oligonucleotide
  Antisense strand to SEQ ID NO: 1842641
ugugauguagaacugauac

SEQ ID NO: 1842643 - RNA, 19 nt, Artificial Sequence
  Description of Artificial Sequence: Synthetic oligonucleotide
  Sense strand starting at position 3022 of SEQ ID NO: 1563926
auacuuguggcagggaaga

SEQ ID NO: 1842644 - RNA, 19 nt, Artificial Sequence
  Description of Artificial Sequence: Synthetic oligonucleotide
  Antisense strand to SEQ ID NO: 1842643
ucuucccugccacaaguau

SEQ ID NO: 1842645 - RNA, 19 nt, Artificial Sequence
  Description of Artificial Sequence: Synthetic oligonucleotide
  Sense strand starting at position 3046 of SEQ ID NO: 1563926
aggacauuauaacauggaa

SEQ ID NO: 1842646 - RNA, 19 nt, Artificial Sequence
  Description of Artificial Sequence: Synthetic oligonucleotide
  Antisense strand to SEQ ID NO: 1842645
uuccauguuauaauguccu

SEQ ID NO: 1842647 - RNA, 19 nt, Artificial Sequence
  Description of Artificial Sequence: Synthetic oligonucleotide
  Sense strand starting at position 3375 of SEQ ID NO: 1563926
ucaugcuuucgcuauguga

SEQ ID NO: 1842648 - RNA, 19 nt, Artificial Sequence
  Description of Artificial Sequence: Synthetic oligonucleotide
  Antisense strand to SEQ ID NO: 1842647
ucacauagcgaaagcauga

SEQ ID NO: 1842649 - RNA, 19 nt, Artificial Sequence
  Description of Artificial Sequence: Synthetic oligonucleotide
  Sense strand starting at position 3706 of SEQ ID NO: 1563926
aaugaugagcaguguaauu

SEQ ID NO: 1842650 - RNA, 19 nt, Artificial Sequence
  Description of Artificial Sequence: Synthetic oligonucleotide
  Antisense strand to SEQ ID NO: 1842649
aauuacacugcucaucauu

SEQ ID NO: 1842651 - RNA, 19 nt, Artificial Sequence
  Description of Artificial Sequence: Synthetic oligonucleotide
  Sense strand starting at position 3711 of SEQ ID NO: 1563926
ugagcaguguaauucagga

SEQ ID NO: 1842652 - RNA, 19 nt, Artificial Sequence
  Description of Artificial Sequence: Synthetic oligonucleotide
  Antisense strand to SEQ ID NO: 1842651
uccugaauuacacugcuca

SEQ ID NO: 1842653 - RNA, 19 nt, Artificial Sequence
  Description of Artificial Sequence: Synthetic oligonucleotide
  Sense strand starting at position 3725 of SEQ ID NO: 1563926
caggaaucacuguaguagu

SEQ ID NO: 1842654 - RNA, 19 nt, Artificial Sequence
  Description of Artificial Sequence: Synthetic oligonucleotide
  Antisense strand to SEQ ID NO: 1842653
acuacuacagugauuccug

SEQ ID NO: 1842655 - RNA, 19 nt, Artificial Sequence
  Description of Artificial Sequence: Synthetic oligonucleotide
  Sense strand starting at position 3736 of SEQ ID NO: 1563926
guaguaguagauuguuaca

SEQ ID NO: 1842656 - RNA, 19 nt, Artificial Sequence
  Description of Artificial Sequence: Synthetic oligonucleotide
  Antisense strand to SEQ ID NO: 1842655
uguaacaaucuacuacuac

SEQ ID NO: 1842657 - RNA, 19 nt, Artificial Sequence
  Description of Artificial Sequence: Synthetic oligonucleotide
  Sense strand starting at position 3738 of SEQ ID NO: 1563926
aguaguagauuguuacagu

SEQ ID NO: 1842658 - RNA, 19 nt, Artificial Sequence
  Description of Artificial Sequence: Synthetic oligonucleotide
  Antisense strand to SEQ ID NO: 1842657
acuguaacaaucuacuacu

SEQ ID NO: 1842659 - RNA, 19 nt, Artificial Sequence
  Description of Artificial Sequence: Synthetic oligonucleotide
  Sense strand starting at position 3760 of SEQ ID NO: 1563926
acugcaauuuguucgugga

SEQ ID NO: 1842660 - RNA, 19 nt, Artificial Sequence
  Description of Artificial Sequence: Synthetic oligonucleotide
  Antisense strand to SEQ ID NO: 1842659
uccacgaacaaauugcagu

SEQ ID NO: 1842661 - RNA, 19 nt, Artificial Sequence
  Description of Artificial Sequence: Synthetic oligonucleotide
  Sense strand starting at position 3761 of SEQ ID NO: 1563926
cugcaauuuguucguggaa

SEQ ID NO: 1842662 - RNA, 19 nt, Artificial Sequence
  Description of Artificial Sequence: Synthetic oligonucleotide
  Antisense strand to SEQ ID NO: 1842661
uuccacgaacaaauugcag

SEQ ID NO: 1842663 - RNA, 19 nt, Artificial Sequence
  Description of Artificial Sequence: Synthetic oligonucleotide
  Sense strand starting at position 3762 of SEQ ID NO: 1563926
ugcaauuuguucguggaag

SEQ ID NO: 1842664 - RNA, 19 nt, Artificial Sequence
  Description of Artificial Sequence: Synthetic oligonucleotide
  Antisense strand to SEQ ID NO: 1842663
cuuccacgaacaaauugca

SEQ ID NO: 1842665 - RNA, 19 nt, Artificial Sequence
  Description of Artificial Sequence: Synthetic oligonucleotide
  Sense strand starting at position 3780 of SEQ ID NO: 1563926
gccuguaucuccuuccaca

SEQ ID NO: 1842666 - RNA, 19 nt, Artificial Sequence
  Description of Artificial Sequence: Synthetic oligonucleotide
  Antisense strand to SEQ ID NO: 1842665
uguggaaggagauacaggc

SEQ ID NO: 1842667 - RNA, 19 nt, Artificial Sequence
  Description of Artificial Sequence: Synthetic oligonucleotide
  Sense strand starting at position 3810 of SEQ ID NO: 1563926
ucuggucuuggccauguaa

SEQ ID NO: 1842668 - RNA, 19 nt, Artificial Sequence
  Description of Artificial Sequence: Synthetic oligonucleotide
  Antisense strand to SEQ ID NO: 1842667
uuacauggccaagaccaga

SEQ ID NO: 1842669 - RNA, 19 nt, Artificial Sequence
  Description of Artificial Sequence: Synthetic oligonucleotide
  Sense strand starting at position 3812 of SEQ ID NO: 1563926
uggucuuggccauguaauu

SEQ ID NO: 1842670 - RNA, 19 nt, Artificial Sequence
  Description of Artificial Sequence: Synthetic oligonucleotide
  Antisense strand to SEQ ID NO: 1842669
aauuacauggccaagacca

SEQ ID NO: 1842671 - RNA, 19 nt, Artificial Sequence
  Description of Artificial Sequence: Synthetic oligonucleotide
  Sense strand starting at position 3825 of SEQ ID NO: 1563926
guaauuuguuguguccagu

SEQ ID NO: 1842672 - RNA, 19 nt, Artificial Sequence
  Description of Artificial Sequence: Synthetic oligonucleotide
  Antisense strand to SEQ ID NO: 1842671
acuggacacaacaaauuac

SEQ ID NO: 1842673 - RNA, 19 nt, Artificial Sequence
  Description of Artificial Sequence: Synthetic oligonucleotide
  Sense strand starting at position 3831 of SEQ ID NO: 1563926
uguuguguccagugggaca

SEQ ID NO: 1842674 - RNA, 19 nt, Artificial Sequence
  Description of Artificial Sequence: Synthetic oligonucleotide
  Antisense strand to SEQ ID NO: 1842673
ugucccacuggacacaaca

SEQ ID NO: 1842675 - RNA, 19 nt, Artificial Sequence
  Description of Artificial Sequence: Synthetic oligonucleotide
  Sense strand starting at position 3833 of SEQ ID NO: 1563926
uuguguccagugggacaau

SEQ ID NO: 1842676 - RNA, 19 nt, Artificial Sequence
  Description of Artificial Sequence: Synthetic oligonucleotide
  Antisense strand to SEQ ID NO: 1842675
auugucccacuggacacaa

SEQ ID NO: 1842677 - RNA, 19 nt, Artificial Sequence
  Description of Artificial Sequence: Synthetic oligonucleotide
  Sense strand starting at position 3880 of SEQ ID NO: 1563926
acugaaaggugcuugcaca

SEQ ID NO: 1842678 - RNA, 19 nt, Artificial Sequence
  Description of Artificial Sequence: Synthetic oligonucleotide
  Antisense strand to SEQ ID NO: 1842677
ugugcaagcaccuuucagu

SEQ ID NO: 1842679 - RNA, 19 nt, Artificial Sequence
  Description of Artificial Sequence: Synthetic oligonucleotide
  Sense strand starting at position 3974 of SEQ ID NO: 1563926
ugaugagauaccuguggca

SEQ ID NO: 1842680 - RNA, 19 nt, Artificial Sequence
  Description of Artificial Sequence: Synthetic oligonucleotide
  Antisense strand to SEQ ID NO: 1842679
ugccacagguaucucauca

SEQ ID NO: 1842681 - RNA, 19 nt, Artificial Sequence
  Description of Artificial Sequence: Synthetic oligonucleotide
  Sense strand starting at position 3976 of SEQ ID NO: 1563926
augagauaccuguggcaga

SEQ ID NO: 1842682 - RNA, 19 nt, Artificial Sequence
  Description of Artificial Sequence: Synthetic oligonucleotide
  Antisense strand to SEQ ID NO: 1842681
ucugccacagguaucucau

SEQ ID NO: 1842683 - RNA, 19 nt, Artificial Sequence
  Description of Artificial Sequence: Synthetic oligonucleotide
  Sense strand starting at position 113 of SEQ ID NO: 1563927
aacguuaaguucuugaugu

SEQ ID NO: 1842684 - RNA, 19 nt, Artificial Sequence
  Description of Artificial Sequence: Synthetic oligonucleotide
  Antisense strand to SEQ ID NO: 1842683
acaucaagaacuuaacguu

SEQ ID NO: 1842685 - RNA, 19 nt, Artificial Sequence
  Description of Artificial Sequence: Synthetic oligonucleotide
  Sense strand starting at position 115 of SEQ ID NO: 1563927
cguuaaguucuugauguag

SEQ ID NO: 1842686 - RNA, 19 nt, Artificial Sequence
  Description of Artificial Sequence: Synthetic oligonucleotide
  Antisense strand to SEQ ID NO: 1842685
cuacaucaagaacuuaacg

SEQ ID NO: 1842687 - RNA, 19 nt, Artificial Sequence
  Description of Artificial Sequence: Synthetic oligonucleotide
  Sense strand starting at position 183 of SEQ ID NO: 1563927
uauucucuaucguuaagag

SEQ ID NO: 1842688 - RNA, 19 nt, Artificial Sequence
  Description of Artificial Sequence: Synthetic oligonucleotide
  Antisense strand to SEQ ID NO: 1842687
cucuuaacgauagagaaua

SEQ ID NO: 1842689 - RNA, 19 nt, Artificial Sequence
  Description of Artificial Sequence: Synthetic oligonucleotide
  Sense strand starting at position 184 of SEQ ID NO: 1563927
auucucuaucguuaagaga

SEQ ID NO: 1842690 - RNA, 19 nt, Artificial Sequence
  Description of Artificial Sequence: Synthetic oligonucleotide
  Antisense strand to SEQ ID NO: 1842689
ucucuuaacgauagagaau

SEQ ID NO: 1842691 - RNA, 19 nt, Artificial Sequence
  Description of Artificial Sequence: Synthetic oligonucleotide
  Sense strand starting at position 191 of SEQ ID NO: 1563927
aucguuaagagagauuguu

SEQ ID NO: 1842692 - RNA, 19 nt, Artificial Sequence
  Description of Artificial Sequence: Synthetic oligonucleotide
  Antisense strand to SEQ ID NO: 1842691
aacaaucucucuuaacgau

SEQ ID NO: 1842693 - RNA, 19 nt, Artificial Sequence
  Description of Artificial Sequence: Synthetic oligonucleotide
  Sense strand starting at position 210 of SEQ ID NO: 1563927
caggaauccuaauaguuug

SEQ ID NO: 1842694 - RNA, 19 nt, Artificial Sequence
  Description of Artificial Sequence: Synthetic oligonucleotide
  Antisense strand to SEQ ID NO: 1842693
caaacuauuaggauuccug

SEQ ID NO: 1842695 - RNA, 19 nt, Artificial Sequence
  Description of Artificial Sequence: Synthetic oligonucleotide
  Sense strand starting at position 256 of SEQ ID NO: 1563927
agagcuaacucaguuggga

SEQ ID NO: 1842696 - RNA, 19 nt, Artificial Sequence
  Description of Artificial Sequence: Synthetic oligonucleotide
  Antisense strand to SEQ ID NO: 1842695
ucccaacugaguuagcucu

SEQ ID NO: 1842697 - RNA, 19 nt, Artificial Sequence
  Description of Artificial Sequence: Synthetic oligonucleotide
  Sense strand starting at position 292 of SEQ ID NO: 1563927
auuccauuccugugguuac

SEQ ID NO: 1842698 - RNA, 19 nt, Artificial Sequence
  Description of Artificial Sequence: Synthetic oligonucleotide
  Antisense strand to SEQ ID NO: 1842697
guaaccacaggaauggaau

SEQ ID NO: 1842699 - RNA, 19 nt, Artificial Sequence
  Description of Artificial Sequence: Synthetic oligonucleotide
  Sense strand starting at position 310 of SEQ ID NO: 1563927
cugggagucagggagguuu

SEQ ID NO: 1842700 - RNA, 19 nt, Artificial Sequence
  Description of Artificial Sequence: Synthetic oligonucleotide
  Antisense strand to SEQ ID NO: 1842699
aaaccucccugacucccag

SEQ ID NO: 1842701 - RNA, 19 nt, Artificial Sequence
  Description of Artificial Sequence: Synthetic oligonucleotide
  Sense strand starting at position 312 of SEQ ID NO: 1563927
gggagucagggagguuuaa

SEQ ID NO: 1842702 - RNA, 19 nt, Artificial Sequence
  Description of Artificial Sequence: Synthetic oligonucleotide
  Antisense strand to SEQ ID NO: 1842701
uuaaaccucccugacuccc

SEQ ID NO: 1842703 - RNA, 19 nt, Artificial Sequence
  Description of Artificial Sequence: Synthetic oligonucleotide
  Sense strand starting at position 321 of SEQ ID NO: 1563927
ggagguuuaagcggaaugu

SEQ ID NO: 1842704 - RNA, 19 nt, Artificial Sequence
  Description of Artificial Sequence: Synthetic oligonucleotide
  Antisense strand to SEQ ID NO: 1842703
acauuccgcuuaaaccucc

SEQ ID NO: 1842705 - RNA, 19 nt, Artificial Sequence
  Description of Artificial Sequence: Synthetic oligonucleotide
  Sense strand starting at position 330 of SEQ ID NO: 1563927
agcggaaugucacuacauu

SEQ ID NO: 1842706 - RNA, 19 nt, Artificial Sequence
  Description of Artificial Sequence: Synthetic oligonucleotide
  Antisense strand to SEQ ID NO: 1842705
aauguagugacauuccgcu

SEQ ID NO: 1842707 - RNA, 19 nt, Artificial Sequence
  Description of Artificial Sequence: Synthetic oligonucleotide
  Sense strand starting at position 331 of SEQ ID NO: 1563927
gcggaaugucacuacauuc

SEQ ID NO: 1842708 - RNA, 19 nt, Artificial Sequence
  Description of Artificial Sequence: Synthetic oligonucleotide
  Antisense strand to SEQ ID NO: 1842707
gaauguagugacauuccgc

SEQ ID NO: 1842709 - RNA, 19 nt, Artificial Sequence
  Description of Artificial Sequence: Synthetic oligonucleotide
  Sense strand starting at position 395 of SEQ ID NO: 1563927
gaaccaugguucuucuaug

SEQ ID NO: 1842710 - RNA, 19 nt, Artificial Sequence
  Description of Artificial Sequence: Synthetic oligonucleotide
  Antisense strand to SEQ ID NO: 1842709
cauagaagaaccaugguuc

SEQ ID NO: 1842711 - RNA, 19 nt, Artificial Sequence
  Description of Artificial Sequence: Synthetic oligonucleotide
  Sense strand starting at position 406 of SEQ ID NO: 1563927
cuucuaugguauccaguaa

SEQ ID NO: 1842712 - RNA, 19 nt, Artificial Sequence
  Description of Artificial Sequence: Synthetic oligonucleotide
  Antisense strand to SEQ ID NO: 1842711
uuacuggauaccauagaag

SEQ ID NO: 1842713 - RNA, 19 nt, Artificial Sequence
  Description of Artificial Sequence: Synthetic oligonucleotide
  Sense strand starting at position 434 of SEQ ID NO: 1563927
ggaguuggaaguugaguau

SEQ ID NO: 1842714 - RNA, 19 nt, Artificial Sequence
  Description of Artificial Sequence: Synthetic oligonucleotide
  Antisense strand to SEQ ID NO: 1842713
auacucaacuuccaacucc

SEQ ID NO: 1842715 - RNA, 19 nt, Artificial Sequence
  Description of Artificial Sequence: Synthetic oligonucleotide
  Sense strand starting at position 461 of SEQ ID NO: 1563927
aaauucugugaauacgguu

SEQ ID NO: 1842716 - RNA, 19 nt, Artificial Sequence
  Description of Artificial Sequence: Synthetic oligonucleotide
  Antisense strand to SEQ ID NO: 1842715
aaccguauucacagaauuu

SEQ ID NO: 1842717 - RNA, 19 nt, Artificial Sequence
  Description of Artificial Sequence: Synthetic oligonucleotide
  Sense strand starting at position 486 of SEQ ID NO: 1563927
auaagauguguuuggcuag

SEQ ID NO: 1842718 - RNA, 19 nt, Artificial Sequence
  Description of Artificial Sequence: Synthetic oligonucleotide
  Antisense strand to SEQ ID NO: 1842717
cuagccaaacacaucuuau

SEQ ID NO: 1842719 - RNA, 19 nt, Artificial Sequence
  Description of Artificial Sequence: Synthetic oligonucleotide
  Sense strand starting at position 534 of SEQ ID NO: 1563927
guuaaucuacaugggaaau

SEQ ID NO: 1842720 - RNA, 19 nt, Artificial Sequence
  Description of Artificial Sequence: Synthetic oligonucleotide
  Antisense strand to SEQ ID NO: 1842719
auuucccauguagauuaac

SEQ ID NO: 1842721 - RNA, 19 nt, Artificial Sequence
  Description of Artificial Sequence: Synthetic oligonucleotide
  Sense strand starting at position 797 of SEQ ID NO: 1563927
gaacgcugugaaggagaaa

SEQ ID NO: 1842722 - RNA, 19 nt, Artificial Sequence
  Description of Artificial Sequence: Synthetic oligonucleotide
  Antisense strand to SEQ ID NO: 1842721
uuucuccuucacagcguuc

SEQ ID NO: 1842723 - RNA, 19 nt, Artificial Sequence
  Description of Artificial Sequence: Synthetic oligonucleotide
  Sense strand starting at position 933 of SEQ ID NO: 1563927
ccacgaauaugugugaaau

SEQ ID NO: 1842724 - RNA, 19 nt, Artificial Sequence
  Description of Artificial Sequence: Synthetic oligonucleotide
  Antisense strand to SEQ ID NO: 1842723
auuucacacauauucgugg

SEQ ID NO: 1842725 - RNA, 19 nt, Artificial Sequence
  Description of Artificial Sequence: Synthetic oligonucleotide
  Sense strand starting at position 934 of SEQ ID NO: 1563927
cacgaauaugugugaaaua

SEQ ID NO: 1842726 - RNA, 19 nt, Artificial Sequence
  Description of Artificial Sequence: Synthetic oligonucleotide
  Antisense strand to SEQ ID NO: 1842725
uauuucacacauauucgug

SEQ ID NO: 1842727 - RNA, 19 nt, Artificial Sequence
  Description of Artificial Sequence: Synthetic oligonucleotide
  Sense strand starting at position 1149 of SEQ ID NO: 1563927
cgugcaaacugucuugaaa

SEQ ID NO: 1842728 - RNA, 19 nt, Artificial Sequence
  Description of Artificial Sequence: Synthetic oligonucleotide
  Antisense strand to SEQ ID NO: 1842727
uuucaagacaguuugcacg

SEQ ID NO: 1842729 - RNA, 19 nt, Artificial Sequence
  Description of Artificial Sequence: Synthetic oligonucleotide
  Sense strand starting at position 1198 of SEQ ID NO: 1563927
gcgugauucagagggucug

SEQ ID NO: 1842730 - RNA, 19 nt, Artificial Sequence
  Description of Artificial Sequence: Synthetic oligonucleotide
  Antisense strand to SEQ ID NO: 1842729
cagacccucugaaucacgc

SEQ ID NO: 1842731 - RNA, 19 nt, Artificial Sequence
  Description of Artificial Sequence: Synthetic oligonucleotide
  Sense strand starting at position 1404 of SEQ ID NO: 1563927
agcuuuaguuucuccagau

SEQ ID NO: 1842732 - RNA, 19 nt, Artificial Sequence
  Description of Artificial Sequence: Synthetic oligonucleotide
  Antisense strand to SEQ ID NO: 1842731
aucuggagaaacuaaagcu

SEQ ID NO: 1842733 - RNA, 19 nt, Artificial Sequence
  Description of Artificial Sequence: Synthetic oligonucleotide
  Sense strand starting at position 1405 of SEQ ID NO: 1563927
gcuuuaguuucuccagaua

SEQ ID NO: 1842734 - RNA, 19 nt, Artificial Sequence
  Description of Artificial Sequence: Synthetic oligonucleotide
  Antisense strand to SEQ ID NO: 1842733
uaucuggagaaacuaaagc

SEQ ID NO: 1842735 - RNA, 19 nt, Artificial Sequence
  Description of Artificial Sequence: Synthetic oligonucleotide
  Sense strand starting at position 1408 of SEQ ID NO: 1563927
uuaguuucuccagauauuc

SEQ ID NO: 1842736 - RNA, 19 nt, Artificial Sequence
  Description of Artificial Sequence: Synthetic oligonucleotide
  Antisense strand to SEQ ID NO: 1842735
gaauaucuggagaaacuaa

SEQ ID NO: 1842737 - RNA, 19 nt, Artificial Sequence
  Description of Artificial Sequence: Synthetic oligonucleotide
  Sense strand starting at position 1534 of SEQ ID NO: 1563927
ccgugacagucaguacaua

SEQ ID NO: 1842738 - RNA, 19 nt, Artificial Sequence
  Description of Artificial Sequence: Synthetic oligonucleotide
  Antisense strand to SEQ ID NO: 1842737
uauguacugacugucacgg

SEQ ID NO: 1842739 - RNA, 19 nt, Artificial Sequence
  Description of Artificial Sequence: Synthetic oligonucleotide
  Sense strand starting at position 1556 of SEQ ID NO: 1563927
guacguucugugcuugcga

SEQ ID NO: 1842740 - RNA, 19 nt, Artificial Sequence
  Description of Artificial Sequence: Synthetic oligonucleotide
  Antisense strand to SEQ ID NO: 1842739
ucgcaagcacagaacguac

SEQ ID NO: 1842741 - RNA, 19 nt, Artificial Sequence
  Description of Artificial Sequence: Synthetic oligonucleotide
  Sense strand starting at position 1573 of SEQ ID NO: 1563927
gauccugguucuguucgaa

SEQ ID NO: 1842742 - RNA, 19 nt, Artificial Sequence
  Description of Artificial Sequence: Synthetic oligonucleotide
  Antisense strand to SEQ ID NO: 1842741
uucgaacagaaccaggauc

SEQ ID NO: 1842743 - RNA, 19 nt, Artificial Sequence
  Description of Artificial Sequence: Synthetic oligonucleotide
  Sense strand starting at position 1576 of SEQ ID NO: 1563927
ccugguucuguucgaagac

SEQ ID NO: 1842744 - RNA, 19 nt, Artificial Sequence
  Description of Artificial Sequence: Synthetic oligonucleotide
  Antisense strand to SEQ ID NO: 1842743
gucuucgaacagaaccagg

SEQ ID NO: 1842745 - RNA, 19 nt, Artificial Sequence
  Description of Artificial Sequence: Synthetic oligonucleotide
  Sense strand starting at position 2370 of SEQ ID NO: 1563927
gucguucgcgcacugugaa

SEQ ID NO: 1842746 - RNA, 19 nt, Artificial Sequence
  Description of Artificial Sequence: Synthetic oligonucleotide
  Antisense strand to SEQ ID NO: 1842745
uucacagugcgcgaacgac

SEQ ID NO: 1842747 - RNA, 19 nt, Artificial Sequence
  Description of Artificial Sequence: Synthetic oligonucleotide
  Sense strand starting at position 2534 of SEQ ID NO: 1563927
agggcaucgucgucaucau

SEQ ID NO: 1842748 - RNA, 19 nt, Artificial Sequence
  Description of Artificial Sequence: Synthetic oligonucleotide
  Antisense strand to SEQ ID NO: 1842747
augaugacgacgaugcccu

SEQ ID NO: 1842749 - RNA, 19 nt, Artificial Sequence
  Description of Artificial Sequence: Synthetic oligonucleotide
  Sense strand starting at position 2620 of SEQ ID NO: 1563927
acgggauucuuggcagaau

SEQ ID NO: 1842750 - RNA, 19 nt, Artificial Sequence
  Description of Artificial Sequence: Synthetic oligonucleotide
  Antisense strand to SEQ ID NO: 1842749
auucugccaagaaucccgu

SEQ ID NO: 1842751 - RNA, 19 nt, Artificial Sequence
  Description of Artificial Sequence: Synthetic oligonucleotide
  Sense strand starting at position 2652 of SEQ ID NO: 1563927
ugcugagucacaugaugca

SEQ ID NO: 1842752 - RNA, 19 nt, Artificial Sequence
  Description of Artificial Sequence: Synthetic oligonucleotide
  Antisense strand to SEQ ID NO: 1842751
ugcaucaugugacucagca

SEQ ID NO: 1842753 - RNA, 19 nt, Artificial Sequence
  Description of Artificial Sequence: Synthetic oligonucleotide
  Sense strand starting at position 2779 of SEQ ID NO: 1563927
caguuuccucauggguaca

SEQ ID NO: 1842754 - RNA, 19 nt, Artificial Sequence
  Description of Artificial Sequence: Synthetic oligonucleotide
  Antisense strand to SEQ ID NO: 1842753
uguacccaugaggaaacug

SEQ ID NO: 1842755 - RNA, 19 nt, Artificial Sequence
  Description of Artificial Sequence: Synthetic oligonucleotide
  Sense strand starting at position 2868 of SEQ ID NO: 1563927
cuaguauuccugcguuaaa

SEQ ID NO: 1842756 - RNA, 19 nt, Artificial Sequence
  Description of Artificial Sequence: Synthetic oligonucleotide
  Antisense strand to SEQ ID NO: 1842755
uuuaacgcaggaauacuag

SEQ ID NO: 1842757 - RNA, 19 nt, Artificial Sequence
  Description of Artificial Sequence: Synthetic oligonucleotide
  Sense strand starting at position 2869 of SEQ ID NO: 1563927
uaguauuccugcguuaaag

SEQ ID NO: 1842758 - RNA, 19 nt, Artificial Sequence
  Description of Artificial Sequence: Synthetic oligonucleotide
  Antisense strand to SEQ ID NO: 1842757
cuuuaacgcaggaauacua

SEQ ID NO: 1842759 - RNA, 19 nt, Artificial Sequence
  Description of Artificial Sequence: Synthetic oligonucleotide
  Sense strand starting at position 2870 of SEQ ID NO: 1563927
aguauuccugcguuaaagc

SEQ ID NO: 1842760 - RNA, 19 nt, Artificial Sequence
  Description of Artificial Sequence: Synthetic oligonucleotide
  Antisense strand to SEQ ID NO: 1842759
gcuuuaacgcaggaauacu

SEQ ID NO: 1842761 - RNA, 19 nt, Artificial Sequence
  Description of Artificial Sequence: Synthetic oligonucleotide
  Sense strand starting at position 2925 of SEQ ID NO: 1563927
ugucuuucucuuugauaag

SEQ ID NO: 1842762 - RNA, 19 nt, Artificial Sequence
  Description of Artificial Sequence: Synthetic oligonucleotide
  Antisense strand to SEQ ID NO: 1842761
cuuaucaaagagaaagaca

SEQ ID NO: 1842763 - RNA, 19 nt, Artificial Sequence
  Description of Artificial Sequence: Synthetic oligonucleotide
  Sense strand starting at position 204 of SEQ ID NO: 1563928
gaaccaauuucuggaggga

SEQ ID NO: 1842764 - RNA, 19 nt, Artificial Sequence
  Description of Artificial Sequence: Synthetic oligonucleotide
  Antisense strand to SEQ ID NO: 1842763
ucccuccagaaauugguuc

SEQ ID NO: 1842765 - RNA, 19 nt, Artificial Sequence
  Description of Artificial Sequence: Synthetic oligonucleotide
  Sense strand starting at position 581 of SEQ ID NO: 1563928
gguguugugguguacauuu

SEQ ID NO: 1842766 - RNA, 19 nt, Artificial Sequence
  Description of Artificial Sequence: Synthetic oligonucleotide
  Antisense strand to SEQ ID NO: 1842765
aaauguacaccacaacacc

SEQ ID NO: 1842767 - RNA, 19 nt, Artificial Sequence
  Description of Artificial Sequence: Synthetic oligonucleotide
  Sense strand starting at position 626 of SEQ ID NO: 1563928
guauauugcaaguaguaag

SEQ ID NO: 1842768 - RNA, 19 nt, Artificial Sequence
  Description of Artificial Sequence: Synthetic oligonucleotide
  Antisense strand to SEQ ID NO: 1842767
cuuacuacuugcaauauac

SEQ ID NO: 1842769 - RNA, 19 nt, Artificial Sequence
  Description of Artificial Sequence: Synthetic oligonucleotide
  Sense strand starting at position 677 of SEQ ID NO: 1563928
gguuauauauugucuacau

SEQ ID NO: 1842770 - RNA, 19 nt, Artificial Sequence
  Description of Artificial Sequence: Synthetic oligonucleotide
  Antisense strand to SEQ ID NO: 1842769
auguagacaauauauaacc

SEQ ID NO: 1842771 - RNA, 19 nt, Artificial Sequence
  Description of Artificial Sequence: Synthetic oligonucleotide
  Sense strand starting at position 678 of SEQ ID NO: 1563928
guuauauauugucuacaug

SEQ ID NO: 1842772 - RNA, 19 nt, Artificial Sequence
  Description of Artificial Sequence: Synthetic oligonucleotide
  Antisense strand to SEQ ID NO: 1842771
cauguagacaauauauaac

SEQ ID NO: 1842773 - RNA, 19 nt, Artificial Sequence
  Description of Artificial Sequence: Synthetic oligonucleotide
  Sense strand starting at position 681 of SEQ ID NO: 1563928
auauauugucuacaugugu

SEQ ID NO: 1842774 - RNA, 19 nt, Artificial Sequence
  Description of Artificial Sequence: Synthetic oligonucleotide
  Antisense strand to SEQ ID NO: 1842773
acacauguagacaauauau

SEQ ID NO: 1842775 - RNA, 19 nt, Artificial Sequence
  Description of Artificial Sequence: Synthetic oligonucleotide
  Sense strand starting at position 695 of SEQ ID NO: 1563928
uguguacuaggucacaaua

SEQ ID NO: 1842776 - RNA, 19 nt, Artificial Sequence
  Description of Artificial Sequence: Synthetic oligonucleotide
  Antisense strand to SEQ ID NO: 1842775
uauugugaccuaguacaca

SEQ ID NO: 1842777 - RNA, 19 nt, Artificial Sequence
  Description of Artificial Sequence: Synthetic oligonucleotide
  Sense strand starting at position 914 of SEQ ID NO: 1563928
acaguaauaagcggaauua

SEQ ID NO: 1842778 - RNA, 19 nt, Artificial Sequence
  Description of Artificial Sequence: Synthetic oligonucleotide
  Antisense strand to SEQ ID NO: 1842777
uaauuccgcuuauuacugu

SEQ ID NO: 1842779 - RNA, 19 nt, Artificial Sequence
  Description of Artificial Sequence: Synthetic oligonucleotide
  Sense strand starting at position 915 of SEQ ID NO: 1563928
caguaauaagcggaauuaa

SEQ ID NO: 1842780 - RNA, 19 nt, Artificial Sequence
  Description of Artificial Sequence: Synthetic oligonucleotide
  Antisense strand to SEQ ID NO: 1842779
uuaauuccgcuuauuacug

SEQ ID NO: 1842781 - RNA, 19 nt, Artificial Sequence
  Description of Artificial Sequence: Synthetic oligonucleotide
  Sense strand starting at position 924 of SEQ ID NO: 1563928
gcggaauuaagguauuggu

SEQ ID NO: 1842782 - RNA, 19 nt, Artificial Sequence
  Description of Artificial Sequence: Synthetic oligonucleotide
  Antisense strand to SEQ ID NO: 1842781
accaauaccuuaauuccgc

SEQ ID NO: 1842783 - RNA, 19 nt, Artificial Sequence
  Description of Artificial Sequence: Synthetic oligonucleotide
  Sense strand starting at position 956 of SEQ ID NO: 1563928
ggccaauaacguuacuuua

SEQ ID NO: 1842784 - RNA, 19 nt, Artificial Sequence
  Description of Artificial Sequence: Synthetic oligonucleotide
  Antisense strand to SEQ ID NO: 1842783
uaaaguaacguuauuggcc

SEQ ID NO: 1842785 - RNA, 19 nt, Artificial Sequence
  Description of Artificial Sequence: Synthetic oligonucleotide
  Sense strand starting at position 1003 of SEQ ID NO: 1563928
uuguuuacuguagauaaga

SEQ ID NO: 1842786 - RNA, 19 nt, Artificial Sequence
  Description of Artificial Sequence: Synthetic oligonucleotide
  Antisense strand to SEQ ID NO: 1842785
ucuuaucuacaguaaacaa

SEQ ID NO: 1842787 - RNA, 19 nt, Artificial Sequence
  Description of Artificial Sequence: Synthetic oligonucleotide
  Sense strand starting at position 1057 of SEQ ID NO: 1563928
ucucuuaugccagauggga

SEQ ID NO: 1842788 - RNA, 19 nt, Artificial Sequence
  Description of Artificial Sequence: Synthetic oligonucleotide
  Antisense strand to SEQ ID NO: 1842787
ucccaucuggcauaagaga

SEQ ID NO: 1842789 - RNA, 19 nt, Artificial Sequence
  Description of Artificial Sequence: Synthetic oligonucleotide
  Sense strand starting at position 1070 of SEQ ID NO: 1563928
augggauggucguuaagaa

SEQ ID NO: 1842790 - RNA, 19 nt, Artificial Sequence
  Description of Artificial Sequence: Synthetic oligonucleotide
  Antisense strand to SEQ ID NO: 1842789
uucuuaacgaccaucccau

SEQ ID NO: 1842791 - RNA, 19 nt, Artificial Sequence
  Description of Artificial Sequence: Synthetic oligonucleotide
  Sense strand starting at position 1071 of SEQ ID NO: 1563928
ugggauggucguuaagaaa

SEQ ID NO: 1842792 - RNA, 19 nt, Artificial Sequence
  Description of Artificial Sequence: Synthetic oligonucleotide
  Antisense strand to SEQ ID NO: 1842791
uuucuuaacgaccauccca

SEQ ID NO: 1842793 - RNA, 19 nt, Artificial Sequence
  Description of Artificial Sequence: Synthetic oligonucleotide
  Sense strand starting at position 1080 of SEQ ID NO: 1563928
cguuaagaaaugcauggua

SEQ ID NO: 1842794 - RNA, 19 nt, Artificial Sequence
  Description of Artificial Sequence: Synthetic oligonucleotide
  Antisense strand to SEQ ID NO: 1842793
uaccaugcauuucuuaacg

SEQ ID NO: 1842795 - RNA, 19 nt, Artificial Sequence
  Description of Artificial Sequence: Synthetic oligonucleotide
  Sense strand starting at position 1082 of SEQ ID NO: 1563928
uuaagaaaugcaugguaua

SEQ ID NO: 1842796 - RNA, 19 nt, Artificial Sequence
  Description of Artificial Sequence: Synthetic oligonucleotide
  Antisense strand to SEQ ID NO: 1842795
uauaccaugcauuucuuaa

SEQ ID NO: 1842797 - RNA, 19 nt, Artificial Sequence
  Description of Artificial Sequence: Synthetic oligonucleotide
  Sense strand starting at position 1196 of SEQ ID NO: 1563928
acuauugaucauggcuaau

SEQ ID NO: 1842798 - RNA, 19 nt, Artificial Sequence
  Description of Artificial Sequence: Synthetic oligonucleotide
  Antisense strand to SEQ ID NO: 1842797
auuagccaugaucaauagu

SEQ ID NO: 1842799 - RNA, 19 nt, Artificial Sequence
  Description of Artificial Sequence: Synthetic oligonucleotide
  Sense strand starting at position 1280 of SEQ ID NO: 1563928
cacggaauuuaugggaaac

SEQ ID NO: 1842800 - RNA, 19 nt, Artificial Sequence
  Description of Artificial Sequence: Synthetic oligonucleotide
  Antisense strand to SEQ ID NO: 1842799
guuucccauaaauuccgug

SEQ ID NO: 1842801 - RNA, 19 nt, Artificial Sequence
  Description of Artificial Sequence: Synthetic oligonucleotide
  Sense strand starting at position 1282 of SEQ ID NO: 1563928
cggaauuuaugggaaacua

SEQ ID NO: 1842802 - RNA, 19 nt, Artificial Sequence
  Description of Artificial Sequence: Synthetic oligonucleotide
  Antisense strand to SEQ ID NO: 1842801
uaguuucccauaaauuccg

SEQ ID NO: 1842803 - RNA, 19 nt, Artificial Sequence
  Description of Artificial Sequence: Synthetic oligonucleotide
  Sense strand starting at position 1301 of SEQ ID NO: 1563928
ggguaacaacucuaucucu

SEQ ID NO: 1842804 - RNA, 19 nt, Artificial Sequence
  Description of Artificial Sequence: Synthetic oligonucleotide
  Antisense strand to SEQ ID NO: 1842803
agagauagaguuguuaccc

SEQ ID NO: 1842805 - RNA, 19 nt, Artificial Sequence
  Description of Artificial Sequence: Synthetic oligonucleotide
  Sense strand starting at position 1740 of SEQ ID NO: 1563928
gaguccucagaucgggaau

SEQ ID NO: 1842806 - RNA, 19 nt, Artificial Sequence
  Description of Artificial Sequence: Synthetic oligonucleotide
  Antisense strand to SEQ ID NO: 1842805
auucccgaucugaggacuc

SEQ ID NO: 1842807 - RNA, 19 nt, Artificial Sequence
  Description of Artificial Sequence: Synthetic oligonucleotide
  Sense strand starting at position 2010 of SEQ ID NO: 1563928
cgaccugguuaacuagaaa

SEQ ID NO: 1842808 - RNA, 19 nt, Artificial Sequence
  Description of Artificial Sequence: Synthetic oligonucleotide
  Antisense strand to SEQ ID NO: 1842807
uuucuaguuaaccaggucg

SEQ ID NO: 1842809 - RNA, 19 nt, Artificial Sequence
  Description of Artificial Sequence: Synthetic oligonucleotide
  Sense strand starting at position 2078 of SEQ ID NO: 1563928
ugcagucucagaugagacu

SEQ ID NO: 1842810 - RNA, 19 nt, Artificial Sequence
  Description of Artificial Sequence: Synthetic oligonucleotide
  Antisense strand to SEQ ID NO: 1842809
agucucaucugagacugca

SEQ ID NO: 1842811 - RNA, 19 nt, Artificial Sequence
  Description of Artificial Sequence: Synthetic oligonucleotide
  Sense strand starting at position 2097 of SEQ ID NO: 1563928
cuucuaugauuggccagaa

SEQ ID NO: 1842812 - RNA, 19 nt, Artificial Sequence
  Description of Artificial Sequence: Synthetic oligonucleotide
  Antisense strand to SEQ ID NO: 1842811
uucuggccaaucauagaag

SEQ ID NO: 1842813 - RNA, 19 nt, Artificial Sequence
  Description of Artificial Sequence: Synthetic oligonucleotide
  Sense strand starting at position 2098 of SEQ ID NO: 1563928
uucuaugauuggccagaaa

SEQ ID NO: 1842814 - RNA, 19 nt, Artificial Sequence
  Description of Artificial Sequence: Synthetic oligonucleotide
  Antisense strand to SEQ ID NO: 1842813
uuucuggccaaucauagaa

SEQ ID NO: 1842815 - RNA, 19 nt, Artificial Sequence
  Description of Artificial Sequence: Synthetic oligonucleotide
  Sense strand starting at position 2294 of SEQ ID NO: 1563928
agaugcuguggcuaucaga

SEQ ID NO: 1842816 - RNA, 19 nt, Artificial Sequence
  Description of Artificial Sequence: Synthetic oligonucleotide
  Antisense strand to SEQ ID NO: 1842815
ucugauagccacagcaucu

SEQ ID NO: 1842817 - RNA, 19 nt, Artificial Sequence
  Description of Artificial Sequence: Synthetic oligonucleotide
  Sense strand starting at position 2386 of SEQ ID NO: 1563928
gaagacccguucccuaaau

SEQ ID NO: 1842818 - RNA, 19 nt, Artificial Sequence
  Description of Artificial Sequence: Synthetic oligonucleotide
  Antisense strand to SEQ ID NO: 1842817
auuuagggaacgggucuuc

SEQ ID NO: 1842819 - RNA, 19 nt, Artificial Sequence
  Description of Artificial Sequence: Synthetic oligonucleotide
  Sense strand starting at position 2432 of SEQ ID NO: 1563928
cccgcuauccuagacucua

SEQ ID NO: 1842820 - RNA, 19 nt, Artificial Sequence
  Description of Artificial Sequence: Synthetic oligonucleotide
  Antisense strand to SEQ ID NO: 1842819
uagagucuaggauagcggg

SEQ ID NO: 1842821 - RNA, 19 nt, Artificial Sequence
  Description of Artificial Sequence: Synthetic oligonucleotide
  Sense strand starting at position 2496 of SEQ ID NO: 1563928
gugaaagauggaugcugau

SEQ ID NO: 1842822 - RNA, 19 nt, Artificial Sequence
  Description of Artificial Sequence: Synthetic oligonucleotide
  Antisense strand to SEQ ID NO: 1842821
aucagcauccaucuuucac

SEQ ID NO: 1842823 - RNA, 19 nt, Artificial Sequence
  Description of Artificial Sequence: Synthetic oligonucleotide
  Sense strand starting at position 2612 of SEQ ID NO: 1563928
ugacuaauuugggaaugua

SEQ ID NO: 1842824 - RNA, 19 nt, Artificial Sequence
  Description of Artificial Sequence: Synthetic oligonucleotide
  Antisense strand to SEQ ID NO: 1842823
uacauucccaaauuaguca

SEQ ID NO: 1842825 - RNA, 19 nt, Artificial Sequence
  Description of Artificial Sequence: Synthetic oligonucleotide
  Sense strand starting at position 2999 of SEQ ID NO: 1563928
guuugacuguaacuaucaa

SEQ ID NO: 1842826 - RNA, 19 nt, Artificial Sequence
  Description of Artificial Sequence: Synthetic oligonucleotide
  Antisense strand to SEQ ID NO: 1842825
uugauaguuacagucaaac

SEQ ID NO: 1842827 - RNA, 19 nt, Artificial Sequence
  Description of Artificial Sequence: Synthetic oligonucleotide
  Sense strand starting at position 3088 of SEQ ID NO: 1563928
aggagucauuacuccuuaa

SEQ ID NO: 1842828 - RNA, 19 nt, Artificial Sequence
  Description of Artificial Sequence: Synthetic oligonucleotide
  Antisense strand to SEQ ID NO: 1842827
uuaaggaguaaugacuccu

SEQ ID NO: 1842829 - RNA, 19 nt, Artificial Sequence
  Description of Artificial Sequence: Synthetic oligonucleotide
  Sense strand starting at position 3091 of SEQ ID NO: 1563928
agucauuacuccuuaagag

SEQ ID NO: 1842830 - RNA, 19 nt, Artificial Sequence
  Description of Artificial Sequence: Synthetic oligonucleotide
  Antisense strand to SEQ ID NO: 1842829
cucuuaaggaguaaugacu

SEQ ID NO: 1842831 - RNA, 19 nt, Artificial Sequence
  Description of Artificial Sequence: Synthetic oligonucleotide
  Sense strand starting at position 3092 of SEQ ID NO: 1563928
gucauuacuccuuaagagc

SEQ ID NO: 1842832 - RNA, 19 nt, Artificial Sequence
  Description of Artificial Sequence: Synthetic oligonucleotide
  Antisense strand to SEQ ID NO: 1842831
gcucuuaaggaguaaugac

SEQ ID NO: 1842833 - RNA, 19 nt, Artificial Sequence
  Description of Artificial Sequence: Synthetic oligonucleotide
  Sense strand starting at position 3537 of SEQ ID NO: 1563928
uuuagauagagguggagua

SEQ ID NO: 1842834 - RNA, 19 nt, Artificial Sequence
  Description of Artificial Sequence: Synthetic oligonucleotide
  Antisense strand to SEQ ID NO: 1842833
uacuccaccucuaucuaaa

SEQ ID NO: 1842835 - RNA, 19 nt, Artificial Sequence
  Description of Artificial Sequence: Synthetic oligonucleotide
  Sense strand starting at position 3615 of SEQ ID NO: 1563928
uguacuauagagcauucga

SEQ ID NO: 1842836 - RNA, 19 nt, Artificial Sequence
  Description of Artificial Sequence: Synthetic oligonucleotide
  Antisense strand to SEQ ID NO: 1842835
ucgaaugcucuauaguaca

SEQ ID NO: 1842837 - RNA, 19 nt, Artificial Sequence
  Description of Artificial Sequence: Synthetic oligonucleotide
  Sense strand starting at position 3630 of SEQ ID NO: 1563928
ucgauaauucaggaugggu

SEQ ID NO: 1842838 - RNA, 19 nt, Artificial Sequence
  Description of Artificial Sequence: Synthetic oligonucleotide
  Antisense strand to SEQ ID NO: 1842837
acccauccugaauuaucga

SEQ ID NO: 1842839 - RNA, 19 nt, Artificial Sequence
  Description of Artificial Sequence: Synthetic oligonucleotide
  Sense strand starting at position 3700 of SEQ ID NO: 1563928
aacucagcacuuugagagu

SEQ ID NO: 1842840 - RNA, 19 nt, Artificial Sequence
  Description of Artificial Sequence: Synthetic oligonucleotide
  Antisense strand to SEQ ID NO: 1842839
acucucaaagugcugaguu

SEQ ID NO: 1842841 - RNA, 19 nt, Artificial Sequence
  Description of Artificial Sequence: Synthetic oligonucleotide
  Sense strand starting at position 3716 of SEQ ID NO: 1563928
aguccuaagcgagggauca

SEQ ID NO: 1842842 - RNA, 19 nt, Artificial Sequence
  Description of Artificial Sequence: Synthetic oligonucleotide
  Antisense strand to SEQ ID NO: 1842841
ugaucccucgcuuaggacu

SEQ ID NO: 1842843 - RNA, 19 nt, Artificial Sequence
  Description of Artificial Sequence: Synthetic oligonucleotide
  Sense strand starting at position 47 of SEQ ID NO: 1563929
uuggguucccagggagaaa

SEQ ID NO: 1842844 - RNA, 19 nt, Artificial Sequence
  Description of Artificial Sequence: Synthetic oligonucleotide
  Antisense strand to SEQ ID NO: 1842843
uuucucccugggaacccaa

SEQ ID NO: 1842845 - RNA, 19 nt, Artificial Sequence
  Description of Artificial Sequence: Synthetic oligonucleotide
  Sense strand starting at position 318 of SEQ ID NO: 1563929
uccaguugugaguaaaugu

SEQ ID NO: 1842846 - RNA, 19 nt, Artificial Sequence
  Description of Artificial Sequence: Synthetic oligonucleotide
  Antisense strand to SEQ ID NO: 1842845
acauuuacucacaacugga

SEQ ID NO: 1842847 - RNA, 19 nt, Artificial Sequence
  Description of Artificial Sequence: Synthetic oligonucleotide
  Sense strand starting at position 327 of SEQ ID NO: 1563929
gaguaaauguuacugauaa

SEQ ID NO: 1842848 - RNA, 19 nt, Artificial Sequence
  Description of Artificial Sequence: Synthetic oligonucleotide
  Antisense strand to SEQ ID NO: 1842847
uuaucaguaacauuuacuc

SEQ ID NO: 1842849 - RNA, 19 nt, Artificial Sequence
  Description of Artificial Sequence: Synthetic oligonucleotide
  Sense strand starting at position 341 of SEQ ID NO: 1563929
gauaaauugcuguggauuc

SEQ ID NO: 1842850 - RNA, 19 nt, Artificial Sequence
  Description of Artificial Sequence: Synthetic oligonucleotide
  Antisense strand to SEQ ID NO: 1842849
gaauccacagcaauuuauc

SEQ ID NO: 1842851 - RNA, 19 nt, Artificial Sequence
  Description of Artificial Sequence: Synthetic oligonucleotide
  Sense strand starting at position 654 of SEQ ID NO: 1563929
uggauaagauccuagaaua

SEQ ID NO: 1842852 - RNA, 19 nt, Artificial Sequence
  Description of Artificial Sequence: Synthetic oligonucleotide
  Antisense strand to SEQ ID NO: 1842851
uauucuaggaucuuaucca

SEQ ID NO: 1842853 - RNA, 19 nt, Artificial Sequence
  Description of Artificial Sequence: Synthetic oligonucleotide
  Sense strand starting at position 685 of SEQ ID NO: 1563929
cagugagauaucuggugaa

SEQ ID NO: 1842854 - RNA, 19 nt, Artificial Sequence
  Description of Artificial Sequence: Synthetic oligonucleotide
  Antisense strand to SEQ ID NO: 1842853
uucaccagauaucucacug

SEQ ID NO: 1842855 - RNA, 19 nt, Artificial Sequence
  Description of Artificial Sequence: Synthetic oligonucleotide
  Sense strand starting at position 757 of SEQ ID NO: 1563929
gguaauuaacaucgaugua

SEQ ID NO: 1842856 - RNA, 19 nt, Artificial Sequence
  Description of Artificial Sequence: Synthetic oligonucleotide
  Antisense strand to SEQ ID NO: 1842855
uacaucgauguuaauuacc

SEQ ID NO: 1842857 - RNA, 19 nt, Artificial Sequence
  Description of Artificial Sequence: Synthetic oligonucleotide
  Sense strand starting at position 758 of SEQ ID NO: 1563929
guaauuaacaucgauguag

SEQ ID NO: 1842858 - RNA, 19 nt, Artificial Sequence
  Description of Artificial Sequence: Synthetic oligonucleotide
  Antisense strand to SEQ ID NO: 1842857
cuacaucgauguuaauuac

SEQ ID NO: 1842859 - RNA, 19 nt, Artificial Sequence
  Description of Artificial Sequence: Synthetic oligonucleotide
  Sense strand starting at position 760 of SEQ ID NO: 1563929
aauuaacaucgauguagua

SEQ ID NO: 1842860 - RNA, 19 nt, Artificial Sequence
  Description of Artificial Sequence: Synthetic oligonucleotide
  Antisense strand to SEQ ID NO: 1842859
uacuacaucgauguuaauu

SEQ ID NO: 1842861 - RNA, 19 nt, Artificial Sequence
  Description of Artificial Sequence: Synthetic oligonucleotide
  Sense strand starting at position 780 of SEQ ID NO: 1563929
ugucaauuagugcaucaau

SEQ ID NO: 1842862 - RNA, 19 nt, Artificial Sequence
  Description of Artificial Sequence: Synthetic oligonucleotide
  Antisense strand to SEQ ID NO: 1842861
auugaugcacuaauugaca

SEQ ID NO: 1842863 - RNA, 19 nt, Artificial Sequence
  Description of Artificial Sequence: Synthetic oligonucleotide
  Sense strand starting at position 869 of SEQ ID NO: 1563929
gagggcucucuguauaauc

SEQ ID NO: 1842864 - RNA, 19 nt, Artificial Sequence
  Description of Artificial Sequence: Synthetic oligonucleotide
  Antisense strand to SEQ ID NO: 1842863
gauuauacagagagcccuc

SEQ ID NO: 1842865 - RNA, 19 nt, Artificial Sequence
  Description of Artificial Sequence: Synthetic oligonucleotide
  Sense strand starting at position 871 of SEQ ID NO: 1563929
gggcucucuguauaaucau

SEQ ID NO: 1842866 - RNA, 19 nt, Artificial Sequence
  Description of Artificial Sequence: Synthetic oligonucleotide
  Antisense strand to SEQ ID NO: 1842865
augauuauacagagagccc

SEQ ID NO: 1842867 - RNA, 19 nt, Artificial Sequence
  Description of Artificial Sequence: Synthetic oligonucleotide
  Sense strand starting at position 1005 of SEQ ID NO: 1563929
gaaacauaguuagaaggau

SEQ ID NO: 1842868 - RNA, 19 nt, Artificial Sequence
  Description of Artificial Sequence: Synthetic oligonucleotide
  Antisense strand to SEQ ID NO: 1842867
auccuucuaacuauguuuc

SEQ ID NO: 1842869 - RNA, 19 nt, Artificial Sequence
  Description of Artificial Sequence: Synthetic oligonucleotide
  Sense strand starting at position 1267 of SEQ ID NO: 1563929
auauaacuuucugaagaag

SEQ ID NO: 1842870 - RNA, 19 nt, Artificial Sequence
  Description of Artificial Sequence: Synthetic oligonucleotide
  Antisense strand to SEQ ID NO: 1842869
cuucuucagaaaguuauau

SEQ ID NO: 1842871 - RNA, 19 nt, Artificial Sequence
  Description of Artificial Sequence: Synthetic oligonucleotide
  Sense strand starting at position 1321 of SEQ ID NO: 1563929
acaugaagugauuagccau

SEQ ID NO: 1842872 - RNA, 19 nt, Artificial Sequence
  Description of Artificial Sequence: Synthetic oligonucleotide
  Antisense strand to SEQ ID NO: 1842871
auggcuaaucacuucaugu

SEQ ID NO: 1842873 - RNA, 19 nt, Artificial Sequence
  Description of Artificial Sequence: Synthetic oligonucleotide
  Sense strand starting at position 1324 of SEQ ID NO: 1563929
ugaagugauuagccauaca

SEQ ID NO: 1842874 - RNA, 19 nt, Artificial Sequence
  Description of Artificial Sequence: Synthetic oligonucleotide
  Antisense strand to SEQ ID NO: 1842873
uguauggcuaaucacuuca

SEQ ID NO: 1842875 - RNA, 19 nt, Artificial Sequence
  Description of Artificial Sequence: Synthetic oligonucleotide
  Sense strand starting at position 1327 of SEQ ID NO: 1563929
agugauuagccauacaauu

SEQ ID NO: 1842876 - RNA, 19 nt, Artificial Sequence
  Description of Artificial Sequence: Synthetic oligonucleotide
  Antisense strand to SEQ ID NO: 1842875
aauuguauggcuaaucacu

SEQ ID NO: 1842877 - RNA, 19 nt, Artificial Sequence
  Description of Artificial Sequence: Synthetic oligonucleotide
  Sense strand starting at position 1455 of SEQ ID NO: 1563929
cuagguaauguaggccaaa

SEQ ID NO: 1842878 - RNA, 19 nt, Artificial Sequence
  Description of Artificial Sequence: Synthetic oligonucleotide
  Antisense strand to SEQ ID NO: 1842877
uuuggccuacauuaccuag

SEQ ID NO: 1842879 - RNA, 19 nt, Artificial Sequence
  Description of Artificial Sequence: Synthetic oligonucleotide
  Sense strand starting at position 2017 of SEQ ID NO: 1563929
ggugaccuccuuugaccaa

SEQ ID NO: 1842880 - RNA, 19 nt, Artificial Sequence
  Description of Artificial Sequence: Synthetic oligonucleotide
  Antisense strand to SEQ ID NO: 1842879
uuggucaaaggaggucacc

SEQ ID NO: 1842881 - RNA, 19 nt, Artificial Sequence
  Description of Artificial Sequence: Synthetic oligonucleotide
  Sense strand starting at position 2207 of SEQ ID NO: 1563929
ggguguucugauuauaagc

SEQ ID NO: 1842882 - RNA, 19 nt, Artificial Sequence
  Description of Artificial Sequence: Synthetic oligonucleotide
  Antisense strand to SEQ ID NO: 1842881
gcuuauaaucagaacaccc

SEQ ID NO: 1842883 - RNA, 19 nt, Artificial Sequence
  Description of Artificial Sequence: Synthetic oligonucleotide
  Sense strand starting at position 2793 of SEQ ID NO: 1563929
gucucugguucucugauau

SEQ ID NO: 1842884 - RNA, 19 nt, Artificial Sequence
  Description of Artificial Sequence: Synthetic oligonucleotide
  Antisense strand to SEQ ID NO: 1842883
auaucagagaaccagagac

SEQ ID NO: 1842885 - RNA, 19 nt, Artificial Sequence
  Description of Artificial Sequence: Synthetic oligonucleotide
  Sense strand starting at position 2851 of SEQ ID NO: 1563929
auguguuguccucugcagu

SEQ ID NO: 1842886 - RNA, 19 nt, Artificial Sequence
  Description of Artificial Sequence: Synthetic oligonucleotide
  Antisense strand to SEQ ID NO: 1842885
acugcagaggacaacacau

SEQ ID NO: 1842887 - RNA, 19 nt, Artificial Sequence
  Description of Artificial Sequence: Synthetic oligonucleotide
  Sense strand starting at position 3041 of SEQ ID NO: 1563929
agucaucuucuggaaugca

SEQ ID NO: 1842888 - RNA, 19 nt, Artificial Sequence
  Description of Artificial Sequence: Synthetic oligonucleotide
  Antisense strand to SEQ ID NO: 1842887
ugcauuccagaagaugacu

SEQ ID NO: 1842889 - RNA, 19 nt, Artificial Sequence
  Description of Artificial Sequence: Synthetic oligonucleotide
  Sense strand starting at position 3133 of SEQ ID NO: 1563929
gggcaaauaucuuugucua

SEQ ID NO: 1842890 - RNA, 19 nt, Artificial Sequence
  Description of Artificial Sequence: Synthetic oligonucleotide
  Antisense strand to SEQ ID NO: 1842889
uagacaaagauauuugccc

SEQ ID NO: 1842891 - RNA, 19 nt, Artificial Sequence
  Description of Artificial Sequence: Synthetic oligonucleotide
  Sense strand starting at position 3134 of SEQ ID NO: 1563929
ggcaaauaucuuugucuau

SEQ ID NO: 1842892 - RNA, 19 nt, Artificial Sequence
  Description of Artificial Sequence: Synthetic oligonucleotide
  Antisense strand to SEQ ID NO: 1842891
auagacaaagauauuugcc

SEQ ID NO: 1842893 - RNA, 19 nt, Artificial Sequence
  Description of Artificial Sequence: Synthetic oligonucleotide
  Sense strand starting at position 3156 of SEQ ID NO: 1563929
ucauuaauguacccuaagu

SEQ ID NO: 1842894 - RNA, 19 nt, Artificial Sequence
  Description of Artificial Sequence: Synthetic oligonucleotide
  Antisense strand to SEQ ID NO: 1842893
acuuaggguacauuaauga

SEQ ID NO: 1842895 - RNA, 19 nt, Artificial Sequence
  Description of Artificial Sequence: Synthetic oligonucleotide
  Sense strand starting at position 3307 of SEQ ID NO: 1563929
guaacagccuggcuuuaga

SEQ ID NO: 1842896 - RNA, 19 nt, Artificial Sequence
  Description of Artificial Sequence: Synthetic oligonucleotide
  Antisense strand to SEQ ID NO: 1842895
ucuaaagccaggcuguuac

SEQ ID NO: 1842897 - RNA, 19 nt, Artificial Sequence
  Description of Artificial Sequence: Synthetic oligonucleotide
  Sense strand starting at position 3310 of SEQ ID NO: 1563929
acagccuggcuuuagauau

SEQ ID NO: 1842898 - RNA, 19 nt, Artificial Sequence
  Description of Artificial Sequence: Synthetic oligonucleotide
  Antisense strand to SEQ ID NO: 1842897
auaucuaaagccaggcugu

SEQ ID NO: 1842899 - RNA, 19 nt, Artificial Sequence
  Description of Artificial Sequence: Synthetic oligonucleotide
  Sense strand starting at position 3317 of SEQ ID NO: 1563929
ggcuuuagauaucccuaua

SEQ ID NO: 1842900 - RNA, 19 nt, Artificial Sequence
  Description of Artificial Sequence: Synthetic oligonucleotide
  Antisense strand to SEQ ID NO: 1842899
uauagggauaucuaaagcc

SEQ ID NO: 1842901 - RNA, 19 nt, Artificial Sequence
  Description of Artificial Sequence: Synthetic oligonucleotide
  Sense strand starting at position 3341 of SEQ ID NO: 1563929
cuuccuuacuuaguguaca

SEQ ID NO: 1842902 - RNA, 19 nt, Artificial Sequence
  Description of Artificial Sequence: Synthetic oligonucleotide
  Antisense strand to SEQ ID NO: 1842901
uguacacuaaguaaggaag

SEQ ID NO: 1842903 - RNA, 19 nt, Artificial Sequence
  Description of Artificial Sequence: Synthetic oligonucleotide
  Sense strand starting at position 3352 of SEQ ID NO: 1563929
aguguacaucucugaucac

SEQ ID NO: 1842904 - RNA, 19 nt, Artificial Sequence
  Description of Artificial Sequence: Synthetic oligonucleotide
  Antisense strand to SEQ ID NO: 1842903
gugaucagagauguacacu

SEQ ID NO: 1842905 - RNA, 19 nt, Artificial Sequence
  Description of Artificial Sequence: Synthetic oligonucleotide
  Sense strand starting at position 3355 of SEQ ID NO: 1563929
guacaucucugaucaccuu

SEQ ID NO: 1842906 - RNA, 19 nt, Artificial Sequence
  Description of Artificial Sequence: Synthetic oligonucleotide
  Antisense strand to SEQ ID NO: 1842905
aaggugaucagagauguac

SEQ ID NO: 1842907 - RNA, 19 nt, Artificial Sequence
  Description of Artificial Sequence: Synthetic oligonucleotide
  Sense strand starting at position 3531 of SEQ ID NO: 1563929
gguaaugggcaucagguau

SEQ ID NO: 1842908 - RNA, 19 nt, Artificial Sequence
  Description of Artificial Sequence: Synthetic oligonucleotide
  Antisense strand to SEQ ID NO: 1842907
auaccugaugcccauuacc

SEQ ID NO: 1842909 - RNA, 19 nt, Artificial Sequence
  Description of Artificial Sequence: Synthetic oligonucleotide
  Sense strand starting at position 3535 of SEQ ID NO: 1563929
augggcaucagguaucuua

SEQ ID NO: 1842910 - RNA, 19 nt, Artificial Sequence
  Description of Artificial Sequence: Synthetic oligonucleotide
  Antisense strand to SEQ ID NO: 1842909
uaagauaccugaugcccau

SEQ ID NO: 1842911 - RNA, 19 nt, Artificial Sequence
  Description of Artificial Sequence: Synthetic oligonucleotide
  Sense strand starting at position 3553 of SEQ ID NO: 1563929
aggauugaauccguggcau

SEQ ID NO: 1842912 - RNA, 19 nt, Artificial Sequence
  Description of Artificial Sequence: Synthetic oligonucleotide
  Antisense strand to SEQ ID NO: 1842911
augccacggauucaauccu

SEQ ID NO: 1842913 - RNA, 19 nt, Artificial Sequence
  Description of Artificial Sequence: Synthetic oligonucleotide
  Sense strand starting at position 3555 of SEQ ID NO: 1563929
gauugaauccguggcauua

SEQ ID NO: 1842914 - RNA, 19 nt, Artificial Sequence
  Description of Artificial Sequence: Synthetic oligonucleotide
  Antisense strand to SEQ ID NO: 1842913
uaaugccacggauucaauc

SEQ ID NO: 1842915 - RNA, 19 nt, Artificial Sequence
  Description of Artificial Sequence: Synthetic oligonucleotide
  Sense strand starting at position 3662 of SEQ ID NO: 1563929
cucauaaggcugugaugac

SEQ ID NO: 1842916 - RNA, 19 nt, Artificial Sequence
  Description of Artificial Sequence: Synthetic oligonucleotide
  Antisense strand to SEQ ID NO: 1842915
gucaucacagccuuaugag

SEQ ID NO: 1842917 - RNA, 19 nt, Artificial Sequence
  Description of Artificial Sequence: Synthetic oligonucleotide
  Sense strand starting at position 3779 of SEQ ID NO: 1563929
gugauaagugcagauuccu

SEQ ID NO: 1842918 - RNA, 19 nt, Artificial Sequence
  Description of Artificial Sequence: Synthetic oligonucleotide
  Antisense strand to SEQ ID NO: 1842917
aggaaucugcacuuaucac

SEQ ID NO: 1842919 - RNA, 19 nt, Artificial Sequence
  Description of Artificial Sequence: Synthetic oligonucleotide
  Sense strand starting at position 3788 of SEQ ID NO: 1563929
gcagauuccuguucugaua

SEQ ID NO: 1842920 - RNA, 19 nt, Artificial Sequence
  Description of Artificial Sequence: Synthetic oligonucleotide
  Antisense strand to SEQ ID NO: 1842919
uaucagaacaggaaucugc

SEQ ID NO: 1842921 - RNA, 19 nt, Artificial Sequence
  Description of Artificial Sequence: Synthetic oligonucleotide
  Sense strand starting at position 3978 of SEQ ID NO: 1563929
uuugcuaggcuuuagggaa

SEQ ID NO: 1842922 - RNA, 19 nt, Artificial Sequence
  Description of Artificial Sequence: Synthetic oligonucleotide
  Antisense strand to SEQ ID NO: 1842921
uucccuaaagccuagcaaa

SEQ ID NO: 1842923 - RNA, 19 nt, Artificial Sequence
  Description of Artificial Sequence: Synthetic oligonucleotide
  Sense strand starting at position 48 of SEQ ID NO: 1563930
uuggguucccagggagaaa

SEQ ID NO: 1842924 - RNA, 19 nt, Artificial Sequence
  Description of Artificial Sequence: Synthetic oligonucleotide
  Antisense strand to SEQ ID NO: 1842923
uuucucccugggaacccaa

SEQ ID NO: 1842925 - RNA, 19 nt, Artificial Sequence
  Description of Artificial Sequence: Synthetic oligonucleotide
  Sense strand starting at position 319 of SEQ ID NO: 1563930
uccaguugugaguaaaugu

SEQ ID NO: 1842926 - RNA, 19 nt, Artificial Sequence
  Description of Artificial Sequence: Synthetic oligonucleotide
  Antisense strand to SEQ ID NO: 1842925
acauuuacucacaacugga

SEQ ID NO: 1842927 - RNA, 19 nt, Artificial Sequence
  Description of Artificial Sequence: Synthetic oligonucleotide
  Sense strand starting at position 342 of SEQ ID NO: 1563930
gauaaauugcuguggauuc

SEQ ID NO: 1842928 - RNA, 19 nt, Artificial Sequence
  Description of Artificial Sequence: Synthetic oligonucleotide
  Antisense strand to SEQ ID NO: 1842927
gaauccacagcaauuuauc

SEQ ID NO: 1842929 - RNA, 19 nt, Artificial Sequence
  Description of Artificial Sequence: Synthetic oligonucleotide
  Sense strand starting at position 544 of SEQ ID NO: 1563930
ccugacugguaucuccaaa

SEQ ID NO: 1842930 - RNA, 19 nt, Artificial Sequence
  Description of Artificial Sequence: Synthetic oligonucleotide
  Antisense strand to SEQ ID NO: 1842929
uuuggagauaccagucagg

SEQ ID NO: 1842931 - RNA, 19 nt, Artificial Sequence
  Description of Artificial Sequence: Synthetic oligonucleotide
  Sense strand starting at position 585 of SEQ ID NO: 1563930
aauaaagauugaggaaaug

SEQ ID NO: 1842932 - RNA, 19 nt, Artificial Sequence
  Description of Artificial Sequence: Synthetic oligonucleotide
  Antisense strand to SEQ ID NO: 1842931
cauuuccucaaucuuuauu

SEQ ID NO: 1842933 - RNA, 19 nt, Artificial Sequence
  Description of Artificial Sequence: Synthetic oligonucleotide
  Sense strand starting at position 595 of SEQ ID NO: 1563930
gaggaaaugucagccugga

SEQ ID NO: 1842934 - RNA, 19 nt, Artificial Sequence
  Description of Artificial Sequence: Synthetic oligonucleotide
  Antisense strand to SEQ ID NO: 1842933
uccaggcugacauuuccuc

SEQ ID NO: 1842935 - RNA, 19 nt, Artificial Sequence
  Description of Artificial Sequence: Synthetic oligonucleotide
  Sense strand starting at position 646 of SEQ ID NO: 1563930
ugaagcguccuggauaaga

SEQ ID NO: 1842936 - RNA, 19 nt, Artificial Sequence
  Description of Artificial Sequence: Synthetic oligonucleotide
  Antisense strand to SEQ ID NO: 1842935
ucuuauccaggacgcuuca

SEQ ID NO: 1842937 - RNA, 19 nt, Artificial Sequence
  Description of Artificial Sequence: Synthetic oligonucleotide
  Sense strand starting at position 648 of SEQ ID NO: 1563930
aagcguccuggauaagauc

SEQ ID NO: 1842938 - RNA, 19 nt, Artificial Sequence
  Description of Artificial Sequence: Synthetic oligonucleotide
  Antisense strand to SEQ ID NO: 1842937
gaucuuauccaggacgcuu

SEQ ID NO: 1842939 - RNA, 19 nt, Artificial Sequence
  Description of Artificial Sequence: Synthetic oligonucleotide
  Sense strand starting at position 687 of SEQ ID NO: 1563930
cagugagauaucuggugaa

SEQ ID NO: 1842940 - RNA, 19 nt, Artificial Sequence
  Description of Artificial Sequence: Synthetic oligonucleotide
  Antisense strand to SEQ ID NO: 1842939
uucaccagauaucucacug

SEQ ID NO: 1842941 - RNA, 19 nt, Artificial Sequence
  Description of Artificial Sequence: Synthetic oligonucleotide
  Sense strand starting at position 759 of SEQ ID NO: 1563930
gguaauuaacaucgaugua

SEQ ID NO: 1842942 - RNA, 19 nt, Artificial Sequence
  Description of Artificial Sequence: Synthetic oligonucleotide
  Antisense strand to SEQ ID NO: 1842941
uacaucgauguuaauuacc

SEQ ID NO: 1842943 - RNA, 19 nt, Artificial Sequence
  Description of Artificial Sequence: Synthetic oligonucleotide
  Sense strand starting at position 760 of SEQ ID NO: 1563930
guaauuaacaucgauguag

SEQ ID NO: 1842944 - RNA, 19 nt, Artificial Sequence
  Description of Artificial Sequence: Synthetic oligonucleotide
  Antisense strand to SEQ ID NO: 1842943
cuacaucgauguuaauuac

SEQ ID NO: 1842945 - RNA, 19 nt, Artificial Sequence
  Description of Artificial Sequence: Synthetic oligonucleotide
  Sense strand starting at position 762 of SEQ ID NO: 1563930
aauuaacaucgauguagua

SEQ ID NO: 1842946 - RNA, 19 nt, Artificial Sequence
  Description of Artificial Sequence: Synthetic oligonucleotide
  Antisense strand to SEQ ID NO: 1842945
uacuacaucgauguuaauu

SEQ ID NO: 1842947 - RNA, 19 nt, Artificial Sequence
  Description of Artificial Sequence: Synthetic oligonucleotide
  Sense strand starting at position 782 of SEQ ID NO: 1563930
ugucaauuagugcaucaau

SEQ ID NO: 1842948 - RNA, 19 nt, Artificial Sequence
  Description of Artificial Sequence: Synthetic oligonucleotide
  Antisense strand to SEQ ID NO: 1842947
auugaugcacuaauugaca

SEQ ID NO: 1842949 - RNA, 19 nt, Artificial Sequence
  Description of Artificial Sequence: Synthetic oligonucleotide
  Sense strand starting at position 871 of SEQ ID NO: 1563930
gagggcucucuguauaauc

SEQ ID NO: 1842950 - RNA, 19 nt, Artificial Sequence
  Description of Artificial Sequence: Synthetic oligonucleotide
  Antisense strand to SEQ ID NO: 1842949
gauuauacagagagcccuc

SEQ ID NO: 1842951 - RNA, 19 nt, Artificial Sequence
  Description of Artificial Sequence: Synthetic oligonucleotide
  Sense strand starting at position 873 of SEQ ID NO: 1563930
gggcucucuguauaaucau

SEQ ID NO: 1842952 - RNA, 19 nt, Artificial Sequence
  Description of Artificial Sequence: Synthetic oligonucleotide
  Antisense strand to SEQ ID NO: 1842951
augauuauacagagagccc

SEQ ID NO: 1842953 - RNA, 19 nt, Artificial Sequence
  Description of Artificial Sequence: Synthetic oligonucleotide
  Sense strand starting at position 1007 of SEQ ID NO: 1563930
gaaacauaguuagaaggau

SEQ ID NO: 1842954 - RNA, 19 nt, Artificial Sequence
  Description of Artificial Sequence: Synthetic oligonucleotide
  Antisense strand to SEQ ID NO: 1842953
auccuucuaacuauguuuc

SEQ ID NO: 1842955 - RNA, 19 nt, Artificial Sequence
  Description of Artificial Sequence: Synthetic oligonucleotide
  Sense strand starting at position 1323 of SEQ ID NO: 1563930
acaugaagugauuagccau

SEQ ID NO: 1842956 - RNA, 19 nt, Artificial Sequence
  Description of Artificial Sequence: Synthetic oligonucleotide
  Antisense strand to SEQ ID NO: 1842955
auggcuaaucacuucaugu

SEQ ID NO: 1842957 - RNA, 19 nt, Artificial Sequence
  Description of Artificial Sequence: Synthetic oligonucleotide
  Sense strand starting at position 1326 of SEQ ID NO: 1563930
ugaagugauuagccauaca

SEQ ID NO: 1842958 - RNA, 19 nt, Artificial Sequence
  Description of Artificial Sequence: Synthetic oligonucleotide
  Antisense strand to SEQ ID NO: 1842957
uguauggcuaaucacuuca

SEQ ID NO: 1842959 - RNA, 19 nt, Artificial Sequence
  Description of Artificial Sequence: Synthetic oligonucleotide
  Sense strand starting at position 1329 of SEQ ID NO: 1563930
agugauuagccauacaauu

SEQ ID NO: 1842960 - RNA, 19 nt, Artificial Sequence
  Description of Artificial Sequence: Synthetic oligonucleotide
  Antisense strand to SEQ ID NO: 1842959
aauuguauggcuaaucacu

SEQ ID NO: 1842961 - RNA, 19 nt, Artificial Sequence
  Description of Artificial Sequence: Synthetic oligonucleotide
  Sense strand starting at position 1457 of SEQ ID NO: 1563930
cuagguaauguaggccaaa

SEQ ID NO: 1842962 - RNA, 19 nt, Artificial Sequence
  Description of Artificial Sequence: Synthetic oligonucleotide
  Antisense strand to SEQ ID NO: 1842961
uuuggccuacauuaccuag

SEQ ID NO: 1842963 - RNA, 19 nt, Artificial Sequence
  Description of Artificial Sequence: Synthetic oligonucleotide
  Sense strand starting at position 1869 of SEQ ID NO: 1563930
gaagaagacuuggaaccaa

SEQ ID NO: 1842964 - RNA, 19 nt, Artificial Sequence
  Description of Artificial Sequence: Synthetic oligonucleotide
  Antisense strand to SEQ ID NO: 1842963
uugguuccaagucuucuuc

SEQ ID NO: 1842965 - RNA, 19 nt, Artificial Sequence
  Description of Artificial Sequence: Synthetic oligonucleotide
  Sense strand starting at position 2016 of SEQ ID NO: 1563930
ggugaccuccuuugaccaa

SEQ ID NO: 1842966 - RNA, 19 nt, Artificial Sequence
  Description of Artificial Sequence: Synthetic oligonucleotide
  Antisense strand to SEQ ID NO: 1842965
uuggucaaaggaggucacc

SEQ ID NO: 1842967 - RNA, 19 nt, Artificial Sequence
  Description of Artificial Sequence: Synthetic oligonucleotide
  Sense strand starting at position 2206 of SEQ ID NO: 1563930
ggguguucugauuauaagc

SEQ ID NO: 1842968 - RNA, 19 nt, Artificial Sequence
  Description of Artificial Sequence: Synthetic oligonucleotide
  Antisense strand to SEQ ID NO: 1842967
gcuuauaaucagaacaccc

SEQ ID NO: 1842969 - RNA, 19 nt, Artificial Sequence
  Description of Artificial Sequence: Synthetic oligonucleotide
  Sense strand starting at position 2851 of SEQ ID NO: 1563930
auguguuguccucugcagu

SEQ ID NO: 1842970 - RNA, 19 nt, Artificial Sequence
  Description of Artificial Sequence: Synthetic oligonucleotide
  Antisense strand to SEQ ID NO: 1842969
acugcagaggacaacacau

SEQ ID NO: 1842971 - RNA, 19 nt, Artificial Sequence
  Description of Artificial Sequence: Synthetic oligonucleotide
  Sense strand starting at position 3041 of SEQ ID NO: 1563930
agucaucuucuggaaugca

SEQ ID NO: 1842972 - RNA, 19 nt, Artificial Sequence
  Description of Artificial Sequence: Synthetic oligonucleotide
  Antisense strand to SEQ ID NO: 1842971
ugcauuccagaagaugacu

SEQ ID NO: 1842973 - RNA, 19 nt, Artificial Sequence
  Description of Artificial Sequence: Synthetic oligonucleotide
  Sense strand starting at position 3133 of SEQ ID NO: 1563930
gggcaaauaucuuugucua

SEQ ID NO: 1842974 - RNA, 19 nt, Artificial Sequence
  Description of Artificial Sequence: Synthetic oligonucleotide
  Antisense strand to SEQ ID NO: 1842973
uagacaaagauauuugccc

SEQ ID NO: 1842975 - RNA, 19 nt, Artificial Sequence
  Description of Artificial Sequence: Synthetic oligonucleotide
  Sense strand starting at position 3134 of SEQ ID NO: 1563930
ggcaaauaucuuugucuau

SEQ ID NO: 1842976 - RNA, 19 nt, Artificial Sequence
  Description of Artificial Sequence: Synthetic oligonucleotide
  Antisense strand to SEQ ID NO: 1842975
auagacaaagauauuugcc

SEQ ID NO: 1842977 - RNA, 19 nt, Artificial Sequence
  Description of Artificial Sequence: Synthetic oligonucleotide
  Sense strand starting at position 3156 of SEQ ID NO: 1563930
ucauuaauguacccuaagu

SEQ ID NO: 1842978 - RNA, 19 nt, Artificial Sequence
  Description of Artificial Sequence: Synthetic oligonucleotide
  Antisense strand to SEQ ID NO: 1842977
acuuaggguacauuaauga

SEQ ID NO: 1842979 - RNA, 19 nt, Artificial Sequence
  Description of Artificial Sequence: Synthetic oligonucleotide
  Sense strand starting at position 3310 of SEQ ID NO: 1563930
acagccuggcuuuagauau

SEQ ID NO: 1842980 - RNA, 19 nt, Artificial Sequence
  Description of Artificial Sequence: Synthetic oligonucleotide
  Antisense strand to SEQ ID NO: 1842979
auaucuaaagccaggcugu

SEQ ID NO: 1842981 - RNA, 19 nt, Artificial Sequence
  Description of Artificial Sequence: Synthetic oligonucleotide
  Sense strand starting at position 3317 of SEQ ID NO: 1563930
ggcuuuagauaucccuaua

SEQ ID NO: 1842982 - RNA, 19 nt, Artificial Sequence
  Description of Artificial Sequence: Synthetic oligonucleotide
  Antisense strand to SEQ ID NO: 1842981
uauagggauaucuaaagcc

SEQ ID NO: 1842983 - RNA, 19 nt, Artificial Sequence
  Description of Artificial Sequence: Synthetic oligonucleotide
  Sense strand starting at position 3352 of SEQ ID NO: 1563930
aguguacaucucugaucac

SEQ ID NO: 1842984 - RNA, 19 nt, Artificial Sequence
  Description of Artificial Sequence: Synthetic oligonucleotide
  Antisense strand to SEQ ID NO: 1842983
gugaucagagauguacacu

SEQ ID NO: 1842985 - RNA, 19 nt, Artificial Sequence
  Description of Artificial Sequence: Synthetic oligonucleotide
  Sense strand starting at position 3355 of SEQ ID NO: 1563930
guacaucucugaucaccuu

SEQ ID NO: 1842986 - RNA, 19 nt, Artificial Sequence
  Description of Artificial Sequence: Synthetic oligonucleotide
  Antisense strand to SEQ ID NO: 1842985
aaggugaucagagauguac

SEQ ID NO: 1842987 - RNA, 19 nt, Artificial Sequence
  Description of Artificial Sequence: Synthetic oligonucleotide
  Sense strand starting at position 3531 of SEQ ID NO: 1563930
gguaaugggcaucagguau

SEQ ID NO: 1842988 - RNA, 19 nt, Artificial Sequence
  Description of Artificial Sequence: Synthetic oligonucleotide
  Antisense strand to SEQ ID NO: 1842987
auaccugaugcccauuacc

SEQ ID NO: 1842989 - RNA, 19 nt, Artificial Sequence
  Description of Artificial Sequence: Synthetic oligonucleotide
  Sense strand starting at position 3535 of SEQ ID NO: 1563930
augggcaucagguaucuua

SEQ ID NO: 1842990 - RNA, 19 nt, Artificial Sequence
  Description of Artificial Sequence: Synthetic oligonucleotide
  Antisense strand to SEQ ID NO: 1842989
uaagauaccugaugcccau

SEQ ID NO: 1842991 - RNA, 19 nt, Artificial Sequence
  Description of Artificial Sequence: Synthetic oligonucleotide
  Sense strand starting at position 3553 of SEQ ID NO: 1563930
aggauugaauccguggcau

SEQ ID NO: 1842992 - RNA, 19 nt, Artificial Sequence
  Description of Artificial Sequence: Synthetic oligonucleotide
  Antisense strand to SEQ ID NO: 1842991
augccacggauucaauccu

SEQ ID NO: 1842993 - RNA, 19 nt, Artificial Sequence
  Description of Artificial Sequence: Synthetic oligonucleotide
  Sense strand starting at position 3555 of SEQ ID NO: 1563930
gauugaauccguggcauua

SEQ ID NO: 1842994 - RNA, 19 nt, Artificial Sequence
  Description of Artificial Sequence: Synthetic oligonucleotide
  Antisense strand to SEQ ID NO: 1842993
uaaugccacggauucaauc

SEQ ID NO: 1842995 - RNA, 19 nt, Artificial Sequence
  Description of Artificial Sequence: Synthetic oligonucleotide
  Sense strand starting at position 3662 of SEQ ID NO: 1563930
cucauaaggcugugaugac

SEQ ID NO: 1842996 - RNA, 19 nt, Artificial Sequence
  Description of Artificial Sequence: Synthetic oligonucleotide
  Antisense strand to SEQ ID NO: 1842995
gucaucacagccuuaugag

SEQ ID NO: 1842997 - RNA, 19 nt, Artificial Sequence
  Description of Artificial Sequence: Synthetic oligonucleotide
  Sense strand starting at position 3779 of SEQ ID NO: 1563930
gugauaagugcagauuccu

SEQ ID NO: 1842998 - RNA, 19 nt, Artificial Sequence
  Description of Artificial Sequence: Synthetic oligonucleotide
  Antisense strand to SEQ ID NO: 1842997
aggaaucugcacuuaucac

SEQ ID NO: 1842999 - RNA, 19 nt, Artificial Sequence
  Description of Artificial Sequence: Synthetic oligonucleotide
  Sense strand starting at position 3788 of SEQ ID NO: 1563930
gcagauuccuguucugaua

SEQ ID NO: 1843000 - RNA, 19 nt, Artificial Sequence
  Description of Artificial Sequence: Synthetic oligonucleotide
  Antisense strand to SEQ ID NO: 1842999
uaucagaacaggaaucugc

SEQ ID NO: 1843001 - RNA, 19 nt, Artificial Sequence
  Description of Artificial Sequence: Synthetic oligonucleotide
  Sense strand starting at position 3978 of SEQ ID NO: 1563930
uuugcuaggcuuuagggaa

SEQ ID NO: 1843002 - RNA, 19 nt, Artificial Sequence
  Description of Artificial Sequence: Synthetic oligonucleotide
  Antisense strand to SEQ ID NO: 1843001
uucccuaaagccuagcaaa

SEQ ID NO: 1843003 - RNA, 19 nt, Artificial Sequence
  Description of Artificial Sequence: Synthetic oligonucleotide
  Sense strand starting at position 47 of SEQ ID NO: 1563931
uuggguucccagggagaaa

SEQ ID NO: 1843004 - RNA, 19 nt, Artificial Sequence
  Description of Artificial Sequence: Synthetic oligonucleotide
  Antisense strand to SEQ ID NO: 1843003
uuucucccugggaacccaa

SEQ ID NO: 1843005 - RNA, 19 nt, Artificial Sequence
  Description of Artificial Sequence: Synthetic oligonucleotide
  Sense strand starting at position 318 of SEQ ID NO: 1563931
uccaguugugaguaaaugu

SEQ ID NO: 1843006 - RNA, 19 nt, Artificial Sequence
  Description of Artificial Sequence: Synthetic oligonucleotide
  Antisense strand to SEQ ID NO: 1843005
acauuuacucacaacugga

SEQ ID NO: 1843007 - RNA, 19 nt, Artificial Sequence
  Description of Artificial Sequence: Synthetic oligonucleotide
  Sense strand starting at position 327 of SEQ ID NO: 1563931
gaguaaauguuacugauaa

SEQ ID NO: 1843008 - RNA, 19 nt, Artificial Sequence
  Description of Artificial Sequence: Synthetic oligonucleotide
  Antisense strand to SEQ ID NO: 1843007
uuaucaguaacauuuacuc

SEQ ID NO: 1843009 - RNA, 19 nt, Artificial Sequence
  Description of Artificial Sequence: Synthetic oligonucleotide
  Sense strand starting at position 341 of SEQ ID NO: 1563931
gauaaauugcuguggauuc

SEQ ID NO: 1843010 - RNA, 19 nt, Artificial Sequence
  Description of Artificial Sequence: Synthetic oligonucleotide
  Antisense strand to SEQ ID NO: 1843009
gaauccacagcaauuuauc

SEQ ID NO: 1843011 - RNA, 19 nt, Artificial Sequence
  Description of Artificial Sequence: Synthetic oligonucleotide
  Sense strand starting at position 654 of SEQ ID NO: 1563931
uggauaagauccuagaaua

SEQ ID NO: 1843012 - RNA, 19 nt, Artificial Sequence
  Description of Artificial Sequence: Synthetic oligonucleotide
  Antisense strand to SEQ ID NO: 1843011
uauucuaggaucuuaucca

SEQ ID NO: 1843013 - RNA, 19 nt, Artificial Sequence
  Description of Artificial Sequence: Synthetic oligonucleotide
  Sense strand starting at position 685 of SEQ ID NO: 1563931
cagugagauaucuggugaa

SEQ ID NO: 1843014 - RNA, 19 nt, Artificial Sequence
  Description of Artificial Sequence: Synthetic oligonucleotide
  Antisense strand to SEQ ID NO: 1843013
uucaccagauaucucacug

SEQ ID NO: 1843015 - RNA, 19 nt, Artificial Sequence
  Description of Artificial Sequence: Synthetic oligonucleotide
  Sense strand starting at position 757 of SEQ ID NO: 1563931
gguaauuaacaucgaugua

SEQ ID NO: 1843016 - RNA, 19 nt, Artificial Sequence
  Description of Artificial Sequence: Synthetic oligonucleotide
  Antisense strand to SEQ ID NO: 1843015
uacaucgauguuaauuacc

SEQ ID NO: 1843017 - RNA, 19 nt, Artificial Sequence
  Description of Artificial Sequence: Synthetic oligonucleotide
  Sense strand starting at position 758 of SEQ ID NO: 1563931
guaauuaacaucgauguag

SEQ ID NO: 1843018 - RNA, 19 nt, Artificial Sequence
  Description of Artificial Sequence: Synthetic oligonucleotide
  Antisense strand to SEQ ID NO: 1843017
cuacaucgauguuaauuac

SEQ ID NO: 1843019 - RNA, 19 nt, Artificial Sequence
  Description of Artificial Sequence: Synthetic oligonucleotide
  Sense strand starting at position 760 of SEQ ID NO: 1563931
aauuaacaucgauguagua

SEQ ID NO: 1843020 - RNA, 19 nt, Artificial Sequence
  Description of Artificial Sequence: Synthetic oligonucleotide
  Antisense strand to SEQ ID NO: 1843019
uacuacaucgauguuaauu

SEQ ID NO: 1843021 - RNA, 19 nt, Artificial Sequence
  Description of Artificial Sequence: Synthetic oligonucleotide
  Sense strand starting at position 780 of SEQ ID NO: 1563931
ugucaauuagugcaucaau

SEQ ID NO: 1843022 - RNA, 19 nt, Artificial Sequence
  Description of Artificial Sequence: Synthetic oligonucleotide
  Antisense strand to SEQ ID NO: 1843021
auugaugcacuaauugaca

SEQ ID NO: 1843023 - RNA, 19 nt, Artificial Sequence
  Description of Artificial Sequence: Synthetic oligonucleotide
  Sense strand starting at position 869 of SEQ ID NO: 1563931
gagggcucucuguauaauc

SEQ ID NO: 1843024 - RNA, 19 nt, Artificial Sequence
  Description of Artificial Sequence: Synthetic oligonucleotide
  Antisense strand to SEQ ID NO: 1843023
gauuauacagagagcccuc

SEQ ID NO: 1843025 - RNA, 19 nt, Artificial Sequence
  Description of Artificial Sequence: Synthetic oligonucleotide
  Sense strand starting at position 871 of SEQ ID NO: 1563931
gggcucucuguauaaucau

SEQ ID NO: 1843026 - RNA, 19 nt, Artificial Sequence
  Description of Artificial Sequence: Synthetic oligonucleotide
  Antisense strand to SEQ ID NO: 1843025
augauuauacagagagccc

SEQ ID NO: 1843027 - RNA, 19 nt, Artificial Sequence
  Description of Artificial Sequence: Synthetic oligonucleotide
  Sense strand starting at position 1005 of SEQ ID NO: 1563931
gaaacauaguuagaaggau

SEQ ID NO: 1843028 - RNA, 19 nt, Artificial Sequence
  Description of Artificial Sequence: Synthetic oligonucleotide
  Antisense strand to SEQ ID NO: 1843027
auccuucuaacuauguuuc

SEQ ID NO: 1843029 - RNA, 19 nt, Artificial Sequence
  Description of Artificial Sequence: Synthetic oligonucleotide
  Sense strand starting at position 1267 of SEQ ID NO: 1563931
auauaacuuucugaagaag

SEQ ID NO: 1843030 - RNA, 19 nt, Artificial Sequence
  Description of Artificial Sequence: Synthetic oligonucleotide
  Antisense strand to SEQ ID NO: 1843029
cuucuucagaaaguuauau

SEQ ID NO: 1843031 - RNA, 19 nt, Artificial Sequence
  Description of Artificial Sequence: Synthetic oligonucleotide
  Sense strand starting at position 1321 of SEQ ID NO: 1563931
acaugaagugauuagccau

SEQ ID NO: 1843032 - RNA, 19 nt, Artificial Sequence
  Description of Artificial Sequence: Synthetic oligonucleotide
  Antisense strand to SEQ ID NO: 1843031
auggcuaaucacuucaugu

SEQ ID NO: 1843033 - RNA, 19 nt, Artificial Sequence
  Description of Artificial Sequence: Synthetic oligonucleotide
  Sense strand starting at position 1324 of SEQ ID NO: 1563931
ugaagugauuagccauaca

SEQ ID NO: 1843034 - RNA, 19 nt, Artificial Sequence
  Description of Artificial Sequence: Synthetic oligonucleotide
  Antisense strand to SEQ ID NO: 1843033
uguauggcuaaucacuuca

SEQ ID NO: 1843035 - RNA, 19 nt, Artificial Sequence
  Description of Artificial Sequence: Synthetic oligonucleotide
  Sense strand starting at position 1327 of SEQ ID NO: 1563931
agugauuagccauacaauu

SEQ ID NO: 1843036 - RNA, 19 nt, Artificial Sequence
  Description of Artificial Sequence: Synthetic oligonucleotide
  Antisense strand to SEQ ID NO: 1843035
aauuguauggcuaaucacu

SEQ ID NO: 1843037 - RNA, 19 nt, Artificial Sequence
  Description of Artificial Sequence: Synthetic oligonucleotide
  Sense strand starting at position 1455 of SEQ ID NO: 1563931
cuagguaauguaggccaaa

SEQ ID NO: 1843038 - RNA, 19 nt, Artificial Sequence
  Description of Artificial Sequence: Synthetic oligonucleotide
  Antisense strand to SEQ ID NO: 1843037
uuuggccuacauuaccuag

SEQ ID NO: 1843039 - RNA, 19 nt, Artificial Sequence
  Description of Artificial Sequence: Synthetic oligonucleotide
  Sense strand starting at position 2017 of SEQ ID NO: 1563931
ggugaccuccuuugaccaa

SEQ ID NO: 1843040 - RNA, 19 nt, Artificial Sequence
  Description of Artificial Sequence: Synthetic oligonucleotide
  Antisense strand to SEQ ID NO: 1843039
uuggucaaaggaggucacc

SEQ ID NO: 1843041 - RNA, 19 nt, Artificial Sequence
  Description of Artificial Sequence: Synthetic oligonucleotide
  Sense strand starting at position 2207 of SEQ ID NO: 1563931
ggguguucugauuauaagc

SEQ ID NO: 1843042 - RNA, 19 nt, Artificial Sequence
  Description of Artificial Sequence: Synthetic oligonucleotide
  Antisense strand to SEQ ID NO: 1843041
gcuuauaaucagaacaccc

SEQ ID NO: 1843043 - RNA, 19 nt, Artificial Sequence
  Description of Artificial Sequence: Synthetic oligonucleotide
  Sense strand starting at position 2793 of SEQ ID NO: 1563931
gucucugguucucugauau

SEQ ID NO: 1843044 - RNA, 19 nt, Artificial Sequence
  Description of Artificial Sequence: Synthetic oligonucleotide
  Antisense strand to SEQ ID NO: 1843043
auaucagagaaccagagac

SEQ ID NO: 1843045 - RNA, 19 nt, Artificial Sequence
  Description of Artificial Sequence: Synthetic oligonucleotide
  Sense strand starting at position 2851 of SEQ ID NO: 1563931
auguguuguccucugcagu

SEQ ID NO: 1843046 - RNA, 19 nt, Artificial Sequence
  Description of Artificial Sequence: Synthetic oligonucleotide
  Antisense strand to SEQ ID NO: 1843045
acugcagaggacaacacau

SEQ ID NO: 1843047 - RNA, 19 nt, Artificial Sequence
  Description of Artificial Sequence: Synthetic oligonucleotide
  Sense strand starting at position 3041 of SEQ ID NO: 1563931
agucaucuucuggaaugca

SEQ ID NO: 1843048 - RNA, 19 nt, Artificial Sequence
  Description of Artificial Sequence: Synthetic oligonucleotide
  Antisense strand to SEQ ID NO: 1843047
ugcauuccagaagaugacu

SEQ ID NO: 1843049 - RNA, 19 nt, Artificial Sequence
  Description of Artificial Sequence: Synthetic oligonucleotide
  Sense strand starting at position 3133 of SEQ ID NO: 1563931
gggcaaauaucuuugucua

SEQ ID NO: 1843050 - RNA, 19 nt, Artificial Sequence
  Description of Artificial Sequence: Synthetic oligonucleotide
  Antisense strand to SEQ ID NO: 1843049
uagacaaagauauuugccc

SEQ ID NO: 1843051 - RNA, 19 nt, Artificial Sequence
  Description of Artificial Sequence: Synthetic oligonucleotide
  Sense strand starting at position 3134 of SEQ ID NO: 1563931
ggcaaauaucuuugucuau

SEQ ID NO: 1843052 - RNA, 19 nt, Artificial Sequence
  Description of Artificial Sequence: Synthetic oligonucleotide
  Antisense strand to SEQ ID NO: 1843051
auagacaaagauauuugcc

SEQ ID NO: 1843053 - RNA, 19 nt, Artificial Sequence
  Description of Artificial Sequence: Synthetic oligonucleotide
  Sense strand starting at position 3156 of SEQ ID NO: 1563931
ucauuaauguacccuaagu

SEQ ID NO: 1843054 - RNA, 19 nt, Artificial Sequence
  Description of Artificial Sequence: Synthetic oligonucleotide
  Antisense strand to SEQ ID NO: 1843053
acuuaggguacauuaauga

SEQ ID NO: 1843055 - RNA, 19 nt, Artificial Sequence
  Description of Artificial Sequence: Synthetic oligonucleotide
  Sense strand starting at position 3307 of SEQ ID NO: 1563931
guaacagccuggcuuuaga

SEQ ID NO: 1843056 - RNA, 19 nt, Artificial Sequence
  Description of Artificial Sequence: Synthetic oligonucleotide
  Antisense strand to SEQ ID NO: 1843055
ucuaaagccaggcuguuac

SEQ ID NO: 1843057 - RNA, 19 nt, Artificial Sequence
  Description of Artificial Sequence: Synthetic oligonucleotide
  Sense strand starting at position 3310 of SEQ ID NO: 1563931
acagccuggcuuuagauau

SEQ ID NO: 1843058 - RNA, 19 nt, Artificial Sequence
  Description of Artificial Sequence: Synthetic oligonucleotide
  Antisense strand to SEQ ID NO: 1843057
auaucuaaagccaggcugu

SEQ ID NO: 1843059 - RNA, 19 nt, Artificial Sequence
  Description of Artificial Sequence: Synthetic oligonucleotide
  Sense strand starting at position 3317 of SEQ ID NO: 1563931
ggcuuuagauaucccuaua

SEQ ID NO: 1843060 - RNA, 19 nt, Artificial Sequence
  Description of Artificial Sequence: Synthetic oligonucleotide
  Antisense strand to SEQ ID NO: 1843059
uauagggauaucuaaagcc

SEQ ID NO: 1843061 - RNA, 19 nt, Artificial Sequence
  Description of Artificial Sequence: Synthetic oligonucleotide
  Sense strand starting at position 3341 of SEQ ID NO: 1563931
cuuccuuacuuaguguaca

SEQ ID NO: 1843062 - RNA, 19 nt, Artificial Sequence
  Description of Artificial Sequence: Synthetic oligonucleotide
  Antisense strand to SEQ ID NO: 1843061
uguacacuaaguaaggaag

SEQ ID NO: 1843063 - RNA, 19 nt, Artificial Sequence
  Description of Artificial Sequence: Synthetic oligonucleotide
  Sense strand starting at position 3352 of SEQ ID NO: 1563931
aguguacaucucugaucac

SEQ ID NO: 1843064 - RNA, 19 nt, Artificial Sequence
  Description of Artificial Sequence: Synthetic oligonucleotide
  Antisense strand to SEQ ID NO: 1843063
gugaucagagauguacacu

SEQ ID NO: 1843065 - RNA, 19 nt, Artificial Sequence
  Description of Artificial Sequence: Synthetic oligonucleotide
  Sense strand starting at position 3355 of SEQ ID NO: 1563931
guacaucucugaucaccuu

SEQ ID NO: 1843066 - RNA, 19 nt, Artificial Sequence
  Description of Artificial Sequence: Synthetic oligonucleotide
  Antisense strand to SEQ ID NO: 1843065
aaggugaucagagauguac

SEQ ID NO: 1843067 - RNA, 19 nt, Artificial Sequence
  Description of Artificial Sequence: Synthetic oligonucleotide
  Sense strand starting at position 3531 of SEQ ID NO: 1563931
gguaaugggcaucagguau

SEQ ID NO: 1843068 - RNA, 19 nt, Artificial Sequence
  Description of Artificial Sequence: Synthetic oligonucleotide
  Antisense strand to SEQ ID NO: 1843067
auaccugaugcccauuacc

SEQ ID NO: 1843069 - RNA, 19 nt, Artificial Sequence
  Description of Artificial Sequence: Synthetic oligonucleotide
  Sense strand starting at position 3535 of SEQ ID NO: 1563931
augggcaucagguaucuua

SEQ ID NO: 1843070 - RNA, 19 nt, Artificial Sequence
  Description of Artificial Sequence: Synthetic oligonucleotide
  Antisense strand to SEQ ID NO: 1843069
uaagauaccugaugcccau

SEQ ID NO: 1843071 - RNA, 19 nt, Artificial Sequence
  Description of Artificial Sequence: Synthetic oligonucleotide
  Sense strand starting at position 3553 of SEQ ID NO: 1563931
aggauugaauccguggcau

SEQ ID NO: 1843072 - RNA, 19 nt, Artificial Sequence
  Description of Artificial Sequence: Synthetic oligonucleotide
  Antisense strand to SEQ ID NO: 1843071
augccacggauucaauccu

SEQ ID NO: 1843073 - RNA, 19 nt, Artificial Sequence
  Description of Artificial Sequence: Synthetic oligonucleotide
  Sense strand starting at position 3555 of SEQ ID NO: 1563931
gauugaauccguggcauua

SEQ ID NO: 1843074 - RNA, 19 nt, Artificial Sequence
  Description of Artificial Sequence: Synthetic oligonucleotide
  Antisense strand to SEQ ID NO: 1843073
uaaugccacggauucaauc

SEQ ID NO: 1843075 - RNA, 19 nt, Artificial Sequence
  Description of Artificial Sequence: Synthetic oligonucleotide
  Sense strand starting at position 3662 of SEQ ID NO: 1563931
cucauaaggcugugaugac

SEQ ID NO: 1843076 - RNA, 19 nt, Artificial Sequence
  Description of Artificial Sequence: Synthetic oligonucleotide
  Antisense strand to SEQ ID NO: 1843075
gucaucacagccuuaugag

SEQ ID NO: 1843077 - RNA, 19 nt, Artificial Sequence
  Description of Artificial Sequence: Synthetic oligonucleotide
  Sense strand starting at position 3779 of SEQ ID NO: 1563931
gugauaagugcagauuccu

SEQ ID NO: 1843078 - RNA, 19 nt, Artificial Sequence
  Description of Artificial Sequence: Synthetic oligonucleotide
  Antisense strand to SEQ ID NO: 1843077
aggaaucugcacuuaucac

SEQ ID NO: 1843079 - RNA, 19 nt, Artificial Sequence
  Description of Artificial Sequence: Synthetic oligonucleotide
  Sense strand starting at position 3788 of SEQ ID NO: 1563931
gcagauuccuguucugaua

SEQ ID NO: 1843080 - RNA, 19 nt, Artificial Sequence
  Description of Artificial Sequence: Synthetic oligonucleotide
  Antisense strand to SEQ ID NO: 1843079
uaucagaacaggaaucugc

SEQ ID NO: 1843081 - RNA, 19 nt, Artificial Sequence
  Description of Artificial Sequence: Synthetic oligonucleotide
  Sense strand starting at position 3978 of SEQ ID NO: 1563931
uuugcuaggcuuuagggaa

SEQ ID NO: 1843082 - RNA, 19 nt, Artificial Sequence
  Description of Artificial Sequence: Synthetic oligonucleotide
  Antisense strand to SEQ ID NO: 1843081
uucccuaaagccuagcaaa

SEQ ID NO: 1843083 - RNA, 19 nt, Artificial Sequence
  Description of Artificial Sequence: Synthetic oligonucleotide
  Sense strand starting at position 48 of SEQ ID NO: 1563932
uuggguucccagggagaaa

SEQ ID NO: 1843084 - RNA, 19 nt, Artificial Sequence
  Description of Artificial Sequence: Synthetic oligonucleotide
  Antisense strand to SEQ ID NO: 1843083
uuucucccugggaacccaa

SEQ ID NO: 1843085 - RNA, 19 nt, Artificial Sequence
  Description of Artificial Sequence: Synthetic oligonucleotide
  Sense strand starting at position 319 of SEQ ID NO: 1563932
uccaguugugaguaaaugu

SEQ ID NO: 1843086 - RNA, 19 nt, Artificial Sequence
  Description of Artificial Sequence: Synthetic oligonucleotide
  Antisense strand to SEQ ID NO: 1843085
acauuuacucacaacugga

SEQ ID NO: 1843087 - RNA, 19 nt, Artificial Sequence
  Description of Artificial Sequence: Synthetic oligonucleotide
  Sense strand starting at position 342 of SEQ ID NO: 1563932
gauaaauugcuguggauuc

SEQ ID NO: 1843088 - RNA, 19 nt, Artificial Sequence
  Description of Artificial Sequence: Synthetic oligonucleotide
  Antisense strand to SEQ ID NO: 1843087
gaauccacagcaauuuauc

SEQ ID NO: 1843089 - RNA, 19 nt, Artificial Sequence
  Description of Artificial Sequence: Synthetic oligonucleotide
  Sense strand starting at position 544 of SEQ ID NO: 1563932
ccugacugguaucuccaaa

SEQ ID NO: 1843090 - RNA, 19 nt, Artificial Sequence
  Description of Artificial Sequence: Synthetic oligonucleotide
  Antisense strand to SEQ ID NO: 1843089
uuuggagauaccagucagg

SEQ ID NO: 1843091 - RNA, 19 nt, Artificial Sequence
  Description of Artificial Sequence: Synthetic oligonucleotide
  Sense strand starting at position 585 of SEQ ID NO: 1563932
aauaaagauugaggaaaug

SEQ ID NO: 1843092 - RNA, 19 nt, Artificial Sequence
  Description of Artificial Sequence: Synthetic oligonucleotide
  Antisense strand to SEQ ID NO: 1843091
cauuuccucaaucuuuauu

SEQ ID NO: 1843093 - RNA, 19 nt, Artificial Sequence
  Description of Artificial Sequence: Synthetic oligonucleotide
  Sense strand starting at position 595 of SEQ ID NO: 1563932
gaggaaaugucagccugga

SEQ ID NO: 1843094 - RNA, 19 nt, Artificial Sequence
  Description of Artificial Sequence: Synthetic oligonucleotide
  Antisense strand to SEQ ID NO: 1843093
uccaggcugacauuuccuc

SEQ ID NO: 1843095 - RNA, 19 nt, Artificial Sequence
  Description of Artificial Sequence: Synthetic oligonucleotide
  Sense strand starting at position 646 of SEQ ID NO: 1563932
ugaagcguccuggauaaga

SEQ ID NO: 1843096 - RNA, 19 nt, Artificial Sequence
  Description of Artificial Sequence: Synthetic oligonucleotide
  Antisense strand to SEQ ID NO: 1843095
ucuuauccaggacgcuuca

SEQ ID NO: 1843097 - RNA, 19 nt, Artificial Sequence
  Description of Artificial Sequence: Synthetic oligonucleotide
  Sense strand starting at position 648 of SEQ ID NO: 1563932
aagcguccuggauaagauc

SEQ ID NO: 1843098 - RNA, 19 nt, Artificial Sequence
  Description of Artificial Sequence: Synthetic oligonucleotide
  Antisense strand to SEQ ID NO: 1843097
gaucuuauccaggacgcuu

SEQ ID NO: 1843099 - RNA, 19 nt, Artificial Sequence
  Description of Artificial Sequence: Synthetic oligonucleotide
  Sense strand starting at position 687 of SEQ ID NO: 1563932
cagugagauaucuggugaa

SEQ ID NO: 1843100 - RNA, 19 nt, Artificial Sequence
  Description of Artificial Sequence: Synthetic oligonucleotide
  Antisense strand to SEQ ID NO: 1843099
uucaccagauaucucacug

SEQ ID NO: 1843101 - RNA, 19 nt, Artificial Sequence
  Description of Artificial Sequence: Synthetic oligonucleotide
  Sense strand starting at position 759 of SEQ ID NO: 1563932
gguaauuaacaucgaugua

SEQ ID NO: 1843102 - RNA, 19 nt, Artificial Sequence
  Description of Artificial Sequence: Synthetic oligonucleotide
  Antisense strand to SEQ ID NO: 1843101
uacaucgauguuaauuacc

SEQ ID NO: 1843103 - RNA, 19 nt, Artificial Sequence
  Description of Artificial Sequence: Synthetic oligonucleotide
  Sense strand starting at position 760 of SEQ ID NO: 1563932
guaauuaacaucgauguag

SEQ ID NO: 1843104 - RNA, 19 nt, Artificial Sequence
  Description of Artificial Sequence: Synthetic oligonucleotide
  Antisense strand to SEQ ID NO: 1843103
cuacaucgauguuaauuac

SEQ ID NO: 1843105 - RNA, 19 nt, Artificial Sequence
  Description of Artificial Sequence: Synthetic oligonucleotide
  Sense strand starting at position 762 of SEQ ID NO: 1563932
aauuaacaucgauguagua

SEQ ID NO: 1843106 - RNA, 19 nt, Artificial Sequence
  Description of Artificial Sequence: Synthetic oligonucleotide
  Antisense strand to SEQ ID NO: 1843105
uacuacaucgauguuaauu

SEQ ID NO: 1843107 - RNA, 19 nt, Artificial Sequence
  Description of Artificial Sequence: Synthetic oligonucleotide
  Sense strand starting at position 782 of SEQ ID NO: 1563932
ugucaauuagugcaucaau

SEQ ID NO: 1843108 - RNA, 19 nt, Artificial Sequence
  Description of Artificial Sequence: Synthetic oligonucleotide
  Antisense strand to SEQ ID NO: 1843107
auugaugcacuaauugaca

SEQ ID NO: 1843109 - RNA, 19 nt, Artificial Sequence
  Description of Artificial Sequence: Synthetic oligonucleotide
  Sense strand starting at position 871 of SEQ ID NO: 1563932
gagggcucucuguauaauc

SEQ ID NO: 1843110 - RNA, 19 nt, Artificial Sequence
  Description of Artificial Sequence: Synthetic oligonucleotide
  Antisense strand to SEQ ID NO: 1843109
gauuauacagagagcccuc

SEQ ID NO: 1843111 - RNA, 19 nt, Artificial Sequence
  Description of Artificial Sequence: Synthetic oligonucleotide
  Sense strand starting at position 873 of SEQ ID NO: 1563932
gggcucucuguauaaucau

SEQ ID NO: 1843112 - RNA, 19 nt, Artificial Sequence
  Description of Artificial Sequence: Synthetic oligonucleotide
  Antisense strand to SEQ ID NO: 1843111
augauuauacagagagccc

SEQ ID NO: 1843113 - RNA, 19 nt, Artificial Sequence
  Description of Artificial Sequence: Synthetic oligonucleotide
  Sense strand starting at position 1007 of SEQ ID NO: 1563932
gaaacauaguuagaaggau

SEQ ID NO: 1843114 - RNA, 19 nt, Artificial Sequence
  Description of Artificial Sequence: Synthetic oligonucleotide
  Antisense strand to SEQ ID NO: 1843113
auccuucuaacuauguuuc

SEQ ID NO: 1843115 - RNA, 19 nt, Artificial Sequence
  Description of Artificial Sequence: Synthetic oligonucleotide
  Sense strand starting at position 1323 of SEQ ID NO: 1563932
acaugaagugauuagccau

SEQ ID NO: 1843116 - RNA, 19 nt, Artificial Sequence
  Description of Artificial Sequence: Synthetic oligonucleotide
  Antisense strand to SEQ ID NO: 1843115
auggcuaaucacuucaugu

SEQ ID NO: 1843117 - RNA, 19 nt, Artificial Sequence
  Description of Artificial Sequence: Synthetic oligonucleotide
  Sense strand starting at position 1326 of SEQ ID NO: 1563932
ugaagugauuagccauaca

SEQ ID NO: 1843118 - RNA, 19 nt, Artificial Sequence
  Description of Artificial Sequence: Synthetic oligonucleotide
  Antisense strand to SEQ ID NO: 1843117
uguauggcuaaucacuuca

SEQ ID NO: 1843119 - RNA, 19 nt, Artificial Sequence
  Description of Artificial Sequence: Synthetic oligonucleotide
  Sense strand starting at position 1329 of SEQ ID NO: 1563932
agugauuagccauacaauu

SEQ ID NO: 1843120 - RNA, 19 nt, Artificial Sequence
  Description of Artificial Sequence: Synthetic oligonucleotide
  Antisense strand to SEQ ID NO: 1843119
aauuguauggcuaaucacu

SEQ ID NO: 1843121 - RNA, 19 nt, Artificial Sequence
  Description of Artificial Sequence: Synthetic oligonucleotide
  Sense strand starting at position 1457 of SEQ ID NO: 1563932
cuagguaauguaggccaaa

SEQ ID NO: 1843122 - RNA, 19 nt, Artificial Sequence
  Description of Artificial Sequence: Synthetic oligonucleotide
  Antisense strand to SEQ ID NO: 1843121
uuuggccuacauuaccuag

SEQ ID NO: 1843123 - RNA, 19 nt, Artificial Sequence
  Description of Artificial Sequence: Synthetic oligonucleotide
  Sense strand starting at position 1869 of SEQ ID NO: 1563932
gaagaagacuuggaaccaa

SEQ ID NO: 1843124 - RNA, 19 nt, Artificial Sequence
  Description of Artificial Sequence: Synthetic oligonucleotide
  Antisense strand to SEQ ID NO: 1843123
uugguuccaagucuucuuc

SEQ ID NO: 1843125 - RNA, 19 nt, Artificial Sequence
  Description of Artificial Sequence: Synthetic oligonucleotide
  Sense strand starting at position 2016 of SEQ ID NO: 1563932
ggugaccuccuuugaccaa

SEQ ID NO: 1843126 - RNA, 19 nt, Artificial Sequence
  Description of Artificial Sequence: Synthetic oligonucleotide
  Antisense strand to SEQ ID NO: 1843125
uuggucaaaggaggucacc

SEQ ID NO: 1843127 - RNA, 19 nt, Artificial Sequence
  Description of Artificial Sequence: Synthetic oligonucleotide
  Sense strand starting at position 2206 of SEQ ID NO: 1563932
ggguguucugauuauaagc

SEQ ID NO: 1843128 - RNA, 19 nt, Artificial Sequence
  Description of Artificial Sequence: Synthetic oligonucleotide
  Antisense strand to SEQ ID NO: 1843127
gcuuauaaucagaacaccc

SEQ ID NO: 1843129 - RNA, 19 nt, Artificial Sequence
  Description of Artificial Sequence: Synthetic oligonucleotide
  Sense strand starting at position 2851 of SEQ ID NO: 1563932
auguguuguccucugcagu

SEQ ID NO: 1843130 - RNA, 19 nt, Artificial Sequence
  Description of Artificial Sequence: Synthetic oligonucleotide
  Antisense strand to SEQ ID NO: 1843129
acugcagaggacaacacau

SEQ ID NO: 1843131 - RNA, 19 nt, Artificial Sequence
  Description of Artificial Sequence: Synthetic oligonucleotide
  Sense strand starting at position 3041 of SEQ ID NO: 1563932
agucaucuucuggaaugca

SEQ ID NO: 1843132 - RNA, 19 nt, Artificial Sequence
  Description of Artificial Sequence: Synthetic oligonucleotide
  Antisense strand to SEQ ID NO: 1843131
ugcauuccagaagaugacu

SEQ ID NO: 1843133 - RNA, 19 nt, Artificial Sequence
  Description of Artificial Sequence: Synthetic oligonucleotide
  Sense strand starting at position 3133 of SEQ ID NO: 1563932
gggcaaauaucuuugucua

SEQ ID NO: 1843134 - RNA, 19 nt, Artificial Sequence
  Description of Artificial Sequence: Synthetic oligonucleotide
  Antisense strand to SEQ ID NO: 1843133
uagacaaagauauuugccc

SEQ ID NO: 1843135 - RNA, 19 nt, Artificial Sequence
  Description of Artificial Sequence: Synthetic oligonucleotide
  Sense strand starting at position 3134 of SEQ ID NO: 1563932
ggcaaauaucuuugucuau

SEQ ID NO: 1843136 - RNA, 19 nt, Artificial Sequence
  Description of Artificial Sequence: Synthetic oligonucleotide
  Antisense strand to SEQ ID NO: 1843135
auagacaaagauauuugcc

SEQ ID NO: 1843137 - RNA, 19 nt, Artificial Sequence
  Description of Artificial Sequence: Synthetic oligonucleotide
  Sense strand starting at position 3156 of SEQ ID NO: 1563932
ucauuaauguacccuaagu

SEQ ID NO: 1843138 - RNA, 19 nt, Artificial Sequence
  Description of Artificial Sequence: Synthetic oligonucleotide
  Antisense strand to SEQ ID NO: 1843137
acuuaggguacauuaauga

SEQ ID NO: 1843139 - RNA, 19 nt, Artificial Sequence
  Description of Artificial Sequence: Synthetic oligonucleotide
  Sense strand starting at position 3310 of SEQ ID NO: 1563932
acagccuggcuuuagauau

SEQ ID NO: 1843140 - RNA, 19 nt, Artificial Sequence
  Description of Artificial Sequence: Synthetic oligonucleotide
  Antisense strand to SEQ ID NO: 1843139
auaucuaaagccaggcugu

SEQ ID NO: 1843141 - RNA, 19 nt, Artificial Sequence
  Description of Artificial Sequence: Synthetic oligonucleotide
  Sense strand starting at position 3317 of SEQ ID NO: 1563932
ggcuuuagauaucccuaua

SEQ ID NO: 1843142 - RNA, 19 nt, Artificial Sequence
  Description of Artificial Sequence: Synthetic oligonucleotide
  Antisense strand to SEQ ID NO: 1843141
uauagggauaucuaaagcc

SEQ ID NO: 1843143 - RNA, 19 nt, Artificial Sequence
  Description of Artificial Sequence: Synthetic oligonucleotide
  Sense strand starting at position 3352 of SEQ ID NO: 1563932
aguguacaucucugaucac

SEQ ID NO: 1843144 - RNA, 19 nt, Artificial Sequence
  Description of Artificial Sequence: Synthetic oligonucleotide
  Antisense strand to SEQ ID NO: 1843143
gugaucagagauguacacu

SEQ ID NO: 1843145 - RNA, 19 nt, Artificial Sequence
  Description of Artificial Sequence: Synthetic oligonucleotide
  Sense strand starting at position 3355 of SEQ ID NO: 1563932
guacaucucugaucaccuu

SEQ ID NO: 1843146 - RNA, 19 nt, Artificial Sequence
  Description of Artificial Sequence: Synthetic oligonucleotide
  Antisense strand to SEQ ID NO: 1843145
aaggugaucagagauguac

SEQ ID NO: 1843147 - RNA, 19 nt, Artificial Sequence
  Description of Artificial Sequence: Synthetic oligonucleotide
  Sense strand starting at position 3531 of SEQ ID NO: 1563932
gguaaugggcaucagguau

SEQ ID NO: 1843148 - RNA, 19 nt, Artificial Sequence
  Description of Artificial Sequence: Synthetic oligonucleotide
  Antisense strand to SEQ ID NO: 1843147
auaccugaugcccauuacc

SEQ ID NO: 1843149 - RNA, 19 nt, Artificial Sequence
  Description of Artificial Sequence: Synthetic oligonucleotide
  Sense strand starting at position 3535 of SEQ ID NO: 1563932
augggcaucagguaucuua

SEQ ID NO: 1843150 - RNA, 19 nt, Artificial Sequence
  Description of Artificial Sequence: Synthetic oligonucleotide
  Antisense strand to SEQ ID NO: 1843149
uaagauaccugaugcccau

SEQ ID NO: 1843151 - RNA, 19 nt, Artificial Sequence
  Description of Artificial Sequence: Synthetic oligonucleotide
  Sense strand starting at position 3553 of SEQ ID NO: 1563932
aggauugaauccguggcau

SEQ ID NO: 1843152 - RNA, 19 nt, Artificial Sequence
  Description of Artificial Sequence: Synthetic oligonucleotide
  Antisense strand to SEQ ID NO: 1843151
augccacggauucaauccu

SEQ ID NO: 1843153 - RNA, 19 nt, Artificial Sequence
  Description of Artificial Sequence: Synthetic oligonucleotide
  Sense strand starting at position 3555 of SEQ ID NO: 1563932
gauugaauccguggcauua

SEQ ID NO: 1843154 - RNA, 19 nt, Artificial Sequence
  Description of Artificial Sequence: Synthetic oligonucleotide
  Antisense strand to SEQ ID NO: 1843153
uaaugccacggauucaauc

SEQ ID NO: 1843155 - RNA, 19 nt, Artificial Sequence
  Description of Artificial Sequence: Synthetic oligonucleotide
  Sense strand starting at position 3662 of SEQ ID NO: 1563932
cucauaaggcugugaugac

SEQ ID NO: 1843156 - RNA, 19 nt, Artificial Sequence
  Description of Artificial Sequence: Synthetic oligonucleotide
  Antisense strand to SEQ ID NO: 1843155
gucaucacagccuuaugag

SEQ ID NO: 1843157 - RNA, 19 nt, Artificial Sequence
  Description of Artificial Sequence: Synthetic oligonucleotide
  Sense strand starting at position 3779 of SEQ ID NO: 1563932
gugauaagugcagauuccu

SEQ ID NO: 1843158 - RNA, 19 nt, Artificial Sequence
  Description of Artificial Sequence: Synthetic oligonucleotide
  Antisense strand to SEQ ID NO: 1843157
aggaaucugcacuuaucac

SEQ ID NO: 1843159 - RNA, 19 nt, Artificial Sequence
  Description of Artificial Sequence: Synthetic oligonucleotide
  Sense strand starting at position 3788 of SEQ ID NO: 1563932
gcagauuccuguucugaua

SEQ ID NO: 1843160 - RNA, 19 nt, Artificial Sequence
  Description of Artificial Sequence: Synthetic oligonucleotide
  Antisense strand to SEQ ID NO: 1843159
uaucagaacaggaaucugc

SEQ ID NO: 1843161 - RNA, 19 nt, Artificial Sequence
  Description of Artificial Sequence: Synthetic oligonucleotide
  Sense strand starting at position 3978 of SEQ ID NO: 1563932
uuugcuaggcuuuagggaa

SEQ ID NO: 1843162 - RNA, 19 nt, Artificial Sequence
  Description of Artificial Sequence: Synthetic oligonucleotide
  Antisense strand to SEQ ID NO: 1843161
uucccuaaagccuagcaaa

SEQ ID NO: 1843163 - RNA, 19 nt, Artificial Sequence
  Description of Artificial Sequence: Synthetic oligonucleotide
  Sense strand starting at position 80 of SEQ ID NO: 1563933
aggcuuuauuugccuaagu

SEQ ID NO: 1843164 - RNA, 19 nt, Artificial Sequence
  Description of Artificial Sequence: Synthetic oligonucleotide
  Antisense strand to SEQ ID NO: 1843163
acuuaggcaaauaaagccu

SEQ ID NO: 1843165 - RNA, 19 nt, Artificial Sequence
  Description of Artificial Sequence: Synthetic oligonucleotide
  Sense strand starting at position 928 of SEQ ID NO: 1563933
uagauauuagauggucugu

SEQ ID NO: 1843166 - RNA, 19 nt, Artificial Sequence
  Description of Artificial Sequence: Synthetic oligonucleotide
  Antisense strand to SEQ ID NO: 1843165
acagaccaucuaauaucua

SEQ ID NO: 1843167 - RNA, 19 nt, Artificial Sequence
  Description of Artificial Sequence: Synthetic oligonucleotide
  Sense strand starting at position 930 of SEQ ID NO: 1563933
gauauuagauggucuguug

SEQ ID NO: 1843168 - RNA, 19 nt, Artificial Sequence
  Description of Artificial Sequence: Synthetic oligonucleotide
  Antisense strand to SEQ ID NO: 1843167
caacagaccaucuaauauc

SEQ ID NO: 1843169 - RNA, 19 nt, Artificial Sequence
  Description of Artificial Sequence: Synthetic oligonucleotide
  Sense strand starting at position 1045 of SEQ ID NO: 1563933
uugauucuaggcuguaaca

SEQ ID NO: 1843170 - RNA, 19 nt, Artificial Sequence
  Description of Artificial Sequence: Synthetic oligonucleotide
  Antisense strand to SEQ ID NO: 1843169
uguuacagccuagaaucaa

SEQ ID NO: 1843171 - RNA, 19 nt, Artificial Sequence
  Description of Artificial Sequence: Synthetic oligonucleotide
  Sense strand starting at position 1047 of SEQ ID NO: 1563933
gauucuaggcuguaacaug

SEQ ID NO: 1843172 - RNA, 19 nt, Artificial Sequence
  Description of Artificial Sequence: Synthetic oligonucleotide
  Antisense strand to SEQ ID NO: 1843171
cauguuacagccuagaauc

SEQ ID NO: 1843173 - RNA, 19 nt, Artificial Sequence
  Description of Artificial Sequence: Synthetic oligonucleotide
  Sense strand starting at position 1095 of SEQ ID NO: 1563933
gcuaacuuaguagaauuaa

SEQ ID NO: 1843174 - RNA, 19 nt, Artificial Sequence
  Description of Artificial Sequence: Synthetic oligonucleotide
  Antisense strand to SEQ ID NO: 1843173
uuaauucuacuaaguuagc

SEQ ID NO: 1843175 - RNA, 19 nt, Artificial Sequence
  Description of Artificial Sequence: Synthetic oligonucleotide
  Sense strand starting at position 1106 of SEQ ID NO: 1563933
agaauuaauuggcuggcua

SEQ ID NO: 1843176 - RNA, 19 nt, Artificial Sequence
  Description of Artificial Sequence: Synthetic oligonucleotide
  Antisense strand to SEQ ID NO: 1843175
uagccagccaauuaauucu

SEQ ID NO: 1843177 - RNA, 19 nt, Artificial Sequence
  Description of Artificial Sequence: Synthetic oligonucleotide
  Sense strand starting at position 1107 of SEQ ID NO: 1563933
gaauuaauuggcuggcuaa

SEQ ID NO: 1843178 - RNA, 19 nt, Artificial Sequence
  Description of Artificial Sequence: Synthetic oligonucleotide
  Antisense strand to SEQ ID NO: 1843177
uuagccagccaauuaauuc

SEQ ID NO: 1843179 - RNA, 19 nt, Artificial Sequence
  Description of Artificial Sequence: Synthetic oligonucleotide
  Sense strand starting at position 1118 of SEQ ID NO: 1563933
cuggcuaacuuaguagaau

SEQ ID NO: 1843180 - RNA, 19 nt, Artificial Sequence
  Description of Artificial Sequence: Synthetic oligonucleotide
  Antisense strand to SEQ ID NO: 1843179
auucuacuaaguuagccag

SEQ ID NO: 1843181 - RNA, 19 nt, Artificial Sequence
  Description of Artificial Sequence: Synthetic oligonucleotide
  Sense strand starting at position 1121 of SEQ ID NO: 1563933
gcuaacuuaguagaauuau

SEQ ID NO: 1843182 - RNA, 19 nt, Artificial Sequence
  Description of Artificial Sequence: Synthetic oligonucleotide
  Antisense strand to SEQ ID NO: 1843181
auaauucuacuaaguuagc

SEQ ID NO: 1843183 - RNA, 19 nt, Artificial Sequence
  Description of Artificial Sequence: Synthetic oligonucleotide
  Sense strand starting at position 1191 of SEQ ID NO: 1563933
gugugcuuaagggaaguaa

SEQ ID NO: 1843184 - RNA, 19 nt, Artificial Sequence
  Description of Artificial Sequence: Synthetic oligonucleotide
  Antisense strand to SEQ ID NO: 1843183
uuacuucccuuaagcacac

SEQ ID NO: 1843185 - RNA, 19 nt, Artificial Sequence
  Description of Artificial Sequence: Synthetic oligonucleotide
  Sense strand starting at position 1286 of SEQ ID NO: 1563933
ucuaaauuuguaugcaugu

SEQ ID NO: 1843186 - RNA, 19 nt, Artificial Sequence
  Description of Artificial Sequence: Synthetic oligonucleotide
  Antisense strand to SEQ ID NO: 1843185
acaugcauacaaauuuaga

SEQ ID NO: 1843187 - RNA, 19 nt, Artificial Sequence
  Description of Artificial Sequence: Synthetic oligonucleotide
  Sense strand starting at position 1301 of SEQ ID NO: 1563933
augucuuaacauggaccaa

SEQ ID NO: 1843188 - RNA, 19 nt, Artificial Sequence
  Description of Artificial Sequence: Synthetic oligonucleotide
  Antisense strand to SEQ ID NO: 1843187
uugguccauguuaagacau

SEQ ID NO: 1843189 - RNA, 19 nt, Artificial Sequence
  Description of Artificial Sequence: Synthetic oligonucleotide
  Sense strand starting at position 1313 of SEQ ID NO: 1563933
ggaccaaucuauguuuaga

SEQ ID NO: 1843190 - RNA, 19 nt, Artificial Sequence
  Description of Artificial Sequence: Synthetic oligonucleotide
  Antisense strand to SEQ ID NO: 1843189
ucuaaacauagauuggucc

SEQ ID NO: 1843191 - RNA, 19 nt, Artificial Sequence
  Description of Artificial Sequence: Synthetic oligonucleotide
  Sense strand starting at position 1375 of SEQ ID NO: 1563933
accacugugaugugggaau

SEQ ID NO: 1843192 - RNA, 19 nt, Artificial Sequence
  Description of Artificial Sequence: Synthetic oligonucleotide
  Antisense strand to SEQ ID NO: 1843191
auucccacaucacaguggu

SEQ ID NO: 1843193 - RNA, 19 nt, Artificial Sequence
  Description of Artificial Sequence: Synthetic oligonucleotide
  Sense strand starting at position 1454 of SEQ ID NO: 1563933
agauuuaaauggcaugagu

SEQ ID NO: 1843194 - RNA, 19 nt, Artificial Sequence
  Description of Artificial Sequence: Synthetic oligonucleotide
  Antisense strand to SEQ ID NO: 1843193
acucaugccauuuaaaucu

SEQ ID NO: 1843195 - RNA, 19 nt, Artificial Sequence
  Description of Artificial Sequence: Synthetic oligonucleotide
  Sense strand starting at position 1457 of SEQ ID NO: 1563933
uuuaaauggcaugaguaau

SEQ ID NO: 1843196 - RNA, 19 nt, Artificial Sequence
  Description of Artificial Sequence: Synthetic oligonucleotide
  Antisense strand to SEQ ID NO: 1843195
auuacucaugccauuuaaa

SEQ ID NO: 1843197 - RNA, 19 nt, Artificial Sequence
  Description of Artificial Sequence: Synthetic oligonucleotide
  Sense strand starting at position 1469 of SEQ ID NO: 1563933
gaguaauaaguuugcuuaa

SEQ ID NO: 1843198 - RNA, 19 nt, Artificial Sequence
  Description of Artificial Sequence: Synthetic oligonucleotide
  Antisense strand to SEQ ID NO: 1843197
uuaagcaaacuuauuacuc

SEQ ID NO: 1843199 - RNA, 19 nt, Artificial Sequence
  Description of Artificial Sequence: Synthetic oligonucleotide
  Sense strand starting at position 1609 of SEQ ID NO: 1563933
cuugaaugguuagugugaa

SEQ ID NO: 1843200 - RNA, 19 nt, Artificial Sequence
  Description of Artificial Sequence: Synthetic oligonucleotide
  Antisense strand to SEQ ID NO: 1843199
uucacacuaaccauucaag

SEQ ID NO: 1843201 - RNA, 19 nt, Artificial Sequence
  Description of Artificial Sequence: Synthetic oligonucleotide
  Sense strand starting at position 1665 of SEQ ID NO: 1563933
guguacauccaaggaaugu

SEQ ID NO: 1843202 - RNA, 19 nt, Artificial Sequence
  Description of Artificial Sequence: Synthetic oligonucleotide
  Antisense strand to SEQ ID NO: 1843201
acauuccuuggauguacac

SEQ ID NO: 1843203 - RNA, 19 nt, Artificial Sequence
  Description of Artificial Sequence: Synthetic oligonucleotide
  Sense strand starting at position 1811 of SEQ ID NO: 1563933
uguuauguggguuagggua

SEQ ID NO: 1843204 - RNA, 19 nt, Artificial Sequence
  Description of Artificial Sequence: Synthetic oligonucleotide
  Antisense strand to SEQ ID NO: 1843203
uacccuaacccacauaaca

SEQ ID NO: 1843205 - RNA, 19 nt, Artificial Sequence
  Description of Artificial Sequence: Synthetic oligonucleotide
  Sense strand starting at position 1859 of SEQ ID NO: 1563933
cccugugagaccugagacu

SEQ ID NO: 1843206 - RNA, 19 nt, Artificial Sequence
  Description of Artificial Sequence: Synthetic oligonucleotide
  Antisense strand to SEQ ID NO: 1843205
agucucaggucucacaggg

SEQ ID NO: 1843207 - RNA, 19 nt, Artificial Sequence
  Description of Artificial Sequence: Synthetic oligonucleotide
  Sense strand starting at position 1912 of SEQ ID NO: 1563933
uccugaaggcagugacauu

SEQ ID NO: 1843208 - RNA, 19 nt, Artificial Sequence
  Description of Artificial Sequence: Synthetic oligonucleotide
  Antisense strand to SEQ ID NO: 1843207
aaugucacugccuucagga

SEQ ID NO: 1843209 - RNA, 19 nt, Artificial Sequence
  Description of Artificial Sequence: Synthetic oligonucleotide
  Sense strand starting at position 1949 of SEQ ID NO: 1563933
ggcucucuugaggagaauc

SEQ ID NO: 1843210 - RNA, 19 nt, Artificial Sequence
  Description of Artificial Sequence: Synthetic oligonucleotide
  Antisense strand to SEQ ID NO: 1843209
gauucuccucaagagagcc

SEQ ID NO: 1843211 - RNA, 19 nt, Artificial Sequence
  Description of Artificial Sequence: Synthetic oligonucleotide
  Sense strand starting at position 1982 of SEQ ID NO: 1563933
acgggaguuuggagaagau

SEQ ID NO: 1843212 - RNA, 19 nt, Artificial Sequence
  Description of Artificial Sequence: Synthetic oligonucleotide
  Antisense strand to SEQ ID NO: 1843211
aucuucuccaaacucccgu

SEQ ID NO: 1843213 - RNA, 19 nt, Artificial Sequence
  Description of Artificial Sequence: Synthetic oligonucleotide
  Sense strand starting at position 2076 of SEQ ID NO: 1563933
aggaguguccuaggaguca

SEQ ID NO: 1843214 - RNA, 19 nt, Artificial Sequence
  Description of Artificial Sequence: Synthetic oligonucleotide
  Antisense strand to SEQ ID NO: 1843213
ugacuccuaggacacuccu

SEQ ID NO: 1843215 - RNA, 19 nt, Artificial Sequence
  Description of Artificial Sequence: Synthetic oligonucleotide
  Sense strand starting at position 2448 of SEQ ID NO: 1563933
auaggaccuugucuggaau

SEQ ID NO: 1843216 - RNA, 19 nt, Artificial Sequence
  Description of Artificial Sequence: Synthetic oligonucleotide
  Antisense strand to SEQ ID NO: 1843215
auuccagacaagguccuau

SEQ ID NO: 1843217 - RNA, 19 nt, Artificial Sequence
  Description of Artificial Sequence: Synthetic oligonucleotide
  Sense strand starting at position 2582 of SEQ ID NO: 1563933
ggcaaaguaagacaauguu

SEQ ID NO: 1843218 - RNA, 19 nt, Artificial Sequence
  Description of Artificial Sequence: Synthetic oligonucleotide
  Antisense strand to SEQ ID NO: 1843217
aacauugucuuacuuugcc

SEQ ID NO: 1843219 - RNA, 19 nt, Artificial Sequence
  Description of Artificial Sequence: Synthetic oligonucleotide
  Sense strand starting at position 2588 of SEQ ID NO: 1563933
guaagacaauguucugcaa

SEQ ID NO: 1843220 - RNA, 19 nt, Artificial Sequence
  Description of Artificial Sequence: Synthetic oligonucleotide
  Antisense strand to SEQ ID NO: 1843219
uugcagaacauugucuuac

SEQ ID NO: 1843221 - RNA, 19 nt, Artificial Sequence
  Description of Artificial Sequence: Synthetic oligonucleotide
  Sense strand starting at position 2591 of SEQ ID NO: 1563933
agacaauguucugcaaaua

SEQ ID NO: 1843222 - RNA, 19 nt, Artificial Sequence
  Description of Artificial Sequence: Synthetic oligonucleotide
  Antisense strand to SEQ ID NO: 1843221
uauuugcagaacauugucu

SEQ ID NO: 1843223 - RNA, 19 nt, Artificial Sequence
  Description of Artificial Sequence: Synthetic oligonucleotide
  Sense strand starting at position 2607 of SEQ ID NO: 1563933
auacucgugugacuggaau

SEQ ID NO: 1843224 - RNA, 19 nt, Artificial Sequence
  Description of Artificial Sequence: Synthetic oligonucleotide
  Antisense strand to SEQ ID NO: 1843223
auuccagucacacgaguau

SEQ ID NO: 1843225 - RNA, 19 nt, Artificial Sequence
  Description of Artificial Sequence: Synthetic oligonucleotide
  Sense strand starting at position 2748 of SEQ ID NO: 1563933
aaguauagucaauguagau

SEQ ID NO: 1843226 - RNA, 19 nt, Artificial Sequence
  Description of Artificial Sequence: Synthetic oligonucleotide
  Antisense strand to SEQ ID NO: 1843225
aucuacauugacuauacuu

SEQ ID NO: 1843227 - RNA, 19 nt, Artificial Sequence
  Description of Artificial Sequence: Synthetic oligonucleotide
  Sense strand starting at position 2761 of SEQ ID NO: 1563933
guagauggauacuccuaau

SEQ ID NO: 1843228 - RNA, 19 nt, Artificial Sequence
  Description of Artificial Sequence: Synthetic oligonucleotide
  Antisense strand to SEQ ID NO: 1843227
auuaggaguauccaucuac

SEQ ID NO: 1843229 - RNA, 19 nt, Artificial Sequence
  Description of Artificial Sequence: Synthetic oligonucleotide
  Sense strand starting at position 2788 of SEQ ID NO: 1563933
ccagaaauguagcucuuaa

SEQ ID NO: 1843230 - RNA, 19 nt, Artificial Sequence
  Description of Artificial Sequence: Synthetic oligonucleotide
  Antisense strand to SEQ ID NO: 1843229
uuaagagcuacauuucugg

SEQ ID NO: 1843231 - RNA, 19 nt, Artificial Sequence
  Description of Artificial Sequence: Synthetic oligonucleotide
  Sense strand starting at position 3734 of SEQ ID NO: 1563933
uugguuauuucugaaccaa

SEQ ID NO: 1843232 - RNA, 19 nt, Artificial Sequence
  Description of Artificial Sequence: Synthetic oligonucleotide
  Antisense strand to SEQ ID NO: 1843231
uugguucagaaauaaccaa

SEQ ID NO: 1843233 - RNA, 19 nt, Artificial Sequence
  Description of Artificial Sequence: Synthetic oligonucleotide
  Sense strand starting at position 3749 of SEQ ID NO: 1563933
ccaacauugugacugauag

SEQ ID NO: 1843234 - RNA, 19 nt, Artificial Sequence
  Description of Artificial Sequence: Synthetic oligonucleotide
  Antisense strand to SEQ ID NO: 1843233
cuaucagucacaauguugg

SEQ ID NO: 1843235 - RNA, 19 nt, Artificial Sequence
  Description of Artificial Sequence: Synthetic oligonucleotide
  Sense strand starting at position 3750 of SEQ ID NO: 1563933
caacauugugacugauagu

SEQ ID NO: 1843236 - RNA, 19 nt, Artificial Sequence
  Description of Artificial Sequence: Synthetic oligonucleotide
  Antisense strand to SEQ ID NO: 1843235
acuaucagucacaauguug

SEQ ID NO: 1843237 - RNA, 19 nt, Artificial Sequence
  Description of Artificial Sequence: Synthetic oligonucleotide
  Sense strand starting at position 3785 of SEQ ID NO: 1563933
aucagaguucuaggaaugu

SEQ ID NO: 1843238 - RNA, 19 nt, Artificial Sequence
  Description of Artificial Sequence: Synthetic oligonucleotide
  Antisense strand to SEQ ID NO: 1843237
acauuccuagaacucugau

SEQ ID NO: 1843239 - RNA, 19 nt, Artificial Sequence
  Description of Artificial Sequence: Synthetic oligonucleotide
  Sense strand starting at position 3789 of SEQ ID NO: 1563933
gaguucuaggaauguuaua

SEQ ID NO: 1843240 - RNA, 19 nt, Artificial Sequence
  Description of Artificial Sequence: Synthetic oligonucleotide
  Antisense strand to SEQ ID NO: 1843239
uauaacauuccuagaacuc

SEQ ID NO: 1843241 - RNA, 19 nt, Artificial Sequence
  Description of Artificial Sequence: Synthetic oligonucleotide
  Sense strand starting at position 3913 of SEQ ID NO: 1563933
agauaagcugaugguguaa

SEQ ID NO: 1843242 - RNA, 19 nt, Artificial Sequence
  Description of Artificial Sequence: Synthetic oligonucleotide
  Antisense strand to SEQ ID NO: 1843241
uuacaccaucagcuuaucu

SEQ ID NO: 1843243 - RNA, 19 nt, Artificial Sequence
  Description of Artificial Sequence: Synthetic oligonucleotide
  Sense strand starting at position 686 of SEQ ID NO: 1563934
ugaauuaacucucugcugu

SEQ ID NO: 1843244 - RNA, 19 nt, Artificial Sequence
  Description of Artificial Sequence: Synthetic oligonucleotide
  Antisense strand to SEQ ID NO: 1843243
acagcagagaguuaauuca

SEQ ID NO: 1843245 - RNA, 19 nt, Artificial Sequence
  Description of Artificial Sequence: Synthetic oligonucleotide
  Sense strand starting at position 738 of SEQ ID NO: 1563934
ugguuuauuugugccauag

SEQ ID NO: 1843246 - RNA, 19 nt, Artificial Sequence
  Description of Artificial Sequence: Synthetic oligonucleotide
  Antisense strand to SEQ ID NO: 1843245
cuauggcacaaauaaacca

SEQ ID NO: 1843247 - RNA, 19 nt, Artificial Sequence
  Description of Artificial Sequence: Synthetic oligonucleotide
  Sense strand starting at position 742 of SEQ ID NO: 1563934
uuauuugugccauagcucu

SEQ ID NO: 1843248 - RNA, 19 nt, Artificial Sequence
  Description of Artificial Sequence: Synthetic oligonucleotide
  Antisense strand to SEQ ID NO: 1843247
agagcuauggcacaaauaa

SEQ ID NO: 1843249 - RNA, 19 nt, Artificial Sequence
  Description of Artificial Sequence: Synthetic oligonucleotide
  Sense strand starting at position 908 of SEQ ID NO: 1563934
auggaaagaugagauaguu

SEQ ID NO: 1843250 - RNA, 19 nt, Artificial Sequence
  Description of Artificial Sequence: Synthetic oligonucleotide
  Antisense strand to SEQ ID NO: 1843249
aacuaucucaucuuuccau

SEQ ID NO: 1843251 - RNA, 19 nt, Artificial Sequence
  Description of Artificial Sequence: Synthetic oligonucleotide
  Sense strand starting at position 984 of SEQ ID NO: 1563934
aaugauuaucugugaauag

SEQ ID NO: 1843252 - RNA, 19 nt, Artificial Sequence
  Description of Artificial Sequence: Synthetic oligonucleotide
  Antisense strand to SEQ ID NO: 1843251
cuauucacagauaaucauu

SEQ ID NO: 1843253 - RNA, 19 nt, Artificial Sequence
  Description of Artificial Sequence: Synthetic oligonucleotide
  Sense strand starting at position 1039 of SEQ ID NO: 1563934
agacuuguggcuuaccaau

SEQ ID NO: 1843254 - RNA, 19 nt, Artificial Sequence
  Description of Artificial Sequence: Synthetic oligonucleotide
  Antisense strand to SEQ ID NO: 1843253
auugguaagccacaagucu

SEQ ID NO: 1843255 - RNA, 19 nt, Artificial Sequence
  Description of Artificial Sequence: Synthetic oligonucleotide
  Sense strand starting at position 1048 of SEQ ID NO: 1563934
gcuuaccaauccuugagau

SEQ ID NO: 1843256 - RNA, 19 nt, Artificial Sequence
  Description of Artificial Sequence: Synthetic oligonucleotide
  Antisense strand to SEQ ID NO: 1843255
aucucaaggauugguaagc

SEQ ID NO: 1843257 - RNA, 19 nt, Artificial Sequence
  Description of Artificial Sequence: Synthetic oligonucleotide
  Sense strand starting at position 1134 of SEQ ID NO: 1563934
ugcugauaagcacagcauu

SEQ ID NO: 1843258 - RNA, 19 nt, Artificial Sequence
  Description of Artificial Sequence: Synthetic oligonucleotide
  Antisense strand to SEQ ID NO: 1843257
aaugcugugcuuaucagca

SEQ ID NO: 1843259 - RNA, 19 nt, Artificial Sequence
  Description of Artificial Sequence: Synthetic oligonucleotide
  Sense strand starting at position 1195 of SEQ ID NO: 1563934
augacacccucuuuggauu

SEQ ID NO: 1843260 - RNA, 19 nt, Artificial Sequence
  Description of Artificial Sequence: Synthetic oligonucleotide
  Antisense strand to SEQ ID NO: 1843259
aauccaaagagggugucau

SEQ ID NO: 1843261 - RNA, 19 nt, Artificial Sequence
  Description of Artificial Sequence: Synthetic oligonucleotide
  Sense strand starting at position 1251 of SEQ ID NO: 1563934
uuaucauagugcuugacac

SEQ ID NO: 1843262 - RNA, 19 nt, Artificial Sequence
  Description of Artificial Sequence: Synthetic oligonucleotide
  Antisense strand to SEQ ID NO: 1843261
gugucaagcacuaugauaa

SEQ ID NO: 1843263 - RNA, 19 nt, Artificial Sequence
  Description of Artificial Sequence: Synthetic oligonucleotide
  Sense strand starting at position 1289 of SEQ ID NO: 1563934
ggcagcuaugauuauuaaa

SEQ ID NO: 1843264 - RNA, 19 nt, Artificial Sequence
  Description of Artificial Sequence: Synthetic oligonucleotide
  Antisense strand to SEQ ID NO: 1843263
uuuaauaaucauagcugcc

SEQ ID NO: 1843265 - RNA, 19 nt, Artificial Sequence
  Description of Artificial Sequence: Synthetic oligonucleotide
  Sense strand starting at position 1394 of SEQ ID NO: 1563934
ugcuuucaagggugaggua

SEQ ID NO: 1843266 - RNA, 19 nt, Artificial Sequence
  Description of Artificial Sequence: Synthetic oligonucleotide
  Antisense strand to SEQ ID NO: 1843265
uaccucacccuugaaagca

SEQ ID NO: 1843267 - RNA, 19 nt, Artificial Sequence
  Description of Artificial Sequence: Synthetic oligonucleotide
  Sense strand starting at position 1444 of SEQ ID NO: 1563934
augaaauguuaggcucuua

SEQ ID NO: 1843268 - RNA, 19 nt, Artificial Sequence
  Description of Artificial Sequence: Synthetic oligonucleotide
  Antisense strand to SEQ ID NO: 1843267
uaagagccuaacauuucau

SEQ ID NO: 1843269 - RNA, 19 nt, Artificial Sequence
  Description of Artificial Sequence: Synthetic oligonucleotide
  Sense strand starting at position 1455 of SEQ ID NO: 1563934
ggcucuuauuucuugaagu

SEQ ID NO: 1843270 - RNA, 19 nt, Artificial Sequence
  Description of Artificial Sequence: Synthetic oligonucleotide
  Antisense strand to SEQ ID NO: 1843269
acuucaagaaauaagagcc

SEQ ID NO: 1843271 - RNA, 19 nt, Artificial Sequence
  Description of Artificial Sequence: Synthetic oligonucleotide
  Sense strand starting at position 1468 of SEQ ID NO: 1563934
ugaaguacuuaugcacuua

SEQ ID NO: 1843272 - RNA, 19 nt, Artificial Sequence
  Description of Artificial Sequence: Synthetic oligonucleotide
  Antisense strand to SEQ ID NO: 1843271
uaagugcauaaguacuuca

SEQ ID NO: 1843273 - RNA, 19 nt, Artificial Sequence
  Description of Artificial Sequence: Synthetic oligonucleotide
  Sense strand starting at position 1597 of SEQ ID NO: 1563934
gcuaaagagcaauaaguaa

SEQ ID NO: 1843274 - RNA, 19 nt, Artificial Sequence
  Description of Artificial Sequence: Synthetic oligonucleotide
  Antisense strand to SEQ ID NO: 1843273
uuacuuauugcucuuuagc

SEQ ID NO: 1843275 - RNA, 19 nt, Artificial Sequence
  Description of Artificial Sequence: Synthetic oligonucleotide
  Sense strand starting at position 1611 of SEQ ID NO: 1563934
aguaacuccuuacugagaa

SEQ ID NO: 1843276 - RNA, 19 nt, Artificial Sequence
  Description of Artificial Sequence: Synthetic oligonucleotide
  Antisense strand to SEQ ID NO: 1843275
uucucaguaaggaguuacu

SEQ ID NO: 1843277 - RNA, 19 nt, Artificial Sequence
  Description of Artificial Sequence: Synthetic oligonucleotide
  Sense strand starting at position 1679 of SEQ ID NO: 1563934
auuccauuguucuuuguaa

SEQ ID NO: 1843278 - RNA, 19 nt, Artificial Sequence
  Description of Artificial Sequence: Synthetic oligonucleotide
  Antisense strand to SEQ ID NO: 1843277
uuacaaagaacaauggaau

SEQ ID NO: 1843279 - RNA, 19 nt, Artificial Sequence
  Description of Artificial Sequence: Synthetic oligonucleotide
  Sense strand starting at position 1680 of SEQ ID NO: 1563934
uuccauuguucuuuguaaa

SEQ ID NO: 1843280 - RNA, 19 nt, Artificial Sequence
  Description of Artificial Sequence: Synthetic oligonucleotide
  Antisense strand to SEQ ID NO: 1843279
uuuacaaagaacaauggaa

SEQ ID NO: 1843281 - RNA, 19 nt, Artificial Sequence
  Description of Artificial Sequence: Synthetic oligonucleotide
  Sense strand starting at position 1721 of SEQ ID NO: 1563934
ggcagaagauacuuaguuu

SEQ ID NO: 1843282 - RNA, 19 nt, Artificial Sequence
  Description of Artificial Sequence: Synthetic oligonucleotide
  Antisense strand to SEQ ID NO: 1843281
aaacuaaguaucuucugcc

SEQ ID NO: 1843283 - RNA, 19 nt, Artificial Sequence
  Description of Artificial Sequence: Synthetic oligonucleotide
  Sense strand starting at position 1722 of SEQ ID NO: 1563934
gcagaagauacuuaguuug

SEQ ID NO: 1843284 - RNA, 19 nt, Artificial Sequence
  Description of Artificial Sequence: Synthetic oligonucleotide
  Antisense strand to SEQ ID NO: 1843283
caaacuaaguaucuucugc

SEQ ID NO: 1843285 - RNA, 19 nt, Artificial Sequence
  Description of Artificial Sequence: Synthetic oligonucleotide
  Sense strand starting at position 1725 of SEQ ID NO: 1563934
gaagauacuuaguuugaac

SEQ ID NO: 1843286 - RNA, 19 nt, Artificial Sequence
  Description of Artificial Sequence: Synthetic oligonucleotide
  Antisense strand to SEQ ID NO: 1843285
guucaaacuaaguaucuuc

SEQ ID NO: 1843287 - RNA, 19 nt, Artificial Sequence
  Description of Artificial Sequence: Synthetic oligonucleotide
  Sense strand starting at position 1931 of SEQ ID NO: 1563934
ucuuuaaugguagaguaua

SEQ ID NO: 1843288 - RNA, 19 nt, Artificial Sequence
  Description of Artificial Sequence: Synthetic oligonucleotide
  Antisense strand to SEQ ID NO: 1843287
uauacucuaccauuaaaga

SEQ ID NO: 1843289 - RNA, 19 nt, Artificial Sequence
  Description of Artificial Sequence: Synthetic oligonucleotide
  Sense strand starting at position 1964 of SEQ ID NO: 1563934
gucucucagaccuaguguu

SEQ ID NO: 1843290 - RNA, 19 nt, Artificial Sequence
  Description of Artificial Sequence: Synthetic oligonucleotide
  Antisense strand to SEQ ID NO: 1843289
aacacuaggucugagagac

SEQ ID NO: 1843291 - RNA, 19 nt, Artificial Sequence
  Description of Artificial Sequence: Synthetic oligonucleotide
  Sense strand starting at position 2170 of SEQ ID NO: 1563934
augagaauaucgccuauaa

SEQ ID NO: 1843292 - RNA, 19 nt, Artificial Sequence
  Description of Artificial Sequence: Synthetic oligonucleotide
  Antisense strand to SEQ ID NO: 1843291
uuauaggcgauauucucau

SEQ ID NO: 1843293 - RNA, 19 nt, Artificial Sequence
  Description of Artificial Sequence: Synthetic oligonucleotide
  Sense strand starting at position 2301 of SEQ ID NO: 1563934
gguuguggugcagaagaaa

SEQ ID NO: 1843294 - RNA, 19 nt, Artificial Sequence
  Description of Artificial Sequence: Synthetic oligonucleotide
  Antisense strand to SEQ ID NO: 1843293
uuucuucugcaccacaacc

SEQ ID NO: 1843295 - RNA, 19 nt, Artificial Sequence
  Description of Artificial Sequence: Synthetic oligonucleotide
  Sense strand starting at position 2330 of SEQ ID NO: 1563934
gcuggacuaguuuaagcua

SEQ ID NO: 1843296 - RNA, 19 nt, Artificial Sequence
  Description of Artificial Sequence: Synthetic oligonucleotide
  Antisense strand to SEQ ID NO: 1843295
uagcuuaaacuaguccagc

SEQ ID NO: 1843297 - RNA, 19 nt, Artificial Sequence
  Description of Artificial Sequence: Synthetic oligonucleotide
  Sense strand starting at position 2431 of SEQ ID NO: 1563934
agaacaaauuucgagucuu

SEQ ID NO: 1843298 - RNA, 19 nt, Artificial Sequence
  Description of Artificial Sequence: Synthetic oligonucleotide
  Antisense strand to SEQ ID NO: 1843297
aagacucgaaauuuguucu

SEQ ID NO: 1843299 - RNA, 19 nt, Artificial Sequence
  Description of Artificial Sequence: Synthetic oligonucleotide
  Sense strand starting at position 2591 of SEQ ID NO: 1563934
agucucaaguguccuuaau

SEQ ID NO: 1843300 - RNA, 19 nt, Artificial Sequence
  Description of Artificial Sequence: Synthetic oligonucleotide
  Antisense strand to SEQ ID NO: 1843299
auuaaggacacuugagacu

SEQ ID NO: 1843301 - RNA, 19 nt, Artificial Sequence
  Description of Artificial Sequence: Synthetic oligonucleotide
  Sense strand starting at position 3437 of SEQ ID NO: 1563934
ccuaguguggcagaauaua

SEQ ID NO: 1843302 - RNA, 19 nt, Artificial Sequence
  Description of Artificial Sequence: Synthetic oligonucleotide
  Antisense strand to SEQ ID NO: 1843301
uauauucugccacacuagg

SEQ ID NO: 1843303 - RNA, 19 nt, Artificial Sequence
  Description of Artificial Sequence: Synthetic oligonucleotide
  Sense strand starting at position 3449 of SEQ ID NO: 1563934
gaauauaggaguuggugga

SEQ ID NO: 1843304 - RNA, 19 nt, Artificial Sequence
  Description of Artificial Sequence: Synthetic oligonucleotide
  Antisense strand to SEQ ID NO: 1843303
uccaccaacuccuauauuc

SEQ ID NO: 1843305 - RNA, 19 nt, Artificial Sequence
  Description of Artificial Sequence: Synthetic oligonucleotide
  Sense strand starting at position 3450 of SEQ ID NO: 1563934
aauauaggaguugguggaa

SEQ ID NO: 1843306 - RNA, 19 nt, Artificial Sequence
  Description of Artificial Sequence: Synthetic oligonucleotide
  Antisense strand to SEQ ID NO: 1843305
uuccaccaacuccuauauu

SEQ ID NO: 1843307 - RNA, 19 nt, Artificial Sequence
  Description of Artificial Sequence: Synthetic oligonucleotide
  Sense strand starting at position 3480 of SEQ ID NO: 1563934
gcagccagagucugaucaa

SEQ ID NO: 1843308 - RNA, 19 nt, Artificial Sequence
  Description of Artificial Sequence: Synthetic oligonucleotide
  Antisense strand to SEQ ID NO: 1843307
uugaucagacucuggcugc

SEQ ID NO: 1843309 - RNA, 19 nt, Artificial Sequence
  Description of Artificial Sequence: Synthetic oligonucleotide
  Sense strand starting at position 3483 of SEQ ID NO: 1563934
gccagagucugaucaacua

SEQ ID NO: 1843310 - RNA, 19 nt, Artificial Sequence
  Description of Artificial Sequence: Synthetic oligonucleotide
  Antisense strand to SEQ ID NO: 1843309
uaguugaucagacucuggc

SEQ ID NO: 1843311 - RNA, 19 nt, Artificial Sequence
  Description of Artificial Sequence: Synthetic oligonucleotide
  Sense strand starting at position 3571 of SEQ ID NO: 1563934
ggccaaacauggcuacaau

SEQ ID NO: 1843312 - RNA, 19 nt, Artificial Sequence
  Description of Artificial Sequence: Synthetic oligonucleotide
  Antisense strand to SEQ ID NO: 1843311
auuguagccauguuuggcc

SEQ ID NO: 1843313 - RNA, 19 nt, Artificial Sequence
  Description of Artificial Sequence: Synthetic oligonucleotide
  Sense strand starting at position 3572 of SEQ ID NO: 1563934
gccaaacauggcuacaaua

SEQ ID NO: 1843314 - RNA, 19 nt, Artificial Sequence
  Description of Artificial Sequence: Synthetic oligonucleotide
  Antisense strand to SEQ ID NO: 1843313
uauuguagccauguuuggc

SEQ ID NO: 1843315 - RNA, 19 nt, Artificial Sequence
  Description of Artificial Sequence: Synthetic oligonucleotide
  Sense strand starting at position 3697 of SEQ ID NO: 1563934
gcaggagcuacaugauugu

SEQ ID NO: 1843316 - RNA, 19 nt, Artificial Sequence
  Description of Artificial Sequence: Synthetic oligonucleotide
  Antisense strand to SEQ ID NO: 1843315
acaaucauguagcuccugc

SEQ ID NO: 1843317 - RNA, 19 nt, Artificial Sequence
  Description of Artificial Sequence: Synthetic oligonucleotide
  Sense strand starting at position 3701 of SEQ ID NO: 1563934
gagcuacaugauuguaaga

SEQ ID NO: 1843318 - RNA, 19 nt, Artificial Sequence
  Description of Artificial Sequence: Synthetic oligonucleotide
  Antisense strand to SEQ ID NO: 1843317
ucuuacaaucauguagcuc

SEQ ID NO: 1843319 - RNA, 19 nt, Artificial Sequence
  Description of Artificial Sequence: Synthetic oligonucleotide
  Sense strand starting at position 3770 of SEQ ID NO: 1563934
gguugagccacauggugau

SEQ ID NO: 1843320 - RNA, 19 nt, Artificial Sequence
  Description of Artificial Sequence: Synthetic oligonucleotide
  Antisense strand to SEQ ID NO: 1843319
aucaccauguggcucaacc

SEQ ID NO: 1843321 - RNA, 19 nt, Artificial Sequence
  Description of Artificial Sequence: Synthetic oligonucleotide
  Sense strand starting at position 3818 of SEQ ID NO: 1563934
guacaauagccauaguaua

SEQ ID NO: 1843322 - RNA, 19 nt, Artificial Sequence
  Description of Artificial Sequence: Synthetic oligonucleotide
  Antisense strand to SEQ ID NO: 1843321
uauacuauggcuauuguac

SEQ ID NO: 1843323 - RNA, 19 nt, Artificial Sequence
  Description of Artificial Sequence: Synthetic oligonucleotide
  Sense strand starting at position 35 of SEQ ID NO: 1563935
gaaguaguucuccaaagca

SEQ ID NO: 1843324 - RNA, 19 nt, Artificial Sequence
  Description of Artificial Sequence: Synthetic oligonucleotide
  Antisense strand to SEQ ID NO: 1843323
ugcuuuggagaacuacuuc

SEQ ID NO: 1843325 - RNA, 19 nt, Artificial Sequence
  Description of Artificial Sequence: Synthetic oligonucleotide
  Sense strand starting at position 54 of SEQ ID NO: 1563935
caguucuaugcugguaaga

SEQ ID NO: 1843326 - RNA, 19 nt, Artificial Sequence
  Description of Artificial Sequence: Synthetic oligonucleotide
  Antisense strand to SEQ ID NO: 1843325
ucuuaccagcauagaacug

SEQ ID NO: 1843327 - RNA, 19 nt, Artificial Sequence
  Description of Artificial Sequence: Synthetic oligonucleotide
  Sense strand starting at position 67 of SEQ ID NO: 1563935
guaagagaccuaggcaaga

SEQ ID NO: 1843328 - RNA, 19 nt, Artificial Sequence
  Description of Artificial Sequence: Synthetic oligonucleotide
  Antisense strand to SEQ ID NO: 1843327
ucuugccuaggucucuuac

SEQ ID NO: 1843329 - RNA, 19 nt, Artificial Sequence
  Description of Artificial Sequence: Synthetic oligonucleotide
  Sense strand starting at position 120 of SEQ ID NO: 1563935
agauauggugcagggauaa

SEQ ID NO: 1843330 - RNA, 19 nt, Artificial Sequence
  Description of Artificial Sequence: Synthetic oligonucleotide
  Antisense strand to SEQ ID NO: 1843329
uuaucccugcaccauaucu

SEQ ID NO: 1843331 - RNA, 19 nt, Artificial Sequence
  Description of Artificial Sequence: Synthetic oligonucleotide
  Sense strand starting at position 155 of SEQ ID NO: 1563935
ugaugaaaucucggucugu

SEQ ID NO: 1843332 - RNA, 19 nt, Artificial Sequence
  Description of Artificial Sequence: Synthetic oligonucleotide
  Antisense strand to SEQ ID NO: 1843331
acagaccgagauuucauca

SEQ ID NO: 1843333 - RNA, 19 nt, Artificial Sequence
  Description of Artificial Sequence: Synthetic oligonucleotide
  Sense strand starting at position 166 of SEQ ID NO: 1563935
cggucuguugaggacuuaa

SEQ ID NO: 1843334 - RNA, 19 nt, Artificial Sequence
  Description of Artificial Sequence: Synthetic oligonucleotide
  Antisense strand to SEQ ID NO: 1843333
uuaaguccucaacagaccg

SEQ ID NO: 1843335 - RNA, 19 nt, Artificial Sequence
  Description of Artificial Sequence: Synthetic oligonucleotide
  Sense strand starting at position 213 of SEQ ID NO: 1563935
guggguguaagcuauacuu

SEQ ID NO: 1843336 - RNA, 19 nt, Artificial Sequence
  Description of Artificial Sequence: Synthetic oligonucleotide
  Antisense strand to SEQ ID NO: 1843335
aaguauagcuuacacccac

SEQ ID NO: 1843337 - RNA, 19 nt, Artificial Sequence
  Description of Artificial Sequence: Synthetic oligonucleotide
  Sense strand starting at position 345 of SEQ ID NO: 1563935
ugguuaauugauggaacua

SEQ ID NO: 1843338 - RNA, 19 nt, Artificial Sequence
  Description of Artificial Sequence: Synthetic oligonucleotide
  Antisense strand to SEQ ID NO: 1843337
uaguuccaucaauuaacca

SEQ ID NO: 1843339 - RNA, 19 nt, Artificial Sequence
  Description of Artificial Sequence: Synthetic oligonucleotide
  Sense strand starting at position 503 of SEQ ID NO: 1563935
aaguaaaccugggauauga

SEQ ID NO: 1843340 - RNA, 19 nt, Artificial Sequence
  Description of Artificial Sequence: Synthetic oligonucleotide
  Antisense strand to SEQ ID NO: 1843339
ucauaucccagguuuacuu

SEQ ID NO: 1843341 - RNA, 19 nt, Artificial Sequence
  Description of Artificial Sequence: Synthetic oligonucleotide
  Sense strand starting at position 642 of SEQ ID NO: 1563935
ccugguauuuaauaaagag

SEQ ID NO: 1843342 - RNA, 19 nt, Artificial Sequence
  Description of Artificial Sequence: Synthetic oligonucleotide
  Antisense strand to SEQ ID NO: 1843341
cucuuuauuaaauaccagg

SEQ ID NO: 1843343 - RNA, 19 nt, Artificial Sequence
  Description of Artificial Sequence: Synthetic oligonucleotide
  Sense strand starting at position 663 of SEQ ID NO: 1563935
guagucuauaaagaguagu

SEQ ID NO: 1843344 - RNA, 19 nt, Artificial Sequence
  Description of Artificial Sequence: Synthetic oligonucleotide
  Antisense strand to SEQ ID NO: 1843343
acuacucuuuauagacuac

SEQ ID NO: 1843345 - RNA, 19 nt, Artificial Sequence
  Description of Artificial Sequence: Synthetic oligonucleotide
  Sense strand starting at position 676 of SEQ ID NO: 1563935
aguaguagagucuauaaca

SEQ ID NO: 1843346 - RNA, 19 nt, Artificial Sequence
  Description of Artificial Sequence: Synthetic oligonucleotide
  Antisense strand to SEQ ID NO: 1843345
uguuauagacucuacuacu

SEQ ID NO: 1843347 - RNA, 19 nt, Artificial Sequence
  Description of Artificial Sequence: Synthetic oligonucleotide
  Sense strand starting at position 853 of SEQ ID NO: 1563935
gacagaagcugaugauuua

SEQ ID NO: 1843348 - RNA, 19 nt, Artificial Sequence
  Description of Artificial Sequence: Synthetic oligonucleotide
  Antisense strand to SEQ ID NO: 1843347
uaaaucaucagcuucuguc

SEQ ID NO: 1843349 - RNA, 19 nt, Artificial Sequence
  Description of Artificial Sequence: Synthetic oligonucleotide
  Sense strand starting at position 877 of SEQ ID NO: 1563935
accacuauguagcucuaua

SEQ ID NO: 1843350 - RNA, 19 nt, Artificial Sequence
  Description of Artificial Sequence: Synthetic oligonucleotide
  Antisense strand to SEQ ID NO: 1843349
uauagagcuacauaguggu

SEQ ID NO: 1843351 - RNA, 19 nt, Artificial Sequence
  Description of Artificial Sequence: Synthetic oligonucleotide
  Sense strand starting at position 941 of SEQ ID NO: 1563935
gacucugaaguuugcaauu

SEQ ID NO: 1843352 - RNA, 19 nt, Artificial Sequence
  Description of Artificial Sequence: Synthetic oligonucleotide
  Antisense strand to SEQ ID NO: 1843351
aauugcaaacuucagaguc

SEQ ID NO: 1843353 - RNA, 19 nt, Artificial Sequence
  Description of Artificial Sequence: Synthetic oligonucleotide
  Sense strand starting at position 982 of SEQ ID NO: 1563935
agugcaugucuuuaggaca

SEQ ID NO: 1843354 - RNA, 19 nt, Artificial Sequence
  Description of Artificial Sequence: Synthetic oligonucleotide
  Antisense strand to SEQ ID NO: 1843353
uguccuaaagacaugcacu

SEQ ID NO: 1843355 - RNA, 19 nt, Artificial Sequence
  Description of Artificial Sequence: Synthetic oligonucleotide
  Sense strand starting at position 1167 of SEQ ID NO: 1563935
cugaauaagcuaggaaauu

SEQ ID NO: 1843356 - RNA, 19 nt, Artificial Sequence
  Description of Artificial Sequence: Synthetic oligonucleotide
  Antisense strand to SEQ ID NO: 1843355
aauuuccuagcuuauucag

SEQ ID NO: 1843357 - RNA, 19 nt, Artificial Sequence
  Description of Artificial Sequence: Synthetic oligonucleotide
  Sense strand starting at position 1299 of SEQ ID NO: 1563935
ggcagcuccacuuaggaaa

SEQ ID NO: 1843358 - RNA, 19 nt, Artificial Sequence
  Description of Artificial Sequence: Synthetic oligonucleotide
  Antisense strand to SEQ ID NO: 1843357
uuuccuaaguggagcugcc

SEQ ID NO: 1843359 - RNA, 19 nt, Artificial Sequence
  Description of Artificial Sequence: Synthetic oligonucleotide
  Sense strand starting at position 1320 of SEQ ID NO: 1563935
uucccacauugcguaaaua

SEQ ID NO: 1843360 - RNA, 19 nt, Artificial Sequence
  Description of Artificial Sequence: Synthetic oligonucleotide
  Antisense strand to SEQ ID NO: 1843359
uauuuacgcaaugugggaa

SEQ ID NO: 1843361 - RNA, 19 nt, Artificial Sequence
  Description of Artificial Sequence: Synthetic oligonucleotide
  Sense strand starting at position 1321 of SEQ ID NO: 1563935
ucccacauugcguaaauau

SEQ ID NO: 1843362 - RNA, 19 nt, Artificial Sequence
  Description of Artificial Sequence: Synthetic oligonucleotide
  Antisense strand to SEQ ID NO: 1843361
auauuuacgcaauguggga

SEQ ID NO: 1843363 - RNA, 19 nt, Artificial Sequence
  Description of Artificial Sequence: Synthetic oligonucleotide
  Sense strand starting at position 1392 of SEQ ID NO: 1563935
guucgugccggagaauuaa

SEQ ID NO: 1843364 - RNA, 19 nt, Artificial Sequence
  Description of Artificial Sequence: Synthetic oligonucleotide
  Antisense strand to SEQ ID NO: 1843363
uuaauucuccggcacgaac

SEQ ID NO: 1843365 - RNA, 19 nt, Artificial Sequence
  Description of Artificial Sequence: Synthetic oligonucleotide
  Sense strand starting at position 1481 of SEQ ID NO: 1563935
uucuuugucaggugacuga

SEQ ID NO: 1843366 - RNA, 19 nt, Artificial Sequence
  Description of Artificial Sequence: Synthetic oligonucleotide
  Antisense strand to SEQ ID NO: 1843365
ucagucaccugacaaagaa

SEQ ID NO: 1843367 - RNA, 19 nt, Artificial Sequence
  Description of Artificial Sequence: Synthetic oligonucleotide
  Sense strand starting at position 1485 of SEQ ID NO: 1563935
uugucaggugacugaaagu

SEQ ID NO: 1843368 - RNA, 19 nt, Artificial Sequence
  Description of Artificial Sequence: Synthetic oligonucleotide
  Antisense strand to SEQ ID NO: 1843367
acuuucagucaccugacaa

SEQ ID NO: 1843369 - RNA, 19 nt, Artificial Sequence
  Description of Artificial Sequence: Synthetic oligonucleotide
  Sense strand starting at position 2062 of SEQ ID NO: 1563935
cuuaucuacuuguuugaua

SEQ ID NO: 1843370 - RNA, 19 nt, Artificial Sequence
  Description of Artificial Sequence: Synthetic oligonucleotide
  Antisense strand to SEQ ID NO: 1843369
uaucaaacaaguagauaag

SEQ ID NO: 1843371 - RNA, 19 nt, Artificial Sequence
  Description of Artificial Sequence: Synthetic oligonucleotide
  Sense strand starting at position 2063 of SEQ ID NO: 1563935
uuaucuacuuguuugauac

SEQ ID NO: 1843372 - RNA, 19 nt, Artificial Sequence
  Description of Artificial Sequence: Synthetic oligonucleotide
  Antisense strand to SEQ ID NO: 1843371
guaucaaacaaguagauaa

SEQ ID NO: 1843373 - RNA, 19 nt, Artificial Sequence
  Description of Artificial Sequence: Synthetic oligonucleotide
  Sense strand starting at position 2070 of SEQ ID NO: 1563935
cuuguuugauacuuaguuu

SEQ ID NO: 1843374 - RNA, 19 nt, Artificial Sequence
  Description of Artificial Sequence: Synthetic oligonucleotide
  Antisense strand to SEQ ID NO: 1843373
aaacuaaguaucaaacaag

SEQ ID NO: 1843375 - RNA, 19 nt, Artificial Sequence
  Description of Artificial Sequence: Synthetic oligonucleotide
  Sense strand starting at position 2263 of SEQ ID NO: 1563935
ccuacuauuccguagccua

SEQ ID NO: 1843376 - RNA, 19 nt, Artificial Sequence
  Description of Artificial Sequence: Synthetic oligonucleotide
  Antisense strand to SEQ ID NO: 1843375
uaggcuacggaauaguagg

SEQ ID NO: 1843377 - RNA, 19 nt, Artificial Sequence
  Description of Artificial Sequence: Synthetic oligonucleotide
  Sense strand starting at position 2270 of SEQ ID NO: 1563935
uuccguagccuauaggaua

SEQ ID NO: 1843378 - RNA, 19 nt, Artificial Sequence
  Description of Artificial Sequence: Synthetic oligonucleotide
  Antisense strand to SEQ ID NO: 1843377
uauccuauaggcuacggaa

SEQ ID NO: 1843379 - RNA, 19 nt, Artificial Sequence
  Description of Artificial Sequence: Synthetic oligonucleotide
  Sense strand starting at position 2332 of SEQ ID NO: 1563935
uuuagcauucuggaacguu

SEQ ID NO: 1843380 - RNA, 19 nt, Artificial Sequence
  Description of Artificial Sequence: Synthetic oligonucleotide
  Antisense strand to SEQ ID NO: 1843379
aacguuccagaaugcuaaa

SEQ ID NO: 1843381 - RNA, 19 nt, Artificial Sequence
  Description of Artificial Sequence: Synthetic oligonucleotide
  Sense strand starting at position 2357 of SEQ ID NO: 1563935
ggaucauccucacugaauu

SEQ ID NO: 1843382 - RNA, 19 nt, Artificial Sequence
  Description of Artificial Sequence: Synthetic oligonucleotide
  Antisense strand to SEQ ID NO: 1843381
aauucagugaggaugaucc

SEQ ID NO: 1843383 - RNA, 19 nt, Artificial Sequence
  Description of Artificial Sequence: Synthetic oligonucleotide
  Sense strand starting at position 2533 of SEQ ID NO: 1563935
gcuauuuauucugcaaggu

SEQ ID NO: 1843384 - RNA, 19 nt, Artificial Sequence
  Description of Artificial Sequence: Synthetic oligonucleotide
  Antisense strand to SEQ ID NO: 1843383
accuugcagaauaaauagc

SEQ ID NO: 1843385 - RNA, 19 nt, Artificial Sequence
  Description of Artificial Sequence: Synthetic oligonucleotide
  Sense strand starting at position 2542 of SEQ ID NO: 1563935
ucugcaagguauucuaaca

SEQ ID NO: 1843386 - RNA, 19 nt, Artificial Sequence
  Description of Artificial Sequence: Synthetic oligonucleotide
  Antisense strand to SEQ ID NO: 1843385
uguuagaauaccuugcaga

SEQ ID NO: 1843387 - RNA, 19 nt, Artificial Sequence
  Description of Artificial Sequence: Synthetic oligonucleotide
  Sense strand starting at position 2573 of SEQ ID NO: 1563935
ucgagugcugacuauaugu

SEQ ID NO: 1843388 - RNA, 19 nt, Artificial Sequence
  Description of Artificial Sequence: Synthetic oligonucleotide
  Antisense strand to SEQ ID NO: 1843387
acauauagucagcacucga

SEQ ID NO: 1843389 - RNA, 19 nt, Artificial Sequence
  Description of Artificial Sequence: Synthetic oligonucleotide
  Sense strand starting at position 2705 of SEQ ID NO: 1563935
gucacaaacuaguugagau

SEQ ID NO: 1843390 - RNA, 19 nt, Artificial Sequence
  Description of Artificial Sequence: Synthetic oligonucleotide
  Antisense strand to SEQ ID NO: 1843389
aucucaacuaguuugugac

SEQ ID NO: 1843391 - RNA, 19 nt, Artificial Sequence
  Description of Artificial Sequence: Synthetic oligonucleotide
  Sense strand starting at position 3226 of SEQ ID NO: 1563935
ucaaacuuguacguccaaa

SEQ ID NO: 1843392 - RNA, 19 nt, Artificial Sequence
  Description of Artificial Sequence: Synthetic oligonucleotide
  Antisense strand to SEQ ID NO: 1843391
uuuggacguacaaguuuga

SEQ ID NO: 1843393 - RNA, 19 nt, Artificial Sequence
  Description of Artificial Sequence: Synthetic oligonucleotide
  Sense strand starting at position 3302 of SEQ ID NO: 1563935
ucuugaauucucggaaucu

SEQ ID NO: 1843394 - RNA, 19 nt, Artificial Sequence
  Description of Artificial Sequence: Synthetic oligonucleotide
  Antisense strand to SEQ ID NO: 1843393
agauuccgagaauucaaga

SEQ ID NO: 1843395 - RNA, 19 nt, Artificial Sequence
  Description of Artificial Sequence: Synthetic oligonucleotide
  Sense strand starting at position 3412 of SEQ ID NO: 1563935
cuguauauagaguggugaa

SEQ ID NO: 1843396 - RNA, 19 nt, Artificial Sequence
  Description of Artificial Sequence: Synthetic oligonucleotide
  Antisense strand to SEQ ID NO: 1843395
uucaccacucuauauacag

SEQ ID NO: 1843397 - RNA, 19 nt, Artificial Sequence
  Description of Artificial Sequence: Synthetic oligonucleotide
  Sense strand starting at position 3413 of SEQ ID NO: 1563935
uguauauagaguggugaau

SEQ ID NO: 1843398 - RNA, 19 nt, Artificial Sequence
  Description of Artificial Sequence: Synthetic oligonucleotide
  Antisense strand to SEQ ID NO: 1843397
auucaccacucuauauaca

SEQ ID NO: 1843399 - RNA, 19 nt, Artificial Sequence
  Description of Artificial Sequence: Synthetic oligonucleotide
  Sense strand starting at position 3468 of SEQ ID NO: 1563935
guguaaugagagugcuaga

SEQ ID NO: 1843400 - RNA, 19 nt, Artificial Sequence
  Description of Artificial Sequence: Synthetic oligonucleotide
  Antisense strand to SEQ ID NO: 1843399
ucuagcacucucauuacac

SEQ ID NO: 1843401 - RNA, 19 nt, Artificial Sequence
  Description of Artificial Sequence: Synthetic oligonucleotide
  Sense strand starting at position 3519 of SEQ ID NO: 1563935
cuaaguaacuugcuuaguu

SEQ ID NO: 1843402 - RNA, 19 nt, Artificial Sequence
  Description of Artificial Sequence: Synthetic oligonucleotide
  Antisense strand to SEQ ID NO: 1843401
aacuaagcaaguuacuuag

SEQ ID NO: 1843403 - RNA, 19 nt, Artificial Sequence
  Description of Artificial Sequence: Synthetic oligonucleotide
  Sense strand starting at position 323 of SEQ ID NO: 1563936
gaaguaguucuccaaagca

SEQ ID NO: 1843404 - RNA, 19 nt, Artificial Sequence
  Description of Artificial Sequence: Synthetic oligonucleotide
  Antisense strand to SEQ ID NO: 1843403
ugcuuuggagaacuacuuc

SEQ ID NO: 1843405 - RNA, 19 nt, Artificial Sequence
  Description of Artificial Sequence: Synthetic oligonucleotide
  Sense strand starting at position 342 of SEQ ID NO: 1563936
caguucuaugcugguaaga

SEQ ID NO: 1843406 - RNA, 19 nt, Artificial Sequence
  Description of Artificial Sequence: Synthetic oligonucleotide
  Antisense strand to SEQ ID NO: 1843405
ucuuaccagcauagaacug

SEQ ID NO: 1843407 - RNA, 19 nt, Artificial Sequence
  Description of Artificial Sequence: Synthetic oligonucleotide
  Sense strand starting at position 355 of SEQ ID NO: 1563936
guaagagaccuaggcaaga

SEQ ID NO: 1843408 - RNA, 19 nt, Artificial Sequence
  Description of Artificial Sequence: Synthetic oligonucleotide
  Antisense strand to SEQ ID NO: 1843407
ucuugccuaggucucuuac

SEQ ID NO: 1843409 - RNA, 19 nt, Artificial Sequence
  Description of Artificial Sequence: Synthetic oligonucleotide
  Sense strand starting at position 408 of SEQ ID NO: 1563936
agauauggugcagggauaa

SEQ ID NO: 1843410 - RNA, 19 nt, Artificial Sequence
  Description of Artificial Sequence: Synthetic oligonucleotide
  Antisense strand to SEQ ID NO: 1843409
uuaucccugcaccauaucu

SEQ ID NO: 1843411 - RNA, 19 nt, Artificial Sequence
  Description of Artificial Sequence: Synthetic oligonucleotide
  Sense strand starting at position 443 of SEQ ID NO: 1563936
ugaugaaaucucggucugu

SEQ ID NO: 1843412 - RNA, 19 nt, Artificial Sequence
  Description of Artificial Sequence: Synthetic oligonucleotide
  Antisense strand to SEQ ID NO: 1843411
acagaccgagauuucauca

SEQ ID NO: 1843413 - RNA, 19 nt, Artificial Sequence
  Description of Artificial Sequence: Synthetic oligonucleotide
  Sense strand starting at position 454 of SEQ ID NO: 1563936
cggucuguugaggacuuaa

SEQ ID NO: 1843414 - RNA, 19 nt, Artificial Sequence
  Description of Artificial Sequence: Synthetic oligonucleotide
  Antisense strand to SEQ ID NO: 1843413
uuaaguccucaacagaccg

SEQ ID NO: 1843415 - RNA, 19 nt, Artificial Sequence
  Description of Artificial Sequence: Synthetic oligonucleotide
  Sense strand starting at position 501 of SEQ ID NO: 1563936
guggguguaagcuauacuu

SEQ ID NO: 1843416 - RNA, 19 nt, Artificial Sequence
  Description of Artificial Sequence: Synthetic oligonucleotide
  Antisense strand to SEQ ID NO: 1843415
aaguauagcuuacacccac

SEQ ID NO: 1843417 - RNA, 19 nt, Artificial Sequence
  Description of Artificial Sequence: Synthetic oligonucleotide
  Sense strand starting at position 633 of SEQ ID NO: 1563936
ugguuaauugauggaacua

SEQ ID NO: 1843418 - RNA, 19 nt, Artificial Sequence
  Description of Artificial Sequence: Synthetic oligonucleotide
  Antisense strand to SEQ ID NO: 1843417
uaguuccaucaauuaacca

SEQ ID NO: 1843419 - RNA, 19 nt, Artificial Sequence
  Description of Artificial Sequence: Synthetic oligonucleotide
  Sense strand starting at position 791 of SEQ ID NO: 1563936
aaguaaaccugggauauga

SEQ ID NO: 1843420 - RNA, 19 nt, Artificial Sequence
  Description of Artificial Sequence: Synthetic oligonucleotide
  Antisense strand to SEQ ID NO: 1843419
ucauaucccagguuuacuu

SEQ ID NO: 1843421 - RNA, 19 nt, Artificial Sequence
  Description of Artificial Sequence: Synthetic oligonucleotide
  Sense strand starting at position 930 of SEQ ID NO: 1563936
ccugguauuuaauaaagag

SEQ ID NO: 1843422 - RNA, 19 nt, Artificial Sequence
  Description of Artificial Sequence: Synthetic oligonucleotide
  Antisense strand to SEQ ID NO: 1843421
cucuuuauuaaauaccagg

SEQ ID NO: 1843423 - RNA, 19 nt, Artificial Sequence
  Description of Artificial Sequence: Synthetic oligonucleotide
  Sense strand starting at position 951 of SEQ ID NO: 1563936
guagucuauaaagaguagu

SEQ ID NO: 1843424 - RNA, 19 nt, Artificial Sequence
  Description of Artificial Sequence: Synthetic oligonucleotide
  Antisense strand to SEQ ID NO: 1843423
acuacucuuuauagacuac

SEQ ID NO: 1843425 - RNA, 19 nt, Artificial Sequence
  Description of Artificial Sequence: Synthetic oligonucleotide
  Sense strand starting at position 964 of SEQ ID NO: 1563936
aguaguagagucuauaaca

SEQ ID NO: 1843426 - RNA, 19 nt, Artificial Sequence
  Description of Artificial Sequence: Synthetic oligonucleotide
  Antisense strand to SEQ ID NO: 1843425
uguuauagacucuacuacu

SEQ ID NO: 1843427 - RNA, 19 nt, Artificial Sequence
  Description of Artificial Sequence: Synthetic oligonucleotide
  Sense strand starting at position 1141 of SEQ ID NO: 1563936
gacagaagcugaugauuua

SEQ ID NO: 1843428 - RNA, 19 nt, Artificial Sequence
  Description of Artificial Sequence: Synthetic oligonucleotide
  Antisense strand to SEQ ID NO: 1843427
uaaaucaucagcuucuguc

SEQ ID NO: 1843429 - RNA, 19 nt, Artificial Sequence
  Description of Artificial Sequence: Synthetic oligonucleotide
  Sense strand starting at position 1165 of SEQ ID NO: 1563936
accacuauguagcucuaua

SEQ ID NO: 1843430 - RNA, 19 nt, Artificial Sequence
  Description of Artificial Sequence: Synthetic oligonucleotide
  Antisense strand to SEQ ID NO: 1843429
uauagagcuacauaguggu

SEQ ID NO: 1843431 - RNA, 19 nt, Artificial Sequence
  Description of Artificial Sequence: Synthetic oligonucleotide
  Sense strand starting at position 1229 of SEQ ID NO: 1563936
gacucugaaguuugcaauu

SEQ ID NO: 1843432 - RNA, 19 nt, Artificial Sequence
  Description of Artificial Sequence: Synthetic oligonucleotide
  Antisense strand to SEQ ID NO: 1843431
aauugcaaacuucagaguc

SEQ ID NO: 1843433 - RNA, 19 nt, Artificial Sequence
  Description of Artificial Sequence: Synthetic oligonucleotide
  Sense strand starting at position 1270 of SEQ ID NO: 1563936
agugcaugucuuuaggaca

SEQ ID NO: 1843434 - RNA, 19 nt, Artificial Sequence
  Description of Artificial Sequence: Synthetic oligonucleotide
  Antisense strand to SEQ ID NO: 1843433
uguccuaaagacaugcacu

SEQ ID NO: 1843435 - RNA, 19 nt, Artificial Sequence
  Description of Artificial Sequence: Synthetic oligonucleotide
  Sense strand starting at position 1455 of SEQ ID NO: 1563936
cugaauaagcuaggaaauu

SEQ ID NO: 1843436 - RNA, 19 nt, Artificial Sequence
  Description of Artificial Sequence: Synthetic oligonucleotide
  Antisense strand to SEQ ID NO: 1843435
aauuuccuagcuuauucag

SEQ ID NO: 1843437 - RNA, 19 nt, Artificial Sequence
  Description of Artificial Sequence: Synthetic oligonucleotide
  Sense strand starting at position 1587 of SEQ ID NO: 1563936
ggcagcuccacuuaggaaa

SEQ ID NO: 1843438 - RNA, 19 nt, Artificial Sequence
  Description of Artificial Sequence: Synthetic oligonucleotide
  Antisense strand to SEQ ID NO: 1843437
uuuccuaaguggagcugcc

SEQ ID NO: 1843439 - RNA, 19 nt, Artificial Sequence
  Description of Artificial Sequence: Synthetic oligonucleotide
  Sense strand starting at position 1608 of SEQ ID NO: 1563936
uucccacauugcguaaaua

SEQ ID NO: 1843440 - RNA, 19 nt, Artificial Sequence
  Description of Artificial Sequence: Synthetic oligonucleotide
  Antisense strand to SEQ ID NO: 1843439
uauuuacgcaaugugggaa

SEQ ID NO: 1843441 - RNA, 19 nt, Artificial Sequence
  Description of Artificial Sequence: Synthetic oligonucleotide
  Sense strand starting at position 1609 of SEQ ID NO: 1563936
ucccacauugcguaaauau

SEQ ID NO: 1843442 - RNA, 19 nt, Artificial Sequence
  Description of Artificial Sequence: Synthetic oligonucleotide
  Antisense strand to SEQ ID NO: 1843441
auauuuacgcaauguggga

SEQ ID NO: 1843443 - RNA, 19 nt, Artificial Sequence
  Description of Artificial Sequence: Synthetic oligonucleotide
  Sense strand starting at position 1680 of SEQ ID NO: 1563936
guucgugccggagaauuaa

SEQ ID NO: 1843444 - RNA, 19 nt, Artificial Sequence
  Description of Artificial Sequence: Synthetic oligonucleotide
  Antisense strand to SEQ ID NO: 1843443
uuaauucuccggcacgaac

SEQ ID NO: 1843445 - RNA, 19 nt, Artificial Sequence
  Description of Artificial Sequence: Synthetic oligonucleotide
  Sense strand starting at position 1769 of SEQ ID NO: 1563936
uucuuugucaggugacuga

SEQ ID NO: 1843446 - RNA, 19 nt, Artificial Sequence
  Description of Artificial Sequence: Synthetic oligonucleotide
  Antisense strand to SEQ ID NO: 1843445
ucagucaccugacaaagaa

SEQ ID NO: 1843447 - RNA, 19 nt, Artificial Sequence
  Description of Artificial Sequence: Synthetic oligonucleotide
  Sense strand starting at position 1773 of SEQ ID NO: 1563936
uugucaggugacugaaagu

SEQ ID NO: 1843448 - RNA, 19 nt, Artificial Sequence
  Description of Artificial Sequence: Synthetic oligonucleotide
  Antisense strand to SEQ ID NO: 1843447
acuuucagucaccugacaa

SEQ ID NO: 1843449 - RNA, 19 nt, Artificial Sequence
  Description of Artificial Sequence: Synthetic oligonucleotide
  Sense strand starting at position 2350 of SEQ ID NO: 1563936
cuuaucuacuuguuugaua

SEQ ID NO: 1843450 - RNA, 19 nt, Artificial Sequence
  Description of Artificial Sequence: Synthetic oligonucleotide
  Antisense strand to SEQ ID NO: 1843449
uaucaaacaaguagauaag

SEQ ID NO: 1843451 - RNA, 19 nt, Artificial Sequence
  Description of Artificial Sequence: Synthetic oligonucleotide
  Sense strand starting at position 2351 of SEQ ID NO: 1563936
uuaucuacuuguuugauac

SEQ ID NO: 1843452 - RNA, 19 nt, Artificial Sequence
  Description of Artificial Sequence: Synthetic oligonucleotide
  Antisense strand to SEQ ID NO: 1843451
guaucaaacaaguagauaa

SEQ ID NO: 1843453 - RNA, 19 nt, Artificial Sequence
  Description of Artificial Sequence: Synthetic oligonucleotide
  Sense strand starting at position 2358 of SEQ ID NO: 1563936
cuuguuugauacuuaguuu

SEQ ID NO: 1843454 - RNA, 19 nt, Artificial Sequence
  Description of Artificial Sequence: Synthetic oligonucleotide
  Antisense strand to SEQ ID NO: 1843453
aaacuaaguaucaaacaag

SEQ ID NO: 1843455 - RNA, 19 nt, Artificial Sequence
  Description of Artificial Sequence: Synthetic oligonucleotide
  Sense strand starting at position 2551 of SEQ ID NO: 1563936
ccuacuauuccguagccua

SEQ ID NO: 1843456 - RNA, 19 nt, Artificial Sequence
  Description of Artificial Sequence: Synthetic oligonucleotide
  Antisense strand to SEQ ID NO: 1843455
uaggcuacggaauaguagg

SEQ ID NO: 1843457 - RNA, 19 nt, Artificial Sequence
  Description of Artificial Sequence: Synthetic oligonucleotide
  Sense strand starting at position 2558 of SEQ ID NO: 1563936
uuccguagccuauaggaua

SEQ ID NO: 1843458 - RNA, 19 nt, Artificial Sequence
  Description of Artificial Sequence: Synthetic oligonucleotide
  Antisense strand to SEQ ID NO: 1843457
uauccuauaggcuacggaa

SEQ ID NO: 1843459 - RNA, 19 nt, Artificial Sequence
  Description of Artificial Sequence: Synthetic oligonucleotide
  Sense strand starting at position 2620 of SEQ ID NO: 1563936
uuuagcauucuggaacguu

SEQ ID NO: 1843460 - RNA, 19 nt, Artificial Sequence
  Description of Artificial Sequence: Synthetic oligonucleotide
  Antisense strand to SEQ ID NO: 1843459
aacguuccagaaugcuaaa

SEQ ID NO: 1843461 - RNA, 19 nt, Artificial Sequence
  Description of Artificial Sequence: Synthetic oligonucleotide
  Sense strand starting at position 2645 of SEQ ID NO: 1563936
ggaucauccucacugaauu

SEQ ID NO: 1843462 - RNA, 19 nt, Artificial Sequence
  Description of Artificial Sequence: Synthetic oligonucleotide
  Antisense strand to SEQ ID NO: 1843461
aauucagugaggaugaucc

SEQ ID NO: 1843463 - RNA, 19 nt, Artificial Sequence
  Description of Artificial Sequence: Synthetic oligonucleotide
  Sense strand starting at position 2821 of SEQ ID NO: 1563936
gcuauuuauucugcaaggu

SEQ ID NO: 1843464 - RNA, 19 nt, Artificial Sequence
  Description of Artificial Sequence: Synthetic oligonucleotide
  Antisense strand to SEQ ID NO: 1843463
accuugcagaauaaauagc

SEQ ID NO: 1843465 - RNA, 19 nt, Artificial Sequence
  Description of Artificial Sequence: Synthetic oligonucleotide
  Sense strand starting at position 2830 of SEQ ID NO: 1563936
ucugcaagguauucuaaca

SEQ ID NO: 1843466 - RNA, 19 nt, Artificial Sequence
  Description of Artificial Sequence: Synthetic oligonucleotide
  Antisense strand to SEQ ID NO: 1843465
uguuagaauaccuugcaga

SEQ ID NO: 1843467 - RNA, 19 nt, Artificial Sequence
  Description of Artificial Sequence: Synthetic oligonucleotide
  Sense strand starting at position 2861 of SEQ ID NO: 1563936
ucgagugcugacuauaugu

SEQ ID NO: 1843468 - RNA, 19 nt, Artificial Sequence
  Description of Artificial Sequence: Synthetic oligonucleotide
  Antisense strand to SEQ ID NO: 1843467
acauauagucagcacucga

SEQ ID NO: 1843469 - RNA, 19 nt, Artificial Sequence
  Description of Artificial Sequence: Synthetic oligonucleotide
  Sense strand starting at position 2993 of SEQ ID NO: 1563936
gucacaaacuaguugagau

SEQ ID NO: 1843470 - RNA, 19 nt, Artificial Sequence
  Description of Artificial Sequence: Synthetic oligonucleotide
  Antisense strand to SEQ ID NO: 1843469
aucucaacuaguuugugac

SEQ ID NO: 1843471 - RNA, 19 nt, Artificial Sequence
  Description of Artificial Sequence: Synthetic oligonucleotide
  Sense strand starting at position 3514 of SEQ ID NO: 1563936
ucaaacuuguacguccaaa

SEQ ID NO: 1843472 - RNA, 19 nt, Artificial Sequence
  Description of Artificial Sequence: Synthetic oligonucleotide
  Antisense strand to SEQ ID NO: 1843471
uuuggacguacaaguuuga

SEQ ID NO: 1843473 - RNA, 19 nt, Artificial Sequence
  Description of Artificial Sequence: Synthetic oligonucleotide
  Sense strand starting at position 3590 of SEQ ID NO: 1563936
ucuugaauucucggaaucu

SEQ ID NO: 1843474 - RNA, 19 nt, Artificial Sequence
  Description of Artificial Sequence: Synthetic oligonucleotide
  Antisense strand to SEQ ID NO: 1843473
agauuccgagaauucaaga

SEQ ID NO: 1843475 - RNA, 19 nt, Artificial Sequence
  Description of Artificial Sequence: Synthetic oligonucleotide
  Sense strand starting at position 3700 of SEQ ID NO: 1563936
cuguauauagaguggugaa

SEQ ID NO: 1843476 - RNA, 19 nt, Artificial Sequence
  Description of Artificial Sequence: Synthetic oligonucleotide
  Antisense strand to SEQ ID NO: 1843475
uucaccacucuauauacag

SEQ ID NO: 1843477 - RNA, 19 nt, Artificial Sequence
  Description of Artificial Sequence: Synthetic oligonucleotide
  Sense strand starting at position 3701 of SEQ ID NO: 1563936
uguauauagaguggugaau

SEQ ID NO: 1843478 - RNA, 19 nt, Artificial Sequence
  Description of Artificial Sequence: Synthetic oligonucleotide
  Antisense strand to SEQ ID NO: 1843477
auucaccacucuauauaca

SEQ ID NO: 1843479 - RNA, 19 nt, Artificial Sequence
  Description of Artificial Sequence: Synthetic oligonucleotide
  Sense strand starting at position 3756 of SEQ ID NO: 1563936
guguaaugagagugcuaga

SEQ ID NO: 1843480 - RNA, 19 nt, Artificial Sequence
  Description of Artificial Sequence: Synthetic oligonucleotide
  Antisense strand to SEQ ID NO: 1843479
ucuagcacucucauuacac

SEQ ID NO: 1843481 - RNA, 19 nt, Artificial Sequence
  Description of Artificial Sequence: Synthetic oligonucleotide
  Sense strand starting at position 3807 of SEQ ID NO: 1563936
cuaaguaacuugcuuaguu

SEQ ID NO: 1843482 - RNA, 19 nt, Artificial Sequence
  Description of Artificial Sequence: Synthetic oligonucleotide
  Antisense strand to SEQ ID NO: 1843481
aacuaagcaaguuacuuag

SEQ ID NO: 1843483 - RNA, 19 nt, Artificial Sequence
  Description of Artificial Sequence: Synthetic oligonucleotide
  Sense strand starting at position 118 of SEQ ID NO: 1563937
cugaauaagcuaggaaauu

SEQ ID NO: 1843484 - RNA, 19 nt, Artificial Sequence
  Description of Artificial Sequence: Synthetic oligonucleotide
  Antisense strand to SEQ ID NO: 1843483
aauuuccuagcuuauucag

SEQ ID NO: 1843485 - RNA, 19 nt, Artificial Sequence
  Description of Artificial Sequence: Synthetic oligonucleotide
  Sense strand starting at position 250 of SEQ ID NO: 1563937
ggcagcuccacuuaggaaa

SEQ ID NO: 1843486 - RNA, 19 nt, Artificial Sequence
  Description of Artificial Sequence: Synthetic oligonucleotide
  Antisense strand to SEQ ID NO: 1843485
uuuccuaaguggagcugcc

SEQ ID NO: 1843487 - RNA, 19 nt, Artificial Sequence
  Description of Artificial Sequence: Synthetic oligonucleotide
  Sense strand starting at position 272 of SEQ ID NO: 1563937
ucccacauugcguaaauau

SEQ ID NO: 1843488 - RNA, 19 nt, Artificial Sequence
  Description of Artificial Sequence: Synthetic oligonucleotide
  Antisense strand to SEQ ID NO: 1843487
auauuuacgcaauguggga

SEQ ID NO: 1843489 - RNA, 19 nt, Artificial Sequence
  Description of Artificial Sequence: Synthetic oligonucleotide
  Sense strand starting at position 343 of SEQ ID NO: 1563937
guucgugccggagaauuaa

SEQ ID NO: 1843490 - RNA, 19 nt, Artificial Sequence
  Description of Artificial Sequence: Synthetic oligonucleotide
  Antisense strand to SEQ ID NO: 1843489
uuaauucuccggcacgaac

SEQ ID NO: 1843491 - RNA, 19 nt, Artificial Sequence
  Description of Artificial Sequence: Synthetic oligonucleotide
  Sense strand starting at position 432 of SEQ ID NO: 1563937
uucuuugucaggugacuga

SEQ ID NO: 1843492 - RNA, 19 nt, Artificial Sequence
  Description of Artificial Sequence: Synthetic oligonucleotide
  Antisense strand to SEQ ID NO: 1843491
ucagucaccugacaaagaa

SEQ ID NO: 1843493 - RNA, 19 nt, Artificial Sequence
  Description of Artificial Sequence: Synthetic oligonucleotide
  Sense strand starting at position 436 of SEQ ID NO: 1563937
uugucaggugacugaaagu

SEQ ID NO: 1843494 - RNA, 19 nt, Artificial Sequence
  Description of Artificial Sequence: Synthetic oligonucleotide
  Antisense strand to SEQ ID NO: 1843493
acuuucagucaccugacaa

SEQ ID NO: 1843495 - RNA, 19 nt, Artificial Sequence
  Description of Artificial Sequence: Synthetic oligonucleotide
  Sense strand starting at position 1013 of SEQ ID NO: 1563937
cuuaucuacuuguuugaua

SEQ ID NO: 1843496 - RNA, 19 nt, Artificial Sequence
  Description of Artificial Sequence: Synthetic oligonucleotide
  Antisense strand to SEQ ID NO: 1843495
uaucaaacaaguagauaag

SEQ ID NO: 1843497 - RNA, 19 nt, Artificial Sequence
  Description of Artificial Sequence: Synthetic oligonucleotide
  Sense strand starting at position 1014 of SEQ ID NO: 1563937
uuaucuacuuguuugauac

SEQ ID NO: 1843498 - RNA, 19 nt, Artificial Sequence
  Description of Artificial Sequence: Synthetic oligonucleotide
  Antisense strand to SEQ ID NO: 1843497
guaucaaacaaguagauaa

SEQ ID NO: 1843499 - RNA, 19 nt, Artificial Sequence
  Description of Artificial Sequence: Synthetic oligonucleotide
  Sense strand starting at position 1021 of SEQ ID NO: 1563937
cuuguuugauacuuaguuu

SEQ ID NO: 1843500 - RNA, 19 nt, Artificial Sequence
  Description of Artificial Sequence: Synthetic oligonucleotide
  Antisense strand to SEQ ID NO: 1843499
aaacuaaguaucaaacaag

SEQ ID NO: 1843501 - RNA, 19 nt, Artificial Sequence
  Description of Artificial Sequence: Synthetic oligonucleotide
  Sense strand starting at position 1214 of SEQ ID NO: 1563937
ccuacuauuccguagccua

SEQ ID NO: 1843502 - RNA, 19 nt, Artificial Sequence
  Description of Artificial Sequence: Synthetic oligonucleotide
  Antisense strand to SEQ ID NO: 1843501
uaggcuacggaauaguagg

SEQ ID NO: 1843503 - RNA, 19 nt, Artificial Sequence
  Description of Artificial Sequence: Synthetic oligonucleotide
  Sense strand starting at position 1221 of SEQ ID NO: 1563937
uuccguagccuauaggaua

SEQ ID NO: 1843504 - RNA, 19 nt, Artificial Sequence
  Description of Artificial Sequence: Synthetic oligonucleotide
  Antisense strand to SEQ ID NO: 1843503
uauccuauaggcuacggaa

SEQ ID NO: 1843505 - RNA, 19 nt, Artificial Sequence
  Description of Artificial Sequence: Synthetic oligonucleotide
  Sense strand starting at position 1283 of SEQ ID NO: 1563937
uuuagcauucuggaacguu

SEQ ID NO: 1843506 - RNA, 19 nt, Artificial Sequence
  Description of Artificial Sequence: Synthetic oligonucleotide
  Antisense strand to SEQ ID NO: 1843505
aacguuccagaaugcuaaa

SEQ ID NO: 1843507 - RNA, 19 nt, Artificial Sequence
  Description of Artificial Sequence: Synthetic oligonucleotide
  Sense strand starting at position 1308 of SEQ ID NO: 1563937
ggaucauccucacugaauu

SEQ ID NO: 1843508 - RNA, 19 nt, Artificial Sequence
  Description of Artificial Sequence: Synthetic oligonucleotide
  Antisense strand to SEQ ID NO: 1843507
aauucagugaggaugaucc

SEQ ID NO: 1843509 - RNA, 19 nt, Artificial Sequence
  Description of Artificial Sequence: Synthetic oligonucleotide
  Sense strand starting at position 1484 of SEQ ID NO: 1563937
gcuauuuauucugcaaggu

SEQ ID NO: 1843510 - RNA, 19 nt, Artificial Sequence
  Description of Artificial Sequence: Synthetic oligonucleotide
  Antisense strand to SEQ ID NO: 1843509
accuugcagaauaaauagc

SEQ ID NO: 1843511 - RNA, 19 nt, Artificial Sequence
  Description of Artificial Sequence: Synthetic oligonucleotide
  Sense strand starting at position 1493 of SEQ ID NO: 1563937
ucugcaagguauucuaaca

SEQ ID NO: 1843512 - RNA, 19 nt, Artificial Sequence
  Description of Artificial Sequence: Synthetic oligonucleotide
  Antisense strand to SEQ ID NO: 1843511
uguuagaauaccuugcaga

SEQ ID NO: 1843513 - RNA, 19 nt, Artificial Sequence
  Description of Artificial Sequence: Synthetic oligonucleotide
  Sense strand starting at position 1524 of SEQ ID NO: 1563937
ucgagugcugacuauaugu

SEQ ID NO: 1843514 - RNA, 19 nt, Artificial Sequence
  Description of Artificial Sequence: Synthetic oligonucleotide
  Antisense strand to SEQ ID NO: 1843513
acauauagucagcacucga

SEQ ID NO: 1843515 - RNA, 19 nt, Artificial Sequence
  Description of Artificial Sequence: Synthetic oligonucleotide
  Sense strand starting at position 1656 of SEQ ID NO: 1563937
gucacaaacuaguugagau

SEQ ID NO: 1843516 - RNA, 19 nt, Artificial Sequence
  Description of Artificial Sequence: Synthetic oligonucleotide
  Antisense strand to SEQ ID NO: 1843515
aucucaacuaguuugugac

SEQ ID NO: 1843517 - RNA, 19 nt, Artificial Sequence
  Description of Artificial Sequence: Synthetic oligonucleotide
  Sense strand starting at position 2177 of SEQ ID NO: 1563937
ucaaacuuguacguccaaa

SEQ ID NO: 1843518 - RNA, 19 nt, Artificial Sequence
  Description of Artificial Sequence: Synthetic oligonucleotide
  Antisense strand to SEQ ID NO: 1843517
uuuggacguacaaguuuga

SEQ ID NO: 1843519 - RNA, 19 nt, Artificial Sequence
  Description of Artificial Sequence: Synthetic oligonucleotide
  Sense strand starting at position 2253 of SEQ ID NO: 1563937
ucuugaauucucggaaucu

SEQ ID NO: 1843520 - RNA, 19 nt, Artificial Sequence
  Description of Artificial Sequence: Synthetic oligonucleotide
  Antisense strand to SEQ ID NO: 1843519
agauuccgagaauucaaga

SEQ ID NO: 1843521 - RNA, 19 nt, Artificial Sequence
  Description of Artificial Sequence: Synthetic oligonucleotide
  Sense strand starting at position 2363 of SEQ ID NO: 1563937
cuguauauagaguggugaa

SEQ ID NO: 1843522 - RNA, 19 nt, Artificial Sequence
  Description of Artificial Sequence: Synthetic oligonucleotide
  Antisense strand to SEQ ID NO: 1843521
uucaccacucuauauacag

SEQ ID NO: 1843523 - RNA, 19 nt, Artificial Sequence
  Description of Artificial Sequence: Synthetic oligonucleotide
  Sense strand starting at position 2364 of SEQ ID NO: 1563937
uguauauagaguggugaau

SEQ ID NO: 1843524 - RNA, 19 nt, Artificial Sequence
  Description of Artificial Sequence: Synthetic oligonucleotide
  Antisense strand to SEQ ID NO: 1843523
auucaccacucuauauaca

SEQ ID NO: 1843525 - RNA, 19 nt, Artificial Sequence
  Description of Artificial Sequence: Synthetic oligonucleotide
  Sense strand starting at position 2419 of SEQ ID NO: 1563937
guguaaugagagugcuaga

SEQ ID NO: 1843526 - RNA, 19 nt, Artificial Sequence
  Description of Artificial Sequence: Synthetic oligonucleotide
  Antisense strand to SEQ ID NO: 1843525
ucuagcacucucauuacac

SEQ ID NO: 1843527 - RNA, 19 nt, Artificial Sequence
  Description of Artificial Sequence: Synthetic oligonucleotide
  Sense strand starting at position 2945 of SEQ ID NO: 1563937
uuggucugaucugaauuua

SEQ ID NO: 1843528 - RNA, 19 nt, Artificial Sequence
  Description of Artificial Sequence: Synthetic oligonucleotide
  Antisense strand to SEQ ID NO: 1843527
uaaauucagaucagaccaa

SEQ ID NO: 1843529 - RNA, 19 nt, Artificial Sequence
  Description of Artificial Sequence: Synthetic oligonucleotide
  Sense strand starting at position 3015 of SEQ ID NO: 1563937
acuguuugccaagaaugac

SEQ ID NO: 1843530 - RNA, 19 nt, Artificial Sequence
  Description of Artificial Sequence: Synthetic oligonucleotide
  Antisense strand to SEQ ID NO: 1843529
gucauucuuggcaaacagu

SEQ ID NO: 1843531 - RNA, 19 nt, Artificial Sequence
  Description of Artificial Sequence: Synthetic oligonucleotide
  Sense strand starting at position 3295 of SEQ ID NO: 1563937
uuuggaauguucccuccau

SEQ ID NO: 1843532 - RNA, 19 nt, Artificial Sequence
  Description of Artificial Sequence: Synthetic oligonucleotide
  Antisense strand to SEQ ID NO: 1843531
auggagggaacauuccaaa

SEQ ID NO: 1843533 - RNA, 19 nt, Artificial Sequence
  Description of Artificial Sequence: Synthetic oligonucleotide
  Sense strand starting at position 3296 of SEQ ID NO: 1563937
uuggaauguucccuccauu

SEQ ID NO: 1843534 - RNA, 19 nt, Artificial Sequence
  Description of Artificial Sequence: Synthetic oligonucleotide
  Antisense strand to SEQ ID NO: 1843533
aauggagggaacauuccaa

SEQ ID NO: 1843535 - RNA, 19 nt, Artificial Sequence
  Description of Artificial Sequence: Synthetic oligonucleotide
  Sense strand starting at position 3344 of SEQ ID NO: 1563937
ugcgaucuucccuaugaag

SEQ ID NO: 1843536 - RNA, 19 nt, Artificial Sequence
  Description of Artificial Sequence: Synthetic oligonucleotide
  Antisense strand to SEQ ID NO: 1843535
cuucauagggaagaucgca

SEQ ID NO: 1843537 - RNA, 19 nt, Artificial Sequence
  Description of Artificial Sequence: Synthetic oligonucleotide
  Sense strand starting at position 3346 of SEQ ID NO: 1563937
cgaucuucccuaugaaguc

SEQ ID NO: 1843538 - RNA, 19 nt, Artificial Sequence
  Description of Artificial Sequence: Synthetic oligonucleotide
  Antisense strand to SEQ ID NO: 1843537
gacuucauagggaagaucg

SEQ ID NO: 1843539 - RNA, 19 nt, Artificial Sequence
  Description of Artificial Sequence: Synthetic oligonucleotide
  Sense strand starting at position 3405 of SEQ ID NO: 1563937
cucuuuaauggcuaugaga

SEQ ID NO: 1843540 - RNA, 19 nt, Artificial Sequence
  Description of Artificial Sequence: Synthetic oligonucleotide
  Antisense strand to SEQ ID NO: 1843539
ucucauagccauuaaagag

SEQ ID NO: 1843541 - RNA, 19 nt, Artificial Sequence
  Description of Artificial Sequence: Synthetic oligonucleotide
  Sense strand starting at position 3407 of SEQ ID NO: 1563937
cuuuaauggcuaugagaau

SEQ ID NO: 1843542 - RNA, 19 nt, Artificial Sequence
  Description of Artificial Sequence: Synthetic oligonucleotide
  Antisense strand to SEQ ID NO: 1843541
auucucauagccauuaaag

SEQ ID NO: 1843543 - RNA, 19 nt, Artificial Sequence
  Description of Artificial Sequence: Synthetic oligonucleotide
  Sense strand starting at position 3414 of SEQ ID NO: 1563937
ggcuaugagaauggcuauu

SEQ ID NO: 1843544 - RNA, 19 nt, Artificial Sequence
  Description of Artificial Sequence: Synthetic oligonucleotide
  Antisense strand to SEQ ID NO: 1843543
aauagccauucucauagcc

SEQ ID NO: 1843545 - RNA, 19 nt, Artificial Sequence
  Description of Artificial Sequence: Synthetic oligonucleotide
  Sense strand starting at position 3425 of SEQ ID NO: 1563937
uggcuauuggugugggaaa

SEQ ID NO: 1843546 - RNA, 19 nt, Artificial Sequence
  Description of Artificial Sequence: Synthetic oligonucleotide
  Antisense strand to SEQ ID NO: 1843545
uuucccacaccaauagcca

SEQ ID NO: 1843547 - RNA, 19 nt, Artificial Sequence
  Description of Artificial Sequence: Synthetic oligonucleotide
  Sense strand starting at position 3427 of SEQ ID NO: 1563937
gcuauuggugugggaaaua

SEQ ID NO: 1843548 - RNA, 19 nt, Artificial Sequence
  Description of Artificial Sequence: Synthetic oligonucleotide
  Antisense strand to SEQ ID NO: 1843547
uauuucccacaccaauagc

SEQ ID NO: 1843549 - RNA, 19 nt, Artificial Sequence
  Description of Artificial Sequence: Synthetic oligonucleotide
  Sense strand starting at position 3545 of SEQ ID NO: 1563937
gugcuacaaaguggaaauu

SEQ ID NO: 1843550 - RNA, 19 nt, Artificial Sequence
  Description of Artificial Sequence: Synthetic oligonucleotide
  Antisense strand to SEQ ID NO: 1843549
aauuuccacuuuguagcac

SEQ ID NO: 1843551 - RNA, 19 nt, Artificial Sequence
  Description of Artificial Sequence: Synthetic oligonucleotide
  Sense strand starting at position 3704 of SEQ ID NO: 1563937
gugaauaagacacggaguu

SEQ ID NO: 1843552 - RNA, 19 nt, Artificial Sequence
  Description of Artificial Sequence: Synthetic oligonucleotide
  Antisense strand to SEQ ID NO: 1843551
aacuccgugucuuauucac

SEQ ID NO: 1843553 - RNA, 19 nt, Artificial Sequence
  Description of Artificial Sequence: Synthetic oligonucleotide
  Sense strand starting at position 3730 of SEQ ID NO: 1563937
acuagauaacugcaaaugu

SEQ ID NO: 1843554 - RNA, 19 nt, Artificial Sequence
  Description of Artificial Sequence: Synthetic oligonucleotide
  Antisense strand to SEQ ID NO: 1843553
acauuugcaguuaucuagu

SEQ ID NO: 1843555 - RNA, 19 nt, Artificial Sequence
  Description of Artificial Sequence: Synthetic oligonucleotide
  Sense strand starting at position 3837 of SEQ ID NO: 1563937
gcaccagucugggcucaaa

SEQ ID NO: 1843556 - RNA, 19 nt, Artificial Sequence
  Description of Artificial Sequence: Synthetic oligonucleotide
  Antisense strand to SEQ ID NO: 1843555
uuugagcccagacuggugc

SEQ ID NO: 1843557 - RNA, 19 nt, Artificial Sequence
  Description of Artificial Sequence: Synthetic oligonucleotide
  Sense strand starting at position 3862 of SEQ ID NO: 1563937
ucaugcuacugacuaguuu

SEQ ID NO: 1843558 - RNA, 19 nt, Artificial Sequence
  Description of Artificial Sequence: Synthetic oligonucleotide
  Antisense strand to SEQ ID NO: 1843557
aaacuagucaguagcauga

SEQ ID NO: 1843559 - RNA, 19 nt, Artificial Sequence
  Description of Artificial Sequence: Synthetic oligonucleotide
  Sense strand starting at position 3910 of SEQ ID NO: 1563937
acucauacucccgaucugu

SEQ ID NO: 1843560 - RNA, 19 nt, Artificial Sequence
  Description of Artificial Sequence: Synthetic oligonucleotide
  Antisense strand to SEQ ID NO: 1843559
acagaucgggaguaugagu

SEQ ID NO: 1843561 - RNA, 19 nt, Artificial Sequence
  Description of Artificial Sequence: Synthetic oligonucleotide
  Sense strand starting at position 3958 of SEQ ID NO: 1563937
acagcauugcuuuaggaau

SEQ ID NO: 1843562 - RNA, 19 nt, Artificial Sequence
  Description of Artificial Sequence: Synthetic oligonucleotide
  Antisense strand to SEQ ID NO: 1843561
auuccuaaagcaaugcugu

SEQ ID NO: 1843563 - RNA, 19 nt, Artificial Sequence
  Description of Artificial Sequence: Synthetic oligonucleotide
  Sense strand starting at position 57 of SEQ ID NO: 1563938
agacaaagagcaugcuauu

SEQ ID NO: 1843564 - RNA, 19 nt, Artificial Sequence
  Description of Artificial Sequence: Synthetic oligonucleotide
  Antisense strand to SEQ ID NO: 1843563
aauagcaugcucuuugucu

SEQ ID NO: 1843565 - RNA, 19 nt, Artificial Sequence
  Description of Artificial Sequence: Synthetic oligonucleotide
  Sense strand starting at position 86 of SEQ ID NO: 1563938
uaaauaucucucgagcguu

SEQ ID NO: 1843566 - RNA, 19 nt, Artificial Sequence
  Description of Artificial Sequence: Synthetic oligonucleotide
  Antisense strand to SEQ ID NO: 1843565
aacgcucgagagauauuua

SEQ ID NO: 1843567 - RNA, 19 nt, Artificial Sequence
  Description of Artificial Sequence: Synthetic oligonucleotide
  Sense strand starting at position 116 of SEQ ID NO: 1563938
caguguaugccuguugguu

SEQ ID NO: 1843568 - RNA, 19 nt, Artificial Sequence
  Description of Artificial Sequence: Synthetic oligonucleotide
  Antisense strand to SEQ ID NO: 1843567
aaccaacaggcauacacug

SEQ ID NO: 1843569 - RNA, 19 nt, Artificial Sequence
  Description of Artificial Sequence: Synthetic oligonucleotide
  Sense strand starting at position 237 of SEQ ID NO: 1563938
aucgcauacagaggucuau

SEQ ID NO: 1843570 - RNA, 19 nt, Artificial Sequence
  Description of Artificial Sequence: Synthetic oligonucleotide
  Antisense strand to SEQ ID NO: 1843569
auagaccucuguaugcgau

SEQ ID NO: 1843571 - RNA, 19 nt, Artificial Sequence
  Description of Artificial Sequence: Synthetic oligonucleotide
  Sense strand starting at position 308 of SEQ ID NO: 1563938
aacagauucuuuguguaga

SEQ ID NO: 1843572 - RNA, 19 nt, Artificial Sequence
  Description of Artificial Sequence: Synthetic oligonucleotide
  Antisense strand to SEQ ID NO: 1843571
ucuacacaaagaaucuguu

SEQ ID NO: 1843573 - RNA, 19 nt, Artificial Sequence
  Description of Artificial Sequence: Synthetic oligonucleotide
  Sense strand starting at position 310 of SEQ ID NO: 1563938
cagauucuuuguguagaau

SEQ ID NO: 1843574 - RNA, 19 nt, Artificial Sequence
  Description of Artificial Sequence: Synthetic oligonucleotide
  Antisense strand to SEQ ID NO: 1843573
auucuacacaaagaaucug

SEQ ID NO: 1843575 - RNA, 19 nt, Artificial Sequence
  Description of Artificial Sequence: Synthetic oligonucleotide
  Sense strand starting at position 311 of SEQ ID NO: 1563938
agauucuuuguguagaauc

SEQ ID NO: 1843576 - RNA, 19 nt, Artificial Sequence
  Description of Artificial Sequence: Synthetic oligonucleotide
  Antisense strand to SEQ ID NO: 1843575
gauucuacacaaagaaucu

SEQ ID NO: 1843577 - RNA, 19 nt, Artificial Sequence
  Description of Artificial Sequence: Synthetic oligonucleotide
  Sense strand starting at position 313 of SEQ ID NO: 1563938
auucuuuguguagaaucau

SEQ ID NO: 1843578 - RNA, 19 nt, Artificial Sequence
  Description of Artificial Sequence: Synthetic oligonucleotide
  Antisense strand to SEQ ID NO: 1843577
augauucuacacaaagaau

SEQ ID NO: 1843579 - RNA, 19 nt, Artificial Sequence
  Description of Artificial Sequence: Synthetic oligonucleotide
  Sense strand starting at position 324 of SEQ ID NO: 1563938
agaaucauuuacugaagaa

SEQ ID NO: 1843580 - RNA, 19 nt, Artificial Sequence
  Description of Artificial Sequence: Synthetic oligonucleotide
  Antisense strand to SEQ ID NO: 1843579
uucuucaguaaaugauucu

SEQ ID NO: 1843581 - RNA, 19 nt, Artificial Sequence
  Description of Artificial Sequence: Synthetic oligonucleotide
  Sense strand starting at position 360 of SEQ ID NO: 1563938
ugggcuaucucagucagau

SEQ ID NO: 1843582 - RNA, 19 nt, Artificial Sequence
  Description of Artificial Sequence: Synthetic oligonucleotide
  Antisense strand to SEQ ID NO: 1843581
aucugacugagauagccca

SEQ ID NO: 1843583 - RNA, 19 nt, Artificial Sequence
  Description of Artificial Sequence: Synthetic oligonucleotide
  Sense strand starting at position 362 of SEQ ID NO: 1563938
ggcuaucucagucagauug

SEQ ID NO: 1843584 - RNA, 19 nt, Artificial Sequence
  Description of Artificial Sequence: Synthetic oligonucleotide
  Antisense strand to SEQ ID NO: 1843583
caaucugacugagauagcc

SEQ ID NO: 1843585 - RNA, 19 nt, Artificial Sequence
  Description of Artificial Sequence: Synthetic oligonucleotide
  Sense strand starting at position 410 of SEQ ID NO: 1563938
uaacgagucuucuugguau

SEQ ID NO: 1843586 - RNA, 19 nt, Artificial Sequence
  Description of Artificial Sequence: Synthetic oligonucleotide
  Antisense strand to SEQ ID NO: 1843585
auaccaagaagacucguua

SEQ ID NO: 1843587 - RNA, 19 nt, Artificial Sequence
  Description of Artificial Sequence: Synthetic oligonucleotide
  Sense strand starting at position 416 of SEQ ID NO: 1563938
gucuucuugguauauuaaa

SEQ ID NO: 1843588 - RNA, 19 nt, Artificial Sequence
  Description of Artificial Sequence: Synthetic oligonucleotide
  Antisense strand to SEQ ID NO: 1843587
uuuaauauaccaagaagac

SEQ ID NO: 1843589 - RNA, 19 nt, Artificial Sequence
  Description of Artificial Sequence: Synthetic oligonucleotide
  Sense strand starting at position 1310 of SEQ ID NO: 1563938
auauauucggcucaggagu

SEQ ID NO: 1843590 - RNA, 19 nt, Artificial Sequence
  Description of Artificial Sequence: Synthetic oligonucleotide
  Antisense strand to SEQ ID NO: 1843589
acuccugagccgaauauau

SEQ ID NO: 1843591 - RNA, 19 nt, Artificial Sequence
  Description of Artificial Sequence: Synthetic oligonucleotide
  Sense strand starting at position 1405 of SEQ ID NO: 1563938
gucagugaaaccugaucag

SEQ ID NO: 1843592 - RNA, 19 nt, Artificial Sequence
  Description of Artificial Sequence: Synthetic oligonucleotide
  Antisense strand to SEQ ID NO: 1843591
cugaucagguuucacugac

SEQ ID NO: 1843593 - RNA, 19 nt, Artificial Sequence
  Description of Artificial Sequence: Synthetic oligonucleotide
  Sense strand starting at position 1456 of SEQ ID NO: 1563938
uuuaaagacucuuugggca

SEQ ID NO: 1843594 - RNA, 19 nt, Artificial Sequence
  Description of Artificial Sequence: Synthetic oligonucleotide
  Antisense strand to SEQ ID NO: 1843593
ugcccaaagagucuuuaaa

SEQ ID NO: 1843595 - RNA, 19 nt, Artificial Sequence
  Description of Artificial Sequence: Synthetic oligonucleotide
  Sense strand starting at position 2095 of SEQ ID NO: 1563938
aggaauaguuacuugugca

SEQ ID NO: 1843596 - RNA, 19 nt, Artificial Sequence
  Description of Artificial Sequence: Synthetic oligonucleotide
  Antisense strand to SEQ ID NO: 1843595
ugcacaaguaacuauuccu

SEQ ID NO: 1843597 - RNA, 19 nt, Artificial Sequence
  Description of Artificial Sequence: Synthetic oligonucleotide
  Sense strand starting at position 2140 of SEQ ID NO: 1563938
cagauuuaauggcaggaaa

SEQ ID NO: 1843598 - RNA, 19 nt, Artificial Sequence
  Description of Artificial Sequence: Synthetic oligonucleotide
  Antisense strand to SEQ ID NO: 1843597
uuuccugccauuaaaucug

SEQ ID NO: 1843599 - RNA, 19 nt, Artificial Sequence
  Description of Artificial Sequence: Synthetic oligonucleotide
  Sense strand starting at position 2191 of SEQ ID NO: 1563938
gaaagaaugugucugccuu

SEQ ID NO: 1843600 - RNA, 19 nt, Artificial Sequence
  Description of Artificial Sequence: Synthetic oligonucleotide
  Antisense strand to SEQ ID NO: 1843599
aaggcagacacauucuuuc

SEQ ID NO: 1843601 - RNA, 19 nt, Artificial Sequence
  Description of Artificial Sequence: Synthetic oligonucleotide
  Sense strand starting at position 2192 of SEQ ID NO: 1563938
aaagaaugugucugccuuu

SEQ ID NO: 1843602 - RNA, 19 nt, Artificial Sequence
  Description of Artificial Sequence: Synthetic oligonucleotide
  Antisense strand to SEQ ID NO: 1843601
aaaggcagacacauucuuu

SEQ ID NO: 1843603 - RNA, 19 nt, Artificial Sequence
  Description of Artificial Sequence: Synthetic oligonucleotide
  Sense strand starting at position 2376 of SEQ ID NO: 1563938
agcaauauguagccugaaa

SEQ ID NO: 1843604 - RNA, 19 nt, Artificial Sequence
  Description of Artificial Sequence: Synthetic oligonucleotide
  Antisense strand to SEQ ID NO: 1843603
uuucaggcuacauauugcu

SEQ ID NO: 1843605 - RNA, 19 nt, Artificial Sequence
  Description of Artificial Sequence: Synthetic oligonucleotide
  Sense strand starting at position 2521 of SEQ ID NO: 1563938
uuucuuugaagugguugau

SEQ ID NO: 1843606 - RNA, 19 nt, Artificial Sequence
  Description of Artificial Sequence: Synthetic oligonucleotide
  Antisense strand to SEQ ID NO: 1843605
aucaaccacuucaaagaaa

SEQ ID NO: 1843607 - RNA, 19 nt, Artificial Sequence
  Description of Artificial Sequence: Synthetic oligonucleotide
  Sense strand starting at position 2524 of SEQ ID NO: 1563938
cuuugaagugguugauggu

SEQ ID NO: 1843608 - RNA, 19 nt, Artificial Sequence
  Description of Artificial Sequence: Synthetic oligonucleotide
  Antisense strand to SEQ ID NO: 1843607
accaucaaccacuucaaag

SEQ ID NO: 1843609 - RNA, 19 nt, Artificial Sequence
  Description of Artificial Sequence: Synthetic oligonucleotide
  Sense strand starting at position 2531 of SEQ ID NO: 1563938
gugguugauggugaaugau

SEQ ID NO: 1843610 - RNA, 19 nt, Artificial Sequence
  Description of Artificial Sequence: Synthetic oligonucleotide
  Antisense strand to SEQ ID NO: 1843609
aucauucaccaucaaccac

SEQ ID NO: 1843611 - RNA, 19 nt, Artificial Sequence
  Description of Artificial Sequence: Synthetic oligonucleotide
  Sense strand starting at position 2534 of SEQ ID NO: 1563938
guugauggugaaugauaca

SEQ ID NO: 1843612 - RNA, 19 nt, Artificial Sequence
  Description of Artificial Sequence: Synthetic oligonucleotide
  Antisense strand to SEQ ID NO: 1843611
uguaucauucaccaucaac

SEQ ID NO: 1843613 - RNA, 19 nt, Artificial Sequence
  Description of Artificial Sequence: Synthetic oligonucleotide
  Sense strand starting at position 2562 of SEQ ID NO: 1563938
uggagagaguccuuccacu

SEQ ID NO: 1843614 - RNA, 19 nt, Artificial Sequence
  Description of Artificial Sequence: Synthetic oligonucleotide
  Antisense strand to SEQ ID NO: 1843613
aguggaaggacucucucca

SEQ ID NO: 1843615 - RNA, 19 nt, Artificial Sequence
  Description of Artificial Sequence: Synthetic oligonucleotide
  Sense strand starting at position 2658 of SEQ ID NO: 1563938
ucagaaucuggcugagguu

SEQ ID NO: 1843616 - RNA, 19 nt, Artificial Sequence
  Description of Artificial Sequence: Synthetic oligonucleotide
  Antisense strand to SEQ ID NO: 1843615
aaccucagccagauucuga

SEQ ID NO: 1843617 - RNA, 19 nt, Artificial Sequence
  Description of Artificial Sequence: Synthetic oligonucleotide
  Sense strand starting at position 2659 of SEQ ID NO: 1563938
cagaaucuggcugagguuu

SEQ ID NO: 1843618 - RNA, 19 nt, Artificial Sequence
  Description of Artificial Sequence: Synthetic oligonucleotide
  Antisense strand to SEQ ID NO: 1843617
aaaccucagccagauucug

SEQ ID NO: 1843619 - RNA, 19 nt, Artificial Sequence
  Description of Artificial Sequence: Synthetic oligonucleotide
  Sense strand starting at position 2745 of SEQ ID NO: 1563938
cugagagcucguuaggaaa

SEQ ID NO: 1843620 - RNA, 19 nt, Artificial Sequence
  Description of Artificial Sequence: Synthetic oligonucleotide
  Antisense strand to SEQ ID NO: 1843619
uuuccuaacgagcucucag

SEQ ID NO: 1843621 - RNA, 19 nt, Artificial Sequence
  Description of Artificial Sequence: Synthetic oligonucleotide
  Sense strand starting at position 3371 of SEQ ID NO: 1563938
ugagccagugcugaugaaa

SEQ ID NO: 1843622 - RNA, 19 nt, Artificial Sequence
  Description of Artificial Sequence: Synthetic oligonucleotide
  Antisense strand to SEQ ID NO: 1843621
uuucaucagcacuggcuca

SEQ ID NO: 1843623 - RNA, 19 nt, Artificial Sequence
  Description of Artificial Sequence: Synthetic oligonucleotide
  Sense strand starting at position 3374 of SEQ ID NO: 1563938
gccagugcugaugaaagga

SEQ ID NO: 1843624 - RNA, 19 nt, Artificial Sequence
  Description of Artificial Sequence: Synthetic oligonucleotide
  Antisense strand to SEQ ID NO: 1843623
uccuuucaucagcacuggc

SEQ ID NO: 1843625 - RNA, 19 nt, Artificial Sequence
  Description of Artificial Sequence: Synthetic oligonucleotide
  Sense strand starting at position 3398 of SEQ ID NO: 1563938
ggaguucccuucccacaga

SEQ ID NO: 1843626 - RNA, 19 nt, Artificial Sequence
  Description of Artificial Sequence: Synthetic oligonucleotide
  Antisense strand to SEQ ID NO: 1843625
ucugugggaagggaacucc

SEQ ID NO: 1843627 - RNA, 19 nt, Artificial Sequence
  Description of Artificial Sequence: Synthetic oligonucleotide
  Sense strand starting at position 3417 of SEQ ID NO: 1563938
aaggguucuggaugugaau

SEQ ID NO: 1843628 - RNA, 19 nt, Artificial Sequence
  Description of Artificial Sequence: Synthetic oligonucleotide
  Antisense strand to SEQ ID NO: 1843627
auucacauccagaacccuu

SEQ ID NO: 1843629 - RNA, 19 nt, Artificial Sequence
  Description of Artificial Sequence: Synthetic oligonucleotide
  Sense strand starting at position 3419 of SEQ ID NO: 1563938
ggguucuggaugugaaucu

SEQ ID NO: 1843630 - RNA, 19 nt, Artificial Sequence
  Description of Artificial Sequence: Synthetic oligonucleotide
  Antisense strand to SEQ ID NO: 1843629
agauucacauccagaaccc

SEQ ID NO: 1843631 - RNA, 19 nt, Artificial Sequence
  Description of Artificial Sequence: Synthetic oligonucleotide
  Sense strand starting at position 3508 of SEQ ID NO: 1563938
ggcugaacuugucuaaccu

SEQ ID NO: 1843632 - RNA, 19 nt, Artificial Sequence
  Description of Artificial Sequence: Synthetic oligonucleotide
  Antisense strand to SEQ ID NO: 1843631
agguuagacaaguucagcc

SEQ ID NO: 1843633 - RNA, 19 nt, Artificial Sequence
  Description of Artificial Sequence: Synthetic oligonucleotide
  Sense strand starting at position 3518 of SEQ ID NO: 1563938
gucuaaccugcuggaaaga

SEQ ID NO: 1843634 - RNA, 19 nt, Artificial Sequence
  Description of Artificial Sequence: Synthetic oligonucleotide
  Antisense strand to SEQ ID NO: 1843633
ucuuuccagcagguuagac

SEQ ID NO: 1843635 - RNA, 19 nt, Artificial Sequence
  Description of Artificial Sequence: Synthetic oligonucleotide
  Sense strand starting at position 3534 of SEQ ID NO: 1563938
agaagagaauacuagggau

SEQ ID NO: 1843636 - RNA, 19 nt, Artificial Sequence
  Description of Artificial Sequence: Synthetic oligonucleotide
  Antisense strand to SEQ ID NO: 1843635
aucccuaguauucucuucu

SEQ ID NO: 1843637 - RNA, 19 nt, Artificial Sequence
  Description of Artificial Sequence: Synthetic oligonucleotide
  Sense strand starting at position 3619 of SEQ ID NO: 1563938
ggcuuauuagaugagagca

SEQ ID NO: 1843638 - RNA, 19 nt, Artificial Sequence
  Description of Artificial Sequence: Synthetic oligonucleotide
  Antisense strand to SEQ ID NO: 1843637
ugcucucaucuaauaagcc

SEQ ID NO: 1843639 - RNA, 19 nt, Artificial Sequence
  Description of Artificial Sequence: Synthetic oligonucleotide
  Sense strand starting at position 3745 of SEQ ID NO: 1563938
cugaaucucgacuguaaga

SEQ ID NO: 1843640 - RNA, 19 nt, Artificial Sequence
  Description of Artificial Sequence: Synthetic oligonucleotide
  Antisense strand to SEQ ID NO: 1843639
ucuuacagucgagauucag

SEQ ID NO: 1843641 - RNA, 19 nt, Artificial Sequence
  Description of Artificial Sequence: Synthetic oligonucleotide
  Sense strand starting at position 3797 of SEQ ID NO: 1563938
agcuuauugguccaaccuu

SEQ ID NO: 1843642 - RNA, 19 nt, Artificial Sequence
  Description of Artificial Sequence: Synthetic oligonucleotide
  Antisense strand to SEQ ID NO: 1843641
aagguuggaccaauaagcu

SEQ ID NO: 1843643 - RNA, 19 nt, Artificial Sequence
  Description of Artificial Sequence: Synthetic oligonucleotide
  Sense strand starting at position 68 of SEQ ID NO: 1563939
cuacuaauccgagggacua

SEQ ID NO: 1843644 - RNA, 19 nt, Artificial Sequence
  Description of Artificial Sequence: Synthetic oligonucleotide
  Antisense strand to SEQ ID NO: 1843643
uagucccucggauuaguag

SEQ ID NO: 1843645 - RNA, 19 nt, Artificial Sequence
  Description of Artificial Sequence: Synthetic oligonucleotide
  Sense strand starting at position 99 of SEQ ID NO: 1563939
uggucaucucaacaaugua

SEQ ID NO: 1843646 - RNA, 19 nt, Artificial Sequence
  Description of Artificial Sequence: Synthetic oligonucleotide
  Antisense strand to SEQ ID NO: 1843645
uacauuguugagaugacca

SEQ ID NO: 1843647 - RNA, 19 nt, Artificial Sequence
  Description of Artificial Sequence: Synthetic oligonucleotide
  Sense strand starting at position 308 of SEQ ID NO: 1563939
ucuuccaggguuugaugaa

SEQ ID NO: 1843648 - RNA, 19 nt, Artificial Sequence
  Description of Artificial Sequence: Synthetic oligonucleotide
  Antisense strand to SEQ ID NO: 1843647
uucaucaaacccuggaaga

SEQ ID NO: 1843649 - RNA, 19 nt, Artificial Sequence
  Description of Artificial Sequence: Synthetic oligonucleotide
  Sense strand starting at position 320 of SEQ ID NO: 1563939
ugaugaaauccggguuuga

SEQ ID NO: 1843650 - RNA, 19 nt, Artificial Sequence
  Description of Artificial Sequence: Synthetic oligonucleotide
  Antisense strand to SEQ ID NO: 1843649
ucaaacccggauuucauca

SEQ ID NO: 1843651 - RNA, 19 nt, Artificial Sequence
  Description of Artificial Sequence: Synthetic oligonucleotide
  Sense strand starting at position 324 of SEQ ID NO: 1563939
gaaauccggguuugaugaa

SEQ ID NO: 1843652 - RNA, 19 nt, Artificial Sequence
  Description of Artificial Sequence: Synthetic oligonucleotide
  Antisense strand to SEQ ID NO: 1843651
uucaucaaacccggauuuc

SEQ ID NO: 1843653 - RNA, 19 nt, Artificial Sequence
  Description of Artificial Sequence: Synthetic oligonucleotide
  Sense strand starting at position 339 of SEQ ID NO: 1563939
ugaacuucccaguagagcu

SEQ ID NO: 1843654 - RNA, 19 nt, Artificial Sequence
  Description of Artificial Sequence: Synthetic oligonucleotide
  Antisense strand to SEQ ID NO: 1843653
agcucuacugggaaguuca

SEQ ID NO: 1843655 - RNA, 19 nt, Artificial Sequence
  Description of Artificial Sequence: Synthetic oligonucleotide
  Sense strand starting at position 453 of SEQ ID NO: 1563939
gugggaauuucuuccgugu

SEQ ID NO: 1843656 - RNA, 19 nt, Artificial Sequence
  Description of Artificial Sequence: Synthetic oligonucleotide
  Antisense strand to SEQ ID NO: 1843655
acacggaagaaauucccac

SEQ ID NO: 1843657 - RNA, 19 nt, Artificial Sequence
  Description of Artificial Sequence: Synthetic oligonucleotide
  Sense strand starting at position 457 of SEQ ID NO: 1563939
gaauuucuuccguguaaau

SEQ ID NO: 1843658 - RNA, 19 nt, Artificial Sequence
  Description of Artificial Sequence: Synthetic oligonucleotide
  Antisense strand to SEQ ID NO: 1843657
auuuacacggaagaaauuc

SEQ ID NO: 1843659 - RNA, 19 nt, Artificial Sequence
  Description of Artificial Sequence: Synthetic oligonucleotide
  Sense strand starting at position 611 of SEQ ID NO: 1563939
ugaauauccaagugaggug

SEQ ID NO: 1843660 - RNA, 19 nt, Artificial Sequence
  Description of Artificial Sequence: Synthetic oligonucleotide
  Antisense strand to SEQ ID NO: 1843659
caccucacuuggauauuca

SEQ ID NO: 1843661 - RNA, 19 nt, Artificial Sequence
  Description of Artificial Sequence: Synthetic oligonucleotide
  Sense strand starting at position 661 of SEQ ID NO: 1563939
acguaauggucaccaugga

SEQ ID NO: 1843662 - RNA, 19 nt, Artificial Sequence
  Description of Artificial Sequence: Synthetic oligonucleotide
  Antisense strand to SEQ ID NO: 1843661
uccauggugaccauuacgu

SEQ ID NO: 1843663 - RNA, 19 nt, Artificial Sequence
  Description of Artificial Sequence: Synthetic oligonucleotide
  Sense strand starting at position 662 of SEQ ID NO: 1563939
cguaauggucaccauggau

SEQ ID NO: 1843664 - RNA, 19 nt, Artificial Sequence
  Description of Artificial Sequence: Synthetic oligonucleotide
  Antisense strand to SEQ ID NO: 1843663
auccauggugaccauuacg

SEQ ID NO: 1843665 - RNA, 19 nt, Artificial Sequence
  Description of Artificial Sequence: Synthetic oligonucleotide
  Sense strand starting at position 665 of SEQ ID NO: 1563939
aauggucaccauggauauu

SEQ ID NO: 1843666 - RNA, 19 nt, Artificial Sequence
  Description of Artificial Sequence: Synthetic oligonucleotide
  Antisense strand to SEQ ID NO: 1843665
aauauccauggugaccauu

SEQ ID NO: 1843667 - RNA, 19 nt, Artificial Sequence
  Description of Artificial Sequence: Synthetic oligonucleotide
  Sense strand starting at position 701 of SEQ ID NO: 1563939
gugacaauagagugagguu

SEQ ID NO: 1843668 - RNA, 19 nt, Artificial Sequence
  Description of Artificial Sequence: Synthetic oligonucleotide
  Antisense strand to SEQ ID NO: 1843667
aaccucacucuauugucac

SEQ ID NO: 1843669 - RNA, 19 nt, Artificial Sequence
  Description of Artificial Sequence: Synthetic oligonucleotide
  Sense strand starting at position 867 of SEQ ID NO: 1563939
caguaaagucaguaaguga

SEQ ID NO: 1843670 - RNA, 19 nt, Artificial Sequence
  Description of Artificial Sequence: Synthetic oligonucleotide
  Antisense strand to SEQ ID NO: 1843669
ucacuuacugacuuuacug

SEQ ID NO: 1843671 - RNA, 19 nt, Artificial Sequence
  Description of Artificial Sequence: Synthetic oligonucleotide
  Sense strand starting at position 890 of SEQ ID NO: 1563939
guuucuggccuacacuaaa

SEQ ID NO: 1843672 - RNA, 19 nt, Artificial Sequence
  Description of Artificial Sequence: Synthetic oligonucleotide
  Antisense strand to SEQ ID NO: 1843671
uuuaguguaggccagaaac

SEQ ID NO: 1843673 - RNA, 19 nt, Artificial Sequence
  Description of Artificial Sequence: Synthetic oligonucleotide
  Sense strand starting at position 990 of SEQ ID NO: 1563939
aagacaagucuguaacguu

SEQ ID NO: 1843674 - RNA, 19 nt, Artificial Sequence
  Description of Artificial Sequence: Synthetic oligonucleotide
  Antisense strand to SEQ ID NO: 1843673
aacguuacagacuugucuu

SEQ ID NO: 1843675 - RNA, 19 nt, Artificial Sequence
  Description of Artificial Sequence: Synthetic oligonucleotide
  Sense strand starting at position 1082 of SEQ ID NO: 1563939
uuccaaaggcuguaaggua

SEQ ID NO: 1843676 - RNA, 19 nt, Artificial Sequence
  Description of Artificial Sequence: Synthetic oligonucleotide
  Antisense strand to SEQ ID NO: 1843675
uaccuuacagccuuuggaa

SEQ ID NO: 1843677 - RNA, 19 nt, Artificial Sequence
  Description of Artificial Sequence: Synthetic oligonucleotide
  Sense strand starting at position 1127 of SEQ ID NO: 1563939
aagaguuaacuuuggccca

SEQ ID NO: 1843678 - RNA, 19 nt, Artificial Sequence
  Description of Artificial Sequence: Synthetic oligonucleotide
  Antisense strand to SEQ ID NO: 1843677
ugggccaaaguuaacucuu

SEQ ID NO: 1843679 - RNA, 19 nt, Artificial Sequence
  Description of Artificial Sequence: Synthetic oligonucleotide
  Sense strand starting at position 1130 of SEQ ID NO: 1563939
aguuaacuuuggcccagaa

SEQ ID NO: 1843680 - RNA, 19 nt, Artificial Sequence
  Description of Artificial Sequence: Synthetic oligonucleotide
  Antisense strand to SEQ ID NO: 1843679
uucugggccaaaguuaacu

SEQ ID NO: 1843681 - RNA, 19 nt, Artificial Sequence
  Description of Artificial Sequence: Synthetic oligonucleotide
  Sense strand starting at position 1142 of SEQ ID NO: 1563939
cccagaaagcuuuauugac

SEQ ID NO: 1843682 - RNA, 19 nt, Artificial Sequence
  Description of Artificial Sequence: Synthetic oligonucleotide
  Antisense strand to SEQ ID NO: 1843681
gucaauaaagcuuucuggg

SEQ ID NO: 1843683 - RNA, 19 nt, Artificial Sequence
  Description of Artificial Sequence: Synthetic oligonucleotide
  Sense strand starting at position 1430 of SEQ ID NO: 1563939
gugggaaucaggugguuac

SEQ ID NO: 1843684 - RNA, 19 nt, Artificial Sequence
  Description of Artificial Sequence: Synthetic oligonucleotide
  Antisense strand to SEQ ID NO: 1843683
guaaccaccugauucccac

SEQ ID NO: 1843685 - RNA, 19 nt, Artificial Sequence
  Description of Artificial Sequence: Synthetic oligonucleotide
  Sense strand starting at position 1431 of SEQ ID NO: 1563939
ugggaaucaggugguuacu

SEQ ID NO: 1843686 - RNA, 19 nt, Artificial Sequence
  Description of Artificial Sequence: Synthetic oligonucleotide
  Antisense strand to SEQ ID NO: 1843685
aguaaccaccugauuccca

SEQ ID NO: 1843687 - RNA, 19 nt, Artificial Sequence
  Description of Artificial Sequence: Synthetic oligonucleotide
  Sense strand starting at position 1433 of SEQ ID NO: 1563939
ggaaucaggugguuacuua

SEQ ID NO: 1843688 - RNA, 19 nt, Artificial Sequence
  Description of Artificial Sequence: Synthetic oligonucleotide
  Antisense strand to SEQ ID NO: 1843687
uaaguaaccaccugauucc

SEQ ID NO: 1843689 - RNA, 19 nt, Artificial Sequence
  Description of Artificial Sequence: Synthetic oligonucleotide
  Sense strand starting at position 2211 of SEQ ID NO: 1563939
cagucauaccuaugggaga

SEQ ID NO: 1843690 - RNA, 19 nt, Artificial Sequence
  Description of Artificial Sequence: Synthetic oligonucleotide
  Antisense strand to SEQ ID NO: 1843689
ucucccauagguaugacug

SEQ ID NO: 1843691 - RNA, 19 nt, Artificial Sequence
  Description of Artificial Sequence: Synthetic oligonucleotide
  Sense strand starting at position 2213 of SEQ ID NO: 1563939
gucauaccuaugggagauc

SEQ ID NO: 1843692 - RNA, 19 nt, Artificial Sequence
  Description of Artificial Sequence: Synthetic oligonucleotide
  Antisense strand to SEQ ID NO: 1843691
gaucucccauagguaugac

SEQ ID NO: 1843693 - RNA, 19 nt, Artificial Sequence
  Description of Artificial Sequence: Synthetic oligonucleotide
  Sense strand starting at position 2478 of SEQ ID NO: 1563939
ccuaauagaguccauuguu

SEQ ID NO: 1843694 - RNA, 19 nt, Artificial Sequence
  Description of Artificial Sequence: Synthetic oligonucleotide
  Antisense strand to SEQ ID NO: 1843693
aacaauggacucuauuagg

SEQ ID NO: 1843695 - RNA, 19 nt, Artificial Sequence
  Description of Artificial Sequence: Synthetic oligonucleotide
  Sense strand starting at position 2716 of SEQ ID NO: 1563939
auaaauccuguuggguuua

SEQ ID NO: 1843696 - RNA, 19 nt, Artificial Sequence
  Description of Artificial Sequence: Synthetic oligonucleotide
  Antisense strand to SEQ ID NO: 1843695
uaaacccaacaggauuuau

SEQ ID NO: 1843697 - RNA, 19 nt, Artificial Sequence
  Description of Artificial Sequence: Synthetic oligonucleotide
  Sense strand starting at position 2839 of SEQ ID NO: 1563939
agauaucaagagugacugu

SEQ ID NO: 1843698 - RNA, 19 nt, Artificial Sequence
  Description of Artificial Sequence: Synthetic oligonucleotide
  Antisense strand to SEQ ID NO: 1843697
acagucacucuugauaucu

SEQ ID NO: 1843699 - RNA, 19 nt, Artificial Sequence
  Description of Artificial Sequence: Synthetic oligonucleotide
  Sense strand starting at position 2842 of SEQ ID NO: 1563939
uaucaagagugacuguaaa

SEQ ID NO: 1843700 - RNA, 19 nt, Artificial Sequence
  Description of Artificial Sequence: Synthetic oligonucleotide
  Antisense strand to SEQ ID NO: 1843699
uuuacagucacucuugaua

SEQ ID NO: 1843701 - RNA, 19 nt, Artificial Sequence
  Description of Artificial Sequence: Synthetic oligonucleotide
  Sense strand starting at position 2852 of SEQ ID NO: 1563939
gacuguaaaucuguaguaa

SEQ ID NO: 1843702 - RNA, 19 nt, Artificial Sequence
  Description of Artificial Sequence: Synthetic oligonucleotide
  Antisense strand to SEQ ID NO: 1843701
uuacuacagauuuacaguc

SEQ ID NO: 1843703 - RNA, 19 nt, Artificial Sequence
  Description of Artificial Sequence: Synthetic oligonucleotide
  Sense strand starting at position 2853 of SEQ ID NO: 1563939
acuguaaaucuguaguaau

SEQ ID NO: 1843704 - RNA, 19 nt, Artificial Sequence
  Description of Artificial Sequence: Synthetic oligonucleotide
  Antisense strand to SEQ ID NO: 1843703
auuacuacagauuuacagu

SEQ ID NO: 1843705 - RNA, 19 nt, Artificial Sequence
  Description of Artificial Sequence: Synthetic oligonucleotide
  Sense strand starting at position 3016 of SEQ ID NO: 1563939
aggacuacugcuuauccau

SEQ ID NO: 1843706 - RNA, 19 nt, Artificial Sequence
  Description of Artificial Sequence: Synthetic oligonucleotide
  Antisense strand to SEQ ID NO: 1843705
auggauaagcaguaguccu

SEQ ID NO: 1843707 - RNA, 19 nt, Artificial Sequence
  Description of Artificial Sequence: Synthetic oligonucleotide
  Sense strand starting at position 3022 of SEQ ID NO: 1563939
acugcuuauccauauggaa

SEQ ID NO: 1843708 - RNA, 19 nt, Artificial Sequence
  Description of Artificial Sequence: Synthetic oligonucleotide
  Antisense strand to SEQ ID NO: 1843707
uuccauauggauaagcagu

SEQ ID NO: 1843709 - RNA, 19 nt, Artificial Sequence
  Description of Artificial Sequence: Synthetic oligonucleotide
  Sense strand starting at position 3083 of SEQ ID NO: 1563939
aucaguuccagguggauua

SEQ ID NO: 1843710 - RNA, 19 nt, Artificial Sequence
  Description of Artificial Sequence: Synthetic oligonucleotide
  Antisense strand to SEQ ID NO: 1843709
uaauccaccuggaacugau

SEQ ID NO: 1843711 - RNA, 19 nt, Artificial Sequence
  Description of Artificial Sequence: Synthetic oligonucleotide
  Sense strand starting at position 3084 of SEQ ID NO: 1563939
ucaguuccagguggauuaa

SEQ ID NO: 1843712 - RNA, 19 nt, Artificial Sequence
  Description of Artificial Sequence: Synthetic oligonucleotide
  Antisense strand to SEQ ID NO: 1843711
uuaauccaccuggaacuga

SEQ ID NO: 1843713 - RNA, 19 nt, Artificial Sequence
  Description of Artificial Sequence: Synthetic oligonucleotide
  Sense strand starting at position 3151 of SEQ ID NO: 1563939
ugaguaugagcuuggaaua

SEQ ID NO: 1843714 - RNA, 19 nt, Artificial Sequence
  Description of Artificial Sequence: Synthetic oligonucleotide
  Antisense strand to SEQ ID NO: 1843713
uauuccaagcucauacuca

SEQ ID NO: 1843715 - RNA, 19 nt, Artificial Sequence
  Description of Artificial Sequence: Synthetic oligonucleotide
  Sense strand starting at position 3152 of SEQ ID NO: 1563939
gaguaugagcuuggaauau

SEQ ID NO: 1843716 - RNA, 19 nt, Artificial Sequence
  Description of Artificial Sequence: Synthetic oligonucleotide
  Antisense strand to SEQ ID NO: 1843715
auauuccaagcucauacuc

SEQ ID NO: 1843717 - RNA, 19 nt, Artificial Sequence
  Description of Artificial Sequence: Synthetic oligonucleotide
  Sense strand starting at position 3210 of SEQ ID NO: 1563939
auguauguacuuuaagaca

SEQ ID NO: 1843718 - RNA, 19 nt, Artificial Sequence
  Description of Artificial Sequence: Synthetic oligonucleotide
  Antisense strand to SEQ ID NO: 1843717
ugucuuaaaguacauacau

SEQ ID NO: 1843719 - RNA, 19 nt, Artificial Sequence
  Description of Artificial Sequence: Synthetic oligonucleotide
  Sense strand starting at position 3914 of SEQ ID NO: 1563939
cuagaauguugaguuccau

SEQ ID NO: 1843720 - RNA, 19 nt, Artificial Sequence
  Description of Artificial Sequence: Synthetic oligonucleotide
  Antisense strand to SEQ ID NO: 1843719
auggaacucaacauucuag

SEQ ID NO: 1843721 - RNA, 19 nt, Artificial Sequence
  Description of Artificial Sequence: Synthetic oligonucleotide
  Sense strand starting at position 3926 of SEQ ID NO: 1563939
guuccaugagugcaaggau

SEQ ID NO: 1843722 - RNA, 19 nt, Artificial Sequence
  Description of Artificial Sequence: Synthetic oligonucleotide
  Antisense strand to SEQ ID NO: 1843721
auccuugcacucauggaac

SEQ ID NO: 1843723 - RNA, 19 nt, Artificial Sequence
  Description of Artificial Sequence: Synthetic oligonucleotide
  Sense strand starting at position 353 of SEQ ID NO: 1563940
uuuccauaaugguucuaga

SEQ ID NO: 1843724 - RNA, 19 nt, Artificial Sequence
  Description of Artificial Sequence: Synthetic oligonucleotide
  Antisense strand to SEQ ID NO: 1843723
ucuagaaccauuauggaaa

SEQ ID NO: 1843725 - RNA, 19 nt, Artificial Sequence
  Description of Artificial Sequence: Synthetic oligonucleotide
  Sense strand starting at position 1145 of SEQ ID NO: 1563940
ugaauaugcuccuuuaaga

SEQ ID NO: 1843726 - RNA, 19 nt, Artificial Sequence
  Description of Artificial Sequence: Synthetic oligonucleotide
  Antisense strand to SEQ ID NO: 1843725
ucuuaaaggagcauauuca

SEQ ID NO: 1843727 - RNA, 19 nt, Artificial Sequence
  Description of Artificial Sequence: Synthetic oligonucleotide
  Sense strand starting at position 1217 of SEQ ID NO: 1563940
gauacagaguuauucggga

SEQ ID NO: 1843728 - RNA, 19 nt, Artificial Sequence
  Description of Artificial Sequence: Synthetic oligonucleotide
  Antisense strand to SEQ ID NO: 1843727
ucccgaauaacucuguauc

SEQ ID NO: 1843729 - RNA, 19 nt, Artificial Sequence
  Description of Artificial Sequence: Synthetic oligonucleotide
  Sense strand starting at position 1353 of SEQ ID NO: 1563940
gccuaaauccgauaccuug

SEQ ID NO: 1843730 - RNA, 19 nt, Artificial Sequence
  Description of Artificial Sequence: Synthetic oligonucleotide
  Antisense strand to SEQ ID NO: 1843729
caagguaucggauuuaggc

SEQ ID NO: 1843731 - RNA, 19 nt, Artificial Sequence
  Description of Artificial Sequence: Synthetic oligonucleotide
  Sense strand starting at position 1359 of SEQ ID NO: 1563940
auccgauaccuugagugua

SEQ ID NO: 1843732 - RNA, 19 nt, Artificial Sequence
  Description of Artificial Sequence: Synthetic oligonucleotide
  Antisense strand to SEQ ID NO: 1843731
uacacucaagguaucggau

SEQ ID NO: 1843733 - RNA, 19 nt, Artificial Sequence
  Description of Artificial Sequence: Synthetic oligonucleotide
  Sense strand starting at position 1558 of SEQ ID NO: 1563940
ggccuagcggcgaaaguuu

SEQ ID NO: 1843734 - RNA, 19 nt, Artificial Sequence
  Description of Artificial Sequence: Synthetic oligonucleotide
  Antisense strand to SEQ ID NO: 1843733
aaacuuucgccgcuaggcc

SEQ ID NO: 1843735 - RNA, 19 nt, Artificial Sequence
  Description of Artificial Sequence: Synthetic oligonucleotide
  Sense strand starting at position 1596 of SEQ ID NO: 1563940
uuuauuuccgcccgagaag

SEQ ID NO: 1843736 - RNA, 19 nt, Artificial Sequence
  Description of Artificial Sequence: Synthetic oligonucleotide
  Antisense strand to SEQ ID NO: 1843735
cuucucgggcggaaauaaa

SEQ ID NO: 1843737 - RNA, 19 nt, Artificial Sequence
  Description of Artificial Sequence: Synthetic oligonucleotide
  Sense strand starting at position 2094 of SEQ ID NO: 1563940
gcgagaacugcuucggcgu

SEQ ID NO: 1843738 - RNA, 19 nt, Artificial Sequence
  Description of Artificial Sequence: Synthetic oligonucleotide
  Antisense strand to SEQ ID NO: 1843737
acgccgaagcaguucucgc

SEQ ID NO: 1843739 - RNA, 19 nt, Artificial Sequence
  Description of Artificial Sequence: Synthetic oligonucleotide
  Sense strand starting at position 2380 of SEQ ID NO: 1563940
ugugguuucgcgguucacu

SEQ ID NO: 1843740 - RNA, 19 nt, Artificial Sequence
  Description of Artificial Sequence: Synthetic oligonucleotide
  Antisense strand to SEQ ID NO: 1843739
agugaaccgcgaaaccaca

SEQ ID NO: 1843741 - RNA, 19 nt, Artificial Sequence
  Description of Artificial Sequence: Synthetic oligonucleotide
  Sense strand starting at position 2610 of SEQ ID NO: 1563940
gguugagauccacagagcu

SEQ ID NO: 1843742 - RNA, 19 nt, Artificial Sequence
  Description of Artificial Sequence: Synthetic oligonucleotide
  Antisense strand to SEQ ID NO: 1843741
agcucuguggaucucaacc

SEQ ID NO: 1843743 - RNA, 19 nt, Artificial Sequence
  Description of Artificial Sequence: Synthetic oligonucleotide
  Sense strand starting at position 2651 of SEQ ID NO: 1563940
uugugugcugugagguaaa

SEQ ID NO: 1843744 - RNA, 19 nt, Artificial Sequence
  Description of Artificial Sequence: Synthetic oligonucleotide
  Antisense strand to SEQ ID NO: 1843743
uuuaccucacagcacacaa

SEQ ID NO: 1843745 - RNA, 19 nt, Artificial Sequence
  Description of Artificial Sequence: Synthetic oligonucleotide
  Sense strand starting at position 2680 of SEQ ID NO: 1563940
uccucaugaugcuuaaaug

SEQ ID NO: 1843746 - RNA, 19 nt, Artificial Sequence
  Description of Artificial Sequence: Synthetic oligonucleotide
  Antisense strand to SEQ ID NO: 1843745
cauuuaagcaucaugagga

SEQ ID NO: 1843747 - RNA, 19 nt, Artificial Sequence
  Description of Artificial Sequence: Synthetic oligonucleotide
  Sense strand starting at position 2681 of SEQ ID NO: 1563940
ccucaugaugcuuaaaugu

SEQ ID NO: 1843748 - RNA, 19 nt, Artificial Sequence
  Description of Artificial Sequence: Synthetic oligonucleotide
  Antisense strand to SEQ ID NO: 1843747
acauuuaagcaucaugagg

SEQ ID NO: 1843749 - RNA, 19 nt, Artificial Sequence
  Description of Artificial Sequence: Synthetic oligonucleotide
  Sense strand starting at position 2745 of SEQ ID NO: 1563940
auguuacagccagagaauu

SEQ ID NO: 1843750 - RNA, 19 nt, Artificial Sequence
  Description of Artificial Sequence: Synthetic oligonucleotide
  Antisense strand to SEQ ID NO: 1843749
aauucucuggcuguaacau

SEQ ID NO: 1843751 - RNA, 19 nt, Artificial Sequence
  Description of Artificial Sequence: Synthetic oligonucleotide
  Sense strand starting at position 2779 of SEQ ID NO: 1563940
uacauuguagacuggauaa

SEQ ID NO: 1843752 - RNA, 19 nt, Artificial Sequence
  Description of Artificial Sequence: Synthetic oligonucleotide
  Antisense strand to SEQ ID NO: 1843751
uuauccagucuacaaugua

SEQ ID NO: 1843753 - RNA, 19 nt, Artificial Sequence
  Description of Artificial Sequence: Synthetic oligonucleotide
  Sense strand starting at position 2834 of SEQ ID NO: 1563940
uccagaucaucucugugga

SEQ ID NO: 1843754 - RNA, 19 nt, Artificial Sequence
  Description of Artificial Sequence: Synthetic oligonucleotide
  Antisense strand to SEQ ID NO: 1843753
uccacagagaugaucugga

SEQ ID NO: 1843755 - RNA, 19 nt, Artificial Sequence
  Description of Artificial Sequence: Synthetic oligonucleotide
  Sense strand starting at position 2835 of SEQ ID NO: 1563940
ccagaucaucucuguggaa

SEQ ID NO: 1843756 - RNA, 19 nt, Artificial Sequence
  Description of Artificial Sequence: Synthetic oligonucleotide
  Antisense strand to SEQ ID NO: 1843755
uuccacagagaugaucugg

SEQ ID NO: 1843757 - RNA, 19 nt, Artificial Sequence
  Description of Artificial Sequence: Synthetic oligonucleotide
  Sense strand starting at position 2836 of SEQ ID NO: 1563940
cagaucaucucuguggaaa

SEQ ID NO: 1843758 - RNA, 19 nt, Artificial Sequence
  Description of Artificial Sequence: Synthetic oligonucleotide
  Antisense strand to SEQ ID NO: 1843757
uuuccacagagaugaucug

SEQ ID NO: 1843759 - RNA, 19 nt, Artificial Sequence
  Description of Artificial Sequence: Synthetic oligonucleotide
  Sense strand starting at position 2872 of SEQ ID NO: 1563940
ggccuugauggguaggauu

SEQ ID NO: 1843760 - RNA, 19 nt, Artificial Sequence
  Description of Artificial Sequence: Synthetic oligonucleotide
  Antisense strand to SEQ ID NO: 1843759
aauccuacccaucaaggcc

SEQ ID NO: 1843761 - RNA, 19 nt, Artificial Sequence
  Description of Artificial Sequence: Synthetic oligonucleotide
  Sense strand starting at position 2988 of SEQ ID NO: 1563940
ugaggaaucuagccugacu

SEQ ID NO: 1843762 - RNA, 19 nt, Artificial Sequence
  Description of Artificial Sequence: Synthetic oligonucleotide
  Antisense strand to SEQ ID NO: 1843761
agucaggcuagauuccuca

SEQ ID NO: 1843763 - RNA, 19 nt, Artificial Sequence
  Description of Artificial Sequence: Synthetic oligonucleotide
  Sense strand starting at position 3020 of SEQ ID NO: 1563940
cugggaauauaagccuuau

SEQ ID NO: 1843764 - RNA, 19 nt, Artificial Sequence
  Description of Artificial Sequence: Synthetic oligonucleotide
  Antisense strand to SEQ ID NO: 1843763
auaaggcuuauauucccag

SEQ ID NO: 1843765 - RNA, 19 nt, Artificial Sequence
  Description of Artificial Sequence: Synthetic oligonucleotide
  Sense strand starting at position 3078 of SEQ ID NO: 1563940
cuuuguguacagcauugaa

SEQ ID NO: 1843766 - RNA, 19 nt, Artificial Sequence
  Description of Artificial Sequence: Synthetic oligonucleotide
  Antisense strand to SEQ ID NO: 1843765
uucaaugcuguacacaaag

SEQ ID NO: 1843767 - RNA, 19 nt, Artificial Sequence
  Description of Artificial Sequence: Synthetic oligonucleotide
  Sense strand starting at position 3090 of SEQ ID NO: 1563940
cauugaagaugaguacgau

SEQ ID NO: 1843768 - RNA, 19 nt, Artificial Sequence
  Description of Artificial Sequence: Synthetic oligonucleotide
  Antisense strand to SEQ ID NO: 1843767
aucguacucaucuucaaug

SEQ ID NO: 1843769 - RNA, 19 nt, Artificial Sequence
  Description of Artificial Sequence: Synthetic oligonucleotide
  Sense strand starting at position 3096 of SEQ ID NO: 1563940
agaugaguacgaugaguuu

SEQ ID NO: 1843770 - RNA, 19 nt, Artificial Sequence
  Description of Artificial Sequence: Synthetic oligonucleotide
  Antisense strand to SEQ ID NO: 1843769
aaacucaucguacucaucu

SEQ ID NO: 1843771 - RNA, 19 nt, Artificial Sequence
  Description of Artificial Sequence: Synthetic oligonucleotide
  Sense strand starting at position 3222 of SEQ ID NO: 1563940
aggagaggcuuaguuggau

SEQ ID NO: 1843772 - RNA, 19 nt, Artificial Sequence
  Description of Artificial Sequence: Synthetic oligonucleotide
  Antisense strand to SEQ ID NO: 1843771
auccaacuaagccucuccu

SEQ ID NO: 1843773 - RNA, 19 nt, Artificial Sequence
  Description of Artificial Sequence: Synthetic oligonucleotide
  Sense strand starting at position 3255 of SEQ ID NO: 1563940
agugguugcagacagaaua

SEQ ID NO: 1843774 - RNA, 19 nt, Artificial Sequence
  Description of Artificial Sequence: Synthetic oligonucleotide
  Antisense strand to SEQ ID NO: 1843773
uauucugucugcaaccacu

SEQ ID NO: 1843775 - RNA, 19 nt, Artificial Sequence
  Description of Artificial Sequence: Synthetic oligonucleotide
  Sense strand starting at position 3277 of SEQ ID NO: 1563940
gagaacauuccaggcauga

SEQ ID NO: 1843776 - RNA, 19 nt, Artificial Sequence
  Description of Artificial Sequence: Synthetic oligonucleotide
  Antisense strand to SEQ ID NO: 1843775
ucaugccuggaauguucuc

SEQ ID NO: 1843777 - RNA, 19 nt, Artificial Sequence
  Description of Artificial Sequence: Synthetic oligonucleotide
  Sense strand starting at position 3302 of SEQ ID NO: 1563940
aaaugauaguagcucugaa

SEQ ID NO: 1843778 - RNA, 19 nt, Artificial Sequence
  Description of Artificial Sequence: Synthetic oligonucleotide
  Antisense strand to SEQ ID NO: 1843777
uucagagcuacuaucauuu

SEQ ID NO: 1843779 - RNA, 19 nt, Artificial Sequence
  Description of Artificial Sequence: Synthetic oligonucleotide
  Sense strand starting at position 3314 of SEQ ID NO: 1563940
cucugaacucgauauaguc

SEQ ID NO: 1843780 - RNA, 19 nt, Artificial Sequence
  Description of Artificial Sequence: Synthetic oligonucleotide
  Antisense strand to SEQ ID NO: 1843779
gacuauaucgaguucagag

SEQ ID NO: 1843781 - RNA, 19 nt, Artificial Sequence
  Description of Artificial Sequence: Synthetic oligonucleotide
  Sense strand starting at position 3320 of SEQ ID NO: 1563940
acucgauauagucaaagug

SEQ ID NO: 1843782 - RNA, 19 nt, Artificial Sequence
  Description of Artificial Sequence: Synthetic oligonucleotide
  Antisense strand to SEQ ID NO: 1843781
cacuuugacuauaucgagu

SEQ ID NO: 1843783 - RNA, 19 nt, Artificial Sequence
  Description of Artificial Sequence: Synthetic oligonucleotide
  Sense strand starting at position 3332 of SEQ ID NO: 1563940
caaagugaauuugggagaa

SEQ ID NO: 1843784 - RNA, 19 nt, Artificial Sequence
  Description of Artificial Sequence: Synthetic oligonucleotide
  Antisense strand to SEQ ID NO: 1843783
uucucccaaauucacuuug

SEQ ID NO: 1843785 - RNA, 19 nt, Artificial Sequence
  Description of Artificial Sequence: Synthetic oligonucleotide
  Sense strand starting at position 3451 of SEQ ID NO: 1563940
guagcugagaugcaucaaa

SEQ ID NO: 1843786 - RNA, 19 nt, Artificial Sequence
  Description of Artificial Sequence: Synthetic oligonucleotide
  Antisense strand to SEQ ID NO: 1843785
uuugaugcaucucagcuac

SEQ ID NO: 1843787 - RNA, 19 nt, Artificial Sequence
  Description of Artificial Sequence: Synthetic oligonucleotide
  Sense strand starting at position 3507 of SEQ ID NO: 1563940
agauguugauauguuguaa

SEQ ID NO: 1843788 - RNA, 19 nt, Artificial Sequence
  Description of Artificial Sequence: Synthetic oligonucleotide
  Antisense strand to SEQ ID NO: 1843787
uuacaacauaucaacaucu

SEQ ID NO: 1843789 - RNA, 19 nt, Artificial Sequence
  Description of Artificial Sequence: Synthetic oligonucleotide
  Sense strand starting at position 3763 of SEQ ID NO: 1563940
agacaugucccaugccaua

SEQ ID NO: 1843790 - RNA, 19 nt, Artificial Sequence
  Description of Artificial Sequence: Synthetic oligonucleotide
  Antisense strand to SEQ ID NO: 1843789
uauggcaugggacaugucu

SEQ ID NO: 1843791 - RNA, 19 nt, Artificial Sequence
  Description of Artificial Sequence: Synthetic oligonucleotide
  Sense strand starting at position 3854 of SEQ ID NO: 1563940
ucuagaagcucuucuauag

SEQ ID NO: 1843792 - RNA, 19 nt, Artificial Sequence
  Description of Artificial Sequence: Synthetic oligonucleotide
  Antisense strand to SEQ ID NO: 1843791
cuauagaagagcuucuaga

SEQ ID NO: 1843793 - RNA, 19 nt, Artificial Sequence
  Description of Artificial Sequence: Synthetic oligonucleotide
  Sense strand starting at position 3858 of SEQ ID NO: 1563940
gaagcucuucuauagaggu

SEQ ID NO: 1843794 - RNA, 19 nt, Artificial Sequence
  Description of Artificial Sequence: Synthetic oligonucleotide
  Antisense strand to SEQ ID NO: 1843793
accucuauagaagagcuuc

SEQ ID NO: 1843795 - RNA, 19 nt, Artificial Sequence
  Description of Artificial Sequence: Synthetic oligonucleotide
  Sense strand starting at position 3865 of SEQ ID NO: 1563940
uucuauagagguuguaaag

SEQ ID NO: 1843796 - RNA, 19 nt, Artificial Sequence
  Description of Artificial Sequence: Synthetic oligonucleotide
  Antisense strand to SEQ ID NO: 1843795
cuuuacaaccucuauagaa

SEQ ID NO: 1843797 - RNA, 19 nt, Artificial Sequence
  Description of Artificial Sequence: Synthetic oligonucleotide
  Sense strand starting at position 3875 of SEQ ID NO: 1563940
guuguaaagaggcaugcua

SEQ ID NO: 1843798 - RNA, 19 nt, Artificial Sequence
  Description of Artificial Sequence: Synthetic oligonucleotide
  Antisense strand to SEQ ID NO: 1843797
uagcaugccucuuuacaac

SEQ ID NO: 1843799 - RNA, 19 nt, Artificial Sequence
  Description of Artificial Sequence: Synthetic oligonucleotide
  Sense strand starting at position 3877 of SEQ ID NO: 1563940
uguaaagaggcaugcuaca

SEQ ID NO: 1843800 - RNA, 19 nt, Artificial Sequence
  Description of Artificial Sequence: Synthetic oligonucleotide
  Antisense strand to SEQ ID NO: 1843799
uguagcaugccucuuuaca

SEQ ID NO: 1843801 - RNA, 19 nt, Artificial Sequence
  Description of Artificial Sequence: Synthetic oligonucleotide
  Sense strand starting at position 3898 of SEQ ID NO: 1563940
aauggaugucuuuggaacu

SEQ ID NO: 1843802 - RNA, 19 nt, Artificial Sequence
  Description of Artificial Sequence: Synthetic oligonucleotide
  Antisense strand to SEQ ID NO: 1843801
aguuccaaagacauccauu

SEQ ID NO: 1843803 - RNA, 19 nt, Artificial Sequence
  Description of Artificial Sequence: Synthetic oligonucleotide
  Sense strand starting at position 40 of SEQ ID NO: 1563941
gguuaaggugacuaguuca

SEQ ID NO: 1843804 - RNA, 19 nt, Artificial Sequence
  Description of Artificial Sequence: Synthetic oligonucleotide
  Antisense strand to SEQ ID NO: 1843803
ugaacuagucaccuuaacc

SEQ ID NO: 1843805 - RNA, 19 nt, Artificial Sequence
  Description of Artificial Sequence: Synthetic oligonucleotide
  Sense strand starting at position 194 of SEQ ID NO: 1563941
gagguuauaucuuuaauag

SEQ ID NO: 1843806 - RNA, 19 nt, Artificial Sequence
  Description of Artificial Sequence: Synthetic oligonucleotide
  Antisense strand to SEQ ID NO: 1843805
cuauuaaagauauaaccuc

SEQ ID NO: 1843807 - RNA, 19 nt, Artificial Sequence
  Description of Artificial Sequence: Synthetic oligonucleotide
  Sense strand starting at position 321 of SEQ ID NO: 1563941
acgacagcuuucucaaaua

SEQ ID NO: 1843808 - RNA, 19 nt, Artificial Sequence
  Description of Artificial Sequence: Synthetic oligonucleotide
  Antisense strand to SEQ ID NO: 1843807
uauuugagaaagcugucgu

SEQ ID NO: 1843809 - RNA, 19 nt, Artificial Sequence
  Description of Artificial Sequence: Synthetic oligonucleotide
  Sense strand starting at position 617 of SEQ ID NO: 1563941
cccaaaucgccucaauaug

SEQ ID NO: 1843810 - RNA, 19 nt, Artificial Sequence
  Description of Artificial Sequence: Synthetic oligonucleotide
  Antisense strand to SEQ ID NO: 1843809
cauauugaggcgauuuggg

SEQ ID NO: 1843811 - RNA, 19 nt, Artificial Sequence
  Description of Artificial Sequence: Synthetic oligonucleotide
  Sense strand starting at position 883 of SEQ ID NO: 1563941
guaacacaaagcgagaauu

SEQ ID NO: 1843812 - RNA, 19 nt, Artificial Sequence
  Description of Artificial Sequence: Synthetic oligonucleotide
  Antisense strand to SEQ ID NO: 1843811
aauucucgcuuuguguuac

SEQ ID NO: 1843813 - RNA, 19 nt, Artificial Sequence
  Description of Artificial Sequence: Synthetic oligonucleotide
  Sense strand starting at position 1049 of SEQ ID NO: 1563941
ggaauugggcgauggcaaa

SEQ ID NO: 1843814 - RNA, 19 nt, Artificial Sequence
  Description of Artificial Sequence: Synthetic oligonucleotide
  Antisense strand to SEQ ID NO: 1843813
uuugccaucgcccaauucc

SEQ ID NO: 1843815 - RNA, 19 nt, Artificial Sequence
  Description of Artificial Sequence: Synthetic oligonucleotide
  Sense strand starting at position 1344 of SEQ ID NO: 1563941
aggcgaugagcuggaauua

SEQ ID NO: 1843816 - RNA, 19 nt, Artificial Sequence
  Description of Artificial Sequence: Synthetic oligonucleotide
  Antisense strand to SEQ ID NO: 1843815
uaauuccagcucaucgccu

SEQ ID NO: 1843817 - RNA, 19 nt, Artificial Sequence
  Description of Artificial Sequence: Synthetic oligonucleotide
  Sense strand starting at position 1395 of SEQ ID NO: 1563941
cagggauuccaaugcaguc

SEQ ID NO: 1843818 - RNA, 19 nt, Artificial Sequence
  Description of Artificial Sequence: Synthetic oligonucleotide
  Antisense strand to SEQ ID NO: 1843817
gacugcauuggaaucccug

SEQ ID NO: 1843819 - RNA, 19 nt, Artificial Sequence
  Description of Artificial Sequence: Synthetic oligonucleotide
  Sense strand starting at position 1458 of SEQ ID NO: 1563941
gagagaguggaaugcuaga

SEQ ID NO: 1843820 - RNA, 19 nt, Artificial Sequence
  Description of Artificial Sequence: Synthetic oligonucleotide
  Antisense strand to SEQ ID NO: 1843819
ucuagcauuccacucucuc

SEQ ID NO: 1843821 - RNA, 19 nt, Artificial Sequence
  Description of Artificial Sequence: Synthetic oligonucleotide
  Sense strand starting at position 1472 of SEQ ID NO: 1563941
cuagaacauuuacgaaaua

SEQ ID NO: 1843822 - RNA, 19 nt, Artificial Sequence
  Description of Artificial Sequence: Synthetic oligonucleotide
  Antisense strand to SEQ ID NO: 1843821
uauuucguaaauguucuag

SEQ ID NO: 1843823 - RNA, 19 nt, Artificial Sequence
  Description of Artificial Sequence: Synthetic oligonucleotide
  Sense strand starting at position 1606 of SEQ ID NO: 1563941
uagcaaugucacugaugua

SEQ ID NO: 1843824 - RNA, 19 nt, Artificial Sequence
  Description of Artificial Sequence: Synthetic oligonucleotide
  Antisense strand to SEQ ID NO: 1843823
uacaucagugacauugcua

SEQ ID NO: 1843825 - RNA, 19 nt, Artificial Sequence
  Description of Artificial Sequence: Synthetic oligonucleotide
  Sense strand starting at position 1694 of SEQ ID NO: 1563941
ggcaucugccaagguagaa

SEQ ID NO: 1843826 - RNA, 19 nt, Artificial Sequence
  Description of Artificial Sequence: Synthetic oligonucleotide
  Antisense strand to SEQ ID NO: 1843825
uucuaccuuggcagaugcc

SEQ ID NO: 1843827 - RNA, 19 nt, Artificial Sequence
  Description of Artificial Sequence: Synthetic oligonucleotide
  Sense strand starting at position 2073 of SEQ ID NO: 1563941
cugcaaagucgagauucca

SEQ ID NO: 1843828 - RNA, 19 nt, Artificial Sequence
  Description of Artificial Sequence: Synthetic oligonucleotide
  Antisense strand to SEQ ID NO: 1843827
uggaaucucgacuuugcag

SEQ ID NO: 1843829 - RNA, 19 nt, Artificial Sequence
  Description of Artificial Sequence: Synthetic oligonucleotide
  Sense strand starting at position 2082 of SEQ ID NO: 1563941
cgagauuccauguaguccu

SEQ ID NO: 1843830 - RNA, 19 nt, Artificial Sequence
  Description of Artificial Sequence: Synthetic oligonucleotide
  Antisense strand to SEQ ID NO: 1843829
aggacuacauggaaucucg

SEQ ID NO: 1843831 - RNA, 19 nt, Artificial Sequence
  Description of Artificial Sequence: Synthetic oligonucleotide
  Sense strand starting at position 2271 of SEQ ID NO: 1563941
cgcgauuaagaagaguguu

SEQ ID NO: 1843832 - RNA, 19 nt, Artificial Sequence
  Description of Artificial Sequence: Synthetic oligonucleotide
  Antisense strand to SEQ ID NO: 1843831
aacacucuucuuaaucgcg

SEQ ID NO: 1843833 - RNA, 19 nt, Artificial Sequence
  Description of Artificial Sequence: Synthetic oligonucleotide
  Sense strand starting at position 2274 of SEQ ID NO: 1563941
gauuaagaagaguguuugu

SEQ ID NO: 1843834 - RNA, 19 nt, Artificial Sequence
  Description of Artificial Sequence: Synthetic oligonucleotide
  Antisense strand to SEQ ID NO: 1843833
acaaacacucuucuuaauc

SEQ ID NO: 1843835 - RNA, 19 nt, Artificial Sequence
  Description of Artificial Sequence: Synthetic oligonucleotide
  Sense strand starting at position 2277 of SEQ ID NO: 1563941
uaagaagaguguuuguuac

SEQ ID NO: 1843836 - RNA, 19 nt, Artificial Sequence
  Description of Artificial Sequence: Synthetic oligonucleotide
  Antisense strand to SEQ ID NO: 1843835
guaacaaacacucuucuua

SEQ ID NO: 1843837 - RNA, 19 nt, Artificial Sequence
  Description of Artificial Sequence: Synthetic oligonucleotide
  Sense strand starting at position 2279 of SEQ ID NO: 1563941
agaagaguguuuguuacuu

SEQ ID NO: 1843838 - RNA, 19 nt, Artificial Sequence
  Description of Artificial Sequence: Synthetic oligonucleotide
  Antisense strand to SEQ ID NO: 1843837
aaguaacaaacacucuucu

SEQ ID NO: 1843839 - RNA, 19 nt, Artificial Sequence
  Description of Artificial Sequence: Synthetic oligonucleotide
  Sense strand starting at position 2350 of SEQ ID NO: 1563941
ucaacuguauucguacaaa

SEQ ID NO: 1843840 - RNA, 19 nt, Artificial Sequence
  Description of Artificial Sequence: Synthetic oligonucleotide
  Antisense strand to SEQ ID NO: 1843839
uuuguacgaauacaguuga

SEQ ID NO: 1843841 - RNA, 19 nt, Artificial Sequence
  Description of Artificial Sequence: Synthetic oligonucleotide
  Sense strand starting at position 2380 of SEQ ID NO: 1563941
acgacucucacggaucaau

SEQ ID NO: 1843842 - RNA, 19 nt, Artificial Sequence
  Description of Artificial Sequence: Synthetic oligonucleotide
  Antisense strand to SEQ ID NO: 1843841
auugauccgugagagucgu

SEQ ID NO: 1843843 - RNA, 19 nt, Artificial Sequence
  Description of Artificial Sequence: Synthetic oligonucleotide
  Sense strand starting at position 2392 of SEQ ID NO: 1563941
gaucaauucugagccaguc

SEQ ID NO: 1843844 - RNA, 19 nt, Artificial Sequence
  Description of Artificial Sequence: Synthetic oligonucleotide
  Antisense strand to SEQ ID NO: 1843843
gacuggcucagaauugauc

SEQ ID NO: 1843845 - RNA, 19 nt, Artificial Sequence
  Description of Artificial Sequence: Synthetic oligonucleotide
  Sense strand starting at position 2414 of SEQ ID NO: 1563941
ucagaagauugccucucaa

SEQ ID NO: 1843846 - RNA, 19 nt, Artificial Sequence
  Description of Artificial Sequence: Synthetic oligonucleotide
  Antisense strand to SEQ ID NO: 1843845
uugagaggcaaucuucuga

SEQ ID NO: 1843847 - RNA, 19 nt, Artificial Sequence
  Description of Artificial Sequence: Synthetic oligonucleotide
  Sense strand starting at position 2573 of SEQ ID NO: 1563941
gccguauagccugaaauuu

SEQ ID NO: 1843848 - RNA, 19 nt, Artificial Sequence
  Description of Artificial Sequence: Synthetic oligonucleotide
  Antisense strand to SEQ ID NO: 1843847
aaauuucaggcuauacggc

SEQ ID NO: 1843849 - RNA, 19 nt, Artificial Sequence
  Description of Artificial Sequence: Synthetic oligonucleotide
  Sense strand starting at position 2789 of SEQ ID NO: 1563941
ggcgauuccacugagcuca

SEQ ID NO: 1843850 - RNA, 19 nt, Artificial Sequence
  Description of Artificial Sequence: Synthetic oligonucleotide
  Antisense strand to SEQ ID NO: 1843849
ugagcucaguggaaucgcc

SEQ ID NO: 1843851 - RNA, 19 nt, Artificial Sequence
  Description of Artificial Sequence: Synthetic oligonucleotide
  Sense strand starting at position 2791 of SEQ ID NO: 1563941
cgauuccacugagcucaaa

SEQ ID NO: 1843852 - RNA, 19 nt, Artificial Sequence
  Description of Artificial Sequence: Synthetic oligonucleotide
  Antisense strand to SEQ ID NO: 1843851
uuugagcucaguggaaucg

SEQ ID NO: 1843853 - RNA, 19 nt, Artificial Sequence
  Description of Artificial Sequence: Synthetic oligonucleotide
  Sense strand starting at position 2856 of SEQ ID NO: 1563941
acacgucuagauugaguca

SEQ ID NO: 1843854 - RNA, 19 nt, Artificial Sequence
  Description of Artificial Sequence: Synthetic oligonucleotide
  Antisense strand to SEQ ID NO: 1843853
ugacucaaucuagacgugu

SEQ ID NO: 1843855 - RNA, 19 nt, Artificial Sequence
  Description of Artificial Sequence: Synthetic oligonucleotide
  Sense strand starting at position 2859 of SEQ ID NO: 1563941
cgucuagauugagucauga

SEQ ID NO: 1843856 - RNA, 19 nt, Artificial Sequence
  Description of Artificial Sequence: Synthetic oligonucleotide
  Antisense strand to SEQ ID NO: 1843855
ucaugacucaaucuagacg

SEQ ID NO: 1843857 - RNA, 19 nt, Artificial Sequence
  Description of Artificial Sequence: Synthetic oligonucleotide
  Sense strand starting at position 2893 of SEQ ID NO: 1563941
uugaacaaaucgguucuua

SEQ ID NO: 1843858 - RNA, 19 nt, Artificial Sequence
  Description of Artificial Sequence: Synthetic oligonucleotide
  Antisense strand to SEQ ID NO: 1843857
uaagaaccgauuuguucaa

SEQ ID NO: 1843859 - RNA, 19 nt, Artificial Sequence
  Description of Artificial Sequence: Synthetic oligonucleotide
  Sense strand starting at position 2897 of SEQ ID NO: 1563941
acaaaucgguucuuacgau

SEQ ID NO: 1843860 - RNA, 19 nt, Artificial Sequence
  Description of Artificial Sequence: Synthetic oligonucleotide
  Antisense strand to SEQ ID NO: 1843859
aucguaagaaccgauuugu

SEQ ID NO: 1843861 - RNA, 19 nt, Artificial Sequence
  Description of Artificial Sequence: Synthetic oligonucleotide
  Sense strand starting at position 2975 of SEQ ID NO: 1563941
ccucuuguucuagaaacga

SEQ ID NO: 1843862 - RNA, 19 nt, Artificial Sequence
  Description of Artificial Sequence: Synthetic oligonucleotide
  Antisense strand to SEQ ID NO: 1843861
ucguuucuagaacaagagg

SEQ ID NO: 1843863 - RNA, 19 nt, Artificial Sequence
  Description of Artificial Sequence: Synthetic oligonucleotide
  Sense strand starting at position 3005 of SEQ ID NO: 1563941
uugccacaucagcaagaaa

SEQ ID NO: 1843864 - RNA, 19 nt, Artificial Sequence
  Description of Artificial Sequence: Synthetic oligonucleotide
  Antisense strand to SEQ ID NO: 1843863
uuucuugcugauguggcaa

SEQ ID NO: 1843865 - RNA, 19 nt, Artificial Sequence
  Description of Artificial Sequence: Synthetic oligonucleotide
  Sense strand starting at position 3047 of SEQ ID NO: 1563941
caaguuggaucucugagag

SEQ ID NO: 1843866 - RNA, 19 nt, Artificial Sequence
  Description of Artificial Sequence: Synthetic oligonucleotide
  Antisense strand to SEQ ID NO: 1843865
cucucagagauccaacuug

SEQ ID NO: 1843867 - RNA, 19 nt, Artificial Sequence
  Description of Artificial Sequence: Synthetic oligonucleotide
  Sense strand starting at position 3393 of SEQ ID NO: 1563941
cuacaaguucccuaucugu

SEQ ID NO: 1843868 - RNA, 19 nt, Artificial Sequence
  Description of Artificial Sequence: Synthetic oligonucleotide
  Antisense strand to SEQ ID NO: 1843867
acagauagggaacuuguag

SEQ ID NO: 1843869 - RNA, 19 nt, Artificial Sequence
  Description of Artificial Sequence: Synthetic oligonucleotide
  Sense strand starting at position 3398 of SEQ ID NO: 1563941
aguucccuaucuguaauga

SEQ ID NO: 1843870 - RNA, 19 nt, Artificial Sequence
  Description of Artificial Sequence: Synthetic oligonucleotide
  Antisense strand to SEQ ID NO: 1843869
ucauuacagauagggaacu

SEQ ID NO: 1843871 - RNA, 19 nt, Artificial Sequence
  Description of Artificial Sequence: Synthetic oligonucleotide
  Sense strand starting at position 3451 of SEQ ID NO: 1563941
cucagauuccacuggcaga

SEQ ID NO: 1843872 - RNA, 19 nt, Artificial Sequence
  Description of Artificial Sequence: Synthetic oligonucleotide
  Antisense strand to SEQ ID NO: 1843871
ucugccaguggaaucugag

SEQ ID NO: 1843873 - RNA, 19 nt, Artificial Sequence
  Description of Artificial Sequence: Synthetic oligonucleotide
  Sense strand starting at position 3493 of SEQ ID NO: 1563941
ggugcuagcuaauuaacaa

SEQ ID NO: 1843874 - RNA, 19 nt, Artificial Sequence
  Description of Artificial Sequence: Synthetic oligonucleotide
  Antisense strand to SEQ ID NO: 1843873
uuguuaauuagcuagcacc

SEQ ID NO: 1843875 - RNA, 19 nt, Artificial Sequence
  Description of Artificial Sequence: Synthetic oligonucleotide
  Sense strand starting at position 3643 of SEQ ID NO: 1563941
ucugaagccuaguuaggua

SEQ ID NO: 1843876 - RNA, 19 nt, Artificial Sequence
  Description of Artificial Sequence: Synthetic oligonucleotide
  Antisense strand to SEQ ID NO: 1843875
uaccuaacuaggcuucaga

SEQ ID NO: 1843877 - RNA, 19 nt, Artificial Sequence
  Description of Artificial Sequence: Synthetic oligonucleotide
  Sense strand starting at position 3647 of SEQ ID NO: 1563941
aagccuaguuagguagaca

SEQ ID NO: 1843878 - RNA, 19 nt, Artificial Sequence
  Description of Artificial Sequence: Synthetic oligonucleotide
  Antisense strand to SEQ ID NO: 1843877
ugucuaccuaacuaggcuu

SEQ ID NO: 1843879 - RNA, 19 nt, Artificial Sequence
  Description of Artificial Sequence: Synthetic oligonucleotide
  Sense strand starting at position 3672 of SEQ ID NO: 1563941
gcuacuagagagcaauaca

SEQ ID NO: 1843880 - RNA, 19 nt, Artificial Sequence
  Description of Artificial Sequence: Synthetic oligonucleotide
  Antisense strand to SEQ ID NO: 1843879
uguauugcucucuaguagc

SEQ ID NO: 1843881 - RNA, 19 nt, Artificial Sequence
  Description of Artificial Sequence: Synthetic oligonucleotide
  Sense strand starting at position 3774 of SEQ ID NO: 1563941
agccuugaucuagacauug

SEQ ID NO: 1843882 - RNA, 19 nt, Artificial Sequence
  Description of Artificial Sequence: Synthetic oligonucleotide
  Antisense strand to SEQ ID NO: 1843881
caaugucuagaucaaggcu

SEQ ID NO: 1843883 - RNA, 19 nt, Artificial Sequence
  Description of Artificial Sequence: Synthetic oligonucleotide
  Sense strand starting at position 402 of SEQ ID NO: 1563942
aggacauacuugccaauga

SEQ ID NO: 1843884 - RNA, 19 nt, Artificial Sequence
  Description of Artificial Sequence: Synthetic oligonucleotide
  Antisense strand to SEQ ID NO: 1843883
ucauuggcaaguauguccu

SEQ ID NO: 1843885 - RNA, 19 nt, Artificial Sequence
  Description of Artificial Sequence: Synthetic oligonucleotide
  Sense strand starting at position 635 of SEQ ID NO: 1563942
gagagcuucccacagcuga

SEQ ID NO: 1843886 - RNA, 19 nt, Artificial Sequence
  Description of Artificial Sequence: Synthetic oligonucleotide
  Antisense strand to SEQ ID NO: 1843885
ucagcugugggaagcucuc

SEQ ID NO: 1843887 - RNA, 19 nt, Artificial Sequence
  Description of Artificial Sequence: Synthetic oligonucleotide
  Sense strand starting at position 859 of SEQ ID NO: 1563942
cauagcucagugugauaaa

SEQ ID NO: 1843888 - RNA, 19 nt, Artificial Sequence
  Description of Artificial Sequence: Synthetic oligonucleotide
  Antisense strand to SEQ ID NO: 1843887
uuuaucacacugagcuaug

SEQ ID NO: 1843889 - RNA, 19 nt, Artificial Sequence
  Description of Artificial Sequence: Synthetic oligonucleotide
  Sense strand starting at position 1082 of SEQ ID NO: 1563942
ugcugaauaugucuaacag

SEQ ID NO: 1843890 - RNA, 19 nt, Artificial Sequence
  Description of Artificial Sequence: Synthetic oligonucleotide
  Antisense strand to SEQ ID NO: 1843889
cuguuagacauauucagca

SEQ ID NO: 1843891 - RNA, 19 nt, Artificial Sequence
  Description of Artificial Sequence: Synthetic oligonucleotide
  Sense strand starting at position 1083 of SEQ ID NO: 1563942
gcugaauaugucuaacagu

SEQ ID NO: 1843892 - RNA, 19 nt, Artificial Sequence
  Description of Artificial Sequence: Synthetic oligonucleotide
  Antisense strand to SEQ ID NO: 1843891
acuguuagacauauucagc

SEQ ID NO: 1843893 - RNA, 19 nt, Artificial Sequence
  Description of Artificial Sequence: Synthetic oligonucleotide
  Sense strand starting at position 1102 of SEQ ID NO: 1563942
acagcagauugucccuuaa

SEQ ID NO: 1843894 - RNA, 19 nt, Artificial Sequence
  Description of Artificial Sequence: Synthetic oligonucleotide
  Antisense strand to SEQ ID NO: 1843893
uuaagggacaaucugcugu

SEQ ID NO: 1843895 - RNA, 19 nt, Artificial Sequence
  Description of Artificial Sequence: Synthetic oligonucleotide
  Sense strand starting at position 1104 of SEQ ID NO: 1563942
agcagauugucccuuaaga

SEQ ID NO: 1843896 - RNA, 19 nt, Artificial Sequence
  Description of Artificial Sequence: Synthetic oligonucleotide
  Antisense strand to SEQ ID NO: 1843895
ucuuaagggacaaucugcu

SEQ ID NO: 1843897 - RNA, 19 nt, Artificial Sequence
  Description of Artificial Sequence: Synthetic oligonucleotide
  Sense strand starting at position 1131 of SEQ ID NO: 1563942
cugccaaguaaggguaauu

SEQ ID NO: 1843898 - RNA, 19 nt, Artificial Sequence
  Description of Artificial Sequence: Synthetic oligonucleotide
  Antisense strand to SEQ ID NO: 1843897
aauuacccuuacuuggcag

SEQ ID NO: 1843899 - RNA, 19 nt, Artificial Sequence
  Description of Artificial Sequence: Synthetic oligonucleotide
  Sense strand starting at position 1141 of SEQ ID NO: 1563942
aggguaauugcugagcaag

SEQ ID NO: 1843900 - RNA, 19 nt, Artificial Sequence
  Description of Artificial Sequence: Synthetic oligonucleotide
  Antisense strand to SEQ ID NO: 1843899
cuugcucagcaauuacccu

SEQ ID NO: 1843901 - RNA, 19 nt, Artificial Sequence
  Description of Artificial Sequence: Synthetic oligonucleotide
  Sense strand starting at position 1143 of SEQ ID NO: 1563942
gguaauugcugagcaagag

SEQ ID NO: 1843902 - RNA, 19 nt, Artificial Sequence
  Description of Artificial Sequence: Synthetic oligonucleotide
  Antisense strand to SEQ ID NO: 1843901
cucuugcucagcaauuacc

SEQ ID NO: 1843903 - RNA, 19 nt, Artificial Sequence
  Description of Artificial Sequence: Synthetic oligonucleotide
  Sense strand starting at position 1442 of SEQ ID NO: 1563942
uugauuacgucuuugauga

SEQ ID NO: 1843904 - RNA, 19 nt, Artificial Sequence
  Description of Artificial Sequence: Synthetic oligonucleotide
  Antisense strand to SEQ ID NO: 1843903
ucaucaaagacguaaucaa

SEQ ID NO: 1843905 - RNA, 19 nt, Artificial Sequence
  Description of Artificial Sequence: Synthetic oligonucleotide
  Sense strand starting at position 1443 of SEQ ID NO: 1563942
ugauuacgucuuugaugaa

SEQ ID NO: 1843906 - RNA, 19 nt, Artificial Sequence
  Description of Artificial Sequence: Synthetic oligonucleotide
  Antisense strand to SEQ ID NO: 1843905
uucaucaaagacguaauca

SEQ ID NO: 1843907 - RNA, 19 nt, Artificial Sequence
  Description of Artificial Sequence: Synthetic oligonucleotide
  Sense strand starting at position 1615 of SEQ ID NO: 1563942
gcaucaauggcacaguaga

SEQ ID NO: 1843908 - RNA, 19 nt, Artificial Sequence
  Description of Artificial Sequence: Synthetic oligonucleotide
  Antisense strand to SEQ ID NO: 1843907
ucuacugugccauugaugc

SEQ ID NO: 1843909 - RNA, 19 nt, Artificial Sequence
  Description of Artificial Sequence: Synthetic oligonucleotide
  Sense strand starting at position 1788 of SEQ ID NO: 1563942
gggagagcuaacuaucgca

SEQ ID NO: 1843910 - RNA, 19 nt, Artificial Sequence
  Description of Artificial Sequence: Synthetic oligonucleotide
  Antisense strand to SEQ ID NO: 1843909
ugcgauaguuagcucuccc

SEQ ID NO: 1843911 - RNA, 19 nt, Artificial Sequence
  Description of Artificial Sequence: Synthetic oligonucleotide
  Sense strand starting at position 1912 of SEQ ID NO: 1563942
cggauccuuccugagcaau

SEQ ID NO: 1843912 - RNA, 19 nt, Artificial Sequence
  Description of Artificial Sequence: Synthetic oligonucleotide
  Antisense strand to SEQ ID NO: 1843911
auugcucaggaaggauccg

SEQ ID NO: 1843913 - RNA, 19 nt, Artificial Sequence
  Description of Artificial Sequence: Synthetic oligonucleotide
  Sense strand starting at position 2026 of SEQ ID NO: 1563942
ggaagacuuccuuggccga

SEQ ID NO: 1843914 - RNA, 19 nt, Artificial Sequence
  Description of Artificial Sequence: Synthetic oligonucleotide
  Antisense strand to SEQ ID NO: 1843913
ucggccaaggaagucuucc

SEQ ID NO: 1843915 - RNA, 19 nt, Artificial Sequence
  Description of Artificial Sequence: Synthetic oligonucleotide
  Sense strand starting at position 2027 of SEQ ID NO: 1563942
gaagacuuccuuggccgaa

SEQ ID NO: 1843916 - RNA, 19 nt, Artificial Sequence
  Description of Artificial Sequence: Synthetic oligonucleotide
  Antisense strand to SEQ ID NO: 1843915
uucggccaaggaagucuuc

SEQ ID NO: 1843917 - RNA, 19 nt, Artificial Sequence
  Description of Artificial Sequence: Synthetic oligonucleotide
  Sense strand starting at position 2164 of SEQ ID NO: 1563942
uuccuuguaccuuagaguu

SEQ ID NO: 1843918 - RNA, 19 nt, Artificial Sequence
  Description of Artificial Sequence: Synthetic oligonucleotide
  Antisense strand to SEQ ID NO: 1843917
aacucuaagguacaaggaa

SEQ ID NO: 1843919 - RNA, 19 nt, Artificial Sequence
  Description of Artificial Sequence: Synthetic oligonucleotide
  Sense strand starting at position 2441 of SEQ ID NO: 1563942
uagucuuuccguuugcacu

SEQ ID NO: 1843920 - RNA, 19 nt, Artificial Sequence
  Description of Artificial Sequence: Synthetic oligonucleotide
  Antisense strand to SEQ ID NO: 1843919
agugcaaacggaaagacua

SEQ ID NO: 1843921 - RNA, 19 nt, Artificial Sequence
  Description of Artificial Sequence: Synthetic oligonucleotide
  Sense strand starting at position 2922 of SEQ ID NO: 1563942
gccgauaaugcauaugauu

SEQ ID NO: 1843922 - RNA, 19 nt, Artificial Sequence
  Description of Artificial Sequence: Synthetic oligonucleotide
  Antisense strand to SEQ ID NO: 1843921
aaucauaugcauuaucggc

SEQ ID NO: 1843923 - RNA, 19 nt, Artificial Sequence
  Description of Artificial Sequence: Synthetic oligonucleotide
  Sense strand starting at position 2941 of SEQ ID NO: 1563942
uuccauguguaaguggaaa

SEQ ID NO: 1843924 - RNA, 19 nt, Artificial Sequence
  Description of Artificial Sequence: Synthetic oligonucleotide
  Antisense strand to SEQ ID NO: 1843923
uuuccacuuacacauggaa

SEQ ID NO: 1843925 - RNA, 19 nt, Artificial Sequence
  Description of Artificial Sequence: Synthetic oligonucleotide
  Sense strand starting at position 2959 of SEQ ID NO: 1563942
agucuaagaauaggauguu

SEQ ID NO: 1843926 - RNA, 19 nt, Artificial Sequence
  Description of Artificial Sequence: Synthetic oligonucleotide
  Antisense strand to SEQ ID NO: 1843925
aacauccuauucuuagacu

SEQ ID NO: 1843927 - RNA, 19 nt, Artificial Sequence
  Description of Artificial Sequence: Synthetic oligonucleotide
  Sense strand starting at position 3002 of SEQ ID NO: 1563942
aaaggcagcugucuugaga

SEQ ID NO: 1843928 - RNA, 19 nt, Artificial Sequence
  Description of Artificial Sequence: Synthetic oligonucleotide
  Antisense strand to SEQ ID NO: 1843927
ucucaagacagcugccuuu

SEQ ID NO: 1843929 - RNA, 19 nt, Artificial Sequence
  Description of Artificial Sequence: Synthetic oligonucleotide
  Sense strand starting at position 3005 of SEQ ID NO: 1563942
ggcagcugucuugagacua

SEQ ID NO: 1843930 - RNA, 19 nt, Artificial Sequence
  Description of Artificial Sequence: Synthetic oligonucleotide
  Antisense strand to SEQ ID NO: 1843929
uagucucaagacagcugcc

SEQ ID NO: 1843931 - RNA, 19 nt, Artificial Sequence
  Description of Artificial Sequence: Synthetic oligonucleotide
  Sense strand starting at position 3010 of SEQ ID NO: 1563942
cugucuugagacuaagggu

SEQ ID NO: 1843932 - RNA, 19 nt, Artificial Sequence
  Description of Artificial Sequence: Synthetic oligonucleotide
  Antisense strand to SEQ ID NO: 1843931
acccuuagucucaagacag

SEQ ID NO: 1843933 - RNA, 19 nt, Artificial Sequence
  Description of Artificial Sequence: Synthetic oligonucleotide
  Sense strand starting at position 3079 of SEQ ID NO: 1563942
cccuuuaauucugcagaag

SEQ ID NO: 1843934 - RNA, 19 nt, Artificial Sequence
  Description of Artificial Sequence: Synthetic oligonucleotide
  Antisense strand to SEQ ID NO: 1843933
cuucugcagaauuaaaggg

SEQ ID NO: 1843935 - RNA, 19 nt, Artificial Sequence
  Description of Artificial Sequence: Synthetic oligonucleotide
  Sense strand starting at position 3082 of SEQ ID NO: 1563942
uuuaauucugcagaagugu

SEQ ID NO: 1843936 - RNA, 19 nt, Artificial Sequence
  Description of Artificial Sequence: Synthetic oligonucleotide
  Antisense strand to SEQ ID NO: 1843935
acacuucugcagaauuaaa

SEQ ID NO: 1843937 - RNA, 19 nt, Artificial Sequence
  Description of Artificial Sequence: Synthetic oligonucleotide
  Sense strand starting at position 3090 of SEQ ID NO: 1563942
ugcagaaguguuuacauua

SEQ ID NO: 1843938 - RNA, 19 nt, Artificial Sequence
  Description of Artificial Sequence: Synthetic oligonucleotide
  Antisense strand to SEQ ID NO: 1843937
uaauguaaacacuucugca

SEQ ID NO: 1843939 - RNA, 19 nt, Artificial Sequence
  Description of Artificial Sequence: Synthetic oligonucleotide
  Sense strand starting at position 3095 of SEQ ID NO: 1563942
aaguguuuacauuagauug

SEQ ID NO: 1843940 - RNA, 19 nt, Artificial Sequence
  Description of Artificial Sequence: Synthetic oligonucleotide
  Antisense strand to SEQ ID NO: 1843939
caaucuaauguaaacacuu

SEQ ID NO: 1843941 - RNA, 19 nt, Artificial Sequence
  Description of Artificial Sequence: Synthetic oligonucleotide
  Sense strand starting at position 3103 of SEQ ID NO: 1563942
acauuagauugcccuguga

SEQ ID NO: 1843942 - RNA, 19 nt, Artificial Sequence
  Description of Artificial Sequence: Synthetic oligonucleotide
  Antisense strand to SEQ ID NO: 1843941
ucacagggcaaucuaaugu

SEQ ID NO: 1843943 - RNA, 19 nt, Artificial Sequence
  Description of Artificial Sequence: Synthetic oligonucleotide
  Sense strand starting at position 3105 of SEQ ID NO: 1563942
auuagauugcccugugaag

SEQ ID NO: 1843944 - RNA, 19 nt, Artificial Sequence
  Description of Artificial Sequence: Synthetic oligonucleotide
  Antisense strand to SEQ ID NO: 1843943
cuucacagggcaaucuaau

SEQ ID NO: 1843945 - RNA, 19 nt, Artificial Sequence
  Description of Artificial Sequence: Synthetic oligonucleotide
  Sense strand starting at position 3107 of SEQ ID NO: 1563942
uagauugcccugugaagaa

SEQ ID NO: 1843946 - RNA, 19 nt, Artificial Sequence
  Description of Artificial Sequence: Synthetic oligonucleotide
  Antisense strand to SEQ ID NO: 1843945
uucuucacagggcaaucua

SEQ ID NO: 1843947 - RNA, 19 nt, Artificial Sequence
  Description of Artificial Sequence: Synthetic oligonucleotide
  Sense strand starting at position 3222 of SEQ ID NO: 1563942
guccuaaaucagcauaaag

SEQ ID NO: 1843948 - RNA, 19 nt, Artificial Sequence
  Description of Artificial Sequence: Synthetic oligonucleotide
  Antisense strand to SEQ ID NO: 1843947
cuuuaugcugauuuaggac

SEQ ID NO: 1843949 - RNA, 19 nt, Artificial Sequence
  Description of Artificial Sequence: Synthetic oligonucleotide
  Sense strand starting at position 3340 of SEQ ID NO: 1563942
gguagaaucugguuccuua

SEQ ID NO: 1843950 - RNA, 19 nt, Artificial Sequence
  Description of Artificial Sequence: Synthetic oligonucleotide
  Antisense strand to SEQ ID NO: 1843949
uaaggaaccagauucuacc

SEQ ID NO: 1843951 - RNA, 19 nt, Artificial Sequence
  Description of Artificial Sequence: Synthetic oligonucleotide
  Sense strand starting at position 3453 of SEQ ID NO: 1563942
acaucacugugauucucau

SEQ ID NO: 1843952 - RNA, 19 nt, Artificial Sequence
  Description of Artificial Sequence: Synthetic oligonucleotide
  Antisense strand to SEQ ID NO: 1843951
augagaaucacagugaugu

SEQ ID NO: 1843953 - RNA, 19 nt, Artificial Sequence
  Description of Artificial Sequence: Synthetic oligonucleotide
  Sense strand starting at position 3601 of SEQ ID NO: 1563942
ggacaucugugaaggagga

SEQ ID NO: 1843954 - RNA, 19 nt, Artificial Sequence
  Description of Artificial Sequence: Synthetic oligonucleotide
  Antisense strand to SEQ ID NO: 1843953
uccuccuucacagaugucc

SEQ ID NO: 1843955 - RNA, 19 nt, Artificial Sequence
  Description of Artificial Sequence: Synthetic oligonucleotide
  Sense strand starting at position 3744 of SEQ ID NO: 1563942
ugacuugccgaaggacaaa

SEQ ID NO: 1843956 - RNA, 19 nt, Artificial Sequence
  Description of Artificial Sequence: Synthetic oligonucleotide
  Antisense strand to SEQ ID NO: 1843955
uuuguccuucggcaaguca

SEQ ID NO: 1843957 - RNA, 19 nt, Artificial Sequence
  Description of Artificial Sequence: Synthetic oligonucleotide
  Sense strand starting at position 3816 of SEQ ID NO: 1563942
gguagugcucuugaccacu

SEQ ID NO: 1843958 - RNA, 19 nt, Artificial Sequence
  Description of Artificial Sequence: Synthetic oligonucleotide
  Antisense strand to SEQ ID NO: 1843957
aguggucaagagcacuacc

SEQ ID NO: 1843959 - RNA, 19 nt, Artificial Sequence
  Description of Artificial Sequence: Synthetic oligonucleotide
  Sense strand starting at position 3845 of SEQ ID NO: 1563942
gcagaauggcaaugagaaa

SEQ ID NO: 1843960 - RNA, 19 nt, Artificial Sequence
  Description of Artificial Sequence: Synthetic oligonucleotide
  Antisense strand to SEQ ID NO: 1843959
uuucucauugccauucugc

SEQ ID NO: 1843961 - RNA, 19 nt, Artificial Sequence
  Description of Artificial Sequence: Synthetic oligonucleotide
  Sense strand starting at position 3933 of SEQ ID NO: 1563942
aagguuaauuuaugggaaa

SEQ ID NO: 1843962 - RNA, 19 nt, Artificial Sequence
  Description of Artificial Sequence: Synthetic oligonucleotide
  Antisense strand to SEQ ID NO: 1843961
uuucccauaaauuaaccuu

SEQ ID NO: 1843963 - RNA, 19 nt, Artificial Sequence
  Description of Artificial Sequence: Synthetic oligonucleotide
  Sense strand starting at position 2161 of SEQ ID NO: 1563943
gggauuugcugggaaccaa

SEQ ID NO: 1843964 - RNA, 19 nt, Artificial Sequence
  Description of Artificial Sequence: Synthetic oligonucleotide
  Antisense strand to SEQ ID NO: 1843963
uugguucccagcaaauccc

SEQ ID NO: 1843965 - RNA, 19 nt, Artificial Sequence
  Description of Artificial Sequence: Synthetic oligonucleotide
  Sense strand starting at position 2237 of SEQ ID NO: 1563943
uggcccucucuguguuuau

SEQ ID NO: 1843966 - RNA, 19 nt, Artificial Sequence
  Description of Artificial Sequence: Synthetic oligonucleotide
  Antisense strand to SEQ ID NO: 1843965
auaaacacagagagggcca

SEQ ID NO: 1843967 - RNA, 19 nt, Artificial Sequence
  Description of Artificial Sequence: Synthetic oligonucleotide
  Sense strand starting at position 2248 of SEQ ID NO: 1563943
guguuuauguguucucugu

SEQ ID NO: 1843968 - RNA, 19 nt, Artificial Sequence
  Description of Artificial Sequence: Synthetic oligonucleotide
  Antisense strand to SEQ ID NO: 1843967
acagagaacacauaaacac

SEQ ID NO: 1843969 - RNA, 19 nt, Artificial Sequence
  Description of Artificial Sequence: Synthetic oligonucleotide
  Sense strand starting at position 2249 of SEQ ID NO: 1563943
uguuuauguguucucuguu

SEQ ID NO: 1843970 - RNA, 19 nt, Artificial Sequence
  Description of Artificial Sequence: Synthetic oligonucleotide
  Antisense strand to SEQ ID NO: 1843969
aacagagaacacauaaaca

SEQ ID NO: 1843971 - RNA, 19 nt, Artificial Sequence
  Description of Artificial Sequence: Synthetic oligonucleotide
  Sense strand starting at position 2250 of SEQ ID NO: 1563943
guuuauguguucucuguuc

SEQ ID NO: 1843972 - RNA, 19 nt, Artificial Sequence
  Description of Artificial Sequence: Synthetic oligonucleotide
  Antisense strand to SEQ ID NO: 1843971
gaacagagaacacauaaac

SEQ ID NO: 1843973 - RNA, 19 nt, Artificial Sequence
  Description of Artificial Sequence: Synthetic oligonucleotide
  Sense strand starting at position 2375 of SEQ ID NO: 1563943
ucaugugguucucuugaaa

SEQ ID NO: 1843974 - RNA, 19 nt, Artificial Sequence
  Description of Artificial Sequence: Synthetic oligonucleotide
  Antisense strand to SEQ ID NO: 1843973
uuucaagagaaccacauga

SEQ ID NO: 1843975 - RNA, 19 nt, Artificial Sequence
  Description of Artificial Sequence: Synthetic oligonucleotide
  Sense strand starting at position 2940 of SEQ ID NO: 1563943
uggguuuauuccuuaagcu

SEQ ID NO: 1843976 - RNA, 19 nt, Artificial Sequence
  Description of Artificial Sequence: Synthetic oligonucleotide
  Antisense strand to SEQ ID NO: 1843975
agcuuaaggaauaaaccca

SEQ ID NO: 1843977 - RNA, 19 nt, Artificial Sequence
  Description of Artificial Sequence: Synthetic oligonucleotide
  Sense strand starting at position 2941 of SEQ ID NO: 1563943
ggguuuauuccuuaagcuu

SEQ ID NO: 1843978 - RNA, 19 nt, Artificial Sequence
  Description of Artificial Sequence: Synthetic oligonucleotide
  Antisense strand to SEQ ID NO: 1843977
aagcuuaaggaauaaaccc

SEQ ID NO: 1843979 - RNA, 19 nt, Artificial Sequence
  Description of Artificial Sequence: Synthetic oligonucleotide
  Sense strand starting at position 2988 of SEQ ID NO: 1563943
ucuugucccuguucucaga

SEQ ID NO: 1843980 - RNA, 19 nt, Artificial Sequence
  Description of Artificial Sequence: Synthetic oligonucleotide
  Antisense strand to SEQ ID NO: 1843979
ucugagaacagggacaaga

SEQ ID NO: 1843981 - RNA, 19 nt, Artificial Sequence
  Description of Artificial Sequence: Synthetic oligonucleotide
  Sense strand starting at position 2997 of SEQ ID NO: 1563943
uguucucagagccacgauu

SEQ ID NO: 1843982 - RNA, 19 nt, Artificial Sequence
  Description of Artificial Sequence: Synthetic oligonucleotide
  Antisense strand to SEQ ID NO: 1843981
aaucguggcucugagaaca

SEQ ID NO: 1843983 - RNA, 19 nt, Artificial Sequence
  Description of Artificial Sequence: Synthetic oligonucleotide
  Sense strand starting at position 3297 of SEQ ID NO: 1563943
cuguguacccaagagacuu

SEQ ID NO: 1843984 - RNA, 19 nt, Artificial Sequence
  Description of Artificial Sequence: Synthetic oligonucleotide
  Antisense strand to SEQ ID NO: 1843983
aagucucuuggguacacag

SEQ ID NO: 1843985 - RNA, 19 nt, Artificial Sequence
  Description of Artificial Sequence: Synthetic oligonucleotide
  Sense strand starting at position 3428 of SEQ ID NO: 1563943
aguggccugucuguacaau

SEQ ID NO: 1843986 - RNA, 19 nt, Artificial Sequence
  Description of Artificial Sequence: Synthetic oligonucleotide
  Antisense strand to SEQ ID NO: 1843985
auuguacagacaggccacu

SEQ ID NO: 1843987 - RNA, 19 nt, Artificial Sequence
  Description of Artificial Sequence: Synthetic oligonucleotide
  Sense strand starting at position 3434 of SEQ ID NO: 1563943
cugucuguacaauggagua

SEQ ID NO: 1843988 - RNA, 19 nt, Artificial Sequence
  Description of Artificial Sequence: Synthetic oligonucleotide
  Antisense strand to SEQ ID NO: 1843987
uacuccauuguacagacag

SEQ ID NO: 1843989 - RNA, 19 nt, Artificial Sequence
  Description of Artificial Sequence: Synthetic oligonucleotide
  Sense strand starting at position 3439 of SEQ ID NO: 1563943
uguacaauggaguaucauu

SEQ ID NO: 1843990 - RNA, 19 nt, Artificial Sequence
  Description of Artificial Sequence: Synthetic oligonucleotide
  Antisense strand to SEQ ID NO: 1843989
aaugauacuccauuguaca

SEQ ID NO: 1843991 - RNA, 19 nt, Artificial Sequence
  Description of Artificial Sequence: Synthetic oligonucleotide
  Sense strand starting at position 3447 of SEQ ID NO: 1563943
ggaguaucauuuggccaua

SEQ ID NO: 1843992 - RNA, 19 nt, Artificial Sequence
  Description of Artificial Sequence: Synthetic oligonucleotide
  Antisense strand to SEQ ID NO: 1843991
uauggccaaaugauacucc

SEQ ID NO: 1843993 - RNA, 19 nt, Artificial Sequence
  Description of Artificial Sequence: Synthetic oligonucleotide
  Sense strand starting at position 3497 of SEQ ID NO: 1563943
cguggauggaccuggagaa

SEQ ID NO: 1843994 - RNA, 19 nt, Artificial Sequence
  Description of Artificial Sequence: Synthetic oligonucleotide
  Antisense strand to SEQ ID NO: 1843993
uucuccagguccauccacg

SEQ ID NO: 1843995 - RNA, 19 nt, Artificial Sequence
  Description of Artificial Sequence: Synthetic oligonucleotide
  Sense strand starting at position 3563 of SEQ ID NO: 1563943
uggcuccaucucugugaaa

SEQ ID NO: 1843996 - RNA, 19 nt, Artificial Sequence
  Description of Artificial Sequence: Synthetic oligonucleotide
  Antisense strand to SEQ ID NO: 1843995
uuucacagagauggagcca

SEQ ID NO: 1843997 - RNA, 19 nt, Artificial Sequence
  Description of Artificial Sequence: Synthetic oligonucleotide
  Sense strand starting at position 3564 of SEQ ID NO: 1563943
ggcuccaucucugugaaau

SEQ ID NO: 1843998 - RNA, 19 nt, Artificial Sequence
  Description of Artificial Sequence: Synthetic oligonucleotide
  Antisense strand to SEQ ID NO: 1843997
auuucacagagauggagcc

SEQ ID NO: 1843999 - RNA, 19 nt, Artificial Sequence
  Description of Artificial Sequence: Synthetic oligonucleotide
  Sense strand starting at position 3574 of SEQ ID NO: 1563943
cugugaaaugcuuagauag

SEQ ID NO: 1844000 - RNA, 19 nt, Artificial Sequence
  Description of Artificial Sequence: Synthetic oligonucleotide
  Antisense strand to SEQ ID NO: 1843999
cuaucuaagcauuucacag

SEQ ID NO: 1844001 - RNA, 19 nt, Artificial Sequence
  Description of Artificial Sequence: Synthetic oligonucleotide
  Sense strand starting at position 3678 of SEQ ID NO: 1563943
gggagugcuuuauggguga

SEQ ID NO: 1844002 - RNA, 19 nt, Artificial Sequence
  Description of Artificial Sequence: Synthetic oligonucleotide
  Antisense strand to SEQ ID NO: 1844001
ucacccauaaagcacuccc

SEQ ID NO: 1844003 - RNA, 19 nt, Artificial Sequence
  Description of Artificial Sequence: Synthetic oligonucleotide
  Sense strand starting at position 3680 of SEQ ID NO: 1563943
gagugcuuuaugggugaua

SEQ ID NO: 1844004 - RNA, 19 nt, Artificial Sequence
  Description of Artificial Sequence: Synthetic oligonucleotide
  Antisense strand to SEQ ID NO: 1844003
uaucacccauaaagcacuc

SEQ ID NO: 1844005 - RNA, 19 nt, Artificial Sequence
  Description of Artificial Sequence: Synthetic oligonucleotide
  Sense strand starting at position 3681 of SEQ ID NO: 1563943
agugcuuuaugggugauaa

SEQ ID NO: 1844006 - RNA, 19 nt, Artificial Sequence
  Description of Artificial Sequence: Synthetic oligonucleotide
  Antisense strand to SEQ ID NO: 1844005
uuaucacccauaaagcacu

SEQ ID NO: 1844007 - RNA, 19 nt, Artificial Sequence
  Description of Artificial Sequence: Synthetic oligonucleotide
  Sense strand starting at position 3682 of SEQ ID NO: 1563943
gugcuuuaugggugauaaa

SEQ ID NO: 1844008 - RNA, 19 nt, Artificial Sequence
  Description of Artificial Sequence: Synthetic oligonucleotide
  Antisense strand to SEQ ID NO: 1844007
uuuaucacccauaaagcac

SEQ ID NO: 1844009 - RNA, 19 nt, Artificial Sequence
  Description of Artificial Sequence: Synthetic oligonucleotide
  Sense strand starting at position 3924 of SEQ ID NO: 1563943
gggcaauugggcuggacau

SEQ ID NO: 1844010 - RNA, 19 nt, Artificial Sequence
  Description of Artificial Sequence: Synthetic oligonucleotide
  Antisense strand to SEQ ID NO: 1844009
auguccagcccaauugccc

SEQ ID NO: 1844011 - RNA, 19 nt, Artificial Sequence
  Description of Artificial Sequence: Synthetic oligonucleotide
  Sense strand starting at position 7 of SEQ ID NO: 1563950
ggacaaaguuuauuguaua

SEQ ID NO: 1844012 - RNA, 19 nt, Artificial Sequence
  Description of Artificial Sequence: Synthetic oligonucleotide
  Antisense strand to SEQ ID NO: 1844011
uauacaauaaacuuugucc

SEQ ID NO: 1844013 - RNA, 19 nt, Artificial Sequence
  Description of Artificial Sequence: Synthetic oligonucleotide
  Sense strand starting at position 61 of SEQ ID NO: 1563950
cuacauuagucaucucuag

SEQ ID NO: 1844014 - RNA, 19 nt, Artificial Sequence
  Description of Artificial Sequence: Synthetic oligonucleotide
  Antisense strand to SEQ ID NO: 1844013
cuagagaugacuaauguag

SEQ ID NO: 1844015 - RNA, 19 nt, Artificial Sequence
  Description of Artificial Sequence: Synthetic oligonucleotide
  Sense strand starting at position 65 of SEQ ID NO: 1563950
auuagucaucucuaggguu

SEQ ID NO: 1844016 - RNA, 19 nt, Artificial Sequence
  Description of Artificial Sequence: Synthetic oligonucleotide
  Antisense strand to SEQ ID NO: 1844015
aacccuagagaugacuaau

SEQ ID NO: 1844017 - RNA, 19 nt, Artificial Sequence
  Description of Artificial Sequence: Synthetic oligonucleotide
  Sense strand starting at position 95 of SEQ ID NO: 1563950
uagauauaguaagugggau

SEQ ID NO: 1844018 - RNA, 19 nt, Artificial Sequence
  Description of Artificial Sequence: Synthetic oligonucleotide
  Antisense strand to SEQ ID NO: 1844017
aucccacuuacuauaucua

SEQ ID NO: 1844019 - RNA, 19 nt, Artificial Sequence
  Description of Artificial Sequence: Synthetic oligonucleotide
  Sense strand starting at position 103 of SEQ ID NO: 1563950
guaagugggaucuggaauc

SEQ ID NO: 1844020 - RNA, 19 nt, Artificial Sequence
  Description of Artificial Sequence: Synthetic oligonucleotide
  Antisense strand to SEQ ID NO: 1844019
gauuccagaucccacuuac

SEQ ID NO: 1844021 - RNA, 19 nt, Artificial Sequence
  Description of Artificial Sequence: Synthetic oligonucleotide
  Sense strand starting at position 215 of SEQ ID NO: 1563950
auugaaccacugugugaau

SEQ ID NO: 1844022 - RNA, 19 nt, Artificial Sequence
  Description of Artificial Sequence: Synthetic oligonucleotide
  Antisense strand to SEQ ID NO: 1844021
auucacacagugguucaau

SEQ ID NO: 1844023 - RNA, 19 nt, Artificial Sequence
  Description of Artificial Sequence: Synthetic oligonucleotide
  Sense strand starting at position 216 of SEQ ID NO: 1563950
uugaaccacugugugaauu

SEQ ID NO: 1844024 - RNA, 19 nt, Artificial Sequence
  Description of Artificial Sequence: Synthetic oligonucleotide
  Antisense strand to SEQ ID NO: 1844023
aauucacacagugguucaa

SEQ ID NO: 1844025 - RNA, 19 nt, Artificial Sequence
  Description of Artificial Sequence: Synthetic oligonucleotide
  Sense strand starting at position 227 of SEQ ID NO: 1563950
ugugaauucuaugugauaa

SEQ ID NO: 1844026 - RNA, 19 nt, Artificial Sequence
  Description of Artificial Sequence: Synthetic oligonucleotide
  Antisense strand to SEQ ID NO: 1844025
uuaucacauagaauucaca

SEQ ID NO: 1844027 - RNA, 19 nt, Artificial Sequence
  Description of Artificial Sequence: Synthetic oligonucleotide
  Sense strand starting at position 292 of SEQ ID NO: 1563950
aauaaaugguagcuguauu

SEQ ID NO: 1844028 - RNA, 19 nt, Artificial Sequence
  Description of Artificial Sequence: Synthetic oligonucleotide
  Antisense strand to SEQ ID NO: 1844027
aauacagcuaccauuuauu

SEQ ID NO: 1844029 - RNA, 19 nt, Artificial Sequence
  Description of Artificial Sequence: Synthetic oligonucleotide
  Sense strand starting at position 417 of SEQ ID NO: 1563950
gacuuuagaugagucucaa

SEQ ID NO: 1844030 - RNA, 19 nt, Artificial Sequence
  Description of Artificial Sequence: Synthetic oligonucleotide
  Antisense strand to SEQ ID NO: 1844029
uugagacucaucuaaaguc

SEQ ID NO: 1844031 - RNA, 19 nt, Artificial Sequence
  Description of Artificial Sequence: Synthetic oligonucleotide
  Sense strand starting at position 660 of SEQ ID NO: 1563950
agggcuuacccucaguaaa

SEQ ID NO: 1844032 - RNA, 19 nt, Artificial Sequence
  Description of Artificial Sequence: Synthetic oligonucleotide
  Antisense strand to SEQ ID NO: 1844031
uuuacugaggguaagcccu

SEQ ID NO: 1844033 - RNA, 19 nt, Artificial Sequence
  Description of Artificial Sequence: Synthetic oligonucleotide
  Sense strand starting at position 728 of SEQ ID NO: 1563950
uugucuuaguuuccaauuu

SEQ ID NO: 1844034 - RNA, 19 nt, Artificial Sequence
  Description of Artificial Sequence: Synthetic oligonucleotide
  Antisense strand to SEQ ID NO: 1844033
aaauuggaaacuaagacaa

SEQ ID NO: 1844035 - RNA, 19 nt, Artificial Sequence
  Description of Artificial Sequence: Synthetic oligonucleotide
  Sense strand starting at position 802 of SEQ ID NO: 1563950
cucuucugucagugagaaa

SEQ ID NO: 1844036 - RNA, 19 nt, Artificial Sequence
  Description of Artificial Sequence: Synthetic oligonucleotide
  Antisense strand to SEQ ID NO: 1844035
uuucucacugacagaagag

SEQ ID NO: 1844037 - RNA, 19 nt, Artificial Sequence
  Description of Artificial Sequence: Synthetic oligonucleotide
  Sense strand starting at position 862 of SEQ ID NO: 1563950
auggguagccacuaacaau

SEQ ID NO: 1844038 - RNA, 19 nt, Artificial Sequence
  Description of Artificial Sequence: Synthetic oligonucleotide
  Antisense strand to SEQ ID NO: 1844037
auuguuaguggcuacccau

SEQ ID NO: 1844039 - RNA, 19 nt, Artificial Sequence
  Description of Artificial Sequence: Synthetic oligonucleotide
  Sense strand starting at position 926 of SEQ ID NO: 1563950
caagucucaguaggaauaa

SEQ ID NO: 1844040 - RNA, 19 nt, Artificial Sequence
  Description of Artificial Sequence: Synthetic oligonucleotide
  Antisense strand to SEQ ID NO: 1844039
uuauuccuacugagacuug

SEQ ID NO: 1844041 - RNA, 19 nt, Artificial Sequence
  Description of Artificial Sequence: Synthetic oligonucleotide
  Sense strand starting at position 956 of SEQ ID NO: 1563950
ggagcacuuccugaagcuu

SEQ ID NO: 1844042 - RNA, 19 nt, Artificial Sequence
  Description of Artificial Sequence: Synthetic oligonucleotide
  Antisense strand to SEQ ID NO: 1844041
aagcuucaggaagugcucc

SEQ ID NO: 1844043 - RNA, 19 nt, Artificial Sequence
  Description of Artificial Sequence: Synthetic oligonucleotide
  Sense strand starting at position 964 of SEQ ID NO: 1563950
uccugaagcuucucauaug

SEQ ID NO: 1844044 - RNA, 19 nt, Artificial Sequence
  Description of Artificial Sequence: Synthetic oligonucleotide
  Antisense strand to SEQ ID NO: 1844043
cauaugagaagcuucagga

SEQ ID NO: 1844045 - RNA, 19 nt, Artificial Sequence
  Description of Artificial Sequence: Synthetic oligonucleotide
  Sense strand starting at position 1032 of SEQ ID NO: 1563950
cagggacguuguguuauuu

SEQ ID NO: 1844046 - RNA, 19 nt, Artificial Sequence
  Description of Artificial Sequence: Synthetic oligonucleotide
  Antisense strand to SEQ ID NO: 1844045
aaauaacacaacgucccug

SEQ ID NO: 1844047 - RNA, 19 nt, Artificial Sequence
  Description of Artificial Sequence: Synthetic oligonucleotide
  Sense strand starting at position 2021 of SEQ ID NO: 1563950
ucauuaaauggaugccaau

SEQ ID NO: 1844048 - RNA, 19 nt, Artificial Sequence
  Description of Artificial Sequence: Synthetic oligonucleotide
  Antisense strand to SEQ ID NO: 1844047
auuggcauccauuuaauga

SEQ ID NO: 1844049 - RNA, 19 nt, Artificial Sequence
  Description of Artificial Sequence: Synthetic oligonucleotide
  Sense strand starting at position 2057 of SEQ ID NO: 1563950
cugaaagaaugggaauaaa

SEQ ID NO: 1844050 - RNA, 19 nt, Artificial Sequence
  Description of Artificial Sequence: Synthetic oligonucleotide
  Antisense strand to SEQ ID NO: 1844049
uuuauucccauucuuucag

SEQ ID NO: 1844051 - RNA, 19 nt, Artificial Sequence
  Description of Artificial Sequence: Synthetic oligonucleotide
  Sense strand starting at position 2106 of SEQ ID NO: 1563950
uagggugugcaggaucauu

SEQ ID NO: 1844052 - RNA, 19 nt, Artificial Sequence
  Description of Artificial Sequence: Synthetic oligonucleotide
  Antisense strand to SEQ ID NO: 1844051
aaugauccugcacacccua

SEQ ID NO: 1844053 - RNA, 19 nt, Artificial Sequence
  Description of Artificial Sequence: Synthetic oligonucleotide
  Sense strand starting at position 2221 of SEQ ID NO: 1563950
auggaaaguuccuuaucuu

SEQ ID NO: 1844054 - RNA, 19 nt, Artificial Sequence
  Description of Artificial Sequence: Synthetic oligonucleotide
  Antisense strand to SEQ ID NO: 1844053
aagauaaggaacuuuccau

SEQ ID NO: 1844055 - RNA, 19 nt, Artificial Sequence
  Description of Artificial Sequence: Synthetic oligonucleotide
  Sense strand starting at position 2222 of SEQ ID NO: 1563950
uggaaaguuccuuaucuuu

SEQ ID NO: 1844056 - RNA, 19 nt, Artificial Sequence
  Description of Artificial Sequence: Synthetic oligonucleotide
  Antisense strand to SEQ ID NO: 1844055
aaagauaaggaacuuucca

SEQ ID NO: 1844057 - RNA, 19 nt, Artificial Sequence
  Description of Artificial Sequence: Synthetic oligonucleotide
  Sense strand starting at position 2373 of SEQ ID NO: 1563950
cugauauguagacaugguu

SEQ ID NO: 1844058 - RNA, 19 nt, Artificial Sequence
  Description of Artificial Sequence: Synthetic oligonucleotide
  Antisense strand to SEQ ID NO: 1844057
aaccaugucuacauaucag

SEQ ID NO: 1844059 - RNA, 19 nt, Artificial Sequence
  Description of Artificial Sequence: Synthetic oligonucleotide
  Sense strand starting at position 2376 of SEQ ID NO: 1563950
auauguagacaugguugaa

SEQ ID NO: 1844060 - RNA, 19 nt, Artificial Sequence
  Description of Artificial Sequence: Synthetic oligonucleotide
  Antisense strand to SEQ ID NO: 1844059
uucaaccaugucuacauau

SEQ ID NO: 1844061 - RNA, 19 nt, Artificial Sequence
  Description of Artificial Sequence: Synthetic oligonucleotide
  Sense strand starting at position 2379 of SEQ ID NO: 1563950
uguagacaugguugaaucu

SEQ ID NO: 1844062 - RNA, 19 nt, Artificial Sequence
  Description of Artificial Sequence: Synthetic oligonucleotide
  Antisense strand to SEQ ID NO: 1844061
agauucaaccaugucuaca

SEQ ID NO: 1844063 - RNA, 19 nt, Artificial Sequence
  Description of Artificial Sequence: Synthetic oligonucleotide
  Sense strand starting at position 2567 of SEQ ID NO: 1563950
gcucuuugaccugagcuga

SEQ ID NO: 1844064 - RNA, 19 nt, Artificial Sequence
  Description of Artificial Sequence: Synthetic oligonucleotide
  Antisense strand to SEQ ID NO: 1844063
ucagcucaggucaaagagc

SEQ ID NO: 1844065 - RNA, 19 nt, Artificial Sequence
  Description of Artificial Sequence: Synthetic oligonucleotide
  Sense strand starting at position 2572 of SEQ ID NO: 1563950
uugaccugagcugauauua

SEQ ID NO: 1844066 - RNA, 19 nt, Artificial Sequence
  Description of Artificial Sequence: Synthetic oligonucleotide
  Antisense strand to SEQ ID NO: 1844065
uaauaucagcucaggucaa

SEQ ID NO: 1844067 - RNA, 19 nt, Artificial Sequence
  Description of Artificial Sequence: Synthetic oligonucleotide
  Sense strand starting at position 2581 of SEQ ID NO: 1563950
gcugauauuauguagaugu

SEQ ID NO: 1844068 - RNA, 19 nt, Artificial Sequence
  Description of Artificial Sequence: Synthetic oligonucleotide
  Antisense strand to SEQ ID NO: 1844067
acaucuacauaauaucagc

SEQ ID NO: 1844069 - RNA, 19 nt, Artificial Sequence
  Description of Artificial Sequence: Synthetic oligonucleotide
  Sense strand starting at position 2614 of SEQ ID NO: 1563950
ggaggacccucuucuaaua

SEQ ID NO: 1844070 - RNA, 19 nt, Artificial Sequence
  Description of Artificial Sequence: Synthetic oligonucleotide
  Antisense strand to SEQ ID NO: 1844069
uauuagaagaggguccucc

SEQ ID NO: 1844071 - RNA, 19 nt, Artificial Sequence
  Description of Artificial Sequence: Synthetic oligonucleotide
  Sense strand starting at position 2923 of SEQ ID NO: 1563950
ggcccuugucugcuguuua

SEQ ID NO: 1844072 - RNA, 19 nt, Artificial Sequence
  Description of Artificial Sequence: Synthetic oligonucleotide
  Antisense strand to SEQ ID NO: 1844071
uaaacagcagacaagggcc

SEQ ID NO: 1844073 - RNA, 19 nt, Artificial Sequence
  Description of Artificial Sequence: Synthetic oligonucleotide
  Sense strand starting at position 2941 of SEQ ID NO: 1563950
acugguguauuccuagaac

SEQ ID NO: 1844074 - RNA, 19 nt, Artificial Sequence
  Description of Artificial Sequence: Synthetic oligonucleotide
  Antisense strand to SEQ ID NO: 1844073
guucuaggaauacaccagu

SEQ ID NO: 1844075 - RNA, 19 nt, Artificial Sequence
  Description of Artificial Sequence: Synthetic oligonucleotide
  Sense strand starting at position 2944 of SEQ ID NO: 1563950
gguguauuccuagaacaua

SEQ ID NO: 1844076 - RNA, 19 nt, Artificial Sequence
  Description of Artificial Sequence: Synthetic oligonucleotide
  Antisense strand to SEQ ID NO: 1844075
uauguucuaggaauacacc

SEQ ID NO: 1844077 - RNA, 19 nt, Artificial Sequence
  Description of Artificial Sequence: Synthetic oligonucleotide
  Sense strand starting at position 3180 of SEQ ID NO: 1563950
ucaguugaacuguaaguga

SEQ ID NO: 1844078 - RNA, 19 nt, Artificial Sequence
  Description of Artificial Sequence: Synthetic oligonucleotide
  Antisense strand to SEQ ID NO: 1844077
ucacuuacaguucaacuga

SEQ ID NO: 1844079 - RNA, 19 nt, Artificial Sequence
  Description of Artificial Sequence: Synthetic oligonucleotide
  Sense strand starting at position 3183 of SEQ ID NO: 1563950
guugaacuguaagugaaau

SEQ ID NO: 1844080 - RNA, 19 nt, Artificial Sequence
  Description of Artificial Sequence: Synthetic oligonucleotide
  Antisense strand to SEQ ID NO: 1844079
auuucacuuacaguucaac

SEQ ID NO: 1844081 - RNA, 19 nt, Artificial Sequence
  Description of Artificial Sequence: Synthetic oligonucleotide
  Sense strand starting at position 3195 of SEQ ID NO: 1563950
gugaaaucaggucacucuu

SEQ ID NO: 1844082 - RNA, 19 nt, Artificial Sequence
  Description of Artificial Sequence: Synthetic oligonucleotide
  Antisense strand to SEQ ID NO: 1844081
aagagugaccugauuucac

SEQ ID NO: 1844083 - RNA, 19 nt, Artificial Sequence
  Description of Artificial Sequence: Synthetic oligonucleotide
  Sense strand starting at position 3201 of SEQ ID NO: 1563950
ucaggucacucuuccauua

SEQ ID NO: 1844084 - RNA, 19 nt, Artificial Sequence
  Description of Artificial Sequence: Synthetic oligonucleotide
  Antisense strand to SEQ ID NO: 1844083
uaauggaagagugaccuga

SEQ ID NO: 1844085 - RNA, 19 nt, Artificial Sequence
  Description of Artificial Sequence: Synthetic oligonucleotide
  Sense strand starting at position 3285 of SEQ ID NO: 1563950
acaucuugaguuugaagau

SEQ ID NO: 1844086 - RNA, 19 nt, Artificial Sequence
  Description of Artificial Sequence: Synthetic oligonucleotide
  Antisense strand to SEQ ID NO: 1844085
aucuucaaacucaagaugu

SEQ ID NO: 1844087 - RNA, 19 nt, Artificial Sequence
  Description of Artificial Sequence: Synthetic oligonucleotide
  Sense strand starting at position 3667 of SEQ ID NO: 1563950
gcuguucuauauuuguaaa

SEQ ID NO: 1844088 - RNA, 19 nt, Artificial Sequence
  Description of Artificial Sequence: Synthetic oligonucleotide
  Antisense strand to SEQ ID NO: 1844087
uuuacaaauauagaacagc

SEQ ID NO: 1844089 - RNA, 19 nt, Artificial Sequence
  Description of Artificial Sequence: Synthetic oligonucleotide
  Sense strand starting at position 3790 of SEQ ID NO: 1563950
ggucacgucaucuaggaau

SEQ ID NO: 1844090 - RNA, 19 nt, Artificial Sequence
  Description of Artificial Sequence: Synthetic oligonucleotide
  Antisense strand to SEQ ID NO: 1844089
auuccuagaugacgugacc

SEQ ID NO: 1844091 - RNA, 19 nt, Artificial Sequence
  Description of Artificial Sequence: Synthetic oligonucleotide
  Sense strand starting at position 92 of SEQ ID NO: 1563951
agugaugauuccuuguuaa

SEQ ID NO: 1844092 - RNA, 19 nt, Artificial Sequence
  Description of Artificial Sequence: Synthetic oligonucleotide
  Antisense strand to SEQ ID NO: 1844091
uuaacaaggaaucaucacu

SEQ ID NO: 1844093 - RNA, 19 nt, Artificial Sequence
  Description of Artificial Sequence: Synthetic oligonucleotide
  Sense strand starting at position 148 of SEQ ID NO: 1563951
uguaacucaguguaaugga

SEQ ID NO: 1844094 - RNA, 19 nt, Artificial Sequence
  Description of Artificial Sequence: Synthetic oligonucleotide
  Antisense strand to SEQ ID NO: 1844093
uccauuacacugaguuaca

SEQ ID NO: 1844095 - RNA, 19 nt, Artificial Sequence
  Description of Artificial Sequence: Synthetic oligonucleotide
  Sense strand starting at position 181 of SEQ ID NO: 1563951
aaugaacauuggucuguca

SEQ ID NO: 1844096 - RNA, 19 nt, Artificial Sequence
  Description of Artificial Sequence: Synthetic oligonucleotide
  Antisense strand to SEQ ID NO: 1844095
ugacagaccaauguucauu

SEQ ID NO: 1844097 - RNA, 19 nt, Artificial Sequence
  Description of Artificial Sequence: Synthetic oligonucleotide
  Sense strand starting at position 281 of SEQ ID NO: 1563951
guuauuuaccaccguaucu

SEQ ID NO: 1844098 - RNA, 19 nt, Artificial Sequence
  Description of Artificial Sequence: Synthetic oligonucleotide
  Antisense strand to SEQ ID NO: 1844097
agauacggugguaaauaac

SEQ ID NO: 1844099 - RNA, 19 nt, Artificial Sequence
  Description of Artificial Sequence: Synthetic oligonucleotide
  Sense strand starting at position 363 of SEQ ID NO: 1563951
ugaaccacccuguaaugua

SEQ ID NO: 1844100 - RNA, 19 nt, Artificial Sequence
  Description of Artificial Sequence: Synthetic oligonucleotide
  Antisense strand to SEQ ID NO: 1844099
uacauuacagggugguuca

SEQ ID NO: 1844101 - RNA, 19 nt, Artificial Sequence
  Description of Artificial Sequence: Synthetic oligonucleotide
  Sense strand starting at position 372 of SEQ ID NO: 1563951
cuguaauguaggcagaaca

SEQ ID NO: 1844102 - RNA, 19 nt, Artificial Sequence
  Description of Artificial Sequence: Synthetic oligonucleotide
  Antisense strand to SEQ ID NO: 1844101
uguucugccuacauuacag

SEQ ID NO: 1844103 - RNA, 19 nt, Artificial Sequence
  Description of Artificial Sequence: Synthetic oligonucleotide
  Sense strand starting at position 418 of SEQ ID NO: 1563951
gugaaacaacauugcagaa

SEQ ID NO: 1844104 - RNA, 19 nt, Artificial Sequence
  Description of Artificial Sequence: Synthetic oligonucleotide
  Antisense strand to SEQ ID NO: 1844103
uucugcaauguuguuucac

SEQ ID NO: 1844105 - RNA, 19 nt, Artificial Sequence
  Description of Artificial Sequence: Synthetic oligonucleotide
  Sense strand starting at position 702 of SEQ ID NO: 1563951
aggucucaacuaggucuaa

SEQ ID NO: 1844106 - RNA, 19 nt, Artificial Sequence
  Description of Artificial Sequence: Synthetic oligonucleotide
  Antisense strand to SEQ ID NO: 1844105
uuagaccuaguugagaccu

SEQ ID NO: 1844107 - RNA, 19 nt, Artificial Sequence
  Description of Artificial Sequence: Synthetic oligonucleotide
  Sense strand starting at position 717 of SEQ ID NO: 1563951
cuaauauuaugggcuuaau

SEQ ID NO: 1844108 - RNA, 19 nt, Artificial Sequence
  Description of Artificial Sequence: Synthetic oligonucleotide
  Antisense strand to SEQ ID NO: 1844107
auuaagcccauaauauuag

SEQ ID NO: 1844109 - RNA, 19 nt, Artificial Sequence
  Description of Artificial Sequence: Synthetic oligonucleotide
  Sense strand starting at position 753 of SEQ ID NO: 1563951
guaucauucugacuucuga

SEQ ID NO: 1844110 - RNA, 19 nt, Artificial Sequence
  Description of Artificial Sequence: Synthetic oligonucleotide
  Antisense strand to SEQ ID NO: 1844109
ucagaagucagaaugauac

SEQ ID NO: 1844111 - RNA, 19 nt, Artificial Sequence
  Description of Artificial Sequence: Synthetic oligonucleotide
  Sense strand starting at position 938 of SEQ ID NO: 1563951
guugcuuuagguuauaaag

SEQ ID NO: 1844112 - RNA, 19 nt, Artificial Sequence
  Description of Artificial Sequence: Synthetic oligonucleotide
  Antisense strand to SEQ ID NO: 1844111
cuuuauaaccuaaagcaac

SEQ ID NO: 1844113 - RNA, 19 nt, Artificial Sequence
  Description of Artificial Sequence: Synthetic oligonucleotide
  Sense strand starting at position 963 of SEQ ID NO: 1563951
ugaagaaauucugucucau

SEQ ID NO: 1844114 - RNA, 19 nt, Artificial Sequence
  Description of Artificial Sequence: Synthetic oligonucleotide
  Antisense strand to SEQ ID NO: 1844113
augagacagaauuucuuca

SEQ ID NO: 1844115 - RNA, 19 nt, Artificial Sequence
  Description of Artificial Sequence: Synthetic oligonucleotide
  Sense strand starting at position 991 of SEQ ID NO: 1563951
gaaacuguucuagaagcuu

SEQ ID NO: 1844116 - RNA, 19 nt, Artificial Sequence
  Description of Artificial Sequence: Synthetic oligonucleotide
  Antisense strand to SEQ ID NO: 1844115
aagcuucuagaacaguuuc

SEQ ID NO: 1844117 - RNA, 19 nt, Artificial Sequence
  Description of Artificial Sequence: Synthetic oligonucleotide
  Sense strand starting at position 1015 of SEQ ID NO: 1563951
uagugaugucuccaccuga

SEQ ID NO: 1844118 - RNA, 19 nt, Artificial Sequence
  Description of Artificial Sequence: Synthetic oligonucleotide
  Antisense strand to SEQ ID NO: 1844117
ucagguggagacaucacua

SEQ ID NO: 1844119 - RNA, 19 nt, Artificial Sequence
  Description of Artificial Sequence: Synthetic oligonucleotide
  Sense strand starting at position 1136 of SEQ ID NO: 1563951
gguuguaagcaggauguaa

SEQ ID NO: 1844120 - RNA, 19 nt, Artificial Sequence
  Description of Artificial Sequence: Synthetic oligonucleotide
  Antisense strand to SEQ ID NO: 1844119
uuacauccugcuuacaacc

SEQ ID NO: 1844121 - RNA, 19 nt, Artificial Sequence
  Description of Artificial Sequence: Synthetic oligonucleotide
  Sense strand starting at position 1190 of SEQ ID NO: 1563951
ugcacaugccagcaagaau

SEQ ID NO: 1844122 - RNA, 19 nt, Artificial Sequence
  Description of Artificial Sequence: Synthetic oligonucleotide
  Antisense strand to SEQ ID NO: 1844121
auucuugcuggcaugugca

SEQ ID NO: 1844123 - RNA, 19 nt, Artificial Sequence
  Description of Artificial Sequence: Synthetic oligonucleotide
  Sense strand starting at position 1333 of SEQ ID NO: 1563951
agaacugauuagucucaac

SEQ ID NO: 1844124 - RNA, 19 nt, Artificial Sequence
  Description of Artificial Sequence: Synthetic oligonucleotide
  Antisense strand to SEQ ID NO: 1844123
guugagacuaaucaguucu

SEQ ID NO: 1844125 - RNA, 19 nt, Artificial Sequence
  Description of Artificial Sequence: Synthetic oligonucleotide
  Sense strand starting at position 1397 of SEQ ID NO: 1563951
gaaggcccuguguaaauua

SEQ ID NO: 1844126 - RNA, 19 nt, Artificial Sequence
  Description of Artificial Sequence: Synthetic oligonucleotide
  Antisense strand to SEQ ID NO: 1844125
uaauuuacacagggccuuc

SEQ ID NO: 1844127 - RNA, 19 nt, Artificial Sequence
  Description of Artificial Sequence: Synthetic oligonucleotide
  Sense strand starting at position 1555 of SEQ ID NO: 1563951
aaaugaaagcuuugcugga

SEQ ID NO: 1844128 - RNA, 19 nt, Artificial Sequence
  Description of Artificial Sequence: Synthetic oligonucleotide
  Antisense strand to SEQ ID NO: 1844127
uccagcaaagcuuucauuu

SEQ ID NO: 1844129 - RNA, 19 nt, Artificial Sequence
  Description of Artificial Sequence: Synthetic oligonucleotide
  Sense strand starting at position 1556 of SEQ ID NO: 1563951
aaugaaagcuuugcuggaa

SEQ ID NO: 1844130 - RNA, 19 nt, Artificial Sequence
  Description of Artificial Sequence: Synthetic oligonucleotide
  Antisense strand to SEQ ID NO: 1844129
uuccagcaaagcuuucauu

SEQ ID NO: 1844131 - RNA, 19 nt, Artificial Sequence
  Description of Artificial Sequence: Synthetic oligonucleotide
  Sense strand starting at position 1557 of SEQ ID NO: 1563951
augaaagcuuugcuggaau

SEQ ID NO: 1844132 - RNA, 19 nt, Artificial Sequence
  Description of Artificial Sequence: Synthetic oligonucleotide
  Antisense strand to SEQ ID NO: 1844131
auuccagcaaagcuuucau

SEQ ID NO: 1844133 - RNA, 19 nt, Artificial Sequence
  Description of Artificial Sequence: Synthetic oligonucleotide
  Sense strand starting at position 1634 of SEQ ID NO: 1563951
gaggccuuacugcagaaua

SEQ ID NO: 1844134 - RNA, 19 nt, Artificial Sequence
  Description of Artificial Sequence: Synthetic oligonucleotide
  Antisense strand to SEQ ID NO: 1844133
uauucugcaguaaggccuc

SEQ ID NO: 1844135 - RNA, 19 nt, Artificial Sequence
  Description of Artificial Sequence: Synthetic oligonucleotide
  Sense strand starting at position 1636 of SEQ ID NO: 1563951
ggccuuacugcagaauaua

SEQ ID NO: 1844136 - RNA, 19 nt, Artificial Sequence
  Description of Artificial Sequence: Synthetic oligonucleotide
  Antisense strand to SEQ ID NO: 1844135
uauauucugcaguaaggcc

SEQ ID NO: 1844137 - RNA, 19 nt, Artificial Sequence
  Description of Artificial Sequence: Synthetic oligonucleotide
  Sense strand starting at position 2097 of SEQ ID NO: 1563951
auugacaaguacucauuga

SEQ ID NO: 1844138 - RNA, 19 nt, Artificial Sequence
  Description of Artificial Sequence: Synthetic oligonucleotide
  Antisense strand to SEQ ID NO: 1844137
ucaaugaguacuugucaau

SEQ ID NO: 1844139 - RNA, 19 nt, Artificial Sequence
  Description of Artificial Sequence: Synthetic oligonucleotide
  Sense strand starting at position 2101 of SEQ ID NO: 1563951
acaaguacucauugaggau

SEQ ID NO: 1844140 - RNA, 19 nt, Artificial Sequence
  Description of Artificial Sequence: Synthetic oligonucleotide
  Antisense strand to SEQ ID NO: 1844139
auccucaaugaguacuugu

SEQ ID NO: 1844141 - RNA, 19 nt, Artificial Sequence
  Description of Artificial Sequence: Synthetic oligonucleotide
  Sense strand starting at position 2153 of SEQ ID NO: 1563951
ugugaaggugaguagaagu

SEQ ID NO: 1844142 - RNA, 19 nt, Artificial Sequence
  Description of Artificial Sequence: Synthetic oligonucleotide
  Antisense strand to SEQ ID NO: 1844141
acuucuacucaccuucaca

SEQ ID NO: 1844143 - RNA, 19 nt, Artificial Sequence
  Description of Artificial Sequence: Synthetic oligonucleotide
  Sense strand starting at position 2223 of SEQ ID NO: 1563951
gacaguccugaguaguacu

SEQ ID NO: 1844144 - RNA, 19 nt, Artificial Sequence
  Description of Artificial Sequence: Synthetic oligonucleotide
  Antisense strand to SEQ ID NO: 1844143
aguacuacucaggacuguc

SEQ ID NO: 1844145 - RNA, 19 nt, Artificial Sequence
  Description of Artificial Sequence: Synthetic oligonucleotide
  Sense strand starting at position 2303 of SEQ ID NO: 1563951
agaagugcccuggaagcua

SEQ ID NO: 1844146 - RNA, 19 nt, Artificial Sequence
  Description of Artificial Sequence: Synthetic oligonucleotide
  Antisense strand to SEQ ID NO: 1844145
uagcuuccagggcacuucu

SEQ ID NO: 1844147 - RNA, 19 nt, Artificial Sequence
  Description of Artificial Sequence: Synthetic oligonucleotide
  Sense strand starting at position 2736 of SEQ ID NO: 1563951
agaaauaguugccuauuga

SEQ ID NO: 1844148 - RNA, 19 nt, Artificial Sequence
  Description of Artificial Sequence: Synthetic oligonucleotide
  Antisense strand to SEQ ID NO: 1844147
ucaauaggcaacuauuucu

SEQ ID NO: 1844149 - RNA, 19 nt, Artificial Sequence
  Description of Artificial Sequence: Synthetic oligonucleotide
  Sense strand starting at position 2737 of SEQ ID NO: 1563951
gaaauaguugccuauugau

SEQ ID NO: 1844150 - RNA, 19 nt, Artificial Sequence
  Description of Artificial Sequence: Synthetic oligonucleotide
  Antisense strand to SEQ ID NO: 1844149
aucaauaggcaacuauuuc

SEQ ID NO: 1844151 - RNA, 19 nt, Artificial Sequence
  Description of Artificial Sequence: Synthetic oligonucleotide
  Sense strand starting at position 2949 of SEQ ID NO: 1563951
augacaucaucuuugcaga

SEQ ID NO: 1844152 - RNA, 19 nt, Artificial Sequence
  Description of Artificial Sequence: Synthetic oligonucleotide
  Antisense strand to SEQ ID NO: 1844151
ucugcaaagaugaugucau

SEQ ID NO: 1844153 - RNA, 19 nt, Artificial Sequence
  Description of Artificial Sequence: Synthetic oligonucleotide
  Sense strand starting at position 2976 of SEQ ID NO: 1563951
uucaguaaaggugguauga

SEQ ID NO: 1844154 - RNA, 19 nt, Artificial Sequence
  Description of Artificial Sequence: Synthetic oligonucleotide
  Antisense strand to SEQ ID NO: 1844153
ucauaccaccuuuacugaa

SEQ ID NO: 1844155 - RNA, 19 nt, Artificial Sequence
  Description of Artificial Sequence: Synthetic oligonucleotide
  Sense strand starting at position 3123 of SEQ ID NO: 1563951
ugccucuucuggucaauuu

SEQ ID NO: 1844156 - RNA, 19 nt, Artificial Sequence
  Description of Artificial Sequence: Synthetic oligonucleotide
  Antisense strand to SEQ ID NO: 1844155
aaauugaccagaagaggca

SEQ ID NO: 1844157 - RNA, 19 nt, Artificial Sequence
  Description of Artificial Sequence: Synthetic oligonucleotide
  Sense strand starting at position 3171 of SEQ ID NO: 1563951
uuuccagaaguuuguggaa

SEQ ID NO: 1844158 - RNA, 19 nt, Artificial Sequence
  Description of Artificial Sequence: Synthetic oligonucleotide
  Antisense strand to SEQ ID NO: 1844157
uuccacaaacuucuggaaa

SEQ ID NO: 1844159 - RNA, 19 nt, Artificial Sequence
  Description of Artificial Sequence: Synthetic oligonucleotide
  Sense strand starting at position 3478 of SEQ ID NO: 1563951
caaggccaguuauugaaua

SEQ ID NO: 1844160 - RNA, 19 nt, Artificial Sequence
  Description of Artificial Sequence: Synthetic oligonucleotide
  Antisense strand to SEQ ID NO: 1844159
uauucaauaacuggccuug

SEQ ID NO: 1844161 - RNA, 19 nt, Artificial Sequence
  Description of Artificial Sequence: Synthetic oligonucleotide
  Sense strand starting at position 3483 of SEQ ID NO: 1563951
ccaguuauugaauagguuu

SEQ ID NO: 1844162 - RNA, 19 nt, Artificial Sequence
  Description of Artificial Sequence: Synthetic oligonucleotide
  Antisense strand to SEQ ID NO: 1844161
aaaccuauucaauaacugg

SEQ ID NO: 1844163 - RNA, 19 nt, Artificial Sequence
  Description of Artificial Sequence: Synthetic oligonucleotide
  Sense strand starting at position 3690 of SEQ ID NO: 1563951
aguuccaugcuagagagua

SEQ ID NO: 1844164 - RNA, 19 nt, Artificial Sequence
  Description of Artificial Sequence: Synthetic oligonucleotide
  Antisense strand to SEQ ID NO: 1844163
uacucucuagcauggaacu

SEQ ID NO: 1844165 - RNA, 19 nt, Artificial Sequence
  Description of Artificial Sequence: Synthetic oligonucleotide
  Sense strand starting at position 3846 of SEQ ID NO: 1563951
ucacaagugggaugaaguu

SEQ ID NO: 1844166 - RNA, 19 nt, Artificial Sequence
  Description of Artificial Sequence: Synthetic oligonucleotide
  Antisense strand to SEQ ID NO: 1844165
aacuucaucccacuuguga

SEQ ID NO: 1844167 - RNA, 19 nt, Artificial Sequence
  Description of Artificial Sequence: Synthetic oligonucleotide
  Sense strand starting at position 3894 of SEQ ID NO: 1563951
agggcaucucaaugaacuu

SEQ ID NO: 1844168 - RNA, 19 nt, Artificial Sequence
  Description of Artificial Sequence: Synthetic oligonucleotide
  Antisense strand to SEQ ID NO: 1844167
aaguucauugagaugcccu

SEQ ID NO: 1844169 - RNA, 19 nt, Artificial Sequence
  Description of Artificial Sequence: Synthetic oligonucleotide
  Sense strand starting at position 3948 of SEQ ID NO: 1563951
gauuaugucacauguggag

SEQ ID NO: 1844170 - RNA, 19 nt, Artificial Sequence
  Description of Artificial Sequence: Synthetic oligonucleotide
  Antisense strand to SEQ ID NO: 1844169
cuccacaugugacauaauc

SEQ ID NO: 1844171 - RNA, 19 nt, Artificial Sequence
  Description of Artificial Sequence: Synthetic oligonucleotide
  Sense strand starting at position 56 of SEQ ID NO: 1563952
ggucguaugucccugacaa

SEQ ID NO: 1844172 - RNA, 19 nt, Artificial Sequence
  Description of Artificial Sequence: Synthetic oligonucleotide
  Antisense strand to SEQ ID NO: 1844171
uugucagggacauacgacc

SEQ ID NO: 1844173 - RNA, 19 nt, Artificial Sequence
  Description of Artificial Sequence: Synthetic oligonucleotide
  Sense strand starting at position 57 of SEQ ID NO: 1563952
gucguaugucccugacaaa

SEQ ID NO: 1844174 - RNA, 19 nt, Artificial Sequence
  Description of Artificial Sequence: Synthetic oligonucleotide
  Antisense strand to SEQ ID NO: 1844173
uuugucagggacauacgac

SEQ ID NO: 1844175 - RNA, 19 nt, Artificial Sequence
  Description of Artificial Sequence: Synthetic oligonucleotide
  Sense strand starting at position 434 of SEQ ID NO: 1563952
gggcccaucucuucuuaca

SEQ ID NO: 1844176 - RNA, 19 nt, Artificial Sequence
  Description of Artificial Sequence: Synthetic oligonucleotide
  Antisense strand to SEQ ID NO: 1844175
uguaagaagagaugggccc

SEQ ID NO: 1844177 - RNA, 19 nt, Artificial Sequence
  Description of Artificial Sequence: Synthetic oligonucleotide
  Sense strand starting at position 528 of SEQ ID NO: 1563952
agaccuuugucacucagaa

SEQ ID NO: 1844178 - RNA, 19 nt, Artificial Sequence
  Description of Artificial Sequence: Synthetic oligonucleotide
  Antisense strand to SEQ ID NO: 1844177
uucugagugacaaaggucu

SEQ ID NO: 1844179 - RNA, 19 nt, Artificial Sequence
  Description of Artificial Sequence: Synthetic oligonucleotide
  Sense strand starting at position 631 of SEQ ID NO: 1563952
agucuuacaucccuggaaa

SEQ ID NO: 1844180 - RNA, 19 nt, Artificial Sequence
  Description of Artificial Sequence: Synthetic oligonucleotide
  Antisense strand to SEQ ID NO: 1844179
uuuccagggauguaagacu

SEQ ID NO: 1844181 - RNA, 19 nt, Artificial Sequence
  Description of Artificial Sequence: Synthetic oligonucleotide
  Sense strand starting at position 698 of SEQ ID NO: 1563952
gugucaggaccuugauucu

SEQ ID NO: 1844182 - RNA, 19 nt, Artificial Sequence
  Description of Artificial Sequence: Synthetic oligonucleotide
  Antisense strand to SEQ ID NO: 1844181
agaaucaagguccugacac

SEQ ID NO: 1844183 - RNA, 19 nt, Artificial Sequence
  Description of Artificial Sequence: Synthetic oligonucleotide
  Sense strand starting at position 701 of SEQ ID NO: 1563952
ucaggaccuugauucuaga

SEQ ID NO: 1844184 - RNA, 19 nt, Artificial Sequence
  Description of Artificial Sequence: Synthetic oligonucleotide
  Antisense strand to SEQ ID NO: 1844183
ucuagaaucaagguccuga

SEQ ID NO: 1844185 - RNA, 19 nt, Artificial Sequence
  Description of Artificial Sequence: Synthetic oligonucleotide
  Sense strand starting at position 793 of SEQ ID NO: 1563952
ugcaguguuacccagcgaa

SEQ ID NO: 1844186 - RNA, 19 nt, Artificial Sequence
  Description of Artificial Sequence: Synthetic oligonucleotide
  Antisense strand to SEQ ID NO: 1844185
uucgcuggguaacacugca

SEQ ID NO: 1844187 - RNA, 19 nt, Artificial Sequence
  Description of Artificial Sequence: Synthetic oligonucleotide
  Sense strand starting at position 812 of SEQ ID NO: 1563952
gcgggagaggauuguccua

SEQ ID NO: 1844188 - RNA, 19 nt, Artificial Sequence
  Description of Artificial Sequence: Synthetic oligonucleotide
  Antisense strand to SEQ ID NO: 1844187
uaggacaauccucucccgc

SEQ ID NO: 1844189 - RNA, 19 nt, Artificial Sequence
  Description of Artificial Sequence: Synthetic oligonucleotide
  Sense strand starting at position 819 of SEQ ID NO: 1563952
aggauuguccuauaugcag

SEQ ID NO: 1844190 - RNA, 19 nt, Artificial Sequence
  Description of Artificial Sequence: Synthetic oligonucleotide
  Antisense strand to SEQ ID NO: 1844189
cugcauauaggacaauccu

SEQ ID NO: 1844191 - RNA, 19 nt, Artificial Sequence
  Description of Artificial Sequence: Synthetic oligonucleotide
  Sense strand starting at position 846 of SEQ ID NO: 1563952
agacucuugaaagggcuua

SEQ ID NO: 1844192 - RNA, 19 nt, Artificial Sequence
  Description of Artificial Sequence: Synthetic oligonucleotide
  Antisense strand to SEQ ID NO: 1844191
uaagcccuuucaagagucu

SEQ ID NO: 1844193 - RNA, 19 nt, Artificial Sequence
  Description of Artificial Sequence: Synthetic oligonucleotide
  Sense strand starting at position 892 of SEQ ID NO: 1563952
cuccgaggucuccaccuua

SEQ ID NO: 1844194 - RNA, 19 nt, Artificial Sequence
  Description of Artificial Sequence: Synthetic oligonucleotide
  Antisense strand to SEQ ID NO: 1844193
uaagguggagaccucggag

SEQ ID NO: 1844195 - RNA, 19 nt, Artificial Sequence
  Description of Artificial Sequence: Synthetic oligonucleotide
  Sense strand starting at position 981 of SEQ ID NO: 1563952
auaccuaagucucuuggga

SEQ ID NO: 1844196 - RNA, 19 nt, Artificial Sequence
  Description of Artificial Sequence: Synthetic oligonucleotide
  Antisense strand to SEQ ID NO: 1844195
ucccaagagacuuagguau

SEQ ID NO: 1844197 - RNA, 19 nt, Artificial Sequence
  Description of Artificial Sequence: Synthetic oligonucleotide
  Sense strand starting at position 1036 of SEQ ID NO: 1563952
ccuguaucucuuggagaau

SEQ ID NO: 1844198 - RNA, 19 nt, Artificial Sequence
  Description of Artificial Sequence: Synthetic oligonucleotide
  Antisense strand to SEQ ID NO: 1844197
auucuccaagagauacagg

SEQ ID NO: 1844199 - RNA, 19 nt, Artificial Sequence
  Description of Artificial Sequence: Synthetic oligonucleotide
  Sense strand starting at position 1045 of SEQ ID NO: 1563952
cuuggagaauucccaccua

SEQ ID NO: 1844200 - RNA, 19 nt, Artificial Sequence
  Description of Artificial Sequence: Synthetic oligonucleotide
  Antisense strand to SEQ ID NO: 1844199
uaggugggaauucuccaag

SEQ ID NO: 1844201 - RNA, 19 nt, Artificial Sequence
  Description of Artificial Sequence: Synthetic oligonucleotide
  Sense strand starting at position 1059 of SEQ ID NO: 1563952
accuauuggcccuauauga

SEQ ID NO: 1844202 - RNA, 19 nt, Artificial Sequence
  Description of Artificial Sequence: Synthetic oligonucleotide
  Antisense strand to SEQ ID NO: 1844201
ucauauagggccaauaggu

SEQ ID NO: 1844203 - RNA, 19 nt, Artificial Sequence
  Description of Artificial Sequence: Synthetic oligonucleotide
  Sense strand starting at position 1185 of SEQ ID NO: 1563952
gaaagaaggugucucacau

SEQ ID NO: 1844204 - RNA, 19 nt, Artificial Sequence
  Description of Artificial Sequence: Synthetic oligonucleotide
  Antisense strand to SEQ ID NO: 1844203
augugagacaccuucuuuc

SEQ ID NO: 1844205 - RNA, 19 nt, Artificial Sequence
  Description of Artificial Sequence: Synthetic oligonucleotide
  Sense strand starting at position 2146 of SEQ ID NO: 1563952
ggagaacccggauguaaag

SEQ ID NO: 1844206 - RNA, 19 nt, Artificial Sequence
  Description of Artificial Sequence: Synthetic oligonucleotide
  Antisense strand to SEQ ID NO: 1844205
cuuuacauccggguucucc

SEQ ID NO: 1844207 - RNA, 19 nt, Artificial Sequence
  Description of Artificial Sequence: Synthetic oligonucleotide
  Sense strand starting at position 2831 of SEQ ID NO: 1563952
ugcggugauugguuaagag

SEQ ID NO: 1844208 - RNA, 19 nt, Artificial Sequence
  Description of Artificial Sequence: Synthetic oligonucleotide
  Antisense strand to SEQ ID NO: 1844207
cucuuaaccaaucaccgca

SEQ ID NO: 1844209 - RNA, 19 nt, Artificial Sequence
  Description of Artificial Sequence: Synthetic oligonucleotide
  Sense strand starting at position 2832 of SEQ ID NO: 1563952
gcggugauugguuaagaga

SEQ ID NO: 1844210 - RNA, 19 nt, Artificial Sequence
  Description of Artificial Sequence: Synthetic oligonucleotide
  Antisense strand to SEQ ID NO: 1844209
ucucuuaaccaaucaccgc

SEQ ID NO: 1844211 - RNA, 19 nt, Artificial Sequence
  Description of Artificial Sequence: Synthetic oligonucleotide
  Sense strand starting at position 2903 of SEQ ID NO: 1563952
gacagugguuguuugggaa

SEQ ID NO: 1844212 - RNA, 19 nt, Artificial Sequence
  Description of Artificial Sequence: Synthetic oligonucleotide
  Antisense strand to SEQ ID NO: 1844211
uucccaaacaaccacuguc

SEQ ID NO: 1844213 - RNA, 19 nt, Artificial Sequence
  Description of Artificial Sequence: Synthetic oligonucleotide
  Sense strand starting at position 3363 of SEQ ID NO: 1563952
ugggucgaucgagguuuau

SEQ ID NO: 1844214 - RNA, 19 nt, Artificial Sequence
  Description of Artificial Sequence: Synthetic oligonucleotide
  Antisense strand to SEQ ID NO: 1844213
auaaaccucgaucgaccca

SEQ ID NO: 1844215 - RNA, 19 nt, Artificial Sequence
  Description of Artificial Sequence: Synthetic oligonucleotide
  Sense strand starting at position 3367 of SEQ ID NO: 1563952
ucgaucgagguuuaugaaa

SEQ ID NO: 1844216 - RNA, 19 nt, Artificial Sequence
  Description of Artificial Sequence: Synthetic oligonucleotide
  Antisense strand to SEQ ID NO: 1844215
uuucauaaaccucgaucga

SEQ ID NO: 1844217 - RNA, 19 nt, Artificial Sequence
  Description of Artificial Sequence: Synthetic oligonucleotide
  Sense strand starting at position 3418 of SEQ ID NO: 1563952
uuggcagaaucccugcuau

SEQ ID NO: 1844218 - RNA, 19 nt, Artificial Sequence
  Description of Artificial Sequence: Synthetic oligonucleotide
  Antisense strand to SEQ ID NO: 1844217
auagcagggauucugccaa

SEQ ID NO: 1844219 - RNA, 19 nt, Artificial Sequence
  Description of Artificial Sequence: Synthetic oligonucleotide
  Sense strand starting at position 3432 of SEQ ID NO: 1563952
gcuauugaguagcuggaga

SEQ ID NO: 1844220 - RNA, 19 nt, Artificial Sequence
  Description of Artificial Sequence: Synthetic oligonucleotide
  Antisense strand to SEQ ID NO: 1844219
ucuccagcuacucaauagc

SEQ ID NO: 1844221 - RNA, 19 nt, Artificial Sequence
  Description of Artificial Sequence: Synthetic oligonucleotide
  Sense strand starting at position 3445 of SEQ ID NO: 1563952
uggagagcuacacgcuaau

SEQ ID NO: 1844222 - RNA, 19 nt, Artificial Sequence
  Description of Artificial Sequence: Synthetic oligonucleotide
  Antisense strand to SEQ ID NO: 1844221
auuagcguguagcucucca

SEQ ID NO: 1844223 - RNA, 19 nt, Artificial Sequence
  Description of Artificial Sequence: Synthetic oligonucleotide
  Sense strand starting at position 3476 of SEQ ID NO: 1563952
cuuccugucugagugaucu

SEQ ID NO: 1844224 - RNA, 19 nt, Artificial Sequence
  Description of Artificial Sequence: Synthetic oligonucleotide
  Antisense strand to SEQ ID NO: 1844223
agaucacucagacaggaag

SEQ ID NO: 1844225 - RNA, 19 nt, Artificial Sequence
  Description of Artificial Sequence: Synthetic oligonucleotide
  Sense strand starting at position 3480 of SEQ ID NO: 1563952
cugucugagugaucuuugu

SEQ ID NO: 1844226 - RNA, 19 nt, Artificial Sequence
  Description of Artificial Sequence: Synthetic oligonucleotide
  Antisense strand to SEQ ID NO: 1844225
acaaagaucacucagacag

SEQ ID NO: 1844227 - RNA, 19 nt, Artificial Sequence
  Description of Artificial Sequence: Synthetic oligonucleotide
  Sense strand starting at position 3484 of SEQ ID NO: 1563952
cugagugaucuuugucagu

SEQ ID NO: 1844228 - RNA, 19 nt, Artificial Sequence
  Description of Artificial Sequence: Synthetic oligonucleotide
  Antisense strand to SEQ ID NO: 1844227
acugacaaagaucacucag

SEQ ID NO: 1844229 - RNA, 19 nt, Artificial Sequence
  Description of Artificial Sequence: Synthetic oligonucleotide
  Sense strand starting at position 3486 of SEQ ID NO: 1563952
gagugaucuuugucaguca

SEQ ID NO: 1844230 - RNA, 19 nt, Artificial Sequence
  Description of Artificial Sequence: Synthetic oligonucleotide
  Antisense strand to SEQ ID NO: 1844229
ugacugacaaagaucacuc

SEQ ID NO: 1844231 - RNA, 19 nt, Artificial Sequence
  Description of Artificial Sequence: Synthetic oligonucleotide
  Sense strand starting at position 3489 of SEQ ID NO: 1563952
ugaucuuugucagucauuu

SEQ ID NO: 1844232 - RNA, 19 nt, Artificial Sequence
  Description of Artificial Sequence: Synthetic oligonucleotide
  Antisense strand to SEQ ID NO: 1844231
aaaugacugacaaagauca

SEQ ID NO: 1844233 - RNA, 19 nt, Artificial Sequence
  Description of Artificial Sequence: Synthetic oligonucleotide
  Sense strand starting at position 3564 of SEQ ID NO: 1563952
ucacguauuugcgugucau

SEQ ID NO: 1844234 - RNA, 19 nt, Artificial Sequence
  Description of Artificial Sequence: Synthetic oligonucleotide
  Antisense strand to SEQ ID NO: 1844233
augacacgcaaauacguga

SEQ ID NO: 1844235 - RNA, 19 nt, Artificial Sequence
  Description of Artificial Sequence: Synthetic oligonucleotide
  Sense strand starting at position 3574 of SEQ ID NO: 1563952
gcgugucauccuuucgcau

SEQ ID NO: 1844236 - RNA, 19 nt, Artificial Sequence
  Description of Artificial Sequence: Synthetic oligonucleotide
  Antisense strand to SEQ ID NO: 1844235
augcgaaaggaugacacgc

SEQ ID NO: 1844237 - RNA, 19 nt, Artificial Sequence
  Description of Artificial Sequence: Synthetic oligonucleotide
  Sense strand starting at position 3575 of SEQ ID NO: 1563952
cgugucauccuuucgcaua

SEQ ID NO: 1844238 - RNA, 19 nt, Artificial Sequence
  Description of Artificial Sequence: Synthetic oligonucleotide
  Antisense strand to SEQ ID NO: 1844237
uaugcgaaaggaugacacg

SEQ ID NO: 1844239 - RNA, 19 nt, Artificial Sequence
  Description of Artificial Sequence: Synthetic oligonucleotide
  Sense strand starting at position 3686 of SEQ ID NO: 1563952
auucuaauccgaggaucag

SEQ ID NO: 1844240 - RNA, 19 nt, Artificial Sequence
  Description of Artificial Sequence: Synthetic oligonucleotide
  Antisense strand to SEQ ID NO: 1844239
cugauccucggauuagaau

SEQ ID NO: 1844241 - RNA, 19 nt, Artificial Sequence
  Description of Artificial Sequence: Synthetic oligonucleotide
  Sense strand starting at position 3703 of SEQ ID NO: 1563952
agagauuaaugcuugugaa

SEQ ID NO: 1844242 - RNA, 19 nt, Artificial Sequence
  Description of Artificial Sequence: Synthetic oligonucleotide
  Antisense strand to SEQ ID NO: 1844241
uucacaagcauuaaucucu

SEQ ID NO: 1844243 - RNA, 19 nt, Artificial Sequence
  Description of Artificial Sequence: Synthetic oligonucleotide
  Sense strand starting at position 3704 of SEQ ID NO: 1563952
gagauuaaugcuugugaag

SEQ ID NO: 1844244 - RNA, 19 nt, Artificial Sequence
  Description of Artificial Sequence: Synthetic oligonucleotide
  Antisense strand to SEQ ID NO: 1844243
cuucacaagcauuaaucuc

SEQ ID NO: 1844245 - RNA, 19 nt, Artificial Sequence
  Description of Artificial Sequence: Synthetic oligonucleotide
  Sense strand starting at position 3756 of SEQ ID NO: 1563952
ucaauaaaguagucugcau

SEQ ID NO: 1844246 - RNA, 19 nt, Artificial Sequence
  Description of Artificial Sequence: Synthetic oligonucleotide
  Antisense strand to SEQ ID NO: 1844245
augcagacuacuuuauuga

SEQ ID NO: 1844247 - RNA, 19 nt, Artificial Sequence
  Description of Artificial Sequence: Synthetic oligonucleotide
  Sense strand starting at position 3861 of SEQ ID NO: 1563952
ugagcaagucauuguguca

SEQ ID NO: 1844248 - RNA, 19 nt, Artificial Sequence
  Description of Artificial Sequence: Synthetic oligonucleotide
  Antisense strand to SEQ ID NO: 1844247
ugacacaaugacuugcuca

SEQ ID NO: 1844249 - RNA, 19 nt, Artificial Sequence
  Description of Artificial Sequence: Synthetic oligonucleotide
  Sense strand starting at position 3884 of SEQ ID NO: 1563952
ugagauuacccauguguaa

SEQ ID NO: 1844250 - RNA, 19 nt, Artificial Sequence
  Description of Artificial Sequence: Synthetic oligonucleotide
  Antisense strand to SEQ ID NO: 1844249
uuacacauggguaaucuca

SEQ ID NO: 1844251 - RNA, 19 nt, Artificial Sequence
  Description of Artificial Sequence: Synthetic oligonucleotide
  Sense strand starting at position 57 of SEQ ID NO: 1563953
gcgggagaggauuguccua

SEQ ID NO: 1844252 - RNA, 19 nt, Artificial Sequence
  Description of Artificial Sequence: Synthetic oligonucleotide
  Antisense strand to SEQ ID NO: 1844251
uaggacaauccucucccgc

SEQ ID NO: 1844253 - RNA, 19 nt, Artificial Sequence
  Description of Artificial Sequence: Synthetic oligonucleotide
  Sense strand starting at position 64 of SEQ ID NO: 1563953
aggauuguccuauaugcag

SEQ ID NO: 1844254 - RNA, 19 nt, Artificial Sequence
  Description of Artificial Sequence: Synthetic oligonucleotide
  Antisense strand to SEQ ID NO: 1844253
cugcauauaggacaauccu

SEQ ID NO: 1844255 - RNA, 19 nt, Artificial Sequence
  Description of Artificial Sequence: Synthetic oligonucleotide
  Sense strand starting at position 91 of SEQ ID NO: 1563953
agacucuugaaagggcuua

SEQ ID NO: 1844256 - RNA, 19 nt, Artificial Sequence
  Description of Artificial Sequence: Synthetic oligonucleotide
  Antisense strand to SEQ ID NO: 1844255
uaagcccuuucaagagucu

SEQ ID NO: 1844257 - RNA, 19 nt, Artificial Sequence
  Description of Artificial Sequence: Synthetic oligonucleotide
  Sense strand starting at position 137 of SEQ ID NO: 1563953
cuccgaggucuccaccuua

SEQ ID NO: 1844258 - RNA, 19 nt, Artificial Sequence
  Description of Artificial Sequence: Synthetic oligonucleotide
  Antisense strand to SEQ ID NO: 1844257
uaagguggagaccucggag

SEQ ID NO: 1844259 - RNA, 19 nt, Artificial Sequence
  Description of Artificial Sequence: Synthetic oligonucleotide
  Sense strand starting at position 226 of SEQ ID NO: 1563953
auaccuaagucucuuggga

SEQ ID NO: 1844260 - RNA, 19 nt, Artificial Sequence
  Description of Artificial Sequence: Synthetic oligonucleotide
  Antisense strand to SEQ ID NO: 1844259
ucccaagagacuuagguau

SEQ ID NO: 1844261 - RNA, 19 nt, Artificial Sequence
  Description of Artificial Sequence: Synthetic oligonucleotide
  Sense strand starting at position 281 of SEQ ID NO: 1563953
ccuguaucucuuggagaau

SEQ ID NO: 1844262 - RNA, 19 nt, Artificial Sequence
  Description of Artificial Sequence: Synthetic oligonucleotide
  Antisense strand to SEQ ID NO: 1844261
auucuccaagagauacagg

SEQ ID NO: 1844263 - RNA, 19 nt, Artificial Sequence
  Description of Artificial Sequence: Synthetic oligonucleotide
  Sense strand starting at position 290 of SEQ ID NO: 1563953
cuuggagaauucccaccua

SEQ ID NO: 1844264 - RNA, 19 nt, Artificial Sequence
  Description of Artificial Sequence: Synthetic oligonucleotide
  Antisense strand to SEQ ID NO: 1844263
uaggugggaauucuccaag

SEQ ID NO: 1844265 - RNA, 19 nt, Artificial Sequence
  Description of Artificial Sequence: Synthetic oligonucleotide
  Sense strand starting at position 304 of SEQ ID NO: 1563953
accuauuggcccuauauga

SEQ ID NO: 1844266 - RNA, 19 nt, Artificial Sequence
  Description of Artificial Sequence: Synthetic oligonucleotide
  Antisense strand to SEQ ID NO: 1844265
ucauauagggccaauaggu

SEQ ID NO: 1844267 - RNA, 19 nt, Artificial Sequence
  Description of Artificial Sequence: Synthetic oligonucleotide
  Sense strand starting at position 430 of SEQ ID NO: 1563953
gaaagaaggugucucacau

SEQ ID NO: 1844268 - RNA, 19 nt, Artificial Sequence
  Description of Artificial Sequence: Synthetic oligonucleotide
  Antisense strand to SEQ ID NO: 1844267
augugagacaccuucuuuc

SEQ ID NO: 1844269 - RNA, 19 nt, Artificial Sequence
  Description of Artificial Sequence: Synthetic oligonucleotide
  Sense strand starting at position 1391 of SEQ ID NO: 1563953
ggagaacccggauguaaag

SEQ ID NO: 1844270 - RNA, 19 nt, Artificial Sequence
  Description of Artificial Sequence: Synthetic oligonucleotide
  Antisense strand to SEQ ID NO: 1844269
cuuuacauccggguucucc

SEQ ID NO: 1844271 - RNA, 19 nt, Artificial Sequence
  Description of Artificial Sequence: Synthetic oligonucleotide
  Sense strand starting at position 2076 of SEQ ID NO: 1563953
ugcggugauugguuaagag

SEQ ID NO: 1844272 - RNA, 19 nt, Artificial Sequence
  Description of Artificial Sequence: Synthetic oligonucleotide
  Antisense strand to SEQ ID NO: 1844271
cucuuaaccaaucaccgca

SEQ ID NO: 1844273 - RNA, 19 nt, Artificial Sequence
  Description of Artificial Sequence: Synthetic oligonucleotide
  Sense strand starting at position 2077 of SEQ ID NO: 1563953
gcggugauugguuaagaga

SEQ ID NO: 1844274 - RNA, 19 nt, Artificial Sequence
  Description of Artificial Sequence: Synthetic oligonucleotide
  Antisense strand to SEQ ID NO: 1844273
ucucuuaaccaaucaccgc

SEQ ID NO: 1844275 - RNA, 19 nt, Artificial Sequence
  Description of Artificial Sequence: Synthetic oligonucleotide
  Sense strand starting at position 2148 of SEQ ID NO: 1563953
gacagugguuguuugggaa

SEQ ID NO: 1844276 - RNA, 19 nt, Artificial Sequence
  Description of Artificial Sequence: Synthetic oligonucleotide
  Antisense strand to SEQ ID NO: 1844275
uucccaaacaaccacuguc

SEQ ID NO: 1844277 - RNA, 19 nt, Artificial Sequence
  Description of Artificial Sequence: Synthetic oligonucleotide
  Sense strand starting at position 2612 of SEQ ID NO: 1563953
ucgaucgagguuuaugaaa

SEQ ID NO: 1844278 - RNA, 19 nt, Artificial Sequence
  Description of Artificial Sequence: Synthetic oligonucleotide
  Antisense strand to SEQ ID NO: 1844277
uuucauaaaccucgaucga

SEQ ID NO: 1844279 - RNA, 19 nt, Artificial Sequence
  Description of Artificial Sequence: Synthetic oligonucleotide
  Sense strand starting at position 2663 of SEQ ID NO: 1563953
uuggcagaaucccugcuau

SEQ ID NO: 1844280 - RNA, 19 nt, Artificial Sequence
  Description of Artificial Sequence: Synthetic oligonucleotide
  Antisense strand to SEQ ID NO: 1844279
auagcagggauucugccaa

SEQ ID NO: 1844281 - RNA, 19 nt, Artificial Sequence
  Description of Artificial Sequence: Synthetic oligonucleotide
  Sense strand starting at position 2677 of SEQ ID NO: 1563953
gcuauugaguagcuggaga

SEQ ID NO: 1844282 - RNA, 19 nt, Artificial Sequence
  Description of Artificial Sequence: Synthetic oligonucleotide
  Antisense strand to SEQ ID NO: 1844281
ucuccagcuacucaauagc

SEQ ID NO: 1844283 - RNA, 19 nt, Artificial Sequence
  Description of Artificial Sequence: Synthetic oligonucleotide
  Sense strand starting at position 2690 of SEQ ID NO: 1563953
uggagagcuacacgcuaau

SEQ ID NO: 1844284 - RNA, 19 nt, Artificial Sequence
  Description of Artificial Sequence: Synthetic oligonucleotide
  Antisense strand to SEQ ID NO: 1844283
auuagcguguagcucucca

SEQ ID NO: 1844285 - RNA, 19 nt, Artificial Sequence
  Description of Artificial Sequence: Synthetic oligonucleotide
  Sense strand starting at position 2721 of SEQ ID NO: 1563953
cuuccugucugagugaucu

SEQ ID NO: 1844286 - RNA, 19 nt, Artificial Sequence
  Description of Artificial Sequence: Synthetic oligonucleotide
  Antisense strand to SEQ ID NO: 1844285
agaucacucagacaggaag

SEQ ID NO: 1844287 - RNA, 19 nt, Artificial Sequence
  Description of Artificial Sequence: Synthetic oligonucleotide
  Sense strand starting at position 2729 of SEQ ID NO: 1563953
cugagugaucuuugucagu

SEQ ID NO: 1844288 - RNA, 19 nt, Artificial Sequence
  Description of Artificial Sequence: Synthetic oligonucleotide
  Antisense strand to SEQ ID NO: 1844287
acugacaaagaucacucag

SEQ ID NO: 1844289 - RNA, 19 nt, Artificial Sequence
  Description of Artificial Sequence: Synthetic oligonucleotide
  Sense strand starting at position 2731 of SEQ ID NO: 1563953
gagugaucuuugucaguca

SEQ ID NO: 1844290 - RNA, 19 nt, Artificial Sequence
  Description of Artificial Sequence: Synthetic oligonucleotide
  Antisense strand to SEQ ID NO: 1844289
ugacugacaaagaucacuc

SEQ ID NO: 1844291 - RNA, 19 nt, Artificial Sequence
  Description of Artificial Sequence: Synthetic oligonucleotide
  Sense strand starting at position 2734 of SEQ ID NO: 1563953
ugaucuuugucagucauuu

SEQ ID NO: 1844292 - RNA, 19 nt, Artificial Sequence
  Description of Artificial Sequence: Synthetic oligonucleotide
  Antisense strand to SEQ ID NO: 1844291
aaaugacugacaaagauca

SEQ ID NO: 1844293 - RNA, 19 nt, Artificial Sequence
  Description of Artificial Sequence: Synthetic oligonucleotide
  Sense strand starting at position 2819 of SEQ ID NO: 1563953
gcgugucauccuuucgcau

SEQ ID NO: 1844294 - RNA, 19 nt, Artificial Sequence
  Description of Artificial Sequence: Synthetic oligonucleotide
  Antisense strand to SEQ ID NO: 1844293
augcgaaaggaugacacgc

SEQ ID NO: 1844295 - RNA, 19 nt, Artificial Sequence
  Description of Artificial Sequence: Synthetic oligonucleotide
  Sense strand starting at position 2820 of SEQ ID NO: 1563953
cgugucauccuuucgcaua

SEQ ID NO: 1844296 - RNA, 19 nt, Artificial Sequence
  Description of Artificial Sequence: Synthetic oligonucleotide
  Antisense strand to SEQ ID NO: 1844295
uaugcgaaaggaugacacg

SEQ ID NO: 1844297 - RNA, 19 nt, Artificial Sequence
  Description of Artificial Sequence: Synthetic oligonucleotide
  Sense strand starting at position 2931 of SEQ ID NO: 1563953
auucuaauccgaggaucag

SEQ ID NO: 1844298 - RNA, 19 nt, Artificial Sequence
  Description of Artificial Sequence: Synthetic oligonucleotide
  Antisense strand to SEQ ID NO: 1844297
cugauccucggauuagaau

SEQ ID NO: 1844299 - RNA, 19 nt, Artificial Sequence
  Description of Artificial Sequence: Synthetic oligonucleotide
  Sense strand starting at position 2948 of SEQ ID NO: 1563953
agagauuaaugcuugugaa

SEQ ID NO: 1844300 - RNA, 19 nt, Artificial Sequence
  Description of Artificial Sequence: Synthetic oligonucleotide
  Antisense strand to SEQ ID NO: 1844299
uucacaagcauuaaucucu

SEQ ID NO: 1844301 - RNA, 19 nt, Artificial Sequence
  Description of Artificial Sequence: Synthetic oligonucleotide
  Sense strand starting at position 2949 of SEQ ID NO: 1563953
gagauuaaugcuugugaag

SEQ ID NO: 1844302 - RNA, 19 nt, Artificial Sequence
  Description of Artificial Sequence: Synthetic oligonucleotide
  Antisense strand to SEQ ID NO: 1844301
cuucacaagcauuaaucuc

SEQ ID NO: 1844303 - RNA, 19 nt, Artificial Sequence
  Description of Artificial Sequence: Synthetic oligonucleotide
  Sense strand starting at position 3001 of SEQ ID NO: 1563953
ucaauaaaguagucugcau

SEQ ID NO: 1844304 - RNA, 19 nt, Artificial Sequence
  Description of Artificial Sequence: Synthetic oligonucleotide
  Antisense strand to SEQ ID NO: 1844303
augcagacuacuuuauuga

SEQ ID NO: 1844305 - RNA, 19 nt, Artificial Sequence
  Description of Artificial Sequence: Synthetic oligonucleotide
  Sense strand starting at position 3129 of SEQ ID NO: 1563953
ugagauuacccauguguaa

SEQ ID NO: 1844306 - RNA, 19 nt, Artificial Sequence
  Description of Artificial Sequence: Synthetic oligonucleotide
  Antisense strand to SEQ ID NO: 1844305
uuacacauggguaaucuca

SEQ ID NO: 1844307 - RNA, 19 nt, Artificial Sequence
  Description of Artificial Sequence: Synthetic oligonucleotide
  Sense strand starting at position 3309 of SEQ ID NO: 1563953
agccuugccucccuugaga

SEQ ID NO: 1844308 - RNA, 19 nt, Artificial Sequence
  Description of Artificial Sequence: Synthetic oligonucleotide
  Antisense strand to SEQ ID NO: 1844307
ucucaagggaggcaaggcu

SEQ ID NO: 1844309 - RNA, 19 nt, Artificial Sequence
  Description of Artificial Sequence: Synthetic oligonucleotide
  Sense strand starting at position 3311 of SEQ ID NO: 1563953
ccuugccucccuugagaua

SEQ ID NO: 1844310 - RNA, 19 nt, Artificial Sequence
  Description of Artificial Sequence: Synthetic oligonucleotide
  Antisense strand to SEQ ID NO: 1844309
uaucucaagggaggcaagg

SEQ ID NO: 1844311 - RNA, 19 nt, Artificial Sequence
  Description of Artificial Sequence: Synthetic oligonucleotide
  Sense strand starting at position 3322 of SEQ ID NO: 1563953
uugagauacuaacccuagu

SEQ ID NO: 1844312 - RNA, 19 nt, Artificial Sequence
  Description of Artificial Sequence: Synthetic oligonucleotide
  Antisense strand to SEQ ID NO: 1844311
acuaggguuaguaucucaa

SEQ ID NO: 1844313 - RNA, 19 nt, Artificial Sequence
  Description of Artificial Sequence: Synthetic oligonucleotide
  Sense strand starting at position 3338 of SEQ ID NO: 1563953
aguugaaauucuucccuga

SEQ ID NO: 1844314 - RNA, 19 nt, Artificial Sequence
  Description of Artificial Sequence: Synthetic oligonucleotide
  Antisense strand to SEQ ID NO: 1844313
ucagggaagaauuucaacu

SEQ ID NO: 1844315 - RNA, 19 nt, Artificial Sequence
  Description of Artificial Sequence: Synthetic oligonucleotide
  Sense strand starting at position 3349 of SEQ ID NO: 1563953
uucccugaaagguguaagu

SEQ ID NO: 1844316 - RNA, 19 nt, Artificial Sequence
  Description of Artificial Sequence: Synthetic oligonucleotide
  Antisense strand to SEQ ID NO: 1844315
acuuacaccuuucagggaa

SEQ ID NO: 1844317 - RNA, 19 nt, Artificial Sequence
  Description of Artificial Sequence: Synthetic oligonucleotide
  Sense strand starting at position 3351 of SEQ ID NO: 1563953
cccugaaagguguaaguaa

SEQ ID NO: 1844318 - RNA, 19 nt, Artificial Sequence
  Description of Artificial Sequence: Synthetic oligonucleotide
  Antisense strand to SEQ ID NO: 1844317
uuacuuacaccuuucaggg

SEQ ID NO: 1844319 - RNA, 19 nt, Artificial Sequence
  Description of Artificial Sequence: Synthetic oligonucleotide
  Sense strand starting at position 3365 of SEQ ID NO: 1563953
aguaauaaaugggcucuaa

SEQ ID NO: 1844320 - RNA, 19 nt, Artificial Sequence
  Description of Artificial Sequence: Synthetic oligonucleotide
  Antisense strand to SEQ ID NO: 1844319
uuagagcccauuuauuacu

SEQ ID NO: 1844321 - RNA, 19 nt, Artificial Sequence
  Description of Artificial Sequence: Synthetic oligonucleotide
  Sense strand starting at position 3629 of SEQ ID NO: 1563953
uucccuuuaccagggaaua

SEQ ID NO: 1844322 - RNA, 19 nt, Artificial Sequence
  Description of Artificial Sequence: Synthetic oligonucleotide
  Antisense strand to SEQ ID NO: 1844321
uauucccugguaaagggaa

SEQ ID NO: 1844323 - RNA, 19 nt, Artificial Sequence
  Description of Artificial Sequence: Synthetic oligonucleotide
  Sense strand starting at position 3863 of SEQ ID NO: 1563953
ccaggacuguuucucuaua

SEQ ID NO: 1844324 - RNA, 19 nt, Artificial Sequence
  Description of Artificial Sequence: Synthetic oligonucleotide
  Antisense strand to SEQ ID NO: 1844323
uauagagaaacaguccugg

SEQ ID NO: 1844325 - RNA, 19 nt, Artificial Sequence
  Description of Artificial Sequence: Synthetic oligonucleotide
  Sense strand starting at position 3865 of SEQ ID NO: 1563953
aggacuguuucucuauauc

SEQ ID NO: 1844326 - RNA, 19 nt, Artificial Sequence
  Description of Artificial Sequence: Synthetic oligonucleotide
  Antisense strand to SEQ ID NO: 1844325
gauauagagaaacaguccu

SEQ ID NO: 1844327 - RNA, 19 nt, Artificial Sequence
  Description of Artificial Sequence: Synthetic oligonucleotide
  Sense strand starting at position 3938 of SEQ ID NO: 1563953
cuguuuaagucuuuagagg

SEQ ID NO: 1844328 - RNA, 19 nt, Artificial Sequence
  Description of Artificial Sequence: Synthetic oligonucleotide
  Antisense strand to SEQ ID NO: 1844327
ccucuaaagacuuaaacag

SEQ ID NO: 1844329 - RNA, 19 nt, Artificial Sequence
  Description of Artificial Sequence: Synthetic oligonucleotide
  Sense strand starting at position 3963 of SEQ ID NO: 1563953
cuaucuuuaggaugaaguu

SEQ ID NO: 1844330 - RNA, 19 nt, Artificial Sequence
  Description of Artificial Sequence: Synthetic oligonucleotide
  Antisense strand to SEQ ID NO: 1844329
aacuucauccuaaagauag

SEQ ID NO: 1844331 - RNA, 19 nt, Artificial Sequence
  Description of Artificial Sequence: Synthetic oligonucleotide
  Sense strand starting at position 79 of SEQ ID NO: 1563954
ugagacaucuccugaguag

SEQ ID NO: 1844332 - RNA, 19 nt, Artificial Sequence
  Description of Artificial Sequence: Synthetic oligonucleotide
  Antisense strand to SEQ ID NO: 1844331
cuacucaggagaugucuca

SEQ ID NO: 1844333 - RNA, 19 nt, Artificial Sequence
  Description of Artificial Sequence: Synthetic oligonucleotide
  Sense strand starting at position 80 of SEQ ID NO: 1563954
gagacaucuccugaguagu

SEQ ID NO: 1844334 - RNA, 19 nt, Artificial Sequence
  Description of Artificial Sequence: Synthetic oligonucleotide
  Antisense strand to SEQ ID NO: 1844333
acuacucaggagaugucuc

SEQ ID NO: 1844335 - RNA, 19 nt, Artificial Sequence
  Description of Artificial Sequence: Synthetic oligonucleotide
  Sense strand starting at position 82 of SEQ ID NO: 1563954
gacaucuccugaguagucu

SEQ ID NO: 1844336 - RNA, 19 nt, Artificial Sequence
  Description of Artificial Sequence: Synthetic oligonucleotide
  Antisense strand to SEQ ID NO: 1844335
agacuacucaggagauguc

SEQ ID NO: 1844337 - RNA, 19 nt, Artificial Sequence
  Description of Artificial Sequence: Synthetic oligonucleotide
  Sense strand starting at position 83 of SEQ ID NO: 1563954
acaucuccugaguagucua

SEQ ID NO: 1844338 - RNA, 19 nt, Artificial Sequence
  Description of Artificial Sequence: Synthetic oligonucleotide
  Antisense strand to SEQ ID NO: 1844337
uagacuacucaggagaugu

SEQ ID NO: 1844339 - RNA, 19 nt, Artificial Sequence
  Description of Artificial Sequence: Synthetic oligonucleotide
  Sense strand starting at position 88 of SEQ ID NO: 1563954
uccugaguagucuagcuua

SEQ ID NO: 1844340 - RNA, 19 nt, Artificial Sequence
  Description of Artificial Sequence: Synthetic oligonucleotide
  Antisense strand to SEQ ID NO: 1844339
uaagcuagacuacucagga

SEQ ID NO: 1844341 - RNA, 19 nt, Artificial Sequence
  Description of Artificial Sequence: Synthetic oligonucleotide
  Sense strand starting at position 91 of SEQ ID NO: 1563954
ugaguagucuagcuuaagu

SEQ ID NO: 1844342 - RNA, 19 nt, Artificial Sequence
  Description of Artificial Sequence: Synthetic oligonucleotide
  Antisense strand to SEQ ID NO: 1844341
acuuaagcuagacuacuca

SEQ ID NO: 1844343 - RNA, 19 nt, Artificial Sequence
  Description of Artificial Sequence: Synthetic oligonucleotide
  Sense strand starting at position 93 of SEQ ID NO: 1563954
aguagucuagcuuaaguaa

SEQ ID NO: 1844344 - RNA, 19 nt, Artificial Sequence
  Description of Artificial Sequence: Synthetic oligonucleotide
  Antisense strand to SEQ ID NO: 1844343
uuacuuaagcuagacuacu

SEQ ID NO: 1844345 - RNA, 19 nt, Artificial Sequence
  Description of Artificial Sequence: Synthetic oligonucleotide
  Sense strand starting at position 96 of SEQ ID NO: 1563954
agucuagcuuaaguaaaua

SEQ ID NO: 1844346 - RNA, 19 nt, Artificial Sequence
  Description of Artificial Sequence: Synthetic oligonucleotide
  Antisense strand to SEQ ID NO: 1844345
uauuuacuuaagcuagacu

SEQ ID NO: 1844347 - RNA, 19 nt, Artificial Sequence
  Description of Artificial Sequence: Synthetic oligonucleotide
  Sense strand starting at position 192 of SEQ ID NO: 1563954
uugucuaaguaauccaaga

SEQ ID NO: 1844348 - RNA, 19 nt, Artificial Sequence
  Description of Artificial Sequence: Synthetic oligonucleotide
  Antisense strand to SEQ ID NO: 1844347
ucuuggauuacuuagacaa

SEQ ID NO: 1844349 - RNA, 19 nt, Artificial Sequence
  Description of Artificial Sequence: Synthetic oligonucleotide
  Sense strand starting at position 239 of SEQ ID NO: 1563954
gagcuagucuacuagauuu

SEQ ID NO: 1844350 - RNA, 19 nt, Artificial Sequence
  Description of Artificial Sequence: Synthetic oligonucleotide
  Antisense strand to SEQ ID NO: 1844349
aaaucuaguagacuagcuc

SEQ ID NO: 1844351 - RNA, 19 nt, Artificial Sequence
  Description of Artificial Sequence: Synthetic oligonucleotide
  Sense strand starting at position 1989 of SEQ ID NO: 1563954
guugaaauuugcuggcagu

SEQ ID NO: 1844352 - RNA, 19 nt, Artificial Sequence
  Description of Artificial Sequence: Synthetic oligonucleotide
  Antisense strand to SEQ ID NO: 1844351
acugccagcaaauuucaac

SEQ ID NO: 1844353 - RNA, 19 nt, Artificial Sequence
  Description of Artificial Sequence: Synthetic oligonucleotide
  Sense strand starting at position 1990 of SEQ ID NO: 1563954
uugaaauuugcuggcaguu

SEQ ID NO: 1844354 - RNA, 19 nt, Artificial Sequence
  Description of Artificial Sequence: Synthetic oligonucleotide
  Antisense strand to SEQ ID NO: 1844353
aacugccagcaaauuucaa

SEQ ID NO: 1844355 - RNA, 19 nt, Artificial Sequence
  Description of Artificial Sequence: Synthetic oligonucleotide
  Sense strand starting at position 2218 of SEQ ID NO: 1563954
aggauuggcuguugggaga

SEQ ID NO: 1844356 - RNA, 19 nt, Artificial Sequence
  Description of Artificial Sequence: Synthetic oligonucleotide
  Antisense strand to SEQ ID NO: 1844355
ucucccaacagccaauccu

SEQ ID NO: 1844357 - RNA, 19 nt, Artificial Sequence
  Description of Artificial Sequence: Synthetic oligonucleotide
  Sense strand starting at position 2228 of SEQ ID NO: 1563954
guugggagaccggaaguau

SEQ ID NO: 1844358 - RNA, 19 nt, Artificial Sequence
  Description of Artificial Sequence: Synthetic oligonucleotide
  Antisense strand to SEQ ID NO: 1844357
auacuuccggucucccaac

SEQ ID NO: 1844359 - RNA, 19 nt, Artificial Sequence
  Description of Artificial Sequence: Synthetic oligonucleotide
  Sense strand starting at position 2237 of SEQ ID NO: 1563954
ccggaaguaugagcccauu

SEQ ID NO: 1844360 - RNA, 19 nt, Artificial Sequence
  Description of Artificial Sequence: Synthetic oligonucleotide
  Antisense strand to SEQ ID NO: 1844359
aaugggcucauacuuccgg

SEQ ID NO: 1844361 - RNA, 19 nt, Artificial Sequence
  Description of Artificial Sequence: Synthetic oligonucleotide
  Sense strand starting at position 2326 of SEQ ID NO: 1563954
uguagagucuuucgcugau

SEQ ID NO: 1844362 - RNA, 19 nt, Artificial Sequence
  Description of Artificial Sequence: Synthetic oligonucleotide
  Antisense strand to SEQ ID NO: 1844361
aucagcgaaagacucuaca

SEQ ID NO: 1844363 - RNA, 19 nt, Artificial Sequence
  Description of Artificial Sequence: Synthetic oligonucleotide
  Sense strand starting at position 2328 of SEQ ID NO: 1563954
uagagucuuucgcugauug

SEQ ID NO: 1844364 - RNA, 19 nt, Artificial Sequence
  Description of Artificial Sequence: Synthetic oligonucleotide
  Antisense strand to SEQ ID NO: 1844363
caaucagcgaaagacucua

SEQ ID NO: 1844365 - RNA, 19 nt, Artificial Sequence
  Description of Artificial Sequence: Synthetic oligonucleotide
  Sense strand starting at position 2329 of SEQ ID NO: 1563954
agagucuuucgcugauuga

SEQ ID NO: 1844366 - RNA, 19 nt, Artificial Sequence
  Description of Artificial Sequence: Synthetic oligonucleotide
  Antisense strand to SEQ ID NO: 1844365
ucaaucagcgaaagacucu

SEQ ID NO: 1844367 - RNA, 19 nt, Artificial Sequence
  Description of Artificial Sequence: Synthetic oligonucleotide
  Sense strand starting at position 2330 of SEQ ID NO: 1563954
gagucuuucgcugauugag

SEQ ID NO: 1844368 - RNA, 19 nt, Artificial Sequence
  Description of Artificial Sequence: Synthetic oligonucleotide
  Antisense strand to SEQ ID NO: 1844367
cucaaucagcgaaagacuc

SEQ ID NO: 1844369 - RNA, 19 nt, Artificial Sequence
  Description of Artificial Sequence: Synthetic oligonucleotide
  Sense strand starting at position 2332 of SEQ ID NO: 1563954
gucuuucgcugauugagag

SEQ ID NO: 1844370 - RNA, 19 nt, Artificial Sequence
  Description of Artificial Sequence: Synthetic oligonucleotide
  Antisense strand to SEQ ID NO: 1844369
cucucaaucagcgaaagac

SEQ ID NO: 1844371 - RNA, 19 nt, Artificial Sequence
  Description of Artificial Sequence: Synthetic oligonucleotide
  Sense strand starting at position 2426 of SEQ ID NO: 1563954
cugaaugugcucuaacccu

SEQ ID NO: 1844372 - RNA, 19 nt, Artificial Sequence
  Description of Artificial Sequence: Synthetic oligonucleotide
  Antisense strand to SEQ ID NO: 1844371
aggguuagagcacauucag

SEQ ID NO: 1844373 - RNA, 19 nt, Artificial Sequence
  Description of Artificial Sequence: Synthetic oligonucleotide
  Sense strand starting at position 2918 of SEQ ID NO: 1563954
gaaguucccugauggcuaa

SEQ ID NO: 1844374 - RNA, 19 nt, Artificial Sequence
  Description of Artificial Sequence: Synthetic oligonucleotide
  Antisense strand to SEQ ID NO: 1844373
uuagccaucagggaacuuc

SEQ ID NO: 1844375 - RNA, 19 nt, Artificial Sequence
  Description of Artificial Sequence: Synthetic oligonucleotide
  Sense strand starting at position 2954 of SEQ ID NO: 1563954
ugugcucauuugucaucua

SEQ ID NO: 1844376 - RNA, 19 nt, Artificial Sequence
  Description of Artificial Sequence: Synthetic oligonucleotide
  Antisense strand to SEQ ID NO: 1844375
uagaugacaaaugagcaca

SEQ ID NO: 1844377 - RNA, 19 nt, Artificial Sequence
  Description of Artificial Sequence: Synthetic oligonucleotide
  Sense strand starting at position 2955 of SEQ ID NO: 1563954
gugcucauuugucaucuau

SEQ ID NO: 1844378 - RNA, 19 nt, Artificial Sequence
  Description of Artificial Sequence: Synthetic oligonucleotide
  Antisense strand to SEQ ID NO: 1844377
auagaugacaaaugagcac

SEQ ID NO: 1844379 - RNA, 19 nt, Artificial Sequence
  Description of Artificial Sequence: Synthetic oligonucleotide
  Sense strand starting at position 2962 of SEQ ID NO: 1563954
uuugucaucuaugccauau

SEQ ID NO: 1844380 - RNA, 19 nt, Artificial Sequence
  Description of Artificial Sequence: Synthetic oligonucleotide
  Antisense strand to SEQ ID NO: 1844379
auauggcauagaugacaaa

SEQ ID NO: 1844381 - RNA, 19 nt, Artificial Sequence
  Description of Artificial Sequence: Synthetic oligonucleotide
  Sense strand starting at position 2994 of SEQ ID NO: 1563954
auguuuaugucauuugccu

SEQ ID NO: 1844382 - RNA, 19 nt, Artificial Sequence
  Description of Artificial Sequence: Synthetic oligonucleotide
  Antisense strand to SEQ ID NO: 1844381
aggcaaaugacauaaacau

SEQ ID NO: 1844383 - RNA, 19 nt, Artificial Sequence
  Description of Artificial Sequence: Synthetic oligonucleotide
  Sense strand starting at position 450 of SEQ ID NO: 1563955
acccauaaauguguuuauu

SEQ ID NO: 1844384 - RNA, 19 nt, Artificial Sequence
  Description of Artificial Sequence: Synthetic oligonucleotide
  Antisense strand to SEQ ID NO: 1844383
aauaaacacauuuaugggu

SEQ ID NO: 1844385 - RNA, 19 nt, Artificial Sequence
  Description of Artificial Sequence: Synthetic oligonucleotide
  Sense strand starting at position 487 of SEQ ID NO: 1563955
uugaguagucuguacaacu

SEQ ID NO: 1844386 - RNA, 19 nt, Artificial Sequence
  Description of Artificial Sequence: Synthetic oligonucleotide
  Antisense strand to SEQ ID NO: 1844385
aguuguacagacuacucaa

SEQ ID NO: 1844387 - RNA, 19 nt, Artificial Sequence
  Description of Artificial Sequence: Synthetic oligonucleotide
  Sense strand starting at position 599 of SEQ ID NO: 1563955
ccaaaugugugaucugauu

SEQ ID NO: 1844388 - RNA, 19 nt, Artificial Sequence
  Description of Artificial Sequence: Synthetic oligonucleotide
  Antisense strand to SEQ ID NO: 1844387
aaucagaucacacauuugg

SEQ ID NO: 1844389 - RNA, 19 nt, Artificial Sequence
  Description of Artificial Sequence: Synthetic oligonucleotide
  Sense strand starting at position 613 of SEQ ID NO: 1563955
ugauucugacuguaguuua

SEQ ID NO: 1844390 - RNA, 19 nt, Artificial Sequence
  Description of Artificial Sequence: Synthetic oligonucleotide
  Antisense strand to SEQ ID NO: 1844389
uaaacuacagucagaauca

SEQ ID NO: 1844391 - RNA, 19 nt, Artificial Sequence
  Description of Artificial Sequence: Synthetic oligonucleotide
  Sense strand starting at position 646 of SEQ ID NO: 1563955
ucaguauaucugcauauca

SEQ ID NO: 1844392 - RNA, 19 nt, Artificial Sequence
  Description of Artificial Sequence: Synthetic oligonucleotide
  Antisense strand to SEQ ID NO: 1844391
ugauaugcagauauacuga

SEQ ID NO: 1844393 - RNA, 19 nt, Artificial Sequence
  Description of Artificial Sequence: Synthetic oligonucleotide
  Sense strand starting at position 896 of SEQ ID NO: 1563955
agggacuccuuagcugaaa

SEQ ID NO: 1844394 - RNA, 19 nt, Artificial Sequence
  Description of Artificial Sequence: Synthetic oligonucleotide
  Antisense strand to SEQ ID NO: 1844393
uuucagcuaaggagucccu

SEQ ID NO: 1844395 - RNA, 19 nt, Artificial Sequence
  Description of Artificial Sequence: Synthetic oligonucleotide
  Sense strand starting at position 898 of SEQ ID NO: 1563955
ggacuccuuagcugaaagu

SEQ ID NO: 1844396 - RNA, 19 nt, Artificial Sequence
  Description of Artificial Sequence: Synthetic oligonucleotide
  Antisense strand to SEQ ID NO: 1844395
acuuucagcuaaggagucc

SEQ ID NO: 1844397 - RNA, 19 nt, Artificial Sequence
  Description of Artificial Sequence: Synthetic oligonucleotide
  Sense strand starting at position 923 of SEQ ID NO: 1563955
uugauuuagucaucuuagc

SEQ ID NO: 1844398 - RNA, 19 nt, Artificial Sequence
  Description of Artificial Sequence: Synthetic oligonucleotide
  Antisense strand to SEQ ID NO: 1844397
gcuaagaugacuaaaucaa

SEQ ID NO: 1844399 - RNA, 19 nt, Artificial Sequence
  Description of Artificial Sequence: Synthetic oligonucleotide
  Sense strand starting at position 1088 of SEQ ID NO: 1563955
ucugaagucaucugggaua

SEQ ID NO: 1844400 - RNA, 19 nt, Artificial Sequence
  Description of Artificial Sequence: Synthetic oligonucleotide
  Antisense strand to SEQ ID NO: 1844399
uaucccagaugacuucaga

SEQ ID NO: 1844401 - RNA, 19 nt, Artificial Sequence
  Description of Artificial Sequence: Synthetic oligonucleotide
  Sense strand starting at position 1090 of SEQ ID NO: 1563955
ugaagucaucugggauacu

SEQ ID NO: 1844402 - RNA, 19 nt, Artificial Sequence
  Description of Artificial Sequence: Synthetic oligonucleotide
  Antisense strand to SEQ ID NO: 1844401
aguaucccagaugacuuca

SEQ ID NO: 1844403 - RNA, 19 nt, Artificial Sequence
  Description of Artificial Sequence: Synthetic oligonucleotide
  Sense strand starting at position 1099 of SEQ ID NO: 1563955
cugggauacuuucuccuuu

SEQ ID NO: 1844404 - RNA, 19 nt, Artificial Sequence
  Description of Artificial Sequence: Synthetic oligonucleotide
  Antisense strand to SEQ ID NO: 1844403
aaaggagaaaguaucccag

SEQ ID NO: 1844405 - RNA, 19 nt, Artificial Sequence
  Description of Artificial Sequence: Synthetic oligonucleotide
  Sense strand starting at position 1153 of SEQ ID NO: 1563955
uacaguauucucugggaga

SEQ ID NO: 1844406 - RNA, 19 nt, Artificial Sequence
  Description of Artificial Sequence: Synthetic oligonucleotide
  Antisense strand to SEQ ID NO: 1844405
ucucccagagaauacugua

SEQ ID NO: 1844407 - RNA, 19 nt, Artificial Sequence
  Description of Artificial Sequence: Synthetic oligonucleotide
  Sense strand starting at position 1155 of SEQ ID NO: 1563955
caguauucucugggagaug

SEQ ID NO: 1844408 - RNA, 19 nt, Artificial Sequence
  Description of Artificial Sequence: Synthetic oligonucleotide
  Antisense strand to SEQ ID NO: 1844407
caucucccagagaauacug

SEQ ID NO: 1844409 - RNA, 19 nt, Artificial Sequence
  Description of Artificial Sequence: Synthetic oligonucleotide
  Sense strand starting at position 1172 of SEQ ID NO: 1563955
ugcaaacugcuguaggaaa

SEQ ID NO: 1844410 - RNA, 19 nt, Artificial Sequence
  Description of Artificial Sequence: Synthetic oligonucleotide
  Antisense strand to SEQ ID NO: 1844409
uuuccuacagcaguuugca

SEQ ID NO: 1844411 - RNA, 19 nt, Artificial Sequence
  Description of Artificial Sequence: Synthetic oligonucleotide
  Sense strand starting at position 1191 of SEQ ID NO: 1563955
aggcaaacaugaguuuaaa

SEQ ID NO: 1844412 - RNA, 19 nt, Artificial Sequence
  Description of Artificial Sequence: Synthetic oligonucleotide
  Antisense strand to SEQ ID NO: 1844411
uuuaaacucauguuugccu

SEQ ID NO: 1844413 - RNA, 19 nt, Artificial Sequence
  Description of Artificial Sequence: Synthetic oligonucleotide
  Sense strand starting at position 1368 of SEQ ID NO: 1563955
gucucaguaucucugaaag

SEQ ID NO: 1844414 - RNA, 19 nt, Artificial Sequence
  Description of Artificial Sequence: Synthetic oligonucleotide
  Antisense strand to SEQ ID NO: 1844413
cuuucagagauacugagac

SEQ ID NO: 1844415 - RNA, 19 nt, Artificial Sequence
  Description of Artificial Sequence: Synthetic oligonucleotide
  Sense strand starting at position 1430 of SEQ ID NO: 1563955
ucacgaugcagcuagauaa

SEQ ID NO: 1844416 - RNA, 19 nt, Artificial Sequence
  Description of Artificial Sequence: Synthetic oligonucleotide
  Antisense strand to SEQ ID NO: 1844415
uuaucuagcugcaucguga

SEQ ID NO: 1844417 - RNA, 19 nt, Artificial Sequence
  Description of Artificial Sequence: Synthetic oligonucleotide
  Sense strand starting at position 1585 of SEQ ID NO: 1563955
aagagugagcugcaucaca

SEQ ID NO: 1844418 - RNA, 19 nt, Artificial Sequence
  Description of Artificial Sequence: Synthetic oligonucleotide
  Antisense strand to SEQ ID NO: 1844417
ugugaugcagcucacucuu

SEQ ID NO: 1844419 - RNA, 19 nt, Artificial Sequence
  Description of Artificial Sequence: Synthetic oligonucleotide
  Sense strand starting at position 1610 of SEQ ID NO: 1563955
augcuccuggcauaaugaa

SEQ ID NO: 1844420 - RNA, 19 nt, Artificial Sequence
  Description of Artificial Sequence: Synthetic oligonucleotide
  Antisense strand to SEQ ID NO: 1844419
uucauuaugccaggagcau

SEQ ID NO: 1844421 - RNA, 19 nt, Artificial Sequence
  Description of Artificial Sequence: Synthetic oligonucleotide
  Sense strand starting at position 1632 of SEQ ID NO: 1563955
gacugauggcauuaacguu

SEQ ID NO: 1844422 - RNA, 19 nt, Artificial Sequence
  Description of Artificial Sequence: Synthetic oligonucleotide
  Antisense strand to SEQ ID NO: 1844421
aacguuaaugccaucaguc

SEQ ID NO: 1844423 - RNA, 19 nt, Artificial Sequence
  Description of Artificial Sequence: Synthetic oligonucleotide
  Sense strand starting at position 1651 of SEQ ID NO: 1563955
aacuuuggacucuggucaa

SEQ ID NO: 1844424 - RNA, 19 nt, Artificial Sequence
  Description of Artificial Sequence: Synthetic oligonucleotide
  Antisense strand to SEQ ID NO: 1844423
uugaccagaguccaaaguu

SEQ ID NO: 1844425 - RNA, 19 nt, Artificial Sequence
  Description of Artificial Sequence: Synthetic oligonucleotide
  Sense strand starting at position 1654 of SEQ ID NO: 1563955
uuuggacucuggucaaacu

SEQ ID NO: 1844426 - RNA, 19 nt, Artificial Sequence
  Description of Artificial Sequence: Synthetic oligonucleotide
  Antisense strand to SEQ ID NO: 1844425
aguuugaccagaguccaaa

SEQ ID NO: 1844427 - RNA, 19 nt, Artificial Sequence
  Description of Artificial Sequence: Synthetic oligonucleotide
  Sense strand starting at position 1697 of SEQ ID NO: 1563955
uuguaagaugucugagaug

SEQ ID NO: 1844428 - RNA, 19 nt, Artificial Sequence
  Description of Artificial Sequence: Synthetic oligonucleotide
  Antisense strand to SEQ ID NO: 1844427
caucucagacaucuuacaa

SEQ ID NO: 1844429 - RNA, 19 nt, Artificial Sequence
  Description of Artificial Sequence: Synthetic oligonucleotide
  Sense strand starting at position 1818 of SEQ ID NO: 1563955
ggugcuaggcauuaacuua

SEQ ID NO: 1844430 - RNA, 19 nt, Artificial Sequence
  Description of Artificial Sequence: Synthetic oligonucleotide
  Antisense strand to SEQ ID NO: 1844429
uaaguuaaugccuagcacc

SEQ ID NO: 1844431 - RNA, 19 nt, Artificial Sequence
  Description of Artificial Sequence: Synthetic oligonucleotide
  Sense strand starting at position 1995 of SEQ ID NO: 1563955
gcacaaaugaaagguaagu

SEQ ID NO: 1844432 - RNA, 19 nt, Artificial Sequence
  Description of Artificial Sequence: Synthetic oligonucleotide
  Antisense strand to SEQ ID NO: 1844431
acuuaccuuucauuugugc

SEQ ID NO: 1844433 - RNA, 19 nt, Artificial Sequence
  Description of Artificial Sequence: Synthetic oligonucleotide
  Sense strand starting at position 2020 of SEQ ID NO: 1563955
agcaaaugacguuacucaa

SEQ ID NO: 1844434 - RNA, 19 nt, Artificial Sequence
  Description of Artificial Sequence: Synthetic oligonucleotide
  Antisense strand to SEQ ID NO: 1844433
uugaguaacgucauuugcu

SEQ ID NO: 1844435 - RNA, 19 nt, Artificial Sequence
  Description of Artificial Sequence: Synthetic oligonucleotide
  Sense strand starting at position 2086 of SEQ ID NO: 1563955
ggagucagaggcuaugcau

SEQ ID NO: 1844436 - RNA, 19 nt, Artificial Sequence
  Description of Artificial Sequence: Synthetic oligonucleotide
  Antisense strand to SEQ ID NO: 1844435
augcauagccucugacucc

SEQ ID NO: 1844437 - RNA, 19 nt, Artificial Sequence
  Description of Artificial Sequence: Synthetic oligonucleotide
  Sense strand starting at position 2177 of SEQ ID NO: 1563955
cacugauuccaguagguuc

SEQ ID NO: 1844438 - RNA, 19 nt, Artificial Sequence
  Description of Artificial Sequence: Synthetic oligonucleotide
  Antisense strand to SEQ ID NO: 1844437
gaaccuacuggaaucagug

SEQ ID NO: 1844439 - RNA, 19 nt, Artificial Sequence
  Description of Artificial Sequence: Synthetic oligonucleotide
  Sense strand starting at position 2223 of SEQ ID NO: 1563955
ucuaaagaguguuuaccua

SEQ ID NO: 1844440 - RNA, 19 nt, Artificial Sequence
  Description of Artificial Sequence: Synthetic oligonucleotide
  Antisense strand to SEQ ID NO: 1844439
uagguaaacacucuuuaga

SEQ ID NO: 1844441 - RNA, 19 nt, Artificial Sequence
  Description of Artificial Sequence: Synthetic oligonucleotide
  Sense strand starting at position 2227 of SEQ ID NO: 1563955
aagaguguuuaccuaguaa

SEQ ID NO: 1844442 - RNA, 19 nt, Artificial Sequence
  Description of Artificial Sequence: Synthetic oligonucleotide
  Antisense strand to SEQ ID NO: 1844441
uuacuagguaaacacucuu

SEQ ID NO: 1844443 - RNA, 19 nt, Artificial Sequence
  Description of Artificial Sequence: Synthetic oligonucleotide
  Sense strand starting at position 2326 of SEQ ID NO: 1563955
agaaguaccuuugcuuaag

SEQ ID NO: 1844444 - RNA, 19 nt, Artificial Sequence
  Description of Artificial Sequence: Synthetic oligonucleotide
  Antisense strand to SEQ ID NO: 1844443
cuuaagcaaagguacuucu

SEQ ID NO: 1844445 - RNA, 19 nt, Artificial Sequence
  Description of Artificial Sequence: Synthetic oligonucleotide
  Sense strand starting at position 2526 of SEQ ID NO: 1563955
caugaauuguuauugaaug

SEQ ID NO: 1844446 - RNA, 19 nt, Artificial Sequence
  Description of Artificial Sequence: Synthetic oligonucleotide
  Antisense strand to SEQ ID NO: 1844445
cauucaauaacaauucaug

SEQ ID NO: 1844447 - RNA, 19 nt, Artificial Sequence
  Description of Artificial Sequence: Synthetic oligonucleotide
  Sense strand starting at position 2825 of SEQ ID NO: 1563955
aagagcuugggaugauuga

SEQ ID NO: 1844448 - RNA, 19 nt, Artificial Sequence
  Description of Artificial Sequence: Synthetic oligonucleotide
  Antisense strand to SEQ ID NO: 1844447
ucaaucaucccaagcucuu

SEQ ID NO: 1844449 - RNA, 19 nt, Artificial Sequence
  Description of Artificial Sequence: Synthetic oligonucleotide
  Sense strand starting at position 3091 of SEQ ID NO: 1563955
ggguaagauucuucucuga

SEQ ID NO: 1844450 - RNA, 19 nt, Artificial Sequence
  Description of Artificial Sequence: Synthetic oligonucleotide
  Antisense strand to SEQ ID NO: 1844449
ucagagaagaaucuuaccc

SEQ ID NO: 1844451 - RNA, 19 nt, Artificial Sequence
  Description of Artificial Sequence: Synthetic oligonucleotide
  Sense strand starting at position 3093 of SEQ ID NO: 1563955
guaagauucuucucugaac

SEQ ID NO: 1844452 - RNA, 19 nt, Artificial Sequence
  Description of Artificial Sequence: Synthetic oligonucleotide
  Antisense strand to SEQ ID NO: 1844451
guucagagaagaaucuuac

SEQ ID NO: 1844453 - RNA, 19 nt, Artificial Sequence
  Description of Artificial Sequence: Synthetic oligonucleotide
  Sense strand starting at position 3677 of SEQ ID NO: 1563955
gccauaugggacuguuaag

SEQ ID NO: 1844454 - RNA, 19 nt, Artificial Sequence
  Description of Artificial Sequence: Synthetic oligonucleotide
  Antisense strand to SEQ ID NO: 1844453
cuuaacagucccauauggc

SEQ ID NO: 1844455 - RNA, 19 nt, Artificial Sequence
  Description of Artificial Sequence: Synthetic oligonucleotide
  Sense strand starting at position 3683 of SEQ ID NO: 1563955
ugggacuguuaaguccaau

SEQ ID NO: 1844456 - RNA, 19 nt, Artificial Sequence
  Description of Artificial Sequence: Synthetic oligonucleotide
  Antisense strand to SEQ ID NO: 1844455
auuggacuuaacaguccca

SEQ ID NO: 1844457 - RNA, 19 nt, Artificial Sequence
  Description of Artificial Sequence: Synthetic oligonucleotide
  Sense strand starting at position 3857 of SEQ ID NO: 1563955
cuagguacgacuuaugguu

SEQ ID NO: 1844458 - RNA, 19 nt, Artificial Sequence
  Description of Artificial Sequence: Synthetic oligonucleotide
  Antisense strand to SEQ ID NO: 1844457
aaccauaagucguaccuag

SEQ ID NO: 1844459 - RNA, 19 nt, Artificial Sequence
  Description of Artificial Sequence: Synthetic oligonucleotide
  Sense strand starting at position 3862 of SEQ ID NO: 1563955
uacgacuuaugguuuacaa

SEQ ID NO: 1844460 - RNA, 19 nt, Artificial Sequence
  Description of Artificial Sequence: Synthetic oligonucleotide
  Antisense strand to SEQ ID NO: 1844459
uuguaaaccauaagucgua

SEQ ID NO: 1844461 - RNA, 19 nt, Artificial Sequence
  Description of Artificial Sequence: Synthetic oligonucleotide
  Sense strand starting at position 3864 of SEQ ID NO: 1563955
cgacuuaugguuuacaaau

SEQ ID NO: 1844462 - RNA, 19 nt, Artificial Sequence
  Description of Artificial Sequence: Synthetic oligonucleotide
  Antisense strand to SEQ ID NO: 1844461
auuuguaaaccauaagucg

SEQ ID NO: 1844463 - RNA, 19 nt, Artificial Sequence
  Description of Artificial Sequence: Synthetic oligonucleotide
  Sense strand starting at position 291 of SEQ ID NO: 1563956
uccugauucugguuaucac

SEQ ID NO: 1844464 - RNA, 19 nt, Artificial Sequence
  Description of Artificial Sequence: Synthetic oligonucleotide
  Antisense strand to SEQ ID NO: 1844463
gugauaaccagaaucagga

SEQ ID NO: 1844465 - RNA, 19 nt, Artificial Sequence
  Description of Artificial Sequence: Synthetic oligonucleotide
  Sense strand starting at position 294 of SEQ ID NO: 1563956
ugauucugguuaucaccau

SEQ ID NO: 1844466 - RNA, 19 nt, Artificial Sequence
  Description of Artificial Sequence: Synthetic oligonucleotide
  Antisense strand to SEQ ID NO: 1844465
auggugauaaccagaauca

SEQ ID NO: 1844467 - RNA, 19 nt, Artificial Sequence
  Description of Artificial Sequence: Synthetic oligonucleotide
  Sense strand starting at position 298 of SEQ ID NO: 1563956
ucugguuaucaccaucaga

SEQ ID NO: 1844468 - RNA, 19 nt, Artificial Sequence
  Description of Artificial Sequence: Synthetic oligonucleotide
  Antisense strand to SEQ ID NO: 1844467
ucugauggugauaaccaga

SEQ ID NO: 1844469 - RNA, 19 nt, Artificial Sequence
  Description of Artificial Sequence: Synthetic oligonucleotide
  Sense strand starting at position 332 of SEQ ID NO: 1563956
cugagaugacucugccuga

SEQ ID NO: 1844470 - RNA, 19 nt, Artificial Sequence
  Description of Artificial Sequence: Synthetic oligonucleotide
  Antisense strand to SEQ ID NO: 1844469
ucaggcagagucaucucag

SEQ ID NO: 1844471 - RNA, 19 nt, Artificial Sequence
  Description of Artificial Sequence: Synthetic oligonucleotide
  Sense strand starting at position 333 of SEQ ID NO: 1563956
ugagaugacucugccugau

SEQ ID NO: 1844472 - RNA, 19 nt, Artificial Sequence
  Description of Artificial Sequence: Synthetic oligonucleotide
  Antisense strand to SEQ ID NO: 1844471
aucaggcagagucaucuca

SEQ ID NO: 1844473 - RNA, 19 nt, Artificial Sequence
  Description of Artificial Sequence: Synthetic oligonucleotide
  Sense strand starting at position 336 of SEQ ID NO: 1563956
gaugacucugccugaucca

SEQ ID NO: 1844474 - RNA, 19 nt, Artificial Sequence
  Description of Artificial Sequence: Synthetic oligonucleotide
  Antisense strand to SEQ ID NO: 1844473
uggaucaggcagagucauc

SEQ ID NO: 1844475 - RNA, 19 nt, Artificial Sequence
  Description of Artificial Sequence: Synthetic oligonucleotide
  Sense strand starting at position 503 of SEQ ID NO: 1563956
ggaguagaagauuggcauu

SEQ ID NO: 1844476 - RNA, 19 nt, Artificial Sequence
  Description of Artificial Sequence: Synthetic oligonucleotide
  Antisense strand to SEQ ID NO: 1844475
aaugccaaucuucuacucc

SEQ ID NO: 1844477 - RNA, 19 nt, Artificial Sequence
  Description of Artificial Sequence: Synthetic oligonucleotide
  Sense strand starting at position 509 of SEQ ID NO: 1563956
gaagauuggcauuggcuaa

SEQ ID NO: 1844478 - RNA, 19 nt, Artificial Sequence
  Description of Artificial Sequence: Synthetic oligonucleotide
  Antisense strand to SEQ ID NO: 1844477
uuagccaaugccaaucuuc

SEQ ID NO: 1844479 - RNA, 19 nt, Artificial Sequence
  Description of Artificial Sequence: Synthetic oligonucleotide
  Sense strand starting at position 548 of SEQ ID NO: 1563956
gguuaugagagaugagguc

SEQ ID NO: 1844480 - RNA, 19 nt, Artificial Sequence
  Description of Artificial Sequence: Synthetic oligonucleotide
  Antisense strand to SEQ ID NO: 1844479
gaccucaucucucauaacc

SEQ ID NO: 1844481 - RNA, 19 nt, Artificial Sequence
  Description of Artificial Sequence: Synthetic oligonucleotide
  Sense strand starting at position 560 of SEQ ID NO: 1563956
ugaggucacccaugauauc

SEQ ID NO: 1844482 - RNA, 19 nt, Artificial Sequence
  Description of Artificial Sequence: Synthetic oligonucleotide
  Antisense strand to SEQ ID NO: 1844481
gauaucaugggugaccuca

SEQ ID NO: 1844483 - RNA, 19 nt, Artificial Sequence
  Description of Artificial Sequence: Synthetic oligonucleotide
  Sense strand starting at position 710 of SEQ ID NO: 1563956
ccggcuucccguguuacaa

SEQ ID NO: 1844484 - RNA, 19 nt, Artificial Sequence
  Description of Artificial Sequence: Synthetic oligonucleotide
  Antisense strand to SEQ ID NO: 1844483
uuguaacacgggaagccgg

SEQ ID NO: 1844485 - RNA, 19 nt, Artificial Sequence
  Description of Artificial Sequence: Synthetic oligonucleotide
  Sense strand starting at position 711 of SEQ ID NO: 1563956
cggcuucccguguuacaau

SEQ ID NO: 1844486 - RNA, 19 nt, Artificial Sequence
  Description of Artificial Sequence: Synthetic oligonucleotide
  Antisense strand to SEQ ID NO: 1844485
auuguaacacgggaagccg

SEQ ID NO: 1844487 - RNA, 19 nt, Artificial Sequence
  Description of Artificial Sequence: Synthetic oligonucleotide
  Sense strand starting at position 728 of SEQ ID NO: 1563956
aucuaucugcccuaggagu

SEQ ID NO: 1844488 - RNA, 19 nt, Artificial Sequence
  Description of Artificial Sequence: Synthetic oligonucleotide
  Antisense strand to SEQ ID NO: 1844487
acuccuagggcagauagau

SEQ ID NO: 1844489 - RNA, 19 nt, Artificial Sequence
  Description of Artificial Sequence: Synthetic oligonucleotide
  Sense strand starting at position 806 of SEQ ID NO: 1563956
acacuagugccagggaaga

SEQ ID NO: 1844490 - RNA, 19 nt, Artificial Sequence
  Description of Artificial Sequence: Synthetic oligonucleotide
  Antisense strand to SEQ ID NO: 1844489
ucuucccuggcacuagugu

SEQ ID NO: 1844491 - RNA, 19 nt, Artificial Sequence
  Description of Artificial Sequence: Synthetic oligonucleotide
  Sense strand starting at position 871 of SEQ ID NO: 1563956
agcugacgucgauauuugu

SEQ ID NO: 1844492 - RNA, 19 nt, Artificial Sequence
  Description of Artificial Sequence: Synthetic oligonucleotide
  Antisense strand to SEQ ID NO: 1844491
acaaauaucgacgucagcu

SEQ ID NO: 1844493 - RNA, 19 nt, Artificial Sequence
  Description of Artificial Sequence: Synthetic oligonucleotide
  Sense strand starting at position 1148 of SEQ ID NO: 1563956
gagccaugaguccauagca

SEQ ID NO: 1844494 - RNA, 19 nt, Artificial Sequence
  Description of Artificial Sequence: Synthetic oligonucleotide
  Antisense strand to SEQ ID NO: 1844493
ugcuauggacucauggcuc

SEQ ID NO: 1844495 - RNA, 19 nt, Artificial Sequence
  Description of Artificial Sequence: Synthetic oligonucleotide
  Sense strand starting at position 1568 of SEQ ID NO: 1563956
cauacaaggugucugacaa

SEQ ID NO: 1844496 - RNA, 19 nt, Artificial Sequence
  Description of Artificial Sequence: Synthetic oligonucleotide
  Antisense strand to SEQ ID NO: 1844495
uugucagacaccuuguaug

SEQ ID NO: 1844497 - RNA, 19 nt, Artificial Sequence
  Description of Artificial Sequence: Synthetic oligonucleotide
  Sense strand starting at position 1569 of SEQ ID NO: 1563956
auacaaggugucugacaau

SEQ ID NO: 1844498 - RNA, 19 nt, Artificial Sequence
  Description of Artificial Sequence: Synthetic oligonucleotide
  Antisense strand to SEQ ID NO: 1844497
auugucagacaccuuguau

SEQ ID NO: 1844499 - RNA, 19 nt, Artificial Sequence
  Description of Artificial Sequence: Synthetic oligonucleotide
  Sense strand starting at position 1580 of SEQ ID NO: 1563956
cugacaaugccagguggaa

SEQ ID NO: 1844500 - RNA, 19 nt, Artificial Sequence
  Description of Artificial Sequence: Synthetic oligonucleotide
  Antisense strand to SEQ ID NO: 1844499
uuccaccuggcauugucag

SEQ ID NO: 1844501 - RNA, 19 nt, Artificial Sequence
  Description of Artificial Sequence: Synthetic oligonucleotide
  Sense strand starting at position 1858 of SEQ ID NO: 1563956
gcaggauuucccugcccac

SEQ ID NO: 1844502 - RNA, 19 nt, Artificial Sequence
  Description of Artificial Sequence: Synthetic oligonucleotide
  Antisense strand to SEQ ID NO: 1844501
gugggcagggaaauccugc

SEQ ID NO: 1844503 - RNA, 19 nt, Artificial Sequence
  Description of Artificial Sequence: Synthetic oligonucleotide
  Sense strand starting at position 2164 of SEQ ID NO: 1563956
gacccaaagugucuucuga

SEQ ID NO: 1844504 - RNA, 19 nt, Artificial Sequence
  Description of Artificial Sequence: Synthetic oligonucleotide
  Antisense strand to SEQ ID NO: 1844503
ucagaagacacuuuggguc

SEQ ID NO: 1844505 - RNA, 19 nt, Artificial Sequence
  Description of Artificial Sequence: Synthetic oligonucleotide
  Sense strand starting at position 2194 of SEQ ID NO: 1563956
agcuauaucccuggaagag

SEQ ID NO: 1844506 - RNA, 19 nt, Artificial Sequence
  Description of Artificial Sequence: Synthetic oligonucleotide
  Antisense strand to SEQ ID NO: 1844505
cucuuccagggauauagcu

SEQ ID NO: 1844507 - RNA, 19 nt, Artificial Sequence
  Description of Artificial Sequence: Synthetic oligonucleotide
  Sense strand starting at position 2578 of SEQ ID NO: 1563956
cuuugaaaugacugcagga

SEQ ID NO: 1844508 - RNA, 19 nt, Artificial Sequence
  Description of Artificial Sequence: Synthetic oligonucleotide
  Antisense strand to SEQ ID NO: 1844507
uccugcagucauuucaaag

SEQ ID NO: 1844509 - RNA, 19 nt, Artificial Sequence
  Description of Artificial Sequence: Synthetic oligonucleotide
  Sense strand starting at position 2634 of SEQ ID NO: 1563956
gagccaggucccuggagau

SEQ ID NO: 1844510 - RNA, 19 nt, Artificial Sequence
  Description of Artificial Sequence: Synthetic oligonucleotide
  Antisense strand to SEQ ID NO: 1844509
aucuccagggaccuggcuc

SEQ ID NO: 1844511 - RNA, 19 nt, Artificial Sequence
  Description of Artificial Sequence: Synthetic oligonucleotide
  Sense strand starting at position 2907 of SEQ ID NO: 1563956
cucugcuuugcugaugaaa

SEQ ID NO: 1844512 - RNA, 19 nt, Artificial Sequence
  Description of Artificial Sequence: Synthetic oligonucleotide
  Antisense strand to SEQ ID NO: 1844511
uuucaucagcaaagcagag

SEQ ID NO: 1844513 - RNA, 19 nt, Artificial Sequence
  Description of Artificial Sequence: Synthetic oligonucleotide
  Sense strand starting at position 3405 of SEQ ID NO: 1563956
cugguaguuccuuaggagu

SEQ ID NO: 1844514 - RNA, 19 nt, Artificial Sequence
  Description of Artificial Sequence: Synthetic oligonucleotide
  Antisense strand to SEQ ID NO: 1844513
acuccuaaggaacuaccag

SEQ ID NO: 1844515 - RNA, 19 nt, Artificial Sequence
  Description of Artificial Sequence: Synthetic oligonucleotide
  Sense strand starting at position 3411 of SEQ ID NO: 1563956
guuccuuaggaguggacaa

SEQ ID NO: 1844516 - RNA, 19 nt, Artificial Sequence
  Description of Artificial Sequence: Synthetic oligonucleotide
  Antisense strand to SEQ ID NO: 1844515
uuguccacuccuaaggaac

SEQ ID NO: 1844517 - RNA, 19 nt, Artificial Sequence
  Description of Artificial Sequence: Synthetic oligonucleotide
  Sense strand starting at position 3412 of SEQ ID NO: 1563956
uuccuuaggaguggacaaa

SEQ ID NO: 1844518 - RNA, 19 nt, Artificial Sequence
  Description of Artificial Sequence: Synthetic oligonucleotide
  Antisense strand to SEQ ID NO: 1844517
uuuguccacuccuaaggaa

SEQ ID NO: 1844519 - RNA, 19 nt, Artificial Sequence
  Description of Artificial Sequence: Synthetic oligonucleotide
  Sense strand starting at position 3496 of SEQ ID NO: 1563956
aaauauguagauugugauc

SEQ ID NO: 1844520 - RNA, 19 nt, Artificial Sequence
  Description of Artificial Sequence: Synthetic oligonucleotide
  Antisense strand to SEQ ID NO: 1844519
gaucacaaucuacauauuu

SEQ ID NO: 1844521 - RNA, 19 nt, Artificial Sequence
  Description of Artificial Sequence: Synthetic oligonucleotide
  Sense strand starting at position 3501 of SEQ ID NO: 1563956
uguagauugugaucaucau

SEQ ID NO: 1844522 - RNA, 19 nt, Artificial Sequence
  Description of Artificial Sequence: Synthetic oligonucleotide
  Antisense strand to SEQ ID NO: 1844521
augaugaucacaaucuaca

SEQ ID NO: 1844523 - RNA, 19 nt, Artificial Sequence
  Description of Artificial Sequence: Synthetic oligonucleotide
  Sense strand starting at position 3502 of SEQ ID NO: 1563956
guagauugugaucaucauu

SEQ ID NO: 1844524 - RNA, 19 nt, Artificial Sequence
  Description of Artificial Sequence: Synthetic oligonucleotide
  Antisense strand to SEQ ID NO: 1844523
aaugaugaucacaaucuac

SEQ ID NO: 1844525 - RNA, 19 nt, Artificial Sequence
  Description of Artificial Sequence: Synthetic oligonucleotide
  Sense strand starting at position 3507 of SEQ ID NO: 1563956
uugugaucaucauuaugga

SEQ ID NO: 1844526 - RNA, 19 nt, Artificial Sequence
  Description of Artificial Sequence: Synthetic oligonucleotide
  Antisense strand to SEQ ID NO: 1844525
uccauaaugaugaucacaa

SEQ ID NO: 1844527 - RNA, 19 nt, Artificial Sequence
  Description of Artificial Sequence: Synthetic oligonucleotide
  Sense strand starting at position 3573 of SEQ ID NO: 1563956
ggguaauagagaggguugu

SEQ ID NO: 1844528 - RNA, 19 nt, Artificial Sequence
  Description of Artificial Sequence: Synthetic oligonucleotide
  Antisense strand to SEQ ID NO: 1844527
acaacccucucuauuaccc

SEQ ID NO: 1844529 - RNA, 19 nt, Artificial Sequence
  Description of Artificial Sequence: Synthetic oligonucleotide
  Sense strand starting at position 3574 of SEQ ID NO: 1563956
gguaauagagaggguuguu

SEQ ID NO: 1844530 - RNA, 19 nt, Artificial Sequence
  Description of Artificial Sequence: Synthetic oligonucleotide
  Antisense strand to SEQ ID NO: 1844529
aacaacccucucuauuacc

SEQ ID NO: 1844531 - RNA, 19 nt, Artificial Sequence
  Description of Artificial Sequence: Synthetic oligonucleotide
  Sense strand starting at position 3577 of SEQ ID NO: 1563956
aauagagaggguuguuguu

SEQ ID NO: 1844532 - RNA, 19 nt, Artificial Sequence
  Description of Artificial Sequence: Synthetic oligonucleotide
  Antisense strand to SEQ ID NO: 1844531
aacaacaacccucucuauu

SEQ ID NO: 1844533 - RNA, 19 nt, Artificial Sequence
  Description of Artificial Sequence: Synthetic oligonucleotide
  Sense strand starting at position 3748 of SEQ ID NO: 1563956
agacccugucuauaaguaa

SEQ ID NO: 1844534 - RNA, 19 nt, Artificial Sequence
  Description of Artificial Sequence: Synthetic oligonucleotide
  Antisense strand to SEQ ID NO: 1844533
uuacuuauagacagggucu

SEQ ID NO: 1844535 - RNA, 19 nt, Artificial Sequence
  Description of Artificial Sequence: Synthetic oligonucleotide
  Sense strand starting at position 3751 of SEQ ID NO: 1563956
cccugucuauaaguaaaua

SEQ ID NO: 1844536 - RNA, 19 nt, Artificial Sequence
  Description of Artificial Sequence: Synthetic oligonucleotide
  Antisense strand to SEQ ID NO: 1844535
uauuuacuuauagacaggg

SEQ ID NO: 1844537 - RNA, 19 nt, Artificial Sequence
  Description of Artificial Sequence: Synthetic oligonucleotide
  Sense strand starting at position 3773 of SEQ ID NO: 1563956
aaauauuaagggugacuuu

SEQ ID NO: 1844538 - RNA, 19 nt, Artificial Sequence
  Description of Artificial Sequence: Synthetic oligonucleotide
  Antisense strand to SEQ ID NO: 1844537
aaagucacccuuaauauuu

SEQ ID NO: 1844539 - RNA, 19 nt, Artificial Sequence
  Description of Artificial Sequence: Synthetic oligonucleotide
  Sense strand starting at position 3927 of SEQ ID NO: 1563956
agagaagagaggugucauc

SEQ ID NO: 1844540 - RNA, 19 nt, Artificial Sequence
  Description of Artificial Sequence: Synthetic oligonucleotide
  Antisense strand to SEQ ID NO: 1844539
gaugacaccucucuucucu

SEQ ID NO: 1844541 - RNA, 19 nt, Artificial Sequence
  Description of Artificial Sequence: Synthetic oligonucleotide
  Sense strand starting at position 3934 of SEQ ID NO: 1563956
agaggugucaucugacuua

SEQ ID NO: 1844542 - RNA, 19 nt, Artificial Sequence
  Description of Artificial Sequence: Synthetic oligonucleotide
  Antisense strand to SEQ ID NO: 1844541
uaagucagaugacaccucu

SEQ ID NO: 1844543 - RNA, 19 nt, Artificial Sequence
  Description of Artificial Sequence: Synthetic oligonucleotide
  Sense strand starting at position 8 of SEQ ID NO: 1563958
gauuacuggugacuuuaau

SEQ ID NO: 1844544 - RNA, 19 nt, Artificial Sequence
  Description of Artificial Sequence: Synthetic oligonucleotide
  Antisense strand to SEQ ID NO: 1844543
auuaaagucaccaguaauc

SEQ ID NO: 1844545 - RNA, 19 nt, Artificial Sequence
  Description of Artificial Sequence: Synthetic oligonucleotide
  Sense strand starting at position 37 of SEQ ID NO: 1563958
uaacuugucugcuuuguga

SEQ ID NO: 1844546 - RNA, 19 nt, Artificial Sequence
  Description of Artificial Sequence: Synthetic oligonucleotide
  Antisense strand to SEQ ID NO: 1844545
ucacaaagcagacaaguua

SEQ ID NO: 1844547 - RNA, 19 nt, Artificial Sequence
  Description of Artificial Sequence: Synthetic oligonucleotide
  Sense strand starting at position 40 of SEQ ID NO: 1563958
cuugucugcuuugugauuu

SEQ ID NO: 1844548 - RNA, 19 nt, Artificial Sequence
  Description of Artificial Sequence: Synthetic oligonucleotide
  Antisense strand to SEQ ID NO: 1844547
aaaucacaaagcagacaag

SEQ ID NO: 1844549 - RNA, 19 nt, Artificial Sequence
  Description of Artificial Sequence: Synthetic oligonucleotide
  Sense strand starting at position 66 of SEQ ID NO: 1563958
uugcaaugacgcugaauua

SEQ ID NO: 1844550 - RNA, 19 nt, Artificial Sequence
  Description of Artificial Sequence: Synthetic oligonucleotide
  Antisense strand to SEQ ID NO: 1844549
uaauucagcgucauugcaa

SEQ ID NO: 1844551 - RNA, 19 nt, Artificial Sequence
  Description of Artificial Sequence: Synthetic oligonucleotide
  Sense strand starting at position 255 of SEQ ID NO: 1563958
gaucaauuacagugaccag

SEQ ID NO: 1844552 - RNA, 19 nt, Artificial Sequence
  Description of Artificial Sequence: Synthetic oligonucleotide
  Antisense strand to SEQ ID NO: 1844551
cuggucacuguaauugauc

SEQ ID NO: 1844553 - RNA, 19 nt, Artificial Sequence
  Description of Artificial Sequence: Synthetic oligonucleotide
  Sense strand starting at position 292 of SEQ ID NO: 1563958
cgggcauacucuuuacuag

SEQ ID NO: 1844554 - RNA, 19 nt, Artificial Sequence
  Description of Artificial Sequence: Synthetic oligonucleotide
  Antisense strand to SEQ ID NO: 1844553
cuaguaaagaguaugcccg

SEQ ID NO: 1844555 - RNA, 19 nt, Artificial Sequence
  Description of Artificial Sequence: Synthetic oligonucleotide
  Sense strand starting at position 327 of SEQ ID NO: 1563958
gagugcaaaucgguacaau

SEQ ID NO: 1844556 - RNA, 19 nt, Artificial Sequence
  Description of Artificial Sequence: Synthetic oligonucleotide
  Antisense strand to SEQ ID NO: 1844555
auuguaccgauuugcacuc

SEQ ID NO: 1844557 - RNA, 19 nt, Artificial Sequence
  Description of Artificial Sequence: Synthetic oligonucleotide
  Sense strand starting at position 336 of SEQ ID NO: 1563958
ucgguacaaugcuuaugaa

SEQ ID NO: 1844558 - RNA, 19 nt, Artificial Sequence
  Description of Artificial Sequence: Synthetic oligonucleotide
  Antisense strand to SEQ ID NO: 1844557
uucauaagcauuguaccga

SEQ ID NO: 1844559 - RNA, 19 nt, Artificial Sequence
  Description of Artificial Sequence: Synthetic oligonucleotide
  Sense strand starting at position 494 of SEQ ID NO: 1563958
cacgcaauguuggucuuaa

SEQ ID NO: 1844560 - RNA, 19 nt, Artificial Sequence
  Description of Artificial Sequence: Synthetic oligonucleotide
  Antisense strand to SEQ ID NO: 1844559
uuaagaccaacauugcgug

SEQ ID NO: 1844561 - RNA, 19 nt, Artificial Sequence
  Description of Artificial Sequence: Synthetic oligonucleotide
  Sense strand starting at position 495 of SEQ ID NO: 1563958
acgcaauguuggucuuaaa

SEQ ID NO: 1844562 - RNA, 19 nt, Artificial Sequence
  Description of Artificial Sequence: Synthetic oligonucleotide
  Antisense strand to SEQ ID NO: 1844561
uuuaagaccaacauugcgu

SEQ ID NO: 1844563 - RNA, 19 nt, Artificial Sequence
  Description of Artificial Sequence: Synthetic oligonucleotide
  Sense strand starting at position 555 of SEQ ID NO: 1563958
cgggaaugauuacagaaau

SEQ ID NO: 1844564 - RNA, 19 nt, Artificial Sequence
  Description of Artificial Sequence: Synthetic oligonucleotide
  Antisense strand to SEQ ID NO: 1844563
auuucuguaaucauucccg

SEQ ID NO: 1844565 - RNA, 19 nt, Artificial Sequence
  Description of Artificial Sequence: Synthetic oligonucleotide
  Sense strand starting at position 727 of SEQ ID NO: 1563958
auucuauaacgguguguua

SEQ ID NO: 1844566 - RNA, 19 nt, Artificial Sequence
  Description of Artificial Sequence: Synthetic oligonucleotide
  Antisense strand to SEQ ID NO: 1844565
uaacacaccguuauagaau

SEQ ID NO: 1844567 - RNA, 19 nt, Artificial Sequence
  Description of Artificial Sequence: Synthetic oligonucleotide
  Sense strand starting at position 729 of SEQ ID NO: 1563958
ucuauaacgguguguuaaa

SEQ ID NO: 1844568 - RNA, 19 nt, Artificial Sequence
  Description of Artificial Sequence: Synthetic oligonucleotide
  Antisense strand to SEQ ID NO: 1844567
uuuaacacaccguuauaga

SEQ ID NO: 1844569 - RNA, 19 nt, Artificial Sequence
  Description of Artificial Sequence: Synthetic oligonucleotide
  Sense strand starting at position 873 of SEQ ID NO: 1563958
uguuucuucccucaucuga

SEQ ID NO: 1844570 - RNA, 19 nt, Artificial Sequence
  Description of Artificial Sequence: Synthetic oligonucleotide
  Antisense strand to SEQ ID NO: 1844569
ucagaugagggaagaaaca

SEQ ID NO: 1844571 - RNA, 19 nt, Artificial Sequence
  Description of Artificial Sequence: Synthetic oligonucleotide
  Sense strand starting at position 907 of SEQ ID NO: 1563958
ugaugauucuaccaugaaa

SEQ ID NO: 1844572 - RNA, 19 nt, Artificial Sequence
  Description of Artificial Sequence: Synthetic oligonucleotide
  Antisense strand to SEQ ID NO: 1844571
uuucaugguagaaucauca

SEQ ID NO: 1844573 - RNA, 19 nt, Artificial Sequence
  Description of Artificial Sequence: Synthetic oligonucleotide
  Sense strand starting at position 931 of SEQ ID NO: 1563958
ccaccugugcaguaaacaa

SEQ ID NO: 1844574 - RNA, 19 nt, Artificial Sequence
  Description of Artificial Sequence: Synthetic oligonucleotide
  Antisense strand to SEQ ID NO: 1844573
uuguuuacugcacaggugg

SEQ ID NO: 1844575 - RNA, 19 nt, Artificial Sequence
  Description of Artificial Sequence: Synthetic oligonucleotide
  Sense strand starting at position 1014 of SEQ ID NO: 1563958
uggcacagauuaguaagau

SEQ ID NO: 1844576 - RNA, 19 nt, Artificial Sequence
  Description of Artificial Sequence: Synthetic oligonucleotide
  Antisense strand to SEQ ID NO: 1844575
aucuuacuaaucugugcca

SEQ ID NO: 1844577 - RNA, 19 nt, Artificial Sequence
  Description of Artificial Sequence: Synthetic oligonucleotide
  Sense strand starting at position 1210 of SEQ ID NO: 1563958
gguuguaaaccggguguga

SEQ ID NO: 1844578 - RNA, 19 nt, Artificial Sequence
  Description of Artificial Sequence: Synthetic oligonucleotide
  Antisense strand to SEQ ID NO: 1844577
ucacacccgguuuacaacc

SEQ ID NO: 1844579 - RNA, 19 nt, Artificial Sequence
  Description of Artificial Sequence: Synthetic oligonucleotide
  Sense strand starting at position 1261 of SEQ ID NO: 1563958
cugggaugucuucaucgca

SEQ ID NO: 1844580 - RNA, 19 nt, Artificial Sequence
  Description of Artificial Sequence: Synthetic oligonucleotide
  Antisense strand to SEQ ID NO: 1844579
ugcgaugaagacaucccag

SEQ ID NO: 1844581 - RNA, 19 nt, Artificial Sequence
  Description of Artificial Sequence: Synthetic oligonucleotide
  Sense strand starting at position 1304 of SEQ ID NO: 1563958
ccucgaaauccuugacguc

SEQ ID NO: 1844582 - RNA, 19 nt, Artificial Sequence
  Description of Artificial Sequence: Synthetic oligonucleotide
  Antisense strand to SEQ ID NO: 1844581
gacgucaaggauuucgagg

SEQ ID NO: 1844583 - RNA, 19 nt, Artificial Sequence
  Description of Artificial Sequence: Synthetic oligonucleotide
  Sense strand starting at position 1305 of SEQ ID NO: 1563958
cucgaaauccuugacguca

SEQ ID NO: 1844584 - RNA, 19 nt, Artificial Sequence
  Description of Artificial Sequence: Synthetic oligonucleotide
  Antisense strand to SEQ ID NO: 1844583
ugacgucaaggauuucgag

SEQ ID NO: 1844585 - RNA, 19 nt, Artificial Sequence
  Description of Artificial Sequence: Synthetic oligonucleotide
  Sense strand starting at position 1380 of SEQ ID NO: 1563958
cuugaaucucccgacgaaa

SEQ ID NO: 1844586 - RNA, 19 nt, Artificial Sequence
  Description of Artificial Sequence: Synthetic oligonucleotide
  Antisense strand to SEQ ID NO: 1844585
uuucgucgggagauucaag

SEQ ID NO: 1844587 - RNA, 19 nt, Artificial Sequence
  Description of Artificial Sequence: Synthetic oligonucleotide
  Sense strand starting at position 1404 of SEQ ID NO: 1563958
gcgguaguucaggaacaug

SEQ ID NO: 1844588 - RNA, 19 nt, Artificial Sequence
  Description of Artificial Sequence: Synthetic oligonucleotide
  Antisense strand to SEQ ID NO: 1844587
cauguuccugaacuaccgc

SEQ ID NO: 1844589 - RNA, 19 nt, Artificial Sequence
  Description of Artificial Sequence: Synthetic oligonucleotide
  Sense strand starting at position 1532 of SEQ ID NO: 1563958
ugccgaacgccgagaagau

SEQ ID NO: 1844590 - RNA, 19 nt, Artificial Sequence
  Description of Artificial Sequence: Synthetic oligonucleotide
  Antisense strand to SEQ ID NO: 1844589
aucuucucggcguucggca

SEQ ID NO: 1844591 - RNA, 19 nt, Artificial Sequence
  Description of Artificial Sequence: Synthetic oligonucleotide
  Sense strand starting at position 1659 of SEQ ID NO: 1563958
uggccugcccuuuaugaca

SEQ ID NO: 1844592 - RNA, 19 nt, Artificial Sequence
  Description of Artificial Sequence: Synthetic oligonucleotide
  Antisense strand to SEQ ID NO: 1844591
ugucauaaagggcaggcca

SEQ ID NO: 1844593 - RNA, 19 nt, Artificial Sequence
  Description of Artificial Sequence: Synthetic oligonucleotide
  Sense strand starting at position 1718 of SEQ ID NO: 1563958
guugcugguaguugacaua

SEQ ID NO: 1844594 - RNA, 19 nt, Artificial Sequence
  Description of Artificial Sequence: Synthetic oligonucleotide
  Antisense strand to SEQ ID NO: 1844593
uaugucaacuaccagcaac

SEQ ID NO: 1844595 - RNA, 19 nt, Artificial Sequence
  Description of Artificial Sequence: Synthetic oligonucleotide
  Sense strand starting at position 1757 of SEQ ID NO: 1563958
gggugaucuugucccugca

SEQ ID NO: 1844596 - RNA, 19 nt, Artificial Sequence
  Description of Artificial Sequence: Synthetic oligonucleotide
  Antisense strand to SEQ ID NO: 1844595
ugcagggacaagaucaccc

SEQ ID NO: 1844597 - RNA, 19 nt, Artificial Sequence
  Description of Artificial Sequence: Synthetic oligonucleotide
  Sense strand starting at position 1759 of SEQ ID NO: 1563958
gugaucuugucccugcaga

SEQ ID NO: 1844598 - RNA, 19 nt, Artificial Sequence
  Description of Artificial Sequence: Synthetic oligonucleotide
  Antisense strand to SEQ ID NO: 1844597
ucugcagggacaagaucac

SEQ ID NO: 1844599 - RNA, 19 nt, Artificial Sequence
  Description of Artificial Sequence: Synthetic oligonucleotide
  Sense strand starting at position 1760 of SEQ ID NO: 1563958
ugaucuugucccugcagau

SEQ ID NO: 1844600 - RNA, 19 nt, Artificial Sequence
  Description of Artificial Sequence: Synthetic oligonucleotide
  Antisense strand to SEQ ID NO: 1844599
aucugcagggacaagauca

SEQ ID NO: 1844601 - RNA, 19 nt, Artificial Sequence
  Description of Artificial Sequence: Synthetic oligonucleotide
  Sense strand starting at position 1809 of SEQ ID NO: 1563958
gaacuucucguacagcauu

SEQ ID NO: 1844602 - RNA, 19 nt, Artificial Sequence
  Description of Artificial Sequence: Synthetic oligonucleotide
  Antisense strand to SEQ ID NO: 1844601
aaugcuguacgagaaguuc

SEQ ID NO: 1844603 - RNA, 19 nt, Artificial Sequence
  Description of Artificial Sequence: Synthetic oligonucleotide
  Sense strand starting at position 3309 of SEQ ID NO: 1563958
auggaaagcuuaucaggua

SEQ ID NO: 1844604 - RNA, 19 nt, Artificial Sequence
  Description of Artificial Sequence: Synthetic oligonucleotide
  Antisense strand to SEQ ID NO: 1844603
uaccugauaagcuuuccau

SEQ ID NO: 1844605 - RNA, 19 nt, Artificial Sequence
  Description of Artificial Sequence: Synthetic oligonucleotide
  Sense strand starting at position 3491 of SEQ ID NO: 1563958
augagaguugaguguaaca

SEQ ID NO: 1844606 - RNA, 19 nt, Artificial Sequence
  Description of Artificial Sequence: Synthetic oligonucleotide
  Antisense strand to SEQ ID NO: 1844605
uguuacacucaacucucau

SEQ ID NO: 1844607 - RNA, 19 nt, Artificial Sequence
  Description of Artificial Sequence: Synthetic oligonucleotide
  Sense strand starting at position 3498 of SEQ ID NO: 1563958
uugaguguaacagaagcua

SEQ ID NO: 1844608 - RNA, 19 nt, Artificial Sequence
  Description of Artificial Sequence: Synthetic oligonucleotide
  Antisense strand to SEQ ID NO: 1844607
uagcuucuguuacacucaa

SEQ ID NO: 1844609 - RNA, 19 nt, Artificial Sequence
  Description of Artificial Sequence: Synthetic oligonucleotide
  Sense strand starting at position 3560 of SEQ ID NO: 1563958
cuuaguagcaauuagguga

SEQ ID NO: 1844610 - RNA, 19 nt, Artificial Sequence
  Description of Artificial Sequence: Synthetic oligonucleotide
  Antisense strand to SEQ ID NO: 1844609
ucaccuaauugcuacuaag

SEQ ID NO: 1844611 - RNA, 19 nt, Artificial Sequence
  Description of Artificial Sequence: Synthetic oligonucleotide
  Sense strand starting at position 3564 of SEQ ID NO: 1563958
guagcaauuaggugaggcu

SEQ ID NO: 1844612 - RNA, 19 nt, Artificial Sequence
  Description of Artificial Sequence: Synthetic oligonucleotide
  Antisense strand to SEQ ID NO: 1844611
agccucaccuaauugcuac

SEQ ID NO: 1844613 - RNA, 19 nt, Artificial Sequence
  Description of Artificial Sequence: Synthetic oligonucleotide
  Sense strand starting at position 3602 of SEQ ID NO: 1563958
cgaggugggcucugaaaca

SEQ ID NO: 1844614 - RNA, 19 nt, Artificial Sequence
  Description of Artificial Sequence: Synthetic oligonucleotide
  Antisense strand to SEQ ID NO: 1844613
uguuucagagcccaccucg

SEQ ID NO: 1844615 - RNA, 19 nt, Artificial Sequence
  Description of Artificial Sequence: Synthetic oligonucleotide
  Sense strand starting at position 3671 of SEQ ID NO: 1563958
gggaucagucugugcccaa

SEQ ID NO: 1844616 - RNA, 19 nt, Artificial Sequence
  Description of Artificial Sequence: Synthetic oligonucleotide
  Antisense strand to SEQ ID NO: 1844615
uugggcacagacugauccc

SEQ ID NO: 1844617 - RNA, 19 nt, Artificial Sequence
  Description of Artificial Sequence: Synthetic oligonucleotide
  Sense strand starting at position 3691 of SEQ ID NO: 1563958
gcccuuugucaugagagca

SEQ ID NO: 1844618 - RNA, 19 nt, Artificial Sequence
  Description of Artificial Sequence: Synthetic oligonucleotide
  Antisense strand to SEQ ID NO: 1844617
ugcucucaugacaaagggc

SEQ ID NO: 1844619 - RNA, 19 nt, Artificial Sequence
  Description of Artificial Sequence: Synthetic oligonucleotide
  Sense strand starting at position 3724 of SEQ ID NO: 1563958
ucuggccaugccuaauaau

SEQ ID NO: 1844620 - RNA, 19 nt, Artificial Sequence
  Description of Artificial Sequence: Synthetic oligonucleotide
  Antisense strand to SEQ ID NO: 1844619
auuauuaggcauggccaga

SEQ ID NO: 1844621 - RNA, 19 nt, Artificial Sequence
  Description of Artificial Sequence: Synthetic oligonucleotide
  Sense strand starting at position 3893 of SEQ ID NO: 1563958
augagaacuuuagaaugag

SEQ ID NO: 1844622 - RNA, 19 nt, Artificial Sequence
  Description of Artificial Sequence: Synthetic oligonucleotide
  Antisense strand to SEQ ID NO: 1844621
cucauucuaaaguucucau

SEQ ID NO: 1844623 - RNA, 19 nt, Artificial Sequence
  Description of Artificial Sequence: Synthetic oligonucleotide
  Sense strand starting at position 2854 of SEQ ID NO: 1563959
ucgggucgccuggauauuu

SEQ ID NO: 1844624 - RNA, 19 nt, Artificial Sequence
  Description of Artificial Sequence: Synthetic oligonucleotide
  Antisense strand to SEQ ID NO: 1844623
aaauauccaggcgacccga

SEQ ID NO: 1844625 - RNA, 19 nt, Artificial Sequence
  Description of Artificial Sequence: Synthetic oligonucleotide
  Sense strand starting at position 2914 of SEQ ID NO: 1563959
gggauaaggguucgauuca

SEQ ID NO: 1844626 - RNA, 19 nt, Artificial Sequence
  Description of Artificial Sequence: Synthetic oligonucleotide
  Antisense strand to SEQ ID NO: 1844625
ugaaucgaacccuuauccc

SEQ ID NO: 1844627 - RNA, 19 nt, Artificial Sequence
  Description of Artificial Sequence: Synthetic oligonucleotide
  Sense strand starting at position 2915 of SEQ ID NO: 1563959
ggauaaggguucgauucag

SEQ ID NO: 1844628 - RNA, 19 nt, Artificial Sequence
  Description of Artificial Sequence: Synthetic oligonucleotide
  Antisense strand to SEQ ID NO: 1844627
cugaaucgaacccuuaucc

SEQ ID NO: 1844629 - RNA, 19 nt, Artificial Sequence
  Description of Artificial Sequence: Synthetic oligonucleotide
  Sense strand starting at position 2921 of SEQ ID NO: 1563959
ggguucgauucagaaggga

SEQ ID NO: 1844630 - RNA, 19 nt, Artificial Sequence
  Description of Artificial Sequence: Synthetic oligonucleotide
  Antisense strand to SEQ ID NO: 1844629
ucccuucugaaucgaaccc

SEQ ID NO: 1844631 - RNA, 19 nt, Artificial Sequence
  Description of Artificial Sequence: Synthetic oligonucleotide
  Sense strand starting at position 2929 of SEQ ID NO: 1563959
uucagaagggagcguuauu

SEQ ID NO: 1844632 - RNA, 19 nt, Artificial Sequence
  Description of Artificial Sequence: Synthetic oligonucleotide
  Antisense strand to SEQ ID NO: 1844631
aauaacgcucccuucugaa

SEQ ID NO: 1844633 - RNA, 19 nt, Artificial Sequence
  Description of Artificial Sequence: Synthetic oligonucleotide
  Sense strand starting at position 2972 of SEQ ID NO: 1563959
acguuuaaaugguuaaauc

SEQ ID NO: 1844634 - RNA, 19 nt, Artificial Sequence
  Description of Artificial Sequence: Synthetic oligonucleotide
  Antisense strand to SEQ ID NO: 1844633
gauuuaaccauuuaaacgu

SEQ ID NO: 1844635 - RNA, 19 nt, Artificial Sequence
  Description of Artificial Sequence: Synthetic oligonucleotide
  Sense strand starting at position 2973 of SEQ ID NO: 1563959
cguuuaaaugguuaaauca

SEQ ID NO: 1844636 - RNA, 19 nt, Artificial Sequence
  Description of Artificial Sequence: Synthetic oligonucleotide
  Antisense strand to SEQ ID NO: 1844635
ugauuuaaccauuuaaacg

SEQ ID NO: 1844637 - RNA, 19 nt, Artificial Sequence
  Description of Artificial Sequence: Synthetic oligonucleotide
  Sense strand starting at position 3087 of SEQ ID NO: 1563959
cuaguacuguccucaauga

SEQ ID NO: 1844638 - RNA, 19 nt, Artificial Sequence
  Description of Artificial Sequence: Synthetic oligonucleotide
  Antisense strand to SEQ ID NO: 1844637
ucauugaggacaguacuag

SEQ ID NO: 1844639 - RNA, 19 nt, Artificial Sequence
  Description of Artificial Sequence: Synthetic oligonucleotide
  Sense strand starting at position 3153 of SEQ ID NO: 1563959
gagccaggcgcuuguuuau

SEQ ID NO: 1844640 - RNA, 19 nt, Artificial Sequence
  Description of Artificial Sequence: Synthetic oligonucleotide
  Antisense strand to SEQ ID NO: 1844639
auaaacaagcgccuggcuc

SEQ ID NO: 1844641 - RNA, 19 nt, Artificial Sequence
  Description of Artificial Sequence: Synthetic oligonucleotide
  Sense strand starting at position 3159 of SEQ ID NO: 1563959
ggcgcuuguuuauucuuga

SEQ ID NO: 1844642 - RNA, 19 nt, Artificial Sequence
  Description of Artificial Sequence: Synthetic oligonucleotide
  Antisense strand to SEQ ID NO: 1844641
ucaagaauaaacaagcgcc

SEQ ID NO: 1844643 - RNA, 19 nt, Artificial Sequence
  Description of Artificial Sequence: Synthetic oligonucleotide
  Sense strand starting at position 3312 of SEQ ID NO: 1563959
auggaaagcuuaucaggua

SEQ ID NO: 1844644 - RNA, 19 nt, Artificial Sequence
  Description of Artificial Sequence: Synthetic oligonucleotide
  Antisense strand to SEQ ID NO: 1844643
uaccugauaagcuuuccau

SEQ ID NO: 1844645 - RNA, 19 nt, Artificial Sequence
  Description of Artificial Sequence: Synthetic oligonucleotide
  Sense strand starting at position 3315 of SEQ ID NO: 1563959
gaaagcuuaucagguacuu

SEQ ID NO: 1844646 - RNA, 19 nt, Artificial Sequence
  Description of Artificial Sequence: Synthetic oligonucleotide
  Antisense strand to SEQ ID NO: 1844645
aaguaccugauaagcuuuc

SEQ ID NO: 1844647 - RNA, 19 nt, Artificial Sequence
  Description of Artificial Sequence: Synthetic oligonucleotide
  Sense strand starting at position 3353 of SEQ ID NO: 1563959
cccgcaaugugguaaguga

SEQ ID NO: 1844648 - RNA, 19 nt, Artificial Sequence
  Description of Artificial Sequence: Synthetic oligonucleotide
  Antisense strand to SEQ ID NO: 1844647
ucacuuaccacauugcggg

SEQ ID NO: 1844649 - RNA, 19 nt, Artificial Sequence
  Description of Artificial Sequence: Synthetic oligonucleotide
  Sense strand starting at position 3494 of SEQ ID NO: 1563959
augagaguugaguguaaca

SEQ ID NO: 1844650 - RNA, 19 nt, Artificial Sequence
  Description of Artificial Sequence: Synthetic oligonucleotide
  Antisense strand to SEQ ID NO: 1844649
uguuacacucaacucucau

SEQ ID NO: 1844651 - RNA, 19 nt, Artificial Sequence
  Description of Artificial Sequence: Synthetic oligonucleotide
  Sense strand starting at position 3501 of SEQ ID NO: 1563959
uugaguguaacagaagcua

SEQ ID NO: 1844652 - RNA, 19 nt, Artificial Sequence
  Description of Artificial Sequence: Synthetic oligonucleotide
  Antisense strand to SEQ ID NO: 1844651
uagcuucuguuacacucaa

SEQ ID NO: 1844653 - RNA, 19 nt, Artificial Sequence
  Description of Artificial Sequence: Synthetic oligonucleotide
  Sense strand starting at position 3563 of SEQ ID NO: 1563959
cuuaguagcaauuagguga

SEQ ID NO: 1844654 - RNA, 19 nt, Artificial Sequence
  Description of Artificial Sequence: Synthetic oligonucleotide
  Antisense strand to SEQ ID NO: 1844653
ucaccuaauugcuacuaag

SEQ ID NO: 1844655 - RNA, 19 nt, Artificial Sequence
  Description of Artificial Sequence: Synthetic oligonucleotide
  Sense strand starting at position 3567 of SEQ ID NO: 1563959
guagcaauuaggugaggcu

SEQ ID NO: 1844656 - RNA, 19 nt, Artificial Sequence
  Description of Artificial Sequence: Synthetic oligonucleotide
  Antisense strand to SEQ ID NO: 1844655
agccucaccuaauugcuac

SEQ ID NO: 1844657 - RNA, 19 nt, Artificial Sequence
  Description of Artificial Sequence: Synthetic oligonucleotide
  Sense strand starting at position 3605 of SEQ ID NO: 1563959
cgaggugggcucugaaaca

SEQ ID NO: 1844658 - RNA, 19 nt, Artificial Sequence
  Description of Artificial Sequence: Synthetic oligonucleotide
  Antisense strand to SEQ ID NO: 1844657
uguuucagagcccaccucg

SEQ ID NO: 1844659 - RNA, 19 nt, Artificial Sequence
  Description of Artificial Sequence: Synthetic oligonucleotide
  Sense strand starting at position 3674 of SEQ ID NO: 1563959
gggaucagucugugcccaa

SEQ ID NO: 1844660 - RNA, 19 nt, Artificial Sequence
  Description of Artificial Sequence: Synthetic oligonucleotide
  Antisense strand to SEQ ID NO: 1844659
uugggcacagacugauccc

SEQ ID NO: 1844661 - RNA, 19 nt, Artificial Sequence
  Description of Artificial Sequence: Synthetic oligonucleotide
  Sense strand starting at position 3693 of SEQ ID NO: 1563959
ggcccuuugucaugagagc

SEQ ID NO: 1844662 - RNA, 19 nt, Artificial Sequence
  Description of Artificial Sequence: Synthetic oligonucleotide
  Antisense strand to SEQ ID NO: 1844661
gcucucaugacaaagggcc

SEQ ID NO: 1844663 - RNA, 19 nt, Artificial Sequence
  Description of Artificial Sequence: Synthetic oligonucleotide
  Sense strand starting at position 3694 of SEQ ID NO: 1563959
gcccuuugucaugagagca

SEQ ID NO: 1844664 - RNA, 19 nt, Artificial Sequence
  Description of Artificial Sequence: Synthetic oligonucleotide
  Antisense strand to SEQ ID NO: 1844663
ugcucucaugacaaagggc

SEQ ID NO: 1844665 - RNA, 19 nt, Artificial Sequence
  Description of Artificial Sequence: Synthetic oligonucleotide
  Sense strand starting at position 3727 of SEQ ID NO: 1563959
ucuggccaugccuaauaau

SEQ ID NO: 1844666 - RNA, 19 nt, Artificial Sequence
  Description of Artificial Sequence: Synthetic oligonucleotide
  Antisense strand to SEQ ID NO: 1844665
auuauuaggcauggccaga

SEQ ID NO: 1844667 - RNA, 19 nt, Artificial Sequence
  Description of Artificial Sequence: Synthetic oligonucleotide
  Sense strand starting at position 3885 of SEQ ID NO: 1563959
gaagcaguaugaugagaac

SEQ ID NO: 1844668 - RNA, 19 nt, Artificial Sequence
  Description of Artificial Sequence: Synthetic oligonucleotide
  Antisense strand to SEQ ID NO: 1844667
guucucaucauacugcuuc

SEQ ID NO: 1844669 - RNA, 19 nt, Artificial Sequence
  Description of Artificial Sequence: Synthetic oligonucleotide
  Sense strand starting at position 3888 of SEQ ID NO: 1563959
gcaguaugaugagaacuuu

SEQ ID NO: 1844670 - RNA, 19 nt, Artificial Sequence
  Description of Artificial Sequence: Synthetic oligonucleotide
  Antisense strand to SEQ ID NO: 1844669
aaaguucucaucauacugc

SEQ ID NO: 1844671 - RNA, 19 nt, Artificial Sequence
  Description of Artificial Sequence: Synthetic oligonucleotide
  Sense strand starting at position 3896 of SEQ ID NO: 1563959
augagaacuuuagaaugag

SEQ ID NO: 1844672 - RNA, 19 nt, Artificial Sequence
  Description of Artificial Sequence: Synthetic oligonucleotide
  Antisense strand to SEQ ID NO: 1844671
cucauucuaaaguucucau

SEQ ID NO: 1844673 - RNA, 19 nt, Artificial Sequence
  Description of Artificial Sequence: Synthetic oligonucleotide
  Sense strand starting at position 1154 of SEQ ID NO: 1563960
cacugucgaggcugagaaa

SEQ ID NO: 1844674 - RNA, 19 nt, Artificial Sequence
  Description of Artificial Sequence: Synthetic oligonucleotide
  Antisense strand to SEQ ID NO: 1844673
uuucucagccucgacagug

SEQ ID NO: 1844675 - RNA, 19 nt, Artificial Sequence
  Description of Artificial Sequence: Synthetic oligonucleotide
  Sense strand starting at position 1338 of SEQ ID NO: 1563960
gugaaauugugagaagcca

SEQ ID NO: 1844676 - RNA, 19 nt, Artificial Sequence
  Description of Artificial Sequence: Synthetic oligonucleotide
  Antisense strand to SEQ ID NO: 1844675
uggcuucucacaauuucac

SEQ ID NO: 1844677 - RNA, 19 nt, Artificial Sequence
  Description of Artificial Sequence: Synthetic oligonucleotide
  Sense strand starting at position 1409 of SEQ ID NO: 1563960
acccgcuuucugcauaaau

SEQ ID NO: 1844678 - RNA, 19 nt, Artificial Sequence
  Description of Artificial Sequence: Synthetic oligonucleotide
  Antisense strand to SEQ ID NO: 1844677
auuuaugcagaaagcgggu

SEQ ID NO: 1844679 - RNA, 19 nt, Artificial Sequence
  Description of Artificial Sequence: Synthetic oligonucleotide
  Sense strand starting at position 1411 of SEQ ID NO: 1563960
ccgcuuucugcauaaauau

SEQ ID NO: 1844680 - RNA, 19 nt, Artificial Sequence
  Description of Artificial Sequence: Synthetic oligonucleotide
  Antisense strand to SEQ ID NO: 1844679
auauuuaugcagaaagcgg

SEQ ID NO: 1844681 - RNA, 19 nt, Artificial Sequence
  Description of Artificial Sequence: Synthetic oligonucleotide
  Sense strand starting at position 1420 of SEQ ID NO: 1563960
gcauaaauauaggccuaga

SEQ ID NO: 1844682 - RNA, 19 nt, Artificial Sequence
  Description of Artificial Sequence: Synthetic oligonucleotide
  Antisense strand to SEQ ID NO: 1844681
ucuaggccuauauuuaugc

SEQ ID NO: 1844683 - RNA, 19 nt, Artificial Sequence
  Description of Artificial Sequence: Synthetic oligonucleotide
  Sense strand starting at position 1436 of SEQ ID NO: 1563960
agagcuccuguugguuuaa

SEQ ID NO: 1844684 - RNA, 19 nt, Artificial Sequence
  Description of Artificial Sequence: Synthetic oligonucleotide
  Antisense strand to SEQ ID NO: 1844683
uuaaaccaacaggagcucu

SEQ ID NO: 1844685 - RNA, 19 nt, Artificial Sequence
  Description of Artificial Sequence: Synthetic oligonucleotide
  Sense strand starting at position 1437 of SEQ ID NO: 1563960
gagcuccuguugguuuaaa

SEQ ID NO: 1844686 - RNA, 19 nt, Artificial Sequence
  Description of Artificial Sequence: Synthetic oligonucleotide
  Antisense strand to SEQ ID NO: 1844685
uuuaaaccaacaggagcuc

SEQ ID NO: 1844687 - RNA, 19 nt, Artificial Sequence
  Description of Artificial Sequence: Synthetic oligonucleotide
  Sense strand starting at position 1520 of SEQ ID NO: 1563960
cuggcuagccuuucgcuaa

SEQ ID NO: 1844688 - RNA, 19 nt, Artificial Sequence
  Description of Artificial Sequence: Synthetic oligonucleotide
  Antisense strand to SEQ ID NO: 1844687
uuagcgaaaggcuagccag

SEQ ID NO: 1844689 - RNA, 19 nt, Artificial Sequence
  Description of Artificial Sequence: Synthetic oligonucleotide
  Sense strand starting at position 1548 of SEQ ID NO: 1563960
gcacucagcgucugcgaaa

SEQ ID NO: 1844690 - RNA, 19 nt, Artificial Sequence
  Description of Artificial Sequence: Synthetic oligonucleotide
  Antisense strand to SEQ ID NO: 1844689
uuucgcagacgcugagugc

SEQ ID NO: 1844691 - RNA, 19 nt, Artificial Sequence
  Description of Artificial Sequence: Synthetic oligonucleotide
  Sense strand starting at position 1577 of SEQ ID NO: 1563960
gacacuuggugcgauaaga

SEQ ID NO: 1844692 - RNA, 19 nt, Artificial Sequence
  Description of Artificial Sequence: Synthetic oligonucleotide
  Antisense strand to SEQ ID NO: 1844691
ucuuaucgcaccaaguguc

SEQ ID NO: 1844693 - RNA, 19 nt, Artificial Sequence
  Description of Artificial Sequence: Synthetic oligonucleotide
  Sense strand starting at position 2281 of SEQ ID NO: 1563960
aaggauagguugcauacuu

SEQ ID NO: 1844694 - RNA, 19 nt, Artificial Sequence
  Description of Artificial Sequence: Synthetic oligonucleotide
  Antisense strand to SEQ ID NO: 1844693
aaguaugcaaccuauccuu

SEQ ID NO: 1844695 - RNA, 19 nt, Artificial Sequence
  Description of Artificial Sequence: Synthetic oligonucleotide
  Sense strand starting at position 2289 of SEQ ID NO: 1563960
guugcauacuuuccugagu

SEQ ID NO: 1844696 - RNA, 19 nt, Artificial Sequence
  Description of Artificial Sequence: Synthetic oligonucleotide
  Antisense strand to SEQ ID NO: 1844695
acucaggaaaguaugcaac

SEQ ID NO: 1844697 - RNA, 19 nt, Artificial Sequence
  Description of Artificial Sequence: Synthetic oligonucleotide
  Sense strand starting at position 2292 of SEQ ID NO: 1563960
gcauacuuuccugagugca

SEQ ID NO: 1844698 - RNA, 19 nt, Artificial Sequence
  Description of Artificial Sequence: Synthetic oligonucleotide
  Antisense strand to SEQ ID NO: 1844697
ugcacucaggaaaguaugc

SEQ ID NO: 1844699 - RNA, 19 nt, Artificial Sequence
  Description of Artificial Sequence: Synthetic oligonucleotide
  Sense strand starting at position 2294 of SEQ ID NO: 1563960
auacuuuccugagugcauu

SEQ ID NO: 1844700 - RNA, 19 nt, Artificial Sequence
  Description of Artificial Sequence: Synthetic oligonucleotide
  Antisense strand to SEQ ID NO: 1844699
aaugcacucaggaaaguau

SEQ ID NO: 1844701 - RNA, 19 nt, Artificial Sequence
  Description of Artificial Sequence: Synthetic oligonucleotide
  Sense strand starting at position 2300 of SEQ ID NO: 1563960
uccugagugcauuggaaag

SEQ ID NO: 1844702 - RNA, 19 nt, Artificial Sequence
  Description of Artificial Sequence: Synthetic oligonucleotide
  Antisense strand to SEQ ID NO: 1844701
cuuuccaaugcacucagga

SEQ ID NO: 1844703 - RNA, 19 nt, Artificial Sequence
  Description of Artificial Sequence: Synthetic oligonucleotide
  Sense strand starting at position 2317 of SEQ ID NO: 1563960
agucaaaguuuacaaaugu

SEQ ID NO: 1844704 - RNA, 19 nt, Artificial Sequence
  Description of Artificial Sequence: Synthetic oligonucleotide
  Antisense strand to SEQ ID NO: 1844703
acauuuguaaacuuugacu

SEQ ID NO: 1844705 - RNA, 19 nt, Artificial Sequence
  Description of Artificial Sequence: Synthetic oligonucleotide
  Sense strand starting at position 2565 of SEQ ID NO: 1563960
uugagcugccgcgagaauu

SEQ ID NO: 1844706 - RNA, 19 nt, Artificial Sequence
  Description of Artificial Sequence: Synthetic oligonucleotide
  Antisense strand to SEQ ID NO: 1844705
aauucucgcggcagcucaa

SEQ ID NO: 1844707 - RNA, 19 nt, Artificial Sequence
  Description of Artificial Sequence: Synthetic oligonucleotide
  Sense strand starting at position 2734 of SEQ ID NO: 1563960
aggaaacagugccaucaga

SEQ ID NO: 1844708 - RNA, 19 nt, Artificial Sequence
  Description of Artificial Sequence: Synthetic oligonucleotide
  Antisense strand to SEQ ID NO: 1844707
ucugauggcacuguuuccu

SEQ ID NO: 1844709 - RNA, 19 nt, Artificial Sequence
  Description of Artificial Sequence: Synthetic oligonucleotide
  Sense strand starting at position 2850 of SEQ ID NO: 1563960
ugauaucuagcaugcgcaa

SEQ ID NO: 1844710 - RNA, 19 nt, Artificial Sequence
  Description of Artificial Sequence: Synthetic oligonucleotide
  Antisense strand to SEQ ID NO: 1844709
uugcgcaugcuagauauca

SEQ ID NO: 1844711 - RNA, 19 nt, Artificial Sequence
  Description of Artificial Sequence: Synthetic oligonucleotide
  Sense strand starting at position 2880 of SEQ ID NO: 1563960
agaggcuccuuccacaauu

SEQ ID NO: 1844712 - RNA, 19 nt, Artificial Sequence
  Description of Artificial Sequence: Synthetic oligonucleotide
  Antisense strand to SEQ ID NO: 1844711
aauuguggaaggagccucu

SEQ ID NO: 1844713 - RNA, 19 nt, Artificial Sequence
  Description of Artificial Sequence: Synthetic oligonucleotide
  Sense strand starting at position 3069 of SEQ ID NO: 1563960
uagugucuauuagacugua

SEQ ID NO: 1844714 - RNA, 19 nt, Artificial Sequence
  Description of Artificial Sequence: Synthetic oligonucleotide
  Antisense strand to SEQ ID NO: 1844713
uacagucuaauagacacua

SEQ ID NO: 1844715 - RNA, 19 nt, Artificial Sequence
  Description of Artificial Sequence: Synthetic oligonucleotide
  Sense strand starting at position 3072 of SEQ ID NO: 1563960
ugucuauuagacuguagag

SEQ ID NO: 1844716 - RNA, 19 nt, Artificial Sequence
  Description of Artificial Sequence: Synthetic oligonucleotide
  Antisense strand to SEQ ID NO: 1844715
cucuacagucuaauagaca

SEQ ID NO: 1844717 - RNA, 19 nt, Artificial Sequence
  Description of Artificial Sequence: Synthetic oligonucleotide
  Sense strand starting at position 3160 of SEQ ID NO: 1563960
uuucuaguguucuugguua

SEQ ID NO: 1844718 - RNA, 19 nt, Artificial Sequence
  Description of Artificial Sequence: Synthetic oligonucleotide
  Antisense strand to SEQ ID NO: 1844717
uaaccaagaacacuagaaa

SEQ ID NO: 1844719 - RNA, 19 nt, Artificial Sequence
  Description of Artificial Sequence: Synthetic oligonucleotide
  Sense strand starting at position 3162 of SEQ ID NO: 1563960
ucuaguguucuugguuaac

SEQ ID NO: 1844720 - RNA, 19 nt, Artificial Sequence
  Description of Artificial Sequence: Synthetic oligonucleotide
  Antisense strand to SEQ ID NO: 1844719
guuaaccaagaacacuaga

SEQ ID NO: 1844721 - RNA, 19 nt, Artificial Sequence
  Description of Artificial Sequence: Synthetic oligonucleotide
  Sense strand starting at position 3164 of SEQ ID NO: 1563960
uaguguucuugguuaacua

SEQ ID NO: 1844722 - RNA, 19 nt, Artificial Sequence
  Description of Artificial Sequence: Synthetic oligonucleotide
  Antisense strand to SEQ ID NO: 1844721
uaguuaaccaagaacacua

SEQ ID NO: 1844723 - RNA, 19 nt, Artificial Sequence
  Description of Artificial Sequence: Synthetic oligonucleotide
  Sense strand starting at position 3165 of SEQ ID NO: 1563960
aguguucuugguuaacuaa

SEQ ID NO: 1844724 - RNA, 19 nt, Artificial Sequence
  Description of Artificial Sequence: Synthetic oligonucleotide
  Antisense strand to SEQ ID NO: 1844723
uuaguuaaccaagaacacu

SEQ ID NO: 1844725 - RNA, 19 nt, Artificial Sequence
  Description of Artificial Sequence: Synthetic oligonucleotide
  Sense strand starting at position 3272 of SEQ ID NO: 1563960
uguggaaacacuugugaac

SEQ ID NO: 1844726 - RNA, 19 nt, Artificial Sequence
  Description of Artificial Sequence: Synthetic oligonucleotide
  Antisense strand to SEQ ID NO: 1844725
guucacaaguguuuccaca

SEQ ID NO: 1844727 - RNA, 19 nt, Artificial Sequence
  Description of Artificial Sequence: Synthetic oligonucleotide
  Sense strand starting at position 3283 of SEQ ID NO: 1563960
uugugaacaucugccuagu

SEQ ID NO: 1844728 - RNA, 19 nt, Artificial Sequence
  Description of Artificial Sequence: Synthetic oligonucleotide
  Antisense strand to SEQ ID NO: 1844727
acuaggcagauguucacaa

SEQ ID NO: 1844729 - RNA, 19 nt, Artificial Sequence
  Description of Artificial Sequence: Synthetic oligonucleotide
  Sense strand starting at position 3285 of SEQ ID NO: 1563960
gugaacaucugccuaguuu

SEQ ID NO: 1844730 - RNA, 19 nt, Artificial Sequence
  Description of Artificial Sequence: Synthetic oligonucleotide
  Antisense strand to SEQ ID NO: 1844729
aaacuaggcagauguucac

SEQ ID NO: 1844731 - RNA, 19 nt, Artificial Sequence
  Description of Artificial Sequence: Synthetic oligonucleotide
  Sense strand starting at position 3286 of SEQ ID NO: 1563960
ugaacaucugccuaguuua

SEQ ID NO: 1844732 - RNA, 19 nt, Artificial Sequence
  Description of Artificial Sequence: Synthetic oligonucleotide
  Antisense strand to SEQ ID NO: 1844731
uaaacuaggcagauguuca

SEQ ID NO: 1844733 - RNA, 19 nt, Artificial Sequence
  Description of Artificial Sequence: Synthetic oligonucleotide
  Sense strand starting at position 3347 of SEQ ID NO: 1563960
cguaauuaacaauggguua

SEQ ID NO: 1844734 - RNA, 19 nt, Artificial Sequence
  Description of Artificial Sequence: Synthetic oligonucleotide
  Antisense strand to SEQ ID NO: 1844733
uaacccauuguuaauuacg

SEQ ID NO: 1844735 - RNA, 19 nt, Artificial Sequence
  Description of Artificial Sequence: Synthetic oligonucleotide
  Sense strand starting at position 3360 of SEQ ID NO: 1563960
ggguuagaauucuagucug

SEQ ID NO: 1844736 - RNA, 19 nt, Artificial Sequence
  Description of Artificial Sequence: Synthetic oligonucleotide
  Antisense strand to SEQ ID NO: 1844735
cagacuagaauucuaaccc

SEQ ID NO: 1844737 - RNA, 19 nt, Artificial Sequence
  Description of Artificial Sequence: Synthetic oligonucleotide
  Sense strand starting at position 3363 of SEQ ID NO: 1563960
uuagaauucuagucuguuu

SEQ ID NO: 1844738 - RNA, 19 nt, Artificial Sequence
  Description of Artificial Sequence: Synthetic oligonucleotide
  Antisense strand to SEQ ID NO: 1844737
aaacagacuagaauucuaa

SEQ ID NO: 1844739 - RNA, 19 nt, Artificial Sequence
  Description of Artificial Sequence: Synthetic oligonucleotide
  Sense strand starting at position 3499 of SEQ ID NO: 1563960
acuaaauguuguccauauu

SEQ ID NO: 1844740 - RNA, 19 nt, Artificial Sequence
  Description of Artificial Sequence: Synthetic oligonucleotide
  Antisense strand to SEQ ID NO: 1844739
aauauggacaacauuuagu

SEQ ID NO: 1844741 - RNA, 19 nt, Artificial Sequence
  Description of Artificial Sequence: Synthetic oligonucleotide
  Sense strand starting at position 3500 of SEQ ID NO: 1563960
cuaaauguuguccauauuc

SEQ ID NO: 1844742 - RNA, 19 nt, Artificial Sequence
  Description of Artificial Sequence: Synthetic oligonucleotide
  Antisense strand to SEQ ID NO: 1844741
gaauauggacaacauuuag

SEQ ID NO: 1844743 - RNA, 19 nt, Artificial Sequence
  Description of Artificial Sequence: Synthetic oligonucleotide
  Sense strand starting at position 3703 of SEQ ID NO: 1563960
uuaaucuuuguuugcagau

SEQ ID NO: 1844744 - RNA, 19 nt, Artificial Sequence
  Description of Artificial Sequence: Synthetic oligonucleotide
  Antisense strand to SEQ ID NO: 1844743
aucugcaaacaaagauuaa

SEQ ID NO: 1844745 - RNA, 19 nt, Artificial Sequence
  Description of Artificial Sequence: Synthetic oligonucleotide
  Sense strand starting at position 3704 of SEQ ID NO: 1563960
uaaucuuuguuugcagaug

SEQ ID NO: 1844746 - RNA, 19 nt, Artificial Sequence
  Description of Artificial Sequence: Synthetic oligonucleotide
  Antisense strand to SEQ ID NO: 1844745
caucugcaaacaaagauua

SEQ ID NO: 1844747 - RNA, 19 nt, Artificial Sequence
  Description of Artificial Sequence: Synthetic oligonucleotide
  Sense strand starting at position 3722 of SEQ ID NO: 1563960
ggcauaaucuuaucuguag

SEQ ID NO: 1844748 - RNA, 19 nt, Artificial Sequence
  Description of Artificial Sequence: Synthetic oligonucleotide
  Antisense strand to SEQ ID NO: 1844747
cuacagauaagauuaugcc

SEQ ID NO: 1844749 - RNA, 19 nt, Artificial Sequence
  Description of Artificial Sequence: Synthetic oligonucleotide
  Sense strand starting at position 3723 of SEQ ID NO: 1563960
gcauaaucuuaucuguaga

SEQ ID NO: 1844750 - RNA, 19 nt, Artificial Sequence
  Description of Artificial Sequence: Synthetic oligonucleotide
  Antisense strand to SEQ ID NO: 1844749
ucuacagauaagauuaugc

SEQ ID NO: 1844751 - RNA, 19 nt, Artificial Sequence
  Description of Artificial Sequence: Synthetic oligonucleotide
  Sense strand starting at position 3892 of SEQ ID NO: 1563960
aaagcaaucugagaacgaa

SEQ ID NO: 1844752 - RNA, 19 nt, Artificial Sequence
  Description of Artificial Sequence: Synthetic oligonucleotide
  Antisense strand to SEQ ID NO: 1844751
uucguucucagauugcuuu

SEQ ID NO: 1844753 - RNA, 19 nt, Artificial Sequence
  Description of Artificial Sequence: Synthetic oligonucleotide
  Sense strand starting at position 3 of SEQ ID NO: 1563961
guuccugguaugugacaau

SEQ ID NO: 1844754 - RNA, 19 nt, Artificial Sequence
  Description of Artificial Sequence: Synthetic oligonucleotide
  Antisense strand to SEQ ID NO: 1844753
auugucacauaccaggaac

SEQ ID NO: 1844755 - RNA, 19 nt, Artificial Sequence
  Description of Artificial Sequence: Synthetic oligonucleotide
  Sense strand starting at position 150 of SEQ ID NO: 1563961
guagaauccugacuuugag

SEQ ID NO: 1844756 - RNA, 19 nt, Artificial Sequence
  Description of Artificial Sequence: Synthetic oligonucleotide
  Antisense strand to SEQ ID NO: 1844755
cucaaagucaggauucuac

SEQ ID NO: 1844757 - RNA, 19 nt, Artificial Sequence
  Description of Artificial Sequence: Synthetic oligonucleotide
  Sense strand starting at position 158 of SEQ ID NO: 1563961
cugacuuugaguuggugau

SEQ ID NO: 1844758 - RNA, 19 nt, Artificial Sequence
  Description of Artificial Sequence: Synthetic oligonucleotide
  Antisense strand to SEQ ID NO: 1844757
aucaccaacucaaagucag

SEQ ID NO: 1844759 - RNA, 19 nt, Artificial Sequence
  Description of Artificial Sequence: Synthetic oligonucleotide
  Sense strand starting at position 159 of SEQ ID NO: 1563961
ugacuuugaguuggugauu

SEQ ID NO: 1844760 - RNA, 19 nt, Artificial Sequence
  Description of Artificial Sequence: Synthetic oligonucleotide
  Antisense strand to SEQ ID NO: 1844759
aaucaccaacucaaaguca

SEQ ID NO: 1844761 - RNA, 19 nt, Artificial Sequence
  Description of Artificial Sequence: Synthetic oligonucleotide
  Sense strand starting at position 162 of SEQ ID NO: 1563961
cuuugaguuggugauucca

SEQ ID NO: 1844762 - RNA, 19 nt, Artificial Sequence
  Description of Artificial Sequence: Synthetic oligonucleotide
  Antisense strand to SEQ ID NO: 1844761
uggaaucaccaacucaaag

SEQ ID NO: 1844763 - RNA, 19 nt, Artificial Sequence
  Description of Artificial Sequence: Synthetic oligonucleotide
  Sense strand starting at position 164 of SEQ ID NO: 1563961
uugaguuggugauuccacu

SEQ ID NO: 1844764 - RNA, 19 nt, Artificial Sequence
  Description of Artificial Sequence: Synthetic oligonucleotide
  Antisense strand to SEQ ID NO: 1844763
aguggaaucaccaacucaa

SEQ ID NO: 1844765 - RNA, 19 nt, Artificial Sequence
  Description of Artificial Sequence: Synthetic oligonucleotide
  Sense strand starting at position 206 of SEQ ID NO: 1563961
cuccuugugguagggaaua

SEQ ID NO: 1844766 - RNA, 19 nt, Artificial Sequence
  Description of Artificial Sequence: Synthetic oligonucleotide
  Antisense strand to SEQ ID NO: 1844765
uauucccuaccacaaggag

SEQ ID NO: 1844767 - RNA, 19 nt, Artificial Sequence
  Description of Artificial Sequence: Synthetic oligonucleotide
  Sense strand starting at position 300 of SEQ ID NO: 1563961
augcauagauguuucugau

SEQ ID NO: 1844768 - RNA, 19 nt, Artificial Sequence
  Description of Artificial Sequence: Synthetic oligonucleotide
  Antisense strand to SEQ ID NO: 1844767
aucagaaacaucuaugcau

SEQ ID NO: 1844769 - RNA, 19 nt, Artificial Sequence
  Description of Artificial Sequence: Synthetic oligonucleotide
  Sense strand starting at position 306 of SEQ ID NO: 1563961
agauguuucugaucauaac

SEQ ID NO: 1844770 - RNA, 19 nt, Artificial Sequence
  Description of Artificial Sequence: Synthetic oligonucleotide
  Antisense strand to SEQ ID NO: 1844769
guuaugaucagaaacaucu

SEQ ID NO: 1844771 - RNA, 19 nt, Artificial Sequence
  Description of Artificial Sequence: Synthetic oligonucleotide
  Sense strand starting at position 361 of SEQ ID NO: 1563961
gguuaauaaggcuacucua

SEQ ID NO: 1844772 - RNA, 19 nt, Artificial Sequence
  Description of Artificial Sequence: Synthetic oligonucleotide
  Antisense strand to SEQ ID NO: 1844771
uagaguagccuuauuaacc

SEQ ID NO: 1844773 - RNA, 19 nt, Artificial Sequence
  Description of Artificial Sequence: Synthetic oligonucleotide
  Sense strand starting at position 431 of SEQ ID NO: 1563961
auugcacucuauguuggaa

SEQ ID NO: 1844774 - RNA, 19 nt, Artificial Sequence
  Description of Artificial Sequence: Synthetic oligonucleotide
  Antisense strand to SEQ ID NO: 1844773
uuccaacauagagugcaau

SEQ ID NO: 1844775 - RNA, 19 nt, Artificial Sequence
  Description of Artificial Sequence: Synthetic oligonucleotide
  Sense strand starting at position 444 of SEQ ID NO: 1563961
uuggaauagauguguauaa

SEQ ID NO: 1844776 - RNA, 19 nt, Artificial Sequence
  Description of Artificial Sequence: Synthetic oligonucleotide
  Antisense strand to SEQ ID NO: 1844775
uuauacacaucuauuccaa

SEQ ID NO: 1844777 - RNA, 19 nt, Artificial Sequence
  Description of Artificial Sequence: Synthetic oligonucleotide
  Sense strand starting at position 451 of SEQ ID NO: 1563961
agauguguauaaucuaugu

SEQ ID NO: 1844778 - RNA, 19 nt, Artificial Sequence
  Description of Artificial Sequence: Synthetic oligonucleotide
  Antisense strand to SEQ ID NO: 1844777
acauagauuauacacaucu

SEQ ID NO: 1844779 - RNA, 19 nt, Artificial Sequence
  Description of Artificial Sequence: Synthetic oligonucleotide
  Sense strand starting at position 453 of SEQ ID NO: 1563961
auguguauaaucuaugugu

SEQ ID NO: 1844780 - RNA, 19 nt, Artificial Sequence
  Description of Artificial Sequence: Synthetic oligonucleotide
  Antisense strand to SEQ ID NO: 1844779
acacauagauuauacacau

SEQ ID NO: 1844781 - RNA, 19 nt, Artificial Sequence
  Description of Artificial Sequence: Synthetic oligonucleotide
  Sense strand starting at position 456 of SEQ ID NO: 1563961
uguauaaucuaugugucau

SEQ ID NO: 1844782 - RNA, 19 nt, Artificial Sequence
  Description of Artificial Sequence: Synthetic oligonucleotide
  Antisense strand to SEQ ID NO: 1844781
augacacauagauuauaca

SEQ ID NO: 1844783 - RNA, 19 nt, Artificial Sequence
  Description of Artificial Sequence: Synthetic oligonucleotide
  Sense strand starting at position 492 of SEQ ID NO: 1563961
gaaagaagucauggccaaa

SEQ ID NO: 1844784 - RNA, 19 nt, Artificial Sequence
  Description of Artificial Sequence: Synthetic oligonucleotide
  Antisense strand to SEQ ID NO: 1844783
uuuggccaugacuucuuuc

SEQ ID NO: 1844785 - RNA, 19 nt, Artificial Sequence
  Description of Artificial Sequence: Synthetic oligonucleotide
  Sense strand starting at position 604 of SEQ ID NO: 1563961
ccuuuauuaguguaucuau

SEQ ID NO: 1844786 - RNA, 19 nt, Artificial Sequence
  Description of Artificial Sequence: Synthetic oligonucleotide
  Antisense strand to SEQ ID NO: 1844785
auagauacacuaauaaagg

SEQ ID NO: 1844787 - RNA, 19 nt, Artificial Sequence
  Description of Artificial Sequence: Synthetic oligonucleotide
  Sense strand starting at position 673 of SEQ ID NO: 1563961
ucgaauuaacguuaaagca

SEQ ID NO: 1844788 - RNA, 19 nt, Artificial Sequence
  Description of Artificial Sequence: Synthetic oligonucleotide
  Antisense strand to SEQ ID NO: 1844787
ugcuuuaacguuaauucga

SEQ ID NO: 1844789 - RNA, 19 nt, Artificial Sequence
  Description of Artificial Sequence: Synthetic oligonucleotide
  Sense strand starting at position 738 of SEQ ID NO: 1563961
uuggucuacgccgauagau

SEQ ID NO: 1844790 - RNA, 19 nt, Artificial Sequence
  Description of Artificial Sequence: Synthetic oligonucleotide
  Antisense strand to SEQ ID NO: 1844789
aucuaucggcguagaccaa

SEQ ID NO: 1844791 - RNA, 19 nt, Artificial Sequence
  Description of Artificial Sequence: Synthetic oligonucleotide
  Sense strand starting at position 740 of SEQ ID NO: 1563961
ggucuacgccgauagauua

SEQ ID NO: 1844792 - RNA, 19 nt, Artificial Sequence
  Description of Artificial Sequence: Synthetic oligonucleotide
  Antisense strand to SEQ ID NO: 1844791
uaaucuaucggcguagacc

SEQ ID NO: 1844793 - RNA, 19 nt, Artificial Sequence
  Description of Artificial Sequence: Synthetic oligonucleotide
  Sense strand starting at position 748 of SEQ ID NO: 1563961
ccgauagauuaaucuucuu

SEQ ID NO: 1844794 - RNA, 19 nt, Artificial Sequence
  Description of Artificial Sequence: Synthetic oligonucleotide
  Antisense strand to SEQ ID NO: 1844793
aagaagauuaaucuaucgg

SEQ ID NO: 1844795 - RNA, 19 nt, Artificial Sequence
  Description of Artificial Sequence: Synthetic oligonucleotide
  Sense strand starting at position 839 of SEQ ID NO: 1563961
cgaucacuuccauggcuaa

SEQ ID NO: 1844796 - RNA, 19 nt, Artificial Sequence
  Description of Artificial Sequence: Synthetic oligonucleotide
  Antisense strand to SEQ ID NO: 1844795
uuagccauggaagugaucg

SEQ ID NO: 1844797 - RNA, 19 nt, Artificial Sequence
  Description of Artificial Sequence: Synthetic oligonucleotide
  Sense strand starting at position 853 of SEQ ID NO: 1563961
gcuaaauguuaacuuguca

SEQ ID NO: 1844798 - RNA, 19 nt, Artificial Sequence
  Description of Artificial Sequence: Synthetic oligonucleotide
  Antisense strand to SEQ ID NO: 1844797
ugacaaguuaacauuuagc

SEQ ID NO: 1844799 - RNA, 19 nt, Artificial Sequence
  Description of Artificial Sequence: Synthetic oligonucleotide
  Sense strand starting at position 982 of SEQ ID NO: 1563961
ucuuaaggcauguggcaaa

SEQ ID NO: 1844800 - RNA, 19 nt, Artificial Sequence
  Description of Artificial Sequence: Synthetic oligonucleotide
  Antisense strand to SEQ ID NO: 1844799
uuugccacaugccuuaaga

SEQ ID NO: 1844801 - RNA, 19 nt, Artificial Sequence
  Description of Artificial Sequence: Synthetic oligonucleotide
  Sense strand starting at position 1182 of SEQ ID NO: 1563961
gacguuucugaugagguuu

SEQ ID NO: 1844802 - RNA, 19 nt, Artificial Sequence
  Description of Artificial Sequence: Synthetic oligonucleotide
  Antisense strand to SEQ ID NO: 1844801
aaaccucaucagaaacguc

SEQ ID NO: 1844803 - RNA, 19 nt, Artificial Sequence
  Description of Artificial Sequence: Synthetic oligonucleotide
  Sense strand starting at position 1902 of SEQ ID NO: 1563961
gcggaucuaccagaugagu

SEQ ID NO: 1844804 - RNA, 19 nt, Artificial Sequence
  Description of Artificial Sequence: Synthetic oligonucleotide
  Antisense strand to SEQ ID NO: 1844803
acucaucugguagauccgc

SEQ ID NO: 1844805 - RNA, 19 nt, Artificial Sequence
  Description of Artificial Sequence: Synthetic oligonucleotide
  Sense strand starting at position 1904 of SEQ ID NO: 1563961
ggaucuaccagaugagucu

SEQ ID NO: 1844806 - RNA, 19 nt, Artificial Sequence
  Description of Artificial Sequence: Synthetic oligonucleotide
  Antisense strand to SEQ ID NO: 1844805
agacucaucugguagaucc

SEQ ID NO: 1844807 - RNA, 19 nt, Artificial Sequence
  Description of Artificial Sequence: Synthetic oligonucleotide
  Sense strand starting at position 1913 of SEQ ID NO: 1563961
agaugagucucaguagagg

SEQ ID NO: 1844808 - RNA, 19 nt, Artificial Sequence
  Description of Artificial Sequence: Synthetic oligonucleotide
  Antisense strand to SEQ ID NO: 1844807
ccucuacugagacucaucu

SEQ ID NO: 1844809 - RNA, 19 nt, Artificial Sequence
  Description of Artificial Sequence: Synthetic oligonucleotide
  Sense strand starting at position 2153 of SEQ ID NO: 1563961
ugccucggguacucaaaua

SEQ ID NO: 1844810 - RNA, 19 nt, Artificial Sequence
  Description of Artificial Sequence: Synthetic oligonucleotide
  Antisense strand to SEQ ID NO: 1844809
uauuugaguacccgaggca

SEQ ID NO: 1844811 - RNA, 19 nt, Artificial Sequence
  Description of Artificial Sequence: Synthetic oligonucleotide
  Sense strand starting at position 2457 of SEQ ID NO: 1563961
agcagacaucacugcuaag

SEQ ID NO: 1844812 - RNA, 19 nt, Artificial Sequence
  Description of Artificial Sequence: Synthetic oligonucleotide
  Antisense strand to SEQ ID NO: 1844811
cuuagcagugaugucugcu

SEQ ID NO: 1844813 - RNA, 19 nt, Artificial Sequence
  Description of Artificial Sequence: Synthetic oligonucleotide
  Sense strand starting at position 3026 of SEQ ID NO: 1563961
aauagaaauuguucugugu

SEQ ID NO: 1844814 - RNA, 19 nt, Artificial Sequence
  Description of Artificial Sequence: Synthetic oligonucleotide
  Antisense strand to SEQ ID NO: 1844813
acacagaacaauuucuauu

SEQ ID NO: 1844815 - RNA, 19 nt, Artificial Sequence
  Description of Artificial Sequence: Synthetic oligonucleotide
  Sense strand starting at position 3045 of SEQ ID NO: 1563961
ggccaagagcagugacuua

SEQ ID NO: 1844816 - RNA, 19 nt, Artificial Sequence
  Description of Artificial Sequence: Synthetic oligonucleotide
  Antisense strand to SEQ ID NO: 1844815
uaagucacugcucuuggcc

SEQ ID NO: 1844817 - RNA, 19 nt, Artificial Sequence
  Description of Artificial Sequence: Synthetic oligonucleotide
  Sense strand starting at position 3103 of SEQ ID NO: 1563961
gauagauggcuugaggcua

SEQ ID NO: 1844818 - RNA, 19 nt, Artificial Sequence
  Description of Artificial Sequence: Synthetic oligonucleotide
  Antisense strand to SEQ ID NO: 1844817
uagccucaagccaucuauc

SEQ ID NO: 1844819 - RNA, 19 nt, Artificial Sequence
  Description of Artificial Sequence: Synthetic oligonucleotide
  Sense strand starting at position 3355 of SEQ ID NO: 1563961
agugucucauaaccugaua

SEQ ID NO: 1844820 - RNA, 19 nt, Artificial Sequence
  Description of Artificial Sequence: Synthetic oligonucleotide
  Antisense strand to SEQ ID NO: 1844819
uaucagguuaugagacacu

SEQ ID NO: 1844821 - RNA, 19 nt, Artificial Sequence
  Description of Artificial Sequence: Synthetic oligonucleotide
  Sense strand starting at position 3412 of SEQ ID NO: 1563961
uacgaagaagcaugaaagu

SEQ ID NO: 1844822 - RNA, 19 nt, Artificial Sequence
  Description of Artificial Sequence: Synthetic oligonucleotide
  Antisense strand to SEQ ID NO: 1844821
acuuucaugcuucuucgua

SEQ ID NO: 1844823 - RNA, 19 nt, Artificial Sequence
  Description of Artificial Sequence: Synthetic oligonucleotide
  Sense strand starting at position 3422 of SEQ ID NO: 1563961
caugaaaguuaggcaucuu

SEQ ID NO: 1844824 - RNA, 19 nt, Artificial Sequence
  Description of Artificial Sequence: Synthetic oligonucleotide
  Antisense strand to SEQ ID NO: 1844823
aagaugccuaacuuucaug

SEQ ID NO: 1844825 - RNA, 19 nt, Artificial Sequence
  Description of Artificial Sequence: Synthetic oligonucleotide
  Sense strand starting at position 3729 of SEQ ID NO: 1563961
aaaggaaguuauggaauuu

SEQ ID NO: 1844826 - RNA, 19 nt, Artificial Sequence
  Description of Artificial Sequence: Synthetic oligonucleotide
  Antisense strand to SEQ ID NO: 1844825
aaauuccauaacuuccuuu

SEQ ID NO: 1844827 - RNA, 19 nt, Artificial Sequence
  Description of Artificial Sequence: Synthetic oligonucleotide
  Sense strand starting at position 3793 of SEQ ID NO: 1563961
uguugagauuaucugggaa

SEQ ID NO: 1844828 - RNA, 19 nt, Artificial Sequence
  Description of Artificial Sequence: Synthetic oligonucleotide
  Antisense strand to SEQ ID NO: 1844827
uucccagauaaucucaaca

SEQ ID NO: 1844829 - RNA, 19 nt, Artificial Sequence
  Description of Artificial Sequence: Synthetic oligonucleotide
  Sense strand starting at position 3796 of SEQ ID NO: 1563961
ugagauuaucugggaaagc

SEQ ID NO: 1844830 - RNA, 19 nt, Artificial Sequence
  Description of Artificial Sequence: Synthetic oligonucleotide
  Antisense strand to SEQ ID NO: 1844829
gcuuucccagauaaucuca

SEQ ID NO: 1844831 - RNA, 19 nt, Artificial Sequence
  Description of Artificial Sequence: Synthetic oligonucleotide
  Sense strand starting at position 3915 of SEQ ID NO: 1563961
auaguaagaguuuguuuag

SEQ ID NO: 1844832 - RNA, 19 nt, Artificial Sequence
  Description of Artificial Sequence: Synthetic oligonucleotide
  Antisense strand to SEQ ID NO: 1844831
cuaaacaaacucuuacuau

SEQ ID NO: 1844833 - RNA, 19 nt, Artificial Sequence
  Description of Artificial Sequence: Synthetic oligonucleotide
  Sense strand starting at position 265 of SEQ ID NO: 1563962
ccaucaaagugguaggaaa

SEQ ID NO: 1844834 - RNA, 19 nt, Artificial Sequence
  Description of Artificial Sequence: Synthetic oligonucleotide
  Antisense strand to SEQ ID NO: 1844833
uuuccuaccacuuugaugg

SEQ ID NO: 1844835 - RNA, 19 nt, Artificial Sequence
  Description of Artificial Sequence: Synthetic oligonucleotide
  Sense strand starting at position 876 of SEQ ID NO: 1563962
ccuguaucaguguauguau

SEQ ID NO: 1844836 - RNA, 19 nt, Artificial Sequence
  Description of Artificial Sequence: Synthetic oligonucleotide
  Antisense strand to SEQ ID NO: 1844835
auacauacacugauacagg

SEQ ID NO: 1844837 - RNA, 19 nt, Artificial Sequence
  Description of Artificial Sequence: Synthetic oligonucleotide
  Sense strand starting at position 879 of SEQ ID NO: 1563962
guaucaguguauguauacu

SEQ ID NO: 1844838 - RNA, 19 nt, Artificial Sequence
  Description of Artificial Sequence: Synthetic oligonucleotide
  Antisense strand to SEQ ID NO: 1844837
aguauacauacacugauac

SEQ ID NO: 1844839 - RNA, 19 nt, Artificial Sequence
  Description of Artificial Sequence: Synthetic oligonucleotide
  Sense strand starting at position 885 of SEQ ID NO: 1563962
guguauguauacuagcuca

SEQ ID NO: 1844840 - RNA, 19 nt, Artificial Sequence
  Description of Artificial Sequence: Synthetic oligonucleotide
  Antisense strand to SEQ ID NO: 1844839
ugagcuaguauacauacac

SEQ ID NO: 1844841 - RNA, 19 nt, Artificial Sequence
  Description of Artificial Sequence: Synthetic oligonucleotide
  Sense strand starting at position 1107 of SEQ ID NO: 1563962
augaacauuccacggcaaa

SEQ ID NO: 1844842 - RNA, 19 nt, Artificial Sequence
  Description of Artificial Sequence: Synthetic oligonucleotide
  Antisense strand to SEQ ID NO: 1844841
uuugccguggaauguucau

SEQ ID NO: 1844843 - RNA, 19 nt, Artificial Sequence
  Description of Artificial Sequence: Synthetic oligonucleotide
  Sense strand starting at position 1171 of SEQ ID NO: 1563962
gucacagagcaaugauaag

SEQ ID NO: 1844844 - RNA, 19 nt, Artificial Sequence
  Description of Artificial Sequence: Synthetic oligonucleotide
  Antisense strand to SEQ ID NO: 1844843
cuuaucauugcucugugac

SEQ ID NO: 1844845 - RNA, 19 nt, Artificial Sequence
  Description of Artificial Sequence: Synthetic oligonucleotide
  Sense strand starting at position 1177 of SEQ ID NO: 1563962
gagcaaugauaaguacaca

SEQ ID NO: 1844846 - RNA, 19 nt, Artificial Sequence
  Description of Artificial Sequence: Synthetic oligonucleotide
  Antisense strand to SEQ ID NO: 1844845
uguguacuuaucauugcuc

SEQ ID NO: 1844847 - RNA, 19 nt, Artificial Sequence
  Description of Artificial Sequence: Synthetic oligonucleotide
  Sense strand starting at position 1191 of SEQ ID NO: 1563962
acacaugcuuucgaaucaa

SEQ ID NO: 1844848 - RNA, 19 nt, Artificial Sequence
  Description of Artificial Sequence: Synthetic oligonucleotide
  Antisense strand to SEQ ID NO: 1844847
uugauucgaaagcaugugu

SEQ ID NO: 1844849 - RNA, 19 nt, Artificial Sequence
  Description of Artificial Sequence: Synthetic oligonucleotide
  Sense strand starting at position 1345 of SEQ ID NO: 1563962
cgggcagagaauugaaacu

SEQ ID NO: 1844850 - RNA, 19 nt, Artificial Sequence
  Description of Artificial Sequence: Synthetic oligonucleotide
  Antisense strand to SEQ ID NO: 1844849
aguuucaauucucugcccg

SEQ ID NO: 1844851 - RNA, 19 nt, Artificial Sequence
  Description of Artificial Sequence: Synthetic oligonucleotide
  Sense strand starting at position 1471 of SEQ ID NO: 1563962
cuaugauguccauggcgga

SEQ ID NO: 1844852 - RNA, 19 nt, Artificial Sequence
  Description of Artificial Sequence: Synthetic oligonucleotide
  Antisense strand to SEQ ID NO: 1844851
uccgccauggacaucauag

SEQ ID NO: 1844853 - RNA, 19 nt, Artificial Sequence
  Description of Artificial Sequence: Synthetic oligonucleotide
  Sense strand starting at position 1516 of SEQ ID NO: 1563962
cguuaugcuccucacagga

SEQ ID NO: 1844854 - RNA, 19 nt, Artificial Sequence
  Description of Artificial Sequence: Synthetic oligonucleotide
  Antisense strand to SEQ ID NO: 1844853
uccugugaggagcauaacg

SEQ ID NO: 1844855 - RNA, 19 nt, Artificial Sequence
  Description of Artificial Sequence: Synthetic oligonucleotide
  Sense strand starting at position 2138 of SEQ ID NO: 1563962
ggguauucgccucgugacu

SEQ ID NO: 1844856 - RNA, 19 nt, Artificial Sequence
  Description of Artificial Sequence: Synthetic oligonucleotide
  Antisense strand to SEQ ID NO: 1844855
agucacgaggcgaauaccc

SEQ ID NO: 1844857 - RNA, 19 nt, Artificial Sequence
  Description of Artificial Sequence: Synthetic oligonucleotide
  Sense strand starting at position 2140 of SEQ ID NO: 1563962
guauucgccucgugacuga

SEQ ID NO: 1844858 - RNA, 19 nt, Artificial Sequence
  Description of Artificial Sequence: Synthetic oligonucleotide
  Antisense strand to SEQ ID NO: 1844857
ucagucacgaggcgaauac

SEQ ID NO: 1844859 - RNA, 19 nt, Artificial Sequence
  Description of Artificial Sequence: Synthetic oligonucleotide
  Sense strand starting at position 2165 of SEQ ID NO: 1563962
ccugccucuguggaguaaa

SEQ ID NO: 1844860 - RNA, 19 nt, Artificial Sequence
  Description of Artificial Sequence: Synthetic oligonucleotide
  Antisense strand to SEQ ID NO: 1844859
uuuacuccacagaggcagg

SEQ ID NO: 1844861 - RNA, 19 nt, Artificial Sequence
  Description of Artificial Sequence: Synthetic oligonucleotide
  Sense strand starting at position 2274 of SEQ ID NO: 1563962
gaauaugagccucagguua

SEQ ID NO: 1844862 - RNA, 19 nt, Artificial Sequence
  Description of Artificial Sequence: Synthetic oligonucleotide
  Antisense strand to SEQ ID NO: 1844861
uaaccugaggcucauauuc

SEQ ID NO: 1844863 - RNA, 19 nt, Artificial Sequence
  Description of Artificial Sequence: Synthetic oligonucleotide
  Sense strand starting at position 2276 of SEQ ID NO: 1563962
auaugagccucagguuacu

SEQ ID NO: 1844864 - RNA, 19 nt, Artificial Sequence
  Description of Artificial Sequence: Synthetic oligonucleotide
  Antisense strand to SEQ ID NO: 1844863
aguaaccugaggcucauau

SEQ ID NO: 1844865 - RNA, 19 nt, Artificial Sequence
  Description of Artificial Sequence: Synthetic oligonucleotide
  Sense strand starting at position 2282 of SEQ ID NO: 1563962
gccucagguuacucuaaua

SEQ ID NO: 1844866 - RNA, 19 nt, Artificial Sequence
  Description of Artificial Sequence: Synthetic oligonucleotide
  Antisense strand to SEQ ID NO: 1844865
uauuagaguaaccugaggc

SEQ ID NO: 1844867 - RNA, 19 nt, Artificial Sequence
  Description of Artificial Sequence: Synthetic oligonucleotide
  Sense strand starting at position 2407 of SEQ ID NO: 1563962
cugucaugcuugcaauggu

SEQ ID NO: 1844868 - RNA, 19 nt, Artificial Sequence
  Description of Artificial Sequence: Synthetic oligonucleotide
  Antisense strand to SEQ ID NO: 1844867
accauugcaagcaugacag

SEQ ID NO: 1844869 - RNA, 19 nt, Artificial Sequence
  Description of Artificial Sequence: Synthetic oligonucleotide
  Sense strand starting at position 2423 of SEQ ID NO: 1563962
ggucucacccacugcaaua

SEQ ID NO: 1844870 - RNA, 19 nt, Artificial Sequence
  Description of Artificial Sequence: Synthetic oligonucleotide
  Antisense strand to SEQ ID NO: 1844869
uauugcagugggugagacc

SEQ ID NO: 1844871 - RNA, 19 nt, Artificial Sequence
  Description of Artificial Sequence: Synthetic oligonucleotide
  Sense strand starting at position 2565 of SEQ ID NO: 1563962
ugaaauggcucuuaucauc

SEQ ID NO: 1844872 - RNA, 19 nt, Artificial Sequence
  Description of Artificial Sequence: Synthetic oligonucleotide
  Antisense strand to SEQ ID NO: 1844871
gaugauaagagccauuuca

SEQ ID NO: 1844873 - RNA, 19 nt, Artificial Sequence
  Description of Artificial Sequence: Synthetic oligonucleotide
  Sense strand starting at position 2816 of SEQ ID NO: 1563962
uugagacacuaguuauuau

SEQ ID NO: 1844874 - RNA, 19 nt, Artificial Sequence
  Description of Artificial Sequence: Synthetic oligonucleotide
  Antisense strand to SEQ ID NO: 1844873
auaauaacuagugucucaa

SEQ ID NO: 1844875 - RNA, 19 nt, Artificial Sequence
  Description of Artificial Sequence: Synthetic oligonucleotide
  Sense strand starting at position 2942 of SEQ ID NO: 1563962
ccacacaaugauuguguua

SEQ ID NO: 1844876 - RNA, 19 nt, Artificial Sequence
  Description of Artificial Sequence: Synthetic oligonucleotide
  Antisense strand to SEQ ID NO: 1844875
uaacacaaucauugugugg

SEQ ID NO: 1844877 - RNA, 19 nt, Artificial Sequence
  Description of Artificial Sequence: Synthetic oligonucleotide
  Sense strand starting at position 2944 of SEQ ID NO: 1563962
acacaaugauuguguuauu

SEQ ID NO: 1844878 - RNA, 19 nt, Artificial Sequence
  Description of Artificial Sequence: Synthetic oligonucleotide
  Antisense strand to SEQ ID NO: 1844877
aauaacacaaucauugugu

SEQ ID NO: 1844879 - RNA, 19 nt, Artificial Sequence
  Description of Artificial Sequence: Synthetic oligonucleotide
  Sense strand starting at position 2949 of SEQ ID NO: 1563962
augauuguguuauuugcuu

SEQ ID NO: 1844880 - RNA, 19 nt, Artificial Sequence
  Description of Artificial Sequence: Synthetic oligonucleotide
  Antisense strand to SEQ ID NO: 1844879
aagcaaauaacacaaucau

SEQ ID NO: 1844881 - RNA, 19 nt, Artificial Sequence
  Description of Artificial Sequence: Synthetic oligonucleotide
  Sense strand starting at position 3201 of SEQ ID NO: 1563962
ccagaaguguuucuguaca

SEQ ID NO: 1844882 - RNA, 19 nt, Artificial Sequence
  Description of Artificial Sequence: Synthetic oligonucleotide
  Antisense strand to SEQ ID NO: 1844881
uguacagaaacacuucugg

SEQ ID NO: 1844883 - RNA, 19 nt, Artificial Sequence
  Description of Artificial Sequence: Synthetic oligonucleotide
  Sense strand starting at position 3438 of SEQ ID NO: 1563962
ggccuaauugaccaaagca

SEQ ID NO: 1844884 - RNA, 19 nt, Artificial Sequence
  Description of Artificial Sequence: Synthetic oligonucleotide
  Antisense strand to SEQ ID NO: 1844883
ugcuuuggucaauuaggcc

SEQ ID NO: 1844885 - RNA, 19 nt, Artificial Sequence
  Description of Artificial Sequence: Synthetic oligonucleotide
  Sense strand starting at position 190 of SEQ ID NO: 1563963
ccgucaaagugguaggaaa

SEQ ID NO: 1844886 - RNA, 19 nt, Artificial Sequence
  Description of Artificial Sequence: Synthetic oligonucleotide
  Antisense strand to SEQ ID NO: 1844885
uuuccuaccacuuugacgg

SEQ ID NO: 1844887 - RNA, 19 nt, Artificial Sequence
  Description of Artificial Sequence: Synthetic oligonucleotide
  Sense strand starting at position 845 of SEQ ID NO: 1563963
accuguaucagugcgugua

SEQ ID NO: 1844888 - RNA, 19 nt, Artificial Sequence
  Description of Artificial Sequence: Synthetic oligonucleotide
  Antisense strand to SEQ ID NO: 1844887
uacacgcacugauacaggu

SEQ ID NO: 1844889 - RNA, 19 nt, Artificial Sequence
  Description of Artificial Sequence: Synthetic oligonucleotide
  Sense strand starting at position 847 of SEQ ID NO: 1563963
cuguaucagugcguguaca

SEQ ID NO: 1844890 - RNA, 19 nt, Artificial Sequence
  Description of Artificial Sequence: Synthetic oligonucleotide
  Antisense strand to SEQ ID NO: 1844889
uguacacgcacugauacag

SEQ ID NO: 1844891 - RNA, 19 nt, Artificial Sequence
  Description of Artificial Sequence: Synthetic oligonucleotide
  Sense strand starting at position 849 of SEQ ID NO: 1563963
guaucagugcguguacacu

SEQ ID NO: 1844892 - RNA, 19 nt, Artificial Sequence
  Description of Artificial Sequence: Synthetic oligonucleotide
  Antisense strand to SEQ ID NO: 1844891
aguguacacgcacugauac

SEQ ID NO: 1844893 - RNA, 19 nt, Artificial Sequence
  Description of Artificial Sequence: Synthetic oligonucleotide
  Sense strand starting at position 894 of SEQ ID NO: 1563963
uuguguuaauaggaaacau

SEQ ID NO: 1844894 - RNA, 19 nt, Artificial Sequence
  Description of Artificial Sequence: Synthetic oligonucleotide
  Antisense strand to SEQ ID NO: 1844893
auguuuccuauuaacacaa

SEQ ID NO: 1844895 - RNA, 19 nt, Artificial Sequence
  Description of Artificial Sequence: Synthetic oligonucleotide
  Sense strand starting at position 1617 of SEQ ID NO: 1563963
cgaggagucuggaaacugu

SEQ ID NO: 1844896 - RNA, 19 nt, Artificial Sequence
  Description of Artificial Sequence: Synthetic oligonucleotide
  Antisense strand to SEQ ID NO: 1844895
acaguuuccagacuccucg

SEQ ID NO: 1844897 - RNA, 19 nt, Artificial Sequence
  Description of Artificial Sequence: Synthetic oligonucleotide
  Sense strand starting at position 2067 of SEQ ID NO: 1563963
gcaacagacaugcguaaca

SEQ ID NO: 1844898 - RNA, 19 nt, Artificial Sequence
  Description of Artificial Sequence: Synthetic oligonucleotide
  Antisense strand to SEQ ID NO: 1844897
uguuacgcaugucuguugc

SEQ ID NO: 1844899 - RNA, 19 nt, Artificial Sequence
  Description of Artificial Sequence: Synthetic oligonucleotide
  Sense strand starting at position 2119 of SEQ ID NO: 1563963
gcacacugacugggacauu

SEQ ID NO: 1844900 - RNA, 19 nt, Artificial Sequence
  Description of Artificial Sequence: Synthetic oligonucleotide
  Antisense strand to SEQ ID NO: 1844899
aaugucccagucagugugc

SEQ ID NO: 1844901 - RNA, 19 nt, Artificial Sequence
  Description of Artificial Sequence: Synthetic oligonucleotide
  Sense strand starting at position 2131 of SEQ ID NO: 1563963
ggacauucgccucgugacu

SEQ ID NO: 1844902 - RNA, 19 nt, Artificial Sequence
  Description of Artificial Sequence: Synthetic oligonucleotide
  Antisense strand to SEQ ID NO: 1844901
agucacgaggcgaaugucc

SEQ ID NO: 1844903 - RNA, 19 nt, Artificial Sequence
  Description of Artificial Sequence: Synthetic oligonucleotide
  Sense strand starting at position 2256 of SEQ ID NO: 1563963
uccaguggcuuuggagaau

SEQ ID NO: 1844904 - RNA, 19 nt, Artificial Sequence
  Description of Artificial Sequence: Synthetic oligonucleotide
  Antisense strand to SEQ ID NO: 1844903
auucuccaaagccacugga

SEQ ID NO: 1844905 - RNA, 19 nt, Artificial Sequence
  Description of Artificial Sequence: Synthetic oligonucleotide
  Sense strand starting at position 2402 of SEQ ID NO: 1563963
ugcugucaugcuugcaauu

SEQ ID NO: 1844906 - RNA, 19 nt, Artificial Sequence
  Description of Artificial Sequence: Synthetic oligonucleotide
  Antisense strand to SEQ ID NO: 1844905
aauugcaagcaugacagca

SEQ ID NO: 1844907 - RNA, 19 nt, Artificial Sequence
  Description of Artificial Sequence: Synthetic oligonucleotide
  Sense strand starting at position 2404 of SEQ ID NO: 1563963
cugucaugcuugcaauugu

SEQ ID NO: 1844908 - RNA, 19 nt, Artificial Sequence
  Description of Artificial Sequence: Synthetic oligonucleotide
  Antisense strand to SEQ ID NO: 1844907
acaauugcaagcaugacag

SEQ ID NO: 1844909 - RNA, 19 nt, Artificial Sequence
  Description of Artificial Sequence: Synthetic oligonucleotide
  Sense strand starting at position 2673 of SEQ ID NO: 1563963
auugcuguagcuuaaauua

SEQ ID NO: 1844910 - RNA, 19 nt, Artificial Sequence
  Description of Artificial Sequence: Synthetic oligonucleotide
  Antisense strand to SEQ ID NO: 1844909
uaauuuaagcuacagcaau

SEQ ID NO: 1844911 - RNA, 19 nt, Artificial Sequence
  Description of Artificial Sequence: Synthetic oligonucleotide
  Sense strand starting at position 2936 of SEQ ID NO: 1563963
ccacacaaugacuguguua

SEQ ID NO: 1844912 - RNA, 19 nt, Artificial Sequence
  Description of Artificial Sequence: Synthetic oligonucleotide
  Antisense strand to SEQ ID NO: 1844911
uaacacagucauugugugg

SEQ ID NO: 1844913 - RNA, 19 nt, Artificial Sequence
  Description of Artificial Sequence: Synthetic oligonucleotide
  Sense strand starting at position 2938 of SEQ ID NO: 1563963
acacaaugacuguguuauu

SEQ ID NO: 1844914 - RNA, 19 nt, Artificial Sequence
  Description of Artificial Sequence: Synthetic oligonucleotide
  Antisense strand to SEQ ID NO: 1844913
aauaacacagucauugugu

SEQ ID NO: 1844915 - RNA, 19 nt, Artificial Sequence
  Description of Artificial Sequence: Synthetic oligonucleotide
  Sense strand starting at position 3454 of SEQ ID NO: 1563963
cagugauguugcuauuaaa

SEQ ID NO: 1844916 - RNA, 19 nt, Artificial Sequence
  Description of Artificial Sequence: Synthetic oligonucleotide
  Antisense strand to SEQ ID NO: 1844915
uuuaauagcaacaucacug

SEQ ID NO: 1844917 - RNA, 19 nt, Artificial Sequence
  Description of Artificial Sequence: Synthetic oligonucleotide
  Sense strand starting at position 3457 of SEQ ID NO: 1563963
ugauguugcuauuaaacua

SEQ ID NO: 1844918 - RNA, 19 nt, Artificial Sequence
  Description of Artificial Sequence: Synthetic oligonucleotide
  Antisense strand to SEQ ID NO: 1844917
uaguuuaauagcaacauca

SEQ ID NO: 1844919 - RNA, 19 nt, Artificial Sequence
  Description of Artificial Sequence: Synthetic oligonucleotide
  Sense strand starting at position 3543 of SEQ ID NO: 1563963
cuggcaagauggcguaaua

SEQ ID NO: 1844920 - RNA, 19 nt, Artificial Sequence
  Description of Artificial Sequence: Synthetic oligonucleotide
  Antisense strand to SEQ ID NO: 1844919
uauuacgccaucuugccag

SEQ ID NO: 1844921 - RNA, 19 nt, Artificial Sequence
  Description of Artificial Sequence: Synthetic oligonucleotide
  Sense strand starting at position 3565 of SEQ ID NO: 1563963
aaagcuuuggucugcaacu

SEQ ID NO: 1844922 - RNA, 19 nt, Artificial Sequence
  Description of Artificial Sequence: Synthetic oligonucleotide
  Antisense strand to SEQ ID NO: 1844921
aguugcagaccaaagcuuu

SEQ ID NO: 1844923 - RNA, 19 nt, Artificial Sequence
  Description of Artificial Sequence: Synthetic oligonucleotide
  Sense strand starting at position 3606 of SEQ ID NO: 1563963
gcaagcacuuucugcauuu

SEQ ID NO: 1844924 - RNA, 19 nt, Artificial Sequence
  Description of Artificial Sequence: Synthetic oligonucleotide
  Antisense strand to SEQ ID NO: 1844923
aaaugcagaaagugcuugc

SEQ ID NO: 1844925 - RNA, 19 nt, Artificial Sequence
  Description of Artificial Sequence: Synthetic oligonucleotide
  Sense strand starting at position 3719 of SEQ ID NO: 1563963
ccgugaaguguaaggaguu

SEQ ID NO: 1844926 - RNA, 19 nt, Artificial Sequence
  Description of Artificial Sequence: Synthetic oligonucleotide
  Antisense strand to SEQ ID NO: 1844925
aacuccuuacacuucacgg

SEQ ID NO: 1844927 - RNA, 19 nt, Artificial Sequence
  Description of Artificial Sequence: Synthetic oligonucleotide
  Sense strand starting at position 3720 of SEQ ID NO: 1563963
cgugaaguguaaggaguua

SEQ ID NO: 1844928 - RNA, 19 nt, Artificial Sequence
  Description of Artificial Sequence: Synthetic oligonucleotide
  Antisense strand to SEQ ID NO: 1844927
uaacuccuuacacuucacg

SEQ ID NO: 1844929 - RNA, 19 nt, Artificial Sequence
  Description of Artificial Sequence: Synthetic oligonucleotide
  Sense strand starting at position 3890 of SEQ ID NO: 1563963
gggcaguuguucgggcaga

SEQ ID NO: 1844930 - RNA, 19 nt, Artificial Sequence
  Description of Artificial Sequence: Synthetic oligonucleotide
  Antisense strand to SEQ ID NO: 1844929
ucugcccgaacaacugccc

SEQ ID NO: 1844931 - RNA, 19 nt, Artificial Sequence
  Description of Artificial Sequence: Synthetic oligonucleotide
  Sense strand starting at position 148 of SEQ ID NO: 1563964
ugguuuauuuauuccuguu

SEQ ID NO: 1844932 - RNA, 19 nt, Artificial Sequence
  Description of Artificial Sequence: Synthetic oligonucleotide
  Antisense strand to SEQ ID NO: 1844931
aacaggaauaaauaaacca

SEQ ID NO: 1844933 - RNA, 19 nt, Artificial Sequence
  Description of Artificial Sequence: Synthetic oligonucleotide
  Sense strand starting at position 394 of SEQ ID NO: 1563964
gaagguagcuagucacaaa

SEQ ID NO: 1844934 - RNA, 19 nt, Artificial Sequence
  Description of Artificial Sequence: Synthetic oligonucleotide
  Antisense strand to SEQ ID NO: 1844933
uuugugacuagcuaccuuc

SEQ ID NO: 1844935 - RNA, 19 nt, Artificial Sequence
  Description of Artificial Sequence: Synthetic oligonucleotide
  Sense strand starting at position 431 of SEQ ID NO: 1563964
uccuaucuucucuguaagu

SEQ ID NO: 1844936 - RNA, 19 nt, Artificial Sequence
  Description of Artificial Sequence: Synthetic oligonucleotide
  Antisense strand to SEQ ID NO: 1844935
acuuacagagaagauagga

SEQ ID NO: 1844937 - RNA, 19 nt, Artificial Sequence
  Description of Artificial Sequence: Synthetic oligonucleotide
  Sense strand starting at position 432 of SEQ ID NO: 1563964
ccuaucuucucuguaagua

SEQ ID NO: 1844938 - RNA, 19 nt, Artificial Sequence
  Description of Artificial Sequence: Synthetic oligonucleotide
  Antisense strand to SEQ ID NO: 1844937
uacuuacagagaagauagg

SEQ ID NO: 1844939 - RNA, 19 nt, Artificial Sequence
  Description of Artificial Sequence: Synthetic oligonucleotide
  Sense strand starting at position 440 of SEQ ID NO: 1563964
cucuguaaguacucuuaag

SEQ ID NO: 1844940 - RNA, 19 nt, Artificial Sequence
  Description of Artificial Sequence: Synthetic oligonucleotide
  Antisense strand to SEQ ID NO: 1844939
cuuaagaguacuuacagag

SEQ ID NO: 1844941 - RNA, 19 nt, Artificial Sequence
  Description of Artificial Sequence: Synthetic oligonucleotide
  Sense strand starting at position 537 of SEQ ID NO: 1563964
uucucugggcuguauuauu

SEQ ID NO: 1844942 - RNA, 19 nt, Artificial Sequence
  Description of Artificial Sequence: Synthetic oligonucleotide
  Antisense strand to SEQ ID NO: 1844941
aauaauacagcccagagaa

SEQ ID NO: 1844943 - RNA, 19 nt, Artificial Sequence
  Description of Artificial Sequence: Synthetic oligonucleotide
  Sense strand starting at position 570 of SEQ ID NO: 1563964
auaggaaagucauaagacu

SEQ ID NO: 1844944 - RNA, 19 nt, Artificial Sequence
  Description of Artificial Sequence: Synthetic oligonucleotide
  Antisense strand to SEQ ID NO: 1844943
agucuuaugacuuuccuau

SEQ ID NO: 1844945 - RNA, 19 nt, Artificial Sequence
  Description of Artificial Sequence: Synthetic oligonucleotide
  Sense strand starting at position 647 of SEQ ID NO: 1563964
cucaaugucucauuaaugu

SEQ ID NO: 1844946 - RNA, 19 nt, Artificial Sequence
  Description of Artificial Sequence: Synthetic oligonucleotide
  Antisense strand to SEQ ID NO: 1844945
acauuaaugagacauugag

SEQ ID NO: 1844947 - RNA, 19 nt, Artificial Sequence
  Description of Artificial Sequence: Synthetic oligonucleotide
  Sense strand starting at position 654 of SEQ ID NO: 1563964
ucucauuaaugugauuuag

SEQ ID NO: 1844948 - RNA, 19 nt, Artificial Sequence
  Description of Artificial Sequence: Synthetic oligonucleotide
  Antisense strand to SEQ ID NO: 1844947
cuaaaucacauuaaugaga

SEQ ID NO: 1844949 - RNA, 19 nt, Artificial Sequence
  Description of Artificial Sequence: Synthetic oligonucleotide
  Sense strand starting at position 660 of SEQ ID NO: 1563964
uaaugugauuuaguuugca

SEQ ID NO: 1844950 - RNA, 19 nt, Artificial Sequence
  Description of Artificial Sequence: Synthetic oligonucleotide
  Antisense strand to SEQ ID NO: 1844949
ugcaaacuaaaucacauua

SEQ ID NO: 1844951 - RNA, 19 nt, Artificial Sequence
  Description of Artificial Sequence: Synthetic oligonucleotide
  Sense strand starting at position 663 of SEQ ID NO: 1563964
ugugauuuaguuugcaacu

SEQ ID NO: 1844952 - RNA, 19 nt, Artificial Sequence
  Description of Artificial Sequence: Synthetic oligonucleotide
  Antisense strand to SEQ ID NO: 1844951
aguugcaaacuaaaucaca

SEQ ID NO: 1844953 - RNA, 19 nt, Artificial Sequence
  Description of Artificial Sequence: Synthetic oligonucleotide
  Sense strand starting at position 664 of SEQ ID NO: 1563964
gugauuuaguuugcaacua

SEQ ID NO: 1844954 - RNA, 19 nt, Artificial Sequence
  Description of Artificial Sequence: Synthetic oligonucleotide
  Antisense strand to SEQ ID NO: 1844953
uaguugcaaacuaaaucac

SEQ ID NO: 1844955 - RNA, 19 nt, Artificial Sequence
  Description of Artificial Sequence: Synthetic oligonucleotide
  Sense strand starting at position 711 of SEQ ID NO: 1563964
agaucuauauugguuaaca

SEQ ID NO: 1844956 - RNA, 19 nt, Artificial Sequence
  Description of Artificial Sequence: Synthetic oligonucleotide
  Antisense strand to SEQ ID NO: 1844955
uguuaaccaauauagaucu

SEQ ID NO: 1844957 - RNA, 19 nt, Artificial Sequence
  Description of Artificial Sequence: Synthetic oligonucleotide
  Sense strand starting at position 755 of SEQ ID NO: 1563964
auacauuucugccaaugga

SEQ ID NO: 1844958 - RNA, 19 nt, Artificial Sequence
  Description of Artificial Sequence: Synthetic oligonucleotide
  Antisense strand to SEQ ID NO: 1844957
uccauuggcagaaauguau

SEQ ID NO: 1844959 - RNA, 19 nt, Artificial Sequence
  Description of Artificial Sequence: Synthetic oligonucleotide
  Sense strand starting at position 895 of SEQ ID NO: 1563964
ugaacugaagacugcaaua

SEQ ID NO: 1844960 - RNA, 19 nt, Artificial Sequence
  Description of Artificial Sequence: Synthetic oligonucleotide
  Antisense strand to SEQ ID NO: 1844959
uauugcagucuucaguuca

SEQ ID NO: 1844961 - RNA, 19 nt, Artificial Sequence
  Description of Artificial Sequence: Synthetic oligonucleotide
  Sense strand starting at position 932 of SEQ ID NO: 1563964
ugacucuuuccauggccau

SEQ ID NO: 1844962 - RNA, 19 nt, Artificial Sequence
  Description of Artificial Sequence: Synthetic oligonucleotide
  Antisense strand to SEQ ID NO: 1844961
auggccauggaaagaguca

SEQ ID NO: 1844963 - RNA, 19 nt, Artificial Sequence
  Description of Artificial Sequence: Synthetic oligonucleotide
  Sense strand starting at position 944 of SEQ ID NO: 1563964
uggccaucugcugauugua

SEQ ID NO: 1844964 - RNA, 19 nt, Artificial Sequence
  Description of Artificial Sequence: Synthetic oligonucleotide
  Antisense strand to SEQ ID NO: 1844963
uacaaucagcagauggcca

SEQ ID NO: 1844965 - RNA, 19 nt, Artificial Sequence
  Description of Artificial Sequence: Synthetic oligonucleotide
  Sense strand starting at position 947 of SEQ ID NO: 1563964
ccaucugcugauuguaauu

SEQ ID NO: 1844966 - RNA, 19 nt, Artificial Sequence
  Description of Artificial Sequence: Synthetic oligonucleotide
  Antisense strand to SEQ ID NO: 1844965
aauuacaaucagcagaugg

SEQ ID NO: 1844967 - RNA, 19 nt, Artificial Sequence
  Description of Artificial Sequence: Synthetic oligonucleotide
  Sense strand starting at position 976 of SEQ ID NO: 1563964
uugugagauuuccauaaua

SEQ ID NO: 1844968 - RNA, 19 nt, Artificial Sequence
  Description of Artificial Sequence: Synthetic oligonucleotide
  Antisense strand to SEQ ID NO: 1844967
uauuauggaaaucucacaa

SEQ ID NO: 1844969 - RNA, 19 nt, Artificial Sequence
  Description of Artificial Sequence: Synthetic oligonucleotide
  Sense strand starting at position 1082 of SEQ ID NO: 1563964
ucggcagagaagugaucuu

SEQ ID NO: 1844970 - RNA, 19 nt, Artificial Sequence
  Description of Artificial Sequence: Synthetic oligonucleotide
  Antisense strand to SEQ ID NO: 1844969
aagaucacuucucugccga

SEQ ID NO: 1844971 - RNA, 19 nt, Artificial Sequence
  Description of Artificial Sequence: Synthetic oligonucleotide
  Sense strand starting at position 1229 of SEQ ID NO: 1563964
uccgaaaccuguccucuuu

SEQ ID NO: 1844972 - RNA, 19 nt, Artificial Sequence
  Description of Artificial Sequence: Synthetic oligonucleotide
  Antisense strand to SEQ ID NO: 1844971
aaagaggacagguuucgga

SEQ ID NO: 1844973 - RNA, 19 nt, Artificial Sequence
  Description of Artificial Sequence: Synthetic oligonucleotide
  Sense strand starting at position 1517 of SEQ ID NO: 1563964
cucagucucaggugaaaga

SEQ ID NO: 1844974 - RNA, 19 nt, Artificial Sequence
  Description of Artificial Sequence: Synthetic oligonucleotide
  Antisense strand to SEQ ID NO: 1844973
ucuuucaccugagacugag

SEQ ID NO: 1844975 - RNA, 19 nt, Artificial Sequence
  Description of Artificial Sequence: Synthetic oligonucleotide
  Sense strand starting at position 1951 of SEQ ID NO: 1563964
acacuugagucagcagaga

SEQ ID NO: 1844976 - RNA, 19 nt, Artificial Sequence
  Description of Artificial Sequence: Synthetic oligonucleotide
  Antisense strand to SEQ ID NO: 1844975
ucucugcugacucaagugu

SEQ ID NO: 1844977 - RNA, 19 nt, Artificial Sequence
  Description of Artificial Sequence: Synthetic oligonucleotide
  Sense strand starting at position 2022 of SEQ ID NO: 1563964
uuguuuagaccucagcagu

SEQ ID NO: 1844978 - RNA, 19 nt, Artificial Sequence
  Description of Artificial Sequence: Synthetic oligonucleotide
  Antisense strand to SEQ ID NO: 1844977
acugcugaggucuaaacaa

SEQ ID NO: 1844979 - RNA, 19 nt, Artificial Sequence
  Description of Artificial Sequence: Synthetic oligonucleotide
  Sense strand starting at position 2155 of SEQ ID NO: 1563964
cugagaagggcuuguuucu

SEQ ID NO: 1844980 - RNA, 19 nt, Artificial Sequence
  Description of Artificial Sequence: Synthetic oligonucleotide
  Antisense strand to SEQ ID NO: 1844979
agaaacaagcccuucucag

SEQ ID NO: 1844981 - RNA, 19 nt, Artificial Sequence
  Description of Artificial Sequence: Synthetic oligonucleotide
  Sense strand starting at position 2325 of SEQ ID NO: 1563964
gugaaagcuuagguucuca

SEQ ID NO: 1844982 - RNA, 19 nt, Artificial Sequence
  Description of Artificial Sequence: Synthetic oligonucleotide
  Antisense strand to SEQ ID NO: 1844981
ugagaaccuaagcuuucac

SEQ ID NO: 1844983 - RNA, 19 nt, Artificial Sequence
  Description of Artificial Sequence: Synthetic oligonucleotide
  Sense strand starting at position 2329 of SEQ ID NO: 1563964
aagcuuagguucucagaga

SEQ ID NO: 1844984 - RNA, 19 nt, Artificial Sequence
  Description of Artificial Sequence: Synthetic oligonucleotide
  Antisense strand to SEQ ID NO: 1844983
ucucugagaaccuaagcuu

SEQ ID NO: 1844985 - RNA, 19 nt, Artificial Sequence
  Description of Artificial Sequence: Synthetic oligonucleotide
  Sense strand starting at position 2769 of SEQ ID NO: 1563964
cuucuaggacuuuaauguu

SEQ ID NO: 1844986 - RNA, 19 nt, Artificial Sequence
  Description of Artificial Sequence: Synthetic oligonucleotide
  Antisense strand to SEQ ID NO: 1844985
aacauuaaaguccuagaag

SEQ ID NO: 1844987 - RNA, 19 nt, Artificial Sequence
  Description of Artificial Sequence: Synthetic oligonucleotide
  Sense strand starting at position 2790 of SEQ ID NO: 1563964
ggaaacugucuugaauguu

SEQ ID NO: 1844988 - RNA, 19 nt, Artificial Sequence
  Description of Artificial Sequence: Synthetic oligonucleotide
  Antisense strand to SEQ ID NO: 1844987
aacauucaagacaguuucc

SEQ ID NO: 1844989 - RNA, 19 nt, Artificial Sequence
  Description of Artificial Sequence: Synthetic oligonucleotide
  Sense strand starting at position 3156 of SEQ ID NO: 1563964
cgcuguauucaguauugag

SEQ ID NO: 1844990 - RNA, 19 nt, Artificial Sequence
  Description of Artificial Sequence: Synthetic oligonucleotide
  Antisense strand to SEQ ID NO: 1844989
cucaauacugaauacagcg

SEQ ID NO: 1844991 - RNA, 19 nt, Artificial Sequence
  Description of Artificial Sequence: Synthetic oligonucleotide
  Sense strand starting at position 3195 of SEQ ID NO: 1563964
gcaagaucccauugcaaug

SEQ ID NO: 1844992 - RNA, 19 nt, Artificial Sequence
  Description of Artificial Sequence: Synthetic oligonucleotide
  Antisense strand to SEQ ID NO: 1844991
cauugcaaugggaucuugc

SEQ ID NO: 1844993 - RNA, 19 nt, Artificial Sequence
  Description of Artificial Sequence: Synthetic oligonucleotide
  Sense strand starting at position 3345 of SEQ ID NO: 1563964
uuuauaauagcauggucau

SEQ ID NO: 1844994 - RNA, 19 nt, Artificial Sequence
  Description of Artificial Sequence: Synthetic oligonucleotide
  Antisense strand to SEQ ID NO: 1844993
augaccaugcuauuauaaa

SEQ ID NO: 1844995 - RNA, 19 nt, Artificial Sequence
  Description of Artificial Sequence: Synthetic oligonucleotide
  Sense strand starting at position 3346 of SEQ ID NO: 1563964
uuauaauagcauggucaug

SEQ ID NO: 1844996 - RNA, 19 nt, Artificial Sequence
  Description of Artificial Sequence: Synthetic oligonucleotide
  Antisense strand to SEQ ID NO: 1844995
caugaccaugcuauuauaa

SEQ ID NO: 1844997 - RNA, 19 nt, Artificial Sequence
  Description of Artificial Sequence: Synthetic oligonucleotide
  Sense strand starting at position 3357 of SEQ ID NO: 1563964
uggucauggacuugcuaua

SEQ ID NO: 1844998 - RNA, 19 nt, Artificial Sequence
  Description of Artificial Sequence: Synthetic oligonucleotide
  Antisense strand to SEQ ID NO: 1844997
uauagcaaguccaugacca

SEQ ID NO: 1844999 - RNA, 19 nt, Artificial Sequence
  Description of Artificial Sequence: Synthetic oligonucleotide
  Sense strand starting at position 3362 of SEQ ID NO: 1563964
auggacuugcuauauaagu

SEQ ID NO: 1845000 - RNA, 19 nt, Artificial Sequence
  Description of Artificial Sequence: Synthetic oligonucleotide
  Antisense strand to SEQ ID NO: 1844999
acuuauauagcaaguccau

SEQ ID NO: 1845001 - RNA, 19 nt, Artificial Sequence
  Description of Artificial Sequence: Synthetic oligonucleotide
  Sense strand starting at position 3424 of SEQ ID NO: 1563964
accagugcugaauaauauu

SEQ ID NO: 1845002 - RNA, 19 nt, Artificial Sequence
  Description of Artificial Sequence: Synthetic oligonucleotide
  Antisense strand to SEQ ID NO: 1845001
aauauuauucagcacuggu

SEQ ID NO: 1845003 - RNA, 19 nt, Artificial Sequence
  Description of Artificial Sequence: Synthetic oligonucleotide
  Sense strand starting at position 3506 of SEQ ID NO: 1563964
guguauguacaauaugauc

SEQ ID NO: 1845004 - RNA, 19 nt, Artificial Sequence
  Description of Artificial Sequence: Synthetic oligonucleotide
  Antisense strand to SEQ ID NO: 1845003
gaucauauuguacauacac

SEQ ID NO: 1845005 - RNA, 19 nt, Artificial Sequence
  Description of Artificial Sequence: Synthetic oligonucleotide
  Sense strand starting at position 3630 of SEQ ID NO: 1563964
gauauaugguucuccaagg

SEQ ID NO: 1845006 - RNA, 19 nt, Artificial Sequence
  Description of Artificial Sequence: Synthetic oligonucleotide
  Antisense strand to SEQ ID NO: 1845005
ccuuggagaaccauauauc

SEQ ID NO: 1845007 - RNA, 19 nt, Artificial Sequence
  Description of Artificial Sequence: Synthetic oligonucleotide
  Sense strand starting at position 3954 of SEQ ID NO: 1563964
gcagguuacccuuaaagaa

SEQ ID NO: 1845008 - RNA, 19 nt, Artificial Sequence
  Description of Artificial Sequence: Synthetic oligonucleotide
  Antisense strand to SEQ ID NO: 1845007
uucuuuaaggguaaccugc

SEQ ID NO: 1845009 - RNA, 19 nt, Artificial Sequence
  Description of Artificial Sequence: Synthetic oligonucleotide
  Sense strand starting at position 3971 of SEQ ID NO: 1563964
aagcgcacauucuuugaga

SEQ ID NO: 1845010 - RNA, 19 nt, Artificial Sequence
  Description of Artificial Sequence: Synthetic oligonucleotide
  Antisense strand to SEQ ID NO: 1845009
ucucaaagaaugugcgcuu

SEQ ID NO: 1845011 - RNA, 19 nt, Artificial Sequence
  Description of Artificial Sequence: Synthetic oligonucleotide
  Sense strand starting at position 37 of SEQ ID NO: 1563965
cugacaucuccggcgcuua

SEQ ID NO: 1845012 - RNA, 19 nt, Artificial Sequence
  Description of Artificial Sequence: Synthetic oligonucleotide
  Antisense strand to SEQ ID NO: 1845011
uaagcgccggagaugucag

SEQ ID NO: 1845013 - RNA, 19 nt, Artificial Sequence
  Description of Artificial Sequence: Synthetic oligonucleotide
  Sense strand starting at position 47 of SEQ ID NO: 1563965
cggcgcuuaguauauuaca

SEQ ID NO: 1845014 - RNA, 19 nt, Artificial Sequence
  Description of Artificial Sequence: Synthetic oligonucleotide
  Antisense strand to SEQ ID NO: 1845013
uguaauauacuaagcgccg

SEQ ID NO: 1845015 - RNA, 19 nt, Artificial Sequence
  Description of Artificial Sequence: Synthetic oligonucleotide
  Sense strand starting at position 117 of SEQ ID NO: 1563965
augagagauguccgcagau

SEQ ID NO: 1845016 - RNA, 19 nt, Artificial Sequence
  Description of Artificial Sequence: Synthetic oligonucleotide
  Antisense strand to SEQ ID NO: 1845015
aucugcggacaucucucau

SEQ ID NO: 1845017 - RNA, 19 nt, Artificial Sequence
  Description of Artificial Sequence: Synthetic oligonucleotide
  Sense strand starting at position 119 of SEQ ID NO: 1563965
gagagauguccgcagaugg

SEQ ID NO: 1845018 - RNA, 19 nt, Artificial Sequence
  Description of Artificial Sequence: Synthetic oligonucleotide
  Antisense strand to SEQ ID NO: 1845017
ccaucugcggacaucucuc

SEQ ID NO: 1845019 - RNA, 19 nt, Artificial Sequence
  Description of Artificial Sequence: Synthetic oligonucleotide
  Sense strand starting at position 307 of SEQ ID NO: 1563965
guaggaaaguuuguggcuu

SEQ ID NO: 1845020 - RNA, 19 nt, Artificial Sequence
  Description of Artificial Sequence: Synthetic oligonucleotide
  Antisense strand to SEQ ID NO: 1845019
aagccacaaacuuuccuac

SEQ ID NO: 1845021 - RNA, 19 nt, Artificial Sequence
  Description of Artificial Sequence: Synthetic oligonucleotide
  Sense strand starting at position 405 of SEQ ID NO: 1563965
cuguuacugguaugucaca

SEQ ID NO: 1845022 - RNA, 19 nt, Artificial Sequence
  Description of Artificial Sequence: Synthetic oligonucleotide
  Antisense strand to SEQ ID NO: 1845021
ugugacauaccaguaacag

SEQ ID NO: 1845023 - RNA, 19 nt, Artificial Sequence
  Description of Artificial Sequence: Synthetic oligonucleotide
  Sense strand starting at position 1104 of SEQ ID NO: 1563965
gucacagagcauugauaag

SEQ ID NO: 1845024 - RNA, 19 nt, Artificial Sequence
  Description of Artificial Sequence: Synthetic oligonucleotide
  Antisense strand to SEQ ID NO: 1845023
cuuaucaaugcucugugac

SEQ ID NO: 1845025 - RNA, 19 nt, Artificial Sequence
  Description of Artificial Sequence: Synthetic oligonucleotide
  Sense strand starting at position 1111 of SEQ ID NO: 1563965
agcauugauaaguacgcau

SEQ ID NO: 1845026 - RNA, 19 nt, Artificial Sequence
  Description of Artificial Sequence: Synthetic oligonucleotide
  Antisense strand to SEQ ID NO: 1845025
augcguacuuaucaaugcu

SEQ ID NO: 1845027 - RNA, 19 nt, Artificial Sequence
  Description of Artificial Sequence: Synthetic oligonucleotide
  Sense strand starting at position 1115 of SEQ ID NO: 1563965
uugauaaguacgcaugcuu

SEQ ID NO: 1845028 - RNA, 19 nt, Artificial Sequence
  Description of Artificial Sequence: Synthetic oligonucleotide
  Antisense strand to SEQ ID NO: 1845027
aagcaugcguacuuaucaa

SEQ ID NO: 1845029 - RNA, 19 nt, Artificial Sequence
  Description of Artificial Sequence: Synthetic oligonucleotide
  Sense strand starting at position 1409 of SEQ ID NO: 1563965
ccaugagguccauggcuga

SEQ ID NO: 1845030 - RNA, 19 nt, Artificial Sequence
  Description of Artificial Sequence: Synthetic oligonucleotide
  Antisense strand to SEQ ID NO: 1845029
ucagccauggaccucaugg

SEQ ID NO: 1845031 - RNA, 19 nt, Artificial Sequence
  Description of Artificial Sequence: Synthetic oligonucleotide
  Sense strand starting at position 1433 of SEQ ID NO: 1563965
gaaguugcgacacagaguu

SEQ ID NO: 1845032 - RNA, 19 nt, Artificial Sequence
  Description of Artificial Sequence: Synthetic oligonucleotide
  Antisense strand to SEQ ID NO: 1845031
aacucugugucgcaacuuc

SEQ ID NO: 1845033 - RNA, 19 nt, Artificial Sequence
  Description of Artificial Sequence: Synthetic oligonucleotide
  Sense strand starting at position 1439 of SEQ ID NO: 1563965
gcgacacagaguuaagguu

SEQ ID NO: 1845034 - RNA, 19 nt, Artificial Sequence
  Description of Artificial Sequence: Synthetic oligonucleotide
  Antisense strand to SEQ ID NO: 1845033
aaccuuaacucugugucgc

SEQ ID NO: 1845035 - RNA, 19 nt, Artificial Sequence
  Description of Artificial Sequence: Synthetic oligonucleotide
  Sense strand starting at position 1454 of SEQ ID NO: 1563965
gguuauguuccucacugga

SEQ ID NO: 1845036 - RNA, 19 nt, Artificial Sequence
  Description of Artificial Sequence: Synthetic oligonucleotide
  Antisense strand to SEQ ID NO: 1845035
uccagugaggaacauaacc

SEQ ID NO: 1845037 - RNA, 19 nt, Artificial Sequence
  Description of Artificial Sequence: Synthetic oligonucleotide
  Sense strand starting at position 1456 of SEQ ID NO: 1563965
uuauguuccucacuggaca

SEQ ID NO: 1845038 - RNA, 19 nt, Artificial Sequence
  Description of Artificial Sequence: Synthetic oligonucleotide
  Antisense strand to SEQ ID NO: 1845037
uguccagugaggaacauaa

SEQ ID NO: 1845039 - RNA, 19 nt, Artificial Sequence
  Description of Artificial Sequence: Synthetic oligonucleotide
  Sense strand starting at position 1610 of SEQ ID NO: 1563965
cagagaguuccaggcguuu

SEQ ID NO: 1845040 - RNA, 19 nt, Artificial Sequence
  Description of Artificial Sequence: Synthetic oligonucleotide
  Antisense strand to SEQ ID NO: 1845039
aaacgccuggaacucucug

SEQ ID NO: 1845041 - RNA, 19 nt, Artificial Sequence
  Description of Artificial Sequence: Synthetic oligonucleotide
  Sense strand starting at position 1995 of SEQ ID NO: 1563965
gagcucugccuagacagaa

SEQ ID NO: 1845042 - RNA, 19 nt, Artificial Sequence
  Description of Artificial Sequence: Synthetic oligonucleotide
  Antisense strand to SEQ ID NO: 1845041
uucugucuaggcagagcuc

SEQ ID NO: 1845043 - RNA, 19 nt, Artificial Sequence
  Description of Artificial Sequence: Synthetic oligonucleotide
  Sense strand starting at position 2038 of SEQ ID NO: 1563965
gcaacagaucugugcagca

SEQ ID NO: 1845044 - RNA, 19 nt, Artificial Sequence
  Description of Artificial Sequence: Synthetic oligonucleotide
  Antisense strand to SEQ ID NO: 1845043
ugcugcacagaucuguugc

SEQ ID NO: 1845045 - RNA, 19 nt, Artificial Sequence
  Description of Artificial Sequence: Synthetic oligonucleotide
  Sense strand starting at position 2070 of SEQ ID NO: 1563965
ggguauuugccacgugacu

SEQ ID NO: 1845046 - RNA, 19 nt, Artificial Sequence
  Description of Artificial Sequence: Synthetic oligonucleotide
  Antisense strand to SEQ ID NO: 1845045
agucacguggcaaauaccc

SEQ ID NO: 1845047 - RNA, 19 nt, Artificial Sequence
  Description of Artificial Sequence: Synthetic oligonucleotide
  Sense strand starting at position 2072 of SEQ ID NO: 1563965
guauuugccacgugacuga

SEQ ID NO: 1845048 - RNA, 19 nt, Artificial Sequence
  Description of Artificial Sequence: Synthetic oligonucleotide
  Antisense strand to SEQ ID NO: 1845047
ucagucacguggcaaauac

SEQ ID NO: 1845049 - RNA, 19 nt, Artificial Sequence
  Description of Artificial Sequence: Synthetic oligonucleotide
  Sense strand starting at position 2194 of SEQ ID NO: 1563965
uuccaauggcguuggagaa

SEQ ID NO: 1845050 - RNA, 19 nt, Artificial Sequence
  Description of Artificial Sequence: Synthetic oligonucleotide
  Antisense strand to SEQ ID NO: 1845049
uucuccaacgccauuggaa

SEQ ID NO: 1845051 - RNA, 19 nt, Artificial Sequence
  Description of Artificial Sequence: Synthetic oligonucleotide
  Sense strand starting at position 2195 of SEQ ID NO: 1563965
uccaauggcguuggagaau

SEQ ID NO: 1845052 - RNA, 19 nt, Artificial Sequence
  Description of Artificial Sequence: Synthetic oligonucleotide
  Antisense strand to SEQ ID NO: 1845051
auucuccaacgccauugga

SEQ ID NO: 1845053 - RNA, 19 nt, Artificial Sequence
  Description of Artificial Sequence: Synthetic oligonucleotide
  Sense strand starting at position 2218 of SEQ ID NO: 1563965
ggcccagguuacucuaaga

SEQ ID NO: 1845054 - RNA, 19 nt, Artificial Sequence
  Description of Artificial Sequence: Synthetic oligonucleotide
  Antisense strand to SEQ ID NO: 1845053
ucuuagaguaaccugggcc

SEQ ID NO: 1845055 - RNA, 19 nt, Artificial Sequence
  Description of Artificial Sequence: Synthetic oligonucleotide
  Sense strand starting at position 2242 of SEQ ID NO: 1563965
auguguuucggacaaauuc

SEQ ID NO: 1845056 - RNA, 19 nt, Artificial Sequence
  Description of Artificial Sequence: Synthetic oligonucleotide
  Antisense strand to SEQ ID NO: 1845055
gaauuuguccgaaacacau

SEQ ID NO: 1845057 - RNA, 19 nt, Artificial Sequence
  Description of Artificial Sequence: Synthetic oligonucleotide
  Sense strand starting at position 2250 of SEQ ID NO: 1563965
cggacaaauucgccaucau

SEQ ID NO: 1845058 - RNA, 19 nt, Artificial Sequence
  Description of Artificial Sequence: Synthetic oligonucleotide
  Antisense strand to SEQ ID NO: 1845057
augauggcgaauuuguccg

SEQ ID NO: 1845059 - RNA, 19 nt, Artificial Sequence
  Description of Artificial Sequence: Synthetic oligonucleotide
  Sense strand starting at position 2251 of SEQ ID NO: 1563965
ggacaaauucgccaucaua

SEQ ID NO: 1845060 - RNA, 19 nt, Artificial Sequence
  Description of Artificial Sequence: Synthetic oligonucleotide
  Antisense strand to SEQ ID NO: 1845059
uaugauggcgaauuugucc

SEQ ID NO: 1845061 - RNA, 19 nt, Artificial Sequence
  Description of Artificial Sequence: Synthetic oligonucleotide
  Sense strand starting at position 2338 of SEQ ID NO: 1563965
gcgagucugcugucaugcu

SEQ ID NO: 1845062 - RNA, 19 nt, Artificial Sequence
  Description of Artificial Sequence: Synthetic oligonucleotide
  Antisense strand to SEQ ID NO: 1845061
agcaugacagcagacucgc

SEQ ID NO: 1845063 - RNA, 19 nt, Artificial Sequence
  Description of Artificial Sequence: Synthetic oligonucleotide
  Sense strand starting at position 2350 of SEQ ID NO: 1563965
ucaugcuugcaaugaucuu

SEQ ID NO: 1845064 - RNA, 19 nt, Artificial Sequence
  Description of Artificial Sequence: Synthetic oligonucleotide
  Antisense strand to SEQ ID NO: 1845063
aagaucauugcaagcauga

SEQ ID NO: 1845065 - RNA, 19 nt, Artificial Sequence
  Description of Artificial Sequence: Synthetic oligonucleotide
  Sense strand starting at position 2401 of SEQ ID NO: 1563965
uuuguugcaugauuguaca

SEQ ID NO: 1845066 - RNA, 19 nt, Artificial Sequence
  Description of Artificial Sequence: Synthetic oligonucleotide
  Antisense strand to SEQ ID NO: 1845065
uguacaaucaugcaacaaa

SEQ ID NO: 1845067 - RNA, 19 nt, Artificial Sequence
  Description of Artificial Sequence: Synthetic oligonucleotide
  Sense strand starting at position 2905 of SEQ ID NO: 1563965
cauugagucguuuguaccu

SEQ ID NO: 1845068 - RNA, 19 nt, Artificial Sequence
  Description of Artificial Sequence: Synthetic oligonucleotide
  Antisense strand to SEQ ID NO: 1845067
agguacaaacgacucaaug

SEQ ID NO: 1845069 - RNA, 19 nt, Artificial Sequence
  Description of Artificial Sequence: Synthetic oligonucleotide
  Sense strand starting at position 2924 of SEQ ID NO: 1563965
guaccacuaguauacuauu

SEQ ID NO: 1845070 - RNA, 19 nt, Artificial Sequence
  Description of Artificial Sequence: Synthetic oligonucleotide
  Antisense strand to SEQ ID NO: 1845069
aauaguauacuagugguac

SEQ ID NO: 1845071 - RNA, 19 nt, Artificial Sequence
  Description of Artificial Sequence: Synthetic oligonucleotide
  Sense strand starting at position 3012 of SEQ ID NO: 1563965
uucugucuacucugacaca

SEQ ID NO: 1845072 - RNA, 19 nt, Artificial Sequence
  Description of Artificial Sequence: Synthetic oligonucleotide
  Antisense strand to SEQ ID NO: 1845071
ugugucagaguagacagaa

SEQ ID NO: 1845073 - RNA, 19 nt, Artificial Sequence
  Description of Artificial Sequence: Synthetic oligonucleotide
  Sense strand starting at position 3015 of SEQ ID NO: 1563965
ugucuacucugacacauuu

SEQ ID NO: 1845074 - RNA, 19 nt, Artificial Sequence
  Description of Artificial Sequence: Synthetic oligonucleotide
  Antisense strand to SEQ ID NO: 1845073
aaaugugucagaguagaca

SEQ ID NO: 1845075 - RNA, 19 nt, Artificial Sequence
  Description of Artificial Sequence: Synthetic oligonucleotide
  Sense strand starting at position 3085 of SEQ ID NO: 1563965
gugagacacuagguauuau

SEQ ID NO: 1845076 - RNA, 19 nt, Artificial Sequence
  Description of Artificial Sequence: Synthetic oligonucleotide
  Antisense strand to SEQ ID NO: 1845075
auaauaccuagugucucac

SEQ ID NO: 1845077 - RNA, 19 nt, Artificial Sequence
  Description of Artificial Sequence: Synthetic oligonucleotide
  Sense strand starting at position 3115 of SEQ ID NO: 1563965
aucuuaacuuagggacaau

SEQ ID NO: 1845078 - RNA, 19 nt, Artificial Sequence
  Description of Artificial Sequence: Synthetic oligonucleotide
  Antisense strand to SEQ ID NO: 1845077
auugucccuaaguuaagau

SEQ ID NO: 1845079 - RNA, 19 nt, Artificial Sequence
  Description of Artificial Sequence: Synthetic oligonucleotide
  Sense strand starting at position 3209 of SEQ ID NO: 1563965
ccucacaaugacuguguua

SEQ ID NO: 1845080 - RNA, 19 nt, Artificial Sequence
  Description of Artificial Sequence: Synthetic oligonucleotide
  Antisense strand to SEQ ID NO: 1845079
uaacacagucauugugagg

SEQ ID NO: 1845081 - RNA, 19 nt, Artificial Sequence
  Description of Artificial Sequence: Synthetic oligonucleotide
  Sense strand starting at position 3211 of SEQ ID NO: 1563965
ucacaaugacuguguuauu

SEQ ID NO: 1845082 - RNA, 19 nt, Artificial Sequence
  Description of Artificial Sequence: Synthetic oligonucleotide
  Antisense strand to SEQ ID NO: 1845081
aauaacacagucauuguga

SEQ ID NO: 1845083 - RNA, 19 nt, Artificial Sequence
  Description of Artificial Sequence: Synthetic oligonucleotide
  Sense strand starting at position 3355 of SEQ ID NO: 1563965
guucgcaaacaauaugauu

SEQ ID NO: 1845084 - RNA, 19 nt, Artificial Sequence
  Description of Artificial Sequence: Synthetic oligonucleotide
  Antisense strand to SEQ ID NO: 1845083
aaucauauuguuugcgaac

SEQ ID NO: 1845085 - RNA, 19 nt, Artificial Sequence
  Description of Artificial Sequence: Synthetic oligonucleotide
  Sense strand starting at position 3749 of SEQ ID NO: 1563965
aaugacacucuucguggaa

SEQ ID NO: 1845086 - RNA, 19 nt, Artificial Sequence
  Description of Artificial Sequence: Synthetic oligonucleotide
  Antisense strand to SEQ ID NO: 1845085
uuccacgaagagugucauu

SEQ ID NO: 1845087 - RNA, 19 nt, Artificial Sequence
  Description of Artificial Sequence: Synthetic oligonucleotide
  Sense strand starting at position 3750 of SEQ ID NO: 1563965
augacacucuucguggaau

SEQ ID NO: 1845088 - RNA, 19 nt, Artificial Sequence
  Description of Artificial Sequence: Synthetic oligonucleotide
  Antisense strand to SEQ ID NO: 1845087
auuccacgaagagugucau

SEQ ID NO: 1845089 - RNA, 19 nt, Artificial Sequence
  Description of Artificial Sequence: Synthetic oligonucleotide
  Sense strand starting at position 3752 of SEQ ID NO: 1563965
gacacucuucguggaauua

SEQ ID NO: 1845090 - RNA, 19 nt, Artificial Sequence
  Description of Artificial Sequence: Synthetic oligonucleotide
  Antisense strand to SEQ ID NO: 1845089
uaauuccacgaagaguguc

SEQ ID NO: 1845091 - RNA, 19 nt, Artificial Sequence
  Description of Artificial Sequence: Synthetic oligonucleotide
  Sense strand starting at position 36 of SEQ ID NO: 1563966
cugacaucuccggcgcuua

SEQ ID NO: 1845092 - RNA, 19 nt, Artificial Sequence
  Description of Artificial Sequence: Synthetic oligonucleotide
  Antisense strand to SEQ ID NO: 1845091
uaagcgccggagaugucag

SEQ ID NO: 1845093 - RNA, 19 nt, Artificial Sequence
  Description of Artificial Sequence: Synthetic oligonucleotide
  Sense strand starting at position 46 of SEQ ID NO: 1563966
cggcgcuuaguauauuaca

SEQ ID NO: 1845094 - RNA, 19 nt, Artificial Sequence
  Description of Artificial Sequence: Synthetic oligonucleotide
  Antisense strand to SEQ ID NO: 1845093
uguaauauacuaagcgccg

SEQ ID NO: 1845095 - RNA, 19 nt, Artificial Sequence
  Description of Artificial Sequence: Synthetic oligonucleotide
  Sense strand starting at position 116 of SEQ ID NO: 1563966
augagagauguccgcagau

SEQ ID NO: 1845096 - RNA, 19 nt, Artificial Sequence
  Description of Artificial Sequence: Synthetic oligonucleotide
  Antisense strand to SEQ ID NO: 1845095
aucugcggacaucucucau

SEQ ID NO: 1845097 - RNA, 19 nt, Artificial Sequence
  Description of Artificial Sequence: Synthetic oligonucleotide
  Sense strand starting at position 118 of SEQ ID NO: 1563966
gagagauguccgcagaugg

SEQ ID NO: 1845098 - RNA, 19 nt, Artificial Sequence
  Description of Artificial Sequence: Synthetic oligonucleotide
  Antisense strand to SEQ ID NO: 1845097
ccaucugcggacaucucuc

SEQ ID NO: 1845099 - RNA, 19 nt, Artificial Sequence
  Description of Artificial Sequence: Synthetic oligonucleotide
  Sense strand starting at position 306 of SEQ ID NO: 1563966
guaggaaaguuuguggcuu

SEQ ID NO: 1845100 - RNA, 19 nt, Artificial Sequence
  Description of Artificial Sequence: Synthetic oligonucleotide
  Antisense strand to SEQ ID NO: 1845099
aagccacaaacuuuccuac

SEQ ID NO: 1845101 - RNA, 19 nt, Artificial Sequence
  Description of Artificial Sequence: Synthetic oligonucleotide
  Sense strand starting at position 404 of SEQ ID NO: 1563966
cuguuacugguaugucaca

SEQ ID NO: 1845102 - RNA, 19 nt, Artificial Sequence
  Description of Artificial Sequence: Synthetic oligonucleotide
  Antisense strand to SEQ ID NO: 1845101
ugugacauaccaguaacag

SEQ ID NO: 1845103 - RNA, 19 nt, Artificial Sequence
  Description of Artificial Sequence: Synthetic oligonucleotide
  Sense strand starting at position 1103 of SEQ ID NO: 1563966
gucacagagcauugauaag

SEQ ID NO: 1845104 - RNA, 19 nt, Artificial Sequence
  Description of Artificial Sequence: Synthetic oligonucleotide
  Antisense strand to SEQ ID NO: 1845103
cuuaucaaugcucugugac

SEQ ID NO: 1845105 - RNA, 19 nt, Artificial Sequence
  Description of Artificial Sequence: Synthetic oligonucleotide
  Sense strand starting at position 1110 of SEQ ID NO: 1563966
agcauugauaaguacgcau

SEQ ID NO: 1845106 - RNA, 19 nt, Artificial Sequence
  Description of Artificial Sequence: Synthetic oligonucleotide
  Antisense strand to SEQ ID NO: 1845105
augcguacuuaucaaugcu

SEQ ID NO: 1845107 - RNA, 19 nt, Artificial Sequence
  Description of Artificial Sequence: Synthetic oligonucleotide
  Sense strand starting at position 1114 of SEQ ID NO: 1563966
uugauaaguacgcaugcuu

SEQ ID NO: 1845108 - RNA, 19 nt, Artificial Sequence
  Description of Artificial Sequence: Synthetic oligonucleotide
  Antisense strand to SEQ ID NO: 1845107
aagcaugcguacuuaucaa

SEQ ID NO: 1845109 - RNA, 19 nt, Artificial Sequence
  Description of Artificial Sequence: Synthetic oligonucleotide
  Sense strand starting at position 1408 of SEQ ID NO: 1563966
ccaugagguccauggcuga

SEQ ID NO: 1845110 - RNA, 19 nt, Artificial Sequence
  Description of Artificial Sequence: Synthetic oligonucleotide
  Antisense strand to SEQ ID NO: 1845109
ucagccauggaccucaugg

SEQ ID NO: 1845111 - RNA, 19 nt, Artificial Sequence
  Description of Artificial Sequence: Synthetic oligonucleotide
  Sense strand starting at position 1432 of SEQ ID NO: 1563966
gaaguugcgacacagaguu

SEQ ID NO: 1845112 - RNA, 19 nt, Artificial Sequence
  Description of Artificial Sequence: Synthetic oligonucleotide
  Antisense strand to SEQ ID NO: 1845111
aacucugugucgcaacuuc

SEQ ID NO: 1845113 - RNA, 19 nt, Artificial Sequence
  Description of Artificial Sequence: Synthetic oligonucleotide
  Sense strand starting at position 1438 of SEQ ID NO: 1563966
gcgacacagaguuaagguu

SEQ ID NO: 1845114 - RNA, 19 nt, Artificial Sequence
  Description of Artificial Sequence: Synthetic oligonucleotide
  Antisense strand to SEQ ID NO: 1845113
aaccuuaacucugugucgc

SEQ ID NO: 1845115 - RNA, 19 nt, Artificial Sequence
  Description of Artificial Sequence: Synthetic oligonucleotide
  Sense strand starting at position 1453 of SEQ ID NO: 1563966
gguuauguuccucacugga

SEQ ID NO: 1845116 - RNA, 19 nt, Artificial Sequence
  Description of Artificial Sequence: Synthetic oligonucleotide
  Antisense strand to SEQ ID NO: 1845115
uccagugaggaacauaacc

SEQ ID NO: 1845117 - RNA, 19 nt, Artificial Sequence
  Description of Artificial Sequence: Synthetic oligonucleotide
  Sense strand starting at position 1455 of SEQ ID NO: 1563966
uuauguuccucacuggaca

SEQ ID NO: 1845118 - RNA, 19 nt, Artificial Sequence
  Description of Artificial Sequence: Synthetic oligonucleotide
  Antisense strand to SEQ ID NO: 1845117
uguccagugaggaacauaa

SEQ ID NO: 1845119 - RNA, 19 nt, Artificial Sequence
  Description of Artificial Sequence: Synthetic oligonucleotide
  Sense strand starting at position 1609 of SEQ ID NO: 1563966
cagagaguuccaggcguuu

SEQ ID NO: 1845120 - RNA, 19 nt, Artificial Sequence
  Description of Artificial Sequence: Synthetic oligonucleotide
  Antisense strand to SEQ ID NO: 1845119
aaacgccuggaacucucug

SEQ ID NO: 1845121 - RNA, 19 nt, Artificial Sequence
  Description of Artificial Sequence: Synthetic oligonucleotide
  Sense strand starting at position 1994 of SEQ ID NO: 1563966
gagcucugccuagacagaa

SEQ ID NO: 1845122 - RNA, 19 nt, Artificial Sequence
  Description of Artificial Sequence: Synthetic oligonucleotide
  Antisense strand to SEQ ID NO: 1845121
uucugucuaggcagagcuc

SEQ ID NO: 1845123 - RNA, 19 nt, Artificial Sequence
  Description of Artificial Sequence: Synthetic oligonucleotide
  Sense strand starting at position 2037 of SEQ ID NO: 1563966
gcaacagaucugugcagca

SEQ ID NO: 1845124 - RNA, 19 nt, Artificial Sequence
  Description of Artificial Sequence: Synthetic oligonucleotide
  Antisense strand to SEQ ID NO: 1845123
ugcugcacagaucuguugc

SEQ ID NO: 1845125 - RNA, 19 nt, Artificial Sequence
  Description of Artificial Sequence: Synthetic oligonucleotide
  Sense strand starting at position 2069 of SEQ ID NO: 1563966
ggguauuugccacgugacu

SEQ ID NO: 1845126 - RNA, 19 nt, Artificial Sequence
  Description of Artificial Sequence: Synthetic oligonucleotide
  Antisense strand to SEQ ID NO: 1845125
agucacguggcaaauaccc

SEQ ID NO: 1845127 - RNA, 19 nt, Artificial Sequence
  Description of Artificial Sequence: Synthetic oligonucleotide
  Sense strand starting at position 2071 of SEQ ID NO: 1563966
guauuugccacgugacuga

SEQ ID NO: 1845128 - RNA, 19 nt, Artificial Sequence
  Description of Artificial Sequence: Synthetic oligonucleotide
  Antisense strand to SEQ ID NO: 1845127
ucagucacguggcaaauac

SEQ ID NO: 1845129 - RNA, 19 nt, Artificial Sequence
  Description of Artificial Sequence: Synthetic oligonucleotide
  Sense strand starting at position 2193 of SEQ ID NO: 1563966
uuccaauggcguuggagaa

SEQ ID NO: 1845130 - RNA, 19 nt, Artificial Sequence
  Description of Artificial Sequence: Synthetic oligonucleotide
  Antisense strand to SEQ ID NO: 1845129
uucuccaacgccauuggaa

SEQ ID NO: 1845131 - RNA, 19 nt, Artificial Sequence
  Description of Artificial Sequence: Synthetic oligonucleotide
  Sense strand starting at position 2194 of SEQ ID NO: 1563966
uccaauggcguuggagaau

SEQ ID NO: 1845132 - RNA, 19 nt, Artificial Sequence
  Description of Artificial Sequence: Synthetic oligonucleotide
  Antisense strand to SEQ ID NO: 1845131
auucuccaacgccauugga

SEQ ID NO: 1845133 - RNA, 19 nt, Artificial Sequence
  Description of Artificial Sequence: Synthetic oligonucleotide
  Sense strand starting at position 2217 of SEQ ID NO: 1563966
ggcccagguuacucuaaga

SEQ ID NO: 1845134 - RNA, 19 nt, Artificial Sequence
  Description of Artificial Sequence: Synthetic oligonucleotide
  Antisense strand to SEQ ID NO: 1845133
ucuuagaguaaccugggcc

SEQ ID NO: 1845135 - RNA, 19 nt, Artificial Sequence
  Description of Artificial Sequence: Synthetic oligonucleotide
  Sense strand starting at position 2241 of SEQ ID NO: 1563966
auguguuucggacaaauuc

SEQ ID NO: 1845136 - RNA, 19 nt, Artificial Sequence
  Description of Artificial Sequence: Synthetic oligonucleotide
  Antisense strand to SEQ ID NO: 1845135
gaauuuguccgaaacacau

SEQ ID NO: 1845137 - RNA, 19 nt, Artificial Sequence
  Description of Artificial Sequence: Synthetic oligonucleotide
  Sense strand starting at position 2249 of SEQ ID NO: 1563966
cggacaaauucgccaucau

SEQ ID NO: 1845138 - RNA, 19 nt, Artificial Sequence
  Description of Artificial Sequence: Synthetic oligonucleotide
  Antisense strand to SEQ ID NO: 1845137
augauggcgaauuuguccg

SEQ ID NO: 1845139 - RNA, 19 nt, Artificial Sequence
  Description of Artificial Sequence: Synthetic oligonucleotide
  Sense strand starting at position 2250 of SEQ ID NO: 1563966
ggacaaauucgccaucaua

SEQ ID NO: 1845140 - RNA, 19 nt, Artificial Sequence
  Description of Artificial Sequence: Synthetic oligonucleotide
  Antisense strand to SEQ ID NO: 1845139
uaugauggcgaauuugucc

SEQ ID NO: 1845141 - RNA, 19 nt, Artificial Sequence
  Description of Artificial Sequence: Synthetic oligonucleotide
  Sense strand starting at position 2337 of SEQ ID NO: 1563966
gcgagucugcugucaugcu

SEQ ID NO: 1845142 - RNA, 19 nt, Artificial Sequence
  Description of Artificial Sequence: Synthetic oligonucleotide
  Antisense strand to SEQ ID NO: 1845141
agcaugacagcagacucgc

SEQ ID NO: 1845143 - RNA, 19 nt, Artificial Sequence
  Description of Artificial Sequence: Synthetic oligonucleotide
  Sense strand starting at position 2349 of SEQ ID NO: 1563966
ucaugcuugcaaugaucuu

SEQ ID NO: 1845144 - RNA, 19 nt, Artificial Sequence
  Description of Artificial Sequence: Synthetic oligonucleotide
  Antisense strand to SEQ ID NO: 1845143
aagaucauugcaagcauga

SEQ ID NO: 1845145 - RNA, 19 nt, Artificial Sequence
  Description of Artificial Sequence: Synthetic oligonucleotide
  Sense strand starting at position 2400 of SEQ ID NO: 1563966
uuuguugcaugauuguaca

SEQ ID NO: 1845146 - RNA, 19 nt, Artificial Sequence
  Description of Artificial Sequence: Synthetic oligonucleotide
  Antisense strand to SEQ ID NO: 1845145
uguacaaucaugcaacaaa

SEQ ID NO: 1845147 - RNA, 19 nt, Artificial Sequence
  Description of Artificial Sequence: Synthetic oligonucleotide
  Sense strand starting at position 2904 of SEQ ID NO: 1563966
cauugagucguuuguaccu

SEQ ID NO: 1845148 - RNA, 19 nt, Artificial Sequence
  Description of Artificial Sequence: Synthetic oligonucleotide
  Antisense strand to SEQ ID NO: 1845147
agguacaaacgacucaaug

SEQ ID NO: 1845149 - RNA, 19 nt, Artificial Sequence
  Description of Artificial Sequence: Synthetic oligonucleotide
  Sense strand starting at position 2923 of SEQ ID NO: 1563966
guaccacuaguauacuauu

SEQ ID NO: 1845150 - RNA, 19 nt, Artificial Sequence
  Description of Artificial Sequence: Synthetic oligonucleotide
  Antisense strand to SEQ ID NO: 1845149
aauaguauacuagugguac

SEQ ID NO: 1845151 - RNA, 19 nt, Artificial Sequence
  Description of Artificial Sequence: Synthetic oligonucleotide
  Sense strand starting at position 3011 of SEQ ID NO: 1563966
uucugucuacucugacaca

SEQ ID NO: 1845152 - RNA, 19 nt, Artificial Sequence
  Description of Artificial Sequence: Synthetic oligonucleotide
  Antisense strand to SEQ ID NO: 1845151
ugugucagaguagacagaa

SEQ ID NO: 1845153 - RNA, 19 nt, Artificial Sequence
  Description of Artificial Sequence: Synthetic oligonucleotide
  Sense strand starting at position 3014 of SEQ ID NO: 1563966
ugucuacucugacacauuu

SEQ ID NO: 1845154 - RNA, 19 nt, Artificial Sequence
  Description of Artificial Sequence: Synthetic oligonucleotide
  Antisense strand to SEQ ID NO: 1845153
aaaugugucagaguagaca

SEQ ID NO: 1845155 - RNA, 19 nt, Artificial Sequence
  Description of Artificial Sequence: Synthetic oligonucleotide
  Sense strand starting at position 3084 of SEQ ID NO: 1563966
gugagacacuagguauuau

SEQ ID NO: 1845156 - RNA, 19 nt, Artificial Sequence
  Description of Artificial Sequence: Synthetic oligonucleotide
  Antisense strand to SEQ ID NO: 1845155
auaauaccuagugucucac

SEQ ID NO: 1845157 - RNA, 19 nt, Artificial Sequence
  Description of Artificial Sequence: Synthetic oligonucleotide
  Sense strand starting at position 3114 of SEQ ID NO: 1563966
aucuuaacuuagggacaau

SEQ ID NO: 1845158 - RNA, 19 nt, Artificial Sequence
  Description of Artificial Sequence: Synthetic oligonucleotide
  Antisense strand to SEQ ID NO: 1845157
auugucccuaaguuaagau

SEQ ID NO: 1845159 - RNA, 19 nt, Artificial Sequence
  Description of Artificial Sequence: Synthetic oligonucleotide
  Sense strand starting at position 3208 of SEQ ID NO: 1563966
ccucacaaugacuguguua

SEQ ID NO: 1845160 - RNA, 19 nt, Artificial Sequence
  Description of Artificial Sequence: Synthetic oligonucleotide
  Antisense strand to SEQ ID NO: 1845159
uaacacagucauugugagg

SEQ ID NO: 1845161 - RNA, 19 nt, Artificial Sequence
  Description of Artificial Sequence: Synthetic oligonucleotide
  Sense strand starting at position 3210 of SEQ ID NO: 1563966
ucacaaugacuguguuauu

SEQ ID NO: 1845162 - RNA, 19 nt, Artificial Sequence
  Description of Artificial Sequence: Synthetic oligonucleotide
  Antisense strand to SEQ ID NO: 1845161
aauaacacagucauuguga

SEQ ID NO: 1845163 - RNA, 19 nt, Artificial Sequence
  Description of Artificial Sequence: Synthetic oligonucleotide
  Sense strand starting at position 3354 of SEQ ID NO: 1563966
guucgcaaacaauaugauu

SEQ ID NO: 1845164 - RNA, 19 nt, Artificial Sequence
  Description of Artificial Sequence: Synthetic oligonucleotide
  Antisense strand to SEQ ID NO: 1845163
aaucauauuguuugcgaac

SEQ ID NO: 1845165 - RNA, 19 nt, Artificial Sequence
  Description of Artificial Sequence: Synthetic oligonucleotide
  Sense strand starting at position 3748 of SEQ ID NO: 1563966
aaugacacucuucguggaa

SEQ ID NO: 1845166 - RNA, 19 nt, Artificial Sequence
  Description of Artificial Sequence: Synthetic oligonucleotide
  Antisense strand to SEQ ID NO: 1845165
uuccacgaagagugucauu

SEQ ID NO: 1845167 - RNA, 19 nt, Artificial Sequence
  Description of Artificial Sequence: Synthetic oligonucleotide
  Sense strand starting at position 3749 of SEQ ID NO: 1563966
augacacucuucguggaau

SEQ ID NO: 1845168 - RNA, 19 nt, Artificial Sequence
  Description of Artificial Sequence: Synthetic oligonucleotide
  Antisense strand to SEQ ID NO: 1845167
auuccacgaagagugucau

SEQ ID NO: 1845169 - RNA, 19 nt, Artificial Sequence
  Description of Artificial Sequence: Synthetic oligonucleotide
  Sense strand starting at position 3751 of SEQ ID NO: 1563966
gacacucuucguggaauua

SEQ ID NO: 1845170 - RNA, 19 nt, Artificial Sequence
  Description of Artificial Sequence: Synthetic oligonucleotide
  Antisense strand to SEQ ID NO: 1845169
uaauuccacgaagaguguc

SEQ ID NO: 1845171 - RNA, 19 nt, Artificial Sequence
  Description of Artificial Sequence: Synthetic oligonucleotide
  Sense strand starting at position 452 of SEQ ID NO: 1563967
agagaagguuuagcaguuu

SEQ ID NO: 1845172 - RNA, 19 nt, Artificial Sequence
  Description of Artificial Sequence: Synthetic oligonucleotide
  Antisense strand to SEQ ID NO: 1845171
aaacugcuaaaccuucucu

SEQ ID NO: 1845173 - RNA, 19 nt, Artificial Sequence
  Description of Artificial Sequence: Synthetic oligonucleotide
  Sense strand starting at position 740 of SEQ ID NO: 1563967
auccucauuggcugagaga

SEQ ID NO: 1845174 - RNA, 19 nt, Artificial Sequence
  Description of Artificial Sequence: Synthetic oligonucleotide
  Antisense strand to SEQ ID NO: 1845173
ucucucagccaaugaggau

SEQ ID NO: 1845175 - RNA, 19 nt, Artificial Sequence
  Description of Artificial Sequence: Synthetic oligonucleotide
  Sense strand starting at position 770 of SEQ ID NO: 1563967
uaagaaaguugggcaucuu

SEQ ID NO: 1845176 - RNA, 19 nt, Artificial Sequence
  Description of Artificial Sequence: Synthetic oligonucleotide
  Antisense strand to SEQ ID NO: 1845175
aagaugcccaacuuucuua

SEQ ID NO: 1845177 - RNA, 19 nt, Artificial Sequence
  Description of Artificial Sequence: Synthetic oligonucleotide
  Sense strand starting at position 929 of SEQ ID NO: 1563967
acagguuggaccugaucca

SEQ ID NO: 1845178 - RNA, 19 nt, Artificial Sequence
  Description of Artificial Sequence: Synthetic oligonucleotide
  Antisense strand to SEQ ID NO: 1845177
uggaucagguccaaccugu

SEQ ID NO: 1845179 - RNA, 19 nt, Artificial Sequence
  Description of Artificial Sequence: Synthetic oligonucleotide
  Sense strand starting at position 1153 of SEQ ID NO: 1563967
cagggaguguccucucaca

SEQ ID NO: 1845180 - RNA, 19 nt, Artificial Sequence
  Description of Artificial Sequence: Synthetic oligonucleotide
  Antisense strand to SEQ ID NO: 1845179
ugugagaggacacucccug

SEQ ID NO: 1845181 - RNA, 19 nt, Artificial Sequence
  Description of Artificial Sequence: Synthetic oligonucleotide
  Sense strand starting at position 1302 of SEQ ID NO: 1563967
gcuggaucaucuccaucca

SEQ ID NO: 1845182 - RNA, 19 nt, Artificial Sequence
  Description of Artificial Sequence: Synthetic oligonucleotide
  Antisense strand to SEQ ID NO: 1845181
uggauggagaugauccagc

SEQ ID NO: 1845183 - RNA, 19 nt, Artificial Sequence
  Description of Artificial Sequence: Synthetic oligonucleotide
  Sense strand starting at position 1338 of SEQ ID NO: 1563967
cccugagcucccugaacaa

SEQ ID NO: 1845184 - RNA, 19 nt, Artificial Sequence
  Description of Artificial Sequence: Synthetic oligonucleotide
  Antisense strand to SEQ ID NO: 1845183
uuguucagggagcucaggg

SEQ ID NO: 1845185 - RNA, 19 nt, Artificial Sequence
  Description of Artificial Sequence: Synthetic oligonucleotide
  Sense strand starting at position 2171 of SEQ ID NO: 1563967
gguagcuugcaucaacaca

SEQ ID NO: 1845186 - RNA, 19 nt, Artificial Sequence
  Description of Artificial Sequence: Synthetic oligonucleotide
  Antisense strand to SEQ ID NO: 1845185
uguguugaugcaagcuacc

SEQ ID NO: 1845187 - RNA, 19 nt, Artificial Sequence
  Description of Artificial Sequence: Synthetic oligonucleotide
  Sense strand starting at position 2202 of SEQ ID NO: 1563967
cucuauagccaaggagaaa

SEQ ID NO: 1845188 - RNA, 19 nt, Artificial Sequence
  Description of Artificial Sequence: Synthetic oligonucleotide
  Antisense strand to SEQ ID NO: 1845187
uuucuccuuggcuauagag

SEQ ID NO: 1845189 - RNA, 19 nt, Artificial Sequence
  Description of Artificial Sequence: Synthetic oligonucleotide
  Sense strand starting at position 2251 of SEQ ID NO: 1563967
aacacauugcauugaguga

SEQ ID NO: 1845190 - RNA, 19 nt, Artificial Sequence
  Description of Artificial Sequence: Synthetic oligonucleotide
  Antisense strand to SEQ ID NO: 1845189
ucacucaaugcaauguguu

SEQ ID NO: 1845191 - RNA, 19 nt, Artificial Sequence
  Description of Artificial Sequence: Synthetic oligonucleotide
  Sense strand starting at position 2286 of SEQ ID NO: 1563967
gggcaaugccuggacuagu

SEQ ID NO: 1845192 - RNA, 19 nt, Artificial Sequence
  Description of Artificial Sequence: Synthetic oligonucleotide
  Antisense strand to SEQ ID NO: 1845191
acuaguccaggcauugccc

SEQ ID NO: 1845193 - RNA, 19 nt, Artificial Sequence
  Description of Artificial Sequence: Synthetic oligonucleotide
  Sense strand starting at position 2321 of SEQ ID NO: 1563967
uucucacugugaucgacau

SEQ ID NO: 1845194 - RNA, 19 nt, Artificial Sequence
  Description of Artificial Sequence: Synthetic oligonucleotide
  Antisense strand to SEQ ID NO: 1845193
augucgaucacagugagaa

SEQ ID NO: 1845195 - RNA, 19 nt, Artificial Sequence
  Description of Artificial Sequence: Synthetic oligonucleotide
  Sense strand starting at position 2322 of SEQ ID NO: 1563967
ucucacugugaucgacauu

SEQ ID NO: 1845196 - RNA, 19 nt, Artificial Sequence
  Description of Artificial Sequence: Synthetic oligonucleotide
  Antisense strand to SEQ ID NO: 1845195
aaugucgaucacagugaga

SEQ ID NO: 1845197 - RNA, 19 nt, Artificial Sequence
  Description of Artificial Sequence: Synthetic oligonucleotide
  Sense strand starting at position 2556 of SEQ ID NO: 1563967
ggguacucaguuuagauga

SEQ ID NO: 1845198 - RNA, 19 nt, Artificial Sequence
  Description of Artificial Sequence: Synthetic oligonucleotide
  Antisense strand to SEQ ID NO: 1845197
ucaucuaaacugaguaccc

SEQ ID NO: 1845199 - RNA, 19 nt, Artificial Sequence
  Description of Artificial Sequence: Synthetic oligonucleotide
  Sense strand starting at position 2605 of SEQ ID NO: 1563967
gguugaaggucaucacgga

SEQ ID NO: 1845200 - RNA, 19 nt, Artificial Sequence
  Description of Artificial Sequence: Synthetic oligonucleotide
  Antisense strand to SEQ ID NO: 1845199
uccgugaugaccuucaacc

SEQ ID NO: 1845201 - RNA, 19 nt, Artificial Sequence
  Description of Artificial Sequence: Synthetic oligonucleotide
  Sense strand starting at position 2606 of SEQ ID NO: 1563967
guugaaggucaucacggau

SEQ ID NO: 1845202 - RNA, 19 nt, Artificial Sequence
  Description of Artificial Sequence: Synthetic oligonucleotide
  Antisense strand to SEQ ID NO: 1845201
auccgugaugaccuucaac

SEQ ID NO: 1845203 - RNA, 19 nt, Artificial Sequence
  Description of Artificial Sequence: Synthetic oligonucleotide
  Sense strand starting at position 2618 of SEQ ID NO: 1563967
cacggauccaguuggagau

SEQ ID NO: 1845204 - RNA, 19 nt, Artificial Sequence
  Description of Artificial Sequence: Synthetic oligonucleotide
  Antisense strand to SEQ ID NO: 1845203
aucuccaacuggauccgug

SEQ ID NO: 1845205 - RNA, 19 nt, Artificial Sequence
  Description of Artificial Sequence: Synthetic oligonucleotide
  Sense strand starting at position 2803 of SEQ ID NO: 1563967
cuuguugaguaccuugaga

SEQ ID NO: 1845206 - RNA, 19 nt, Artificial Sequence
  Description of Artificial Sequence: Synthetic oligonucleotide
  Antisense strand to SEQ ID NO: 1845205
ucucaagguacucaacaag

SEQ ID NO: 1845207 - RNA, 19 nt, Artificial Sequence
  Description of Artificial Sequence: Synthetic oligonucleotide
  Sense strand starting at position 2805 of SEQ ID NO: 1563967
uguugaguaccuugagauu

SEQ ID NO: 1845208 - RNA, 19 nt, Artificial Sequence
  Description of Artificial Sequence: Synthetic oligonucleotide
  Antisense strand to SEQ ID NO: 1845207
aaucucaagguacucaaca

SEQ ID NO: 1845209 - RNA, 19 nt, Artificial Sequence
  Description of Artificial Sequence: Synthetic oligonucleotide
  Sense strand starting at position 2808 of SEQ ID NO: 1563967
ugaguaccuugagauuuac

SEQ ID NO: 1845210 - RNA, 19 nt, Artificial Sequence
  Description of Artificial Sequence: Synthetic oligonucleotide
  Antisense strand to SEQ ID NO: 1845209
guaaaucucaagguacuca

SEQ ID NO: 1845211 - RNA, 19 nt, Artificial Sequence
  Description of Artificial Sequence: Synthetic oligonucleotide
  Sense strand starting at position 2814 of SEQ ID NO: 1563967
ccuugagauuuacaaagca

SEQ ID NO: 1845212 - RNA, 19 nt, Artificial Sequence
  Description of Artificial Sequence: Synthetic oligonucleotide
  Antisense strand to SEQ ID NO: 1845211
ugcuuuguaaaucucaagg

SEQ ID NO: 1845213 - RNA, 19 nt, Artificial Sequence
  Description of Artificial Sequence: Synthetic oligonucleotide
  Sense strand starting at position 2857 of SEQ ID NO: 1563967
auggcaucucuguaaauua

SEQ ID NO: 1845214 - RNA, 19 nt, Artificial Sequence
  Description of Artificial Sequence: Synthetic oligonucleotide
  Antisense strand to SEQ ID NO: 1845213
uaauuuacagagaugccau

SEQ ID NO: 1845215 - RNA, 19 nt, Artificial Sequence
  Description of Artificial Sequence: Synthetic oligonucleotide
  Sense strand starting at position 2957 of SEQ ID NO: 1563967
augcuaauaaguggcagau

SEQ ID NO: 1845216 - RNA, 19 nt, Artificial Sequence
  Description of Artificial Sequence: Synthetic oligonucleotide
  Antisense strand to SEQ ID NO: 1845215
aucugccacuuauuagcau

SEQ ID NO: 1845217 - RNA, 19 nt, Artificial Sequence
  Description of Artificial Sequence: Synthetic oligonucleotide
  Sense strand starting at position 3077 of SEQ ID NO: 1563967
gaaguaaugguuuagugag

SEQ ID NO: 1845218 - RNA, 19 nt, Artificial Sequence
  Description of Artificial Sequence: Synthetic oligonucleotide
  Antisense strand to SEQ ID NO: 1845217
cucacuaaaccauuacuuc

SEQ ID NO: 1845219 - RNA, 19 nt, Artificial Sequence
  Description of Artificial Sequence: Synthetic oligonucleotide
  Sense strand starting at position 3084 of SEQ ID NO: 1563967
ugguuuagugagggaaguu

SEQ ID NO: 1845220 - RNA, 19 nt, Artificial Sequence
  Description of Artificial Sequence: Synthetic oligonucleotide
  Antisense strand to SEQ ID NO: 1845219
aacuucccucacuaaacca

SEQ ID NO: 1845221 - RNA, 19 nt, Artificial Sequence
  Description of Artificial Sequence: Synthetic oligonucleotide
  Sense strand starting at position 3085 of SEQ ID NO: 1563967
gguuuagugagggaaguug

SEQ ID NO: 1845222 - RNA, 19 nt, Artificial Sequence
  Description of Artificial Sequence: Synthetic oligonucleotide
  Antisense strand to SEQ ID NO: 1845221
caacuucccucacuaaacc

SEQ ID NO: 1845223 - RNA, 19 nt, Artificial Sequence
  Description of Artificial Sequence: Synthetic oligonucleotide
  Sense strand starting at position 3102 of SEQ ID NO: 1563967
ugaaauugcuaacuagaau

SEQ ID NO: 1845224 - RNA, 19 nt, Artificial Sequence
  Description of Artificial Sequence: Synthetic oligonucleotide
  Antisense strand to SEQ ID NO: 1845223
auucuaguuagcaauuuca

SEQ ID NO: 1845225 - RNA, 19 nt, Artificial Sequence
  Description of Artificial Sequence: Synthetic oligonucleotide
  Sense strand starting at position 3108 of SEQ ID NO: 1563967
ugcuaacuagaaugagagu

SEQ ID NO: 1845226 - RNA, 19 nt, Artificial Sequence
  Description of Artificial Sequence: Synthetic oligonucleotide
  Antisense strand to SEQ ID NO: 1845225
acucucauucuaguuagca

SEQ ID NO: 1845227 - RNA, 19 nt, Artificial Sequence
  Description of Artificial Sequence: Synthetic oligonucleotide
  Sense strand starting at position 3272 of SEQ ID NO: 1563967
uugaaaugaaguugcagaa

SEQ ID NO: 1845228 - RNA, 19 nt, Artificial Sequence
  Description of Artificial Sequence: Synthetic oligonucleotide
  Antisense strand to SEQ ID NO: 1845227
uucugcaacuucauuucaa

SEQ ID NO: 1845229 - RNA, 19 nt, Artificial Sequence
  Description of Artificial Sequence: Synthetic oligonucleotide
  Sense strand starting at position 3322 of SEQ ID NO: 1563967
gggugauaaacuuguaaau

SEQ ID NO: 1845230 - RNA, 19 nt, Artificial Sequence
  Description of Artificial Sequence: Synthetic oligonucleotide
  Antisense strand to SEQ ID NO: 1845229
auuuacaaguuuaucaccc

SEQ ID NO: 1845231 - RNA, 19 nt, Artificial Sequence
  Description of Artificial Sequence: Synthetic oligonucleotide
  Sense strand starting at position 3357 of SEQ ID NO: 1563967
agaucugucuccucuaagu

SEQ ID NO: 1845232 - RNA, 19 nt, Artificial Sequence
  Description of Artificial Sequence: Synthetic oligonucleotide
  Antisense strand to SEQ ID NO: 1845231
acuuagaggagacagaucu

SEQ ID NO: 1845233 - RNA, 19 nt, Artificial Sequence
  Description of Artificial Sequence: Synthetic oligonucleotide
  Sense strand starting at position 3359 of SEQ ID NO: 1563967
aucugucuccucuaaguca

SEQ ID NO: 1845234 - RNA, 19 nt, Artificial Sequence
  Description of Artificial Sequence: Synthetic oligonucleotide
  Antisense strand to SEQ ID NO: 1845233
ugacuuagaggagacagau

SEQ ID NO: 1845235 - RNA, 19 nt, Artificial Sequence
  Description of Artificial Sequence: Synthetic oligonucleotide
  Sense strand starting at position 3474 of SEQ ID NO: 1563967
agguuagugcaguggacaa

SEQ ID NO: 1845236 - RNA, 19 nt, Artificial Sequence
  Description of Artificial Sequence: Synthetic oligonucleotide
  Antisense strand to SEQ ID NO: 1845235
uuguccacugcacuaaccu

SEQ ID NO: 1845237 - RNA, 19 nt, Artificial Sequence
  Description of Artificial Sequence: Synthetic oligonucleotide
  Sense strand starting at position 3573 of SEQ ID NO: 1563967
gggugguagaggugugaga

SEQ ID NO: 1845238 - RNA, 19 nt, Artificial Sequence
  Description of Artificial Sequence: Synthetic oligonucleotide
  Antisense strand to SEQ ID NO: 1845237
ucucacaccucuaccaccc

SEQ ID NO: 1845239 - RNA, 19 nt, Artificial Sequence
  Description of Artificial Sequence: Synthetic oligonucleotide
  Sense strand starting at position 3575 of SEQ ID NO: 1563967
gugguagaggugugagaau

SEQ ID NO: 1845240 - RNA, 19 nt, Artificial Sequence
  Description of Artificial Sequence: Synthetic oligonucleotide
  Antisense strand to SEQ ID NO: 1845239
auucucacaccucuaccac

SEQ ID NO: 1845241 - RNA, 19 nt, Artificial Sequence
  Description of Artificial Sequence: Synthetic oligonucleotide
  Sense strand starting at position 3603 of SEQ ID NO: 1563967
ugaugcaaaugcuuaagau

SEQ ID NO: 1845242 - RNA, 19 nt, Artificial Sequence
  Description of Artificial Sequence: Synthetic oligonucleotide
  Antisense strand to SEQ ID NO: 1845241
aucuuaagcauuugcauca

SEQ ID NO: 1845243 - RNA, 19 nt, Artificial Sequence
  Description of Artificial Sequence: Synthetic oligonucleotide
  Sense strand starting at position 3780 of SEQ ID NO: 1563967
agauaaaguguugguguca

SEQ ID NO: 1845244 - RNA, 19 nt, Artificial Sequence
  Description of Artificial Sequence: Synthetic oligonucleotide
  Antisense strand to SEQ ID NO: 1845243
ugacaccaacacuuuaucu

SEQ ID NO: 1845245 - RNA, 19 nt, Artificial Sequence
  Description of Artificial Sequence: Synthetic oligonucleotide
  Sense strand starting at position 3905 of SEQ ID NO: 1563967
acacuuaagauugggugau

SEQ ID NO: 1845246 - RNA, 19 nt, Artificial Sequence
  Description of Artificial Sequence: Synthetic oligonucleotide
  Antisense strand to SEQ ID NO: 1845245
aucacccaaucuuaagugu

SEQ ID NO: 1845247 - RNA, 19 nt, Artificial Sequence
  Description of Artificial Sequence: Synthetic oligonucleotide
  Sense strand starting at position 3952 of SEQ ID NO: 1563967
uggcuacugugauugaaug

SEQ ID NO: 1845248 - RNA, 19 nt, Artificial Sequence
  Description of Artificial Sequence: Synthetic oligonucleotide
  Antisense strand to SEQ ID NO: 1845247
cauucaaucacaguagcca

SEQ ID NO: 1845249 - RNA, 19 nt, Artificial Sequence
  Description of Artificial Sequence: Synthetic oligonucleotide
  Sense strand starting at position 3971 of SEQ ID NO: 1563967
ggaggauaugccuguuaau

SEQ ID NO: 1845250 - RNA, 19 nt, Artificial Sequence
  Description of Artificial Sequence: Synthetic oligonucleotide
  Antisense strand to SEQ ID NO: 1845249
auuaacaggcauauccucc

SEQ ID NO: 1845251 - RNA, 19 nt, Artificial Sequence
  Description of Artificial Sequence: Synthetic oligonucleotide
  Sense strand starting at position 84 of SEQ ID NO: 1563968
cagacauguggcuaguuau

SEQ ID NO: 1845252 - RNA, 19 nt, Artificial Sequence
  Description of Artificial Sequence: Synthetic oligonucleotide
  Antisense strand to SEQ ID NO: 1845251
auaacuagccacaugucug

SEQ ID NO: 1845253 - RNA, 19 nt, Artificial Sequence
  Description of Artificial Sequence: Synthetic oligonucleotide
  Sense strand starting at position 113 of SEQ ID NO: 1563968
uuaccaugaggaugcauau

SEQ ID NO: 1845254 - RNA, 19 nt, Artificial Sequence
  Description of Artificial Sequence: Synthetic oligonucleotide
  Antisense strand to SEQ ID NO: 1845253
auaugcauccucaugguaa

SEQ ID NO: 1845255 - RNA, 19 nt, Artificial Sequence
  Description of Artificial Sequence: Synthetic oligonucleotide
  Sense strand starting at position 206 of SEQ ID NO: 1563968
uuaaguagucuugaacauc

SEQ ID NO: 1845256 - RNA, 19 nt, Artificial Sequence
  Description of Artificial Sequence: Synthetic oligonucleotide
  Antisense strand to SEQ ID NO: 1845255
gauguucaagacuacuuaa

SEQ ID NO: 1845257 - RNA, 19 nt, Artificial Sequence
  Description of Artificial Sequence: Synthetic oligonucleotide
  Sense strand starting at position 281 of SEQ ID NO: 1563968
uucuguuugcuugcuagua

SEQ ID NO: 1845258 - RNA, 19 nt, Artificial Sequence
  Description of Artificial Sequence: Synthetic oligonucleotide
  Antisense strand to SEQ ID NO: 1845257
uacuagcaagcaaacagaa

SEQ ID NO: 1845259 - RNA, 19 nt, Artificial Sequence
  Description of Artificial Sequence: Synthetic oligonucleotide
  Sense strand starting at position 301 of SEQ ID NO: 1563968
acuggaaacuuggcucauu

SEQ ID NO: 1845260 - RNA, 19 nt, Artificial Sequence
  Description of Artificial Sequence: Synthetic oligonucleotide
  Antisense strand to SEQ ID NO: 1845259
aaugagccaaguuuccagu

SEQ ID NO: 1845261 - RNA, 19 nt, Artificial Sequence
  Description of Artificial Sequence: Synthetic oligonucleotide
  Sense strand starting at position 410 of SEQ ID NO: 1563968
augucagcuucucugauuu

SEQ ID NO: 1845262 - RNA, 19 nt, Artificial Sequence
  Description of Artificial Sequence: Synthetic oligonucleotide
  Antisense strand to SEQ ID NO: 1845261
aaaucagagaagcugacau

SEQ ID NO: 1845263 - RNA, 19 nt, Artificial Sequence
  Description of Artificial Sequence: Synthetic oligonucleotide
  Sense strand starting at position 495 of SEQ ID NO: 1563968
ucucgauagcacuaaagau

SEQ ID NO: 1845264 - RNA, 19 nt, Artificial Sequence
  Description of Artificial Sequence: Synthetic oligonucleotide
  Antisense strand to SEQ ID NO: 1845263
aucuuuagugcuaucgaga

SEQ ID NO: 1845265 - RNA, 19 nt, Artificial Sequence
  Description of Artificial Sequence: Synthetic oligonucleotide
  Sense strand starting at position 509 of SEQ ID NO: 1563968
aagauuugugcaggcaugu

SEQ ID NO: 1845266 - RNA, 19 nt, Artificial Sequence
  Description of Artificial Sequence: Synthetic oligonucleotide
  Antisense strand to SEQ ID NO: 1845265
acaugccugcacaaaucuu

SEQ ID NO: 1845267 - RNA, 19 nt, Artificial Sequence
  Description of Artificial Sequence: Synthetic oligonucleotide
  Sense strand starting at position 618 of SEQ ID NO: 1563968
agaccuggucuccacauua

SEQ ID NO: 1845268 - RNA, 19 nt, Artificial Sequence
  Description of Artificial Sequence: Synthetic oligonucleotide
  Antisense strand to SEQ ID NO: 1845267
uaauguggagaccaggucu

SEQ ID NO: 1845269 - RNA, 19 nt, Artificial Sequence
  Description of Artificial Sequence: Synthetic oligonucleotide
  Sense strand starting at position 924 of SEQ ID NO: 1563968
auuguagauugauuaacac

SEQ ID NO: 1845270 - RNA, 19 nt, Artificial Sequence
  Description of Artificial Sequence: Synthetic oligonucleotide
  Antisense strand to SEQ ID NO: 1845269
guguuaaucaaucuacaau

SEQ ID NO: 1845271 - RNA, 19 nt, Artificial Sequence
  Description of Artificial Sequence: Synthetic oligonucleotide
  Sense strand starting at position 1054 of SEQ ID NO: 1563968
gugucagugcccuuguacu

SEQ ID NO: 1845272 - RNA, 19 nt, Artificial Sequence
  Description of Artificial Sequence: Synthetic oligonucleotide
  Antisense strand to SEQ ID NO: 1845271
aguacaagggcacugacac

SEQ ID NO: 1845273 - RNA, 19 nt, Artificial Sequence
  Description of Artificial Sequence: Synthetic oligonucleotide
  Sense strand starting at position 1123 of SEQ ID NO: 1563968
ccugaaaguuacuuacuag

SEQ ID NO: 1845274 - RNA, 19 nt, Artificial Sequence
  Description of Artificial Sequence: Synthetic oligonucleotide
  Antisense strand to SEQ ID NO: 1845273
cuaguaaguaacuuucagg

SEQ ID NO: 1845275 - RNA, 19 nt, Artificial Sequence
  Description of Artificial Sequence: Synthetic oligonucleotide
  Sense strand starting at position 1161 of SEQ ID NO: 1563968
gucacaaagcauuagcaua

SEQ ID NO: 1845276 - RNA, 19 nt, Artificial Sequence
  Description of Artificial Sequence: Synthetic oligonucleotide
  Antisense strand to SEQ ID NO: 1845275
uaugcuaaugcuuugugac

SEQ ID NO: 1845277 - RNA, 19 nt, Artificial Sequence
  Description of Artificial Sequence: Synthetic oligonucleotide
  Sense strand starting at position 1362 of SEQ ID NO: 1563968
guggacugauucucauaua

SEQ ID NO: 1845278 - RNA, 19 nt, Artificial Sequence
  Description of Artificial Sequence: Synthetic oligonucleotide
  Antisense strand to SEQ ID NO: 1845277
uauaugagaaucaguccac

SEQ ID NO: 1845279 - RNA, 19 nt, Artificial Sequence
  Description of Artificial Sequence: Synthetic oligonucleotide
  Sense strand starting at position 1504 of SEQ ID NO: 1563968
gaaagaaagucacuguuga

SEQ ID NO: 1845280 - RNA, 19 nt, Artificial Sequence
  Description of Artificial Sequence: Synthetic oligonucleotide
  Antisense strand to SEQ ID NO: 1845279
ucaacagugacuuucuuuc

SEQ ID NO: 1845281 - RNA, 19 nt, Artificial Sequence
  Description of Artificial Sequence: Synthetic oligonucleotide
  Sense strand starting at position 1505 of SEQ ID NO: 1563968
aaagaaagucacuguugau

SEQ ID NO: 1845282 - RNA, 19 nt, Artificial Sequence
  Description of Artificial Sequence: Synthetic oligonucleotide
  Antisense strand to SEQ ID NO: 1845281
aucaacagugacuuucuuu

SEQ ID NO: 1845283 - RNA, 19 nt, Artificial Sequence
  Description of Artificial Sequence: Synthetic oligonucleotide
  Sense strand starting at position 1547 of SEQ ID NO: 1563968
augauuacccuuggcuuaa

SEQ ID NO: 1845284 - RNA, 19 nt, Artificial Sequence
  Description of Artificial Sequence: Synthetic oligonucleotide
  Antisense strand to SEQ ID NO: 1845283
uuaagccaaggguaaucau

SEQ ID NO: 1845285 - RNA, 19 nt, Artificial Sequence
  Description of Artificial Sequence: Synthetic oligonucleotide
  Sense strand starting at position 1557 of SEQ ID NO: 1563968
uuggcuuaacacuaugaau

SEQ ID NO: 1845286 - RNA, 19 nt, Artificial Sequence
  Description of Artificial Sequence: Synthetic oligonucleotide
  Antisense strand to SEQ ID NO: 1845285
auucauaguguuaagccaa

SEQ ID NO: 1845287 - RNA, 19 nt, Artificial Sequence
  Description of Artificial Sequence: Synthetic oligonucleotide
  Sense strand starting at position 1593 of SEQ ID NO: 1563968
gcaaacauaguguaaaugu

SEQ ID NO: 1845288 - RNA, 19 nt, Artificial Sequence
  Description of Artificial Sequence: Synthetic oligonucleotide
  Antisense strand to SEQ ID NO: 1845287
acauuuacacuauguuugc

SEQ ID NO: 1845289 - RNA, 19 nt, Artificial Sequence
  Description of Artificial Sequence: Synthetic oligonucleotide
  Sense strand starting at position 1669 of SEQ ID NO: 1563968
ucugaagacguagauguaa

SEQ ID NO: 1845290 - RNA, 19 nt, Artificial Sequence
  Description of Artificial Sequence: Synthetic oligonucleotide
  Antisense strand to SEQ ID NO: 1845289
uuacaucuacgucuucaga

SEQ ID NO: 1845291 - RNA, 19 nt, Artificial Sequence
  Description of Artificial Sequence: Synthetic oligonucleotide
  Sense strand starting at position 2053 of SEQ ID NO: 1563968
ccuaauaaauauguggauu

SEQ ID NO: 1845292 - RNA, 19 nt, Artificial Sequence
  Description of Artificial Sequence: Synthetic oligonucleotide
  Antisense strand to SEQ ID NO: 1845291
aauccacauauuuauuagg

SEQ ID NO: 1845293 - RNA, 19 nt, Artificial Sequence
  Description of Artificial Sequence: Synthetic oligonucleotide
  Sense strand starting at position 2141 of SEQ ID NO: 1563968
guuucucuucuggagggaa

SEQ ID NO: 1845294 - RNA, 19 nt, Artificial Sequence
  Description of Artificial Sequence: Synthetic oligonucleotide
  Antisense strand to SEQ ID NO: 1845293
uucccuccagaagagaaac

SEQ ID NO: 1845295 - RNA, 19 nt, Artificial Sequence
  Description of Artificial Sequence: Synthetic oligonucleotide
  Sense strand starting at position 2340 of SEQ ID NO: 1563968
uucuauccugaugauugua

SEQ ID NO: 1845296 - RNA, 19 nt, Artificial Sequence
  Description of Artificial Sequence: Synthetic oligonucleotide
  Antisense strand to SEQ ID NO: 1845295
uacaaucaucaggauagaa

SEQ ID NO: 1845297 - RNA, 19 nt, Artificial Sequence
  Description of Artificial Sequence: Synthetic oligonucleotide
  Sense strand starting at position 2352 of SEQ ID NO: 1563968
gauuguaguggucagguga

SEQ ID NO: 1845298 - RNA, 19 nt, Artificial Sequence
  Description of Artificial Sequence: Synthetic oligonucleotide
  Antisense strand to SEQ ID NO: 1845297
ucaccugaccacuacaauc

SEQ ID NO: 1845299 - RNA, 19 nt, Artificial Sequence
  Description of Artificial Sequence: Synthetic oligonucleotide
  Sense strand starting at position 2469 of SEQ ID NO: 1563968
ugguguuuauuucuuacau

SEQ ID NO: 1845300 - RNA, 19 nt, Artificial Sequence
  Description of Artificial Sequence: Synthetic oligonucleotide
  Antisense strand to SEQ ID NO: 1845299
auguaagaaauaaacacca

SEQ ID NO: 1845301 - RNA, 19 nt, Artificial Sequence
  Description of Artificial Sequence: Synthetic oligonucleotide
  Sense strand starting at position 2593 of SEQ ID NO: 1563968
gguaaacaauguuccauau

SEQ ID NO: 1845302 - RNA, 19 nt, Artificial Sequence
  Description of Artificial Sequence: Synthetic oligonucleotide
  Antisense strand to SEQ ID NO: 1845301
auauggaacauuguuuacc

SEQ ID NO: 1845303 - RNA, 19 nt, Artificial Sequence
  Description of Artificial Sequence: Synthetic oligonucleotide
  Sense strand starting at position 2653 of SEQ ID NO: 1563968
gggccaguucccgaggaga

SEQ ID NO: 1845304 - RNA, 19 nt, Artificial Sequence
  Description of Artificial Sequence: Synthetic oligonucleotide
  Antisense strand to SEQ ID NO: 1845303
ucuccucgggaacuggccc

SEQ ID NO: 1845305 - RNA, 19 nt, Artificial Sequence
  Description of Artificial Sequence: Synthetic oligonucleotide
  Sense strand starting at position 3356 of SEQ ID NO: 1563968
ucuguaaacuuaucaagua

SEQ ID NO: 1845306 - RNA, 19 nt, Artificial Sequence
  Description of Artificial Sequence: Synthetic oligonucleotide
  Antisense strand to SEQ ID NO: 1845305
uacuugauaaguuuacaga

SEQ ID NO: 1845307 - RNA, 19 nt, Artificial Sequence
  Description of Artificial Sequence: Synthetic oligonucleotide
  Sense strand starting at position 3382 of SEQ ID NO: 1563968
guacuaauuuaggaacauu

SEQ ID NO: 1845308 - RNA, 19 nt, Artificial Sequence
  Description of Artificial Sequence: Synthetic oligonucleotide
  Antisense strand to SEQ ID NO: 1845307
aauguuccuaaauuaguac

SEQ ID NO: 1845309 - RNA, 19 nt, Artificial Sequence
  Description of Artificial Sequence: Synthetic oligonucleotide
  Sense strand starting at position 3489 of SEQ ID NO: 1563968
gggucuacucauuaacugu

SEQ ID NO: 1845310 - RNA, 19 nt, Artificial Sequence
  Description of Artificial Sequence: Synthetic oligonucleotide
  Antisense strand to SEQ ID NO: 1845309
acaguuaaugaguagaccc

SEQ ID NO: 1845311 - RNA, 19 nt, Artificial Sequence
  Description of Artificial Sequence: Synthetic oligonucleotide
  Sense strand starting at position 3574 of SEQ ID NO: 1563968
aguaaugcacucuaaguua

SEQ ID NO: 1845312 - RNA, 19 nt, Artificial Sequence
  Description of Artificial Sequence: Synthetic oligonucleotide
  Antisense strand to SEQ ID NO: 1845311
uaacuuagagugcauuacu

SEQ ID NO: 1845313 - RNA, 19 nt, Artificial Sequence
  Description of Artificial Sequence: Synthetic oligonucleotide
  Sense strand starting at position 3592 of SEQ ID NO: 1563968
acaucauguuagguagaga

SEQ ID NO: 1845314 - RNA, 19 nt, Artificial Sequence
  Description of Artificial Sequence: Synthetic oligonucleotide
  Antisense strand to SEQ ID NO: 1845313
ucucuaccuaacaugaugu

SEQ ID NO: 1845315 - RNA, 19 nt, Artificial Sequence
  Description of Artificial Sequence: Synthetic oligonucleotide
  Sense strand starting at position 3647 of SEQ ID NO: 1563968
acauauacagucuguaauu

SEQ ID NO: 1845316 - RNA, 19 nt, Artificial Sequence
  Description of Artificial Sequence: Synthetic oligonucleotide
  Antisense strand to SEQ ID NO: 1845315
aauuacagacuguauaugu

SEQ ID NO: 1845317 - RNA, 19 nt, Artificial Sequence
  Description of Artificial Sequence: Synthetic oligonucleotide
  Sense strand starting at position 3656 of SEQ ID NO: 1563968
gucuguaauuacucaagaa

SEQ ID NO: 1845318 - RNA, 19 nt, Artificial Sequence
  Description of Artificial Sequence: Synthetic oligonucleotide
  Antisense strand to SEQ ID NO: 1845317
uucuugaguaauuacagac

SEQ ID NO: 1845319 - RNA, 19 nt, Artificial Sequence
  Description of Artificial Sequence: Synthetic oligonucleotide
  Sense strand starting at position 3723 of SEQ ID NO: 1563968
acuaacaauugguuugauu

SEQ ID NO: 1845320 - RNA, 19 nt, Artificial Sequence
  Description of Artificial Sequence: Synthetic oligonucleotide
  Antisense strand to SEQ ID NO: 1845319
aaucaaaccaauuguuagu

SEQ ID NO: 1845321 - RNA, 19 nt, Artificial Sequence
  Description of Artificial Sequence: Synthetic oligonucleotide
  Sense strand starting at position 3854 of SEQ ID NO: 1563968
aguaauaaaugguuuguca

SEQ ID NO: 1845322 - RNA, 19 nt, Artificial Sequence
  Description of Artificial Sequence: Synthetic oligonucleotide
  Antisense strand to SEQ ID NO: 1845321
ugacaaaccauuuauuacu

SEQ ID NO: 1845323 - RNA, 19 nt, Artificial Sequence
  Description of Artificial Sequence: Synthetic oligonucleotide
  Sense strand starting at position 3858 of SEQ ID NO: 1563968
auaaaugguuugucacuau

SEQ ID NO: 1845324 - RNA, 19 nt, Artificial Sequence
  Description of Artificial Sequence: Synthetic oligonucleotide
  Antisense strand to SEQ ID NO: 1845323
auagugacaaaccauuuau

SEQ ID NO: 1845325 - RNA, 19 nt, Artificial Sequence
  Description of Artificial Sequence: Synthetic oligonucleotide
  Sense strand starting at position 3950 of SEQ ID NO: 1563968
uugugaugucaaggauaaa

SEQ ID NO: 1845326 - RNA, 19 nt, Artificial Sequence
  Description of Artificial Sequence: Synthetic oligonucleotide
  Antisense strand to SEQ ID NO: 1845325
uuuauccuugacaucacaa

SEQ ID NO: 1845327 - RNA, 19 nt, Artificial Sequence
  Description of Artificial Sequence: Synthetic oligonucleotide
  Sense strand starting at position 3977 of SEQ ID NO: 1563968
agagauacuaucgguacua

SEQ ID NO: 1845328 - RNA, 19 nt, Artificial Sequence
  Description of Artificial Sequence: Synthetic oligonucleotide
  Antisense strand to SEQ ID NO: 1845327
uaguaccgauaguaucucu

SEQ ID NO: 1845329 - RNA, 19 nt, Artificial Sequence
  Description of Artificial Sequence: Synthetic oligonucleotide
  Sense strand starting at position 3978 of SEQ ID NO: 1563968
gagauacuaucgguacuag

SEQ ID NO: 1845330 - RNA, 19 nt, Artificial Sequence
  Description of Artificial Sequence: Synthetic oligonucleotide
  Antisense strand to SEQ ID NO: 1845329
cuaguaccgauaguaucuc

SEQ ID NO: 1845331 - RNA, 19 nt, Artificial Sequence
  Description of Artificial Sequence: Synthetic oligonucleotide
  Sense strand starting at position 12 of SEQ ID NO: 1563969
ccaggaaauucugcaaccu

SEQ ID NO: 1845332 - RNA, 19 nt, Artificial Sequence
  Description of Artificial Sequence: Synthetic oligonucleotide
  Antisense strand to SEQ ID NO: 1845331
agguugcagaauuuccugg

SEQ ID NO: 1845333 - RNA, 19 nt, Artificial Sequence
  Description of Artificial Sequence: Synthetic oligonucleotide
  Sense strand starting at position 20 of SEQ ID NO: 1563969
uucugcaaccugugggaau

SEQ ID NO: 1845334 - RNA, 19 nt, Artificial Sequence
  Description of Artificial Sequence: Synthetic oligonucleotide
  Antisense strand to SEQ ID NO: 1845333
auucccacagguugcagaa

SEQ ID NO: 1845335 - RNA, 19 nt, Artificial Sequence
  Description of Artificial Sequence: Synthetic oligonucleotide
  Sense strand starting at position 48 of SEQ ID NO: 1563969
gugagaaugucccuagggu

SEQ ID NO: 1845336 - RNA, 19 nt, Artificial Sequence
  Description of Artificial Sequence: Synthetic oligonucleotide
  Antisense strand to SEQ ID NO: 1845335
acccuagggacauucucac

SEQ ID NO: 1845337 - RNA, 19 nt, Artificial Sequence
  Description of Artificial Sequence: Synthetic oligonucleotide
  Sense strand starting at position 49 of SEQ ID NO: 1563969
ugagaaugucccuaggguc

SEQ ID NO: 1845338 - RNA, 19 nt, Artificial Sequence
  Description of Artificial Sequence: Synthetic oligonucleotide
  Antisense strand to SEQ ID NO: 1845337
gacccuagggacauucuca

SEQ ID NO: 1845339 - RNA, 19 nt, Artificial Sequence
  Description of Artificial Sequence: Synthetic oligonucleotide
  Sense strand starting at position 162 of SEQ ID NO: 1563969
gggucagcuccuugacauc

SEQ ID NO: 1845340 - RNA, 19 nt, Artificial Sequence
  Description of Artificial Sequence: Synthetic oligonucleotide
  Antisense strand to SEQ ID NO: 1845339
gaugucaaggagcugaccc

SEQ ID NO: 1845341 - RNA, 19 nt, Artificial Sequence
  Description of Artificial Sequence: Synthetic oligonucleotide
  Sense strand starting at position 187 of SEQ ID NO: 1563969
ucucucugaccucaggauu

SEQ ID NO: 1845342 - RNA, 19 nt, Artificial Sequence
  Description of Artificial Sequence: Synthetic oligonucleotide
  Antisense strand to SEQ ID NO: 1845341
aauccugaggucagagaga

SEQ ID NO: 1845343 - RNA, 19 nt, Artificial Sequence
  Description of Artificial Sequence: Synthetic oligonucleotide
  Sense strand starting at position 198 of SEQ ID NO: 1563969
ucaggauucucagcuguca

SEQ ID NO: 1845344 - RNA, 19 nt, Artificial Sequence
  Description of Artificial Sequence: Synthetic oligonucleotide
  Antisense strand to SEQ ID NO: 1845343
ugacagcugagaauccuga

SEQ ID NO: 1845345 - RNA, 19 nt, Artificial Sequence
  Description of Artificial Sequence: Synthetic oligonucleotide
  Sense strand starting at position 279 of SEQ ID NO: 1563969
ugacacuuguauccagaaa

SEQ ID NO: 1845346 - RNA, 19 nt, Artificial Sequence
  Description of Artificial Sequence: Synthetic oligonucleotide
  Antisense strand to SEQ ID NO: 1845345
uuucuggauacaaguguca

SEQ ID NO: 1845347 - RNA, 19 nt, Artificial Sequence
  Description of Artificial Sequence: Synthetic oligonucleotide
  Sense strand starting at position 888 of SEQ ID NO: 1563969
uugccagaguaagaaucua

SEQ ID NO: 1845348 - RNA, 19 nt, Artificial Sequence
  Description of Artificial Sequence: Synthetic oligonucleotide
  Antisense strand to SEQ ID NO: 1845347
uagauucuuacucuggcaa

SEQ ID NO: 1845349 - RNA, 19 nt, Artificial Sequence
  Description of Artificial Sequence: Synthetic oligonucleotide
  Sense strand starting at position 933 of SEQ ID NO: 1563969
gcaguaaucuugccagagc

SEQ ID NO: 1845350 - RNA, 19 nt, Artificial Sequence
  Description of Artificial Sequence: Synthetic oligonucleotide
  Antisense strand to SEQ ID NO: 1845349
gcucuggcaagauuacugc

SEQ ID NO: 1845351 - RNA, 19 nt, Artificial Sequence
  Description of Artificial Sequence: Synthetic oligonucleotide
  Sense strand starting at position 1083 of SEQ ID NO: 1563969
gcguuauugcaucauucca

SEQ ID NO: 1845352 - RNA, 19 nt, Artificial Sequence
  Description of Artificial Sequence: Synthetic oligonucleotide
  Antisense strand to SEQ ID NO: 1845351
uggaaugaugcaauaacgc

SEQ ID NO: 1845353 - RNA, 19 nt, Artificial Sequence
  Description of Artificial Sequence: Synthetic oligonucleotide
  Sense strand starting at position 1468 of SEQ ID NO: 1563969
gagucuaggguuugaccaa

SEQ ID NO: 1845354 - RNA, 19 nt, Artificial Sequence
  Description of Artificial Sequence: Synthetic oligonucleotide
  Antisense strand to SEQ ID NO: 1845353
uuggucaaacccuagacuc

SEQ ID NO: 1845355 - RNA, 19 nt, Artificial Sequence
  Description of Artificial Sequence: Synthetic oligonucleotide
  Sense strand starting at position 1712 of SEQ ID NO: 1563969
gcaguuagucgcgggauuu

SEQ ID NO: 1845356 - RNA, 19 nt, Artificial Sequence
  Description of Artificial Sequence: Synthetic oligonucleotide
  Antisense strand to SEQ ID NO: 1845355
aaaucccgcgacuaacugc

SEQ ID NO: 1845357 - RNA, 19 nt, Artificial Sequence
  Description of Artificial Sequence: Synthetic oligonucleotide
  Sense strand starting at position 1713 of SEQ ID NO: 1563969
caguuagucgcgggauuua

SEQ ID NO: 1845358 - RNA, 19 nt, Artificial Sequence
  Description of Artificial Sequence: Synthetic oligonucleotide
  Antisense strand to SEQ ID NO: 1845357
uaaaucccgcgacuaacug

SEQ ID NO: 1845359 - RNA, 19 nt, Artificial Sequence
  Description of Artificial Sequence: Synthetic oligonucleotide
  Sense strand starting at position 1725 of SEQ ID NO: 1563969
ggauuuaccugccacggau

SEQ ID NO: 1845360 - RNA, 19 nt, Artificial Sequence
  Description of Artificial Sequence: Synthetic oligonucleotide
  Antisense strand to SEQ ID NO: 1845359
auccguggcagguaaaucc

SEQ ID NO: 1845361 - RNA, 19 nt, Artificial Sequence
  Description of Artificial Sequence: Synthetic oligonucleotide
  Sense strand starting at position 2035 of SEQ ID NO: 1563969
aucagauggugagcauaaa

SEQ ID NO: 1845362 - RNA, 19 nt, Artificial Sequence
  Description of Artificial Sequence: Synthetic oligonucleotide
  Antisense strand to SEQ ID NO: 1845361
uuuaugcucaccaucugau

SEQ ID NO: 1845363 - RNA, 19 nt, Artificial Sequence
  Description of Artificial Sequence: Synthetic oligonucleotide
  Sense strand starting at position 2321 of SEQ ID NO: 1563969
ggacgaaaucuguacagcu

SEQ ID NO: 1845364 - RNA, 19 nt, Artificial Sequence
  Description of Artificial Sequence: Synthetic oligonucleotide
  Antisense strand to SEQ ID NO: 1845363
agcuguacagauuucgucc

SEQ ID NO: 1845365 - RNA, 19 nt, Artificial Sequence
  Description of Artificial Sequence: Synthetic oligonucleotide
  Sense strand starting at position 2480 of SEQ ID NO: 1563969
ggcagucuagaucgggaaa

SEQ ID NO: 1845366 - RNA, 19 nt, Artificial Sequence
  Description of Artificial Sequence: Synthetic oligonucleotide
  Antisense strand to SEQ ID NO: 1845365
uuucccgaucuagacugcc

SEQ ID NO: 1845367 - RNA, 19 nt, Artificial Sequence
  Description of Artificial Sequence: Synthetic oligonucleotide
  Sense strand starting at position 2587 of SEQ ID NO: 1563969
augcgauucucucugucca

SEQ ID NO: 1845368 - RNA, 19 nt, Artificial Sequence
  Description of Artificial Sequence: Synthetic oligonucleotide
  Antisense strand to SEQ ID NO: 1845367
uggacagagagaaucgcau

SEQ ID NO: 1845369 - RNA, 19 nt, Artificial Sequence
  Description of Artificial Sequence: Synthetic oligonucleotide
  Sense strand starting at position 2588 of SEQ ID NO: 1563969
ugcgauucucucuguccau

SEQ ID NO: 1845370 - RNA, 19 nt, Artificial Sequence
  Description of Artificial Sequence: Synthetic oligonucleotide
  Antisense strand to SEQ ID NO: 1845369
auggacagagagaaucgca

SEQ ID NO: 1845371 - RNA, 19 nt, Artificial Sequence
  Description of Artificial Sequence: Synthetic oligonucleotide
  Sense strand starting at position 2630 of SEQ ID NO: 1563969
uuucucuugucuuuaggau

SEQ ID NO: 1845372 - RNA, 19 nt, Artificial Sequence
  Description of Artificial Sequence: Synthetic oligonucleotide
  Antisense strand to SEQ ID NO: 1845371
auccuaaagacaagagaaa

SEQ ID NO: 1845373 - RNA, 19 nt, Artificial Sequence
  Description of Artificial Sequence: Synthetic oligonucleotide
  Sense strand starting at position 2631 of SEQ ID NO: 1563969
uucucuugucuuuaggaua

SEQ ID NO: 1845374 - RNA, 19 nt, Artificial Sequence
  Description of Artificial Sequence: Synthetic oligonucleotide
  Antisense strand to SEQ ID NO: 1845373
uauccuaaagacaagagaa

SEQ ID NO: 1845375 - RNA, 19 nt, Artificial Sequence
  Description of Artificial Sequence: Synthetic oligonucleotide
  Sense strand starting at position 2741 of SEQ ID NO: 1563969
uggcuagauuauguaaauu

SEQ ID NO: 1845376 - RNA, 19 nt, Artificial Sequence
  Description of Artificial Sequence: Synthetic oligonucleotide
  Antisense strand to SEQ ID NO: 1845375
aauuuacauaaucuagcca

SEQ ID NO: 1845377 - RNA, 19 nt, Artificial Sequence
  Description of Artificial Sequence: Synthetic oligonucleotide
  Sense strand starting at position 2778 of SEQ ID NO: 1563969
gcgacaguaagcugccaua

SEQ ID NO: 1845378 - RNA, 19 nt, Artificial Sequence
  Description of Artificial Sequence: Synthetic oligonucleotide
  Antisense strand to SEQ ID NO: 1845377
uauggcagcuuacugucgc

SEQ ID NO: 1845379 - RNA, 19 nt, Artificial Sequence
  Description of Artificial Sequence: Synthetic oligonucleotide
  Sense strand starting at position 2884 of SEQ ID NO: 1563969
aauuguaaccguuggguua

SEQ ID NO: 1845380 - RNA, 19 nt, Artificial Sequence
  Description of Artificial Sequence: Synthetic oligonucleotide
  Antisense strand to SEQ ID NO: 1845379
uaacccaacgguuacaauu

SEQ ID NO: 1845381 - RNA, 19 nt, Artificial Sequence
  Description of Artificial Sequence: Synthetic oligonucleotide
  Sense strand starting at position 2885 of SEQ ID NO: 1563969
auuguaaccguuggguuaa

SEQ ID NO: 1845382 - RNA, 19 nt, Artificial Sequence
  Description of Artificial Sequence: Synthetic oligonucleotide
  Antisense strand to SEQ ID NO: 1845381
uuaacccaacgguuacaau

SEQ ID NO: 1845383 - RNA, 19 nt, Artificial Sequence
  Description of Artificial Sequence: Synthetic oligonucleotide
  Sense strand starting at position 2897 of SEQ ID NO: 1563969
ggguuaaacuaguaguauu

SEQ ID NO: 1845384 - RNA, 19 nt, Artificial Sequence
  Description of Artificial Sequence: Synthetic oligonucleotide
  Antisense strand to SEQ ID NO: 1845383
aauacuacuaguuuaaccc

SEQ ID NO: 1845385 - RNA, 19 nt, Artificial Sequence
  Description of Artificial Sequence: Synthetic oligonucleotide
  Sense strand starting at position 2908 of SEQ ID NO: 1563969
guaguauuaugaguaacuu

SEQ ID NO: 1845386 - RNA, 19 nt, Artificial Sequence
  Description of Artificial Sequence: Synthetic oligonucleotide
  Antisense strand to SEQ ID NO: 1845385
aaguuacucauaauacuac

SEQ ID NO: 1845387 - RNA, 19 nt, Artificial Sequence
  Description of Artificial Sequence: Synthetic oligonucleotide
  Sense strand starting at position 3471 of SEQ ID NO: 1563969
gcuacagauucgccagaca

SEQ ID NO: 1845388 - RNA, 19 nt, Artificial Sequence
  Description of Artificial Sequence: Synthetic oligonucleotide
  Antisense strand to SEQ ID NO: 1845387
ugucuggcgaaucuguagc

SEQ ID NO: 1845389 - RNA, 19 nt, Artificial Sequence
  Description of Artificial Sequence: Synthetic oligonucleotide
  Sense strand starting at position 3494 of SEQ ID NO: 1563969
aucucaggcaguugaagaa

SEQ ID NO: 1845390 - RNA, 19 nt, Artificial Sequence
  Description of Artificial Sequence: Synthetic oligonucleotide
  Antisense strand to SEQ ID NO: 1845389
uucuucaacugccugagau

SEQ ID NO: 1845391 - RNA, 19 nt, Artificial Sequence
  Description of Artificial Sequence: Synthetic oligonucleotide
  Sense strand starting at position 3621 of SEQ ID NO: 1563969
agacuaaguaaacgaugua

SEQ ID NO: 1845392 - RNA, 19 nt, Artificial Sequence
  Description of Artificial Sequence: Synthetic oligonucleotide
  Antisense strand to SEQ ID NO: 1845391
uacaucguuuacuuagucu

SEQ ID NO: 1845393 - RNA, 19 nt, Artificial Sequence
  Description of Artificial Sequence: Synthetic oligonucleotide
  Sense strand starting at position 3624 of SEQ ID NO: 1563969
cuaaguaaacgauguaauc

SEQ ID NO: 1845394 - RNA, 19 nt, Artificial Sequence
  Description of Artificial Sequence: Synthetic oligonucleotide
  Antisense strand to SEQ ID NO: 1845393
gauuacaucguuuacuuag

SEQ ID NO: 1845395 - RNA, 19 nt, Artificial Sequence
  Description of Artificial Sequence: Synthetic oligonucleotide
  Sense strand starting at position 3633 of SEQ ID NO: 1563969
cgauguaauccagaccauu

SEQ ID NO: 1845396 - RNA, 19 nt, Artificial Sequence
  Description of Artificial Sequence: Synthetic oligonucleotide
  Antisense strand to SEQ ID NO: 1845395
aauggucuggauuacaucg

SEQ ID NO: 1845397 - RNA, 19 nt, Artificial Sequence
  Description of Artificial Sequence: Synthetic oligonucleotide
  Sense strand starting at position 3704 of SEQ ID NO: 1563969
ugcauauaugaguauuaca

SEQ ID NO: 1845398 - RNA, 19 nt, Artificial Sequence
  Description of Artificial Sequence: Synthetic oligonucleotide
  Antisense strand to SEQ ID NO: 1845397
uguaauacucauauaugca

SEQ ID NO: 1845399 - RNA, 19 nt, Artificial Sequence
  Description of Artificial Sequence: Synthetic oligonucleotide
  Sense strand starting at position 3720 of SEQ ID NO: 1563969
acauuaacauuguagaaag

SEQ ID NO: 1845400 - RNA, 19 nt, Artificial Sequence
  Description of Artificial Sequence: Synthetic oligonucleotide
  Antisense strand to SEQ ID NO: 1845399
cuuucuacaauguuaaugu

SEQ ID NO: 1845401 - RNA, 19 nt, Artificial Sequence
  Description of Artificial Sequence: Synthetic oligonucleotide
  Sense strand starting at position 3727 of SEQ ID NO: 1563969
cauuguagaaagugguaga

SEQ ID NO: 1845402 - RNA, 19 nt, Artificial Sequence
  Description of Artificial Sequence: Synthetic oligonucleotide
  Antisense strand to SEQ ID NO: 1845401
ucuaccacuuucuacaaug

SEQ ID NO: 1845403 - RNA, 19 nt, Artificial Sequence
  Description of Artificial Sequence: Synthetic oligonucleotide
  Sense strand starting at position 3748 of SEQ ID NO: 1563969
ugggauuuguaucgaaaug

SEQ ID NO: 1845404 - RNA, 19 nt, Artificial Sequence
  Description of Artificial Sequence: Synthetic oligonucleotide
  Antisense strand to SEQ ID NO: 1845403
cauuucgauacaaauccca

SEQ ID NO: 1845405 - RNA, 19 nt, Artificial Sequence
  Description of Artificial Sequence: Synthetic oligonucleotide
  Sense strand starting at position 3874 of SEQ ID NO: 1563969
acuauauaagauuggcauu

SEQ ID NO: 1845406 - RNA, 19 nt, Artificial Sequence
  Description of Artificial Sequence: Synthetic oligonucleotide
  Antisense strand to SEQ ID NO: 1845405
aaugccaaucuuauauagu

SEQ ID NO: 1845407 - RNA, 19 nt, Artificial Sequence
  Description of Artificial Sequence: Synthetic oligonucleotide
  Sense strand starting at position 3931 of SEQ ID NO: 1563969
ugucgugguugucuuuaau

SEQ ID NO: 1845408 - RNA, 19 nt, Artificial Sequence
  Description of Artificial Sequence: Synthetic oligonucleotide
  Antisense strand to SEQ ID NO: 1845407
auuaaagacaaccacgaca

SEQ ID NO: 1845409 - RNA, 19 nt, Artificial Sequence
  Description of Artificial Sequence: Synthetic oligonucleotide
  Sense strand starting at position 3934 of SEQ ID NO: 1563969
cgugguugucuuuaaugca

SEQ ID NO: 1845410 - RNA, 19 nt, Artificial Sequence
  Description of Artificial Sequence: Synthetic oligonucleotide
  Antisense strand to SEQ ID NO: 1845409
ugcauuaaagacaaccacg

SEQ ID NO: 1845411 - RNA, 19 nt, Artificial Sequence
  Description of Artificial Sequence: Synthetic oligonucleotide
  Sense strand starting at position 59 of SEQ ID NO: 1563970
cuguucuuugcugauggaa

SEQ ID NO: 1845412 - RNA, 19 nt, Artificial Sequence
  Description of Artificial Sequence: Synthetic oligonucleotide
  Antisense strand to SEQ ID NO: 1845411
uuccaucagcaaagaacag

SEQ ID NO: 1845413 - RNA, 19 nt, Artificial Sequence
  Description of Artificial Sequence: Synthetic oligonucleotide
  Sense strand starting at position 62 of SEQ ID NO: 1563970
uucuuugcugauggaagaa

SEQ ID NO: 1845414 - RNA, 19 nt, Artificial Sequence
  Description of Artificial Sequence: Synthetic oligonucleotide
  Antisense strand to SEQ ID NO: 1845413
uucuuccaucagcaaagaa

SEQ ID NO: 1845415 - RNA, 19 nt, Artificial Sequence
  Description of Artificial Sequence: Synthetic oligonucleotide
  Sense strand starting at position 131 of SEQ ID NO: 1563970
aaggaagugcuaggcuaau

SEQ ID NO: 1845416 - RNA, 19 nt, Artificial Sequence
  Description of Artificial Sequence: Synthetic oligonucleotide
  Antisense strand to SEQ ID NO: 1845415
auuagccuagcacuuccuu

SEQ ID NO: 1845417 - RNA, 19 nt, Artificial Sequence
  Description of Artificial Sequence: Synthetic oligonucleotide
  Sense strand starting at position 137 of SEQ ID NO: 1563970
gugcuaggcuaaucucaaa

SEQ ID NO: 1845418 - RNA, 19 nt, Artificial Sequence
  Description of Artificial Sequence: Synthetic oligonucleotide
  Antisense strand to SEQ ID NO: 1845417
uuugagauuagccuagcac

SEQ ID NO: 1845419 - RNA, 19 nt, Artificial Sequence
  Description of Artificial Sequence: Synthetic oligonucleotide
  Sense strand starting at position 157 of SEQ ID NO: 1563970
acagaugucucucuaagua

SEQ ID NO: 1845420 - RNA, 19 nt, Artificial Sequence
  Description of Artificial Sequence: Synthetic oligonucleotide
  Antisense strand to SEQ ID NO: 1845419
uacuuagagagacaucugu

SEQ ID NO: 1845421 - RNA, 19 nt, Artificial Sequence
  Description of Artificial Sequence: Synthetic oligonucleotide
  Sense strand starting at position 194 of SEQ ID NO: 1563970
ggcaucuacuggcuacauu

SEQ ID NO: 1845422 - RNA, 19 nt, Artificial Sequence
  Description of Artificial Sequence: Synthetic oligonucleotide
  Antisense strand to SEQ ID NO: 1845421
aauguagccaguagaugcc

SEQ ID NO: 1845423 - RNA, 19 nt, Artificial Sequence
  Description of Artificial Sequence: Synthetic oligonucleotide
  Sense strand starting at position 203 of SEQ ID NO: 1563970
uggcuacauuggccugaau

SEQ ID NO: 1845424 - RNA, 19 nt, Artificial Sequence
  Description of Artificial Sequence: Synthetic oligonucleotide
  Antisense strand to SEQ ID NO: 1845423
auucaggccaauguagcca

SEQ ID NO: 1845425 - RNA, 19 nt, Artificial Sequence
  Description of Artificial Sequence: Synthetic oligonucleotide
  Sense strand starting at position 205 of SEQ ID NO: 1563970
gcuacauuggccugaauac

SEQ ID NO: 1845426 - RNA, 19 nt, Artificial Sequence
  Description of Artificial Sequence: Synthetic oligonucleotide
  Antisense strand to SEQ ID NO: 1845425
guauucaggccaauguagc

SEQ ID NO: 1845427 - RNA, 19 nt, Artificial Sequence
  Description of Artificial Sequence: Synthetic oligonucleotide
  Sense strand starting at position 206 of SEQ ID NO: 1563970
cuacauuggccugaauacu

SEQ ID NO: 1845428 - RNA, 19 nt, Artificial Sequence
  Description of Artificial Sequence: Synthetic oligonucleotide
  Antisense strand to SEQ ID NO: 1845427
aguauucaggccaauguag

SEQ ID NO: 1845429 - RNA, 19 nt, Artificial Sequence
  Description of Artificial Sequence: Synthetic oligonucleotide
  Sense strand starting at position 232 of SEQ ID NO: 1563970
ucaugaguccaaugcuuuc

SEQ ID NO: 1845430 - RNA, 19 nt, Artificial Sequence
  Description of Artificial Sequence: Synthetic oligonucleotide
  Antisense strand to SEQ ID NO: 1845429
gaaagcauuggacucauga

SEQ ID NO: 1845431 - RNA, 19 nt, Artificial Sequence
  Description of Artificial Sequence: Synthetic oligonucleotide
  Sense strand starting at position 251 of SEQ ID NO: 1563970
ugcccauucucuuuaguuu

SEQ ID NO: 1845432 - RNA, 19 nt, Artificial Sequence
  Description of Artificial Sequence: Synthetic oligonucleotide
  Antisense strand to SEQ ID NO: 1845431
aaacuaaagagaaugggca

SEQ ID NO: 1845433 - RNA, 19 nt, Artificial Sequence
  Description of Artificial Sequence: Synthetic oligonucleotide
  Sense strand starting at position 259 of SEQ ID NO: 1563970
cucuuuaguuugguggaaa

SEQ ID NO: 1845434 - RNA, 19 nt, Artificial Sequence
  Description of Artificial Sequence: Synthetic oligonucleotide
  Antisense strand to SEQ ID NO: 1845433
uuuccaccaaacuaaagag

SEQ ID NO: 1845435 - RNA, 19 nt, Artificial Sequence
  Description of Artificial Sequence: Synthetic oligonucleotide
  Sense strand starting at position 311 of SEQ ID NO: 1563970
cucaguacucucuguucua

SEQ ID NO: 1845436 - RNA, 19 nt, Artificial Sequence
  Description of Artificial Sequence: Synthetic oligonucleotide
  Antisense strand to SEQ ID NO: 1845435
uagaacagagaguacugag

SEQ ID NO: 1845437 - RNA, 19 nt, Artificial Sequence
  Description of Artificial Sequence: Synthetic oligonucleotide
  Sense strand starting at position 314 of SEQ ID NO: 1563970
aguacucucuguucuagaa

SEQ ID NO: 1845438 - RNA, 19 nt, Artificial Sequence
  Description of Artificial Sequence: Synthetic oligonucleotide
  Antisense strand to SEQ ID NO: 1845437
uucuagaacagagaguacu

SEQ ID NO: 1845439 - RNA, 19 nt, Artificial Sequence
  Description of Artificial Sequence: Synthetic oligonucleotide
  Sense strand starting at position 448 of SEQ ID NO: 1563970
gccugauucuguuccugga

SEQ ID NO: 1845440 - RNA, 19 nt, Artificial Sequence
  Description of Artificial Sequence: Synthetic oligonucleotide
  Antisense strand to SEQ ID NO: 1845439
uccaggaacagaaucaggc

SEQ ID NO: 1845441 - RNA, 19 nt, Artificial Sequence
  Description of Artificial Sequence: Synthetic oligonucleotide
  Sense strand starting at position 515 of SEQ ID NO: 1563970
ugguguauggcaugcauau

SEQ ID NO: 1845442 - RNA, 19 nt, Artificial Sequence
  Description of Artificial Sequence: Synthetic oligonucleotide
  Antisense strand to SEQ ID NO: 1845441
auaugcaugccauacacca

SEQ ID NO: 1845443 - RNA, 19 nt, Artificial Sequence
  Description of Artificial Sequence: Synthetic oligonucleotide
  Sense strand starting at position 517 of SEQ ID NO: 1563970
guguauggcaugcauauua

SEQ ID NO: 1845444 - RNA, 19 nt, Artificial Sequence
  Description of Artificial Sequence: Synthetic oligonucleotide
  Antisense strand to SEQ ID NO: 1845443
uaauaugcaugccauacac

SEQ ID NO: 1845445 - RNA, 19 nt, Artificial Sequence
  Description of Artificial Sequence: Synthetic oligonucleotide
  Sense strand starting at position 533 of SEQ ID NO: 1563970
uuacauaauccaggguaga

SEQ ID NO: 1845446 - RNA, 19 nt, Artificial Sequence
  Description of Artificial Sequence: Synthetic oligonucleotide
  Antisense strand to SEQ ID NO: 1845445
ucuacccuggauuauguaa

SEQ ID NO: 1845447 - RNA, 19 nt, Artificial Sequence
  Description of Artificial Sequence: Synthetic oligonucleotide
  Sense strand starting at position 534 of SEQ ID NO: 1563970
uacauaauccaggguagau

SEQ ID NO: 1845448 - RNA, 19 nt, Artificial Sequence
  Description of Artificial Sequence: Synthetic oligonucleotide
  Antisense strand to SEQ ID NO: 1845447
aucuacccuggauuaugua

SEQ ID NO: 1845449 - RNA, 19 nt, Artificial Sequence
  Description of Artificial Sequence: Synthetic oligonucleotide
  Sense strand starting at position 590 of SEQ ID NO: 1563970
guucccuuaagauggauga

SEQ ID NO: 1845450 - RNA, 19 nt, Artificial Sequence
  Description of Artificial Sequence: Synthetic oligonucleotide
  Antisense strand to SEQ ID NO: 1845449
ucauccaucuuaagggaac

SEQ ID NO: 1845451 - RNA, 19 nt, Artificial Sequence
  Description of Artificial Sequence: Synthetic oligonucleotide
  Sense strand starting at position 623 of SEQ ID NO: 1563970
auugucuuaugaguuguaa

SEQ ID NO: 1845452 - RNA, 19 nt, Artificial Sequence
  Description of Artificial Sequence: Synthetic oligonucleotide
  Antisense strand to SEQ ID NO: 1845451
uuacaacucauaagacaau

SEQ ID NO: 1845453 - RNA, 19 nt, Artificial Sequence
  Description of Artificial Sequence: Synthetic oligonucleotide
  Sense strand starting at position 625 of SEQ ID NO: 1563970
ugucuuaugaguuguaauu

SEQ ID NO: 1845454 - RNA, 19 nt, Artificial Sequence
  Description of Artificial Sequence: Synthetic oligonucleotide
  Antisense strand to SEQ ID NO: 1845453
aauuacaacucauaagaca

SEQ ID NO: 1845455 - RNA, 19 nt, Artificial Sequence
  Description of Artificial Sequence: Synthetic oligonucleotide
  Sense strand starting at position 850 of SEQ ID NO: 1563970
cgcccuagcuggucucaaa

SEQ ID NO: 1845456 - RNA, 19 nt, Artificial Sequence
  Description of Artificial Sequence: Synthetic oligonucleotide
  Antisense strand to SEQ ID NO: 1845455
uuugagaccagcuagggcg

SEQ ID NO: 1845457 - RNA, 19 nt, Artificial Sequence
  Description of Artificial Sequence: Synthetic oligonucleotide
  Sense strand starting at position 914 of SEQ ID NO: 1563970
cgacguucgccuccauuau

SEQ ID NO: 1845458 - RNA, 19 nt, Artificial Sequence
  Description of Artificial Sequence: Synthetic oligonucleotide
  Antisense strand to SEQ ID NO: 1845457
auaauggaggcgaacgucg

SEQ ID NO: 1845459 - RNA, 19 nt, Artificial Sequence
  Description of Artificial Sequence: Synthetic oligonucleotide
  Sense strand starting at position 965 of SEQ ID NO: 1563970
acgcuaaucugacuccauu

SEQ ID NO: 1845460 - RNA, 19 nt, Artificial Sequence
  Description of Artificial Sequence: Synthetic oligonucleotide
  Antisense strand to SEQ ID NO: 1845459
aauggagucagauuagcgu

SEQ ID NO: 1845461 - RNA, 19 nt, Artificial Sequence
  Description of Artificial Sequence: Synthetic oligonucleotide
  Sense strand starting at position 1029 of SEQ ID NO: 1563970
cguguaagugugcccaaau

SEQ ID NO: 1845462 - RNA, 19 nt, Artificial Sequence
  Description of Artificial Sequence: Synthetic oligonucleotide
  Antisense strand to SEQ ID NO: 1845461
auuugggcacacuuacacg

SEQ ID NO: 1845463 - RNA, 19 nt, Artificial Sequence
  Description of Artificial Sequence: Synthetic oligonucleotide
  Sense strand starting at position 1030 of SEQ ID NO: 1563970
guguaagugugcccaaaua

SEQ ID NO: 1845464 - RNA, 19 nt, Artificial Sequence
  Description of Artificial Sequence: Synthetic oligonucleotide
  Antisense strand to SEQ ID NO: 1845463
uauuugggcacacuuacac

SEQ ID NO: 1845465 - RNA, 19 nt, Artificial Sequence
  Description of Artificial Sequence: Synthetic oligonucleotide
  Sense strand starting at position 1123 of SEQ ID NO: 1563970
ucaagcagauccuuugaaa

SEQ ID NO: 1845466 - RNA, 19 nt, Artificial Sequence
  Description of Artificial Sequence: Synthetic oligonucleotide
  Antisense strand to SEQ ID NO: 1845465
uuucaaaggaucugcuuga

SEQ ID NO: 1845467 - RNA, 19 nt, Artificial Sequence
  Description of Artificial Sequence: Synthetic oligonucleotide
  Sense strand starting at position 1160 of SEQ ID NO: 1563970
aauucugaagucugagauu

SEQ ID NO: 1845468 - RNA, 19 nt, Artificial Sequence
  Description of Artificial Sequence: Synthetic oligonucleotide
  Antisense strand to SEQ ID NO: 1845467
aaucucagacuucagaauu

SEQ ID NO: 1845469 - RNA, 19 nt, Artificial Sequence
  Description of Artificial Sequence: Synthetic oligonucleotide
  Sense strand starting at position 1191 of SEQ ID NO: 1563970
acugcucaaucugcugaaa

SEQ ID NO: 1845470 - RNA, 19 nt, Artificial Sequence
  Description of Artificial Sequence: Synthetic oligonucleotide
  Antisense strand to SEQ ID NO: 1845469
uuucagcagauugagcagu

SEQ ID NO: 1845471 - RNA, 19 nt, Artificial Sequence
  Description of Artificial Sequence: Synthetic oligonucleotide
  Sense strand starting at position 1214 of SEQ ID NO: 1563970
ggcaaaccucucgauauac

SEQ ID NO: 1845472 - RNA, 19 nt, Artificial Sequence
  Description of Artificial Sequence: Synthetic oligonucleotide
  Antisense strand to SEQ ID NO: 1845471
guauaucgagagguuugcc

SEQ ID NO: 1845473 - RNA, 19 nt, Artificial Sequence
  Description of Artificial Sequence: Synthetic oligonucleotide
  Sense strand starting at position 1574 of SEQ ID NO: 1563970
agggaaugucucugaugga

SEQ ID NO: 1845474 - RNA, 19 nt, Artificial Sequence
  Description of Artificial Sequence: Synthetic oligonucleotide
  Antisense strand to SEQ ID NO: 1845473
uccaucagagacauucccu

SEQ ID NO: 1845475 - RNA, 19 nt, Artificial Sequence
  Description of Artificial Sequence: Synthetic oligonucleotide
  Sense strand starting at position 1575 of SEQ ID NO: 1563970
gggaaugucucugauggag

SEQ ID NO: 1845476 - RNA, 19 nt, Artificial Sequence
  Description of Artificial Sequence: Synthetic oligonucleotide
  Antisense strand to SEQ ID NO: 1845475
cuccaucagagacauuccc

SEQ ID NO: 1845477 - RNA, 19 nt, Artificial Sequence
  Description of Artificial Sequence: Synthetic oligonucleotide
  Sense strand starting at position 2164 of SEQ ID NO: 1563970
gaguccaaucauggcucua

SEQ ID NO: 1845478 - RNA, 19 nt, Artificial Sequence
  Description of Artificial Sequence: Synthetic oligonucleotide
  Antisense strand to SEQ ID NO: 1845477
uagagccaugauuggacuc

SEQ ID NO: 1845479 - RNA, 19 nt, Artificial Sequence
  Description of Artificial Sequence: Synthetic oligonucleotide
  Sense strand starting at position 2166 of SEQ ID NO: 1563970
guccaaucauggcucuauu

SEQ ID NO: 1845480 - RNA, 19 nt, Artificial Sequence
  Description of Artificial Sequence: Synthetic oligonucleotide
  Antisense strand to SEQ ID NO: 1845479
aauagagccaugauuggac

SEQ ID NO: 1845481 - RNA, 19 nt, Artificial Sequence
  Description of Artificial Sequence: Synthetic oligonucleotide
  Sense strand starting at position 2176 of SEQ ID NO: 1563970
ggcucuauuguggaacuga

SEQ ID NO: 1845482 - RNA, 19 nt, Artificial Sequence
  Description of Artificial Sequence: Synthetic oligonucleotide
  Antisense strand to SEQ ID NO: 1845481
ucaguuccacaauagagcc

SEQ ID NO: 1845483 - RNA, 19 nt, Artificial Sequence
  Description of Artificial Sequence: Synthetic oligonucleotide
  Sense strand starting at position 3140 of SEQ ID NO: 1563970
cuuuaugucuagcugagau

SEQ ID NO: 1845484 - RNA, 19 nt, Artificial Sequence
  Description of Artificial Sequence: Synthetic oligonucleotide
  Antisense strand to SEQ ID NO: 1845483
aucucagcuagacauaaag

SEQ ID NO: 1845485 - RNA, 19 nt, Artificial Sequence
  Description of Artificial Sequence: Synthetic oligonucleotide
  Sense strand starting at position 3147 of SEQ ID NO: 1563970
ucuagcugagauuguaaau

SEQ ID NO: 1845486 - RNA, 19 nt, Artificial Sequence
  Description of Artificial Sequence: Synthetic oligonucleotide
  Antisense strand to SEQ ID NO: 1845485
auuuacaaucucagcuaga

SEQ ID NO: 1845487 - RNA, 19 nt, Artificial Sequence
  Description of Artificial Sequence: Synthetic oligonucleotide
  Sense strand starting at position 3683 of SEQ ID NO: 1563970
acacgccgccuuuaagaaa

SEQ ID NO: 1845488 - RNA, 19 nt, Artificial Sequence
  Description of Artificial Sequence: Synthetic oligonucleotide
  Antisense strand to SEQ ID NO: 1845487
uuucuuaaaggcggcgugu

SEQ ID NO: 1845489 - RNA, 19 nt, Artificial Sequence
  Description of Artificial Sequence: Synthetic oligonucleotide
  Sense strand starting at position 3863 of SEQ ID NO: 1563970
gagagauuaucgccuaucg

SEQ ID NO: 1845490 - RNA, 19 nt, Artificial Sequence
  Description of Artificial Sequence: Synthetic oligonucleotide
  Antisense strand to SEQ ID NO: 1845489
cgauaggcgauaaucucuc

SEQ ID NO: 1845491 - RNA, 19 nt, Artificial Sequence
  Description of Artificial Sequence: Synthetic oligonucleotide
  Sense strand starting at position 52 of SEQ ID NO: 1563971
ugaagaaugccaggucaua

SEQ ID NO: 1845492 - RNA, 19 nt, Artificial Sequence
  Description of Artificial Sequence: Synthetic oligonucleotide
  Antisense strand to SEQ ID NO: 1845491
uaugaccuggcauucuuca

SEQ ID NO: 1845493 - RNA, 19 nt, Artificial Sequence
  Description of Artificial Sequence: Synthetic oligonucleotide
  Sense strand starting at position 120 of SEQ ID NO: 1563971
ucuaguuaaugcucaagag

SEQ ID NO: 1845494 - RNA, 19 nt, Artificial Sequence
  Description of Artificial Sequence: Synthetic oligonucleotide
  Antisense strand to SEQ ID NO: 1845493
cucuugagcauuaacuaga

SEQ ID NO: 1845495 - RNA, 19 nt, Artificial Sequence
  Description of Artificial Sequence: Synthetic oligonucleotide
  Sense strand starting at position 130 of SEQ ID NO: 1563971
gcucaagagggcuaccaaa

SEQ ID NO: 1845496 - RNA, 19 nt, Artificial Sequence
  Description of Artificial Sequence: Synthetic oligonucleotide
  Antisense strand to SEQ ID NO: 1845495
uuugguagcccucuugagc

SEQ ID NO: 1845497 - RNA, 19 nt, Artificial Sequence
  Description of Artificial Sequence: Synthetic oligonucleotide
  Sense strand starting at position 140 of SEQ ID NO: 1563971
gcuaccaaacuugauguua

SEQ ID NO: 1845498 - RNA, 19 nt, Artificial Sequence
  Description of Artificial Sequence: Synthetic oligonucleotide
  Antisense strand to SEQ ID NO: 1845497
uaacaucaaguuugguagc

SEQ ID NO: 1845499 - RNA, 19 nt, Artificial Sequence
  Description of Artificial Sequence: Synthetic oligonucleotide
  Sense strand starting at position 284 of SEQ ID NO: 1563971
gcuagugaaagcugggaga

SEQ ID NO: 1845500 - RNA, 19 nt, Artificial Sequence
  Description of Artificial Sequence: Synthetic oligonucleotide
  Antisense strand to SEQ ID NO: 1845499
ucucccagcuuucacuagc

SEQ ID NO: 1845501 - RNA, 19 nt, Artificial Sequence
  Description of Artificial Sequence: Synthetic oligonucleotide
  Sense strand starting at position 286 of SEQ ID NO: 1563971
uagugaaagcugggagacu

SEQ ID NO: 1845502 - RNA, 19 nt, Artificial Sequence
  Description of Artificial Sequence: Synthetic oligonucleotide
  Antisense strand to SEQ ID NO: 1845501
agucucccagcuuucacua

SEQ ID NO: 1845503 - RNA, 19 nt, Artificial Sequence
  Description of Artificial Sequence: Synthetic oligonucleotide
  Sense strand starting at position 327 of SEQ ID NO: 1563971
ccuucucaggauugaguua

SEQ ID NO: 1845504 - RNA, 19 nt, Artificial Sequence
  Description of Artificial Sequence: Synthetic oligonucleotide
  Antisense strand to SEQ ID NO: 1845503
uaacucaauccugagaagg

SEQ ID NO: 1845505 - RNA, 19 nt, Artificial Sequence
  Description of Artificial Sequence: Synthetic oligonucleotide
  Sense strand starting at position 383 of SEQ ID NO: 1563971
cacugaguuguugggagaa

SEQ ID NO: 1845506 - RNA, 19 nt, Artificial Sequence
  Description of Artificial Sequence: Synthetic oligonucleotide
  Antisense strand to SEQ ID NO: 1845505
uucucccaacaacucagug

SEQ ID NO: 1845507 - RNA, 19 nt, Artificial Sequence
  Description of Artificial Sequence: Synthetic oligonucleotide
  Sense strand starting at position 436 of SEQ ID NO: 1563971
aagacugaagcaugucaua

SEQ ID NO: 1845508 - RNA, 19 nt, Artificial Sequence
  Description of Artificial Sequence: Synthetic oligonucleotide
  Antisense strand to SEQ ID NO: 1845507
uaugacaugcuucagucuu

SEQ ID NO: 1845509 - RNA, 19 nt, Artificial Sequence
  Description of Artificial Sequence: Synthetic oligonucleotide
  Sense strand starting at position 519 of SEQ ID NO: 1563971
gaaacaggucaagguuaua

SEQ ID NO: 1845510 - RNA, 19 nt, Artificial Sequence
  Description of Artificial Sequence: Synthetic oligonucleotide
  Antisense strand to SEQ ID NO: 1845509
uauaaccuugaccuguuuc

SEQ ID NO: 1845511 - RNA, 19 nt, Artificial Sequence
  Description of Artificial Sequence: Synthetic oligonucleotide
  Sense strand starting at position 562 of SEQ ID NO: 1563971
ggagguuccacuggaaucu

SEQ ID NO: 1845512 - RNA, 19 nt, Artificial Sequence
  Description of Artificial Sequence: Synthetic oligonucleotide
  Antisense strand to SEQ ID NO: 1845511
agauuccaguggaaccucc

SEQ ID NO: 1845513 - RNA, 19 nt, Artificial Sequence
  Description of Artificial Sequence: Synthetic oligonucleotide
  Sense strand starting at position 694 of SEQ ID NO: 1563971
ccaccuacacuuugaggau

SEQ ID NO: 1845514 - RNA, 19 nt, Artificial Sequence
  Description of Artificial Sequence: Synthetic oligonucleotide
  Antisense strand to SEQ ID NO: 1845513
auccucaaaguguaggugg

SEQ ID NO: 1845515 - RNA, 19 nt, Artificial Sequence
  Description of Artificial Sequence: Synthetic oligonucleotide
  Sense strand starting at position 721 of SEQ ID NO: 1563971
agcuccauuuccucaguca

SEQ ID NO: 1845516 - RNA, 19 nt, Artificial Sequence
  Description of Artificial Sequence: Synthetic oligonucleotide
  Antisense strand to SEQ ID NO: 1845515
ugacugaggaaauggagcu

SEQ ID NO: 1845517 - RNA, 19 nt, Artificial Sequence
  Description of Artificial Sequence: Synthetic oligonucleotide
  Sense strand starting at position 978 of SEQ ID NO: 1563971
ggcucucauuacccagaca

SEQ ID NO: 1845518 - RNA, 19 nt, Artificial Sequence
  Description of Artificial Sequence: Synthetic oligonucleotide
  Antisense strand to SEQ ID NO: 1845517
ugucuggguaaugagagcc

SEQ ID NO: 1845519 - RNA, 19 nt, Artificial Sequence
  Description of Artificial Sequence: Synthetic oligonucleotide
  Sense strand starting at position 1009 of SEQ ID NO: 1563971
ugguaugaacugcaaucua

SEQ ID NO: 1845520 - RNA, 19 nt, Artificial Sequence
  Description of Artificial Sequence: Synthetic oligonucleotide
  Antisense strand to SEQ ID NO: 1845519
uagauugcaguucauacca

SEQ ID NO: 1845521 - RNA, 19 nt, Artificial Sequence
  Description of Artificial Sequence: Synthetic oligonucleotide
  Sense strand starting at position 1168 of SEQ ID NO: 1563971
gagggucugcaguagauua

SEQ ID NO: 1845522 - RNA, 19 nt, Artificial Sequence
  Description of Artificial Sequence: Synthetic oligonucleotide
  Antisense strand to SEQ ID NO: 1845521
uaaucuacugcagacccuc

SEQ ID NO: 1845523 - RNA, 19 nt, Artificial Sequence
  Description of Artificial Sequence: Synthetic oligonucleotide
  Sense strand starting at position 1179 of SEQ ID NO: 1563971
guagauuaucaggacguga

SEQ ID NO: 1845524 - RNA, 19 nt, Artificial Sequence
  Description of Artificial Sequence: Synthetic oligonucleotide
  Antisense strand to SEQ ID NO: 1845523
ucacguccugauaaucuac

SEQ ID NO: 1845525 - RNA, 19 nt, Artificial Sequence
  Description of Artificial Sequence: Synthetic oligonucleotide
  Sense strand starting at position 1181 of SEQ ID NO: 1563971
agauuaucaggacgugaag

SEQ ID NO: 1845526 - RNA, 19 nt, Artificial Sequence
  Description of Artificial Sequence: Synthetic oligonucleotide
  Antisense strand to SEQ ID NO: 1845525
cuucacguccugauaaucu

SEQ ID NO: 1845527 - RNA, 19 nt, Artificial Sequence
  Description of Artificial Sequence: Synthetic oligonucleotide
  Sense strand starting at position 1184 of SEQ ID NO: 1563971
uuaucaggacgugaaguua

SEQ ID NO: 1845528 - RNA, 19 nt, Artificial Sequence
  Description of Artificial Sequence: Synthetic oligonucleotide
  Antisense strand to SEQ ID NO: 1845527
uaacuucacguccugauaa

SEQ ID NO: 1845529 - RNA, 19 nt, Artificial Sequence
  Description of Artificial Sequence: Synthetic oligonucleotide
  Sense strand starting at position 1989 of SEQ ID NO: 1563971
auugacucgucaguaauuu

SEQ ID NO: 1845530 - RNA, 19 nt, Artificial Sequence
  Description of Artificial Sequence: Synthetic oligonucleotide
  Antisense strand to SEQ ID NO: 1845529
aaauuacugacgagucaau

SEQ ID NO: 1845531 - RNA, 19 nt, Artificial Sequence
  Description of Artificial Sequence: Synthetic oligonucleotide
  Sense strand starting at position 2211 of SEQ ID NO: 1563971
agaauuuagucccugccuu

SEQ ID NO: 1845532 - RNA, 19 nt, Artificial Sequence
  Description of Artificial Sequence: Synthetic oligonucleotide
  Antisense strand to SEQ ID NO: 1845531
aaggcagggacuaaauucu

SEQ ID NO: 1845533 - RNA, 19 nt, Artificial Sequence
  Description of Artificial Sequence: Synthetic oligonucleotide
  Sense strand starting at position 2508 of SEQ ID NO: 1563971
uagagaguuuacccuuaga

SEQ ID NO: 1845534 - RNA, 19 nt, Artificial Sequence
  Description of Artificial Sequence: Synthetic oligonucleotide
  Antisense strand to SEQ ID NO: 1845533
ucuaaggguaaacucucua

SEQ ID NO: 1845535 - RNA, 19 nt, Artificial Sequence
  Description of Artificial Sequence: Synthetic oligonucleotide
  Sense strand starting at position 2511 of SEQ ID NO: 1563971
agaguuuacccuuagagca

SEQ ID NO: 1845536 - RNA, 19 nt, Artificial Sequence
  Description of Artificial Sequence: Synthetic oligonucleotide
  Antisense strand to SEQ ID NO: 1845535
ugcucuaaggguaaacucu

SEQ ID NO: 1845537 - RNA, 19 nt, Artificial Sequence
  Description of Artificial Sequence: Synthetic oligonucleotide
  Sense strand starting at position 2611 of SEQ ID NO: 1563971
agauuaauuugaggaagac

SEQ ID NO: 1845538 - RNA, 19 nt, Artificial Sequence
  Description of Artificial Sequence: Synthetic oligonucleotide
  Antisense strand to SEQ ID NO: 1845537
gucuuccucaaauuaaucu

SEQ ID NO: 1845539 - RNA, 19 nt, Artificial Sequence
  Description of Artificial Sequence: Synthetic oligonucleotide
  Sense strand starting at position 2775 of SEQ ID NO: 1563971
gaauuuggauucuaguaug

SEQ ID NO: 1845540 - RNA, 19 nt, Artificial Sequence
  Description of Artificial Sequence: Synthetic oligonucleotide
  Antisense strand to SEQ ID NO: 1845539
cauacuagaauccaaauuc

SEQ ID NO: 1845541 - RNA, 19 nt, Artificial Sequence
  Description of Artificial Sequence: Synthetic oligonucleotide
  Sense strand starting at position 2823 of SEQ ID NO: 1563971
auaaauaucguugagcaag

SEQ ID NO: 1845542 - RNA, 19 nt, Artificial Sequence
  Description of Artificial Sequence: Synthetic oligonucleotide
  Antisense strand to SEQ ID NO: 1845541
cuugcucaacgauauuuau

SEQ ID NO: 1845543 - RNA, 19 nt, Artificial Sequence
  Description of Artificial Sequence: Synthetic oligonucleotide
  Sense strand starting at position 2884 of SEQ ID NO: 1563971
guuauaagagccuaugggu

SEQ ID NO: 1845544 - RNA, 19 nt, Artificial Sequence
  Description of Artificial Sequence: Synthetic oligonucleotide
  Antisense strand to SEQ ID NO: 1845543
acccauaggcucuuauaac

SEQ ID NO: 1845545 - RNA, 19 nt, Artificial Sequence
  Description of Artificial Sequence: Synthetic oligonucleotide
  Sense strand starting at position 3031 of SEQ ID NO: 1563971
ucaagcauuuaugaaggaa

SEQ ID NO: 1845546 - RNA, 19 nt, Artificial Sequence
  Description of Artificial Sequence: Synthetic oligonucleotide
  Antisense strand to SEQ ID NO: 1845545
uuccuucauaaaugcuuga

SEQ ID NO: 1845547 - RNA, 19 nt, Artificial Sequence
  Description of Artificial Sequence: Synthetic oligonucleotide
  Sense strand starting at position 3161 of SEQ ID NO: 1563971
guacucucaguugaguaua

SEQ ID NO: 1845548 - RNA, 19 nt, Artificial Sequence
  Description of Artificial Sequence: Synthetic oligonucleotide
  Antisense strand to SEQ ID NO: 1845547
uauacucaacugagaguac

SEQ ID NO: 1845549 - RNA, 19 nt, Artificial Sequence
  Description of Artificial Sequence: Synthetic oligonucleotide
  Sense strand starting at position 3164 of SEQ ID NO: 1563971
cucucaguugaguauacua

SEQ ID NO: 1845550 - RNA, 19 nt, Artificial Sequence
  Description of Artificial Sequence: Synthetic oligonucleotide
  Antisense strand to SEQ ID NO: 1845549
uaguauacucaacugagag

SEQ ID NO: 1845551 - RNA, 19 nt, Artificial Sequence
  Description of Artificial Sequence: Synthetic oligonucleotide
  Sense strand starting at position 3172 of SEQ ID NO: 1563971
ugaguauacuaagcauaaa

SEQ ID NO: 1845552 - RNA, 19 nt, Artificial Sequence
  Description of Artificial Sequence: Synthetic oligonucleotide
  Antisense strand to SEQ ID NO: 1845551
uuuaugcuuaguauacuca

SEQ ID NO: 1845553 - RNA, 19 nt, Artificial Sequence
  Description of Artificial Sequence: Synthetic oligonucleotide
  Sense strand starting at position 3218 of SEQ ID NO: 1563971
agagcagguuuaguggaau

SEQ ID NO: 1845554 - RNA, 19 nt, Artificial Sequence
  Description of Artificial Sequence: Synthetic oligonucleotide
  Antisense strand to SEQ ID NO: 1845553
auuccacuaaaccugcucu

SEQ ID NO: 1845555 - RNA, 19 nt, Artificial Sequence
  Description of Artificial Sequence: Synthetic oligonucleotide
  Sense strand starting at position 3230 of SEQ ID NO: 1563971
guggaauggucauugacaa

SEQ ID NO: 1845556 - RNA, 19 nt, Artificial Sequence
  Description of Artificial Sequence: Synthetic oligonucleotide
  Antisense strand to SEQ ID NO: 1845555
uugucaaugaccauuccac

SEQ ID NO: 1845557 - RNA, 19 nt, Artificial Sequence
  Description of Artificial Sequence: Synthetic oligonucleotide
  Sense strand starting at position 3231 of SEQ ID NO: 1563971
uggaauggucauugacaac

SEQ ID NO: 1845558 - RNA, 19 nt, Artificial Sequence
  Description of Artificial Sequence: Synthetic oligonucleotide
  Antisense strand to SEQ ID NO: 1845557
guugucaaugaccauucca

SEQ ID NO: 1845559 - RNA, 19 nt, Artificial Sequence
  Description of Artificial Sequence: Synthetic oligonucleotide
  Sense strand starting at position 3309 of SEQ ID NO: 1563971
agauguuagugaucaugga

SEQ ID NO: 1845560 - RNA, 19 nt, Artificial Sequence
  Description of Artificial Sequence: Synthetic oligonucleotide
  Antisense strand to SEQ ID NO: 1845559
uccaugaucacuaacaucu

SEQ ID NO: 1845561 - RNA, 19 nt, Artificial Sequence
  Description of Artificial Sequence: Synthetic oligonucleotide
  Sense strand starting at position 3313 of SEQ ID NO: 1563971
guuagugaucauggaaagu

SEQ ID NO: 1845562 - RNA, 19 nt, Artificial Sequence
  Description of Artificial Sequence: Synthetic oligonucleotide
  Antisense strand to SEQ ID NO: 1845561
acuuuccaugaucacuaac

SEQ ID NO: 1845563 - RNA, 19 nt, Artificial Sequence
  Description of Artificial Sequence: Synthetic oligonucleotide
  Sense strand starting at position 3361 of SEQ ID NO: 1563971
acaugaggucuagggacuu

SEQ ID NO: 1845564 - RNA, 19 nt, Artificial Sequence
  Description of Artificial Sequence: Synthetic oligonucleotide
  Antisense strand to SEQ ID NO: 1845563
aagucccuagaccucaugu

SEQ ID NO: 1845565 - RNA, 19 nt, Artificial Sequence
  Description of Artificial Sequence: Synthetic oligonucleotide
  Sense strand starting at position 3523 of SEQ ID NO: 1563971
cucuguaugcauuaaagaa

SEQ ID NO: 1845566 - RNA, 19 nt, Artificial Sequence
  Description of Artificial Sequence: Synthetic oligonucleotide
  Antisense strand to SEQ ID NO: 1845565
uucuuuaaugcauacagag

SEQ ID NO: 1845567 - RNA, 19 nt, Artificial Sequence
  Description of Artificial Sequence: Synthetic oligonucleotide
  Sense strand starting at position 3527 of SEQ ID NO: 1563971
guaugcauuaaagaacgau

SEQ ID NO: 1845568 - RNA, 19 nt, Artificial Sequence
  Description of Artificial Sequence: Synthetic oligonucleotide
  Antisense strand to SEQ ID NO: 1845567
aucguucuuuaaugcauac

SEQ ID NO: 1845569 - RNA, 19 nt, Artificial Sequence
  Description of Artificial Sequence: Synthetic oligonucleotide
  Sense strand starting at position 3625 of SEQ ID NO: 1563971
ugcuuauaacuggaguuau

SEQ ID NO: 1845570 - RNA, 19 nt, Artificial Sequence
  Description of Artificial Sequence: Synthetic oligonucleotide
  Antisense strand to SEQ ID NO: 1845569
auaacuccaguuauaagca

SEQ ID NO: 1845571 - RNA, 19 nt, Artificial Sequence
  Description of Artificial Sequence: Synthetic oligonucleotide
  Sense strand starting at position 59 of SEQ ID NO: 1563972
ugaagaaugccaggucaua

SEQ ID NO: 1845572 - RNA, 19 nt, Artificial Sequence
  Description of Artificial Sequence: Synthetic oligonucleotide
  Antisense strand to SEQ ID NO: 1845571
uaugaccuggcauucuuca

SEQ ID NO: 1845573 - RNA, 19 nt, Artificial Sequence
  Description of Artificial Sequence: Synthetic oligonucleotide
  Sense strand starting at position 127 of SEQ ID NO: 1563972
ucuaguuaaugcucaagag

SEQ ID NO: 1845574 - RNA, 19 nt, Artificial Sequence
  Description of Artificial Sequence: Synthetic oligonucleotide
  Antisense strand to SEQ ID NO: 1845573
cucuugagcauuaacuaga

SEQ ID NO: 1845575 - RNA, 19 nt, Artificial Sequence
  Description of Artificial Sequence: Synthetic oligonucleotide
  Sense strand starting at position 137 of SEQ ID NO: 1563972
gcucaagagggcuaccaaa

SEQ ID NO: 1845576 - RNA, 19 nt, Artificial Sequence
  Description of Artificial Sequence: Synthetic oligonucleotide
  Antisense strand to SEQ ID NO: 1845575
uuugguagcccucuugagc

SEQ ID NO: 1845577 - RNA, 19 nt, Artificial Sequence
  Description of Artificial Sequence: Synthetic oligonucleotide
  Sense strand starting at position 147 of SEQ ID NO: 1563972
gcuaccaaacuugauguua

SEQ ID NO: 1845578 - RNA, 19 nt, Artificial Sequence
  Description of Artificial Sequence: Synthetic oligonucleotide
  Antisense strand to SEQ ID NO: 1845577
uaacaucaaguuugguagc

SEQ ID NO: 1845579 - RNA, 19 nt, Artificial Sequence
  Description of Artificial Sequence: Synthetic oligonucleotide
  Sense strand starting at position 291 of SEQ ID NO: 1563972
gcuagugaaagcugggaga

SEQ ID NO: 1845580 - RNA, 19 nt, Artificial Sequence
  Description of Artificial Sequence: Synthetic oligonucleotide
  Antisense strand to SEQ ID NO: 1845579
ucucccagcuuucacuagc

SEQ ID NO: 1845581 - RNA, 19 nt, Artificial Sequence
  Description of Artificial Sequence: Synthetic oligonucleotide
  Sense strand starting at position 293 of SEQ ID NO: 1563972
uagugaaagcugggagacu

SEQ ID NO: 1845582 - RNA, 19 nt, Artificial Sequence
  Description of Artificial Sequence: Synthetic oligonucleotide
  Antisense strand to SEQ ID NO: 1845581
agucucccagcuuucacua

SEQ ID NO: 1845583 - RNA, 19 nt, Artificial Sequence
  Description of Artificial Sequence: Synthetic oligonucleotide
  Sense strand starting at position 334 of SEQ ID NO: 1563972
ccuucucaggauugaguua

SEQ ID NO: 1845584 - RNA, 19 nt, Artificial Sequence
  Description of Artificial Sequence: Synthetic oligonucleotide
  Antisense strand to SEQ ID NO: 1845583
uaacucaauccugagaagg

SEQ ID NO: 1845585 - RNA, 19 nt, Artificial Sequence
  Description of Artificial Sequence: Synthetic oligonucleotide
  Sense strand starting at position 390 of SEQ ID NO: 1563972
cacugaguuguugggagaa

SEQ ID NO: 1845586 - RNA, 19 nt, Artificial Sequence
  Description of Artificial Sequence: Synthetic oligonucleotide
  Antisense strand to SEQ ID NO: 1845585
uucucccaacaacucagug

SEQ ID NO: 1845587 - RNA, 19 nt, Artificial Sequence
  Description of Artificial Sequence: Synthetic oligonucleotide
  Sense strand starting at position 443 of SEQ ID NO: 1563972
aagacugaagcaugucaua

SEQ ID NO: 1845588 - RNA, 19 nt, Artificial Sequence
  Description of Artificial Sequence: Synthetic oligonucleotide
  Antisense strand to SEQ ID NO: 1845587
uaugacaugcuucagucuu

SEQ ID NO: 1845589 - RNA, 19 nt, Artificial Sequence
  Description of Artificial Sequence: Synthetic oligonucleotide
  Sense strand starting at position 526 of SEQ ID NO: 1563972
gaaacaggucaagguuaua

SEQ ID NO: 1845590 - RNA, 19 nt, Artificial Sequence
  Description of Artificial Sequence: Synthetic oligonucleotide
  Antisense strand to SEQ ID NO: 1845589
uauaaccuugaccuguuuc

SEQ ID NO: 1845591 - RNA, 19 nt, Artificial Sequence
  Description of Artificial Sequence: Synthetic oligonucleotide
  Sense strand starting at position 569 of SEQ ID NO: 1563972
ggagguuccacuggaaucu

SEQ ID NO: 1845592 - RNA, 19 nt, Artificial Sequence
  Description of Artificial Sequence: Synthetic oligonucleotide
  Antisense strand to SEQ ID NO: 1845591
agauuccaguggaaccucc

SEQ ID NO: 1845593 - RNA, 19 nt, Artificial Sequence
  Description of Artificial Sequence: Synthetic oligonucleotide
  Sense strand starting at position 701 of SEQ ID NO: 1563972
ccaccuacacuuugaggau

SEQ ID NO: 1845594 - RNA, 19 nt, Artificial Sequence
  Description of Artificial Sequence: Synthetic oligonucleotide
  Antisense strand to SEQ ID NO: 1845593
auccucaaaguguaggugg

SEQ ID NO: 1845595 - RNA, 19 nt, Artificial Sequence
  Description of Artificial Sequence: Synthetic oligonucleotide
  Sense strand starting at position 728 of SEQ ID NO: 1563972
agcuccauuuccucaguca

SEQ ID NO: 1845596 - RNA, 19 nt, Artificial Sequence
  Description of Artificial Sequence: Synthetic oligonucleotide
  Antisense strand to SEQ ID NO: 1845595
ugacugaggaaauggagcu

SEQ ID NO: 1845597 - RNA, 19 nt, Artificial Sequence
  Description of Artificial Sequence: Synthetic oligonucleotide
  Sense strand starting at position 985 of SEQ ID NO: 1563972
ggcucucauuacccagaca

SEQ ID NO: 1845598 - RNA, 19 nt, Artificial Sequence
  Description of Artificial Sequence: Synthetic oligonucleotide
  Antisense strand to SEQ ID NO: 1845597
ugucuggguaaugagagcc

SEQ ID NO: 1845599 - RNA, 19 nt, Artificial Sequence
  Description of Artificial Sequence: Synthetic oligonucleotide
  Sense strand starting at position 1016 of SEQ ID NO: 1563972
ugguaugaacugcaaucua

SEQ ID NO: 1845600 - RNA, 19 nt, Artificial Sequence
  Description of Artificial Sequence: Synthetic oligonucleotide
  Antisense strand to SEQ ID NO: 1845599
uagauugcaguucauacca

SEQ ID NO: 1845601 - RNA, 19 nt, Artificial Sequence
  Description of Artificial Sequence: Synthetic oligonucleotide
  Sense strand starting at position 1175 of SEQ ID NO: 1563972
gagggucugcaguagauua

SEQ ID NO: 1845602 - RNA, 19 nt, Artificial Sequence
  Description of Artificial Sequence: Synthetic oligonucleotide
  Antisense strand to SEQ ID NO: 1845601
uaaucuacugcagacccuc

SEQ ID NO: 1845603 - RNA, 19 nt, Artificial Sequence
  Description of Artificial Sequence: Synthetic oligonucleotide
  Sense strand starting at position 1186 of SEQ ID NO: 1563972
guagauuaucaggacguga

SEQ ID NO: 1845604 - RNA, 19 nt, Artificial Sequence
  Description of Artificial Sequence: Synthetic oligonucleotide
  Antisense strand to SEQ ID NO: 1845603
ucacguccugauaaucuac

SEQ ID NO: 1845605 - RNA, 19 nt, Artificial Sequence
  Description of Artificial Sequence: Synthetic oligonucleotide
  Sense strand starting at position 1188 of SEQ ID NO: 1563972
agauuaucaggacgugaag

SEQ ID NO: 1845606 - RNA, 19 nt, Artificial Sequence
  Description of Artificial Sequence: Synthetic oligonucleotide
  Antisense strand to SEQ ID NO: 1845605
cuucacguccugauaaucu

SEQ ID NO: 1845607 - RNA, 19 nt, Artificial Sequence
  Description of Artificial Sequence: Synthetic oligonucleotide
  Sense strand starting at position 1191 of SEQ ID NO: 1563972
uuaucaggacgugaaguua

SEQ ID NO: 1845608 - RNA, 19 nt, Artificial Sequence
  Description of Artificial Sequence: Synthetic oligonucleotide
  Antisense strand to SEQ ID NO: 1845607
uaacuucacguccugauaa

SEQ ID NO: 1845609 - RNA, 19 nt, Artificial Sequence
  Description of Artificial Sequence: Synthetic oligonucleotide
  Sense strand starting at position 1996 of SEQ ID NO: 1563972
auugacucgucaguaauuu

SEQ ID NO: 1845610 - RNA, 19 nt, Artificial Sequence
  Description of Artificial Sequence: Synthetic oligonucleotide
  Antisense strand to SEQ ID NO: 1845609
aaauuacugacgagucaau

SEQ ID NO: 1845611 - RNA, 19 nt, Artificial Sequence
  Description of Artificial Sequence: Synthetic oligonucleotide
  Sense strand starting at position 2218 of SEQ ID NO: 1563972
agaauuuagucccugccuu

SEQ ID NO: 1845612 - RNA, 19 nt, Artificial Sequence
  Description of Artificial Sequence: Synthetic oligonucleotide
  Antisense strand to SEQ ID NO: 1845611
aaggcagggacuaaauucu

SEQ ID NO: 1845613 - RNA, 19 nt, Artificial Sequence
  Description of Artificial Sequence: Synthetic oligonucleotide
  Sense strand starting at position 2515 of SEQ ID NO: 1563972
uagagaguuuacccuuaga

SEQ ID NO: 1845614 - RNA, 19 nt, Artificial Sequence
  Description of Artificial Sequence: Synthetic oligonucleotide
  Antisense strand to SEQ ID NO: 1845613
ucuaaggguaaacucucua

SEQ ID NO: 1845615 - RNA, 19 nt, Artificial Sequence
  Description of Artificial Sequence: Synthetic oligonucleotide
  Sense strand starting at position 2518 of SEQ ID NO: 1563972
agaguuuacccuuagagca

SEQ ID NO: 1845616 - RNA, 19 nt, Artificial Sequence
  Description of Artificial Sequence: Synthetic oligonucleotide
  Antisense strand to SEQ ID NO: 1845615
ugcucuaaggguaaacucu

SEQ ID NO: 1845617 - RNA, 19 nt, Artificial Sequence
  Description of Artificial Sequence: Synthetic oligonucleotide
  Sense strand starting at position 2618 of SEQ ID NO: 1563972
agauuaauuugaggaagac

SEQ ID NO: 1845618 - RNA, 19 nt, Artificial Sequence
  Description of Artificial Sequence: Synthetic oligonucleotide
  Antisense strand to SEQ ID NO: 1845617
gucuuccucaaauuaaucu

SEQ ID NO: 1845619 - RNA, 19 nt, Artificial Sequence
  Description of Artificial Sequence: Synthetic oligonucleotide
  Sense strand starting at position 2782 of SEQ ID NO: 1563972
gaauuuggauucuaguaug

SEQ ID NO: 1845620 - RNA, 19 nt, Artificial Sequence
  Description of Artificial Sequence: Synthetic oligonucleotide
  Antisense strand to SEQ ID NO: 1845619
cauacuagaauccaaauuc

SEQ ID NO: 1845621 - RNA, 19 nt, Artificial Sequence
  Description of Artificial Sequence: Synthetic oligonucleotide
  Sense strand starting at position 2830 of SEQ ID NO: 1563972
auaaauaucguugagcaag

SEQ ID NO: 1845622 - RNA, 19 nt, Artificial Sequence
  Description of Artificial Sequence: Synthetic oligonucleotide
  Antisense strand to SEQ ID NO: 1845621
cuugcucaacgauauuuau

SEQ ID NO: 1845623 - RNA, 19 nt, Artificial Sequence
  Description of Artificial Sequence: Synthetic oligonucleotide
  Sense strand starting at position 2891 of SEQ ID NO: 1563972
guuauaagagccuaugggu

SEQ ID NO: 1845624 - RNA, 19 nt, Artificial Sequence
  Description of Artificial Sequence: Synthetic oligonucleotide
  Antisense strand to SEQ ID NO: 1845623
acccauaggcucuuauaac

SEQ ID NO: 1845625 - RNA, 19 nt, Artificial Sequence
  Description of Artificial Sequence: Synthetic oligonucleotide
  Sense strand starting at position 3038 of SEQ ID NO: 1563972
ucaagcauuuaugaaggaa

SEQ ID NO: 1845626 - RNA, 19 nt, Artificial Sequence
  Description of Artificial Sequence: Synthetic oligonucleotide
  Antisense strand to SEQ ID NO: 1845625
uuccuucauaaaugcuuga

SEQ ID NO: 1845627 - RNA, 19 nt, Artificial Sequence
  Description of Artificial Sequence: Synthetic oligonucleotide
  Sense strand starting at position 3168 of SEQ ID NO: 1563972
guacucucaguugaguaua

SEQ ID NO: 1845628 - RNA, 19 nt, Artificial Sequence
  Description of Artificial Sequence: Synthetic oligonucleotide
  Antisense strand to SEQ ID NO: 1845627
uauacucaacugagaguac

SEQ ID NO: 1845629 - RNA, 19 nt, Artificial Sequence
  Description of Artificial Sequence: Synthetic oligonucleotide
  Sense strand starting at position 3171 of SEQ ID NO: 1563972
cucucaguugaguauacua

SEQ ID NO: 1845630 - RNA, 19 nt, Artificial Sequence
  Description of Artificial Sequence: Synthetic oligonucleotide
  Antisense strand to SEQ ID NO: 1845629
uaguauacucaacugagag

SEQ ID NO: 1845631 - RNA, 19 nt, Artificial Sequence
  Description of Artificial Sequence: Synthetic oligonucleotide
  Sense strand starting at position 3179 of SEQ ID NO: 1563972
ugaguauacuaagcauaaa

SEQ ID NO: 1845632 - RNA, 19 nt, Artificial Sequence
  Description of Artificial Sequence: Synthetic oligonucleotide
  Antisense strand to SEQ ID NO: 1845631
uuuaugcuuaguauacuca

SEQ ID NO: 1845633 - RNA, 19 nt, Artificial Sequence
  Description of Artificial Sequence: Synthetic oligonucleotide
  Sense strand starting at position 3225 of SEQ ID NO: 1563972
agagcagguuuaguggaau

SEQ ID NO: 1845634 - RNA, 19 nt, Artificial Sequence
  Description of Artificial Sequence: Synthetic oligonucleotide
  Antisense strand to SEQ ID NO: 1845633
auuccacuaaaccugcucu

SEQ ID NO: 1845635 - RNA, 19 nt, Artificial Sequence
  Description of Artificial Sequence: Synthetic oligonucleotide
  Sense strand starting at position 3237 of SEQ ID NO: 1563972
guggaauggucauugacaa

SEQ ID NO: 1845636 - RNA, 19 nt, Artificial Sequence
  Description of Artificial Sequence: Synthetic oligonucleotide
  Antisense strand to SEQ ID NO: 1845635
uugucaaugaccauuccac

SEQ ID NO: 1845637 - RNA, 19 nt, Artificial Sequence
  Description of Artificial Sequence: Synthetic oligonucleotide
  Sense strand starting at position 3238 of SEQ ID NO: 1563972
uggaauggucauugacaac

SEQ ID NO: 1845638 - RNA, 19 nt, Artificial Sequence
  Description of Artificial Sequence: Synthetic oligonucleotide
  Antisense strand to SEQ ID NO: 1845637
guugucaaugaccauucca

SEQ ID NO: 1845639 - RNA, 19 nt, Artificial Sequence
  Description of Artificial Sequence: Synthetic oligonucleotide
  Sense strand starting at position 3316 of SEQ ID NO: 1563972
agauguuagugaucaugga

SEQ ID NO: 1845640 - RNA, 19 nt, Artificial Sequence
  Description of Artificial Sequence: Synthetic oligonucleotide
  Antisense strand to SEQ ID NO: 1845639
uccaugaucacuaacaucu

SEQ ID NO: 1845641 - RNA, 19 nt, Artificial Sequence
  Description of Artificial Sequence: Synthetic oligonucleotide
  Sense strand starting at position 3320 of SEQ ID NO: 1563972
guuagugaucauggaaagu

SEQ ID NO: 1845642 - RNA, 19 nt, Artificial Sequence
  Description of Artificial Sequence: Synthetic oligonucleotide
  Antisense strand to SEQ ID NO: 1845641
acuuuccaugaucacuaac

SEQ ID NO: 1845643 - RNA, 19 nt, Artificial Sequence
  Description of Artificial Sequence: Synthetic oligonucleotide
  Sense strand starting at position 3368 of SEQ ID NO: 1563972
acaugaggucuagggacuu

SEQ ID NO: 1845644 - RNA, 19 nt, Artificial Sequence
  Description of Artificial Sequence: Synthetic oligonucleotide
  Antisense strand to SEQ ID NO: 1845643
aagucccuagaccucaugu

SEQ ID NO: 1845645 - RNA, 19 nt, Artificial Sequence
  Description of Artificial Sequence: Synthetic oligonucleotide
  Sense strand starting at position 3530 of SEQ ID NO: 1563972
cucuguaugcauuaaagaa

SEQ ID NO: 1845646 - RNA, 19 nt, Artificial Sequence
  Description of Artificial Sequence: Synthetic oligonucleotide
  Antisense strand to SEQ ID NO: 1845645
uucuuuaaugcauacagag

SEQ ID NO: 1845647 - RNA, 19 nt, Artificial Sequence
  Description of Artificial Sequence: Synthetic oligonucleotide
  Sense strand starting at position 3534 of SEQ ID NO: 1563972
guaugcauuaaagaacgau

SEQ ID NO: 1845648 - RNA, 19 nt, Artificial Sequence
  Description of Artificial Sequence: Synthetic oligonucleotide
  Antisense strand to SEQ ID NO: 1845647
aucguucuuuaaugcauac

SEQ ID NO: 1845649 - RNA, 19 nt, Artificial Sequence
  Description of Artificial Sequence: Synthetic oligonucleotide
  Sense strand starting at position 3632 of SEQ ID NO: 1563972
ugcuuauaacuggaguuau

SEQ ID NO: 1845650 - RNA, 19 nt, Artificial Sequence
  Description of Artificial Sequence: Synthetic oligonucleotide
  Antisense strand to SEQ ID NO: 1845649
auaacuccaguuauaagca

SEQ ID NO: 1845651 - RNA, 19 nt, Artificial Sequence
  Description of Artificial Sequence: Synthetic oligonucleotide
  Sense strand starting at position 83 of SEQ ID NO: 1563973
ccucgaaacuguucuccuu

SEQ ID NO: 1845652 - RNA, 19 nt, Artificial Sequence
  Description of Artificial Sequence: Synthetic oligonucleotide
  Antisense strand to SEQ ID NO: 1845651
aaggagaacaguuucgagg

SEQ ID NO: 1845653 - RNA, 19 nt, Artificial Sequence
  Description of Artificial Sequence: Synthetic oligonucleotide
  Sense strand starting at position 86 of SEQ ID NO: 1563973
cgaaacuguucuccuuagu

SEQ ID NO: 1845654 - RNA, 19 nt, Artificial Sequence
  Description of Artificial Sequence: Synthetic oligonucleotide
  Antisense strand to SEQ ID NO: 1845653
acuaaggagaacaguuucg

SEQ ID NO: 1845655 - RNA, 19 nt, Artificial Sequence
  Description of Artificial Sequence: Synthetic oligonucleotide
  Sense strand starting at position 847 of SEQ ID NO: 1563973
ucaauuugaugauacagga

SEQ ID NO: 1845656 - RNA, 19 nt, Artificial Sequence
  Description of Artificial Sequence: Synthetic oligonucleotide
  Antisense strand to SEQ ID NO: 1845655
uccuguaucaucaaauuga

SEQ ID NO: 1845657 - RNA, 19 nt, Artificial Sequence
  Description of Artificial Sequence: Synthetic oligonucleotide
  Sense strand starting at position 2828 of SEQ ID NO: 1563973
auauauggauuugguagau

SEQ ID NO: 1845658 - RNA, 19 nt, Artificial Sequence
  Description of Artificial Sequence: Synthetic oligonucleotide
  Antisense strand to SEQ ID NO: 1845657
aucuaccaaauccauauau

SEQ ID NO: 1845659 - RNA, 19 nt, Artificial Sequence
  Description of Artificial Sequence: Synthetic oligonucleotide
  Sense strand starting at position 3189 of SEQ ID NO: 1563973
ucaguuuccuuucguaauu

SEQ ID NO: 1845660 - RNA, 19 nt, Artificial Sequence
  Description of Artificial Sequence: Synthetic oligonucleotide
  Antisense strand to SEQ ID NO: 1845659
aauuacgaaaggaaacuga

SEQ ID NO: 1845661 - RNA, 19 nt, Artificial Sequence
  Description of Artificial Sequence: Synthetic oligonucleotide
  Sense strand starting at position 3191 of SEQ ID NO: 1563973
aguuuccuuucguaauucu

SEQ ID NO: 1845662 - RNA, 19 nt, Artificial Sequence
  Description of Artificial Sequence: Synthetic oligonucleotide
  Antisense strand to SEQ ID NO: 1845661
agaauuacgaaaggaaacu

SEQ ID NO: 1845663 - RNA, 19 nt, Artificial Sequence
  Description of Artificial Sequence: Synthetic oligonucleotide
  Sense strand starting at position 3294 of SEQ ID NO: 1563973
gcuucuucuggauaguauu

SEQ ID NO: 1845664 - RNA, 19 nt, Artificial Sequence
  Description of Artificial Sequence: Synthetic oligonucleotide
  Antisense strand to SEQ ID NO: 1845663
aauacuauccagaagaagc

SEQ ID NO: 1845665 - RNA, 19 nt, Artificial Sequence
  Description of Artificial Sequence: Synthetic oligonucleotide
  Sense strand starting at position 3489 of SEQ ID NO: 1563973
gcauauagguauccaguua

SEQ ID NO: 1845666 - RNA, 19 nt, Artificial Sequence
  Description of Artificial Sequence: Synthetic oligonucleotide
  Antisense strand to SEQ ID NO: 1845665
uaacuggauaccuauaugc

SEQ ID NO: 1845667 - RNA, 19 nt, Artificial Sequence
  Description of Artificial Sequence: Synthetic oligonucleotide
  Sense strand starting at position 3497 of SEQ ID NO: 1563973
guauccaguuaaggaauuu

SEQ ID NO: 1845668 - RNA, 19 nt, Artificial Sequence
  Description of Artificial Sequence: Synthetic oligonucleotide
  Antisense strand to SEQ ID NO: 1845667
aaauuccuuaacuggauac

SEQ ID NO: 1845669 - RNA, 19 nt, Artificial Sequence
  Description of Artificial Sequence: Synthetic oligonucleotide
  Sense strand starting at position 3788 of SEQ ID NO: 1563973
aagauaguuuaggucagga

SEQ ID NO: 1845670 - RNA, 19 nt, Artificial Sequence
  Description of Artificial Sequence: Synthetic oligonucleotide
  Antisense strand to SEQ ID NO: 1845669
uccugaccuaaacuaucuu

SEQ ID NO: 1845671 - RNA, 19 nt, Artificial Sequence
  Description of Artificial Sequence: Synthetic oligonucleotide
  Sense strand starting at position 3790 of SEQ ID NO: 1563973
gauaguuuaggucaggagu

SEQ ID NO: 1845672 - RNA, 19 nt, Artificial Sequence
  Description of Artificial Sequence: Synthetic oligonucleotide
  Antisense strand to SEQ ID NO: 1845671
acuccugaccuaaacuauc

SEQ ID NO: 1845673 - RNA, 19 nt, Artificial Sequence
  Description of Artificial Sequence: Synthetic oligonucleotide
  Sense strand starting at position 3793 of SEQ ID NO: 1563973
aguuuaggucaggaguaga

SEQ ID NO: 1845674 - RNA, 19 nt, Artificial Sequence
  Description of Artificial Sequence: Synthetic oligonucleotide
  Antisense strand to SEQ ID NO: 1845673
ucuacuccugaccuaaacu

SEQ ID NO: 1845675 - RNA, 19 nt, Artificial Sequence
  Description of Artificial Sequence: Synthetic oligonucleotide
  Sense strand starting at position 3887 of SEQ ID NO: 1563973
agcaguugguaucauacau

SEQ ID NO: 1845676 - RNA, 19 nt, Artificial Sequence
  Description of Artificial Sequence: Synthetic oligonucleotide
  Antisense strand to SEQ ID NO: 1845675
auguaugauaccaacugcu

SEQ ID NO: 1845677 - RNA, 19 nt, Artificial Sequence
  Description of Artificial Sequence: Synthetic oligonucleotide
  Sense strand starting at position 3927 of SEQ ID NO: 1563973
ugaguaaugcuagagcuga

SEQ ID NO: 1845678 - RNA, 19 nt, Artificial Sequence
  Description of Artificial Sequence: Synthetic oligonucleotide
  Antisense strand to SEQ ID NO: 1845677
ucagcucuagcauuacuca

SEQ ID NO: 1845679 - RNA, 19 nt, Artificial Sequence
  Description of Artificial Sequence: Synthetic oligonucleotide
  Sense strand starting at position 3935 of SEQ ID NO: 1563973
gcuagagcugaagacauua

SEQ ID NO: 1845680 - RNA, 19 nt, Artificial Sequence
  Description of Artificial Sequence: Synthetic oligonucleotide
  Antisense strand to SEQ ID NO: 1845679
uaaugucuucagcucuagc

SEQ ID NO: 1845681 - RNA, 19 nt, Artificial Sequence
  Description of Artificial Sequence: Synthetic oligonucleotide
  Sense strand starting at position 48 of SEQ ID NO: 1563974
acagcagaucacggucaau

SEQ ID NO: 1845682 - RNA, 19 nt, Artificial Sequence
  Description of Artificial Sequence: Synthetic oligonucleotide
  Antisense strand to SEQ ID NO: 1845681
auugaccgugaucugcugu

SEQ ID NO: 1845683 - RNA, 19 nt, Artificial Sequence
  Description of Artificial Sequence: Synthetic oligonucleotide
  Sense strand starting at position 51 of SEQ ID NO: 1563974
gcagaucacggucaaucuu

SEQ ID NO: 1845684 - RNA, 19 nt, Artificial Sequence
  Description of Artificial Sequence: Synthetic oligonucleotide
  Antisense strand to SEQ ID NO: 1845683
aagauugaccgugaucugc

SEQ ID NO: 1845685 - RNA, 19 nt, Artificial Sequence
  Description of Artificial Sequence: Synthetic oligonucleotide
  Sense strand starting at position 60 of SEQ ID NO: 1563974
ggucaaucuucugcuuggu

SEQ ID NO: 1845686 - RNA, 19 nt, Artificial Sequence
  Description of Artificial Sequence: Synthetic oligonucleotide
  Antisense strand to SEQ ID NO: 1845685
accaagcagaagauugacc

SEQ ID NO: 1845687 - RNA, 19 nt, Artificial Sequence
  Description of Artificial Sequence: Synthetic oligonucleotide
  Sense strand starting at position 62 of SEQ ID NO: 1563974
ucaaucuucugcuugguga

SEQ ID NO: 1845688 - RNA, 19 nt, Artificial Sequence
  Description of Artificial Sequence: Synthetic oligonucleotide
  Antisense strand to SEQ ID NO: 1845687
ucaccaagcagaagauuga

SEQ ID NO: 1845689 - RNA, 19 nt, Artificial Sequence
  Description of Artificial Sequence: Synthetic oligonucleotide
  Sense strand starting at position 233 of SEQ ID NO: 1563974
ucuucuaccgaguacuuga

SEQ ID NO: 1845690 - RNA, 19 nt, Artificial Sequence
  Description of Artificial Sequence: Synthetic oligonucleotide
  Antisense strand to SEQ ID NO: 1845689
ucaaguacucgguagaaga

SEQ ID NO: 1845691 - RNA, 19 nt, Artificial Sequence
  Description of Artificial Sequence: Synthetic oligonucleotide
  Sense strand starting at position 238 of SEQ ID NO: 1563974
uaccgaguacuugagauua

SEQ ID NO: 1845692 - RNA, 19 nt, Artificial Sequence
  Description of Artificial Sequence: Synthetic oligonucleotide
  Antisense strand to SEQ ID NO: 1845691
uaaucucaaguacucggua

SEQ ID NO: 1845693 - RNA, 19 nt, Artificial Sequence
  Description of Artificial Sequence: Synthetic oligonucleotide
  Sense strand starting at position 938 of SEQ ID NO: 1563974
aggccuguucgggagaaag

SEQ ID NO: 1845694 - RNA, 19 nt, Artificial Sequence
  Description of Artificial Sequence: Synthetic oligonucleotide
  Antisense strand to SEQ ID NO: 1845693
cuuucucccgaacaggccu

SEQ ID NO: 1845695 - RNA, 19 nt, Artificial Sequence
  Description of Artificial Sequence: Synthetic oligonucleotide
  Sense strand starting at position 1196 of SEQ ID NO: 1563974
cgucuaggaaaucaaaguu

SEQ ID NO: 1845696 - RNA, 19 nt, Artificial Sequence
  Description of Artificial Sequence: Synthetic oligonucleotide
  Antisense strand to SEQ ID NO: 1845695
aacuuugauuuccuagacg

SEQ ID NO: 1845697 - RNA, 19 nt, Artificial Sequence
  Description of Artificial Sequence: Synthetic oligonucleotide
  Sense strand starting at position 1234 of SEQ ID NO: 1563974
ccacgucaaguuuguggaa

SEQ ID NO: 1845698 - RNA, 19 nt, Artificial Sequence
  Description of Artificial Sequence: Synthetic oligonucleotide
  Antisense strand to SEQ ID NO: 1845697
uuccacaaacuugacgugg

SEQ ID NO: 1845699 - RNA, 19 nt, Artificial Sequence
  Description of Artificial Sequence: Synthetic oligonucleotide
  Sense strand starting at position 1235 of SEQ ID NO: 1563974
cacgucaaguuuguggaaa

SEQ ID NO: 1845700 - RNA, 19 nt, Artificial Sequence
  Description of Artificial Sequence: Synthetic oligonucleotide
  Antisense strand to SEQ ID NO: 1845699
uuuccacaaacuugacgug

SEQ ID NO: 1845701 - RNA, 19 nt, Artificial Sequence
  Description of Artificial Sequence: Synthetic oligonucleotide
  Sense strand starting at position 1781 of SEQ ID NO: 1563974
gguuuaggauuucggauga

SEQ ID NO: 1845702 - RNA, 19 nt, Artificial Sequence
  Description of Artificial Sequence: Synthetic oligonucleotide
  Antisense strand to SEQ ID NO: 1845701
ucauccgaaauccuaaacc

SEQ ID NO: 1845703 - RNA, 19 nt, Artificial Sequence
  Description of Artificial Sequence: Synthetic oligonucleotide
  Sense strand starting at position 2200 of SEQ ID NO: 1563974
gcgggauucaugggaggac

SEQ ID NO: 1845704 - RNA, 19 nt, Artificial Sequence
  Description of Artificial Sequence: Synthetic oligonucleotide
  Antisense strand to SEQ ID NO: 1845703
guccucccaugaaucccgc

SEQ ID NO: 1845705 - RNA, 19 nt, Artificial Sequence
  Description of Artificial Sequence: Synthetic oligonucleotide
  Sense strand starting at position 2317 of SEQ ID NO: 1563974
cgcuucucauguuugcaga

SEQ ID NO: 1845706 - RNA, 19 nt, Artificial Sequence
  Description of Artificial Sequence: Synthetic oligonucleotide
  Antisense strand to SEQ ID NO: 1845705
ucugcaaacaugagaagcg

SEQ ID NO: 1845707 - RNA, 19 nt, Artificial Sequence
  Description of Artificial Sequence: Synthetic oligonucleotide
  Sense strand starting at position 2319 of SEQ ID NO: 1563974
cuucucauguuugcagaga

SEQ ID NO: 1845708 - RNA, 19 nt, Artificial Sequence
  Description of Artificial Sequence: Synthetic oligonucleotide
  Antisense strand to SEQ ID NO: 1845707
ucucugcaaacaugagaag

SEQ ID NO: 1845709 - RNA, 19 nt, Artificial Sequence
  Description of Artificial Sequence: Synthetic oligonucleotide
  Sense strand starting at position 2347 of SEQ ID NO: 1563974
agaugaggaugauaugauu

SEQ ID NO: 1845710 - RNA, 19 nt, Artificial Sequence
  Description of Artificial Sequence: Synthetic oligonucleotide
  Antisense strand to SEQ ID NO: 1845709
aaucauaucauccucaucu

SEQ ID NO: 1845711 - RNA, 19 nt, Artificial Sequence
  Description of Artificial Sequence: Synthetic oligonucleotide
  Sense strand starting at position 2353 of SEQ ID NO: 1563974
ggaugauaugauugucuua

SEQ ID NO: 1845712 - RNA, 19 nt, Artificial Sequence
  Description of Artificial Sequence: Synthetic oligonucleotide
  Antisense strand to SEQ ID NO: 1845711
uaagacaaucauaucaucc

SEQ ID NO: 1845713 - RNA, 19 nt, Artificial Sequence
  Description of Artificial Sequence: Synthetic oligonucleotide
  Sense strand starting at position 2355 of SEQ ID NO: 1563974
augauaugauugucuuauc

SEQ ID NO: 1845714 - RNA, 19 nt, Artificial Sequence
  Description of Artificial Sequence: Synthetic oligonucleotide
  Antisense strand to SEQ ID NO: 1845713
gauaagacaaucauaucau

SEQ ID NO: 1845715 - RNA, 19 nt, Artificial Sequence
  Description of Artificial Sequence: Synthetic oligonucleotide
  Sense strand starting at position 2360 of SEQ ID NO: 1563974
augauugucuuaucguguu

SEQ ID NO: 1845716 - RNA, 19 nt, Artificial Sequence
  Description of Artificial Sequence: Synthetic oligonucleotide
  Antisense strand to SEQ ID NO: 1845715
aacacgauaagacaaucau

SEQ ID NO: 1845717 - RNA, 19 nt, Artificial Sequence
  Description of Artificial Sequence: Synthetic oligonucleotide
  Sense strand starting at position 2365 of SEQ ID NO: 1563974
ugucuuaucguguuuaccu

SEQ ID NO: 1845718 - RNA, 19 nt, Artificial Sequence
  Description of Artificial Sequence: Synthetic oligonucleotide
  Antisense strand to SEQ ID NO: 1845717
agguaaacacgauaagaca

SEQ ID NO: 1845719 - RNA, 19 nt, Artificial Sequence
  Description of Artificial Sequence: Synthetic oligonucleotide
  Sense strand starting at position 2374 of SEQ ID NO: 1563974
guguuuaccucccuuacau

SEQ ID NO: 1845720 - RNA, 19 nt, Artificial Sequence
  Description of Artificial Sequence: Synthetic oligonucleotide
  Antisense strand to SEQ ID NO: 1845719
auguaagggagguaaacac

SEQ ID NO: 1845721 - RNA, 19 nt, Artificial Sequence
  Description of Artificial Sequence: Synthetic oligonucleotide
  Sense strand starting at position 2736 of SEQ ID NO: 1563974
gucuguugcuuguuaauca

SEQ ID NO: 1845722 - RNA, 19 nt, Artificial Sequence
  Description of Artificial Sequence: Synthetic oligonucleotide
  Antisense strand to SEQ ID NO: 1845721
ugauuaacaagcaacagac

SEQ ID NO: 1845723 - RNA, 19 nt, Artificial Sequence
  Description of Artificial Sequence: Synthetic oligonucleotide
  Sense strand starting at position 2740 of SEQ ID NO: 1563974
guugcuuguuaaucaaaug

SEQ ID NO: 1845724 - RNA, 19 nt, Artificial Sequence
  Description of Artificial Sequence: Synthetic oligonucleotide
  Antisense strand to SEQ ID NO: 1845723
cauuugauuaacaagcaac

SEQ ID NO: 1845725 - RNA, 19 nt, Artificial Sequence
  Description of Artificial Sequence: Synthetic oligonucleotide
  Sense strand starting at position 3236 of SEQ ID NO: 1563974
aaacgugcccguuaaacaa

SEQ ID NO: 1845726 - RNA, 19 nt, Artificial Sequence
  Description of Artificial Sequence: Synthetic oligonucleotide
  Antisense strand to SEQ ID NO: 1845725
uuguuuaacgggcacguuu

SEQ ID NO: 1845727 - RNA, 19 nt, Artificial Sequence
  Description of Artificial Sequence: Synthetic oligonucleotide
  Sense strand starting at position 3318 of SEQ ID NO: 1563974
aaugucuucugagugaguc

SEQ ID NO: 1845728 - RNA, 19 nt, Artificial Sequence
  Description of Artificial Sequence: Synthetic oligonucleotide
  Antisense strand to SEQ ID NO: 1845727
gacucacucagaagacauu

SEQ ID NO: 1845729 - RNA, 19 nt, Artificial Sequence
  Description of Artificial Sequence: Synthetic oligonucleotide
  Sense strand starting at position 3326 of SEQ ID NO: 1563974
cugagugagucgucucgga

SEQ ID NO: 1845730 - RNA, 19 nt, Artificial Sequence
  Description of Artificial Sequence: Synthetic oligonucleotide
  Antisense strand to SEQ ID NO: 1845729
uccgagacgacucacucag

SEQ ID NO: 1845731 - RNA, 19 nt, Artificial Sequence
  Description of Artificial Sequence: Synthetic oligonucleotide
  Sense strand starting at position 3330 of SEQ ID NO: 1563974
gugagucgucucggauauu

SEQ ID NO: 1845732 - RNA, 19 nt, Artificial Sequence
  Description of Artificial Sequence: Synthetic oligonucleotide
  Antisense strand to SEQ ID NO: 1845731
aauauccgagacgacucac

SEQ ID NO: 1845733 - RNA, 19 nt, Artificial Sequence
  Description of Artificial Sequence: Synthetic oligonucleotide
  Sense strand starting at position 3619 of SEQ ID NO: 1563974
agaaauuauuucgcgagug

SEQ ID NO: 1845734 - RNA, 19 nt, Artificial Sequence
  Description of Artificial Sequence: Synthetic oligonucleotide
  Antisense strand to SEQ ID NO: 1845733
cacucgcgaaauaauuucu

SEQ ID NO: 1845735 - RNA, 19 nt, Artificial Sequence
  Description of Artificial Sequence: Synthetic oligonucleotide
  Sense strand starting at position 3624 of SEQ ID NO: 1563974
uuauuucgcgagugagauu

SEQ ID NO: 1845736 - RNA, 19 nt, Artificial Sequence
  Description of Artificial Sequence: Synthetic oligonucleotide
  Antisense strand to SEQ ID NO: 1845735
aaucucacucgcgaaauaa

SEQ ID NO: 1845737 - RNA, 19 nt, Artificial Sequence
  Description of Artificial Sequence: Synthetic oligonucleotide
  Sense strand starting at position 3629 of SEQ ID NO: 1563974
ucgcgagugagauugcgau

SEQ ID NO: 1845738 - RNA, 19 nt, Artificial Sequence
  Description of Artificial Sequence: Synthetic oligonucleotide
  Antisense strand to SEQ ID NO: 1845737
aucgcaaucucacucgcga

SEQ ID NO: 1845739 - RNA, 19 nt, Artificial Sequence
  Description of Artificial Sequence: Synthetic oligonucleotide
  Sense strand starting at position 3721 of SEQ ID NO: 1563974
acuguuucacguuaggaug

SEQ ID NO: 1845740 - RNA, 19 nt, Artificial Sequence
  Description of Artificial Sequence: Synthetic oligonucleotide
  Antisense strand to SEQ ID NO: 1845739
cauccuaacgugaaacagu

SEQ ID NO: 1845741 - RNA, 19 nt, Artificial Sequence
  Description of Artificial Sequence: Synthetic oligonucleotide
  Sense strand starting at position 3735 of SEQ ID NO: 1563974
ggaugugauucggcccaga

SEQ ID NO: 1845742 - RNA, 19 nt, Artificial Sequence
  Description of Artificial Sequence: Synthetic oligonucleotide
  Antisense strand to SEQ ID NO: 1845741
ucugggccgaaucacaucc

SEQ ID NO: 1845743 - RNA, 19 nt, Artificial Sequence
  Description of Artificial Sequence: Synthetic oligonucleotide
  Sense strand starting at position 3738 of SEQ ID NO: 1563974
ugugauucggcccagaaca

SEQ ID NO: 1845744 - RNA, 19 nt, Artificial Sequence
  Description of Artificial Sequence: Synthetic oligonucleotide
  Antisense strand to SEQ ID NO: 1845743
uguucugggccgaaucaca

SEQ ID NO: 1845745 - RNA, 19 nt, Artificial Sequence
  Description of Artificial Sequence: Synthetic oligonucleotide
  Sense strand starting at position 3768 of SEQ ID NO: 1563974
accgaugcuucugcaauga

SEQ ID NO: 1845746 - RNA, 19 nt, Artificial Sequence
  Description of Artificial Sequence: Synthetic oligonucleotide
  Antisense strand to SEQ ID NO: 1845745
ucauugcagaagcaucggu

SEQ ID NO: 1845747 - RNA, 19 nt, Artificial Sequence
  Description of Artificial Sequence: Synthetic oligonucleotide
  Sense strand starting at position 3772 of SEQ ID NO: 1563974
augcuucugcaaugaguau

SEQ ID NO: 1845748 - RNA, 19 nt, Artificial Sequence
  Description of Artificial Sequence: Synthetic oligonucleotide
  Antisense strand to SEQ ID NO: 1845747
auacucauugcagaagcau

SEQ ID NO: 1845749 - RNA, 19 nt, Artificial Sequence
  Description of Artificial Sequence: Synthetic oligonucleotide
  Sense strand starting at position 3776 of SEQ ID NO: 1563974
uucugcaaugaguaucauu

SEQ ID NO: 1845750 - RNA, 19 nt, Artificial Sequence
  Description of Artificial Sequence: Synthetic oligonucleotide
  Antisense strand to SEQ ID NO: 1845749
aaugauacucauugcagaa

SEQ ID NO: 1845751 - RNA, 19 nt, Artificial Sequence
  Description of Artificial Sequence: Synthetic oligonucleotide
  Sense strand starting at position 3779 of SEQ ID NO: 1563974
ugcaaugaguaucauuuaa

SEQ ID NO: 1845752 - RNA, 19 nt, Artificial Sequence
  Description of Artificial Sequence: Synthetic oligonucleotide
  Antisense strand to SEQ ID NO: 1845751
uuaaaugauacucauugca

SEQ ID NO: 1845753 - RNA, 19 nt, Artificial Sequence
  Description of Artificial Sequence: Synthetic oligonucleotide
  Sense strand starting at position 3871 of SEQ ID NO: 1563974
uccagacaccguuggagaa

SEQ ID NO: 1845754 - RNA, 19 nt, Artificial Sequence
  Description of Artificial Sequence: Synthetic oligonucleotide
  Antisense strand to SEQ ID NO: 1845753
uucuccaacggugucugga

SEQ ID NO: 1845755 - RNA, 19 nt, Artificial Sequence
  Description of Artificial Sequence: Synthetic oligonucleotide
  Sense strand starting at position 3873 of SEQ ID NO: 1563974
cagacaccguuggagaaau

SEQ ID NO: 1845756 - RNA, 19 nt, Artificial Sequence
  Description of Artificial Sequence: Synthetic oligonucleotide
  Antisense strand to SEQ ID NO: 1845755
auuucuccaacggugucug

SEQ ID NO: 1845757 - RNA, 19 nt, Artificial Sequence
  Description of Artificial Sequence: Synthetic oligonucleotide
  Sense strand starting at position 3955 of SEQ ID NO: 1563974
aaggaaggguuccauuuga

SEQ ID NO: 1845758 - RNA, 19 nt, Artificial Sequence
  Description of Artificial Sequence: Synthetic oligonucleotide
  Antisense strand to SEQ ID NO: 1845757
ucaaauggaacccuuccuu

SEQ ID NO: 1845759 - RNA, 19 nt, Artificial Sequence
  Description of Artificial Sequence: Synthetic oligonucleotide
  Sense strand starting at position 3983 of SEQ ID NO: 1563974
guuauuuaccuuugauguc

SEQ ID NO: 1845760 - RNA, 19 nt, Artificial Sequence
  Description of Artificial Sequence: Synthetic oligonucleotide
  Antisense strand to SEQ ID NO: 1845759
gacaucaaagguaaauaac

SEQ ID NO: 1845761 - RNA, 19 nt, Artificial Sequence
  Description of Artificial Sequence: Synthetic oligonucleotide
  Sense strand starting at position 33 of SEQ ID NO: 1563975
uggucacaaguucgugaaa

SEQ ID NO: 1845762 - RNA, 19 nt, Artificial Sequence
  Description of Artificial Sequence: Synthetic oligonucleotide
  Antisense strand to SEQ ID NO: 1845761
uuucacgaacuugugacca

SEQ ID NO: 1845763 - RNA, 19 nt, Artificial Sequence
  Description of Artificial Sequence: Synthetic oligonucleotide
  Sense strand starting at position 36 of SEQ ID NO: 1563975
ucacaaguucgugaaagau

SEQ ID NO: 1845764 - RNA, 19 nt, Artificial Sequence
  Description of Artificial Sequence: Synthetic oligonucleotide
  Antisense strand to SEQ ID NO: 1845763
aucuuucacgaacuuguga

SEQ ID NO: 1845765 - RNA, 19 nt, Artificial Sequence
  Description of Artificial Sequence: Synthetic oligonucleotide
  Sense strand starting at position 58 of SEQ ID NO: 1563975
agcagcacuguucguaaua

SEQ ID NO: 1845766 - RNA, 19 nt, Artificial Sequence
  Description of Artificial Sequence: Synthetic oligonucleotide
  Antisense strand to SEQ ID NO: 1845765
uauuacgaacagugcugcu

SEQ ID NO: 1845767 - RNA, 19 nt, Artificial Sequence
  Description of Artificial Sequence: Synthetic oligonucleotide
  Sense strand starting at position 59 of SEQ ID NO: 1563975
gcagcacuguucguaauag

SEQ ID NO: 1845768 - RNA, 19 nt, Artificial Sequence
  Description of Artificial Sequence: Synthetic oligonucleotide
  Antisense strand to SEQ ID NO: 1845767
cuauuacgaacagugcugc

SEQ ID NO: 1845769 - RNA, 19 nt, Artificial Sequence
  Description of Artificial Sequence: Synthetic oligonucleotide
  Sense strand starting at position 127 of SEQ ID NO: 1563975
cugacaaauugagaauaca

SEQ ID NO: 1845770 - RNA, 19 nt, Artificial Sequence
  Description of Artificial Sequence: Synthetic oligonucleotide
  Antisense strand to SEQ ID NO: 1845769
uguauucucaauuugucag

SEQ ID NO: 1845771 - RNA, 19 nt, Artificial Sequence
  Description of Artificial Sequence: Synthetic oligonucleotide
  Sense strand starting at position 161 of SEQ ID NO: 1563975
guccucauaggauguaaua

SEQ ID NO: 1845772 - RNA, 19 nt, Artificial Sequence
  Description of Artificial Sequence: Synthetic oligonucleotide
  Antisense strand to SEQ ID NO: 1845771
uauuacauccuaugaggac

SEQ ID NO: 1845773 - RNA, 19 nt, Artificial Sequence
  Description of Artificial Sequence: Synthetic oligonucleotide
  Sense strand starting at position 172 of SEQ ID NO: 1563975
auguaauauuaugcagcaa

SEQ ID NO: 1845774 - RNA, 19 nt, Artificial Sequence
  Description of Artificial Sequence: Synthetic oligonucleotide
  Antisense strand to SEQ ID NO: 1845773
uugcugcauaauauuacau

SEQ ID NO: 1845775 - RNA, 19 nt, Artificial Sequence
  Description of Artificial Sequence: Synthetic oligonucleotide
  Sense strand starting at position 230 of SEQ ID NO: 1563975
ugaaucucgugaccagaau

SEQ ID NO: 1845776 - RNA, 19 nt, Artificial Sequence
  Description of Artificial Sequence: Synthetic oligonucleotide
  Antisense strand to SEQ ID NO: 1845775
auucuggucacgagauuca

SEQ ID NO: 1845777 - RNA, 19 nt, Artificial Sequence
  Description of Artificial Sequence: Synthetic oligonucleotide
  Sense strand starting at position 356 of SEQ ID NO: 1563975
ccagucacccaguaugauu

SEQ ID NO: 1845778 - RNA, 19 nt, Artificial Sequence
  Description of Artificial Sequence: Synthetic oligonucleotide
  Antisense strand to SEQ ID NO: 1845777
aaucauacugggugacugg

SEQ ID NO: 1845779 - RNA, 19 nt, Artificial Sequence
  Description of Artificial Sequence: Synthetic oligonucleotide
  Sense strand starting at position 433 of SEQ ID NO: 1563975
acacauaugugauaagcua

SEQ ID NO: 1845780 - RNA, 19 nt, Artificial Sequence
  Description of Artificial Sequence: Synthetic oligonucleotide
  Antisense strand to SEQ ID NO: 1845779
uagcuuaucacauaugugu

SEQ ID NO: 1845781 - RNA, 19 nt, Artificial Sequence
  Description of Artificial Sequence: Synthetic oligonucleotide
  Sense strand starting at position 575 of SEQ ID NO: 1563975
gagugacugcuacacgaga

SEQ ID NO: 1845782 - RNA, 19 nt, Artificial Sequence
  Description of Artificial Sequence: Synthetic oligonucleotide
  Antisense strand to SEQ ID NO: 1845781
ucucguguagcagucacuc

SEQ ID NO: 1845783 - RNA, 19 nt, Artificial Sequence
  Description of Artificial Sequence: Synthetic oligonucleotide
  Sense strand starting at position 577 of SEQ ID NO: 1563975
gugacugcuacacgagaga

SEQ ID NO: 1845784 - RNA, 19 nt, Artificial Sequence
  Description of Artificial Sequence: Synthetic oligonucleotide
  Antisense strand to SEQ ID NO: 1845783
ucucucguguagcagucac

SEQ ID NO: 1845785 - RNA, 19 nt, Artificial Sequence
  Description of Artificial Sequence: Synthetic oligonucleotide
  Sense strand starting at position 682 of SEQ ID NO: 1563975
aucuuugaugcagacagua

SEQ ID NO: 1845786 - RNA, 19 nt, Artificial Sequence
  Description of Artificial Sequence: Synthetic oligonucleotide
  Antisense strand to SEQ ID NO: 1845785
uacugucugcaucaaagau

SEQ ID NO: 1845787 - RNA, 19 nt, Artificial Sequence
  Description of Artificial Sequence: Synthetic oligonucleotide
  Sense strand starting at position 815 of SEQ ID NO: 1563975
gacugacaggccuggagau

SEQ ID NO: 1845788 - RNA, 19 nt, Artificial Sequence
  Description of Artificial Sequence: Synthetic oligonucleotide
  Antisense strand to SEQ ID NO: 1845787
aucuccaggccugucaguc

SEQ ID NO: 1845789 - RNA, 19 nt, Artificial Sequence
  Description of Artificial Sequence: Synthetic oligonucleotide
  Sense strand starting at position 1027 of SEQ ID NO: 1563975
gagaaacagucucaggaac

SEQ ID NO: 1845790 - RNA, 19 nt, Artificial Sequence
  Description of Artificial Sequence: Synthetic oligonucleotide
  Antisense strand to SEQ ID NO: 1845789
guuccugagacuguuucuc

SEQ ID NO: 1845791 - RNA, 19 nt, Artificial Sequence
  Description of Artificial Sequence: Synthetic oligonucleotide
  Sense strand starting at position 1314 of SEQ ID NO: 1563975
gaaguaucccgguaucaca

SEQ ID NO: 1845792 - RNA, 19 nt, Artificial Sequence
  Description of Artificial Sequence: Synthetic oligonucleotide
  Antisense strand to SEQ ID NO: 1845791
ugugauaccgggauacuuc

SEQ ID NO: 1845793 - RNA, 19 nt, Artificial Sequence
  Description of Artificial Sequence: Synthetic oligonucleotide
  Sense strand starting at position 2169 of SEQ ID NO: 1563975
ccuuacuguuaccuuagua

SEQ ID NO: 1845794 - RNA, 19 nt, Artificial Sequence
  Description of Artificial Sequence: Synthetic oligonucleotide
  Antisense strand to SEQ ID NO: 1845793
uacuaagguaacaguaagg

SEQ ID NO: 1845795 - RNA, 19 nt, Artificial Sequence
  Description of Artificial Sequence: Synthetic oligonucleotide
  Sense strand starting at position 2173 of SEQ ID NO: 1563975
acuguuaccuuaguagaca

SEQ ID NO: 1845796 - RNA, 19 nt, Artificial Sequence
  Description of Artificial Sequence: Synthetic oligonucleotide
  Antisense strand to SEQ ID NO: 1845795
ugucuacuaagguaacagu

SEQ ID NO: 1845797 - RNA, 19 nt, Artificial Sequence
  Description of Artificial Sequence: Synthetic oligonucleotide
  Sense strand starting at position 2342 of SEQ ID NO: 1563975
ggguucaaucuaggugaug

SEQ ID NO: 1845798 - RNA, 19 nt, Artificial Sequence
  Description of Artificial Sequence: Synthetic oligonucleotide
  Antisense strand to SEQ ID NO: 1845797
caucaccuagauugaaccc

SEQ ID NO: 1845799 - RNA, 19 nt, Artificial Sequence
  Description of Artificial Sequence: Synthetic oligonucleotide
  Sense strand starting at position 2343 of SEQ ID NO: 1563975
gguucaaucuaggugaugu

SEQ ID NO: 1845800 - RNA, 19 nt, Artificial Sequence
  Description of Artificial Sequence: Synthetic oligonucleotide
  Antisense strand to SEQ ID NO: 1845799
acaucaccuagauugaacc

SEQ ID NO: 1845801 - RNA, 19 nt, Artificial Sequence
  Description of Artificial Sequence: Synthetic oligonucleotide
  Sense strand starting at position 2440 of SEQ ID NO: 1563975
caaagugaccuuggagguu

SEQ ID NO: 1845802 - RNA, 19 nt, Artificial Sequence
  Description of Artificial Sequence: Synthetic oligonucleotide
  Antisense strand to SEQ ID NO: 1845801
aaccuccaaggucacuuug

SEQ ID NO: 1845803 - RNA, 19 nt, Artificial Sequence
  Description of Artificial Sequence: Synthetic oligonucleotide
  Sense strand starting at position 2837 of SEQ ID NO: 1563975
cauggcucucuguguuuau

SEQ ID NO: 1845804 - RNA, 19 nt, Artificial Sequence
  Description of Artificial Sequence: Synthetic oligonucleotide
  Antisense strand to SEQ ID NO: 1845803
auaaacacagagagccaug

SEQ ID NO: 1845805 - RNA, 19 nt, Artificial Sequence
  Description of Artificial Sequence: Synthetic oligonucleotide
  Sense strand starting at position 2840 of SEQ ID NO: 1563975
ggcucucuguguuuaucuu

SEQ ID NO: 1845806 - RNA, 19 nt, Artificial Sequence
  Description of Artificial Sequence: Synthetic oligonucleotide
  Antisense strand to SEQ ID NO: 1845805
aagauaaacacagagagcc

SEQ ID NO: 1845807 - RNA, 19 nt, Artificial Sequence
  Description of Artificial Sequence: Synthetic oligonucleotide
  Sense strand starting at position 2841 of SEQ ID NO: 1563975
gcucucuguguuuaucuuu

SEQ ID NO: 1845808 - RNA, 19 nt, Artificial Sequence
  Description of Artificial Sequence: Synthetic oligonucleotide
  Antisense strand to SEQ ID NO: 1845807
aaagauaaacacagagagc

SEQ ID NO: 1845809 - RNA, 19 nt, Artificial Sequence
  Description of Artificial Sequence: Synthetic oligonucleotide
  Sense strand starting at position 2850 of SEQ ID NO: 1563975
guuuaucuuucugcccuua

SEQ ID NO: 1845810 - RNA, 19 nt, Artificial Sequence
  Description of Artificial Sequence: Synthetic oligonucleotide
  Antisense strand to SEQ ID NO: 1845809
uaagggcagaaagauaaac

SEQ ID NO: 1845811 - RNA, 19 nt, Artificial Sequence
  Description of Artificial Sequence: Synthetic oligonucleotide
  Sense strand starting at position 2904 of SEQ ID NO: 1563975
auaugucucuccuugucua

SEQ ID NO: 1845812 - RNA, 19 nt, Artificial Sequence
  Description of Artificial Sequence: Synthetic oligonucleotide
  Antisense strand to SEQ ID NO: 1845811
uagacaaggagagacauau

SEQ ID NO: 1845813 - RNA, 19 nt, Artificial Sequence
  Description of Artificial Sequence: Synthetic oligonucleotide
  Sense strand starting at position 2907 of SEQ ID NO: 1563975
ugucucuccuugucuauga

SEQ ID NO: 1845814 - RNA, 19 nt, Artificial Sequence
  Description of Artificial Sequence: Synthetic oligonucleotide
  Antisense strand to SEQ ID NO: 1845813
ucauagacaaggagagaca

SEQ ID NO: 1845815 - RNA, 19 nt, Artificial Sequence
  Description of Artificial Sequence: Synthetic oligonucleotide
  Sense strand starting at position 2911 of SEQ ID NO: 1563975
ucuccuugucuaugacuuu

SEQ ID NO: 1845816 - RNA, 19 nt, Artificial Sequence
  Description of Artificial Sequence: Synthetic oligonucleotide
  Antisense strand to SEQ ID NO: 1845815
aaagucauagacaaggaga

SEQ ID NO: 1845817 - RNA, 19 nt, Artificial Sequence
  Description of Artificial Sequence: Synthetic oligonucleotide
  Sense strand starting at position 2954 of SEQ ID NO: 1563975
ugucuugucucugucuuua

SEQ ID NO: 1845818 - RNA, 19 nt, Artificial Sequence
  Description of Artificial Sequence: Synthetic oligonucleotide
  Antisense strand to SEQ ID NO: 1845817
uaaagacagagacaagaca

SEQ ID NO: 1845819 - RNA, 19 nt, Artificial Sequence
  Description of Artificial Sequence: Synthetic oligonucleotide
  Sense strand starting at position 2956 of SEQ ID NO: 1563975
ucuugucucugucuuuauu

SEQ ID NO: 1845820 - RNA, 19 nt, Artificial Sequence
  Description of Artificial Sequence: Synthetic oligonucleotide
  Antisense strand to SEQ ID NO: 1845819
aauaaagacagagacaaga

SEQ ID NO: 1845821 - RNA, 19 nt, Artificial Sequence
  Description of Artificial Sequence: Synthetic oligonucleotide
  Sense strand starting at position 3042 of SEQ ID NO: 1563975
acccauauauuguuccaga

SEQ ID NO: 1845822 - RNA, 19 nt, Artificial Sequence
  Description of Artificial Sequence: Synthetic oligonucleotide
  Antisense strand to SEQ ID NO: 1845821
ucuggaacaauauaugggu

SEQ ID NO: 1845823 - RNA, 19 nt, Artificial Sequence
  Description of Artificial Sequence: Synthetic oligonucleotide
  Sense strand starting at position 3178 of SEQ ID NO: 1563975
gagguaacuaaugguuugu

SEQ ID NO: 1845824 - RNA, 19 nt, Artificial Sequence
  Description of Artificial Sequence: Synthetic oligonucleotide
  Antisense strand to SEQ ID NO: 1845823
acaaaccauuaguuaccuc

SEQ ID NO: 1845825 - RNA, 19 nt, Artificial Sequence
  Description of Artificial Sequence: Synthetic oligonucleotide
  Sense strand starting at position 3180 of SEQ ID NO: 1563975
gguaacuaaugguuuguua

SEQ ID NO: 1845826 - RNA, 19 nt, Artificial Sequence
  Description of Artificial Sequence: Synthetic oligonucleotide
  Antisense strand to SEQ ID NO: 1845825
uaacaaaccauuaguuacc

SEQ ID NO: 1845827 - RNA, 19 nt, Artificial Sequence
  Description of Artificial Sequence: Synthetic oligonucleotide
  Sense strand starting at position 3184 of SEQ ID NO: 1563975
acuaaugguuuguuacuuu

SEQ ID NO: 1845828 - RNA, 19 nt, Artificial Sequence
  Description of Artificial Sequence: Synthetic oligonucleotide
  Antisense strand to SEQ ID NO: 1845827
aaaguaacaaaccauuagu

SEQ ID NO: 1845829 - RNA, 19 nt, Artificial Sequence
  Description of Artificial Sequence: Synthetic oligonucleotide
  Sense strand starting at position 3568 of SEQ ID NO: 1563975
aauacauguuccuggauga

SEQ ID NO: 1845830 - RNA, 19 nt, Artificial Sequence
  Description of Artificial Sequence: Synthetic oligonucleotide
  Antisense strand to SEQ ID NO: 1845829
ucauccaggaacauguauu

SEQ ID NO: 1845831 - RNA, 19 nt, Artificial Sequence
  Description of Artificial Sequence: Synthetic oligonucleotide
  Sense strand starting at position 3569 of SEQ ID NO: 1563975
auacauguuccuggaugag

SEQ ID NO: 1845832 - RNA, 19 nt, Artificial Sequence
  Description of Artificial Sequence: Synthetic oligonucleotide
  Antisense strand to SEQ ID NO: 1845831
cucauccaggaacauguau

SEQ ID NO: 1845833 - RNA, 19 nt, Artificial Sequence
  Description of Artificial Sequence: Synthetic oligonucleotide
  Sense strand starting at position 3599 of SEQ ID NO: 1563975
uuauaaagaugucaagucu

SEQ ID NO: 1845834 - RNA, 19 nt, Artificial Sequence
  Description of Artificial Sequence: Synthetic oligonucleotide
  Antisense strand to SEQ ID NO: 1845833
agacuugacaucuuuauaa

SEQ ID NO: 1845835 - RNA, 19 nt, Artificial Sequence
  Description of Artificial Sequence: Synthetic oligonucleotide
  Sense strand starting at position 3605 of SEQ ID NO: 1563975
agaugucaagucuauccaa

SEQ ID NO: 1845836 - RNA, 19 nt, Artificial Sequence
  Description of Artificial Sequence: Synthetic oligonucleotide
  Antisense strand to SEQ ID NO: 1845835
uuggauagacuugacaucu

SEQ ID NO: 1845837 - RNA, 19 nt, Artificial Sequence
  Description of Artificial Sequence: Synthetic oligonucleotide
  Sense strand starting at position 3608 of SEQ ID NO: 1563975
ugucaagucuauccaaacu

SEQ ID NO: 1845838 - RNA, 19 nt, Artificial Sequence
  Description of Artificial Sequence: Synthetic oligonucleotide
  Antisense strand to SEQ ID NO: 1845837
aguuuggauagacuugaca

SEQ ID NO: 1845839 - RNA, 19 nt, Artificial Sequence
  Description of Artificial Sequence: Synthetic oligonucleotide
  Sense strand starting at position 3762 of SEQ ID NO: 1563975
ugguuuguuuauuuguguu

SEQ ID NO: 1845840 - RNA, 19 nt, Artificial Sequence
  Description of Artificial Sequence: Synthetic oligonucleotide
  Antisense strand to SEQ ID NO: 1845839
aacacaaauaaacaaacca

SEQ ID NO: 1845841 - RNA, 19 nt, Artificial Sequence
  Description of Artificial Sequence: Synthetic oligonucleotide
  Sense strand starting at position 9 of SEQ ID NO: 1563976
cagaauacggagugauauu

SEQ ID NO: 1845842 - RNA, 19 nt, Artificial Sequence
  Description of Artificial Sequence: Synthetic oligonucleotide
  Antisense strand to SEQ ID NO: 1845841
aauaucacuccguauucug

SEQ ID NO: 1845843 - RNA, 19 nt, Artificial Sequence
  Description of Artificial Sequence: Synthetic oligonucleotide
  Sense strand starting at position 654 of SEQ ID NO: 1563976
aagugucugcuggauauga

SEQ ID NO: 1845844 - RNA, 19 nt, Artificial Sequence
  Description of Artificial Sequence: Synthetic oligonucleotide
  Antisense strand to SEQ ID NO: 1845843
ucauauccagcagacacuu

SEQ ID NO: 1845845 - RNA, 19 nt, Artificial Sequence
  Description of Artificial Sequence: Synthetic oligonucleotide
  Sense strand starting at position 656 of SEQ ID NO: 1563976
gugucugcuggauaugaac

SEQ ID NO: 1845846 - RNA, 19 nt, Artificial Sequence
  Description of Artificial Sequence: Synthetic oligonucleotide
  Antisense strand to SEQ ID NO: 1845845
guucauauccagcagacac

SEQ ID NO: 1845847 - RNA, 19 nt, Artificial Sequence
  Description of Artificial Sequence: Synthetic oligonucleotide
  Sense strand starting at position 675 of SEQ ID NO: 1563976
cuagacuacuuucugagua

SEQ ID NO: 1845848 - RNA, 19 nt, Artificial Sequence
  Description of Artificial Sequence: Synthetic oligonucleotide
  Antisense strand to SEQ ID NO: 1845847
uacucagaaaguagucuag

SEQ ID NO: 1845849 - RNA, 19 nt, Artificial Sequence
  Description of Artificial Sequence: Synthetic oligonucleotide
  Sense strand starting at position 680 of SEQ ID NO: 1563976
cuacuuucugaguaauaug

SEQ ID NO: 1845850 - RNA, 19 nt, Artificial Sequence
  Description of Artificial Sequence: Synthetic oligonucleotide
  Antisense strand to SEQ ID NO: 1845849
cauauuacucagaaaguag

SEQ ID NO: 1845851 - RNA, 19 nt, Artificial Sequence
  Description of Artificial Sequence: Synthetic oligonucleotide
  Sense strand starting at position 818 of SEQ ID NO: 1563976
caccguuaagcagagaaau

SEQ ID NO: 1845852 - RNA, 19 nt, Artificial Sequence
  Description of Artificial Sequence: Synthetic oligonucleotide
  Antisense strand to SEQ ID NO: 1845851
auuucucugcuuaacggug

SEQ ID NO: 1845853 - RNA, 19 nt, Artificial Sequence
  Description of Artificial Sequence: Synthetic oligonucleotide
  Sense strand starting at position 820 of SEQ ID NO: 1563976
ccguuaagcagagaaauuc

SEQ ID NO: 1845854 - RNA, 19 nt, Artificial Sequence
  Description of Artificial Sequence: Synthetic oligonucleotide
  Antisense strand to SEQ ID NO: 1845853
gaauuucucugcuuaacgg

SEQ ID NO: 1845855 - RNA, 19 nt, Artificial Sequence
  Description of Artificial Sequence: Synthetic oligonucleotide
  Sense strand starting at position 1023 of SEQ ID NO: 1563976
aguggucucacuuaaguga

SEQ ID NO: 1845856 - RNA, 19 nt, Artificial Sequence
  Description of Artificial Sequence: Synthetic oligonucleotide
  Antisense strand to SEQ ID NO: 1845855
ucacuuaagugagaccacu

SEQ ID NO: 1845857 - RNA, 19 nt, Artificial Sequence
  Description of Artificial Sequence: Synthetic oligonucleotide
  Sense strand starting at position 1044 of SEQ ID NO: 1563976
guugcauaacauugaauuc

SEQ ID NO: 1845858 - RNA, 19 nt, Artificial Sequence
  Description of Artificial Sequence: Synthetic oligonucleotide
  Antisense strand to SEQ ID NO: 1845857
gaauucaauguuaugcaac

SEQ ID NO: 1845859 - RNA, 19 nt, Artificial Sequence
  Description of Artificial Sequence: Synthetic oligonucleotide
  Sense strand starting at position 1061 of SEQ ID NO: 1563976
ucagaaauggauugucuuc

SEQ ID NO: 1845860 - RNA, 19 nt, Artificial Sequence
  Description of Artificial Sequence: Synthetic oligonucleotide
  Antisense strand to SEQ ID NO: 1845859
gaagacaauccauuucuga

SEQ ID NO: 1845861 - RNA, 19 nt, Artificial Sequence
  Description of Artificial Sequence: Synthetic oligonucleotide
  Sense strand starting at position 1309 of SEQ ID NO: 1563976
aggaauggguauucuaauc

SEQ ID NO: 1845862 - RNA, 19 nt, Artificial Sequence
  Description of Artificial Sequence: Synthetic oligonucleotide
  Antisense strand to SEQ ID NO: 1845861
gauuagaauacccauuccu

SEQ ID NO: 1845863 - RNA, 19 nt, Artificial Sequence
  Description of Artificial Sequence: Synthetic oligonucleotide
  Sense strand starting at position 1314 of SEQ ID NO: 1563976
uggguauucuaaucaggau

SEQ ID NO: 1845864 - RNA, 19 nt, Artificial Sequence
  Description of Artificial Sequence: Synthetic oligonucleotide
  Antisense strand to SEQ ID NO: 1845863
auccugauuagaauaccca

SEQ ID NO: 1845865 - RNA, 19 nt, Artificial Sequence
  Description of Artificial Sequence: Synthetic oligonucleotide
  Sense strand starting at position 1339 of SEQ ID NO: 1563976
acguuucuacuaggagaau

SEQ ID NO: 1845866 - RNA, 19 nt, Artificial Sequence
  Description of Artificial Sequence: Synthetic oligonucleotide
  Antisense strand to SEQ ID NO: 1845865
auucuccuaguagaaacgu

SEQ ID NO: 1845867 - RNA, 19 nt, Artificial Sequence
  Description of Artificial Sequence: Synthetic oligonucleotide
  Sense strand starting at position 1414 of SEQ ID NO: 1563976
gcucccauagcauauugau

SEQ ID NO: 1845868 - RNA, 19 nt, Artificial Sequence
  Description of Artificial Sequence: Synthetic oligonucleotide
  Antisense strand to SEQ ID NO: 1845867
aucaauaugcuaugggagc

SEQ ID NO: 1845869 - RNA, 19 nt, Artificial Sequence
  Description of Artificial Sequence: Synthetic oligonucleotide
  Sense strand starting at position 1452 of SEQ ID NO: 1563976
gcaaauuuguucuugucau

SEQ ID NO: 1845870 - RNA, 19 nt, Artificial Sequence
  Description of Artificial Sequence: Synthetic oligonucleotide
  Antisense strand to SEQ ID NO: 1845869
augacaagaacaaauuugc

SEQ ID NO: 1845871 - RNA, 19 nt, Artificial Sequence
  Description of Artificial Sequence: Synthetic oligonucleotide
  Sense strand starting at position 1570 of SEQ ID NO: 1563976
agaagauaauguuuccauu

SEQ ID NO: 1845872 - RNA, 19 nt, Artificial Sequence
  Description of Artificial Sequence: Synthetic oligonucleotide
  Antisense strand to SEQ ID NO: 1845871
aauggaaacauuaucuucu

SEQ ID NO: 1845873 - RNA, 19 nt, Artificial Sequence
  Description of Artificial Sequence: Synthetic oligonucleotide
  Sense strand starting at position 1651 of SEQ ID NO: 1563976
uugaacugacuuugauauu

SEQ ID NO: 1845874 - RNA, 19 nt, Artificial Sequence
  Description of Artificial Sequence: Synthetic oligonucleotide
  Antisense strand to SEQ ID NO: 1845873
aauaucaaagucaguucaa

SEQ ID NO: 1845875 - RNA, 19 nt, Artificial Sequence
  Description of Artificial Sequence: Synthetic oligonucleotide
  Sense strand starting at position 1728 of SEQ ID NO: 1563976
cgcgauuguccucuuccau

SEQ ID NO: 1845876 - RNA, 19 nt, Artificial Sequence
  Description of Artificial Sequence: Synthetic oligonucleotide
  Antisense strand to SEQ ID NO: 1845875
auggaagaggacaaucgcg

SEQ ID NO: 1845877 - RNA, 19 nt, Artificial Sequence
  Description of Artificial Sequence: Synthetic oligonucleotide
  Sense strand starting at position 1847 of SEQ ID NO: 1563976
uguugcucacuugaccaaa

SEQ ID NO: 1845878 - RNA, 19 nt, Artificial Sequence
  Description of Artificial Sequence: Synthetic oligonucleotide
  Antisense strand to SEQ ID NO: 1845877
uuuggucaagugagcaaca

SEQ ID NO: 1845879 - RNA, 19 nt, Artificial Sequence
  Description of Artificial Sequence: Synthetic oligonucleotide
  Sense strand starting at position 1923 of SEQ ID NO: 1563976
gucccaguuguugaauaag

SEQ ID NO: 1845880 - RNA, 19 nt, Artificial Sequence
  Description of Artificial Sequence: Synthetic oligonucleotide
  Antisense strand to SEQ ID NO: 1845879
cuuauucaacaacugggac

SEQ ID NO: 1845881 - RNA, 19 nt, Artificial Sequence
  Description of Artificial Sequence: Synthetic oligonucleotide
  Sense strand starting at position 2147 of SEQ ID NO: 1563976
aacaaauuccguuggugaa

SEQ ID NO: 1845882 - RNA, 19 nt, Artificial Sequence
  Description of Artificial Sequence: Synthetic oligonucleotide
  Antisense strand to SEQ ID NO: 1845881
uucaccaacggaauuuguu

SEQ ID NO: 1845883 - RNA, 19 nt, Artificial Sequence
  Description of Artificial Sequence: Synthetic oligonucleotide
  Sense strand starting at position 2151 of SEQ ID NO: 1563976
aauuccguuggugaauuaa

SEQ ID NO: 1845884 - RNA, 19 nt, Artificial Sequence
  Description of Artificial Sequence: Synthetic oligonucleotide
  Antisense strand to SEQ ID NO: 1845883
uuaauucaccaacggaauu

SEQ ID NO: 1845885 - RNA, 19 nt, Artificial Sequence
  Description of Artificial Sequence: Synthetic oligonucleotide
  Sense strand starting at position 2161 of SEQ ID NO: 1563976
gugaauuaacuaugucauu

SEQ ID NO: 1845886 - RNA, 19 nt, Artificial Sequence
  Description of Artificial Sequence: Synthetic oligonucleotide
  Antisense strand to SEQ ID NO: 1845885
aaugacauaguuaauucac

SEQ ID NO: 1845887 - RNA, 19 nt, Artificial Sequence
  Description of Artificial Sequence: Synthetic oligonucleotide
  Sense strand starting at position 2162 of SEQ ID NO: 1563976
ugaauuaacuaugucauug

SEQ ID NO: 1845888 - RNA, 19 nt, Artificial Sequence
  Description of Artificial Sequence: Synthetic oligonucleotide
  Antisense strand to SEQ ID NO: 1845887
caaugacauaguuaauuca

SEQ ID NO: 1845889 - RNA, 19 nt, Artificial Sequence
  Description of Artificial Sequence: Synthetic oligonucleotide
  Sense strand starting at position 2196 of SEQ ID NO: 1563976
gauuaugcuccuggaauga

SEQ ID NO: 1845890 - RNA, 19 nt, Artificial Sequence
  Description of Artificial Sequence: Synthetic oligonucleotide
  Antisense strand to SEQ ID NO: 1845889
ucauuccaggagcauaauc

SEQ ID NO: 1845891 - RNA, 19 nt, Artificial Sequence
  Description of Artificial Sequence: Synthetic oligonucleotide
  Sense strand starting at position 2250 of SEQ ID NO: 1563976
gaccgagaccuugaagugu

SEQ ID NO: 1845892 - RNA, 19 nt, Artificial Sequence
  Description of Artificial Sequence: Synthetic oligonucleotide
  Antisense strand to SEQ ID NO: 1845891
acacuucaaggucucgguc

SEQ ID NO: 1845893 - RNA, 19 nt, Artificial Sequence
  Description of Artificial Sequence: Synthetic oligonucleotide
  Sense strand starting at position 2410 of SEQ ID NO: 1563976
caucuuaacuauguggagu

SEQ ID NO: 1845894 - RNA, 19 nt, Artificial Sequence
  Description of Artificial Sequence: Synthetic oligonucleotide
  Antisense strand to SEQ ID NO: 1845893
acuccacauaguuaagaug

SEQ ID NO: 1845895 - RNA, 19 nt, Artificial Sequence
  Description of Artificial Sequence: Synthetic oligonucleotide
  Sense strand starting at position 2427 of SEQ ID NO: 1563976
gucuucggaauuuguguua

SEQ ID NO: 1845896 - RNA, 19 nt, Artificial Sequence
  Description of Artificial Sequence: Synthetic oligonucleotide
  Antisense strand to SEQ ID NO: 1845895
uaacacaaauuccgaagac

SEQ ID NO: 1845897 - RNA, 19 nt, Artificial Sequence
  Description of Artificial Sequence: Synthetic oligonucleotide
  Sense strand starting at position 2459 of SEQ ID NO: 1563976
ucagauaacucuguguuaa

SEQ ID NO: 1845898 - RNA, 19 nt, Artificial Sequence
  Description of Artificial Sequence: Synthetic oligonucleotide
  Antisense strand to SEQ ID NO: 1845897
uuaacacagaguuaucuga

SEQ ID NO: 1845899 - RNA, 19 nt, Artificial Sequence
  Description of Artificial Sequence: Synthetic oligonucleotide
  Sense strand starting at position 2575 of SEQ ID NO: 1563976
acuguuaccucaguuuaga

SEQ ID NO: 1845900 - RNA, 19 nt, Artificial Sequence
  Description of Artificial Sequence: Synthetic oligonucleotide
  Antisense strand to SEQ ID NO: 1845899
ucuaaacugagguaacagu

SEQ ID NO: 1845901 - RNA, 19 nt, Artificial Sequence
  Description of Artificial Sequence: Synthetic oligonucleotide
  Sense strand starting at position 2855 of SEQ ID NO: 1563976
guguguaguguucugacuu

SEQ ID NO: 1845902 - RNA, 19 nt, Artificial Sequence
  Description of Artificial Sequence: Synthetic oligonucleotide
  Antisense strand to SEQ ID NO: 1845901
aagucagaacacuacacac

SEQ ID NO: 1845903 - RNA, 19 nt, Artificial Sequence
  Description of Artificial Sequence: Synthetic oligonucleotide
  Sense strand starting at position 2913 of SEQ ID NO: 1563976
aaggcuuuggguuagaguu

SEQ ID NO: 1845904 - RNA, 19 nt, Artificial Sequence
  Description of Artificial Sequence: Synthetic oligonucleotide
  Antisense strand to SEQ ID NO: 1845903
aacucuaacccaaagccuu

SEQ ID NO: 1845905 - RNA, 19 nt, Artificial Sequence
  Description of Artificial Sequence: Synthetic oligonucleotide
  Sense strand starting at position 2919 of SEQ ID NO: 1563976
uuggguuagaguugaccaa

SEQ ID NO: 1845906 - RNA, 19 nt, Artificial Sequence
  Description of Artificial Sequence: Synthetic oligonucleotide
  Antisense strand to SEQ ID NO: 1845905
uuggucaacucuaacccaa

SEQ ID NO: 1845907 - RNA, 19 nt, Artificial Sequence
  Description of Artificial Sequence: Synthetic oligonucleotide
  Sense strand starting at position 3024 of SEQ ID NO: 1563976
aacagagguagacgugaaa

SEQ ID NO: 1845908 - RNA, 19 nt, Artificial Sequence
  Description of Artificial Sequence: Synthetic oligonucleotide
  Antisense strand to SEQ ID NO: 1845907
uuucacgucuaccucuguu

SEQ ID NO: 1845909 - RNA, 19 nt, Artificial Sequence
  Description of Artificial Sequence: Synthetic oligonucleotide
  Sense strand starting at position 3080 of SEQ ID NO: 1563976
uccagaucuucuuugugag

SEQ ID NO: 1845910 - RNA, 19 nt, Artificial Sequence
  Description of Artificial Sequence: Synthetic oligonucleotide
  Antisense strand to SEQ ID NO: 1845909
cucacaaagaagaucugga

SEQ ID NO: 1845911 - RNA, 19 nt, Artificial Sequence
  Description of Artificial Sequence: Synthetic oligonucleotide
  Sense strand starting at position 3361 of SEQ ID NO: 1563976
cgugguucugcuucuguga

SEQ ID NO: 1845912 - RNA, 19 nt, Artificial Sequence
  Description of Artificial Sequence: Synthetic oligonucleotide
  Antisense strand to SEQ ID NO: 1845911
ucacagaagcagaaccacg

SEQ ID NO: 1845913 - RNA, 19 nt, Artificial Sequence
  Description of Artificial Sequence: Synthetic oligonucleotide
  Sense strand starting at position 3431 of SEQ ID NO: 1563976
aggagagcauccucagcau

SEQ ID NO: 1845914 - RNA, 19 nt, Artificial Sequence
  Description of Artificial Sequence: Synthetic oligonucleotide
  Antisense strand to SEQ ID NO: 1845913
augcugaggaugcucuccu

SEQ ID NO: 1845915 - RNA, 19 nt, Artificial Sequence
  Description of Artificial Sequence: Synthetic oligonucleotide
  Sense strand starting at position 3539 of SEQ ID NO: 1563976
uguaucagaucucucccua

SEQ ID NO: 1845916 - RNA, 19 nt, Artificial Sequence
  Description of Artificial Sequence: Synthetic oligonucleotide
  Antisense strand to SEQ ID NO: 1845915
uagggagagaucugauaca

SEQ ID NO: 1845917 - RNA, 19 nt, Artificial Sequence
  Description of Artificial Sequence: Synthetic oligonucleotide
  Sense strand starting at position 3543 of SEQ ID NO: 1563976
ucagaucucucccuacagu

SEQ ID NO: 1845918 - RNA, 19 nt, Artificial Sequence
  Description of Artificial Sequence: Synthetic oligonucleotide
  Antisense strand to SEQ ID NO: 1845917
acuguagggagagaucuga

SEQ ID NO: 1845919 - RNA, 19 nt, Artificial Sequence
  Description of Artificial Sequence: Synthetic oligonucleotide
  Sense strand starting at position 3667 of SEQ ID NO: 1563976
uuuguuuggagaugaaguu

SEQ ID NO: 1845920 - RNA, 19 nt, Artificial Sequence
  Description of Artificial Sequence: Synthetic oligonucleotide
  Antisense strand to SEQ ID NO: 1845919
aacuucaucuccaaacaaa

SEQ ID NO: 1845921 - RNA, 19 nt, Artificial Sequence
  Description of Artificial Sequence: Synthetic oligonucleotide
  Sense strand starting at position 207 of SEQ ID NO: 1563977
uauguauaugugcauauga

SEQ ID NO: 1845922 - RNA, 19 nt, Artificial Sequence
  Description of Artificial Sequence: Synthetic oligonucleotide
  Antisense strand to SEQ ID NO: 1845921
ucauaugcacauauacaua

SEQ ID NO: 1845923 - RNA, 19 nt, Artificial Sequence
  Description of Artificial Sequence: Synthetic oligonucleotide
  Sense strand starting at position 209 of SEQ ID NO: 1563977
uguauaugugcauaugaua

SEQ ID NO: 1845924 - RNA, 19 nt, Artificial Sequence
  Description of Artificial Sequence: Synthetic oligonucleotide
  Antisense strand to SEQ ID NO: 1845923
uaucauaugcacauauaca

SEQ ID NO: 1845925 - RNA, 19 nt, Artificial Sequence
  Description of Artificial Sequence: Synthetic oligonucleotide
  Sense strand starting at position 217 of SEQ ID NO: 1563977
ugcauaugauaaucuugua

SEQ ID NO: 1845926 - RNA, 19 nt, Artificial Sequence
  Description of Artificial Sequence: Synthetic oligonucleotide
  Antisense strand to SEQ ID NO: 1845925
uacaagauuaucauaugca

SEQ ID NO: 1845927 - RNA, 19 nt, Artificial Sequence
  Description of Artificial Sequence: Synthetic oligonucleotide
  Sense strand starting at position 270 of SEQ ID NO: 1563977
accauaaguuguuuaguga

SEQ ID NO: 1845928 - RNA, 19 nt, Artificial Sequence
  Description of Artificial Sequence: Synthetic oligonucleotide
  Antisense strand to SEQ ID NO: 1845927
ucacuaaacaacuuauggu

SEQ ID NO: 1845929 - RNA, 19 nt, Artificial Sequence
  Description of Artificial Sequence: Synthetic oligonucleotide
  Sense strand starting at position 271 of SEQ ID NO: 1563977
ccauaaguuguuuagugac

SEQ ID NO: 1845930 - RNA, 19 nt, Artificial Sequence
  Description of Artificial Sequence: Synthetic oligonucleotide
  Antisense strand to SEQ ID NO: 1845929
gucacuaaacaacuuaugg

SEQ ID NO: 1845931 - RNA, 19 nt, Artificial Sequence
  Description of Artificial Sequence: Synthetic oligonucleotide
  Sense strand starting at position 306 of SEQ ID NO: 1563977
guaacaaacuuauugggau

SEQ ID NO: 1845932 - RNA, 19 nt, Artificial Sequence
  Description of Artificial Sequence: Synthetic oligonucleotide
  Antisense strand to SEQ ID NO: 1845931
aucccaauaaguuuguuac

SEQ ID NO: 1845933 - RNA, 19 nt, Artificial Sequence
  Description of Artificial Sequence: Synthetic oligonucleotide
  Sense strand starting at position 460 of SEQ ID NO: 1563977
cccacagggcucuaauaua

SEQ ID NO: 1845934 - RNA, 19 nt, Artificial Sequence
  Description of Artificial Sequence: Synthetic oligonucleotide
  Antisense strand to SEQ ID NO: 1845933
uauauuagagcccuguggg

SEQ ID NO: 1845935 - RNA, 19 nt, Artificial Sequence
  Description of Artificial Sequence: Synthetic oligonucleotide
  Sense strand starting at position 912 of SEQ ID NO: 1563977
gaccaaauuugggagagca

SEQ ID NO: 1845936 - RNA, 19 nt, Artificial Sequence
  Description of Artificial Sequence: Synthetic oligonucleotide
  Antisense strand to SEQ ID NO: 1845935
ugcucucccaaauuugguc

SEQ ID NO: 1845937 - RNA, 19 nt, Artificial Sequence
  Description of Artificial Sequence: Synthetic oligonucleotide
  Sense strand starting at position 1032 of SEQ ID NO: 1563977
ccagguuuccacuaccuga

SEQ ID NO: 1845938 - RNA, 19 nt, Artificial Sequence
  Description of Artificial Sequence: Synthetic oligonucleotide
  Antisense strand to SEQ ID NO: 1845937
ucagguaguggaaaccugg

SEQ ID NO: 1845939 - RNA, 19 nt, Artificial Sequence
  Description of Artificial Sequence: Synthetic oligonucleotide
  Sense strand starting at position 1101 of SEQ ID NO: 1563977
ugcguauuauuucuaacua

SEQ ID NO: 1845940 - RNA, 19 nt, Artificial Sequence
  Description of Artificial Sequence: Synthetic oligonucleotide
  Antisense strand to SEQ ID NO: 1845939
uaguuagaaauaauacgca

SEQ ID NO: 1845941 - RNA, 19 nt, Artificial Sequence
  Description of Artificial Sequence: Synthetic oligonucleotide
  Sense strand starting at position 1486 of SEQ ID NO: 1563977
cgguauagaagcuaaguau

SEQ ID NO: 1845942 - RNA, 19 nt, Artificial Sequence
  Description of Artificial Sequence: Synthetic oligonucleotide
  Antisense strand to SEQ ID NO: 1845941
auacuuagcuucuauaccg

SEQ ID NO: 1845943 - RNA, 19 nt, Artificial Sequence
  Description of Artificial Sequence: Synthetic oligonucleotide
  Sense strand starting at position 1500 of SEQ ID NO: 1563977
aguauaaacagcugagaag

SEQ ID NO: 1845944 - RNA, 19 nt, Artificial Sequence
  Description of Artificial Sequence: Synthetic oligonucleotide
  Antisense strand to SEQ ID NO: 1845943
cuucucagcuguuuauacu

SEQ ID NO: 1845945 - RNA, 19 nt, Artificial Sequence
  Description of Artificial Sequence: Synthetic oligonucleotide
  Sense strand starting at position 1531 of SEQ ID NO: 1563977
gcgcucuucucauuuacau

SEQ ID NO: 1845946 - RNA, 19 nt, Artificial Sequence
  Description of Artificial Sequence: Synthetic oligonucleotide
  Antisense strand to SEQ ID NO: 1845945
auguaaaugagaagagcgc

SEQ ID NO: 1845947 - RNA, 19 nt, Artificial Sequence
  Description of Artificial Sequence: Synthetic oligonucleotide
  Sense strand starting at position 1664 of SEQ ID NO: 1563977
gggcaugugugcucuauuu

SEQ ID NO: 1845948 - RNA, 19 nt, Artificial Sequence
  Description of Artificial Sequence: Synthetic oligonucleotide
  Antisense strand to SEQ ID NO: 1845947
aaauagagcacacaugccc

SEQ ID NO: 1845949 - RNA, 19 nt, Artificial Sequence
  Description of Artificial Sequence: Synthetic oligonucleotide
  Sense strand starting at position 1967 of SEQ ID NO: 1563977
gaggcaaggccucaguuua

SEQ ID NO: 1845950 - RNA, 19 nt, Artificial Sequence
  Description of Artificial Sequence: Synthetic oligonucleotide
  Antisense strand to SEQ ID NO: 1845949
uaaacugaggccuugccuc

SEQ ID NO: 1845951 - RNA, 19 nt, Artificial Sequence
  Description of Artificial Sequence: Synthetic oligonucleotide
  Sense strand starting at position 2061 of SEQ ID NO: 1563977
ggcuacugucaucauagua

SEQ ID NO: 1845952 - RNA, 19 nt, Artificial Sequence
  Description of Artificial Sequence: Synthetic oligonucleotide
  Antisense strand to SEQ ID NO: 1845951
uacuaugaugacaguagcc

SEQ ID NO: 1845953 - RNA, 19 nt, Artificial Sequence
  Description of Artificial Sequence: Synthetic oligonucleotide
  Sense strand starting at position 2295 of SEQ ID NO: 1563977
ggaccaugucccugggaug

SEQ ID NO: 1845954 - RNA, 19 nt, Artificial Sequence
  Description of Artificial Sequence: Synthetic oligonucleotide
  Antisense strand to SEQ ID NO: 1845953
caucccagggacauggucc

SEQ ID NO: 1845955 - RNA, 19 nt, Artificial Sequence
  Description of Artificial Sequence: Synthetic oligonucleotide
  Sense strand starting at position 2296 of SEQ ID NO: 1563977
gaccaugucccugggauga

SEQ ID NO: 1845956 - RNA, 19 nt, Artificial Sequence
  Description of Artificial Sequence: Synthetic oligonucleotide
  Antisense strand to SEQ ID NO: 1845955
ucaucccagggacaugguc

SEQ ID NO: 1845957 - RNA, 19 nt, Artificial Sequence
  Description of Artificial Sequence: Synthetic oligonucleotide
  Sense strand starting at position 2326 of SEQ ID NO: 1563977
augugcuguagucaggaua

SEQ ID NO: 1845958 - RNA, 19 nt, Artificial Sequence
  Description of Artificial Sequence: Synthetic oligonucleotide
  Antisense strand to SEQ ID NO: 1845957
uauccugacuacagcacau

SEQ ID NO: 1845959 - RNA, 19 nt, Artificial Sequence
  Description of Artificial Sequence: Synthetic oligonucleotide
  Sense strand starting at position 2557 of SEQ ID NO: 1563977
ggagguagauugucuuuaa

SEQ ID NO: 1845960 - RNA, 19 nt, Artificial Sequence
  Description of Artificial Sequence: Synthetic oligonucleotide
  Antisense strand to SEQ ID NO: 1845959
uuaaagacaaucuaccucc

SEQ ID NO: 1845961 - RNA, 19 nt, Artificial Sequence
  Description of Artificial Sequence: Synthetic oligonucleotide
  Sense strand starting at position 2558 of SEQ ID NO: 1563977
gagguagauugucuuuaac

SEQ ID NO: 1845962 - RNA, 19 nt, Artificial Sequence
  Description of Artificial Sequence: Synthetic oligonucleotide
  Antisense strand to SEQ ID NO: 1845961
guuaaagacaaucuaccuc

SEQ ID NO: 1845963 - RNA, 19 nt, Artificial Sequence
  Description of Artificial Sequence: Synthetic oligonucleotide
  Sense strand starting at position 2560 of SEQ ID NO: 1563977
gguagauugucuuuaacag

SEQ ID NO: 1845964 - RNA, 19 nt, Artificial Sequence
  Description of Artificial Sequence: Synthetic oligonucleotide
  Antisense strand to SEQ ID NO: 1845963
cuguuaaagacaaucuacc

SEQ ID NO: 1845965 - RNA, 19 nt, Artificial Sequence
  Description of Artificial Sequence: Synthetic oligonucleotide
  Sense strand starting at position 2561 of SEQ ID NO: 1563977
guagauugucuuuaacagc

SEQ ID NO: 1845966 - RNA, 19 nt, Artificial Sequence
  Description of Artificial Sequence: Synthetic oligonucleotide
  Antisense strand to SEQ ID NO: 1845965
gcuguuaaagacaaucuac

SEQ ID NO: 1845967 - RNA, 19 nt, Artificial Sequence
  Description of Artificial Sequence: Synthetic oligonucleotide
  Sense strand starting at position 2784 of SEQ ID NO: 1563977
gcucauggcaaucagagau

SEQ ID NO: 1845968 - RNA, 19 nt, Artificial Sequence
  Description of Artificial Sequence: Synthetic oligonucleotide
  Antisense strand to SEQ ID NO: 1845967
aucucugauugccaugagc

SEQ ID NO: 1845969 - RNA, 19 nt, Artificial Sequence
  Description of Artificial Sequence: Synthetic oligonucleotide
  Sense strand starting at position 2829 of SEQ ID NO: 1563977
ugucuacauuaucuaggga

SEQ ID NO: 1845970 - RNA, 19 nt, Artificial Sequence
  Description of Artificial Sequence: Synthetic oligonucleotide
  Antisense strand to SEQ ID NO: 1845969
ucccuagauaauguagaca

SEQ ID NO: 1845971 - RNA, 19 nt, Artificial Sequence
  Description of Artificial Sequence: Synthetic oligonucleotide
  Sense strand starting at position 2832 of SEQ ID NO: 1563977
cuacauuaucuagggacau

SEQ ID NO: 1845972 - RNA, 19 nt, Artificial Sequence
  Description of Artificial Sequence: Synthetic oligonucleotide
  Antisense strand to SEQ ID NO: 1845971
augucccuagauaauguag

SEQ ID NO: 1845973 - RNA, 19 nt, Artificial Sequence
  Description of Artificial Sequence: Synthetic oligonucleotide
  Sense strand starting at position 2943 of SEQ ID NO: 1563977
ucaugaugaucccuggcau

SEQ ID NO: 1845974 - RNA, 19 nt, Artificial Sequence
  Description of Artificial Sequence: Synthetic oligonucleotide
  Antisense strand to SEQ ID NO: 1845973
augccagggaucaucauga

SEQ ID NO: 1845975 - RNA, 19 nt, Artificial Sequence
  Description of Artificial Sequence: Synthetic oligonucleotide
  Sense strand starting at position 2944 of SEQ ID NO: 1563977
caugaugaucccuggcauu

SEQ ID NO: 1845976 - RNA, 19 nt, Artificial Sequence
  Description of Artificial Sequence: Synthetic oligonucleotide
  Antisense strand to SEQ ID NO: 1845975
aaugccagggaucaucaug

SEQ ID NO: 1845977 - RNA, 19 nt, Artificial Sequence
  Description of Artificial Sequence: Synthetic oligonucleotide
  Sense strand starting at position 3004 of SEQ ID NO: 1563977
uguuuaaucuuugugagaa

SEQ ID NO: 1845978 - RNA, 19 nt, Artificial Sequence
  Description of Artificial Sequence: Synthetic oligonucleotide
  Antisense strand to SEQ ID NO: 1845977
uucucacaaagauuaaaca

SEQ ID NO: 1845979 - RNA, 19 nt, Artificial Sequence
  Description of Artificial Sequence: Synthetic oligonucleotide
  Sense strand starting at position 3225 of SEQ ID NO: 1563977
aggacaagucccugggcuu

SEQ ID NO: 1845980 - RNA, 19 nt, Artificial Sequence
  Description of Artificial Sequence: Synthetic oligonucleotide
  Antisense strand to SEQ ID NO: 1845979
aagcccagggacuuguccu

SEQ ID NO: 1845981 - RNA, 19 nt, Artificial Sequence
  Description of Artificial Sequence: Synthetic oligonucleotide
  Sense strand starting at position 3280 of SEQ ID NO: 1563977
auucaaguguggucuggga

SEQ ID NO: 1845982 - RNA, 19 nt, Artificial Sequence
  Description of Artificial Sequence: Synthetic oligonucleotide
  Antisense strand to SEQ ID NO: 1845981
ucccagaccacacuugaau

SEQ ID NO: 1845983 - RNA, 19 nt, Artificial Sequence
  Description of Artificial Sequence: Synthetic oligonucleotide
  Sense strand starting at position 3652 of SEQ ID NO: 1563977
gauucuguagcagagaauu

SEQ ID NO: 1845984 - RNA, 19 nt, Artificial Sequence
  Description of Artificial Sequence: Synthetic oligonucleotide
  Antisense strand to SEQ ID NO: 1845983
aauucucugcuacagaauc

SEQ ID NO: 1845985 - RNA, 19 nt, Artificial Sequence
  Description of Artificial Sequence: Synthetic oligonucleotide
  Sense strand starting at position 3658 of SEQ ID NO: 1563977
guagcagagaauuacaguu

SEQ ID NO: 1845986 - RNA, 19 nt, Artificial Sequence
  Description of Artificial Sequence: Synthetic oligonucleotide
  Antisense strand to SEQ ID NO: 1845985
aacuguaauucucugcuac

SEQ ID NO: 1845987 - RNA, 19 nt, Artificial Sequence
  Description of Artificial Sequence: Synthetic oligonucleotide
  Sense strand starting at position 3665 of SEQ ID NO: 1563977
agaauuacaguuugacagu

SEQ ID NO: 1845988 - RNA, 19 nt, Artificial Sequence
  Description of Artificial Sequence: Synthetic oligonucleotide
  Antisense strand to SEQ ID NO: 1845987
acugucaaacuguaauucu

SEQ ID NO: 1845989 - RNA, 19 nt, Artificial Sequence
  Description of Artificial Sequence: Synthetic oligonucleotide
  Sense strand starting at position 3723 of SEQ ID NO: 1563977
agaguauuaugaccuauac

SEQ ID NO: 1845990 - RNA, 19 nt, Artificial Sequence
  Description of Artificial Sequence: Synthetic oligonucleotide
  Antisense strand to SEQ ID NO: 1845989
guauaggucauaauacucu

SEQ ID NO: 1845991 - RNA, 19 nt, Artificial Sequence
  Description of Artificial Sequence: Synthetic oligonucleotide
  Sense strand starting at position 3762 of SEQ ID NO: 1563977
ugagaauuccagugaugcu

SEQ ID NO: 1845992 - RNA, 19 nt, Artificial Sequence
  Description of Artificial Sequence: Synthetic oligonucleotide
  Antisense strand to SEQ ID NO: 1845991
agcaucacuggaauucuca

SEQ ID NO: 1845993 - RNA, 19 nt, Artificial Sequence
  Description of Artificial Sequence: Synthetic oligonucleotide
  Sense strand starting at position 3913 of SEQ ID NO: 1563977
ugcaaaugacaugguuauu

SEQ ID NO: 1845994 - RNA, 19 nt, Artificial Sequence
  Description of Artificial Sequence: Synthetic oligonucleotide
  Antisense strand to SEQ ID NO: 1845993
aauaaccaugucauuugca

SEQ ID NO: 1845995 - RNA, 19 nt, Artificial Sequence
  Description of Artificial Sequence: Synthetic oligonucleotide
  Sense strand starting at position 3918 of SEQ ID NO: 1563977
augacaugguuauucuaau

SEQ ID NO: 1845996 - RNA, 19 nt, Artificial Sequence
  Description of Artificial Sequence: Synthetic oligonucleotide
  Antisense strand to SEQ ID NO: 1845995
auuagaauaaccaugucau

SEQ ID NO: 1845997 - RNA, 19 nt, Artificial Sequence
  Description of Artificial Sequence: Synthetic oligonucleotide
  Sense strand starting at position 3919 of SEQ ID NO: 1563977
ugacaugguuauucuaauc

SEQ ID NO: 1845998 - RNA, 19 nt, Artificial Sequence
  Description of Artificial Sequence: Synthetic oligonucleotide
  Antisense strand to SEQ ID NO: 1845997
gauuagaauaaccauguca

SEQ ID NO: 1845999 - RNA, 19 nt, Artificial Sequence
  Description of Artificial Sequence: Synthetic oligonucleotide
  Sense strand starting at position 3977 of SEQ ID NO: 1563977
aguguacuucuccaagaag

SEQ ID NO: 1846000 - RNA, 19 nt, Artificial Sequence
  Description of Artificial Sequence: Synthetic oligonucleotide
  Antisense strand to SEQ ID NO: 1845999
cuucuuggagaaguacacu

SEQ ID NO: 1846001 - RNA, 19 nt, Artificial Sequence
  Description of Artificial Sequence: Synthetic oligonucleotide
  Sense strand starting at position 7 of SEQ ID NO: 1563978
ugacaaguugagugacaca

SEQ ID NO: 1846002 - RNA, 19 nt, Artificial Sequence
  Description of Artificial Sequence: Synthetic oligonucleotide
  Antisense strand to SEQ ID NO: 1846001
ugugucacucaacuuguca

SEQ ID NO: 1846003 - RNA, 19 nt, Artificial Sequence
  Description of Artificial Sequence: Synthetic oligonucleotide
  Sense strand starting at position 66 of SEQ ID NO: 1563978
gaaagauaccugggcacuu

SEQ ID NO: 1846004 - RNA, 19 nt, Artificial Sequence
  Description of Artificial Sequence: Synthetic oligonucleotide
  Antisense strand to SEQ ID NO: 1846003
aagugcccagguaucuuuc

SEQ ID NO: 1846005 - RNA, 19 nt, Artificial Sequence
  Description of Artificial Sequence: Synthetic oligonucleotide
  Sense strand starting at position 680 of SEQ ID NO: 1563978
uaaguagagcgguaucaag

SEQ ID NO: 1846006 - RNA, 19 nt, Artificial Sequence
  Description of Artificial Sequence: Synthetic oligonucleotide
  Antisense strand to SEQ ID NO: 1846005
cuugauaccgcucuacuua

SEQ ID NO: 1846007 - RNA, 19 nt, Artificial Sequence
  Description of Artificial Sequence: Synthetic oligonucleotide
  Sense strand starting at position 859 of SEQ ID NO: 1563978
uugcucuuugcuuuagcua

SEQ ID NO: 1846008 - RNA, 19 nt, Artificial Sequence
  Description of Artificial Sequence: Synthetic oligonucleotide
  Antisense strand to SEQ ID NO: 1846007
uagcuaaagcaaagagcaa

SEQ ID NO: 1846009 - RNA, 19 nt, Artificial Sequence
  Description of Artificial Sequence: Synthetic oligonucleotide
  Sense strand starting at position 873 of SEQ ID NO: 1563978
agcuacuuguacccuaaga

SEQ ID NO: 1846010 - RNA, 19 nt, Artificial Sequence
  Description of Artificial Sequence: Synthetic oligonucleotide
  Antisense strand to SEQ ID NO: 1846009
ucuuaggguacaaguagcu

SEQ ID NO: 1846011 - RNA, 19 nt, Artificial Sequence
  Description of Artificial Sequence: Synthetic oligonucleotide
  Sense strand starting at position 884 of SEQ ID NO: 1563978
cccuaagaauguguaggua

SEQ ID NO: 1846012 - RNA, 19 nt, Artificial Sequence
  Description of Artificial Sequence: Synthetic oligonucleotide
  Antisense strand to SEQ ID NO: 1846011
uaccuacacauucuuaggg

SEQ ID NO: 1846013 - RNA, 19 nt, Artificial Sequence
  Description of Artificial Sequence: Synthetic oligonucleotide
  Sense strand starting at position 994 of SEQ ID NO: 1563978
ggaggaaguuuguuucuga

SEQ ID NO: 1846014 - RNA, 19 nt, Artificial Sequence
  Description of Artificial Sequence: Synthetic oligonucleotide
  Antisense strand to SEQ ID NO: 1846013
ucagaaacaaacuuccucc

SEQ ID NO: 1846015 - RNA, 19 nt, Artificial Sequence
  Description of Artificial Sequence: Synthetic oligonucleotide
  Sense strand starting at position 995 of SEQ ID NO: 1563978
gaggaaguuuguuucugaa

SEQ ID NO: 1846016 - RNA, 19 nt, Artificial Sequence
  Description of Artificial Sequence: Synthetic oligonucleotide
  Antisense strand to SEQ ID NO: 1846015
uucagaaacaaacuuccuc

SEQ ID NO: 1846017 - RNA, 19 nt, Artificial Sequence
  Description of Artificial Sequence: Synthetic oligonucleotide
  Sense strand starting at position 997 of SEQ ID NO: 1563978
ggaaguuuguuucugaaga

SEQ ID NO: 1846018 - RNA, 19 nt, Artificial Sequence
  Description of Artificial Sequence: Synthetic oligonucleotide
  Antisense strand to SEQ ID NO: 1846017
ucuucagaaacaaacuucc

SEQ ID NO: 1846019 - RNA, 19 nt, Artificial Sequence
  Description of Artificial Sequence: Synthetic oligonucleotide
  Sense strand starting at position 1106 of SEQ ID NO: 1563978
acacacauguuaucgauua

SEQ ID NO: 1846020 - RNA, 19 nt, Artificial Sequence
  Description of Artificial Sequence: Synthetic oligonucleotide
  Antisense strand to SEQ ID NO: 1846019
uaaucgauaacaugugugu

SEQ ID NO: 1846021 - RNA, 19 nt, Artificial Sequence
  Description of Artificial Sequence: Synthetic oligonucleotide
  Sense strand starting at position 1273 of SEQ ID NO: 1563978
cuccacuucgagcaaacau

SEQ ID NO: 1846022 - RNA, 19 nt, Artificial Sequence
  Description of Artificial Sequence: Synthetic oligonucleotide
  Antisense strand to SEQ ID NO: 1846021
auguuugcucgaaguggag

SEQ ID NO: 1846023 - RNA, 19 nt, Artificial Sequence
  Description of Artificial Sequence: Synthetic oligonucleotide
  Sense strand starting at position 1411 of SEQ ID NO: 1563978
ccucucggucaagagaaau

SEQ ID NO: 1846024 - RNA, 19 nt, Artificial Sequence
  Description of Artificial Sequence: Synthetic oligonucleotide
  Antisense strand to SEQ ID NO: 1846023
auuucucuugaccgagagg

SEQ ID NO: 1846025 - RNA, 19 nt, Artificial Sequence
  Description of Artificial Sequence: Synthetic oligonucleotide
  Sense strand starting at position 2477 of SEQ ID NO: 1563978
uuuguuucccaauauaugu

SEQ ID NO: 1846026 - RNA, 19 nt, Artificial Sequence
  Description of Artificial Sequence: Synthetic oligonucleotide
  Antisense strand to SEQ ID NO: 1846025
acauauauugggaaacaaa

SEQ ID NO: 1846027 - RNA, 19 nt, Artificial Sequence
  Description of Artificial Sequence: Synthetic oligonucleotide
  Sense strand starting at position 2482 of SEQ ID NO: 1563978
uucccaauauaugucgaga

SEQ ID NO: 1846028 - RNA, 19 nt, Artificial Sequence
  Description of Artificial Sequence: Synthetic oligonucleotide
  Antisense strand to SEQ ID NO: 1846027
ucucgacauauauugggaa

SEQ ID NO: 1846029 - RNA, 19 nt, Artificial Sequence
  Description of Artificial Sequence: Synthetic oligonucleotide
  Sense strand starting at position 2653 of SEQ ID NO: 1563978
cauuguguuguguccuagu

SEQ ID NO: 1846030 - RNA, 19 nt, Artificial Sequence
  Description of Artificial Sequence: Synthetic oligonucleotide
  Antisense strand to SEQ ID NO: 1846029
acuaggacacaacacaaug

SEQ ID NO: 1846031 - RNA, 19 nt, Artificial Sequence
  Description of Artificial Sequence: Synthetic oligonucleotide
  Sense strand starting at position 2730 of SEQ ID NO: 1563978
gaguaaacugaguggaauc

SEQ ID NO: 1846032 - RNA, 19 nt, Artificial Sequence
  Description of Artificial Sequence: Synthetic oligonucleotide
  Antisense strand to SEQ ID NO: 1846031
gauuccacucaguuuacuc

SEQ ID NO: 1846033 - RNA, 19 nt, Artificial Sequence
  Description of Artificial Sequence: Synthetic oligonucleotide
  Sense strand starting at position 2780 of SEQ ID NO: 1563978
gcgauugugacuuaugaag

SEQ ID NO: 1846034 - RNA, 19 nt, Artificial Sequence
  Description of Artificial Sequence: Synthetic oligonucleotide
  Antisense strand to SEQ ID NO: 1846033
cuucauaagucacaaucgc

SEQ ID NO: 1846035 - RNA, 19 nt, Artificial Sequence
  Description of Artificial Sequence: Synthetic oligonucleotide
  Sense strand starting at position 2805 of SEQ ID NO: 1563978
uaaagaaguuaggaagaaa

SEQ ID NO: 1846036 - RNA, 19 nt, Artificial Sequence
  Description of Artificial Sequence: Synthetic oligonucleotide
  Antisense strand to SEQ ID NO: 1846035
uuucuuccuaacuucuuua

SEQ ID NO: 1846037 - RNA, 19 nt, Artificial Sequence
  Description of Artificial Sequence: Synthetic oligonucleotide
  Sense strand starting at position 2832 of SEQ ID NO: 1563978
acuagaauuggcuggguua

SEQ ID NO: 1846038 - RNA, 19 nt, Artificial Sequence
  Description of Artificial Sequence: Synthetic oligonucleotide
  Antisense strand to SEQ ID NO: 1846037
uaacccagccaauucuagu

SEQ ID NO: 1846039 - RNA, 19 nt, Artificial Sequence
  Description of Artificial Sequence: Synthetic oligonucleotide
  Sense strand starting at position 2834 of SEQ ID NO: 1563978
uagaauuggcuggguuaug

SEQ ID NO: 1846040 - RNA, 19 nt, Artificial Sequence
  Description of Artificial Sequence: Synthetic oligonucleotide
  Antisense strand to SEQ ID NO: 1846039
cauaacccagccaauucua

SEQ ID NO: 1846041 - RNA, 19 nt, Artificial Sequence
  Description of Artificial Sequence: Synthetic oligonucleotide
  Sense strand starting at position 2904 of SEQ ID NO: 1563978
cgagccaucguacucguaa

SEQ ID NO: 1846042 - RNA, 19 nt, Artificial Sequence
  Description of Artificial Sequence: Synthetic oligonucleotide
  Antisense strand to SEQ ID NO: 1846041
uuacgaguacgauggcucg

SEQ ID NO: 1846043 - RNA, 19 nt, Artificial Sequence
  Description of Artificial Sequence: Synthetic oligonucleotide
  Sense strand starting at position 2964 of SEQ ID NO: 1563978
gcuugucucauggaugaag

SEQ ID NO: 1846044 - RNA, 19 nt, Artificial Sequence
  Description of Artificial Sequence: Synthetic oligonucleotide
  Antisense strand to SEQ ID NO: 1846043
cuucauccaugagacaagc

SEQ ID NO: 1846045 - RNA, 19 nt, Artificial Sequence
  Description of Artificial Sequence: Synthetic oligonucleotide
  Sense strand starting at position 3084 of SEQ ID NO: 1563978
gucugaguuccacaaggug

SEQ ID NO: 1846046 - RNA, 19 nt, Artificial Sequence
  Description of Artificial Sequence: Synthetic oligonucleotide
  Antisense strand to SEQ ID NO: 1846045
caccuuguggaacucagac

SEQ ID NO: 1846047 - RNA, 19 nt, Artificial Sequence
  Description of Artificial Sequence: Synthetic oligonucleotide
  Sense strand starting at position 3087 of SEQ ID NO: 1563978
ugaguuccacaaggugaaa

SEQ ID NO: 1846048 - RNA, 19 nt, Artificial Sequence
  Description of Artificial Sequence: Synthetic oligonucleotide
  Antisense strand to SEQ ID NO: 1846047
uuucaccuuguggaacuca

SEQ ID NO: 1846049 - RNA, 19 nt, Artificial Sequence
  Description of Artificial Sequence: Synthetic oligonucleotide
  Sense strand starting at position 3099 of SEQ ID NO: 1563978
ggugaaauauaauccuccu

SEQ ID NO: 1846050 - RNA, 19 nt, Artificial Sequence
  Description of Artificial Sequence: Synthetic oligonucleotide
  Antisense strand to SEQ ID NO: 1846049
aggaggauuauauuucacc

SEQ ID NO: 1846051 - RNA, 19 nt, Artificial Sequence
  Description of Artificial Sequence: Synthetic oligonucleotide
  Sense strand starting at position 3194 of SEQ ID NO: 1563978
agucauguuccaggaggaa

SEQ ID NO: 1846052 - RNA, 19 nt, Artificial Sequence
  Description of Artificial Sequence: Synthetic oligonucleotide
  Antisense strand to SEQ ID NO: 1846051
uuccuccuggaacaugacu

SEQ ID NO: 1846053 - RNA, 19 nt, Artificial Sequence
  Description of Artificial Sequence: Synthetic oligonucleotide
  Sense strand starting at position 3306 of SEQ ID NO: 1563978
agauaauucucucccagug

SEQ ID NO: 1846054 - RNA, 19 nt, Artificial Sequence
  Description of Artificial Sequence: Synthetic oligonucleotide
  Antisense strand to SEQ ID NO: 1846053
cacugggagagaauuaucu

SEQ ID NO: 1846055 - RNA, 19 nt, Artificial Sequence
  Description of Artificial Sequence: Synthetic oligonucleotide
  Sense strand starting at position 3318 of SEQ ID NO: 1563978
cccagugucacugaaagua

SEQ ID NO: 1846056 - RNA, 19 nt, Artificial Sequence
  Description of Artificial Sequence: Synthetic oligonucleotide
  Antisense strand to SEQ ID NO: 1846055
uacuuucagugacacuggg

SEQ ID NO: 1846057 - RNA, 19 nt, Artificial Sequence
  Description of Artificial Sequence: Synthetic oligonucleotide
  Sense strand starting at position 3369 of SEQ ID NO: 1563978
ucagcauagcuagagaaau

SEQ ID NO: 1846058 - RNA, 19 nt, Artificial Sequence
  Description of Artificial Sequence: Synthetic oligonucleotide
  Antisense strand to SEQ ID NO: 1846057
auuucucuagcuaugcuga

SEQ ID NO: 1846059 - RNA, 19 nt, Artificial Sequence
  Description of Artificial Sequence: Synthetic oligonucleotide
  Sense strand starting at position 3456 of SEQ ID NO: 1563978
gugagagggcgccauuaaa

SEQ ID NO: 1846060 - RNA, 19 nt, Artificial Sequence
  Description of Artificial Sequence: Synthetic oligonucleotide
  Antisense strand to SEQ ID NO: 1846059
uuuaauggcgcccucucac

SEQ ID NO: 1846061 - RNA, 19 nt, Artificial Sequence
  Description of Artificial Sequence: Synthetic oligonucleotide
  Sense strand starting at position 3491 of SEQ ID NO: 1563978
gagaaacuugcaugguaug

SEQ ID NO: 1846062 - RNA, 19 nt, Artificial Sequence
  Description of Artificial Sequence: Synthetic oligonucleotide
  Antisense strand to SEQ ID NO: 1846061
cauaccaugcaaguuucuc

SEQ ID NO: 1846063 - RNA, 19 nt, Artificial Sequence
  Description of Artificial Sequence: Synthetic oligonucleotide
  Sense strand starting at position 3492 of SEQ ID NO: 1563978
agaaacuugcaugguauga

SEQ ID NO: 1846064 - RNA, 19 nt, Artificial Sequence
  Description of Artificial Sequence: Synthetic oligonucleotide
  Antisense strand to SEQ ID NO: 1846063
ucauaccaugcaaguuucu

SEQ ID NO: 1846065 - RNA, 19 nt, Artificial Sequence
  Description of Artificial Sequence: Synthetic oligonucleotide
  Sense strand starting at position 3601 of SEQ ID NO: 1563978
gucugaaugguuugggaca

SEQ ID NO: 1846066 - RNA, 19 nt, Artificial Sequence
  Description of Artificial Sequence: Synthetic oligonucleotide
  Antisense strand to SEQ ID NO: 1846065
ugucccaaaccauucagac

SEQ ID NO: 1846067 - RNA, 19 nt, Artificial Sequence
  Description of Artificial Sequence: Synthetic oligonucleotide
  Sense strand starting at position 3641 of SEQ ID NO: 1563978
ggcacagcuaucugaagau

SEQ ID NO: 1846068 - RNA, 19 nt, Artificial Sequence
  Description of Artificial Sequence: Synthetic oligonucleotide
  Antisense strand to SEQ ID NO: 1846067
aucuucagauagcugugcc

SEQ ID NO: 1846069 - RNA, 19 nt, Artificial Sequence
  Description of Artificial Sequence: Synthetic oligonucleotide
  Sense strand starting at position 3678 of SEQ ID NO: 1563978
guuguaagucuggaacauu

SEQ ID NO: 1846070 - RNA, 19 nt, Artificial Sequence
  Description of Artificial Sequence: Synthetic oligonucleotide
  Antisense strand to SEQ ID NO: 1846069
aauguuccagacuuacaac

SEQ ID NO: 1846071 - RNA, 19 nt, Artificial Sequence
  Description of Artificial Sequence: Synthetic oligonucleotide
  Sense strand starting at position 3758 of SEQ ID NO: 1563978
gggaacucuguaggccaua

SEQ ID NO: 1846072 - RNA, 19 nt, Artificial Sequence
  Description of Artificial Sequence: Synthetic oligonucleotide
  Antisense strand to SEQ ID NO: 1846071
uauggccuacagaguuccc

SEQ ID NO: 1846073 - RNA, 19 nt, Artificial Sequence
  Description of Artificial Sequence: Synthetic oligonucleotide
  Sense strand starting at position 3763 of SEQ ID NO: 1563978
cucuguaggccauaugaau

SEQ ID NO: 1846074 - RNA, 19 nt, Artificial Sequence
  Description of Artificial Sequence: Synthetic oligonucleotide
  Antisense strand to SEQ ID NO: 1846073
auucauauggccuacagag

SEQ ID NO: 1846075 - RNA, 19 nt, Artificial Sequence
  Description of Artificial Sequence: Synthetic oligonucleotide
  Sense strand starting at position 3817 of SEQ ID NO: 1563978
accuauuauugagcaccga

SEQ ID NO: 1846076 - RNA, 19 nt, Artificial Sequence
  Description of Artificial Sequence: Synthetic oligonucleotide
  Antisense strand to SEQ ID NO: 1846075
ucggugcucaauaauaggu

SEQ ID NO: 1846077 - RNA, 19 nt, Artificial Sequence
  Description of Artificial Sequence: Synthetic oligonucleotide
  Sense strand starting at position 3818 of SEQ ID NO: 1563978
ccuauuauugagcaccgau

SEQ ID NO: 1846078 - RNA, 19 nt, Artificial Sequence
  Description of Artificial Sequence: Synthetic oligonucleotide
  Antisense strand to SEQ ID NO: 1846077
aucggugcucaauaauagg

SEQ ID NO: 1846079 - RNA, 19 nt, Artificial Sequence
  Description of Artificial Sequence: Synthetic oligonucleotide
  Sense strand starting at position 3851 of SEQ ID NO: 1563978
uguacuacacacugaagau

SEQ ID NO: 1846080 - RNA, 19 nt, Artificial Sequence
  Description of Artificial Sequence: Synthetic oligonucleotide
  Antisense strand to SEQ ID NO: 1846079
aucuucaguguguaguaca

SEQ ID NO: 1846081 - RNA, 19 nt, Artificial Sequence
  Description of Artificial Sequence: Synthetic oligonucleotide
  Sense strand starting at position 129 of SEQ ID NO: 1563979
accuauuaacacggguaga

SEQ ID NO: 1846082 - RNA, 19 nt, Artificial Sequence
  Description of Artificial Sequence: Synthetic oligonucleotide
  Antisense strand to SEQ ID NO: 1846081
ucuacccguguuaauaggu

SEQ ID NO: 1846083 - RNA, 19 nt, Artificial Sequence
  Description of Artificial Sequence: Synthetic oligonucleotide
  Sense strand starting at position 188 of SEQ ID NO: 1563979
ggcuauuggagcuaucacu

SEQ ID NO: 1846084 - RNA, 19 nt, Artificial Sequence
  Description of Artificial Sequence: Synthetic oligonucleotide
  Antisense strand to SEQ ID NO: 1846083
agugauagcuccaauagcc

SEQ ID NO: 1846085 - RNA, 19 nt, Artificial Sequence
  Description of Artificial Sequence: Synthetic oligonucleotide
  Sense strand starting at position 202 of SEQ ID NO: 1563979
ucacuuaaacuuugagggu

SEQ ID NO: 1846086 - RNA, 19 nt, Artificial Sequence
  Description of Artificial Sequence: Synthetic oligonucleotide
  Antisense strand to SEQ ID NO: 1846085
acccucaaaguuuaaguga

SEQ ID NO: 1846087 - RNA, 19 nt, Artificial Sequence
  Description of Artificial Sequence: Synthetic oligonucleotide
  Sense strand starting at position 404 of SEQ ID NO: 1563979
ccucuacaauucucgagau

SEQ ID NO: 1846088 - RNA, 19 nt, Artificial Sequence
  Description of Artificial Sequence: Synthetic oligonucleotide
  Antisense strand to SEQ ID NO: 1846087
aucucgagaauuguagagg

SEQ ID NO: 1846089 - RNA, 19 nt, Artificial Sequence
  Description of Artificial Sequence: Synthetic oligonucleotide
  Sense strand starting at position 408 of SEQ ID NO: 1563979
uacaauucucgagauagua

SEQ ID NO: 1846090 - RNA, 19 nt, Artificial Sequence
  Description of Artificial Sequence: Synthetic oligonucleotide
  Antisense strand to SEQ ID NO: 1846089
uacuaucucgagaauugua

SEQ ID NO: 1846091 - RNA, 19 nt, Artificial Sequence
  Description of Artificial Sequence: Synthetic oligonucleotide
  Sense strand starting at position 449 of SEQ ID NO: 1563979
gggagugaaguuugaagau

SEQ ID NO: 1846092 - RNA, 19 nt, Artificial Sequence
  Description of Artificial Sequence: Synthetic oligonucleotide
  Antisense strand to SEQ ID NO: 1846091
aucuucaaacuucacuccc

SEQ ID NO: 1846093 - RNA, 19 nt, Artificial Sequence
  Description of Artificial Sequence: Synthetic oligonucleotide
  Sense strand starting at position 482 of SEQ ID NO: 1563979
gucauugaacuuugacuuu

SEQ ID NO: 1846094 - RNA, 19 nt, Artificial Sequence
  Description of Artificial Sequence: Synthetic oligonucleotide
  Antisense strand to SEQ ID NO: 1846093
aaagucaaaguucaaugac

SEQ ID NO: 1846095 - RNA, 19 nt, Artificial Sequence
  Description of Artificial Sequence: Synthetic oligonucleotide
  Sense strand starting at position 621 of SEQ ID NO: 1563979
ucaggucuuccucaaaugu

SEQ ID NO: 1846096 - RNA, 19 nt, Artificial Sequence
  Description of Artificial Sequence: Synthetic oligonucleotide
  Antisense strand to SEQ ID NO: 1846095
acauuugaggaagaccuga

SEQ ID NO: 1846097 - RNA, 19 nt, Artificial Sequence
  Description of Artificial Sequence: Synthetic oligonucleotide
  Sense strand starting at position 789 of SEQ ID NO: 1563979
cagggaugcugaguuccau

SEQ ID NO: 1846098 - RNA, 19 nt, Artificial Sequence
  Description of Artificial Sequence: Synthetic oligonucleotide
  Antisense strand to SEQ ID NO: 1846097
auggaacucagcaucccug

SEQ ID NO: 1846099 - RNA, 19 nt, Artificial Sequence
  Description of Artificial Sequence: Synthetic oligonucleotide
  Sense strand starting at position 899 of SEQ ID NO: 1563979
gguggaaucuauucccauc

SEQ ID NO: 1846100 - RNA, 19 nt, Artificial Sequence
  Description of Artificial Sequence: Synthetic oligonucleotide
  Antisense strand to SEQ ID NO: 1846099
gaugggaauagauuccacc

SEQ ID NO: 1846101 - RNA, 19 nt, Artificial Sequence
  Description of Artificial Sequence: Synthetic oligonucleotide
  Sense strand starting at position 1053 of SEQ ID NO: 1563979
gcacuaaagccagaguugu

SEQ ID NO: 1846102 - RNA, 19 nt, Artificial Sequence
  Description of Artificial Sequence: Synthetic oligonucleotide
  Antisense strand to SEQ ID NO: 1846101
acaacucuggcuuuagugc

SEQ ID NO: 1846103 - RNA, 19 nt, Artificial Sequence
  Description of Artificial Sequence: Synthetic oligonucleotide
  Sense strand starting at position 1335 of SEQ ID NO: 1563979
acccacaucucguucugaa

SEQ ID NO: 1846104 - RNA, 19 nt, Artificial Sequence
  Description of Artificial Sequence: Synthetic oligonucleotide
  Antisense strand to SEQ ID NO: 1846103
uucagaacgagaugugggu

SEQ ID NO: 1846105 - RNA, 19 nt, Artificial Sequence
  Description of Artificial Sequence: Synthetic oligonucleotide
  Sense strand starting at position 1371 of SEQ ID NO: 1563979
guuugugucaagcagauuu

SEQ ID NO: 1846106 - RNA, 19 nt, Artificial Sequence
  Description of Artificial Sequence: Synthetic oligonucleotide
  Antisense strand to SEQ ID NO: 1846105
aaaucugcuugacacaaac

SEQ ID NO: 1846107 - RNA, 19 nt, Artificial Sequence
  Description of Artificial Sequence: Synthetic oligonucleotide
  Sense strand starting at position 1567 of SEQ ID NO: 1563979
gcgguucccacagacuuua

SEQ ID NO: 1846108 - RNA, 19 nt, Artificial Sequence
  Description of Artificial Sequence: Synthetic oligonucleotide
  Antisense strand to SEQ ID NO: 1846107
uaaagucugugggaaccgc

SEQ ID NO: 1846109 - RNA, 19 nt, Artificial Sequence
  Description of Artificial Sequence: Synthetic oligonucleotide
  Sense strand starting at position 2192 of SEQ ID NO: 1563979
ggguucuccgcugccgaaa

SEQ ID NO: 1846110 - RNA, 19 nt, Artificial Sequence
  Description of Artificial Sequence: Synthetic oligonucleotide
  Antisense strand to SEQ ID NO: 1846109
uuucggcagcggagaaccc

SEQ ID NO: 1846111 - RNA, 19 nt, Artificial Sequence
  Description of Artificial Sequence: Synthetic oligonucleotide
  Sense strand starting at position 2490 of SEQ ID NO: 1563979
cuccuucccgcacaagauu

SEQ ID NO: 1846112 - RNA, 19 nt, Artificial Sequence
  Description of Artificial Sequence: Synthetic oligonucleotide
  Antisense strand to SEQ ID NO: 1846111
aaucuugugcgggaaggag

SEQ ID NO: 1846113 - RNA, 19 nt, Artificial Sequence
  Description of Artificial Sequence: Synthetic oligonucleotide
  Sense strand starting at position 2507 of SEQ ID NO: 1563979
uuaagugacugauugcauu

SEQ ID NO: 1846114 - RNA, 19 nt, Artificial Sequence
  Description of Artificial Sequence: Synthetic oligonucleotide
  Antisense strand to SEQ ID NO: 1846113
aaugcaaucagucacuuaa

SEQ ID NO: 1846115 - RNA, 19 nt, Artificial Sequence
  Description of Artificial Sequence: Synthetic oligonucleotide
  Sense strand starting at position 2614 of SEQ ID NO: 1563979
ggauaauugcaaggucacu

SEQ ID NO: 1846116 - RNA, 19 nt, Artificial Sequence
  Description of Artificial Sequence: Synthetic oligonucleotide
  Antisense strand to SEQ ID NO: 1846115
agugaccuugcaauuaucc

SEQ ID NO: 1846117 - RNA, 19 nt, Artificial Sequence
  Description of Artificial Sequence: Synthetic oligonucleotide
  Sense strand starting at position 2771 of SEQ ID NO: 1563979
acaggagucuaugcuuaca

SEQ ID NO: 1846118 - RNA, 19 nt, Artificial Sequence
  Description of Artificial Sequence: Synthetic oligonucleotide
  Antisense strand to SEQ ID NO: 1846117
uguaagcauagacuccugu

SEQ ID NO: 1846119 - RNA, 19 nt, Artificial Sequence
  Description of Artificial Sequence: Synthetic oligonucleotide
  Sense strand starting at position 2773 of SEQ ID NO: 1563979
aggagucuaugcuuacaca

SEQ ID NO: 1846120 - RNA, 19 nt, Artificial Sequence
  Description of Artificial Sequence: Synthetic oligonucleotide
  Antisense strand to SEQ ID NO: 1846119
uguguaagcauagacuccu

SEQ ID NO: 1846121 - RNA, 19 nt, Artificial Sequence
  Description of Artificial Sequence: Synthetic oligonucleotide
  Sense strand starting at position 2795 of SEQ ID NO: 1563979
uuggguauucuuuaucuca

SEQ ID NO: 1846122 - RNA, 19 nt, Artificial Sequence
  Description of Artificial Sequence: Synthetic oligonucleotide
  Antisense strand to SEQ ID NO: 1846121
ugagauaaagaauacccaa

SEQ ID NO: 1846123 - RNA, 19 nt, Artificial Sequence
  Description of Artificial Sequence: Synthetic oligonucleotide
  Sense strand starting at position 2797 of SEQ ID NO: 1563979
ggguauucuuuaucucaag

SEQ ID NO: 1846124 - RNA, 19 nt, Artificial Sequence
  Description of Artificial Sequence: Synthetic oligonucleotide
  Antisense strand to SEQ ID NO: 1846123
cuugagauaaagaauaccc

SEQ ID NO: 1846125 - RNA, 19 nt, Artificial Sequence
  Description of Artificial Sequence: Synthetic oligonucleotide
  Sense strand starting at position 2965 of SEQ ID NO: 1563979
gaacucagggcucaguaua

SEQ ID NO: 1846126 - RNA, 19 nt, Artificial Sequence
  Description of Artificial Sequence: Synthetic oligonucleotide
  Antisense strand to SEQ ID NO: 1846125
uauacugagcccugaguuc

SEQ ID NO: 1846127 - RNA, 19 nt, Artificial Sequence
  Description of Artificial Sequence: Synthetic oligonucleotide
  Sense strand starting at position 2972 of SEQ ID NO: 1563979
gggcucaguauaugaaauu

SEQ ID NO: 1846128 - RNA, 19 nt, Artificial Sequence
  Description of Artificial Sequence: Synthetic oligonucleotide
  Antisense strand to SEQ ID NO: 1846127
aauuucauauacugagccc

SEQ ID NO: 1846129 - RNA, 19 nt, Artificial Sequence
  Description of Artificial Sequence: Synthetic oligonucleotide
  Sense strand starting at position 2994 of SEQ ID NO: 1563979
auuuccuauuaugagugaa

SEQ ID NO: 1846130 - RNA, 19 nt, Artificial Sequence
  Description of Artificial Sequence: Synthetic oligonucleotide
  Antisense strand to SEQ ID NO: 1846129
uucacucauaauaggaaau

SEQ ID NO: 1846131 - RNA, 19 nt, Artificial Sequence
  Description of Artificial Sequence: Synthetic oligonucleotide
  Sense strand starting at position 2996 of SEQ ID NO: 1563979
uuccuauuaugagugaaua

SEQ ID NO: 1846132 - RNA, 19 nt, Artificial Sequence
  Description of Artificial Sequence: Synthetic oligonucleotide
  Antisense strand to SEQ ID NO: 1846131
uauucacucauaauaggaa

SEQ ID NO: 1846133 - RNA, 19 nt, Artificial Sequence
  Description of Artificial Sequence: Synthetic oligonucleotide
  Sense strand starting at position 2997 of SEQ ID NO: 1563979
uccuauuaugagugaauaa

SEQ ID NO: 1846134 - RNA, 19 nt, Artificial Sequence
  Description of Artificial Sequence: Synthetic oligonucleotide
  Antisense strand to SEQ ID NO: 1846133
uuauucacucauaauagga

SEQ ID NO: 1846135 - RNA, 19 nt, Artificial Sequence
  Description of Artificial Sequence: Synthetic oligonucleotide
  Sense strand starting at position 3131 of SEQ ID NO: 1563979
guacaaaugugacuggaag

SEQ ID NO: 1846136 - RNA, 19 nt, Artificial Sequence
  Description of Artificial Sequence: Synthetic oligonucleotide
  Antisense strand to SEQ ID NO: 1846135
cuuccagucacauuuguac

SEQ ID NO: 1846137 - RNA, 19 nt, Artificial Sequence
  Description of Artificial Sequence: Synthetic oligonucleotide
  Sense strand starting at position 3158 of SEQ ID NO: 1563979
ugggucucugauuggacua

SEQ ID NO: 1846138 - RNA, 19 nt, Artificial Sequence
  Description of Artificial Sequence: Synthetic oligonucleotide
  Antisense strand to SEQ ID NO: 1846137
uaguccaaucagagaccca

SEQ ID NO: 1846139 - RNA, 19 nt, Artificial Sequence
  Description of Artificial Sequence: Synthetic oligonucleotide
  Sense strand starting at position 3179 of SEQ ID NO: 1563979
uuucucacugaaugagauu

SEQ ID NO: 1846140 - RNA, 19 nt, Artificial Sequence
  Description of Artificial Sequence: Synthetic oligonucleotide
  Antisense strand to SEQ ID NO: 1846139
aaucucauucagugagaaa

SEQ ID NO: 1846141 - RNA, 19 nt, Artificial Sequence
  Description of Artificial Sequence: Synthetic oligonucleotide
  Sense strand starting at position 3190 of SEQ ID NO: 1563979
augagauuauuggugggua

SEQ ID NO: 1846142 - RNA, 19 nt, Artificial Sequence
  Description of Artificial Sequence: Synthetic oligonucleotide
  Antisense strand to SEQ ID NO: 1846141
uacccaccaauaaucucau

SEQ ID NO: 1846143 - RNA, 19 nt, Artificial Sequence
  Description of Artificial Sequence: Synthetic oligonucleotide
  Sense strand starting at position 3202 of SEQ ID NO: 1563979
guggguagcuauuuagcuu

SEQ ID NO: 1846144 - RNA, 19 nt, Artificial Sequence
  Description of Artificial Sequence: Synthetic oligonucleotide
  Antisense strand to SEQ ID NO: 1846143
aagcuaaauagcuacccac

SEQ ID NO: 1846145 - RNA, 19 nt, Artificial Sequence
  Description of Artificial Sequence: Synthetic oligonucleotide
  Sense strand starting at position 3278 of SEQ ID NO: 1563979
cucuacucugaauguaaag

SEQ ID NO: 1846146 - RNA, 19 nt, Artificial Sequence
  Description of Artificial Sequence: Synthetic oligonucleotide
  Antisense strand to SEQ ID NO: 1846145
cuuuacauucagaguagag

SEQ ID NO: 1846147 - RNA, 19 nt, Artificial Sequence
  Description of Artificial Sequence: Synthetic oligonucleotide
  Sense strand starting at position 3615 of SEQ ID NO: 1563979
gacauccaguggucuucua

SEQ ID NO: 1846148 - RNA, 19 nt, Artificial Sequence
  Description of Artificial Sequence: Synthetic oligonucleotide
  Antisense strand to SEQ ID NO: 1846147
uagaagaccacuggauguc

SEQ ID NO: 1846149 - RNA, 19 nt, Artificial Sequence
  Description of Artificial Sequence: Synthetic oligonucleotide
  Sense strand starting at position 3650 of SEQ ID NO: 1563979
agaacaucuuggucaucuu

SEQ ID NO: 1846150 - RNA, 19 nt, Artificial Sequence
  Description of Artificial Sequence: Synthetic oligonucleotide
  Antisense strand to SEQ ID NO: 1846149
aagaugaccaagauguucu

SEQ ID NO: 1846151 - RNA, 19 nt, Artificial Sequence
  Description of Artificial Sequence: Synthetic oligonucleotide
  Sense strand starting at position 3675 of SEQ ID NO: 1563979
gguagaaguauguagacua

SEQ ID NO: 1846152 - RNA, 19 nt, Artificial Sequence
  Description of Artificial Sequence: Synthetic oligonucleotide
  Antisense strand to SEQ ID NO: 1846151
uagucuacauacuucuacc

SEQ ID NO: 1846153 - RNA, 19 nt, Artificial Sequence
  Description of Artificial Sequence: Synthetic oligonucleotide
  Sense strand starting at position 3774 of SEQ ID NO: 1563979
agagcuaaguaauccaguu

SEQ ID NO: 1846154 - RNA, 19 nt, Artificial Sequence
  Description of Artificial Sequence: Synthetic oligonucleotide
  Antisense strand to SEQ ID NO: 1846153
aacuggauuacuuagcucu

SEQ ID NO: 1846155 - RNA, 19 nt, Artificial Sequence
  Description of Artificial Sequence: Synthetic oligonucleotide
  Sense strand starting at position 3860 of SEQ ID NO: 1563979
cuggaaguggagcgauaau

SEQ ID NO: 1846156 - RNA, 19 nt, Artificial Sequence
  Description of Artificial Sequence: Synthetic oligonucleotide
  Antisense strand to SEQ ID NO: 1846155
auuaucgcuccacuuccag

SEQ ID NO: 1846157 - RNA, 19 nt, Artificial Sequence
  Description of Artificial Sequence: Synthetic oligonucleotide
  Sense strand starting at position 3886 of SEQ ID NO: 1563979
aguugucagugagcaggaa

SEQ ID NO: 1846158 - RNA, 19 nt, Artificial Sequence
  Description of Artificial Sequence: Synthetic oligonucleotide
  Antisense strand to SEQ ID NO: 1846157
uuccugcucacugacaacu

SEQ ID NO: 1846159 - RNA, 19 nt, Artificial Sequence
  Description of Artificial Sequence: Synthetic oligonucleotide
  Sense strand starting at position 3911 of SEQ ID NO: 1563979
ggauguuuguggagaggga

SEQ ID NO: 1846160 - RNA, 19 nt, Artificial Sequence
  Description of Artificial Sequence: Synthetic oligonucleotide
  Antisense strand to SEQ ID NO: 1846159
ucccucuccacaaacaucc

SEQ ID NO: 1846161 - RNA, 19 nt, Artificial Sequence
  Description of Artificial Sequence: Synthetic oligonucleotide
  Sense strand starting at position 148 of SEQ ID NO: 1563980
uugccuacugggcauaaau

SEQ ID NO: 1846162 - RNA, 19 nt, Artificial Sequence
  Description of Artificial Sequence: Synthetic oligonucleotide
  Antisense strand to SEQ ID NO: 1846161
auuuaugcccaguaggcaa

SEQ ID NO: 1846163 - RNA, 19 nt, Artificial Sequence
  Description of Artificial Sequence: Synthetic oligonucleotide
  Sense strand starting at position 159 of SEQ ID NO: 1563980
gcauaaauaccuuggagau

SEQ ID NO: 1846164 - RNA, 19 nt, Artificial Sequence
  Description of Artificial Sequence: Synthetic oligonucleotide
  Antisense strand to SEQ ID NO: 1846163
aucuccaagguauuuaugc

SEQ ID NO: 1846165 - RNA, 19 nt, Artificial Sequence
  Description of Artificial Sequence: Synthetic oligonucleotide
  Sense strand starting at position 311 of SEQ ID NO: 1563980
uugugugucccugagagga

SEQ ID NO: 1846166 - RNA, 19 nt, Artificial Sequence
  Description of Artificial Sequence: Synthetic oligonucleotide
  Antisense strand to SEQ ID NO: 1846165
uccucucagggacacacaa

SEQ ID NO: 1846167 - RNA, 19 nt, Artificial Sequence
  Description of Artificial Sequence: Synthetic oligonucleotide
  Sense strand starting at position 375 of SEQ ID NO: 1563980
gaaggaaaguuuccucaca

SEQ ID NO: 1846168 - RNA, 19 nt, Artificial Sequence
  Description of Artificial Sequence: Synthetic oligonucleotide
  Antisense strand to SEQ ID NO: 1846167
ugugaggaaacuuuccuuc

SEQ ID NO: 1846169 - RNA, 19 nt, Artificial Sequence
  Description of Artificial Sequence: Synthetic oligonucleotide
  Sense strand starting at position 377 of SEQ ID NO: 1563980
aggaaaguuuccucacauc

SEQ ID NO: 1846170 - RNA, 19 nt, Artificial Sequence
  Description of Artificial Sequence: Synthetic oligonucleotide
  Antisense strand to SEQ ID NO: 1846169
gaugugaggaaacuuuccu

SEQ ID NO: 1846171 - RNA, 19 nt, Artificial Sequence
  Description of Artificial Sequence: Synthetic oligonucleotide
  Sense strand starting at position 436 of SEQ ID NO: 1563980
ugugguauggaugaaucua

SEQ ID NO: 1846172 - RNA, 19 nt, Artificial Sequence
  Description of Artificial Sequence: Synthetic oligonucleotide
  Antisense strand to SEQ ID NO: 1846171
uagauucauccauaccaca

SEQ ID NO: 1846173 - RNA, 19 nt, Artificial Sequence
  Description of Artificial Sequence: Synthetic oligonucleotide
  Sense strand starting at position 444 of SEQ ID NO: 1563980
ggaugaaucuagccugaaa

SEQ ID NO: 1846174 - RNA, 19 nt, Artificial Sequence
  Description of Artificial Sequence: Synthetic oligonucleotide
  Antisense strand to SEQ ID NO: 1846173
uuucaggcuagauucaucc

SEQ ID NO: 1846175 - RNA, 19 nt, Artificial Sequence
  Description of Artificial Sequence: Synthetic oligonucleotide
  Sense strand starting at position 446 of SEQ ID NO: 1563980
augaaucuagccugaaaua

SEQ ID NO: 1846176 - RNA, 19 nt, Artificial Sequence
  Description of Artificial Sequence: Synthetic oligonucleotide
  Antisense strand to SEQ ID NO: 1846175
uauuucaggcuagauucau

SEQ ID NO: 1846177 - RNA, 19 nt, Artificial Sequence
  Description of Artificial Sequence: Synthetic oligonucleotide
  Sense strand starting at position 1055 of SEQ ID NO: 1563980
cucuuaacaguauggaaau

SEQ ID NO: 1846178 - RNA, 19 nt, Artificial Sequence
  Description of Artificial Sequence: Synthetic oligonucleotide
  Antisense strand to SEQ ID NO: 1846177
auuuccauacuguuaagag

SEQ ID NO: 1846179 - RNA, 19 nt, Artificial Sequence
  Description of Artificial Sequence: Synthetic oligonucleotide
  Sense strand starting at position 1089 of SEQ ID NO: 1563980
ccagaauuaaccgguguga

SEQ ID NO: 1846180 - RNA, 19 nt, Artificial Sequence
  Description of Artificial Sequence: Synthetic oligonucleotide
  Antisense strand to SEQ ID NO: 1846179
ucacaccgguuaauucugg

SEQ ID NO: 1846181 - RNA, 19 nt, Artificial Sequence
  Description of Artificial Sequence: Synthetic oligonucleotide
  Sense strand starting at position 1091 of SEQ ID NO: 1563980
agaauuaaccggugugaac

SEQ ID NO: 1846182 - RNA, 19 nt, Artificial Sequence
  Description of Artificial Sequence: Synthetic oligonucleotide
  Antisense strand to SEQ ID NO: 1846181
guucacaccgguuaauucu

SEQ ID NO: 1846183 - RNA, 19 nt, Artificial Sequence
  Description of Artificial Sequence: Synthetic oligonucleotide
  Sense strand starting at position 1176 of SEQ ID NO: 1563980
ggguccucuggcuacaagu

SEQ ID NO: 1846184 - RNA, 19 nt, Artificial Sequence
  Description of Artificial Sequence: Synthetic oligonucleotide
  Antisense strand to SEQ ID NO: 1846183
acuuguagccagaggaccc

SEQ ID NO: 1846185 - RNA, 19 nt, Artificial Sequence
  Description of Artificial Sequence: Synthetic oligonucleotide
  Sense strand starting at position 1411 of SEQ ID NO: 1563980
aagagugaaucagaacaga

SEQ ID NO: 1846186 - RNA, 19 nt, Artificial Sequence
  Description of Artificial Sequence: Synthetic oligonucleotide
  Antisense strand to SEQ ID NO: 1846185
ucuguucugauucacucuu

SEQ ID NO: 1846187 - RNA, 19 nt, Artificial Sequence
  Description of Artificial Sequence: Synthetic oligonucleotide
  Sense strand starting at position 1526 of SEQ ID NO: 1563980
agguguuaagguuggagga

SEQ ID NO: 1846188 - RNA, 19 nt, Artificial Sequence
  Description of Artificial Sequence: Synthetic oligonucleotide
  Antisense strand to SEQ ID NO: 1846187
uccuccaaccuuaacaccu

SEQ ID NO: 1846189 - RNA, 19 nt, Artificial Sequence
  Description of Artificial Sequence: Synthetic oligonucleotide
  Sense strand starting at position 1576 of SEQ ID NO: 1563980
agcuaaacaucuucuggau

SEQ ID NO: 1846190 - RNA, 19 nt, Artificial Sequence
  Description of Artificial Sequence: Synthetic oligonucleotide
  Antisense strand to SEQ ID NO: 1846189
auccagaagauguuuagcu

SEQ ID NO: 1846191 - RNA, 19 nt, Artificial Sequence
  Description of Artificial Sequence: Synthetic oligonucleotide
  Sense strand starting at position 1604 of SEQ ID NO: 1563980
ccugucagguacucuagaa

SEQ ID NO: 1846192 - RNA, 19 nt, Artificial Sequence
  Description of Artificial Sequence: Synthetic oligonucleotide
  Antisense strand to SEQ ID NO: 1846191
uucuagaguaccugacagg

SEQ ID NO: 1846193 - RNA, 19 nt, Artificial Sequence
  Description of Artificial Sequence: Synthetic oligonucleotide
  Sense strand starting at position 1663 of SEQ ID NO: 1563980
ccgucucaaaccuggagaa

SEQ ID NO: 1846194 - RNA, 19 nt, Artificial Sequence
  Description of Artificial Sequence: Synthetic oligonucleotide
  Antisense strand to SEQ ID NO: 1846193
uucuccagguuugagacgg

SEQ ID NO: 1846195 - RNA, 19 nt, Artificial Sequence
  Description of Artificial Sequence: Synthetic oligonucleotide
  Sense strand starting at position 1779 of SEQ ID NO: 1563980
ccuagaugugauuaguaau

SEQ ID NO: 1846196 - RNA, 19 nt, Artificial Sequence
  Description of Artificial Sequence: Synthetic oligonucleotide
  Antisense strand to SEQ ID NO: 1846195
auuacuaaucacaucuagg

SEQ ID NO: 1846197 - RNA, 19 nt, Artificial Sequence
  Description of Artificial Sequence: Synthetic oligonucleotide
  Sense strand starting at position 1796 of SEQ ID NO: 1563980
augguaggguccuuagauc

SEQ ID NO: 1846198 - RNA, 19 nt, Artificial Sequence
  Description of Artificial Sequence: Synthetic oligonucleotide
  Antisense strand to SEQ ID NO: 1846197
gaucuaaggacccuaccau

SEQ ID NO: 1846199 - RNA, 19 nt, Artificial Sequence
  Description of Artificial Sequence: Synthetic oligonucleotide
  Sense strand starting at position 2863 of SEQ ID NO: 1563980
gcgauuugauuccucgaac

SEQ ID NO: 1846200 - RNA, 19 nt, Artificial Sequence
  Description of Artificial Sequence: Synthetic oligonucleotide
  Antisense strand to SEQ ID NO: 1846199
guucgaggaaucaaaucgc

SEQ ID NO: 1846201 - RNA, 19 nt, Artificial Sequence
  Description of Artificial Sequence: Synthetic oligonucleotide
  Sense strand starting at position 2864 of SEQ ID NO: 1563980
cgauuugauuccucgaacg

SEQ ID NO: 1846202 - RNA, 19 nt, Artificial Sequence
  Description of Artificial Sequence: Synthetic oligonucleotide
  Antisense strand to SEQ ID NO: 1846201
cguucgaggaaucaaaucg

SEQ ID NO: 1846203 - RNA, 19 nt, Artificial Sequence
  Description of Artificial Sequence: Synthetic oligonucleotide
  Sense strand starting at position 2974 of SEQ ID NO: 1563980
ucaagaagcccuuagccua

SEQ ID NO: 1846204 - RNA, 19 nt, Artificial Sequence
  Description of Artificial Sequence: Synthetic oligonucleotide
  Antisense strand to SEQ ID NO: 1846203
uaggcuaagggcuucuuga

SEQ ID NO: 1846205 - RNA, 19 nt, Artificial Sequence
  Description of Artificial Sequence: Synthetic oligonucleotide
  Sense strand starting at position 3010 of SEQ ID NO: 1563980
cucuguacccuugaagcua

SEQ ID NO: 1846206 - RNA, 19 nt, Artificial Sequence
  Description of Artificial Sequence: Synthetic oligonucleotide
  Antisense strand to SEQ ID NO: 1846205
uagcuucaaggguacagag

SEQ ID NO: 1846207 - RNA, 19 nt, Artificial Sequence
  Description of Artificial Sequence: Synthetic oligonucleotide
  Sense strand starting at position 3035 of SEQ ID NO: 1563980
uucuguauuugcuuuaugu

SEQ ID NO: 1846208 - RNA, 19 nt, Artificial Sequence
  Description of Artificial Sequence: Synthetic oligonucleotide
  Antisense strand to SEQ ID NO: 1846207
acauaaagcaaauacagaa

SEQ ID NO: 1846209 - RNA, 19 nt, Artificial Sequence
  Description of Artificial Sequence: Synthetic oligonucleotide
  Sense strand starting at position 3066 of SEQ ID NO: 1563980
cuuugacuuguauauguuu

SEQ ID NO: 1846210 - RNA, 19 nt, Artificial Sequence
  Description of Artificial Sequence: Synthetic oligonucleotide
  Antisense strand to SEQ ID NO: 1846209
aaacauauacaagucaaag

SEQ ID NO: 1846211 - RNA, 19 nt, Artificial Sequence
  Description of Artificial Sequence: Synthetic oligonucleotide
  Sense strand starting at position 3079 of SEQ ID NO: 1563980
auguuuguuuauccuggaa

SEQ ID NO: 1846212 - RNA, 19 nt, Artificial Sequence
  Description of Artificial Sequence: Synthetic oligonucleotide
  Antisense strand to SEQ ID NO: 1846211
uuccaggauaaacaaacau

SEQ ID NO: 1846213 - RNA, 19 nt, Artificial Sequence
  Description of Artificial Sequence: Synthetic oligonucleotide
  Sense strand starting at position 3082 of SEQ ID NO: 1563980
uuuguuuauccuggaacuu

SEQ ID NO: 1846214 - RNA, 19 nt, Artificial Sequence
  Description of Artificial Sequence: Synthetic oligonucleotide
  Antisense strand to SEQ ID NO: 1846213
aaguuccaggauaaacaaa

SEQ ID NO: 1846215 - RNA, 19 nt, Artificial Sequence
  Description of Artificial Sequence: Synthetic oligonucleotide
  Sense strand starting at position 3125 of SEQ ID NO: 1563980
guugcugauggugauaagu

SEQ ID NO: 1846216 - RNA, 19 nt, Artificial Sequence
  Description of Artificial Sequence: Synthetic oligonucleotide
  Antisense strand to SEQ ID NO: 1846215
acuuaucaccaucagcaac

SEQ ID NO: 1846217 - RNA, 19 nt, Artificial Sequence
  Description of Artificial Sequence: Synthetic oligonucleotide
  Sense strand starting at position 3350 of SEQ ID NO: 1563980
acaacagagucaguccuau

SEQ ID NO: 1846218 - RNA, 19 nt, Artificial Sequence
  Description of Artificial Sequence: Synthetic oligonucleotide
  Antisense strand to SEQ ID NO: 1846217
auaggacugacucuguugu

SEQ ID NO: 1846219 - RNA, 19 nt, Artificial Sequence
  Description of Artificial Sequence: Synthetic oligonucleotide
  Sense strand starting at position 3356 of SEQ ID NO: 1563980
gagucaguccuauggaagu

SEQ ID NO: 1846220 - RNA, 19 nt, Artificial Sequence
  Description of Artificial Sequence: Synthetic oligonucleotide
  Antisense strand to SEQ ID NO: 1846219
acuuccauaggacugacuc

SEQ ID NO: 1846221 - RNA, 19 nt, Artificial Sequence
  Description of Artificial Sequence: Synthetic oligonucleotide
  Sense strand starting at position 3373 of SEQ ID NO: 1563980
guaguagcucugcucucau

SEQ ID NO: 1846222 - RNA, 19 nt, Artificial Sequence
  Description of Artificial Sequence: Synthetic oligonucleotide
  Antisense strand to SEQ ID NO: 1846221
augagagcagagcuacuac

SEQ ID NO: 1846223 - RNA, 19 nt, Artificial Sequence
  Description of Artificial Sequence: Synthetic oligonucleotide
  Sense strand starting at position 3445 of SEQ ID NO: 1563980
gggugaauuucacagagug

SEQ ID NO: 1846224 - RNA, 19 nt, Artificial Sequence
  Description of Artificial Sequence: Synthetic oligonucleotide
  Antisense strand to SEQ ID NO: 1846223
cacucugugaaauucaccc

SEQ ID NO: 1846225 - RNA, 19 nt, Artificial Sequence
  Description of Artificial Sequence: Synthetic oligonucleotide
  Sense strand starting at position 3483 of SEQ ID NO: 1563980
cuugaauaaugaguauacu

SEQ ID NO: 1846226 - RNA, 19 nt, Artificial Sequence
  Description of Artificial Sequence: Synthetic oligonucleotide
  Antisense strand to SEQ ID NO: 1846225
aguauacucauuauucaag

SEQ ID NO: 1846227 - RNA, 19 nt, Artificial Sequence
  Description of Artificial Sequence: Synthetic oligonucleotide
  Sense strand starting at position 3596 of SEQ ID NO: 1563980
ggaccauagcaggguucua

SEQ ID NO: 1846228 - RNA, 19 nt, Artificial Sequence
  Description of Artificial Sequence: Synthetic oligonucleotide
  Antisense strand to SEQ ID NO: 1846227
uagaacccugcuauggucc

SEQ ID NO: 1846229 - RNA, 19 nt, Artificial Sequence
  Description of Artificial Sequence: Synthetic oligonucleotide
  Sense strand starting at position 3620 of SEQ ID NO: 1563980
gggagcagugccugagaga

SEQ ID NO: 1846230 - RNA, 19 nt, Artificial Sequence
  Description of Artificial Sequence: Synthetic oligonucleotide
  Antisense strand to SEQ ID NO: 1846229
ucucucaggcacugcuccc

SEQ ID NO: 1846231 - RNA, 19 nt, Artificial Sequence
  Description of Artificial Sequence: Synthetic oligonucleotide
  Sense strand starting at position 3621 of SEQ ID NO: 1563980
ggagcagugccugagagau

SEQ ID NO: 1846232 - RNA, 19 nt, Artificial Sequence
  Description of Artificial Sequence: Synthetic oligonucleotide
  Antisense strand to SEQ ID NO: 1846231
aucucucaggcacugcucc

SEQ ID NO: 1846233 - RNA, 19 nt, Artificial Sequence
  Description of Artificial Sequence: Synthetic oligonucleotide
  Sense strand starting at position 3651 of SEQ ID NO: 1563980
auucuaauacagugguuau

SEQ ID NO: 1846234 - RNA, 19 nt, Artificial Sequence
  Description of Artificial Sequence: Synthetic oligonucleotide
  Antisense strand to SEQ ID NO: 1846233
auaaccacuguauuagaau

SEQ ID NO: 1846235 - RNA, 19 nt, Artificial Sequence
  Description of Artificial Sequence: Synthetic oligonucleotide
  Sense strand starting at position 3722 of SEQ ID NO: 1563980
gugccuuaaaguugaaaga

SEQ ID NO: 1846236 - RNA, 19 nt, Artificial Sequence
  Description of Artificial Sequence: Synthetic oligonucleotide
  Antisense strand to SEQ ID NO: 1846235
ucuuucaacuuuaaggcac

SEQ ID NO: 1846237 - RNA, 19 nt, Artificial Sequence
  Description of Artificial Sequence: Synthetic oligonucleotide
  Sense strand starting at position 3790 of SEQ ID NO: 1563980
cuaacaauaucuguuaggu

SEQ ID NO: 1846238 - RNA, 19 nt, Artificial Sequence
  Description of Artificial Sequence: Synthetic oligonucleotide
  Antisense strand to SEQ ID NO: 1846237
accuaacagauauuguuag

SEQ ID NO: 1846239 - RNA, 19 nt, Artificial Sequence
  Description of Artificial Sequence: Synthetic oligonucleotide
  Sense strand starting at position 3884 of SEQ ID NO: 1563980
ggacaagucuaauuauguu

SEQ ID NO: 1846240 - RNA, 19 nt, Artificial Sequence
  Description of Artificial Sequence: Synthetic oligonucleotide
  Antisense strand to SEQ ID NO: 1846239
aacauaauuagacuugucc

SEQ ID NO: 1846241 - RNA, 19 nt, Artificial Sequence
  Description of Artificial Sequence: Synthetic oligonucleotide
  Sense strand starting at position 135 of SEQ ID NO: 1563981
ccacgagguuggccuuaaa

SEQ ID NO: 1846242 - RNA, 19 nt, Artificial Sequence
  Description of Artificial Sequence: Synthetic oligonucleotide
  Antisense strand to SEQ ID NO: 1846241
uuuaaggccaaccucgugg

SEQ ID NO: 1846243 - RNA, 19 nt, Artificial Sequence
  Description of Artificial Sequence: Synthetic oligonucleotide
  Sense strand starting at position 138 of SEQ ID NO: 1563981
cgagguuggccuuaaauga

SEQ ID NO: 1846244 - RNA, 19 nt, Artificial Sequence
  Description of Artificial Sequence: Synthetic oligonucleotide
  Antisense strand to SEQ ID NO: 1846243
ucauuuaaggccaaccucg

SEQ ID NO: 1846245 - RNA, 19 nt, Artificial Sequence
  Description of Artificial Sequence: Synthetic oligonucleotide
  Sense strand starting at position 152 of SEQ ID NO: 1563981
aaugaagugcgacaccaau

SEQ ID NO: 1846246 - RNA, 19 nt, Artificial Sequence
  Description of Artificial Sequence: Synthetic oligonucleotide
  Antisense strand to SEQ ID NO: 1846245
auuggugucgcacuucauu

SEQ ID NO: 1846247 - RNA, 19 nt, Artificial Sequence
  Description of Artificial Sequence: Synthetic oligonucleotide
  Sense strand starting at position 199 of SEQ ID NO: 1563981
ggaggaaucgcuuggagaa

SEQ ID NO: 1846248 - RNA, 19 nt, Artificial Sequence
  Description of Artificial Sequence: Synthetic oligonucleotide
  Antisense strand to SEQ ID NO: 1846247
uucuccaagcgauuccucc

SEQ ID NO: 1846249 - RNA, 19 nt, Artificial Sequence
  Description of Artificial Sequence: Synthetic oligonucleotide
  Sense strand starting at position 200 of SEQ ID NO: 1563981
gaggaaucgcuuggagaaa

SEQ ID NO: 1846250 - RNA, 19 nt, Artificial Sequence
  Description of Artificial Sequence: Synthetic oligonucleotide
  Antisense strand to SEQ ID NO: 1846249
uuucuccaagcgauuccuc

SEQ ID NO: 1846251 - RNA, 19 nt, Artificial Sequence
  Description of Artificial Sequence: Synthetic oligonucleotide
  Sense strand starting at position 201 of SEQ ID NO: 1563981
aggaaucgcuuggagaaau

SEQ ID NO: 1846252 - RNA, 19 nt, Artificial Sequence
  Description of Artificial Sequence: Synthetic oligonucleotide
  Antisense strand to SEQ ID NO: 1846251
auuucuccaagcgauuccu

SEQ ID NO: 1846253 - RNA, 19 nt, Artificial Sequence
  Description of Artificial Sequence: Synthetic oligonucleotide
  Sense strand starting at position 212 of SEQ ID NO: 1563981
ggagaaaucgcuugccguu

SEQ ID NO: 1846254 - RNA, 19 nt, Artificial Sequence
  Description of Artificial Sequence: Synthetic oligonucleotide
  Antisense strand to SEQ ID NO: 1846253
aacggcaagcgauuucucc

SEQ ID NO: 1846255 - RNA, 19 nt, Artificial Sequence
  Description of Artificial Sequence: Synthetic oligonucleotide
  Sense strand starting at position 213 of SEQ ID NO: 1563981
gagaaaucgcuugccguuu

SEQ ID NO: 1846256 - RNA, 19 nt, Artificial Sequence
  Description of Artificial Sequence: Synthetic oligonucleotide
  Antisense strand to SEQ ID NO: 1846255
aaacggcaagcgauuucuc

SEQ ID NO: 1846257 - RNA, 19 nt, Artificial Sequence
  Description of Artificial Sequence: Synthetic oligonucleotide
  Sense strand starting at position 615 of SEQ ID NO: 1563981
ccggauuccugggaauucu

SEQ ID NO: 1846258 - RNA, 19 nt, Artificial Sequence
  Description of Artificial Sequence: Synthetic oligonucleotide
  Antisense strand to SEQ ID NO: 1846257
agaauucccaggaauccgg

SEQ ID NO: 1846259 - RNA, 19 nt, Artificial Sequence
  Description of Artificial Sequence: Synthetic oligonucleotide
  Sense strand starting at position 2720 of SEQ ID NO: 1563981
cgggcuucgccuuaaauga

SEQ ID NO: 1846260 - RNA, 19 nt, Artificial Sequence
  Description of Artificial Sequence: Synthetic oligonucleotide
  Antisense strand to SEQ ID NO: 1846259
ucauuuaaggcgaagcccg

SEQ ID NO: 1846261 - RNA, 19 nt, Artificial Sequence
  Description of Artificial Sequence: Synthetic oligonucleotide
  Sense strand starting at position 2781 of SEQ ID NO: 1563981
aacggacaccuuuguuuaa

SEQ ID NO: 1846262 - RNA, 19 nt, Artificial Sequence
  Description of Artificial Sequence: Synthetic oligonucleotide
  Antisense strand to SEQ ID NO: 1846261
uuaaacaaagguguccguu

SEQ ID NO: 1846263 - RNA, 19 nt, Artificial Sequence
  Description of Artificial Sequence: Synthetic oligonucleotide
  Sense strand starting at position 2782 of SEQ ID NO: 1563981
acggacaccuuuguuuaaa

SEQ ID NO: 1846264 - RNA, 19 nt, Artificial Sequence
  Description of Artificial Sequence: Synthetic oligonucleotide
  Antisense strand to SEQ ID NO: 1846263
uuuaaacaaagguguccgu

SEQ ID NO: 1846265 - RNA, 19 nt, Artificial Sequence
  Description of Artificial Sequence: Synthetic oligonucleotide
  Sense strand starting at position 3066 of SEQ ID NO: 1563981
gaaggccuuugccuggaaa

SEQ ID NO: 1846266 - RNA, 19 nt, Artificial Sequence
  Description of Artificial Sequence: Synthetic oligonucleotide
  Antisense strand to SEQ ID NO: 1846265
uuuccaggcaaaggccuuc

SEQ ID NO: 1846267 - RNA, 19 nt, Artificial Sequence
  Description of Artificial Sequence: Synthetic oligonucleotide
  Sense strand starting at position 3069 of SEQ ID NO: 1563981
ggccuuugccuggaaagca

SEQ ID NO: 1846268 - RNA, 19 nt, Artificial Sequence
  Description of Artificial Sequence: Synthetic oligonucleotide
  Antisense strand to SEQ ID NO: 1846267
ugcuuuccaggcaaaggcc

SEQ ID NO: 1846269 - RNA, 19 nt, Artificial Sequence
  Description of Artificial Sequence: Synthetic oligonucleotide
  Sense strand starting at position 3132 of SEQ ID NO: 1563981
ggagaucacuuggagaaau

SEQ ID NO: 1846270 - RNA, 19 nt, Artificial Sequence
  Description of Artificial Sequence: Synthetic oligonucleotide
  Antisense strand to SEQ ID NO: 1846269
auuucuccaagugaucucc

SEQ ID NO: 1846271 - RNA, 19 nt, Artificial Sequence
  Description of Artificial Sequence: Synthetic oligonucleotide
  Sense strand starting at position 3236 of SEQ ID NO: 1563981
ccuggcuccucguuagaag

SEQ ID NO: 1846272 - RNA, 19 nt, Artificial Sequence
  Description of Artificial Sequence: Synthetic oligonucleotide
  Antisense strand to SEQ ID NO: 1846271
cuucuaacgaggagccagg

SEQ ID NO: 1846273 - RNA, 19 nt, Artificial Sequence
  Description of Artificial Sequence: Synthetic oligonucleotide
  Sense strand starting at position 3237 of SEQ ID NO: 1563981
cuggcuccucguuagaaga

SEQ ID NO: 1846274 - RNA, 19 nt, Artificial Sequence
  Description of Artificial Sequence: Synthetic oligonucleotide
  Antisense strand to SEQ ID NO: 1846273
ucuucuaacgaggagccag

SEQ ID NO: 1846275 - RNA, 19 nt, Artificial Sequence
  Description of Artificial Sequence: Synthetic oligonucleotide
  Sense strand starting at position 3239 of SEQ ID NO: 1563981
ggcuccucguuagaagaga

SEQ ID NO: 1846276 - RNA, 19 nt, Artificial Sequence
  Description of Artificial Sequence: Synthetic oligonucleotide
  Antisense strand to SEQ ID NO: 1846275
ucucuucuaacgaggagcc

SEQ ID NO: 1846277 - RNA, 19 nt, Artificial Sequence
  Description of Artificial Sequence: Synthetic oligonucleotide
  Sense strand starting at position 3297 of SEQ ID NO: 1563981
aggcgaguuucuuauccag

SEQ ID NO: 1846278 - RNA, 19 nt, Artificial Sequence
  Description of Artificial Sequence: Synthetic oligonucleotide
  Antisense strand to SEQ ID NO: 1846277
cuggauaagaaacucgccu

SEQ ID NO: 1846279 - RNA, 19 nt, Artificial Sequence
  Description of Artificial Sequence: Synthetic oligonucleotide
  Sense strand starting at position 3313 of SEQ ID NO: 1563981
cagggcuucucccagaaag

SEQ ID NO: 1846280 - RNA, 19 nt, Artificial Sequence
  Description of Artificial Sequence: Synthetic oligonucleotide
  Antisense strand to SEQ ID NO: 1846279
cuuucugggagaagcccug

SEQ ID NO: 1846281 - RNA, 19 nt, Artificial Sequence
  Description of Artificial Sequence: Synthetic oligonucleotide
  Sense strand starting at position 3315 of SEQ ID NO: 1563981
gggcuucucccagaaagca

SEQ ID NO: 1846282 - RNA, 19 nt, Artificial Sequence
  Description of Artificial Sequence: Synthetic oligonucleotide
  Antisense strand to SEQ ID NO: 1846281
ugcuuucugggagaagccc

SEQ ID NO: 1846283 - RNA, 19 nt, Artificial Sequence
  Description of Artificial Sequence: Synthetic oligonucleotide
  Sense strand starting at position 3382 of SEQ ID NO: 1563981
gcuggcuagucuugaggaa

SEQ ID NO: 1846284 - RNA, 19 nt, Artificial Sequence
  Description of Artificial Sequence: Synthetic oligonucleotide
  Antisense strand to SEQ ID NO: 1846283
uuccucaagacuagccagc

SEQ ID NO: 1846285 - RNA, 19 nt, Artificial Sequence
  Description of Artificial Sequence: Synthetic oligonucleotide
  Sense strand starting at position 3383 of SEQ ID NO: 1563981
cuggcuagucuugaggaau

SEQ ID NO: 1846286 - RNA, 19 nt, Artificial Sequence
  Description of Artificial Sequence: Synthetic oligonucleotide
  Antisense strand to SEQ ID NO: 1846285
auuccucaagacuagccag

SEQ ID NO: 1846287 - RNA, 19 nt, Artificial Sequence
  Description of Artificial Sequence: Synthetic oligonucleotide
  Sense strand starting at position 3395 of SEQ ID NO: 1563981
gaggaauggcgucauauug

SEQ ID NO: 1846288 - RNA, 19 nt, Artificial Sequence
  Description of Artificial Sequence: Synthetic oligonucleotide
  Antisense strand to SEQ ID NO: 1846287
caauaugacgccauuccuc

SEQ ID NO: 1846289 - RNA, 19 nt, Artificial Sequence
  Description of Artificial Sequence: Synthetic oligonucleotide
  Sense strand starting at position 3403 of SEQ ID NO: 1563981
gcgucauauugagggcuca

SEQ ID NO: 1846290 - RNA, 19 nt, Artificial Sequence
  Description of Artificial Sequence: Synthetic oligonucleotide
  Antisense strand to SEQ ID NO: 1846289
ugagcccucaauaugacgc

SEQ ID NO: 1846291 - RNA, 19 nt, Artificial Sequence
  Description of Artificial Sequence: Synthetic oligonucleotide
  Sense strand starting at position 3463 of SEQ ID NO: 1563981
gcggcagugucuagaugag

SEQ ID NO: 1846292 - RNA, 19 nt, Artificial Sequence
  Description of Artificial Sequence: Synthetic oligonucleotide
  Antisense strand to SEQ ID NO: 1846291
cucaucuagacacugccgc

SEQ ID NO: 1846293 - RNA, 19 nt, Artificial Sequence
  Description of Artificial Sequence: Synthetic oligonucleotide
  Sense strand starting at position 3473 of SEQ ID NO: 1563981
cuagaugagccgugguaag

SEQ ID NO: 1846294 - RNA, 19 nt, Artificial Sequence
  Description of Artificial Sequence: Synthetic oligonucleotide
  Antisense strand to SEQ ID NO: 1846293
cuuaccacggcucaucuag

SEQ ID NO: 1846295 - RNA, 19 nt, Artificial Sequence
  Description of Artificial Sequence: Synthetic oligonucleotide
  Sense strand starting at position 3711 of SEQ ID NO: 1563981
guagguaccucuucgccaa

SEQ ID NO: 1846296 - RNA, 19 nt, Artificial Sequence
  Description of Artificial Sequence: Synthetic oligonucleotide
  Antisense strand to SEQ ID NO: 1846295
uuggcgaagagguaccuac

SEQ ID NO: 1846297 - RNA, 19 nt, Artificial Sequence
  Description of Artificial Sequence: Synthetic oligonucleotide
  Sense strand starting at position 3712 of SEQ ID NO: 1563981
uagguaccucuucgccaaa

SEQ ID NO: 1846298 - RNA, 19 nt, Artificial Sequence
  Description of Artificial Sequence: Synthetic oligonucleotide
  Antisense strand to SEQ ID NO: 1846297
uuuggcgaagagguaccua

SEQ ID NO: 1846299 - RNA, 19 nt, Artificial Sequence
  Description of Artificial Sequence: Synthetic oligonucleotide
  Sense strand starting at position 3978 of SEQ ID NO: 1563981
cugggucugagucagucau

SEQ ID NO: 1846300 - RNA, 19 nt, Artificial Sequence
  Description of Artificial Sequence: Synthetic oligonucleotide
  Antisense strand to SEQ ID NO: 1846299
augacugacucagacccag

SEQ ID NO: 1846301 - RNA, 19 nt, Artificial Sequence
  Description of Artificial Sequence: Synthetic oligonucleotide
  Sense strand starting at position 18 of SEQ ID NO: 1563982
aauauuaaugagugacugu

SEQ ID NO: 1846302 - RNA, 19 nt, Artificial Sequence
  Description of Artificial Sequence: Synthetic oligonucleotide
  Antisense strand to SEQ ID NO: 1846301
acagucacucauuaauauu

SEQ ID NO: 1846303 - RNA, 19 nt, Artificial Sequence
  Description of Artificial Sequence: Synthetic oligonucleotide
  Sense strand starting at position 60 of SEQ ID NO: 1563982
uuggcuauggugaguggua

SEQ ID NO: 1846304 - RNA, 19 nt, Artificial Sequence
  Description of Artificial Sequence: Synthetic oligonucleotide
  Antisense strand to SEQ ID NO: 1846303
uaccacucaccauagccaa

SEQ ID NO: 1846305 - RNA, 19 nt, Artificial Sequence
  Description of Artificial Sequence: Synthetic oligonucleotide
  Sense strand starting at position 135 of SEQ ID NO: 1563982
gggccugauguugaggaua

SEQ ID NO: 1846306 - RNA, 19 nt, Artificial Sequence
  Description of Artificial Sequence: Synthetic oligonucleotide
  Antisense strand to SEQ ID NO: 1846305
uauccucaacaucaggccc

SEQ ID NO: 1846307 - RNA, 19 nt, Artificial Sequence
  Description of Artificial Sequence: Synthetic oligonucleotide
  Sense strand starting at position 352 of SEQ ID NO: 1563982
gguuaagagaguuguccaa

SEQ ID NO: 1846308 - RNA, 19 nt, Artificial Sequence
  Description of Artificial Sequence: Synthetic oligonucleotide
  Antisense strand to SEQ ID NO: 1846307
uuggacaacucucuuaacc

SEQ ID NO: 1846309 - RNA, 19 nt, Artificial Sequence
  Description of Artificial Sequence: Synthetic oligonucleotide
  Sense strand starting at position 356 of SEQ ID NO: 1563982
aagagaguuguccaagguc

SEQ ID NO: 1846310 - RNA, 19 nt, Artificial Sequence
  Description of Artificial Sequence: Synthetic oligonucleotide
  Antisense strand to SEQ ID NO: 1846309
gaccuuggacaacucucuu

SEQ ID NO: 1846311 - RNA, 19 nt, Artificial Sequence
  Description of Artificial Sequence: Synthetic oligonucleotide
  Sense strand starting at position 430 of SEQ ID NO: 1563982
accucugaaucagugaauu

SEQ ID NO: 1846312 - RNA, 19 nt, Artificial Sequence
  Description of Artificial Sequence: Synthetic oligonucleotide
  Antisense strand to SEQ ID NO: 1846311
aauucacugauucagaggu

SEQ ID NO: 1846313 - RNA, 19 nt, Artificial Sequence
  Description of Artificial Sequence: Synthetic oligonucleotide
  Sense strand starting at position 462 of SEQ ID NO: 1563982
cuggguugcaggcauuaau

SEQ ID NO: 1846314 - RNA, 19 nt, Artificial Sequence
  Description of Artificial Sequence: Synthetic oligonucleotide
  Antisense strand to SEQ ID NO: 1846313
auuaaugccugcaacccag

SEQ ID NO: 1846315 - RNA, 19 nt, Artificial Sequence
  Description of Artificial Sequence: Synthetic oligonucleotide
  Sense strand starting at position 542 of SEQ ID NO: 1563982
ccuucuauuugauagagac

SEQ ID NO: 1846316 - RNA, 19 nt, Artificial Sequence
  Description of Artificial Sequence: Synthetic oligonucleotide
  Antisense strand to SEQ ID NO: 1846315
gucucuaucaaauagaagg

SEQ ID NO: 1846317 - RNA, 19 nt, Artificial Sequence
  Description of Artificial Sequence: Synthetic oligonucleotide
  Sense strand starting at position 624 of SEQ ID NO: 1563982
gcauucuagcucuggagga

SEQ ID NO: 1846318 - RNA, 19 nt, Artificial Sequence
  Description of Artificial Sequence: Synthetic oligonucleotide
  Antisense strand to SEQ ID NO: 1846317
uccuccagagcuagaaugc

SEQ ID NO: 1846319 - RNA, 19 nt, Artificial Sequence
  Description of Artificial Sequence: Synthetic oligonucleotide
  Sense strand starting at position 769 of SEQ ID NO: 1563982
gagagagcugguggagaua

SEQ ID NO: 1846320 - RNA, 19 nt, Artificial Sequence
  Description of Artificial Sequence: Synthetic oligonucleotide
  Antisense strand to SEQ ID NO: 1846319
uaucuccaccagcucucuc

SEQ ID NO: 1846321 - RNA, 19 nt, Artificial Sequence
  Description of Artificial Sequence: Synthetic oligonucleotide
  Sense strand starting at position 798 of SEQ ID NO: 1563982
agaauaggagccuagucuu

SEQ ID NO: 1846322 - RNA, 19 nt, Artificial Sequence
  Description of Artificial Sequence: Synthetic oligonucleotide
  Antisense strand to SEQ ID NO: 1846321
aagacuaggcuccuauucu

SEQ ID NO: 1846323 - RNA, 19 nt, Artificial Sequence
  Description of Artificial Sequence: Synthetic oligonucleotide
  Sense strand starting at position 938 of SEQ ID NO: 1563982
cuccucuagcauuagcaga

SEQ ID NO: 1846324 - RNA, 19 nt, Artificial Sequence
  Description of Artificial Sequence: Synthetic oligonucleotide
  Antisense strand to SEQ ID NO: 1846323
ucugcuaaugcuagaggag

SEQ ID NO: 1846325 - RNA, 19 nt, Artificial Sequence
  Description of Artificial Sequence: Synthetic oligonucleotide
  Sense strand starting at position 1085 of SEQ ID NO: 1563982
gccuguuaucuaugggaaa

SEQ ID NO: 1846326 - RNA, 19 nt, Artificial Sequence
  Description of Artificial Sequence: Synthetic oligonucleotide
  Antisense strand to SEQ ID NO: 1846325
uuucccauagauaacaggc

SEQ ID NO: 1846327 - RNA, 19 nt, Artificial Sequence
  Description of Artificial Sequence: Synthetic oligonucleotide
  Sense strand starting at position 1087 of SEQ ID NO: 1563982
cuguuaucuaugggaaaug

SEQ ID NO: 1846328 - RNA, 19 nt, Artificial Sequence
  Description of Artificial Sequence: Synthetic oligonucleotide
  Antisense strand to SEQ ID NO: 1846327
cauuucccauagauaacag

SEQ ID NO: 1846329 - RNA, 19 nt, Artificial Sequence
  Description of Artificial Sequence: Synthetic oligonucleotide
  Sense strand starting at position 1339 of SEQ ID NO: 1563982
gagcaauacugaccaguga

SEQ ID NO: 1846330 - RNA, 19 nt, Artificial Sequence
  Description of Artificial Sequence: Synthetic oligonucleotide
  Antisense strand to SEQ ID NO: 1846329
ucacuggucaguauugcuc

SEQ ID NO: 1846331 - RNA, 19 nt, Artificial Sequence
  Description of Artificial Sequence: Synthetic oligonucleotide
  Sense strand starting at position 1343 of SEQ ID NO: 1563982
aauacugaccagugacaug

SEQ ID NO: 1846332 - RNA, 19 nt, Artificial Sequence
  Description of Artificial Sequence: Synthetic oligonucleotide
  Antisense strand to SEQ ID NO: 1846331
caugucacuggucaguauu

SEQ ID NO: 1846333 - RNA, 19 nt, Artificial Sequence
  Description of Artificial Sequence: Synthetic oligonucleotide
  Sense strand starting at position 1430 of SEQ ID NO: 1563982
ggcacuaucagucaggcaa

SEQ ID NO: 1846334 - RNA, 19 nt, Artificial Sequence
  Description of Artificial Sequence: Synthetic oligonucleotide
  Antisense strand to SEQ ID NO: 1846333
uugccugacugauagugcc

SEQ ID NO: 1846335 - RNA, 19 nt, Artificial Sequence
  Description of Artificial Sequence: Synthetic oligonucleotide
  Sense strand starting at position 1596 of SEQ ID NO: 1563982
ucugauuaagauggucuua

SEQ ID NO: 1846336 - RNA, 19 nt, Artificial Sequence
  Description of Artificial Sequence: Synthetic oligonucleotide
  Antisense strand to SEQ ID NO: 1846335
uaagaccaucuuaaucaga

SEQ ID NO: 1846337 - RNA, 19 nt, Artificial Sequence
  Description of Artificial Sequence: Synthetic oligonucleotide
  Sense strand starting at position 1598 of SEQ ID NO: 1563982
ugauuaagauggucuuaac

SEQ ID NO: 1846338 - RNA, 19 nt, Artificial Sequence
  Description of Artificial Sequence: Synthetic oligonucleotide
  Antisense strand to SEQ ID NO: 1846337
guuaagaccaucuuaauca

SEQ ID NO: 1846339 - RNA, 19 nt, Artificial Sequence
  Description of Artificial Sequence: Synthetic oligonucleotide
  Sense strand starting at position 2122 of SEQ ID NO: 1563982
gccucugcuccuguaugua

SEQ ID NO: 1846340 - RNA, 19 nt, Artificial Sequence
  Description of Artificial Sequence: Synthetic oligonucleotide
  Antisense strand to SEQ ID NO: 1846339
uacauacaggagcagaggc

SEQ ID NO: 1846341 - RNA, 19 nt, Artificial Sequence
  Description of Artificial Sequence: Synthetic oligonucleotide
  Sense strand starting at position 2305 of SEQ ID NO: 1563982
acuaauagaguaugcaaau

SEQ ID NO: 1846342 - RNA, 19 nt, Artificial Sequence
  Description of Artificial Sequence: Synthetic oligonucleotide
  Antisense strand to SEQ ID NO: 1846341
auuugcauacucuauuagu

SEQ ID NO: 1846343 - RNA, 19 nt, Artificial Sequence
  Description of Artificial Sequence: Synthetic oligonucleotide
  Sense strand starting at position 2306 of SEQ ID NO: 1563982
cuaauagaguaugcaaaua

SEQ ID NO: 1846344 - RNA, 19 nt, Artificial Sequence
  Description of Artificial Sequence: Synthetic oligonucleotide
  Antisense strand to SEQ ID NO: 1846343
uauuugcauacucuauuag

SEQ ID NO: 1846345 - RNA, 19 nt, Artificial Sequence
  Description of Artificial Sequence: Synthetic oligonucleotide
  Sense strand starting at position 2394 of SEQ ID NO: 1563982
gcggcuuucccagcuuuga

SEQ ID NO: 1846346 - RNA, 19 nt, Artificial Sequence
  Description of Artificial Sequence: Synthetic oligonucleotide
  Antisense strand to SEQ ID NO: 1846345
ucaaagcugggaaagccgc

SEQ ID NO: 1846347 - RNA, 19 nt, Artificial Sequence
  Description of Artificial Sequence: Synthetic oligonucleotide
  Sense strand starting at position 2707 of SEQ ID NO: 1563982
gcacuauccgaucaucuuu

SEQ ID NO: 1846348 - RNA, 19 nt, Artificial Sequence
  Description of Artificial Sequence: Synthetic oligonucleotide
  Antisense strand to SEQ ID NO: 1846347
aaagaugaucggauagugc

SEQ ID NO: 1846349 - RNA, 19 nt, Artificial Sequence
  Description of Artificial Sequence: Synthetic oligonucleotide
  Sense strand starting at position 2836 of SEQ ID NO: 1563982
gcuguuagccaccaucaga

SEQ ID NO: 1846350 - RNA, 19 nt, Artificial Sequence
  Description of Artificial Sequence: Synthetic oligonucleotide
  Antisense strand to SEQ ID NO: 1846349
ucugaugguggcuaacagc

SEQ ID NO: 1846351 - RNA, 19 nt, Artificial Sequence
  Description of Artificial Sequence: Synthetic oligonucleotide
  Sense strand starting at position 2863 of SEQ ID NO: 1563982
ggagaaugacacuggcauc

SEQ ID NO: 1846352 - RNA, 19 nt, Artificial Sequence
  Description of Artificial Sequence: Synthetic oligonucleotide
  Antisense strand to SEQ ID NO: 1846351
gaugccagugucauucucc

SEQ ID NO: 1846353 - RNA, 19 nt, Artificial Sequence
  Description of Artificial Sequence: Synthetic oligonucleotide
  Sense strand starting at position 2876 of SEQ ID NO: 1563982
ggcaucaugaacugauaga

SEQ ID NO: 1846354 - RNA, 19 nt, Artificial Sequence
  Description of Artificial Sequence: Synthetic oligonucleotide
  Antisense strand to SEQ ID NO: 1846353
ucuaucaguucaugaugcc

SEQ ID NO: 1846355 - RNA, 19 nt, Artificial Sequence
  Description of Artificial Sequence: Synthetic oligonucleotide
  Sense strand starting at position 2921 of SEQ ID NO: 1563982
agcuauuaggauggagauu

SEQ ID NO: 1846356 - RNA, 19 nt, Artificial Sequence
  Description of Artificial Sequence: Synthetic oligonucleotide
  Antisense strand to SEQ ID NO: 1846355
aaucuccauccuaauagcu

SEQ ID NO: 1846357 - RNA, 19 nt, Artificial Sequence
  Description of Artificial Sequence: Synthetic oligonucleotide
  Sense strand starting at position 2971 of SEQ ID NO: 1563982
gagcaauggccucaaagua

SEQ ID NO: 1846358 - RNA, 19 nt, Artificial Sequence
  Description of Artificial Sequence: Synthetic oligonucleotide
  Antisense strand to SEQ ID NO: 1846357
uacuuugaggccauugcuc

SEQ ID NO: 1846359 - RNA, 19 nt, Artificial Sequence
  Description of Artificial Sequence: Synthetic oligonucleotide
  Sense strand starting at position 2996 of SEQ ID NO: 1563982
guccauaggccagagucau

SEQ ID NO: 1846360 - RNA, 19 nt, Artificial Sequence
  Description of Artificial Sequence: Synthetic oligonucleotide
  Antisense strand to SEQ ID NO: 1846359
augacucuggccuauggac

SEQ ID NO: 1846361 - RNA, 19 nt, Artificial Sequence
  Description of Artificial Sequence: Synthetic oligonucleotide
  Sense strand starting at position 3104 of SEQ ID NO: 1563982
acagcuugccucgaagaug

SEQ ID NO: 1846362 - RNA, 19 nt, Artificial Sequence
  Description of Artificial Sequence: Synthetic oligonucleotide
  Antisense strand to SEQ ID NO: 1846361
caucuucgaggcaagcugu

SEQ ID NO: 1846363 - RNA, 19 nt, Artificial Sequence
  Description of Artificial Sequence: Synthetic oligonucleotide
  Sense strand starting at position 3179 of SEQ ID NO: 1563982
aacgauuggcuaugaagaa

SEQ ID NO: 1846364 - RNA, 19 nt, Artificial Sequence
  Description of Artificial Sequence: Synthetic oligonucleotide
  Antisense strand to SEQ ID NO: 1846363
uucuucauagccaaucguu

SEQ ID NO: 1846365 - RNA, 19 nt, Artificial Sequence
  Description of Artificial Sequence: Synthetic oligonucleotide
  Sense strand starting at position 3344 of SEQ ID NO: 1563982
gggucagauucccuccagu

SEQ ID NO: 1846366 - RNA, 19 nt, Artificial Sequence
  Description of Artificial Sequence: Synthetic oligonucleotide
  Antisense strand to SEQ ID NO: 1846365
acuggagggaaucugaccc

SEQ ID NO: 1846367 - RNA, 19 nt, Artificial Sequence
  Description of Artificial Sequence: Synthetic oligonucleotide
  Sense strand starting at position 3347 of SEQ ID NO: 1563982
ucagauucccuccaguugu

SEQ ID NO: 1846368 - RNA, 19 nt, Artificial Sequence
  Description of Artificial Sequence: Synthetic oligonucleotide
  Antisense strand to SEQ ID NO: 1846367
acaacuggagggaaucuga

SEQ ID NO: 1846369 - RNA, 19 nt, Artificial Sequence
  Description of Artificial Sequence: Synthetic oligonucleotide
  Sense strand starting at position 3358 of SEQ ID NO: 1563982
ccaguuguuguguauaaau

SEQ ID NO: 1846370 - RNA, 19 nt, Artificial Sequence
  Description of Artificial Sequence: Synthetic oligonucleotide
  Antisense strand to SEQ ID NO: 1846369
auuuauacacaacaacugg

SEQ ID NO: 1846371 - RNA, 19 nt, Artificial Sequence
  Description of Artificial Sequence: Synthetic oligonucleotide
  Sense strand starting at position 3360 of SEQ ID NO: 1563982
aguuguuguguauaaauca

SEQ ID NO: 1846372 - RNA, 19 nt, Artificial Sequence
  Description of Artificial Sequence: Synthetic oligonucleotide
  Antisense strand to SEQ ID NO: 1846371
ugauuuauacacaacaacu

SEQ ID NO: 1846373 - RNA, 19 nt, Artificial Sequence
  Description of Artificial Sequence: Synthetic oligonucleotide
  Sense strand starting at position 3459 of SEQ ID NO: 1563982
uaggcucuggagcaauauu

SEQ ID NO: 1846374 - RNA, 19 nt, Artificial Sequence
  Description of Artificial Sequence: Synthetic oligonucleotide
  Antisense strand to SEQ ID NO: 1846373
aauauugcuccagagccua

SEQ ID NO: 1846375 - RNA, 19 nt, Artificial Sequence
  Description of Artificial Sequence: Synthetic oligonucleotide
  Sense strand starting at position 3594 of SEQ ID NO: 1563982
ccuccuuaggacuguugaa

SEQ ID NO: 1846376 - RNA, 19 nt, Artificial Sequence
  Description of Artificial Sequence: Synthetic oligonucleotide
  Antisense strand to SEQ ID NO: 1846375
uucaacaguccuaaggagg

SEQ ID NO: 1846377 - RNA, 19 nt, Artificial Sequence
  Description of Artificial Sequence: Synthetic oligonucleotide
  Sense strand starting at position 3680 of SEQ ID NO: 1563982
cucccuuugggagguaaau

SEQ ID NO: 1846378 - RNA, 19 nt, Artificial Sequence
  Description of Artificial Sequence: Synthetic oligonucleotide
  Antisense strand to SEQ ID NO: 1846377
auuuaccucccaaagggag

SEQ ID NO: 1846379 - RNA, 19 nt, Artificial Sequence
  Description of Artificial Sequence: Synthetic oligonucleotide
  Sense strand starting at position 3869 of SEQ ID NO: 1563982
uguguaaagacuugcaaga

SEQ ID NO: 1846380 - RNA, 19 nt, Artificial Sequence
  Description of Artificial Sequence: Synthetic oligonucleotide
  Antisense strand to SEQ ID NO: 1846379
ucuugcaagucuuuacaca

SEQ ID NO: 1846381 - RNA, 19 nt, Artificial Sequence
  Description of Artificial Sequence: Synthetic oligonucleotide
  Sense strand starting at position 36 of SEQ ID NO: 1563983
uggaauuagcuaugagauu

SEQ ID NO: 1846382 - RNA, 19 nt, Artificial Sequence
  Description of Artificial Sequence: Synthetic oligonucleotide
  Antisense strand to SEQ ID NO: 1846381
aaucucauagcuaauucca

SEQ ID NO: 1846383 - RNA, 19 nt, Artificial Sequence
  Description of Artificial Sequence: Synthetic oligonucleotide
  Sense strand starting at position 48 of SEQ ID NO: 1563983
ugagauuccucacuacugu

SEQ ID NO: 1846384 - RNA, 19 nt, Artificial Sequence
  Description of Artificial Sequence: Synthetic oligonucleotide
  Antisense strand to SEQ ID NO: 1846383
acaguagugaggaaucuca

SEQ ID NO: 1846385 - RNA, 19 nt, Artificial Sequence
  Description of Artificial Sequence: Synthetic oligonucleotide
  Sense strand starting at position 408 of SEQ ID NO: 1563983
cuccuaucugagcaaguau

SEQ ID NO: 1846386 - RNA, 19 nt, Artificial Sequence
  Description of Artificial Sequence: Synthetic oligonucleotide
  Antisense strand to SEQ ID NO: 1846385
auacuugcucagauaggag

SEQ ID NO: 1846387 - RNA, 19 nt, Artificial Sequence
  Description of Artificial Sequence: Synthetic oligonucleotide
  Sense strand starting at position 463 of SEQ ID NO: 1563983
ugugaacuccuugaguaug

SEQ ID NO: 1846388 - RNA, 19 nt, Artificial Sequence
  Description of Artificial Sequence: Synthetic oligonucleotide
  Antisense strand to SEQ ID NO: 1846387
cauacucaaggaguucaca

SEQ ID NO: 1846389 - RNA, 19 nt, Artificial Sequence
  Description of Artificial Sequence: Synthetic oligonucleotide
  Sense strand starting at position 465 of SEQ ID NO: 1563983
ugaacuccuugaguaugga

SEQ ID NO: 1846390 - RNA, 19 nt, Artificial Sequence
  Description of Artificial Sequence: Synthetic oligonucleotide
  Antisense strand to SEQ ID NO: 1846389
uccauacucaaggaguuca

SEQ ID NO: 1846391 - RNA, 19 nt, Artificial Sequence
  Description of Artificial Sequence: Synthetic oligonucleotide
  Sense strand starting at position 485 of SEQ ID NO: 1563983
acuagaucucagugaucug

SEQ ID NO: 1846392 - RNA, 19 nt, Artificial Sequence
  Description of Artificial Sequence: Synthetic oligonucleotide
  Antisense strand to SEQ ID NO: 1846391
cagaucacugagaucuagu

SEQ ID NO: 1846393 - RNA, 19 nt, Artificial Sequence
  Description of Artificial Sequence: Synthetic oligonucleotide
  Sense strand starting at position 488 of SEQ ID NO: 1563983
agaucucagugaucuguaa

SEQ ID NO: 1846394 - RNA, 19 nt, Artificial Sequence
  Description of Artificial Sequence: Synthetic oligonucleotide
  Antisense strand to SEQ ID NO: 1846393
uuacagaucacugagaucu

SEQ ID NO: 1846395 - RNA, 19 nt, Artificial Sequence
  Description of Artificial Sequence: Synthetic oligonucleotide
  Sense strand starting at position 568 of SEQ ID NO: 1563983
uguguuugugcagucuaca

SEQ ID NO: 1846396 - RNA, 19 nt, Artificial Sequence
  Description of Artificial Sequence: Synthetic oligonucleotide
  Antisense strand to SEQ ID NO: 1846395
uguagacugcacaaacaca

SEQ ID NO: 1846397 - RNA, 19 nt, Artificial Sequence
  Description of Artificial Sequence: Synthetic oligonucleotide
  Sense strand starting at position 569 of SEQ ID NO: 1563983
guguuugugcagucuacau

SEQ ID NO: 1846398 - RNA, 19 nt, Artificial Sequence
  Description of Artificial Sequence: Synthetic oligonucleotide
  Antisense strand to SEQ ID NO: 1846397
auguagacugcacaaacac

SEQ ID NO: 1846399 - RNA, 19 nt, Artificial Sequence
  Description of Artificial Sequence: Synthetic oligonucleotide
  Sense strand starting at position 586 of SEQ ID NO: 1563983
aucucucugcccuagauga

SEQ ID NO: 1846400 - RNA, 19 nt, Artificial Sequence
  Description of Artificial Sequence: Synthetic oligonucleotide
  Antisense strand to SEQ ID NO: 1846399
ucaucuagggcagagagau

SEQ ID NO: 1846401 - RNA, 19 nt, Artificial Sequence
  Description of Artificial Sequence: Synthetic oligonucleotide
  Sense strand starting at position 588 of SEQ ID NO: 1563983
cucucugcccuagaugaga

SEQ ID NO: 1846402 - RNA, 19 nt, Artificial Sequence
  Description of Artificial Sequence: Synthetic oligonucleotide
  Antisense strand to SEQ ID NO: 1846401
ucucaucuagggcagagag

SEQ ID NO: 1846403 - RNA, 19 nt, Artificial Sequence
  Description of Artificial Sequence: Synthetic oligonucleotide
  Sense strand starting at position 720 of SEQ ID NO: 1563983
agguuucucuaccuugaau

SEQ ID NO: 1846404 - RNA, 19 nt, Artificial Sequence
  Description of Artificial Sequence: Synthetic oligonucleotide
  Antisense strand to SEQ ID NO: 1846403
auucaagguagagaaaccu

SEQ ID NO: 1846405 - RNA, 19 nt, Artificial Sequence
  Description of Artificial Sequence: Synthetic oligonucleotide
  Sense strand starting at position 805 of SEQ ID NO: 1563983
ggguucagucaguaccaga

SEQ ID NO: 1846406 - RNA, 19 nt, Artificial Sequence
  Description of Artificial Sequence: Synthetic oligonucleotide
  Antisense strand to SEQ ID NO: 1846405
ucugguacugacugaaccc

SEQ ID NO: 1846407 - RNA, 19 nt, Artificial Sequence
  Description of Artificial Sequence: Synthetic oligonucleotide
  Sense strand starting at position 879 of SEQ ID NO: 1563983
gggcuaucucuagggaaga

SEQ ID NO: 1846408 - RNA, 19 nt, Artificial Sequence
  Description of Artificial Sequence: Synthetic oligonucleotide
  Antisense strand to SEQ ID NO: 1846407
ucuucccuagagauagccc

SEQ ID NO: 1846409 - RNA, 19 nt, Artificial Sequence
  Description of Artificial Sequence: Synthetic oligonucleotide
  Sense strand starting at position 1003 of SEQ ID NO: 1563983
gacagugcugauggauaau

SEQ ID NO: 1846410 - RNA, 19 nt, Artificial Sequence
  Description of Artificial Sequence: Synthetic oligonucleotide
  Antisense strand to SEQ ID NO: 1846409
auuauccaucagcacuguc

SEQ ID NO: 1846411 - RNA, 19 nt, Artificial Sequence
  Description of Artificial Sequence: Synthetic oligonucleotide
  Sense strand starting at position 1254 of SEQ ID NO: 1563983
acugaauccuagucaugga

SEQ ID NO: 1846412 - RNA, 19 nt, Artificial Sequence
  Description of Artificial Sequence: Synthetic oligonucleotide
  Antisense strand to SEQ ID NO: 1846411
uccaugacuaggauucagu

SEQ ID NO: 1846413 - RNA, 19 nt, Artificial Sequence
  Description of Artificial Sequence: Synthetic oligonucleotide
  Sense strand starting at position 1270 of SEQ ID NO: 1563983
ggaaguggcucuccacaga

SEQ ID NO: 1846414 - RNA, 19 nt, Artificial Sequence
  Description of Artificial Sequence: Synthetic oligonucleotide
  Antisense strand to SEQ ID NO: 1846413
ucuguggagagccacuucc

SEQ ID NO: 1846415 - RNA, 19 nt, Artificial Sequence
  Description of Artificial Sequence: Synthetic oligonucleotide
  Sense strand starting at position 1328 of SEQ ID NO: 1563983
gcuuguggagccuauagaa

SEQ ID NO: 1846416 - RNA, 19 nt, Artificial Sequence
  Description of Artificial Sequence: Synthetic oligonucleotide
  Antisense strand to SEQ ID NO: 1846415
uucuauaggcuccacaagc

SEQ ID NO: 1846417 - RNA, 19 nt, Artificial Sequence
  Description of Artificial Sequence: Synthetic oligonucleotide
  Sense strand starting at position 1359 of SEQ ID NO: 1563983
cuacucuuagagcgaggaa

SEQ ID NO: 1846418 - RNA, 19 nt, Artificial Sequence
  Description of Artificial Sequence: Synthetic oligonucleotide
  Antisense strand to SEQ ID NO: 1846417
uuccucgcucuaagaguag

SEQ ID NO: 1846419 - RNA, 19 nt, Artificial Sequence
  Description of Artificial Sequence: Synthetic oligonucleotide
  Sense strand starting at position 1371 of SEQ ID NO: 1563983
cgaggaaguccugaaaugu

SEQ ID NO: 1846420 - RNA, 19 nt, Artificial Sequence
  Description of Artificial Sequence: Synthetic oligonucleotide
  Antisense strand to SEQ ID NO: 1846419
acauuucaggacuuccucg

SEQ ID NO: 1846421 - RNA, 19 nt, Artificial Sequence
  Description of Artificial Sequence: Synthetic oligonucleotide
  Sense strand starting at position 1380 of SEQ ID NO: 1563983
ccugaaaugucuccaaaga

SEQ ID NO: 1846422 - RNA, 19 nt, Artificial Sequence
  Description of Artificial Sequence: Synthetic oligonucleotide
  Antisense strand to SEQ ID NO: 1846421
ucuuuggagacauuucagg

SEQ ID NO: 1846423 - RNA, 19 nt, Artificial Sequence
  Description of Artificial Sequence: Synthetic oligonucleotide
  Sense strand starting at position 1432 of SEQ ID NO: 1563983
gugacagcccucugaggaa

SEQ ID NO: 1846424 - RNA, 19 nt, Artificial Sequence
  Description of Artificial Sequence: Synthetic oligonucleotide
  Antisense strand to SEQ ID NO: 1846423
uuccucagagggcugucac

SEQ ID NO: 1846425 - RNA, 19 nt, Artificial Sequence
  Description of Artificial Sequence: Synthetic oligonucleotide
  Sense strand starting at position 1448 of SEQ ID NO: 1563983
gaacguuggcuagagacuu

SEQ ID NO: 1846426 - RNA, 19 nt, Artificial Sequence
  Description of Artificial Sequence: Synthetic oligonucleotide
  Antisense strand to SEQ ID NO: 1846425
aagucucuagccaacguuc

SEQ ID NO: 1846427 - RNA, 19 nt, Artificial Sequence
  Description of Artificial Sequence: Synthetic oligonucleotide
  Sense strand starting at position 1489 of SEQ ID NO: 1563983
gcuacugaugcccagagaa

SEQ ID NO: 1846428 - RNA, 19 nt, Artificial Sequence
  Description of Artificial Sequence: Synthetic oligonucleotide
  Antisense strand to SEQ ID NO: 1846427
uucucugggcaucaguagc

SEQ ID NO: 1846429 - RNA, 19 nt, Artificial Sequence
  Description of Artificial Sequence: Synthetic oligonucleotide
  Sense strand starting at position 1567 of SEQ ID NO: 1563983
agguaagagcuauaaucuc

SEQ ID NO: 1846430 - RNA, 19 nt, Artificial Sequence
  Description of Artificial Sequence: Synthetic oligonucleotide
  Antisense strand to SEQ ID NO: 1846429
gagauuauagcucuuaccu

SEQ ID NO: 1846431 - RNA, 19 nt, Artificial Sequence
  Description of Artificial Sequence: Synthetic oligonucleotide
  Sense strand starting at position 2261 of SEQ ID NO: 1563983
ggcauaaucccuuacugga

SEQ ID NO: 1846432 - RNA, 19 nt, Artificial Sequence
  Description of Artificial Sequence: Synthetic oligonucleotide
  Antisense strand to SEQ ID NO: 1846431
uccaguaagggauuaugcc

SEQ ID NO: 1846433 - RNA, 19 nt, Artificial Sequence
  Description of Artificial Sequence: Synthetic oligonucleotide
  Sense strand starting at position 2353 of SEQ ID NO: 1563983
agucaauccugagucaaua

SEQ ID NO: 1846434 - RNA, 19 nt, Artificial Sequence
  Description of Artificial Sequence: Synthetic oligonucleotide
  Antisense strand to SEQ ID NO: 1846433
uauugacucaggauugacu

SEQ ID NO: 1846435 - RNA, 19 nt, Artificial Sequence
  Description of Artificial Sequence: Synthetic oligonucleotide
  Sense strand starting at position 2458 of SEQ ID NO: 1563983
uuaaguccuccaggaggaa

SEQ ID NO: 1846436 - RNA, 19 nt, Artificial Sequence
  Description of Artificial Sequence: Synthetic oligonucleotide
  Antisense strand to SEQ ID NO: 1846435
uuccuccuggaggacuuaa

SEQ ID NO: 1846437 - RNA, 19 nt, Artificial Sequence
  Description of Artificial Sequence: Synthetic oligonucleotide
  Sense strand starting at position 2497 of SEQ ID NO: 1563983
gcuguaaccauugaggaug

SEQ ID NO: 1846438 - RNA, 19 nt, Artificial Sequence
  Description of Artificial Sequence: Synthetic oligonucleotide
  Antisense strand to SEQ ID NO: 1846437
cauccucaaugguuacagc

SEQ ID NO: 1846439 - RNA, 19 nt, Artificial Sequence
  Description of Artificial Sequence: Synthetic oligonucleotide
  Sense strand starting at position 2557 of SEQ ID NO: 1563983
ugcaauucugggugaggaa

SEQ ID NO: 1846440 - RNA, 19 nt, Artificial Sequence
  Description of Artificial Sequence: Synthetic oligonucleotide
  Antisense strand to SEQ ID NO: 1846439
uuccucacccagaauugca

SEQ ID NO: 1846441 - RNA, 19 nt, Artificial Sequence
  Description of Artificial Sequence: Synthetic oligonucleotide
  Sense strand starting at position 2558 of SEQ ID NO: 1563983
gcaauucugggugaggaac

SEQ ID NO: 1846442 - RNA, 19 nt, Artificial Sequence
  Description of Artificial Sequence: Synthetic oligonucleotide
  Antisense strand to SEQ ID NO: 1846441
guuccucacccagaauugc

SEQ ID NO: 1846443 - RNA, 19 nt, Artificial Sequence
  Description of Artificial Sequence: Synthetic oligonucleotide
  Sense strand starting at position 2612 of SEQ ID NO: 1563983
gggcauauccauuacuucu

SEQ ID NO: 1846444 - RNA, 19 nt, Artificial Sequence
  Description of Artificial Sequence: Synthetic oligonucleotide
  Antisense strand to SEQ ID NO: 1846443
agaaguaauggauaugccc

SEQ ID NO: 1846445 - RNA, 19 nt, Artificial Sequence
  Description of Artificial Sequence: Synthetic oligonucleotide
  Sense strand starting at position 2665 of SEQ ID NO: 1563983
gucgaugcucuugcuauua

SEQ ID NO: 1846446 - RNA, 19 nt, Artificial Sequence
  Description of Artificial Sequence: Synthetic oligonucleotide
  Antisense strand to SEQ ID NO: 1846445
uaauagcaagagcaucgac

SEQ ID NO: 1846447 - RNA, 19 nt, Artificial Sequence
  Description of Artificial Sequence: Synthetic oligonucleotide
  Sense strand starting at position 2806 of SEQ ID NO: 1563983
uucuaauggcagcagaaau

SEQ ID NO: 1846448 - RNA, 19 nt, Artificial Sequence
  Description of Artificial Sequence: Synthetic oligonucleotide
  Antisense strand to SEQ ID NO: 1846447
auuucugcugccauuagaa

SEQ ID NO: 1846449 - RNA, 19 nt, Artificial Sequence
  Description of Artificial Sequence: Synthetic oligonucleotide
  Sense strand starting at position 2833 of SEQ ID NO: 1563983
augauagcuguguauuaua

SEQ ID NO: 1846450 - RNA, 19 nt, Artificial Sequence
  Description of Artificial Sequence: Synthetic oligonucleotide
  Antisense strand to SEQ ID NO: 1846449
uauaauacacagcuaucau

SEQ ID NO: 1846451 - RNA, 19 nt, Artificial Sequence
  Description of Artificial Sequence: Synthetic oligonucleotide
  Sense strand starting at position 2847 of SEQ ID NO: 1563983
uuauaaguacugugacaga

SEQ ID NO: 1846452 - RNA, 19 nt, Artificial Sequence
  Description of Artificial Sequence: Synthetic oligonucleotide
  Antisense strand to SEQ ID NO: 1846451
ucugucacaguacuuauaa

SEQ ID NO: 1846453 - RNA, 19 nt, Artificial Sequence
  Description of Artificial Sequence: Synthetic oligonucleotide
  Sense strand starting at position 3006 of SEQ ID NO: 1563983
gagagugaacugugagaau

SEQ ID NO: 1846454 - RNA, 19 nt, Artificial Sequence
  Description of Artificial Sequence: Synthetic oligonucleotide
  Antisense strand to SEQ ID NO: 1846453
auucucacaguucacucuc

SEQ ID NO: 1846455 - RNA, 19 nt, Artificial Sequence
  Description of Artificial Sequence: Synthetic oligonucleotide
  Sense strand starting at position 3071 of SEQ ID NO: 1563983
cuggguugucuugagaaug

SEQ ID NO: 1846456 - RNA, 19 nt, Artificial Sequence
  Description of Artificial Sequence: Synthetic oligonucleotide
  Antisense strand to SEQ ID NO: 1846455
cauucucaagacaacccag

SEQ ID NO: 1846457 - RNA, 19 nt, Artificial Sequence
  Description of Artificial Sequence: Synthetic oligonucleotide
  Sense strand starting at position 3076 of SEQ ID NO: 1563983
uugucuugagaaugaaaug

SEQ ID NO: 1846458 - RNA, 19 nt, Artificial Sequence
  Description of Artificial Sequence: Synthetic oligonucleotide
  Antisense strand to SEQ ID NO: 1846457
cauuucauucucaagacaa

SEQ ID NO: 1846459 - RNA, 19 nt, Artificial Sequence
  Description of Artificial Sequence: Synthetic oligonucleotide
  Sense strand starting at position 3711 of SEQ ID NO: 1563983
gccaaugagagcugaggaa

SEQ ID NO: 1846460 - RNA, 19 nt, Artificial Sequence
  Description of Artificial Sequence: Synthetic oligonucleotide
  Antisense strand to SEQ ID NO: 1846459
uuccucagcucucauuggc

SEQ ID NO: 1846461 - RNA, 19 nt, Artificial Sequence
  Description of Artificial Sequence: Synthetic oligonucleotide
  Sense strand starting at position 46 of SEQ ID NO: 1563984
ucccauucuguagguuaaa

SEQ ID NO: 1846462 - RNA, 19 nt, Artificial Sequence
  Description of Artificial Sequence: Synthetic oligonucleotide
  Antisense strand to SEQ ID NO: 1846461
uuuaaccuacagaauggga

SEQ ID NO: 1846463 - RNA, 19 nt, Artificial Sequence
  Description of Artificial Sequence: Synthetic oligonucleotide
  Sense strand starting at position 109 of SEQ ID NO: 1563984
gaaugcauaugucuuaguu

SEQ ID NO: 1846464 - RNA, 19 nt, Artificial Sequence
  Description of Artificial Sequence: Synthetic oligonucleotide
  Antisense strand to SEQ ID NO: 1846463
aacuaagacauaugcauuc

SEQ ID NO: 1846465 - RNA, 19 nt, Artificial Sequence
  Description of Artificial Sequence: Synthetic oligonucleotide
  Sense strand starting at position 149 of SEQ ID NO: 1563984
cauagacuggguggucuaa

SEQ ID NO: 1846466 - RNA, 19 nt, Artificial Sequence
  Description of Artificial Sequence: Synthetic oligonucleotide
  Antisense strand to SEQ ID NO: 1846465
uuagaccacccagucuaug

SEQ ID NO: 1846467 - RNA, 19 nt, Artificial Sequence
  Description of Artificial Sequence: Synthetic oligonucleotide
  Sense strand starting at position 151 of SEQ ID NO: 1563984
uagacuggguggucuaauu

SEQ ID NO: 1846468 - RNA, 19 nt, Artificial Sequence
  Description of Artificial Sequence: Synthetic oligonucleotide
  Antisense strand to SEQ ID NO: 1846467
aauuagaccacccagucua

SEQ ID NO: 1846469 - RNA, 19 nt, Artificial Sequence
  Description of Artificial Sequence: Synthetic oligonucleotide
  Sense strand starting at position 201 of SEQ ID NO: 1563984
guuacaagaguccauuaau

SEQ ID NO: 1846470 - RNA, 19 nt, Artificial Sequence
  Description of Artificial Sequence: Synthetic oligonucleotide
  Antisense strand to SEQ ID NO: 1846469
auuaauggacucuuguaac

SEQ ID NO: 1846471 - RNA, 19 nt, Artificial Sequence
  Description of Artificial Sequence: Synthetic oligonucleotide
  Sense strand starting at position 339 of SEQ ID NO: 1563984
uuauuauacugaucuggua

SEQ ID NO: 1846472 - RNA, 19 nt, Artificial Sequence
  Description of Artificial Sequence: Synthetic oligonucleotide
  Antisense strand to SEQ ID NO: 1846471
uaccagaucaguauaauaa

SEQ ID NO: 1846473 - RNA, 19 nt, Artificial Sequence
  Description of Artificial Sequence: Synthetic oligonucleotide
  Sense strand starting at position 763 of SEQ ID NO: 1563984
gucacaucaccaugcagau

SEQ ID NO: 1846474 - RNA, 19 nt, Artificial Sequence
  Description of Artificial Sequence: Synthetic oligonucleotide
  Antisense strand to SEQ ID NO: 1846473
aucugcauggugaugugac

SEQ ID NO: 1846475 - RNA, 19 nt, Artificial Sequence
  Description of Artificial Sequence: Synthetic oligonucleotide
  Sense strand starting at position 1519 of SEQ ID NO: 1563984
gcaauaguauccuucggac

SEQ ID NO: 1846476 - RNA, 19 nt, Artificial Sequence
  Description of Artificial Sequence: Synthetic oligonucleotide
  Antisense strand to SEQ ID NO: 1846475
guccgaaggauacuauugc

SEQ ID NO: 1846477 - RNA, 19 nt, Artificial Sequence
  Description of Artificial Sequence: Synthetic oligonucleotide
  Sense strand starting at position 2120 of SEQ ID NO: 1563984
cacuguuuccaugggauau

SEQ ID NO: 1846478 - RNA, 19 nt, Artificial Sequence
  Description of Artificial Sequence: Synthetic oligonucleotide
  Antisense strand to SEQ ID NO: 1846477
auaucccauggaaacagug

SEQ ID NO: 1846479 - RNA, 19 nt, Artificial Sequence
  Description of Artificial Sequence: Synthetic oligonucleotide
  Sense strand starting at position 2131 of SEQ ID NO: 1563984
ugggauauauuagauugau

SEQ ID NO: 1846480 - RNA, 19 nt, Artificial Sequence
  Description of Artificial Sequence: Synthetic oligonucleotide
  Antisense strand to SEQ ID NO: 1846479
aucaaucuaauauauccca

SEQ ID NO: 1846481 - RNA, 19 nt, Artificial Sequence
  Description of Artificial Sequence: Synthetic oligonucleotide
  Sense strand starting at position 2165 of SEQ ID NO: 1563984
gguguuugacuaugaugau

SEQ ID NO: 1846482 - RNA, 19 nt, Artificial Sequence
  Description of Artificial Sequence: Synthetic oligonucleotide
  Antisense strand to SEQ ID NO: 1846481
aucaucauagucaaacacc

SEQ ID NO: 1846483 - RNA, 19 nt, Artificial Sequence
  Description of Artificial Sequence: Synthetic oligonucleotide
  Sense strand starting at position 2245 of SEQ ID NO: 1563984
ucuagugggaaguguauua

SEQ ID NO: 1846484 - RNA, 19 nt, Artificial Sequence
  Description of Artificial Sequence: Synthetic oligonucleotide
  Antisense strand to SEQ ID NO: 1846483
uaauacacuucccacuaga

SEQ ID NO: 1846485 - RNA, 19 nt, Artificial Sequence
  Description of Artificial Sequence: Synthetic oligonucleotide
  Sense strand starting at position 2252 of SEQ ID NO: 1563984
ggaaguguauuacuuaauu

SEQ ID NO: 1846486 - RNA, 19 nt, Artificial Sequence
  Description of Artificial Sequence: Synthetic oligonucleotide
  Antisense strand to SEQ ID NO: 1846485
aauuaaguaauacacuucc

SEQ ID NO: 1846487 - RNA, 19 nt, Artificial Sequence
  Description of Artificial Sequence: Synthetic oligonucleotide
  Sense strand starting at position 2268 of SEQ ID NO: 1563984
auuauugcaguguaacaaa

SEQ ID NO: 1846488 - RNA, 19 nt, Artificial Sequence
  Description of Artificial Sequence: Synthetic oligonucleotide
  Antisense strand to SEQ ID NO: 1846487
uuuguuacacugcaauaau

SEQ ID NO: 1846489 - RNA, 19 nt, Artificial Sequence
  Description of Artificial Sequence: Synthetic oligonucleotide
  Sense strand starting at position 2398 of SEQ ID NO: 1563984
ugaaguuguagucaauaug

SEQ ID NO: 1846490 - RNA, 19 nt, Artificial Sequence
  Description of Artificial Sequence: Synthetic oligonucleotide
  Antisense strand to SEQ ID NO: 1846489
cauauugacuacaacuuca

SEQ ID NO: 1846491 - RNA, 19 nt, Artificial Sequence
  Description of Artificial Sequence: Synthetic oligonucleotide
  Sense strand starting at position 2434 of SEQ ID NO: 1563984
aguuuaaaggcuuaacuua

SEQ ID NO: 1846492 - RNA, 19 nt, Artificial Sequence
  Description of Artificial Sequence: Synthetic oligonucleotide
  Antisense strand to SEQ ID NO: 1846491
uaaguuaagccuuuaaacu

SEQ ID NO: 1846493 - RNA, 19 nt, Artificial Sequence
  Description of Artificial Sequence: Synthetic oligonucleotide
  Sense strand starting at position 2442 of SEQ ID NO: 1563984
ggcuuaacuuaggucugaa

SEQ ID NO: 1846494 - RNA, 19 nt, Artificial Sequence
  Description of Artificial Sequence: Synthetic oligonucleotide
  Antisense strand to SEQ ID NO: 1846493
uucagaccuaaguuaagcc

SEQ ID NO: 1846495 - RNA, 19 nt, Artificial Sequence
  Description of Artificial Sequence: Synthetic oligonucleotide
  Sense strand starting at position 2445 of SEQ ID NO: 1563984
uuaacuuaggucugaagga

SEQ ID NO: 1846496 - RNA, 19 nt, Artificial Sequence
  Description of Artificial Sequence: Synthetic oligonucleotide
  Antisense strand to SEQ ID NO: 1846495
uccuucagaccuaaguuaa

SEQ ID NO: 1846497 - RNA, 19 nt, Artificial Sequence
  Description of Artificial Sequence: Synthetic oligonucleotide
  Sense strand starting at position 2540 of SEQ ID NO: 1563984
ucaguuccucaccauauga

SEQ ID NO: 1846498 - RNA, 19 nt, Artificial Sequence
  Description of Artificial Sequence: Synthetic oligonucleotide
  Antisense strand to SEQ ID NO: 1846497
ucauauggugaggaacuga

SEQ ID NO: 1846499 - RNA, 19 nt, Artificial Sequence
  Description of Artificial Sequence: Synthetic oligonucleotide
  Sense strand starting at position 2609 of SEQ ID NO: 1563984
cccagauugcgugauucag

SEQ ID NO: 1846500 - RNA, 19 nt, Artificial Sequence
  Description of Artificial Sequence: Synthetic oligonucleotide
  Antisense strand to SEQ ID NO: 1846499
cugaaucacgcaaucuggg

SEQ ID NO: 1846501 - RNA, 19 nt, Artificial Sequence
  Description of Artificial Sequence: Synthetic oligonucleotide
  Sense strand starting at position 3079 of SEQ ID NO: 1563984
agaaacaagucauuaaguu

SEQ ID NO: 1846502 - RNA, 19 nt, Artificial Sequence
  Description of Artificial Sequence: Synthetic oligonucleotide
  Antisense strand to SEQ ID NO: 1846501
aacuuaaugacuuguuucu

SEQ ID NO: 1846503 - RNA, 19 nt, Artificial Sequence
  Description of Artificial Sequence: Synthetic oligonucleotide
  Sense strand starting at position 3153 of SEQ ID NO: 1563984
aaagaauuugugggcguau

SEQ ID NO: 1846504 - RNA, 19 nt, Artificial Sequence
  Description of Artificial Sequence: Synthetic oligonucleotide
  Antisense strand to SEQ ID NO: 1846503
auacgcccacaaauucuuu

SEQ ID NO: 1846505 - RNA, 19 nt, Artificial Sequence
  Description of Artificial Sequence: Synthetic oligonucleotide
  Sense strand starting at position 3154 of SEQ ID NO: 1563984
aagaauuugugggcguauu

SEQ ID NO: 1846506 - RNA, 19 nt, Artificial Sequence
  Description of Artificial Sequence: Synthetic oligonucleotide
  Antisense strand to SEQ ID NO: 1846505
aauacgcccacaaauucuu

SEQ ID NO: 1846507 - RNA, 19 nt, Artificial Sequence
  Description of Artificial Sequence: Synthetic oligonucleotide
  Sense strand starting at position 3224 of SEQ ID NO: 1563984
caaguuauggaguauguua

SEQ ID NO: 1846508 - RNA, 19 nt, Artificial Sequence
  Description of Artificial Sequence: Synthetic oligonucleotide
  Antisense strand to SEQ ID NO: 1846507
uaacauacuccauaacuug

SEQ ID NO: 1846509 - RNA, 19 nt, Artificial Sequence
  Description of Artificial Sequence: Synthetic oligonucleotide
  Sense strand starting at position 3226 of SEQ ID NO: 1563984
aguuauggaguauguuaga

SEQ ID NO: 1846510 - RNA, 19 nt, Artificial Sequence
  Description of Artificial Sequence: Synthetic oligonucleotide
  Antisense strand to SEQ ID NO: 1846509
ucuaacauacuccauaacu

SEQ ID NO: 1846511 - RNA, 19 nt, Artificial Sequence
  Description of Artificial Sequence: Synthetic oligonucleotide
  Sense strand starting at position 3289 of SEQ ID NO: 1563984
ggaaucagaguauguuugu

SEQ ID NO: 1846512 - RNA, 19 nt, Artificial Sequence
  Description of Artificial Sequence: Synthetic oligonucleotide
  Antisense strand to SEQ ID NO: 1846511
acaaacauacucugauucc

SEQ ID NO: 1846513 - RNA, 19 nt, Artificial Sequence
  Description of Artificial Sequence: Synthetic oligonucleotide
  Sense strand starting at position 3294 of SEQ ID NO: 1563984
cagaguauguuugugugga

SEQ ID NO: 1846514 - RNA, 19 nt, Artificial Sequence
  Description of Artificial Sequence: Synthetic oligonucleotide
  Antisense strand to SEQ ID NO: 1846513
uccacacaaacauacucug

SEQ ID NO: 1846515 - RNA, 19 nt, Artificial Sequence
  Description of Artificial Sequence: Synthetic oligonucleotide
  Sense strand starting at position 3296 of SEQ ID NO: 1563984
gaguauguuuguguggaag

SEQ ID NO: 1846516 - RNA, 19 nt, Artificial Sequence
  Description of Artificial Sequence: Synthetic oligonucleotide
  Antisense strand to SEQ ID NO: 1846515
cuuccacacaaacauacuc

SEQ ID NO: 1846517 - RNA, 19 nt, Artificial Sequence
  Description of Artificial Sequence: Synthetic oligonucleotide
  Sense strand starting at position 3299 of SEQ ID NO: 1563984
uauguuuguguggaaggga

SEQ ID NO: 1846518 - RNA, 19 nt, Artificial Sequence
  Description of Artificial Sequence: Synthetic oligonucleotide
  Antisense strand to SEQ ID NO: 1846517
ucccuuccacacaaacaua

SEQ ID NO: 1846519 - RNA, 19 nt, Artificial Sequence
  Description of Artificial Sequence: Synthetic oligonucleotide
  Sense strand starting at position 3300 of SEQ ID NO: 1563984
auguuuguguggaagggau

SEQ ID NO: 1846520 - RNA, 19 nt, Artificial Sequence
  Description of Artificial Sequence: Synthetic oligonucleotide
  Antisense strand to SEQ ID NO: 1846519
aucccuuccacacaaacau

SEQ ID NO: 1846521 - RNA, 19 nt, Artificial Sequence
  Description of Artificial Sequence: Synthetic oligonucleotide
  Sense strand starting at position 3357 of SEQ ID NO: 1563984
ucauuaagguuagauuuga

SEQ ID NO: 1846522 - RNA, 19 nt, Artificial Sequence
  Description of Artificial Sequence: Synthetic oligonucleotide
  Antisense strand to SEQ ID NO: 1846521
ucaaaucuaaccuuaauga

SEQ ID NO: 1846523 - RNA, 19 nt, Artificial Sequence
  Description of Artificial Sequence: Synthetic oligonucleotide
  Sense strand starting at position 3462 of SEQ ID NO: 1563984
ugaaguaggagucauccuu

SEQ ID NO: 1846524 - RNA, 19 nt, Artificial Sequence
  Description of Artificial Sequence: Synthetic oligonucleotide
  Antisense strand to SEQ ID NO: 1846523
aaggaugacuccuacuuca

SEQ ID NO: 1846525 - RNA, 19 nt, Artificial Sequence
  Description of Artificial Sequence: Synthetic oligonucleotide
  Sense strand starting at position 3524 of SEQ ID NO: 1563984
ggguuuggugagugguaga

SEQ ID NO: 1846526 - RNA, 19 nt, Artificial Sequence
  Description of Artificial Sequence: Synthetic oligonucleotide
  Antisense strand to SEQ ID NO: 1846525
ucuaccacucaccaaaccc

SEQ ID NO: 1846527 - RNA, 19 nt, Artificial Sequence
  Description of Artificial Sequence: Synthetic oligonucleotide
  Sense strand starting at position 3579 of SEQ ID NO: 1563984
ggaaaucaugugggaccuu

SEQ ID NO: 1846528 - RNA, 19 nt, Artificial Sequence
  Description of Artificial Sequence: Synthetic oligonucleotide
  Antisense strand to SEQ ID NO: 1846527
aaggucccacaugauuucc

SEQ ID NO: 1846529 - RNA, 19 nt, Artificial Sequence
  Description of Artificial Sequence: Synthetic oligonucleotide
  Sense strand starting at position 3633 of SEQ ID NO: 1563984
aguucuuaauucguacuua

SEQ ID NO: 1846530 - RNA, 19 nt, Artificial Sequence
  Description of Artificial Sequence: Synthetic oligonucleotide
  Antisense strand to SEQ ID NO: 1846529
uaaguacgaauuaagaacu

SEQ ID NO: 1846531 - RNA, 19 nt, Artificial Sequence
  Description of Artificial Sequence: Synthetic oligonucleotide
  Sense strand starting at position 3676 of SEQ ID NO: 1563984
gggaaacauuaguaaucag

SEQ ID NO: 1846532 - RNA, 19 nt, Artificial Sequence
  Description of Artificial Sequence: Synthetic oligonucleotide
  Antisense strand to SEQ ID NO: 1846531
cugauuacuaauguuuccc

SEQ ID NO: 1846533 - RNA, 19 nt, Artificial Sequence
  Description of Artificial Sequence: Synthetic oligonucleotide
  Sense strand starting at position 3705 of SEQ ID NO: 1563984
uaugaaagcuaguuacuug

SEQ ID NO: 1846534 - RNA, 19 nt, Artificial Sequence
  Description of Artificial Sequence: Synthetic oligonucleotide
  Antisense strand to SEQ ID NO: 1846533
caaguaacuagcuuucaua

SEQ ID NO: 1846535 - RNA, 19 nt, Artificial Sequence
  Description of Artificial Sequence: Synthetic oligonucleotide
  Sense strand starting at position 3708 of SEQ ID NO: 1563984
gaaagcuaguuacuuguau

SEQ ID NO: 1846536 - RNA, 19 nt, Artificial Sequence
  Description of Artificial Sequence: Synthetic oligonucleotide
  Antisense strand to SEQ ID NO: 1846535
auacaaguaacuagcuuuc

SEQ ID NO: 1846537 - RNA, 19 nt, Artificial Sequence
  Description of Artificial Sequence: Synthetic oligonucleotide
  Sense strand starting at position 3950 of SEQ ID NO: 1563984
ggcugaaauuaaugaauuu

SEQ ID NO: 1846538 - RNA, 19 nt, Artificial Sequence
  Description of Artificial Sequence: Synthetic oligonucleotide
  Antisense strand to SEQ ID NO: 1846537
aaauucauuaauuucagcc

SEQ ID NO: 1846539 - RNA, 19 nt, Artificial Sequence
  Description of Artificial Sequence: Synthetic oligonucleotide
  Sense strand starting at position 3971 of SEQ ID NO: 1563984
uguuucuaacaggaaugua

SEQ ID NO: 1846540 - RNA, 19 nt, Artificial Sequence
  Description of Artificial Sequence: Synthetic oligonucleotide
  Antisense strand to SEQ ID NO: 1846539
uacauuccuguuagaaaca

SEQ ID NO: 1846541 - RNA, 19 nt, Artificial Sequence
  Description of Artificial Sequence: Synthetic oligonucleotide
  Sense strand starting at position 80 of SEQ ID NO: 1563985
aagccaguuucccuagaga

SEQ ID NO: 1846542 - RNA, 19 nt, Artificial Sequence
  Description of Artificial Sequence: Synthetic oligonucleotide
  Antisense strand to SEQ ID NO: 1846541
ucucuagggaaacuggcuu

SEQ ID NO: 1846543 - RNA, 19 nt, Artificial Sequence
  Description of Artificial Sequence: Synthetic oligonucleotide
  Sense strand starting at position 120 of SEQ ID NO: 1563985
cugcaauuacaggaagguu

SEQ ID NO: 1846544 - RNA, 19 nt, Artificial Sequence
  Description of Artificial Sequence: Synthetic oligonucleotide
  Antisense strand to SEQ ID NO: 1846543
aaccuuccuguaauugcag

SEQ ID NO: 1846545 - RNA, 19 nt, Artificial Sequence
  Description of Artificial Sequence: Synthetic oligonucleotide
  Sense strand starting at position 128 of SEQ ID NO: 1563985
acaggaagguuaucagcau

SEQ ID NO: 1846546 - RNA, 19 nt, Artificial Sequence
  Description of Artificial Sequence: Synthetic oligonucleotide
  Antisense strand to SEQ ID NO: 1846545
augcugauaaccuuccugu

SEQ ID NO: 1846547 - RNA, 19 nt, Artificial Sequence
  Description of Artificial Sequence: Synthetic oligonucleotide
  Sense strand starting at position 134 of SEQ ID NO: 1563985
agguuaucagcauaauguc

SEQ ID NO: 1846548 - RNA, 19 nt, Artificial Sequence
  Description of Artificial Sequence: Synthetic oligonucleotide
  Antisense strand to SEQ ID NO: 1846547
gacauuaugcugauaaccu

SEQ ID NO: 1846549 - RNA, 19 nt, Artificial Sequence
  Description of Artificial Sequence: Synthetic oligonucleotide
  Sense strand starting at position 173 of SEQ ID NO: 1563985
gguccaugcaucuggaaga

SEQ ID NO: 1846550 - RNA, 19 nt, Artificial Sequence
  Description of Artificial Sequence: Synthetic oligonucleotide
  Antisense strand to SEQ ID NO: 1846549
ucuuccagaugcauggacc

SEQ ID NO: 1846551 - RNA, 19 nt, Artificial Sequence
  Description of Artificial Sequence: Synthetic oligonucleotide
  Sense strand starting at position 352 of SEQ ID NO: 1563985
acuccuacuuuguccagau

SEQ ID NO: 1846552 - RNA, 19 nt, Artificial Sequence
  Description of Artificial Sequence: Synthetic oligonucleotide
  Antisense strand to SEQ ID NO: 1846551
aucuggacaaaguaggagu

SEQ ID NO: 1846553 - RNA, 19 nt, Artificial Sequence
  Description of Artificial Sequence: Synthetic oligonucleotide
  Sense strand starting at position 354 of SEQ ID NO: 1563985
uccuacuuuguccagauua

SEQ ID NO: 1846554 - RNA, 19 nt, Artificial Sequence
  Description of Artificial Sequence: Synthetic oligonucleotide
  Antisense strand to SEQ ID NO: 1846553
uaaucuggacaaaguagga

SEQ ID NO: 1846555 - RNA, 19 nt, Artificial Sequence
  Description of Artificial Sequence: Synthetic oligonucleotide
  Sense strand starting at position 356 of SEQ ID NO: 1563985
cuacuuuguccagauuaca

SEQ ID NO: 1846556 - RNA, 19 nt, Artificial Sequence
  Description of Artificial Sequence: Synthetic oligonucleotide
  Antisense strand to SEQ ID NO: 1846555
uguaaucuggacaaaguag

SEQ ID NO: 1846557 - RNA, 19 nt, Artificial Sequence
  Description of Artificial Sequence: Synthetic oligonucleotide
  Sense strand starting at position 421 of SEQ ID NO: 1563985
ggacauaaauuauuggguu

SEQ ID NO: 1846558 - RNA, 19 nt, Artificial Sequence
  Description of Artificial Sequence: Synthetic oligonucleotide
  Antisense strand to SEQ ID NO: 1846557
aacccaauaauuuaugucc

SEQ ID NO: 1846559 - RNA, 19 nt, Artificial Sequence
  Description of Artificial Sequence: Synthetic oligonucleotide
  Sense strand starting at position 507 of SEQ ID NO: 1563985
aggagagcuacauguccuu

SEQ ID NO: 1846560 - RNA, 19 nt, Artificial Sequence
  Description of Artificial Sequence: Synthetic oligonucleotide
  Antisense strand to SEQ ID NO: 1846559
aaggacauguagcucuccu

SEQ ID NO: 1846561 - RNA, 19 nt, Artificial Sequence
  Description of Artificial Sequence: Synthetic oligonucleotide
  Sense strand starting at position 561 of SEQ ID NO: 1563985
uccucauauguuuaaaguu

SEQ ID NO: 1846562 - RNA, 19 nt, Artificial Sequence
  Description of Artificial Sequence: Synthetic oligonucleotide
  Antisense strand to SEQ ID NO: 1846561
aacuuuaaacauaugagga

SEQ ID NO: 1846563 - RNA, 19 nt, Artificial Sequence
  Description of Artificial Sequence: Synthetic oligonucleotide
  Sense strand starting at position 667 of SEQ ID NO: 1563985
gcuagauuacaccagccaa

SEQ ID NO: 1846564 - RNA, 19 nt, Artificial Sequence
  Description of Artificial Sequence: Synthetic oligonucleotide
  Antisense strand to SEQ ID NO: 1846563
uuggcugguguaaucuagc

SEQ ID NO: 1846565 - RNA, 19 nt, Artificial Sequence
  Description of Artificial Sequence: Synthetic oligonucleotide
  Sense strand starting at position 788 of SEQ ID NO: 1563985
ccuguuaagguauaugaac

SEQ ID NO: 1846566 - RNA, 19 nt, Artificial Sequence
  Description of Artificial Sequence: Synthetic oligonucleotide
  Antisense strand to SEQ ID NO: 1846565
guucauauaccuuaacagg

SEQ ID NO: 1846567 - RNA, 19 nt, Artificial Sequence
  Description of Artificial Sequence: Synthetic oligonucleotide
  Sense strand starting at position 809 of SEQ ID NO: 1563985
ucaaguccaucaguuacau

SEQ ID NO: 1846568 - RNA, 19 nt, Artificial Sequence
  Description of Artificial Sequence: Synthetic oligonucleotide
  Antisense strand to SEQ ID NO: 1846567
auguaacugauggacuuga

SEQ ID NO: 1846569 - RNA, 19 nt, Artificial Sequence
  Description of Artificial Sequence: Synthetic oligonucleotide
  Sense strand starting at position 1110 of SEQ ID NO: 1563985
ugucacaauccugaugcaa

SEQ ID NO: 1846570 - RNA, 19 nt, Artificial Sequence
  Description of Artificial Sequence: Synthetic oligonucleotide
  Antisense strand to SEQ ID NO: 1846569
uugcaucaggauugugaca

SEQ ID NO: 1846571 - RNA, 19 nt, Artificial Sequence
  Description of Artificial Sequence: Synthetic oligonucleotide
  Sense strand starting at position 1127 of SEQ ID NO: 1563985
aaauccugugcccaagagu

SEQ ID NO: 1846572 - RNA, 19 nt, Artificial Sequence
  Description of Artificial Sequence: Synthetic oligonucleotide
  Antisense strand to SEQ ID NO: 1846571
acucuugggcacaggauuu

SEQ ID NO: 1846573 - RNA, 19 nt, Artificial Sequence
  Description of Artificial Sequence: Synthetic oligonucleotide
  Sense strand starting at position 1169 of SEQ ID NO: 1563985
agcagacgccuguuacgua

SEQ ID NO: 1846574 - RNA, 19 nt, Artificial Sequence
  Description of Artificial Sequence: Synthetic oligonucleotide
  Antisense strand to SEQ ID NO: 1846573
uacguaacaggcgucugcu

SEQ ID NO: 1846575 - RNA, 19 nt, Artificial Sequence
  Description of Artificial Sequence: Synthetic oligonucleotide
  Sense strand starting at position 1261 of SEQ ID NO: 1563985
gggucuacuccugaaguua

SEQ ID NO: 1846576 - RNA, 19 nt, Artificial Sequence
  Description of Artificial Sequence: Synthetic oligonucleotide
  Antisense strand to SEQ ID NO: 1846575
uaacuucaggaguagaccc

SEQ ID NO: 1846577 - RNA, 19 nt, Artificial Sequence
  Description of Artificial Sequence: Synthetic oligonucleotide
  Sense strand starting at position 1406 of SEQ ID NO: 1563985
uuccuugaagccuagagau

SEQ ID NO: 1846578 - RNA, 19 nt, Artificial Sequence
  Description of Artificial Sequence: Synthetic oligonucleotide
  Antisense strand to SEQ ID NO: 1846577
aucucuaggcuucaaggaa

SEQ ID NO: 1846579 - RNA, 19 nt, Artificial Sequence
  Description of Artificial Sequence: Synthetic oligonucleotide
  Sense strand starting at position 1416 of SEQ ID NO: 1563985
ccuagagauuugcaggaua

SEQ ID NO: 1846580 - RNA, 19 nt, Artificial Sequence
  Description of Artificial Sequence: Synthetic oligonucleotide
  Antisense strand to SEQ ID NO: 1846579
uauccugcaaaucucuagg

SEQ ID NO: 1846581 - RNA, 19 nt, Artificial Sequence
  Description of Artificial Sequence: Synthetic oligonucleotide
  Sense strand starting at position 1714 of SEQ ID NO: 1563985
agagguuugcgacagagca

SEQ ID NO: 1846582 - RNA, 19 nt, Artificial Sequence
  Description of Artificial Sequence: Synthetic oligonucleotide
  Antisense strand to SEQ ID NO: 1846581
ugcucugucgcaaaccucu

SEQ ID NO: 1846583 - RNA, 19 nt, Artificial Sequence
  Description of Artificial Sequence: Synthetic oligonucleotide
  Sense strand starting at position 1755 of SEQ ID NO: 1563985
gcagaauuaccucauaacg

SEQ ID NO: 1846584 - RNA, 19 nt, Artificial Sequence
  Description of Artificial Sequence: Synthetic oligonucleotide
  Antisense strand to SEQ ID NO: 1846583
cguuaugagguaauucugc

SEQ ID NO: 1846585 - RNA, 19 nt, Artificial Sequence
  Description of Artificial Sequence: Synthetic oligonucleotide
  Sense strand starting at position 2433 of SEQ ID NO: 1563985
auggaauucugcuucuuaa

SEQ ID NO: 1846586 - RNA, 19 nt, Artificial Sequence
  Description of Artificial Sequence: Synthetic oligonucleotide
  Antisense strand to SEQ ID NO: 1846585
uuaagaagcagaauuccau

SEQ ID NO: 1846587 - RNA, 19 nt, Artificial Sequence
  Description of Artificial Sequence: Synthetic oligonucleotide
  Sense strand starting at position 2450 of SEQ ID NO: 1563985
aaggcuuacuuaguaauag

SEQ ID NO: 1846588 - RNA, 19 nt, Artificial Sequence
  Description of Artificial Sequence: Synthetic oligonucleotide
  Antisense strand to SEQ ID NO: 1846587
cuauuacuaaguaagccuu

SEQ ID NO: 1846589 - RNA, 19 nt, Artificial Sequence
  Description of Artificial Sequence: Synthetic oligonucleotide
  Sense strand starting at position 2550 of SEQ ID NO: 1563985
ugguuauggcaugauugau

SEQ ID NO: 1846590 - RNA, 19 nt, Artificial Sequence
  Description of Artificial Sequence: Synthetic oligonucleotide
  Antisense strand to SEQ ID NO: 1846589
aucaaucaugccauaacca

SEQ ID NO: 1846591 - RNA, 19 nt, Artificial Sequence
  Description of Artificial Sequence: Synthetic oligonucleotide
  Sense strand starting at position 2628 of SEQ ID NO: 1563985
ugacuacuguuauccucau

SEQ ID NO: 1846592 - RNA, 19 nt, Artificial Sequence
  Description of Artificial Sequence: Synthetic oligonucleotide
  Antisense strand to SEQ ID NO: 1846591
augaggauaacaguaguca

SEQ ID NO: 1846593 - RNA, 19 nt, Artificial Sequence
  Description of Artificial Sequence: Synthetic oligonucleotide
  Sense strand starting at position 2635 of SEQ ID NO: 1563985
uguuauccucauuaggcaa

SEQ ID NO: 1846594 - RNA, 19 nt, Artificial Sequence
  Description of Artificial Sequence: Synthetic oligonucleotide
  Antisense strand to SEQ ID NO: 1846593
uugccuaaugaggauaaca

SEQ ID NO: 1846595 - RNA, 19 nt, Artificial Sequence
  Description of Artificial Sequence: Synthetic oligonucleotide
  Sense strand starting at position 3026 of SEQ ID NO: 1563985
gggaauugcaauggcgaaa

SEQ ID NO: 1846596 - RNA, 19 nt, Artificial Sequence
  Description of Artificial Sequence: Synthetic oligonucleotide
  Antisense strand to SEQ ID NO: 1846595
uuucgccauugcaauuccc

SEQ ID NO: 1846597 - RNA, 19 nt, Artificial Sequence
  Description of Artificial Sequence: Synthetic oligonucleotide
  Sense strand starting at position 3147 of SEQ ID NO: 1563985
cagguauggguucggaaag

SEQ ID NO: 1846598 - RNA, 19 nt, Artificial Sequence
  Description of Artificial Sequence: Synthetic oligonucleotide
  Antisense strand to SEQ ID NO: 1846597
cuuuccgaacccauaccug

SEQ ID NO: 1846599 - RNA, 19 nt, Artificial Sequence
  Description of Artificial Sequence: Synthetic oligonucleotide
  Sense strand starting at position 3175 of SEQ ID NO: 1563985
cuaguuggucgggaugaag

SEQ ID NO: 1846600 - RNA, 19 nt, Artificial Sequence
  Description of Artificial Sequence: Synthetic oligonucleotide
  Antisense strand to SEQ ID NO: 1846599
cuucaucccgaccaacuag

SEQ ID NO: 1846601 - RNA, 19 nt, Artificial Sequence
  Description of Artificial Sequence: Synthetic oligonucleotide
  Sense strand starting at position 3177 of SEQ ID NO: 1563985
aguuggucgggaugaagau

SEQ ID NO: 1846602 - RNA, 19 nt, Artificial Sequence
  Description of Artificial Sequence: Synthetic oligonucleotide
  Antisense strand to SEQ ID NO: 1846601
aucuucaucccgaccaacu

SEQ ID NO: 1846603 - RNA, 19 nt, Artificial Sequence
  Description of Artificial Sequence: Synthetic oligonucleotide
  Sense strand starting at position 3178 of SEQ ID NO: 1563985
guuggucgggaugaagauu

SEQ ID NO: 1846604 - RNA, 19 nt, Artificial Sequence
  Description of Artificial Sequence: Synthetic oligonucleotide
  Antisense strand to SEQ ID NO: 1846603
aaucuucaucccgaccaac

SEQ ID NO: 1846605 - RNA, 19 nt, Artificial Sequence
  Description of Artificial Sequence: Synthetic oligonucleotide
  Sense strand starting at position 3225 of SEQ ID NO: 1563985
gaguucuuccuggguggga

SEQ ID NO: 1846606 - RNA, 19 nt, Artificial Sequence
  Description of Artificial Sequence: Synthetic oligonucleotide
  Antisense strand to SEQ ID NO: 1846605
ucccacccaggaagaacuc

SEQ ID NO: 1846607 - RNA, 19 nt, Artificial Sequence
  Description of Artificial Sequence: Synthetic oligonucleotide
  Sense strand starting at position 3252 of SEQ ID NO: 1563985
cuaguugagccagauuauc

SEQ ID NO: 1846608 - RNA, 19 nt, Artificial Sequence
  Description of Artificial Sequence: Synthetic oligonucleotide
  Antisense strand to SEQ ID NO: 1846607
gauaaucuggcucaacuag

SEQ ID NO: 1846609 - RNA, 19 nt, Artificial Sequence
  Description of Artificial Sequence: Synthetic oligonucleotide
  Sense strand starting at position 3348 of SEQ ID NO: 1563985
uggugauguuauucccaga

SEQ ID NO: 1846610 - RNA, 19 nt, Artificial Sequence
  Description of Artificial Sequence: Synthetic oligonucleotide
  Antisense strand to SEQ ID NO: 1846609
ucugggaauaacaucacca

SEQ ID NO: 1846611 - RNA, 19 nt, Artificial Sequence
  Description of Artificial Sequence: Synthetic oligonucleotide
  Sense strand starting at position 3511 of SEQ ID NO: 1563985
ugucucagaguuuacacua

SEQ ID NO: 1846612 - RNA, 19 nt, Artificial Sequence
  Description of Artificial Sequence: Synthetic oligonucleotide
  Antisense strand to SEQ ID NO: 1846611
uaguguaaacucugagaca

SEQ ID NO: 1846613 - RNA, 19 nt, Artificial Sequence
  Description of Artificial Sequence: Synthetic oligonucleotide
  Sense strand starting at position 3717 of SEQ ID NO: 1563985
ucaagagcuugguuacaga

SEQ ID NO: 1846614 - RNA, 19 nt, Artificial Sequence
  Description of Artificial Sequence: Synthetic oligonucleotide
  Antisense strand to SEQ ID NO: 1846613
ucuguaaccaagcucuuga

SEQ ID NO: 1846615 - RNA, 19 nt, Artificial Sequence
  Description of Artificial Sequence: Synthetic oligonucleotide
  Sense strand starting at position 3745 of SEQ ID NO: 1563985
ggucuaaauacccgguaga

SEQ ID NO: 1846616 - RNA, 19 nt, Artificial Sequence
  Description of Artificial Sequence: Synthetic oligonucleotide
  Antisense strand to SEQ ID NO: 1846615
ucuaccggguauuuagacc

SEQ ID NO: 1846617 - RNA, 19 nt, Artificial Sequence
  Description of Artificial Sequence: Synthetic oligonucleotide
  Sense strand starting at position 3748 of SEQ ID NO: 1563985
cuaaauacccgguagaggu

SEQ ID NO: 1846618 - RNA, 19 nt, Artificial Sequence
  Description of Artificial Sequence: Synthetic oligonucleotide
  Antisense strand to SEQ ID NO: 1846617
accucuaccggguauuuag

SEQ ID NO: 1846619 - RNA, 19 nt, Artificial Sequence
  Description of Artificial Sequence: Synthetic oligonucleotide
  Sense strand starting at position 3758 of SEQ ID NO: 1563985
gguagagguuucccauuag

SEQ ID NO: 1846620 - RNA, 19 nt, Artificial Sequence
  Description of Artificial Sequence: Synthetic oligonucleotide
  Antisense strand to SEQ ID NO: 1846619
cuaaugggaaaccucuacc

SEQ ID NO: 1846621 - RNA, 19 nt, Artificial Sequence
  Description of Artificial Sequence: Synthetic oligonucleotide
  Sense strand starting at position 119 of SEQ ID NO: 1563986
aaaugaaugccugaguuug

SEQ ID NO: 1846622 - RNA, 19 nt, Artificial Sequence
  Description of Artificial Sequence: Synthetic oligonucleotide
  Antisense strand to SEQ ID NO: 1846621
caaacucaggcauucauuu

SEQ ID NO: 1846623 - RNA, 19 nt, Artificial Sequence
  Description of Artificial Sequence: Synthetic oligonucleotide
  Sense strand starting at position 135 of SEQ ID NO: 1563986
uuguguacugccuucugua

SEQ ID NO: 1846624 - RNA, 19 nt, Artificial Sequence
  Description of Artificial Sequence: Synthetic oligonucleotide
  Antisense strand to SEQ ID NO: 1846623
uacagaaggcaguacacaa

SEQ ID NO: 1846625 - RNA, 19 nt, Artificial Sequence
  Description of Artificial Sequence: Synthetic oligonucleotide
  Sense strand starting at position 208 of SEQ ID NO: 1563986
uaagcucccuguguuuaga

SEQ ID NO: 1846626 - RNA, 19 nt, Artificial Sequence
  Description of Artificial Sequence: Synthetic oligonucleotide
  Antisense strand to SEQ ID NO: 1846625
ucuaaacacagggagcuua

SEQ ID NO: 1846627 - RNA, 19 nt, Artificial Sequence
  Description of Artificial Sequence: Synthetic oligonucleotide
  Sense strand starting at position 211 of SEQ ID NO: 1563986
gcucccuguguuuagagga

SEQ ID NO: 1846628 - RNA, 19 nt, Artificial Sequence
  Description of Artificial Sequence: Synthetic oligonucleotide
  Antisense strand to SEQ ID NO: 1846627
uccucuaaacacagggagc

SEQ ID NO: 1846629 - RNA, 19 nt, Artificial Sequence
  Description of Artificial Sequence: Synthetic oligonucleotide
  Sense strand starting at position 216 of SEQ ID NO: 1563986
cuguguuuagaggagucca

SEQ ID NO: 1846630 - RNA, 19 nt, Artificial Sequence
  Description of Artificial Sequence: Synthetic oligonucleotide
  Antisense strand to SEQ ID NO: 1846629
uggacuccucuaaacacag

SEQ ID NO: 1846631 - RNA, 19 nt, Artificial Sequence
  Description of Artificial Sequence: Synthetic oligonucleotide
  Sense strand starting at position 318 of SEQ ID NO: 1563986
ucgccugggaagcauauua

SEQ ID NO: 1846632 - RNA, 19 nt, Artificial Sequence
  Description of Artificial Sequence: Synthetic oligonucleotide
  Antisense strand to SEQ ID NO: 1846631
uaauaugcuucccaggcga

SEQ ID NO: 1846633 - RNA, 19 nt, Artificial Sequence
  Description of Artificial Sequence: Synthetic oligonucleotide
  Sense strand starting at position 380 of SEQ ID NO: 1563986
gcgguuagacugggaaucu

SEQ ID NO: 1846634 - RNA, 19 nt, Artificial Sequence
  Description of Artificial Sequence: Synthetic oligonucleotide
  Antisense strand to SEQ ID NO: 1846633
agauucccagucuaaccgc

SEQ ID NO: 1846635 - RNA, 19 nt, Artificial Sequence
  Description of Artificial Sequence: Synthetic oligonucleotide
  Sense strand starting at position 411 of SEQ ID NO: 1563986
agaugcaucaggugauucu

SEQ ID NO: 1846636 - RNA, 19 nt, Artificial Sequence
  Description of Artificial Sequence: Synthetic oligonucleotide
  Antisense strand to SEQ ID NO: 1846635
agaaucaccugaugcaucu

SEQ ID NO: 1846637 - RNA, 19 nt, Artificial Sequence
  Description of Artificial Sequence: Synthetic oligonucleotide
  Sense strand starting at position 702 of SEQ ID NO: 1563986
guuaccauuguccaccaua

SEQ ID NO: 1846638 - RNA, 19 nt, Artificial Sequence
  Description of Artificial Sequence: Synthetic oligonucleotide
  Antisense strand to SEQ ID NO: 1846637
uaugguggacaaugguaac

SEQ ID NO: 1846639 - RNA, 19 nt, Artificial Sequence
  Description of Artificial Sequence: Synthetic oligonucleotide
  Sense strand starting at position 2424 of SEQ ID NO: 1563986
ccuccaagcugucuuagga

SEQ ID NO: 1846640 - RNA, 19 nt, Artificial Sequence
  Description of Artificial Sequence: Synthetic oligonucleotide
  Antisense strand to SEQ ID NO: 1846639
uccuaagacagcuuggagg

SEQ ID NO: 1846641 - RNA, 19 nt, Artificial Sequence
  Description of Artificial Sequence: Synthetic oligonucleotide
  Sense strand starting at position 2447 of SEQ ID NO: 1563986
ggaaacucauucuucgaac

SEQ ID NO: 1846642 - RNA, 19 nt, Artificial Sequence
  Description of Artificial Sequence: Synthetic oligonucleotide
  Antisense strand to SEQ ID NO: 1846641
guucgaagaaugaguuucc

SEQ ID NO: 1846643 - RNA, 19 nt, Artificial Sequence
  Description of Artificial Sequence: Synthetic oligonucleotide
  Sense strand starting at position 2586 of SEQ ID NO: 1563986
ugcuaaagucagugcacaa

SEQ ID NO: 1846644 - RNA, 19 nt, Artificial Sequence
  Description of Artificial Sequence: Synthetic oligonucleotide
  Antisense strand to SEQ ID NO: 1846643
uugugcacugacuuuagca

SEQ ID NO: 1846645 - RNA, 19 nt, Artificial Sequence
  Description of Artificial Sequence: Synthetic oligonucleotide
  Sense strand starting at position 2650 of SEQ ID NO: 1563986
uuggguuuguucuccgaaa

SEQ ID NO: 1846646 - RNA, 19 nt, Artificial Sequence
  Description of Artificial Sequence: Synthetic oligonucleotide
  Antisense strand to SEQ ID NO: 1846645
uuucggagaacaaacccaa

SEQ ID NO: 1846647 - RNA, 19 nt, Artificial Sequence
  Description of Artificial Sequence: Synthetic oligonucleotide
  Sense strand starting at position 2685 of SEQ ID NO: 1563986
cugauuugcucagucacca

SEQ ID NO: 1846648 - RNA, 19 nt, Artificial Sequence
  Description of Artificial Sequence: Synthetic oligonucleotide
  Antisense strand to SEQ ID NO: 1846647
uggugacugagcaaaucag

SEQ ID NO: 1846649 - RNA, 19 nt, Artificial Sequence
  Description of Artificial Sequence: Synthetic oligonucleotide
  Sense strand starting at position 2704 of SEQ ID NO: 1563986
ggcauuaacaagcaacguu

SEQ ID NO: 1846650 - RNA, 19 nt, Artificial Sequence
  Description of Artificial Sequence: Synthetic oligonucleotide
  Antisense strand to SEQ ID NO: 1846649
aacguugcuuguuaaugcc

SEQ ID NO: 1846651 - RNA, 19 nt, Artificial Sequence
  Description of Artificial Sequence: Synthetic oligonucleotide
  Sense strand starting at position 2757 of SEQ ID NO: 1563986
gugaaaguuucuuuguuug

SEQ ID NO: 1846652 - RNA, 19 nt, Artificial Sequence
  Description of Artificial Sequence: Synthetic oligonucleotide
  Antisense strand to SEQ ID NO: 1846651
caaacaaagaaacuuucac

SEQ ID NO: 1846653 - RNA, 19 nt, Artificial Sequence
  Description of Artificial Sequence: Synthetic oligonucleotide
  Sense strand starting at position 2779 of SEQ ID NO: 1563986
gcguucuucuauuuggagu

SEQ ID NO: 1846654 - RNA, 19 nt, Artificial Sequence
  Description of Artificial Sequence: Synthetic oligonucleotide
  Antisense strand to SEQ ID NO: 1846653
acuccaaauagaagaacgc

SEQ ID NO: 1846655 - RNA, 19 nt, Artificial Sequence
  Description of Artificial Sequence: Synthetic oligonucleotide
  Sense strand starting at position 2852 of SEQ ID NO: 1563986
gcgggaguuuggaaggauc

SEQ ID NO: 1846656 - RNA, 19 nt, Artificial Sequence
  Description of Artificial Sequence: Synthetic oligonucleotide
  Antisense strand to SEQ ID NO: 1846655
gauccuuccaaacucccgc

SEQ ID NO: 1846657 - RNA, 19 nt, Artificial Sequence
  Description of Artificial Sequence: Synthetic oligonucleotide
  Sense strand starting at position 2854 of SEQ ID NO: 1563986
gggaguuuggaaggauccu

SEQ ID NO: 1846658 - RNA, 19 nt, Artificial Sequence
  Description of Artificial Sequence: Synthetic oligonucleotide
  Antisense strand to SEQ ID NO: 1846657
aggauccuuccaaacuccc

SEQ ID NO: 1846659 - RNA, 19 nt, Artificial Sequence
  Description of Artificial Sequence: Synthetic oligonucleotide
  Sense strand starting at position 2884 of SEQ ID NO: 1563986
cuuccuuuccuagguauuu

SEQ ID NO: 1846660 - RNA, 19 nt, Artificial Sequence
  Description of Artificial Sequence: Synthetic oligonucleotide
  Antisense strand to SEQ ID NO: 1846659
aaauaccuaggaaaggaag

SEQ ID NO: 1846661 - RNA, 19 nt, Artificial Sequence
  Description of Artificial Sequence: Synthetic oligonucleotide
  Sense strand starting at position 3135 of SEQ ID NO: 1563986
acgcaagagacuugaguaa

SEQ ID NO: 1846662 - RNA, 19 nt, Artificial Sequence
  Description of Artificial Sequence: Synthetic oligonucleotide
  Antisense strand to SEQ ID NO: 1846661
uuacucaagucucuugcgu

SEQ ID NO: 1846663 - RNA, 19 nt, Artificial Sequence
  Description of Artificial Sequence: Synthetic oligonucleotide
  Sense strand starting at position 3149 of SEQ ID NO: 1563986
aguaaagauuggcuuccua

SEQ ID NO: 1846664 - RNA, 19 nt, Artificial Sequence
  Description of Artificial Sequence: Synthetic oligonucleotide
  Antisense strand to SEQ ID NO: 1846663
uaggaagccaaucuuuacu

SEQ ID NO: 1846665 - RNA, 19 nt, Artificial Sequence
  Description of Artificial Sequence: Synthetic oligonucleotide
  Sense strand starting at position 3157 of SEQ ID NO: 1563986
uuggcuuccuaccucagaa

SEQ ID NO: 1846666 - RNA, 19 nt, Artificial Sequence
  Description of Artificial Sequence: Synthetic oligonucleotide
  Antisense strand to SEQ ID NO: 1846665
uucugagguaggaagccaa

SEQ ID NO: 1846667 - RNA, 19 nt, Artificial Sequence
  Description of Artificial Sequence: Synthetic oligonucleotide
  Sense strand starting at position 3159 of SEQ ID NO: 1563986
ggcuuccuaccucagaauu

SEQ ID NO: 1846668 - RNA, 19 nt, Artificial Sequence
  Description of Artificial Sequence: Synthetic oligonucleotide
  Antisense strand to SEQ ID NO: 1846667
aauucugagguaggaagcc

SEQ ID NO: 1846669 - RNA, 19 nt, Artificial Sequence
  Description of Artificial Sequence: Synthetic oligonucleotide
  Sense strand starting at position 3289 of SEQ ID NO: 1563986
agagcuaaauuugggauua

SEQ ID NO: 1846670 - RNA, 19 nt, Artificial Sequence
  Description of Artificial Sequence: Synthetic oligonucleotide
  Antisense strand to SEQ ID NO: 1846669
uaaucccaaauuuagcucu

SEQ ID NO: 1846671 - RNA, 19 nt, Artificial Sequence
  Description of Artificial Sequence: Synthetic oligonucleotide
  Sense strand starting at position 3290 of SEQ ID NO: 1563986
gagcuaaauuugggauuag

SEQ ID NO: 1846672 - RNA, 19 nt, Artificial Sequence
  Description of Artificial Sequence: Synthetic oligonucleotide
  Antisense strand to SEQ ID NO: 1846671
cuaaucccaaauuuagcuc

SEQ ID NO: 1846673 - RNA, 19 nt, Artificial Sequence
  Description of Artificial Sequence: Synthetic oligonucleotide
  Sense strand starting at position 3345 of SEQ ID NO: 1563986
ucaauuuaaucauggagaa

SEQ ID NO: 1846674 - RNA, 19 nt, Artificial Sequence
  Description of Artificial Sequence: Synthetic oligonucleotide
  Antisense strand to SEQ ID NO: 1846673
uucuccaugauuaaauuga

SEQ ID NO: 1846675 - RNA, 19 nt, Artificial Sequence
  Description of Artificial Sequence: Synthetic oligonucleotide
  Sense strand starting at position 3377 of SEQ ID NO: 1563986
gagggcacuugucuauagu

SEQ ID NO: 1846676 - RNA, 19 nt, Artificial Sequence
  Description of Artificial Sequence: Synthetic oligonucleotide
  Antisense strand to SEQ ID NO: 1846675
acuauagacaagugcccuc

SEQ ID NO: 1846677 - RNA, 19 nt, Artificial Sequence
  Description of Artificial Sequence: Synthetic oligonucleotide
  Sense strand starting at position 3378 of SEQ ID NO: 1563986
agggcacuugucuauaguu

SEQ ID NO: 1846678 - RNA, 19 nt, Artificial Sequence
  Description of Artificial Sequence: Synthetic oligonucleotide
  Antisense strand to SEQ ID NO: 1846677
aacuauagacaagugcccu

SEQ ID NO: 1846679 - RNA, 19 nt, Artificial Sequence
  Description of Artificial Sequence: Synthetic oligonucleotide
  Sense strand starting at position 3380 of SEQ ID NO: 1563986
ggcacuugucuauaguuag

SEQ ID NO: 1846680 - RNA, 19 nt, Artificial Sequence
  Description of Artificial Sequence: Synthetic oligonucleotide
  Antisense strand to SEQ ID NO: 1846679
cuaacuauagacaagugcc

SEQ ID NO: 1846681 - RNA, 19 nt, Artificial Sequence
  Description of Artificial Sequence: Synthetic oligonucleotide
  Sense strand starting at position 3383 of SEQ ID NO: 1563986
acuugucuauaguuagaau

SEQ ID NO: 1846682 - RNA, 19 nt, Artificial Sequence
  Description of Artificial Sequence: Synthetic oligonucleotide
  Antisense strand to SEQ ID NO: 1846681
auucuaacuauagacaagu

SEQ ID NO: 1846683 - RNA, 19 nt, Artificial Sequence
  Description of Artificial Sequence: Synthetic oligonucleotide
  Sense strand starting at position 3503 of SEQ ID NO: 1563986
gagagaucauuuggauuga

SEQ ID NO: 1846684 - RNA, 19 nt, Artificial Sequence
  Description of Artificial Sequence: Synthetic oligonucleotide
  Antisense strand to SEQ ID NO: 1846683
ucaauccaaaugaucucuc

SEQ ID NO: 1846685 - RNA, 19 nt, Artificial Sequence
  Description of Artificial Sequence: Synthetic oligonucleotide
  Sense strand starting at position 3504 of SEQ ID NO: 1563986
agagaucauuuggauugau

SEQ ID NO: 1846686 - RNA, 19 nt, Artificial Sequence
  Description of Artificial Sequence: Synthetic oligonucleotide
  Antisense strand to SEQ ID NO: 1846685
aucaauccaaaugaucucu

SEQ ID NO: 1846687 - RNA, 19 nt, Artificial Sequence
  Description of Artificial Sequence: Synthetic oligonucleotide
  Sense strand starting at position 3586 of SEQ ID NO: 1563986
agagcaugccaguggugaa

SEQ ID NO: 1846688 - RNA, 19 nt, Artificial Sequence
  Description of Artificial Sequence: Synthetic oligonucleotide
  Antisense strand to SEQ ID NO: 1846687
uucaccacuggcaugcucu

SEQ ID NO: 1846689 - RNA, 19 nt, Artificial Sequence
  Description of Artificial Sequence: Synthetic oligonucleotide
  Sense strand starting at position 3587 of SEQ ID NO: 1563986
gagcaugccaguggugaau

SEQ ID NO: 1846690 - RNA, 19 nt, Artificial Sequence
  Description of Artificial Sequence: Synthetic oligonucleotide
  Antisense strand to SEQ ID NO: 1846689
auucaccacuggcaugcuc

SEQ ID NO: 1846691 - RNA, 19 nt, Artificial Sequence
  Description of Artificial Sequence: Synthetic oligonucleotide
  Sense strand starting at position 3593 of SEQ ID NO: 1563986
gccaguggugaauaagcau

SEQ ID NO: 1846692 - RNA, 19 nt, Artificial Sequence
  Description of Artificial Sequence: Synthetic oligonucleotide
  Antisense strand to SEQ ID NO: 1846691
augcuuauucaccacuggc

SEQ ID NO: 1846693 - RNA, 19 nt, Artificial Sequence
  Description of Artificial Sequence: Synthetic oligonucleotide
  Sense strand starting at position 3623 of SEQ ID NO: 1563986
ucagucucauuaguaacaa

SEQ ID NO: 1846694 - RNA, 19 nt, Artificial Sequence
  Description of Artificial Sequence: Synthetic oligonucleotide
  Antisense strand to SEQ ID NO: 1846693
uuguuacuaaugagacuga

SEQ ID NO: 1846695 - RNA, 19 nt, Artificial Sequence
  Description of Artificial Sequence: Synthetic oligonucleotide
  Sense strand starting at position 3813 of SEQ ID NO: 1563986
cuagaaaucugcucuuuga

SEQ ID NO: 1846696 - RNA, 19 nt, Artificial Sequence
  Description of Artificial Sequence: Synthetic oligonucleotide
  Antisense strand to SEQ ID NO: 1846695
ucaaagagcagauuucuag

SEQ ID NO: 1846697 - RNA, 19 nt, Artificial Sequence
  Description of Artificial Sequence: Synthetic oligonucleotide
  Sense strand starting at position 3896 of SEQ ID NO: 1563986
cuaagaugcucagcagaga

SEQ ID NO: 1846698 - RNA, 19 nt, Artificial Sequence
  Description of Artificial Sequence: Synthetic oligonucleotide
  Antisense strand to SEQ ID NO: 1846697
ucucugcugagcaucuuag

SEQ ID NO: 1846699 - RNA, 19 nt, Artificial Sequence
  Description of Artificial Sequence: Synthetic oligonucleotide
  Sense strand starting at position 3897 of SEQ ID NO: 1563986
uaagaugcucagcagagau

SEQ ID NO: 1846700 - RNA, 19 nt, Artificial Sequence
  Description of Artificial Sequence: Synthetic oligonucleotide
  Antisense strand to SEQ ID NO: 1846699
aucucugcugagcaucuua

SEQ ID NO: 1846701 - RNA, 19 nt, Artificial Sequence
  Description of Artificial Sequence: Synthetic oligonucleotide
  Sense strand starting at position 13 of SEQ ID NO: 1563987
ggccucaggagguaaucau

SEQ ID NO: 1846702 - RNA, 19 nt, Artificial Sequence
  Description of Artificial Sequence: Synthetic oligonucleotide
  Antisense strand to SEQ ID NO: 1846701
augauuaccuccugaggcc

SEQ ID NO: 1846703 - RNA, 19 nt, Artificial Sequence
  Description of Artificial Sequence: Synthetic oligonucleotide
  Sense strand starting at position 226 of SEQ ID NO: 1563987
agaggacccuuguuuaaac

SEQ ID NO: 1846704 - RNA, 19 nt, Artificial Sequence
  Description of Artificial Sequence: Synthetic oligonucleotide
  Antisense strand to SEQ ID NO: 1846703
guuuaaacaaggguccucu

SEQ ID NO: 1846705 - RNA, 19 nt, Artificial Sequence
  Description of Artificial Sequence: Synthetic oligonucleotide
  Sense strand starting at position 243 of SEQ ID NO: 1563987
acccuaagugcugagaaau

SEQ ID NO: 1846706 - RNA, 19 nt, Artificial Sequence
  Description of Artificial Sequence: Synthetic oligonucleotide
  Antisense strand to SEQ ID NO: 1846705
auuucucagcacuuagggu

SEQ ID NO: 1846707 - RNA, 19 nt, Artificial Sequence
  Description of Artificial Sequence: Synthetic oligonucleotide
  Sense strand starting at position 302 of SEQ ID NO: 1563987
guaggagauuucgcuuuau

SEQ ID NO: 1846708 - RNA, 19 nt, Artificial Sequence
  Description of Artificial Sequence: Synthetic oligonucleotide
  Antisense strand to SEQ ID NO: 1846707
auaaagcgaaaucuccuac

SEQ ID NO: 1846709 - RNA, 19 nt, Artificial Sequence
  Description of Artificial Sequence: Synthetic oligonucleotide
  Sense strand starting at position 361 of SEQ ID NO: 1563987
cacagaaagcguggaaaga

SEQ ID NO: 1846710 - RNA, 19 nt, Artificial Sequence
  Description of Artificial Sequence: Synthetic oligonucleotide
  Antisense strand to SEQ ID NO: 1846709
ucuuuccacgcuuucugug

SEQ ID NO: 1846711 - RNA, 19 nt, Artificial Sequence
  Description of Artificial Sequence: Synthetic oligonucleotide
  Sense strand starting at position 504 of SEQ ID NO: 1563987
agaaucuccucguuccuau

SEQ ID NO: 1846712 - RNA, 19 nt, Artificial Sequence
  Description of Artificial Sequence: Synthetic oligonucleotide
  Antisense strand to SEQ ID NO: 1846711
auaggaacgaggagauucu

SEQ ID NO: 1846713 - RNA, 19 nt, Artificial Sequence
  Description of Artificial Sequence: Synthetic oligonucleotide
  Sense strand starting at position 539 of SEQ ID NO: 1563987
ugaaguauuauggguugua

SEQ ID NO: 1846714 - RNA, 19 nt, Artificial Sequence
  Description of Artificial Sequence: Synthetic oligonucleotide
  Antisense strand to SEQ ID NO: 1846713
uacaacccauaauacuuca

SEQ ID NO: 1846715 - RNA, 19 nt, Artificial Sequence
  Description of Artificial Sequence: Synthetic oligonucleotide
  Sense strand starting at position 540 of SEQ ID NO: 1563987
gaaguauuauggguuguau

SEQ ID NO: 1846716 - RNA, 19 nt, Artificial Sequence
  Description of Artificial Sequence: Synthetic oligonucleotide
  Antisense strand to SEQ ID NO: 1846715
auacaacccauaauacuuc

SEQ ID NO: 1846717 - RNA, 19 nt, Artificial Sequence
  Description of Artificial Sequence: Synthetic oligonucleotide
  Sense strand starting at position 542 of SEQ ID NO: 1563987
aguauuauggguuguauga

SEQ ID NO: 1846718 - RNA, 19 nt, Artificial Sequence
  Description of Artificial Sequence: Synthetic oligonucleotide
  Antisense strand to SEQ ID NO: 1846717
ucauacaacccauaauacu

SEQ ID NO: 1846719 - RNA, 19 nt, Artificial Sequence
  Description of Artificial Sequence: Synthetic oligonucleotide
  Sense strand starting at position 574 of SEQ ID NO: 1563987
gguaauagucaaggguuca

SEQ ID NO: 1846720 - RNA, 19 nt, Artificial Sequence
  Description of Artificial Sequence: Synthetic oligonucleotide
  Antisense strand to SEQ ID NO: 1846719
ugaacccuugacuauuacc

SEQ ID NO: 1846721 - RNA, 19 nt, Artificial Sequence
  Description of Artificial Sequence: Synthetic oligonucleotide
  Sense strand starting at position 672 of SEQ ID NO: 1563987
ccuauauacucucugggua

SEQ ID NO: 1846722 - RNA, 19 nt, Artificial Sequence
  Description of Artificial Sequence: Synthetic oligonucleotide
  Antisense strand to SEQ ID NO: 1846721
uacccagagaguauauagg

SEQ ID NO: 1846723 - RNA, 19 nt, Artificial Sequence
  Description of Artificial Sequence: Synthetic oligonucleotide
  Sense strand starting at position 675 of SEQ ID NO: 1563987
auauacucucuggguacau

SEQ ID NO: 1846724 - RNA, 19 nt, Artificial Sequence
  Description of Artificial Sequence: Synthetic oligonucleotide
  Antisense strand to SEQ ID NO: 1846723
auguacccagagaguauau

SEQ ID NO: 1846725 - RNA, 19 nt, Artificial Sequence
  Description of Artificial Sequence: Synthetic oligonucleotide
  Sense strand starting at position 798 of SEQ ID NO: 1563987
ucaccagagucacuggaua

SEQ ID NO: 1846726 - RNA, 19 nt, Artificial Sequence
  Description of Artificial Sequence: Synthetic oligonucleotide
  Antisense strand to SEQ ID NO: 1846725
uauccagugacucugguga

SEQ ID NO: 1846727 - RNA, 19 nt, Artificial Sequence
  Description of Artificial Sequence: Synthetic oligonucleotide
  Sense strand starting at position 956 of SEQ ID NO: 1563987
uguaaagucuuuccucaaa

SEQ ID NO: 1846728 - RNA, 19 nt, Artificial Sequence
  Description of Artificial Sequence: Synthetic oligonucleotide
  Antisense strand to SEQ ID NO: 1846727
uuugaggaaagacuuuaca

SEQ ID NO: 1846729 - RNA, 19 nt, Artificial Sequence
  Description of Artificial Sequence: Synthetic oligonucleotide
  Sense strand starting at position 1095 of SEQ ID NO: 1563987
cuuugccuucuggacuaua

SEQ ID NO: 1846730 - RNA, 19 nt, Artificial Sequence
  Description of Artificial Sequence: Synthetic oligonucleotide
  Antisense strand to SEQ ID NO: 1846729
uauaguccagaaggcaaag

SEQ ID NO: 1846731 - RNA, 19 nt, Artificial Sequence
  Description of Artificial Sequence: Synthetic oligonucleotide
  Sense strand starting at position 1098 of SEQ ID NO: 1563987
ugccuucuggacuauacau

SEQ ID NO: 1846732 - RNA, 19 nt, Artificial Sequence
  Description of Artificial Sequence: Synthetic oligonucleotide
  Antisense strand to SEQ ID NO: 1846731
auguauaguccagaaggca

SEQ ID NO: 1846733 - RNA, 19 nt, Artificial Sequence
  Description of Artificial Sequence: Synthetic oligonucleotide
  Sense strand starting at position 1117 of SEQ ID NO: 1563987
uugguacuuggguguauuu

SEQ ID NO: 1846734 - RNA, 19 nt, Artificial Sequence
  Description of Artificial Sequence: Synthetic oligonucleotide
  Antisense strand to SEQ ID NO: 1846733
aaauacacccaaguaccaa

SEQ ID NO: 1846735 - RNA, 19 nt, Artificial Sequence
  Description of Artificial Sequence: Synthetic oligonucleotide
  Sense strand starting at position 1173 of SEQ ID NO: 1563987
uugcauauuugauagaaac

SEQ ID NO: 1846736 - RNA, 19 nt, Artificial Sequence
  Description of Artificial Sequence: Synthetic oligonucleotide
  Antisense strand to SEQ ID NO: 1846735
guuucuaucaaauaugcaa

SEQ ID NO: 1846737 - RNA, 19 nt, Artificial Sequence
  Description of Artificial Sequence: Synthetic oligonucleotide
  Sense strand starting at position 1226 of SEQ ID NO: 1563987
cccuauaccuguguuauga

SEQ ID NO: 1846738 - RNA, 19 nt, Artificial Sequence
  Description of Artificial Sequence: Synthetic oligonucleotide
  Antisense strand to SEQ ID NO: 1846737
ucauaacacagguauaggg

SEQ ID NO: 1846739 - RNA, 19 nt, Artificial Sequence
  Description of Artificial Sequence: Synthetic oligonucleotide
  Sense strand starting at position 2014 of SEQ ID NO: 1563987
uucuaagaguuccuaggau

SEQ ID NO: 1846740 - RNA, 19 nt, Artificial Sequence
  Description of Artificial Sequence: Synthetic oligonucleotide
  Antisense strand to SEQ ID NO: 1846739
auccuaggaacucuuagaa

SEQ ID NO: 1846741 - RNA, 19 nt, Artificial Sequence
  Description of Artificial Sequence: Synthetic oligonucleotide
  Sense strand starting at position 2026 of SEQ ID NO: 1563987
cuaggauauccuggagcau

SEQ ID NO: 1846742 - RNA, 19 nt, Artificial Sequence
  Description of Artificial Sequence: Synthetic oligonucleotide
  Antisense strand to SEQ ID NO: 1846741
augcuccaggauauccuag

SEQ ID NO: 1846743 - RNA, 19 nt, Artificial Sequence
  Description of Artificial Sequence: Synthetic oligonucleotide
  Sense strand starting at position 2052 of SEQ ID NO: 1563987
caggaacuuuguguaugau

SEQ ID NO: 1846744 - RNA, 19 nt, Artificial Sequence
  Description of Artificial Sequence: Synthetic oligonucleotide
  Antisense strand to SEQ ID NO: 1846743
aucauacacaaaguuccug

SEQ ID NO: 1846745 - RNA, 19 nt, Artificial Sequence
  Description of Artificial Sequence: Synthetic oligonucleotide
  Sense strand starting at position 2055 of SEQ ID NO: 1563987
gaacuuuguguaugauagc

SEQ ID NO: 1846746 - RNA, 19 nt, Artificial Sequence
  Description of Artificial Sequence: Synthetic oligonucleotide
  Antisense strand to SEQ ID NO: 1846745
gcuaucauacacaaaguuc

SEQ ID NO: 1846747 - RNA, 19 nt, Artificial Sequence
  Description of Artificial Sequence: Synthetic oligonucleotide
  Sense strand starting at position 2141 of SEQ ID NO: 1563987
augguuugaacuggaacuu

SEQ ID NO: 1846748 - RNA, 19 nt, Artificial Sequence
  Description of Artificial Sequence: Synthetic oligonucleotide
  Antisense strand to SEQ ID NO: 1846747
aaguuccaguucaaaccau

SEQ ID NO: 1846749 - RNA, 19 nt, Artificial Sequence
  Description of Artificial Sequence: Synthetic oligonucleotide
  Sense strand starting at position 2197 of SEQ ID NO: 1563987
gguacuaagaaguguacaa

SEQ ID NO: 1846750 - RNA, 19 nt, Artificial Sequence
  Description of Artificial Sequence: Synthetic oligonucleotide
  Antisense strand to SEQ ID NO: 1846749
uuguacacuucuuaguacc

SEQ ID NO: 1846751 - RNA, 19 nt, Artificial Sequence
  Description of Artificial Sequence: Synthetic oligonucleotide
  Sense strand starting at position 2234 of SEQ ID NO: 1563987
aaacacaagugcgugaauu

SEQ ID NO: 1846752 - RNA, 19 nt, Artificial Sequence
  Description of Artificial Sequence: Synthetic oligonucleotide
  Antisense strand to SEQ ID NO: 1846751
aauucacgcacuuguguuu

SEQ ID NO: 1846753 - RNA, 19 nt, Artificial Sequence
  Description of Artificial Sequence: Synthetic oligonucleotide
  Sense strand starting at position 2235 of SEQ ID NO: 1563987
aacacaagugcgugaauua

SEQ ID NO: 1846754 - RNA, 19 nt, Artificial Sequence
  Description of Artificial Sequence: Synthetic oligonucleotide
  Antisense strand to SEQ ID NO: 1846753
uaauucacgcacuuguguu

SEQ ID NO: 1846755 - RNA, 19 nt, Artificial Sequence
  Description of Artificial Sequence: Synthetic oligonucleotide
  Sense strand starting at position 2236 of SEQ ID NO: 1563987
acacaagugcgugaauuaa

SEQ ID NO: 1846756 - RNA, 19 nt, Artificial Sequence
  Description of Artificial Sequence: Synthetic oligonucleotide
  Antisense strand to SEQ ID NO: 1846755
uuaauucacgcacuugugu

SEQ ID NO: 1846757 - RNA, 19 nt, Artificial Sequence
  Description of Artificial Sequence: Synthetic oligonucleotide
  Sense strand starting at position 2240 of SEQ ID NO: 1563987
aagugcgugaauuaaguuu

SEQ ID NO: 1846758 - RNA, 19 nt, Artificial Sequence
  Description of Artificial Sequence: Synthetic oligonucleotide
  Antisense strand to SEQ ID NO: 1846757
aaacuuaauucacgcacuu

SEQ ID NO: 1846759 - RNA, 19 nt, Artificial Sequence
  Description of Artificial Sequence: Synthetic oligonucleotide
  Sense strand starting at position 2542 of SEQ ID NO: 1563987
cgaaaccuuguuuguacua

SEQ ID NO: 1846760 - RNA, 19 nt, Artificial Sequence
  Description of Artificial Sequence: Synthetic oligonucleotide
  Antisense strand to SEQ ID NO: 1846759
uaguacaaacaagguuucg

SEQ ID NO: 1846761 - RNA, 19 nt, Artificial Sequence
  Description of Artificial Sequence: Synthetic oligonucleotide
  Sense strand starting at position 2771 of SEQ ID NO: 1563987
ugaugaaugacugggucuu

SEQ ID NO: 1846762 - RNA, 19 nt, Artificial Sequence
  Description of Artificial Sequence: Synthetic oligonucleotide
  Antisense strand to SEQ ID NO: 1846761
aagacccagucauucauca

SEQ ID NO: 1846763 - RNA, 19 nt, Artificial Sequence
  Description of Artificial Sequence: Synthetic oligonucleotide
  Sense strand starting at position 2772 of SEQ ID NO: 1563987
gaugaaugacugggucuuu

SEQ ID NO: 1846764 - RNA, 19 nt, Artificial Sequence
  Description of Artificial Sequence: Synthetic oligonucleotide
  Antisense strand to SEQ ID NO: 1846763
aaagacccagucauucauc

SEQ ID NO: 1846765 - RNA, 19 nt, Artificial Sequence
  Description of Artificial Sequence: Synthetic oligonucleotide
  Sense strand starting at position 2777 of SEQ ID NO: 1563987
augacugggucuuugauau

SEQ ID NO: 1846766 - RNA, 19 nt, Artificial Sequence
  Description of Artificial Sequence: Synthetic oligonucleotide
  Antisense strand to SEQ ID NO: 1846765
auaucaaagacccagucau

SEQ ID NO: 1846767 - RNA, 19 nt, Artificial Sequence
  Description of Artificial Sequence: Synthetic oligonucleotide
  Sense strand starting at position 2909 of SEQ ID NO: 1563987
agauaucguuaacucacaa

SEQ ID NO: 1846768 - RNA, 19 nt, Artificial Sequence
  Description of Artificial Sequence: Synthetic oligonucleotide
  Antisense strand to SEQ ID NO: 1846767
uugugaguuaacgauaucu

SEQ ID NO: 1846769 - RNA, 19 nt, Artificial Sequence
  Description of Artificial Sequence: Synthetic oligonucleotide
  Sense strand starting at position 3051 of SEQ ID NO: 1563987
uggcuuuagaggugacaca

SEQ ID NO: 1846770 - RNA, 19 nt, Artificial Sequence
  Description of Artificial Sequence: Synthetic oligonucleotide
  Antisense strand to SEQ ID NO: 1846769
ugugucaccucuaaagcca

SEQ ID NO: 1846771 - RNA, 19 nt, Artificial Sequence
  Description of Artificial Sequence: Synthetic oligonucleotide
  Sense strand starting at position 3083 of SEQ ID NO: 1563987
ugcugaugagcucaguaua

SEQ ID NO: 1846772 - RNA, 19 nt, Artificial Sequence
  Description of Artificial Sequence: Synthetic oligonucleotide
  Antisense strand to SEQ ID NO: 1846771
uauacugagcucaucagca

SEQ ID NO: 1846773 - RNA, 19 nt, Artificial Sequence
  Description of Artificial Sequence: Synthetic oligonucleotide
  Sense strand starting at position 3086 of SEQ ID NO: 1563987
ugaugagcucaguauaaca

SEQ ID NO: 1846774 - RNA, 19 nt, Artificial Sequence
  Description of Artificial Sequence: Synthetic oligonucleotide
  Antisense strand to SEQ ID NO: 1846773
uguuauacugagcucauca

SEQ ID NO: 1846775 - RNA, 19 nt, Artificial Sequence
  Description of Artificial Sequence: Synthetic oligonucleotide
  Sense strand starting at position 3183 of SEQ ID NO: 1563987
gggcuuauuccauaauaua

SEQ ID NO: 1846776 - RNA, 19 nt, Artificial Sequence
  Description of Artificial Sequence: Synthetic oligonucleotide
  Antisense strand to SEQ ID NO: 1846775
uauauuauggaauaagccc

SEQ ID NO: 1846777 - RNA, 19 nt, Artificial Sequence
  Description of Artificial Sequence: Synthetic oligonucleotide
  Sense strand starting at position 3418 of SEQ ID NO: 1563987
ccaugaguuccacaaaguc

SEQ ID NO: 1846778 - RNA, 19 nt, Artificial Sequence
  Description of Artificial Sequence: Synthetic oligonucleotide
  Antisense strand to SEQ ID NO: 1846777
gacuuuguggaacucaugg

SEQ ID NO: 1846779 - RNA, 19 nt, Artificial Sequence
  Description of Artificial Sequence: Synthetic oligonucleotide
  Sense strand starting at position 3933 of SEQ ID NO: 1563987
ggcagaucacucuaaguca

SEQ ID NO: 1846780 - RNA, 19 nt, Artificial Sequence
  Description of Artificial Sequence: Synthetic oligonucleotide
  Antisense strand to SEQ ID NO: 1846779
ugacuuagagugaucugcc

SEQ ID NO: 1846781 - RNA, 19 nt, Artificial Sequence
  Description of Artificial Sequence: Synthetic oligonucleotide
  Sense strand starting at position 99 of SEQ ID NO: 1563988
cccaaugugcaaugacuaa

SEQ ID NO: 1846782 - RNA, 19 nt, Artificial Sequence
  Description of Artificial Sequence: Synthetic oligonucleotide
  Antisense strand to SEQ ID NO: 1846781
uuagucauugcacauuggg

SEQ ID NO: 1846783 - RNA, 19 nt, Artificial Sequence
  Description of Artificial Sequence: Synthetic oligonucleotide
  Sense strand starting at position 153 of SEQ ID NO: 1563988
gcgcauaucuugguaauuu

SEQ ID NO: 1846784 - RNA, 19 nt, Artificial Sequence
  Description of Artificial Sequence: Synthetic oligonucleotide
  Antisense strand to SEQ ID NO: 1846783
aaauuaccaagauaugcgc

SEQ ID NO: 1846785 - RNA, 19 nt, Artificial Sequence
  Description of Artificial Sequence: Synthetic oligonucleotide
  Sense strand starting at position 274 of SEQ ID NO: 1563988
ucacauuuguggucucuac

SEQ ID NO: 1846786 - RNA, 19 nt, Artificial Sequence
  Description of Artificial Sequence: Synthetic oligonucleotide
  Antisense strand to SEQ ID NO: 1846785
guagagaccacaaauguga

SEQ ID NO: 1846787 - RNA, 19 nt, Artificial Sequence
  Description of Artificial Sequence: Synthetic oligonucleotide
  Sense strand starting at position 285 of SEQ ID NO: 1563988
gucucuacuuaagcagaau

SEQ ID NO: 1846788 - RNA, 19 nt, Artificial Sequence
  Description of Artificial Sequence: Synthetic oligonucleotide
  Antisense strand to SEQ ID NO: 1846787
auucugcuuaaguagagac

SEQ ID NO: 1846789 - RNA, 19 nt, Artificial Sequence
  Description of Artificial Sequence: Synthetic oligonucleotide
  Sense strand starting at position 388 of SEQ ID NO: 1563988
aggccaugcggagaucaaa

SEQ ID NO: 1846790 - RNA, 19 nt, Artificial Sequence
  Description of Artificial Sequence: Synthetic oligonucleotide
  Antisense strand to SEQ ID NO: 1846789
uuugaucuccgcauggccu

SEQ ID NO: 1846791 - RNA, 19 nt, Artificial Sequence
  Description of Artificial Sequence: Synthetic oligonucleotide
  Sense strand starting at position 495 of SEQ ID NO: 1563988
acaauaacagcgugaaaua

SEQ ID NO: 1846792 - RNA, 19 nt, Artificial Sequence
  Description of Artificial Sequence: Synthetic oligonucleotide
  Antisense strand to SEQ ID NO: 1846791
uauuucacgcuguuauugu

SEQ ID NO: 1846793 - RNA, 19 nt, Artificial Sequence
  Description of Artificial Sequence: Synthetic oligonucleotide
  Sense strand starting at position 543 of SEQ ID NO: 1563988
aagcuagauuaguuaagcu

SEQ ID NO: 1846794 - RNA, 19 nt, Artificial Sequence
  Description of Artificial Sequence: Synthetic oligonucleotide
  Antisense strand to SEQ ID NO: 1846793
agcuuaacuaaucuagcuu

SEQ ID NO: 1846795 - RNA, 19 nt, Artificial Sequence
  Description of Artificial Sequence: Synthetic oligonucleotide
  Sense strand starting at position 550 of SEQ ID NO: 1563988
auuaguuaagcugaagcaa

SEQ ID NO: 1846796 - RNA, 19 nt, Artificial Sequence
  Description of Artificial Sequence: Synthetic oligonucleotide
  Antisense strand to SEQ ID NO: 1846795
uugcuucagcuuaacuaau

SEQ ID NO: 1846797 - RNA, 19 nt, Artificial Sequence
  Description of Artificial Sequence: Synthetic oligonucleotide
  Sense strand starting at position 663 of SEQ ID NO: 1563988
ucaucaaugccugguaucu

SEQ ID NO: 1846798 - RNA, 19 nt, Artificial Sequence
  Description of Artificial Sequence: Synthetic oligonucleotide
  Antisense strand to SEQ ID NO: 1846797
agauaccaggcauugauga

SEQ ID NO: 1846799 - RNA, 19 nt, Artificial Sequence
  Description of Artificial Sequence: Synthetic oligonucleotide
  Sense strand starting at position 722 of SEQ ID NO: 1563988
acugcaguuccggaagauu

SEQ ID NO: 1846800 - RNA, 19 nt, Artificial Sequence
  Description of Artificial Sequence: Synthetic oligonucleotide
  Antisense strand to SEQ ID NO: 1846799
aaucuuccggaacugcagu

SEQ ID NO: 1846801 - RNA, 19 nt, Artificial Sequence
  Description of Artificial Sequence: Synthetic oligonucleotide
  Sense strand starting at position 725 of SEQ ID NO: 1563988
gcaguuccggaagauuaaa

SEQ ID NO: 1846802 - RNA, 19 nt, Artificial Sequence
  Description of Artificial Sequence: Synthetic oligonucleotide
  Antisense strand to SEQ ID NO: 1846801
uuuaaucuuccggaacugc

SEQ ID NO: 1846803 - RNA, 19 nt, Artificial Sequence
  Description of Artificial Sequence: Synthetic oligonucleotide
  Sense strand starting at position 753 of SEQ ID NO: 1563988
gcgaaagcaagcugaaaua

SEQ ID NO: 1846804 - RNA, 19 nt, Artificial Sequence
  Description of Artificial Sequence: Synthetic oligonucleotide
  Antisense strand to SEQ ID NO: 1846803
uauuucagcuugcuuucgc

SEQ ID NO: 1846805 - RNA, 19 nt, Artificial Sequence
  Description of Artificial Sequence: Synthetic oligonucleotide
  Sense strand starting at position 877 of SEQ ID NO: 1563988
ccugaauuugguugcacga

SEQ ID NO: 1846806 - RNA, 19 nt, Artificial Sequence
  Description of Artificial Sequence: Synthetic oligonucleotide
  Antisense strand to SEQ ID NO: 1846805
ucgugcaaccaaauucagg

SEQ ID NO: 1846807 - RNA, 19 nt, Artificial Sequence
  Description of Artificial Sequence: Synthetic oligonucleotide
  Sense strand starting at position 884 of SEQ ID NO: 1563988
uugguugcacgauauuauu

SEQ ID NO: 1846808 - RNA, 19 nt, Artificial Sequence
  Description of Artificial Sequence: Synthetic oligonucleotide
  Antisense strand to SEQ ID NO: 1846807
aauaauaucgugcaaccaa

SEQ ID NO: 1846809 - RNA, 19 nt, Artificial Sequence
  Description of Artificial Sequence: Synthetic oligonucleotide
  Sense strand starting at position 1008 of SEQ ID NO: 1563988
accugacauuagguaguaa

SEQ ID NO: 1846810 - RNA, 19 nt, Artificial Sequence
  Description of Artificial Sequence: Synthetic oligonucleotide
  Antisense strand to SEQ ID NO: 1846809
uuacuaccuaaugucaggu

SEQ ID NO: 1846811 - RNA, 19 nt, Artificial Sequence
  Description of Artificial Sequence: Synthetic oligonucleotide
  Sense strand starting at position 1107 of SEQ ID NO: 1563988
aaagaauaccgugguguuc

SEQ ID NO: 1846812 - RNA, 19 nt, Artificial Sequence
  Description of Artificial Sequence: Synthetic oligonucleotide
  Antisense strand to SEQ ID NO: 1846811
gaacaccacgguauucuuu

SEQ ID NO: 1846813 - RNA, 19 nt, Artificial Sequence
  Description of Artificial Sequence: Synthetic oligonucleotide
  Sense strand starting at position 1160 of SEQ ID NO: 1563988
cggauccucuccguuauuu

SEQ ID NO: 1846814 - RNA, 19 nt, Artificial Sequence
  Description of Artificial Sequence: Synthetic oligonucleotide
  Antisense strand to SEQ ID NO: 1846813
aaauaacggagaggauccg

SEQ ID NO: 1846815 - RNA, 19 nt, Artificial Sequence
  Description of Artificial Sequence: Synthetic oligonucleotide
  Sense strand starting at position 1267 of SEQ ID NO: 1563988
gguuccuuuccgucguaaa

SEQ ID NO: 1846816 - RNA, 19 nt, Artificial Sequence
  Description of Artificial Sequence: Synthetic oligonucleotide
  Antisense strand to SEQ ID NO: 1846815
uuuacgacggaaaggaacc

SEQ ID NO: 1846817 - RNA, 19 nt, Artificial Sequence
  Description of Artificial Sequence: Synthetic oligonucleotide
  Sense strand starting at position 1269 of SEQ ID NO: 1563988
uuccuuuccgucguaaagu

SEQ ID NO: 1846818 - RNA, 19 nt, Artificial Sequence
  Description of Artificial Sequence: Synthetic oligonucleotide
  Antisense strand to SEQ ID NO: 1846817
acuuuacgacggaaaggaa

SEQ ID NO: 1846819 - RNA, 19 nt, Artificial Sequence
  Description of Artificial Sequence: Synthetic oligonucleotide
  Sense strand starting at position 1543 of SEQ ID NO: 1563988
uguucuaagcaauggcaaa

SEQ ID NO: 1846820 - RNA, 19 nt, Artificial Sequence
  Description of Artificial Sequence: Synthetic oligonucleotide
  Antisense strand to SEQ ID NO: 1846819
uuugccauugcuuagaaca

SEQ ID NO: 1846821 - RNA, 19 nt, Artificial Sequence
  Description of Artificial Sequence: Synthetic oligonucleotide
  Sense strand starting at position 2460 of SEQ ID NO: 1563988
gacugagaagcuuguagug

SEQ ID NO: 1846822 - RNA, 19 nt, Artificial Sequence
  Description of Artificial Sequence: Synthetic oligonucleotide
  Antisense strand to SEQ ID NO: 1846821
cacuacaagcuucucaguc

SEQ ID NO: 1846823 - RNA, 19 nt, Artificial Sequence
  Description of Artificial Sequence: Synthetic oligonucleotide
  Sense strand starting at position 2624 of SEQ ID NO: 1563988
auuagcaucccuggcauau

SEQ ID NO: 1846824 - RNA, 19 nt, Artificial Sequence
  Description of Artificial Sequence: Synthetic oligonucleotide
  Antisense strand to SEQ ID NO: 1846823
auaugccagggaugcuaau

SEQ ID NO: 1846825 - RNA, 19 nt, Artificial Sequence
  Description of Artificial Sequence: Synthetic oligonucleotide
  Sense strand starting at position 2761 of SEQ ID NO: 1563988
agccaugcuuggguuugaa

SEQ ID NO: 1846826 - RNA, 19 nt, Artificial Sequence
  Description of Artificial Sequence: Synthetic oligonucleotide
  Antisense strand to SEQ ID NO: 1846825
uucaaacccaagcauggcu

SEQ ID NO: 1846827 - RNA, 19 nt, Artificial Sequence
  Description of Artificial Sequence: Synthetic oligonucleotide
  Sense strand starting at position 2869 of SEQ ID NO: 1563988
auaauaguauucgucucaa

SEQ ID NO: 1846828 - RNA, 19 nt, Artificial Sequence
  Description of Artificial Sequence: Synthetic oligonucleotide
  Antisense strand to SEQ ID NO: 1846827
uugagacgaauacuauuau

SEQ ID NO: 1846829 - RNA, 19 nt, Artificial Sequence
  Description of Artificial Sequence: Synthetic oligonucleotide
  Sense strand starting at position 3077 of SEQ ID NO: 1563988
gguggauuuccacggucuu

SEQ ID NO: 1846830 - RNA, 19 nt, Artificial Sequence
  Description of Artificial Sequence: Synthetic oligonucleotide
  Antisense strand to SEQ ID NO: 1846829
aagaccguggaaauccacc

SEQ ID NO: 1846831 - RNA, 19 nt, Artificial Sequence
  Description of Artificial Sequence: Synthetic oligonucleotide
  Sense strand starting at position 3160 of SEQ ID NO: 1563988
aaguguaaguucccaagca

SEQ ID NO: 1846832 - RNA, 19 nt, Artificial Sequence
  Description of Artificial Sequence: Synthetic oligonucleotide
  Antisense strand to SEQ ID NO: 1846831
ugcuugggaacuuacacuu

SEQ ID NO: 1846833 - RNA, 19 nt, Artificial Sequence
  Description of Artificial Sequence: Synthetic oligonucleotide
  Sense strand starting at position 3308 of SEQ ID NO: 1563988
gcuaaagauuugcauaaga

SEQ ID NO: 1846834 - RNA, 19 nt, Artificial Sequence
  Description of Artificial Sequence: Synthetic oligonucleotide
  Antisense strand to SEQ ID NO: 1846833
ucuuaugcaaaucuuuagc

SEQ ID NO: 1846835 - RNA, 19 nt, Artificial Sequence
  Description of Artificial Sequence: Synthetic oligonucleotide
  Sense strand starting at position 3313 of SEQ ID NO: 1563988
agauuugcauaagaagauc

SEQ ID NO: 1846836 - RNA, 19 nt, Artificial Sequence
  Description of Artificial Sequence: Synthetic oligonucleotide
  Antisense strand to SEQ ID NO: 1846835
gaucuucuuaugcaaaucu

SEQ ID NO: 1846837 - RNA, 19 nt, Artificial Sequence
  Description of Artificial Sequence: Synthetic oligonucleotide
  Sense strand starting at position 3325 of SEQ ID NO: 1563988
gaagauccagaauguguau

SEQ ID NO: 1846838 - RNA, 19 nt, Artificial Sequence
  Description of Artificial Sequence: Synthetic oligonucleotide
  Antisense strand to SEQ ID NO: 1846837
auacacauucuggaucuuc

SEQ ID NO: 1846839 - RNA, 19 nt, Artificial Sequence
  Description of Artificial Sequence: Synthetic oligonucleotide
  Sense strand starting at position 3357 of SEQ ID NO: 1563988
gguguauaugaagacaggu

SEQ ID NO: 1846840 - RNA, 19 nt, Artificial Sequence
  Description of Artificial Sequence: Synthetic oligonucleotide
  Antisense strand to SEQ ID NO: 1846839
accugucuucauauacacc

SEQ ID NO: 1846841 - RNA, 19 nt, Artificial Sequence
  Description of Artificial Sequence: Synthetic oligonucleotide
  Sense strand starting at position 3424 of SEQ ID NO: 1563988
ugagacagaugauugugua

SEQ ID NO: 1846842 - RNA, 19 nt, Artificial Sequence
  Description of Artificial Sequence: Synthetic oligonucleotide
  Antisense strand to SEQ ID NO: 1846841
uacacaaucaucugucuca

SEQ ID NO: 1846843 - RNA, 19 nt, Artificial Sequence
  Description of Artificial Sequence: Synthetic oligonucleotide
  Sense strand starting at position 3425 of SEQ ID NO: 1563988
gagacagaugauuguguaa

SEQ ID NO: 1846844 - RNA, 19 nt, Artificial Sequence
  Description of Artificial Sequence: Synthetic oligonucleotide
  Antisense strand to SEQ ID NO: 1846843
uuacacaaucaucugucuc

SEQ ID NO: 1846845 - RNA, 19 nt, Artificial Sequence
  Description of Artificial Sequence: Synthetic oligonucleotide
  Sense strand starting at position 3432 of SEQ ID NO: 1563988
augauuguguaacugacaa

SEQ ID NO: 1846846 - RNA, 19 nt, Artificial Sequence
  Description of Artificial Sequence: Synthetic oligonucleotide
  Antisense strand to SEQ ID NO: 1846845
uugucaguuacacaaucau

SEQ ID NO: 1846847 - RNA, 19 nt, Artificial Sequence
  Description of Artificial Sequence: Synthetic oligonucleotide
  Sense strand starting at position 3634 of SEQ ID NO: 1563988
ccuugagcucauggucaaa

SEQ ID NO: 1846848 - RNA, 19 nt, Artificial Sequence
  Description of Artificial Sequence: Synthetic oligonucleotide
  Antisense strand to SEQ ID NO: 1846847
uuugaccaugagcucaagg

SEQ ID NO: 1846849 - RNA, 19 nt, Artificial Sequence
  Description of Artificial Sequence: Synthetic oligonucleotide
  Sense strand starting at position 3684 of SEQ ID NO: 1563988
ugaugugauaaaugcugua

SEQ ID NO: 1846850 - RNA, 19 nt, Artificial Sequence
  Description of Artificial Sequence: Synthetic oligonucleotide
  Antisense strand to SEQ ID NO: 1846849
uacagcauuuaucacauca

SEQ ID NO: 1846851 - RNA, 19 nt, Artificial Sequence
  Description of Artificial Sequence: Synthetic oligonucleotide
  Sense strand starting at position 3689 of SEQ ID NO: 1563988
ugauaaaugcuguauuaca

SEQ ID NO: 1846852 - RNA, 19 nt, Artificial Sequence
  Description of Artificial Sequence: Synthetic oligonucleotide
  Antisense strand to SEQ ID NO: 1846851
uguaauacagcauuuauca

SEQ ID NO: 1846853 - RNA, 19 nt, Artificial Sequence
  Description of Artificial Sequence: Synthetic oligonucleotide
  Sense strand starting at position 3734 of SEQ ID NO: 1563988
gccuauuauguacaaagca

SEQ ID NO: 1846854 - RNA, 19 nt, Artificial Sequence
  Description of Artificial Sequence: Synthetic oligonucleotide
  Antisense strand to SEQ ID NO: 1846853
ugcuuuguacauaauaggc

SEQ ID NO: 1846855 - RNA, 19 nt, Artificial Sequence
  Description of Artificial Sequence: Synthetic oligonucleotide
  Sense strand starting at position 3830 of SEQ ID NO: 1563988
uaguuacaauaggagauaa

SEQ ID NO: 1846856 - RNA, 19 nt, Artificial Sequence
  Description of Artificial Sequence: Synthetic oligonucleotide
  Antisense strand to SEQ ID NO: 1846855
uuaucuccuauuguaacua

SEQ ID NO: 1846857 - RNA, 19 nt, Artificial Sequence
  Description of Artificial Sequence: Synthetic oligonucleotide
  Sense strand starting at position 3904 of SEQ ID NO: 1563988
ggagauaucaguggcucca

SEQ ID NO: 1846858 - RNA, 19 nt, Artificial Sequence
  Description of Artificial Sequence: Synthetic oligonucleotide
  Antisense strand to SEQ ID NO: 1846857
uggagccacugauaucucc

SEQ ID NO: 1846859 - RNA, 19 nt, Artificial Sequence
  Description of Artificial Sequence: Synthetic oligonucleotide
  Sense strand starting at position 3959 of SEQ ID NO: 1563988
auuagcauggcugauagau

SEQ ID NO: 1846860 - RNA, 19 nt, Artificial Sequence
  Description of Artificial Sequence: Synthetic oligonucleotide
  Antisense strand to SEQ ID NO: 1846859
aucuaucagccaugcuaau

SEQ ID NO: 1846861 - RNA, 19 nt, Artificial Sequence
  Description of Artificial Sequence: Synthetic oligonucleotide
  Sense strand starting at position 241 of SEQ ID NO: 1563989
ggucguguucggagaguuu

SEQ ID NO: 1846862 - RNA, 19 nt, Artificial Sequence
  Description of Artificial Sequence: Synthetic oligonucleotide
  Antisense strand to SEQ ID NO: 1846861
aaacucuccgaacacgacc

SEQ ID NO: 1846863 - RNA, 19 nt, Artificial Sequence
  Description of Artificial Sequence: Synthetic oligonucleotide
  Sense strand starting at position 242 of SEQ ID NO: 1563989
gucguguucggagaguuua

SEQ ID NO: 1846864 - RNA, 19 nt, Artificial Sequence
  Description of Artificial Sequence: Synthetic oligonucleotide
  Antisense strand to SEQ ID NO: 1846863
uaaacucuccgaacacgac

SEQ ID NO: 1846865 - RNA, 19 nt, Artificial Sequence
  Description of Artificial Sequence: Synthetic oligonucleotide
  Sense strand starting at position 243 of SEQ ID NO: 1563989
ucguguucggagaguuuaa

SEQ ID NO: 1846866 - RNA, 19 nt, Artificial Sequence
  Description of Artificial Sequence: Synthetic oligonucleotide
  Antisense strand to SEQ ID NO: 1846865
uuaaacucuccgaacacga

SEQ ID NO: 1846867 - RNA, 19 nt, Artificial Sequence
  Description of Artificial Sequence: Synthetic oligonucleotide
  Sense strand starting at position 359 of SEQ ID NO: 1563989
cagcucguucuguacuuua

SEQ ID NO: 1846868 - RNA, 19 nt, Artificial Sequence
  Description of Artificial Sequence: Synthetic oligonucleotide
  Antisense strand to SEQ ID NO: 1846867
uaaaguacagaacgagcug

SEQ ID NO: 1846869 - RNA, 19 nt, Artificial Sequence
  Description of Artificial Sequence: Synthetic oligonucleotide
  Sense strand starting at position 362 of SEQ ID NO: 1563989
cucguucuguacuuuaaag

SEQ ID NO: 1846870 - RNA, 19 nt, Artificial Sequence
  Description of Artificial Sequence: Synthetic oligonucleotide
  Antisense strand to SEQ ID NO: 1846869
cuuuaaaguacagaacgag

SEQ ID NO: 1846871 - RNA, 19 nt, Artificial Sequence
  Description of Artificial Sequence: Synthetic oligonucleotide
  Sense strand starting at position 364 of SEQ ID NO: 1563989
cguucuguacuuuaaagau

SEQ ID NO: 1846872 - RNA, 19 nt, Artificial Sequence
  Description of Artificial Sequence: Synthetic oligonucleotide
  Antisense strand to SEQ ID NO: 1846871
aucuuuaaaguacagaacg

SEQ ID NO: 1846873 - RNA, 19 nt, Artificial Sequence
  Description of Artificial Sequence: Synthetic oligonucleotide
  Sense strand starting at position 853 of SEQ ID NO: 1563989
cgucgaauucugggauagu

SEQ ID NO: 1846874 - RNA, 19 nt, Artificial Sequence
  Description of Artificial Sequence: Synthetic oligonucleotide
  Antisense strand to SEQ ID NO: 1846873
acuaucccagaauucgacg

SEQ ID NO: 1846875 - RNA, 19 nt, Artificial Sequence
  Description of Artificial Sequence: Synthetic oligonucleotide
  Sense strand starting at position 1077 of SEQ ID NO: 1563989
ggagauacucgcgagcaaa

SEQ ID NO: 1846876 - RNA, 19 nt, Artificial Sequence
  Description of Artificial Sequence: Synthetic oligonucleotide
  Antisense strand to SEQ ID NO: 1846875
uuugcucgcgaguaucucc

SEQ ID NO: 1846877 - RNA, 19 nt, Artificial Sequence
  Description of Artificial Sequence: Synthetic oligonucleotide
  Sense strand starting at position 1180 of SEQ ID NO: 1563989
ggcaauucggaguagucaa

SEQ ID NO: 1846878 - RNA, 19 nt, Artificial Sequence
  Description of Artificial Sequence: Synthetic oligonucleotide
  Antisense strand to SEQ ID NO: 1846877
uugacuacuccgaauugcc

SEQ ID NO: 1846879 - RNA, 19 nt, Artificial Sequence
  Description of Artificial Sequence: Synthetic oligonucleotide
  Sense strand starting at position 1187 of SEQ ID NO: 1563989
cggaguagucaauaaaguu

SEQ ID NO: 1846880 - RNA, 19 nt, Artificial Sequence
  Description of Artificial Sequence: Synthetic oligonucleotide
  Antisense strand to SEQ ID NO: 1846879
aacuuuauugacuacuccg

SEQ ID NO: 1846881 - RNA, 19 nt, Artificial Sequence
  Description of Artificial Sequence: Synthetic oligonucleotide
  Sense strand starting at position 1467 of SEQ ID NO: 1563989
gcccaaucgccgcugaaga

SEQ ID NO: 1846882 - RNA, 19 nt, Artificial Sequence
  Description of Artificial Sequence: Synthetic oligonucleotide
  Antisense strand to SEQ ID NO: 1846881
ucuucagcggcgauugggc

SEQ ID NO: 1846883 - RNA, 19 nt, Artificial Sequence
  Description of Artificial Sequence: Synthetic oligonucleotide
  Sense strand starting at position 1501 of SEQ ID NO: 1563989
cggagaagccgccaucuua

SEQ ID NO: 1846884 - RNA, 19 nt, Artificial Sequence
  Description of Artificial Sequence: Synthetic oligonucleotide
  Antisense strand to SEQ ID NO: 1846883
uaagauggcggcuucuccg

SEQ ID NO: 1846885 - RNA, 19 nt, Artificial Sequence
  Description of Artificial Sequence: Synthetic oligonucleotide
  Sense strand starting at position 1818 of SEQ ID NO: 1563989
gaaggaagcucugugauua

SEQ ID NO: 1846886 - RNA, 19 nt, Artificial Sequence
  Description of Artificial Sequence: Synthetic oligonucleotide
  Antisense strand to SEQ ID NO: 1846885
uaaucacagagcuuccuuc

SEQ ID NO: 1846887 - RNA, 19 nt, Artificial Sequence
  Description of Artificial Sequence: Synthetic oligonucleotide
  Sense strand starting at position 1819 of SEQ ID NO: 1563989
aaggaagcucugugauuau

SEQ ID NO: 1846888 - RNA, 19 nt, Artificial Sequence
  Description of Artificial Sequence: Synthetic oligonucleotide
  Antisense strand to SEQ ID NO: 1846887
auaaucacagagcuuccuu

SEQ ID NO: 1846889 - RNA, 19 nt, Artificial Sequence
  Description of Artificial Sequence: Synthetic oligonucleotide
  Sense strand starting at position 1822 of SEQ ID NO: 1563989
gaagcucugugauuaucac

SEQ ID NO: 1846890 - RNA, 19 nt, Artificial Sequence
  Description of Artificial Sequence: Synthetic oligonucleotide
  Antisense strand to SEQ ID NO: 1846889
gugauaaucacagagcuuc

SEQ ID NO: 1846891 - RNA, 19 nt, Artificial Sequence
  Description of Artificial Sequence: Synthetic oligonucleotide
  Sense strand starting at position 1828 of SEQ ID NO: 1563989
cugugauuaucaccaaaug

SEQ ID NO: 1846892 - RNA, 19 nt, Artificial Sequence
  Description of Artificial Sequence: Synthetic oligonucleotide
  Antisense strand to SEQ ID NO: 1846891
cauuuggugauaaucacag

SEQ ID NO: 1846893 - RNA, 19 nt, Artificial Sequence
  Description of Artificial Sequence: Synthetic oligonucleotide
  Sense strand starting at position 1946 of SEQ ID NO: 1563989
guaguuccucuguaaagcu

SEQ ID NO: 1846894 - RNA, 19 nt, Artificial Sequence
  Description of Artificial Sequence: Synthetic oligonucleotide
  Antisense strand to SEQ ID NO: 1846893
agcuuuacagaggaacuac

SEQ ID NO: 1846895 - RNA, 19 nt, Artificial Sequence
  Description of Artificial Sequence: Synthetic oligonucleotide
  Sense strand starting at position 2114 of SEQ ID NO: 1563989
ggcugaguuaguggagcuu

SEQ ID NO: 1846896 - RNA, 19 nt, Artificial Sequence
  Description of Artificial Sequence: Synthetic oligonucleotide
  Antisense strand to SEQ ID NO: 1846895
aagcuccacuaacucagcc

SEQ ID NO: 1846897 - RNA, 19 nt, Artificial Sequence
  Description of Artificial Sequence: Synthetic oligonucleotide
  Sense strand starting at position 2237 of SEQ ID NO: 1563989
agggucccauugcuuuaaa

SEQ ID NO: 1846898 - RNA, 19 nt, Artificial Sequence
  Description of Artificial Sequence: Synthetic oligonucleotide
  Antisense strand to SEQ ID NO: 1846897
uuuaaagcaaugggacccu

SEQ ID NO: 1846899 - RNA, 19 nt, Artificial Sequence
  Description of Artificial Sequence: Synthetic oligonucleotide
  Sense strand starting at position 2280 of SEQ ID NO: 1563989
uuuacuaaccagugauggu

SEQ ID NO: 1846900 - RNA, 19 nt, Artificial Sequence
  Description of Artificial Sequence: Synthetic oligonucleotide
  Antisense strand to SEQ ID NO: 1846899
accaucacugguuaguaaa

SEQ ID NO: 1846901 - RNA, 19 nt, Artificial Sequence
  Description of Artificial Sequence: Synthetic oligonucleotide
  Sense strand starting at position 2371 of SEQ ID NO: 1563989
caaaguugcgaguaaacaa

SEQ ID NO: 1846902 - RNA, 19 nt, Artificial Sequence
  Description of Artificial Sequence: Synthetic oligonucleotide
  Antisense strand to SEQ ID NO: 1846901
uuguuuacucgcaacuuug

SEQ ID NO: 1846903 - RNA, 19 nt, Artificial Sequence
  Description of Artificial Sequence: Synthetic oligonucleotide
  Sense strand starting at position 2379 of SEQ ID NO: 1563989
cgaguaaacaauuggaaua

SEQ ID NO: 1846904 - RNA, 19 nt, Artificial Sequence
  Description of Artificial Sequence: Synthetic oligonucleotide
  Antisense strand to SEQ ID NO: 1846903
uauuccaauuguuuacucg

SEQ ID NO: 1846905 - RNA, 19 nt, Artificial Sequence
  Description of Artificial Sequence: Synthetic oligonucleotide
  Sense strand starting at position 2567 of SEQ ID NO: 1563989
aggaucaacguguacaaau

SEQ ID NO: 1846906 - RNA, 19 nt, Artificial Sequence
  Description of Artificial Sequence: Synthetic oligonucleotide
  Antisense strand to SEQ ID NO: 1846905
auuuguacacguugauccu

SEQ ID NO: 1846907 - RNA, 19 nt, Artificial Sequence
  Description of Artificial Sequence: Synthetic oligonucleotide
  Sense strand starting at position 2613 of SEQ ID NO: 1563989
cuagaaguugaauauuguu

SEQ ID NO: 1846908 - RNA, 19 nt, Artificial Sequence
  Description of Artificial Sequence: Synthetic oligonucleotide
  Antisense strand to SEQ ID NO: 1846907
aacaauauucaacuucuag

SEQ ID NO: 1846909 - RNA, 19 nt, Artificial Sequence
  Description of Artificial Sequence: Synthetic oligonucleotide
  Sense strand starting at position 2618 of SEQ ID NO: 1563989
aguugaauauuguuggaac

SEQ ID NO: 1846910 - RNA, 19 nt, Artificial Sequence
  Description of Artificial Sequence: Synthetic oligonucleotide
  Antisense strand to SEQ ID NO: 1846909
guuccaacaauauucaacu

SEQ ID NO: 1846911 - RNA, 19 nt, Artificial Sequence
  Description of Artificial Sequence: Synthetic oligonucleotide
  Sense strand starting at position 2620 of SEQ ID NO: 1563989
uugaauauuguuggaacaa

SEQ ID NO: 1846912 - RNA, 19 nt, Artificial Sequence
  Description of Artificial Sequence: Synthetic oligonucleotide
  Antisense strand to SEQ ID NO: 1846911
uuguuccaacaauauucaa

SEQ ID NO: 1846913 - RNA, 19 nt, Artificial Sequence
  Description of Artificial Sequence: Synthetic oligonucleotide
  Sense strand starting at position 2621 of SEQ ID NO: 1563989
ugaauauuguuggaacaag

SEQ ID NO: 1846914 - RNA, 19 nt, Artificial Sequence
  Description of Artificial Sequence: Synthetic oligonucleotide
  Antisense strand to SEQ ID NO: 1846913
cuuguuccaacaauauuca

SEQ ID NO: 1846915 - RNA, 19 nt, Artificial Sequence
  Description of Artificial Sequence: Synthetic oligonucleotide
  Sense strand starting at position 2715 of SEQ ID NO: 1563989
uuuagauuguaugcaguua

SEQ ID NO: 1846916 - RNA, 19 nt, Artificial Sequence
  Description of Artificial Sequence: Synthetic oligonucleotide
  Antisense strand to SEQ ID NO: 1846915
uaacugcauacaaucuaaa

SEQ ID NO: 1846917 - RNA, 19 nt, Artificial Sequence
  Description of Artificial Sequence: Synthetic oligonucleotide
  Sense strand starting at position 2795 of SEQ ID NO: 1563989
agaggaugguuuaggguuu

SEQ ID NO: 1846918 - RNA, 19 nt, Artificial Sequence
  Description of Artificial Sequence: Synthetic oligonucleotide
  Antisense strand to SEQ ID NO: 1846917
aaacccuaaaccauccucu

SEQ ID NO: 1846919 - RNA, 19 nt, Artificial Sequence
  Description of Artificial Sequence: Synthetic oligonucleotide
  Sense strand starting at position 2929 of SEQ ID NO: 1563989
gagccucaugaguaacuga

SEQ ID NO: 1846920 - RNA, 19 nt, Artificial Sequence
  Description of Artificial Sequence: Synthetic oligonucleotide
  Antisense strand to SEQ ID NO: 1846919
ucaguuacucaugaggcuc

SEQ ID NO: 1846921 - RNA, 19 nt, Artificial Sequence
  Description of Artificial Sequence: Synthetic oligonucleotide
  Sense strand starting at position 2936 of SEQ ID NO: 1563989
augaguaacugagacuaua

SEQ ID NO: 1846922 - RNA, 19 nt, Artificial Sequence
  Description of Artificial Sequence: Synthetic oligonucleotide
  Antisense strand to SEQ ID NO: 1846921
uauagucucaguuacucau

SEQ ID NO: 1846923 - RNA, 19 nt, Artificial Sequence
  Description of Artificial Sequence: Synthetic oligonucleotide
  Sense strand starting at position 3088 of SEQ ID NO: 1563989
cugaaagguccagguuuaa

SEQ ID NO: 1846924 - RNA, 19 nt, Artificial Sequence
  Description of Artificial Sequence: Synthetic oligonucleotide
  Antisense strand to SEQ ID NO: 1846923
uuaaaccuggaccuuucag

SEQ ID NO: 1846925 - RNA, 19 nt, Artificial Sequence
  Description of Artificial Sequence: Synthetic oligonucleotide
  Sense strand starting at position 3143 of SEQ ID NO: 1563989
gugagacgucuuuaagaaa

SEQ ID NO: 1846926 - RNA, 19 nt, Artificial Sequence
  Description of Artificial Sequence: Synthetic oligonucleotide
  Antisense strand to SEQ ID NO: 1846925
uuucuuaaagacgucucac

SEQ ID NO: 1846927 - RNA, 19 nt, Artificial Sequence
  Description of Artificial Sequence: Synthetic oligonucleotide
  Sense strand starting at position 3487 of SEQ ID NO: 1563989
aaagguaggcaguaagagu

SEQ ID NO: 1846928 - RNA, 19 nt, Artificial Sequence
  Description of Artificial Sequence: Synthetic oligonucleotide
  Antisense strand to SEQ ID NO: 1846927
acucuuacugccuaccuuu

SEQ ID NO: 1846929 - RNA, 19 nt, Artificial Sequence
  Description of Artificial Sequence: Synthetic oligonucleotide
  Sense strand starting at position 3532 of SEQ ID NO: 1563989
gguaauaauuacgaagaga

SEQ ID NO: 1846930 - RNA, 19 nt, Artificial Sequence
  Description of Artificial Sequence: Synthetic oligonucleotide
  Antisense strand to SEQ ID NO: 1846929
ucucuucguaauuauuacc

SEQ ID NO: 1846931 - RNA, 19 nt, Artificial Sequence
  Description of Artificial Sequence: Synthetic oligonucleotide
  Sense strand starting at position 3592 of SEQ ID NO: 1563989
cagauugcaugucuguaau

SEQ ID NO: 1846932 - RNA, 19 nt, Artificial Sequence
  Description of Artificial Sequence: Synthetic oligonucleotide
  Antisense strand to SEQ ID NO: 1846931
auuacagacaugcaaucug

SEQ ID NO: 1846933 - RNA, 19 nt, Artificial Sequence
  Description of Artificial Sequence: Synthetic oligonucleotide
  Sense strand starting at position 3820 of SEQ ID NO: 1563989
accuaaugcaagggaaagu

SEQ ID NO: 1846934 - RNA, 19 nt, Artificial Sequence
  Description of Artificial Sequence: Synthetic oligonucleotide
  Antisense strand to SEQ ID NO: 1846933
acuuucccuugcauuaggu

SEQ ID NO: 1846935 - RNA, 19 nt, Artificial Sequence
  Description of Artificial Sequence: Synthetic oligonucleotide
  Sense strand starting at position 3876 of SEQ ID NO: 1563989
accaauuguuguuuaaaug

SEQ ID NO: 1846936 - RNA, 19 nt, Artificial Sequence
  Description of Artificial Sequence: Synthetic oligonucleotide
  Antisense strand to SEQ ID NO: 1846935
cauuuaaacaacaauuggu

SEQ ID NO: 1846937 - RNA, 19 nt, Artificial Sequence
  Description of Artificial Sequence: Synthetic oligonucleotide
  Sense strand starting at position 3877 of SEQ ID NO: 1563989
ccaauuguuguuuaaaugu

SEQ ID NO: 1846938 - RNA, 19 nt, Artificial Sequence
  Description of Artificial Sequence: Synthetic oligonucleotide
  Antisense strand to SEQ ID NO: 1846937
acauuuaaacaacaauugg

SEQ ID NO: 1846939 - RNA, 19 nt, Artificial Sequence
  Description of Artificial Sequence: Synthetic oligonucleotide
  Sense strand starting at position 3956 of SEQ ID NO: 1563989
aguuuaagaugucuuagcu

SEQ ID NO: 1846940 - RNA, 19 nt, Artificial Sequence
  Description of Artificial Sequence: Synthetic oligonucleotide
  Antisense strand to SEQ ID NO: 1846939
agcuaagacaucuuaaacu

SEQ ID NO: 1846941 - RNA, 19 nt, Artificial Sequence
  Description of Artificial Sequence: Synthetic oligonucleotide
  Sense strand starting at position 175 of SEQ ID NO: 1563990
gauucuuuguaacaggaaa

SEQ ID NO: 1846942 - RNA, 19 nt, Artificial Sequence
  Description of Artificial Sequence: Synthetic oligonucleotide
  Antisense strand to SEQ ID NO: 1846941
uuuccuguuacaaagaauc

SEQ ID NO: 1846943 - RNA, 19 nt, Artificial Sequence
  Description of Artificial Sequence: Synthetic oligonucleotide
  Sense strand starting at position 292 of SEQ ID NO: 1563990
aggcuaaugucagcuaggu

SEQ ID NO: 1846944 - RNA, 19 nt, Artificial Sequence
  Description of Artificial Sequence: Synthetic oligonucleotide
  Antisense strand to SEQ ID NO: 1846943
accuagcugacauuagccu

SEQ ID NO: 1846945 - RNA, 19 nt, Artificial Sequence
  Description of Artificial Sequence: Synthetic oligonucleotide
  Sense strand starting at position 311 of SEQ ID NO: 1563990
ccuguucugcaaggagaga

SEQ ID NO: 1846946 - RNA, 19 nt, Artificial Sequence
  Description of Artificial Sequence: Synthetic oligonucleotide
  Antisense strand to SEQ ID NO: 1846945
ucucuccuugcagaacagg

SEQ ID NO: 1846947 - RNA, 19 nt, Artificial Sequence
  Description of Artificial Sequence: Synthetic oligonucleotide
  Sense strand starting at position 312 of SEQ ID NO: 1563990
cuguucugcaaggagagau

SEQ ID NO: 1846948 - RNA, 19 nt, Artificial Sequence
  Description of Artificial Sequence: Synthetic oligonucleotide
  Antisense strand to SEQ ID NO: 1846947
aucucuccuugcagaacag

SEQ ID NO: 1846949 - RNA, 19 nt, Artificial Sequence
  Description of Artificial Sequence: Synthetic oligonucleotide
  Sense strand starting at position 356 of SEQ ID NO: 1563990
gguccugagccggaaucua

SEQ ID NO: 1846950 - RNA, 19 nt, Artificial Sequence
  Description of Artificial Sequence: Synthetic oligonucleotide
  Antisense strand to SEQ ID NO: 1846949
uagauuccggcucaggacc

SEQ ID NO: 1846951 - RNA, 19 nt, Artificial Sequence
  Description of Artificial Sequence: Synthetic oligonucleotide
  Sense strand starting at position 627 of SEQ ID NO: 1563990
gcguccucucuggacgaua

SEQ ID NO: 1846952 - RNA, 19 nt, Artificial Sequence
  Description of Artificial Sequence: Synthetic oligonucleotide
  Antisense strand to SEQ ID NO: 1846951
uaucguccagagaggacgc

SEQ ID NO: 1846953 - RNA, 19 nt, Artificial Sequence
  Description of Artificial Sequence: Synthetic oligonucleotide
  Sense strand starting at position 638 of SEQ ID NO: 1563990
ggacgauagcuaggcacaa

SEQ ID NO: 1846954 - RNA, 19 nt, Artificial Sequence
  Description of Artificial Sequence: Synthetic oligonucleotide
  Antisense strand to SEQ ID NO: 1846953
uugugccuagcuaucgucc

SEQ ID NO: 1846955 - RNA, 19 nt, Artificial Sequence
  Description of Artificial Sequence: Synthetic oligonucleotide
  Sense strand starting at position 639 of SEQ ID NO: 1563990
gacgauagcuaggcacaaa

SEQ ID NO: 1846956 - RNA, 19 nt, Artificial Sequence
  Description of Artificial Sequence: Synthetic oligonucleotide
  Antisense strand to SEQ ID NO: 1846955
uuugugccuagcuaucguc

SEQ ID NO: 1846957 - RNA, 19 nt, Artificial Sequence
  Description of Artificial Sequence: Synthetic oligonucleotide
  Sense strand starting at position 640 of SEQ ID NO: 1563990
acgauagcuaggcacaaau

SEQ ID NO: 1846958 - RNA, 19 nt, Artificial Sequence
  Description of Artificial Sequence: Synthetic oligonucleotide
  Antisense strand to SEQ ID NO: 1846957
auuugugccuagcuaucgu

SEQ ID NO: 1846959 - RNA, 19 nt, Artificial Sequence
  Description of Artificial Sequence: Synthetic oligonucleotide
  Sense strand starting at position 713 of SEQ ID NO: 1563990
ucaguucuccaauagaguu

SEQ ID NO: 1846960 - RNA, 19 nt, Artificial Sequence
  Description of Artificial Sequence: Synthetic oligonucleotide
  Antisense strand to SEQ ID NO: 1846959
aacucuauuggagaacuga

SEQ ID NO: 1846961 - RNA, 19 nt, Artificial Sequence
  Description of Artificial Sequence: Synthetic oligonucleotide
  Sense strand starting at position 894 of SEQ ID NO: 1563990
cccguugucagugauaacu

SEQ ID NO: 1846962 - RNA, 19 nt, Artificial Sequence
  Description of Artificial Sequence: Synthetic oligonucleotide
  Antisense strand to SEQ ID NO: 1846961
aguuaucacugacaacggg

SEQ ID NO: 1846963 - RNA, 19 nt, Artificial Sequence
  Description of Artificial Sequence: Synthetic oligonucleotide
  Sense strand starting at position 1203 of SEQ ID NO: 1563990
ggucguguucggagaguuu

SEQ ID NO: 1846964 - RNA, 19 nt, Artificial Sequence
  Description of Artificial Sequence: Synthetic oligonucleotide
  Antisense strand to SEQ ID NO: 1846963
aaacucuccgaacacgacc

SEQ ID NO: 1846965 - RNA, 19 nt, Artificial Sequence
  Description of Artificial Sequence: Synthetic oligonucleotide
  Sense strand starting at position 1205 of SEQ ID NO: 1563990
ucguguucggagaguuuaa

SEQ ID NO: 1846966 - RNA, 19 nt, Artificial Sequence
  Description of Artificial Sequence: Synthetic oligonucleotide
  Antisense strand to SEQ ID NO: 1846965
uuaaacucuccgaacacga

SEQ ID NO: 1846967 - RNA, 19 nt, Artificial Sequence
  Description of Artificial Sequence: Synthetic oligonucleotide
  Sense strand starting at position 1321 of SEQ ID NO: 1563990
cagcucguucuguacuuua

SEQ ID NO: 1846968 - RNA, 19 nt, Artificial Sequence
  Description of Artificial Sequence: Synthetic oligonucleotide
  Antisense strand to SEQ ID NO: 1846967
uaaaguacagaacgagcug

SEQ ID NO: 1846969 - RNA, 19 nt, Artificial Sequence
  Description of Artificial Sequence: Synthetic oligonucleotide
  Sense strand starting at position 1324 of SEQ ID NO: 1563990
cucguucuguacuuuaaag

SEQ ID NO: 1846970 - RNA, 19 nt, Artificial Sequence
  Description of Artificial Sequence: Synthetic oligonucleotide
  Antisense strand to SEQ ID NO: 1846969
cuuuaaaguacagaacgag

SEQ ID NO: 1846971 - RNA, 19 nt, Artificial Sequence
  Description of Artificial Sequence: Synthetic oligonucleotide
  Sense strand starting at position 1326 of SEQ ID NO: 1563990
cguucuguacuuuaaagau

SEQ ID NO: 1846972 - RNA, 19 nt, Artificial Sequence
  Description of Artificial Sequence: Synthetic oligonucleotide
  Antisense strand to SEQ ID NO: 1846971
aucuuuaaaguacagaacg

SEQ ID NO: 1846973 - RNA, 19 nt, Artificial Sequence
  Description of Artificial Sequence: Synthetic oligonucleotide
  Sense strand starting at position 1815 of SEQ ID NO: 1563990
cgucgaauucugggauagu

SEQ ID NO: 1846974 - RNA, 19 nt, Artificial Sequence
  Description of Artificial Sequence: Synthetic oligonucleotide
  Antisense strand to SEQ ID NO: 1846973
acuaucccagaauucgacg

SEQ ID NO: 1846975 - RNA, 19 nt, Artificial Sequence
  Description of Artificial Sequence: Synthetic oligonucleotide
  Sense strand starting at position 2039 of SEQ ID NO: 1563990
ggagauacucgcgagcaaa

SEQ ID NO: 1846976 - RNA, 19 nt, Artificial Sequence
  Description of Artificial Sequence: Synthetic oligonucleotide
  Antisense strand to SEQ ID NO: 1846975
uuugcucgcgaguaucucc

SEQ ID NO: 1846977 - RNA, 19 nt, Artificial Sequence
  Description of Artificial Sequence: Synthetic oligonucleotide
  Sense strand starting at position 2142 of SEQ ID NO: 1563990
ggcaauucggaguagucaa

SEQ ID NO: 1846978 - RNA, 19 nt, Artificial Sequence
  Description of Artificial Sequence: Synthetic oligonucleotide
  Antisense strand to SEQ ID NO: 1846977
uugacuacuccgaauugcc

SEQ ID NO: 1846979 - RNA, 19 nt, Artificial Sequence
  Description of Artificial Sequence: Synthetic oligonucleotide
  Sense strand starting at position 2149 of SEQ ID NO: 1563990
cggaguagucaauaaaguu

SEQ ID NO: 1846980 - RNA, 19 nt, Artificial Sequence
  Description of Artificial Sequence: Synthetic oligonucleotide
  Antisense strand to SEQ ID NO: 1846979
aacuuuauugacuacuccg

SEQ ID NO: 1846981 - RNA, 19 nt, Artificial Sequence
  Description of Artificial Sequence: Synthetic oligonucleotide
  Sense strand starting at position 2429 of SEQ ID NO: 1563990
gcccaaucgccgcugaaga

SEQ ID NO: 1846982 - RNA, 19 nt, Artificial Sequence
  Description of Artificial Sequence: Synthetic oligonucleotide
  Antisense strand to SEQ ID NO: 1846981
ucuucagcggcgauugggc

SEQ ID NO: 1846983 - RNA, 19 nt, Artificial Sequence
  Description of Artificial Sequence: Synthetic oligonucleotide
  Sense strand starting at position 2463 of SEQ ID NO: 1563990
cggagaagccgccaucuua

SEQ ID NO: 1846984 - RNA, 19 nt, Artificial Sequence
  Description of Artificial Sequence: Synthetic oligonucleotide
  Antisense strand to SEQ ID NO: 1846983
uaagauggcggcuucuccg

SEQ ID NO: 1846985 - RNA, 19 nt, Artificial Sequence
  Description of Artificial Sequence: Synthetic oligonucleotide
  Sense strand starting at position 2780 of SEQ ID NO: 1563990
gaaggaagcucugugauua

SEQ ID NO: 1846986 - RNA, 19 nt, Artificial Sequence
  Description of Artificial Sequence: Synthetic oligonucleotide
  Antisense strand to SEQ ID NO: 1846985
uaaucacagagcuuccuuc

SEQ ID NO: 1846987 - RNA, 19 nt, Artificial Sequence
  Description of Artificial Sequence: Synthetic oligonucleotide
  Sense strand starting at position 2781 of SEQ ID NO: 1563990
aaggaagcucugugauuau

SEQ ID NO: 1846988 - RNA, 19 nt, Artificial Sequence
  Description of Artificial Sequence: Synthetic oligonucleotide
  Antisense strand to SEQ ID NO: 1846987
auaaucacagagcuuccuu

SEQ ID NO: 1846989 - RNA, 19 nt, Artificial Sequence
  Description of Artificial Sequence: Synthetic oligonucleotide
  Sense strand starting at position 2784 of SEQ ID NO: 1563990
gaagcucugugauuaucac

SEQ ID NO: 1846990 - RNA, 19 nt, Artificial Sequence
  Description of Artificial Sequence: Synthetic oligonucleotide
  Antisense strand to SEQ ID NO: 1846989
gugauaaucacagagcuuc

SEQ ID NO: 1846991 - RNA, 19 nt, Artificial Sequence
  Description of Artificial Sequence: Synthetic oligonucleotide
  Sense strand starting at position 2790 of SEQ ID NO: 1563990
cugugauuaucaccaaaug

SEQ ID NO: 1846992 - RNA, 19 nt, Artificial Sequence
  Description of Artificial Sequence: Synthetic oligonucleotide
  Antisense strand to SEQ ID NO: 1846991
cauuuggugauaaucacag

SEQ ID NO: 1846993 - RNA, 19 nt, Artificial Sequence
  Description of Artificial Sequence: Synthetic oligonucleotide
  Sense strand starting at position 2908 of SEQ ID NO: 1563990
guaguuccucuguaaagcu

SEQ ID NO: 1846994 - RNA, 19 nt, Artificial Sequence
  Description of Artificial Sequence: Synthetic oligonucleotide
  Antisense strand to SEQ ID NO: 1846993
agcuuuacagaggaacuac

SEQ ID NO: 1846995 - RNA, 19 nt, Artificial Sequence
  Description of Artificial Sequence: Synthetic oligonucleotide
  Sense strand starting at position 3199 of SEQ ID NO: 1563990
agggucccauugcuuuaaa

SEQ ID NO: 1846996 - RNA, 19 nt, Artificial Sequence
  Description of Artificial Sequence: Synthetic oligonucleotide
  Antisense strand to SEQ ID NO: 1846995
uuuaaagcaaugggacccu

SEQ ID NO: 1846997 - RNA, 19 nt, Artificial Sequence
  Description of Artificial Sequence: Synthetic oligonucleotide
  Sense strand starting at position 3242 of SEQ ID NO: 1563990
uuuacuaaccagugauggu

SEQ ID NO: 1846998 - RNA, 19 nt, Artificial Sequence
  Description of Artificial Sequence: Synthetic oligonucleotide
  Antisense strand to SEQ ID NO: 1846997
accaucacugguuaguaaa

SEQ ID NO: 1846999 - RNA, 19 nt, Artificial Sequence
  Description of Artificial Sequence: Synthetic oligonucleotide
  Sense strand starting at position 3333 of SEQ ID NO: 1563990
caaaguugcgaguaaacaa

SEQ ID NO: 1847000 - RNA, 19 nt, Artificial Sequence
  Description of Artificial Sequence: Synthetic oligonucleotide
  Antisense strand to SEQ ID NO: 1846999
uuguuuacucgcaacuuug

SEQ ID NO: 1847001 - RNA, 19 nt, Artificial Sequence
  Description of Artificial Sequence: Synthetic oligonucleotide
  Sense strand starting at position 3341 of SEQ ID NO: 1563990
cgaguaaacaauuggaaua

SEQ ID NO: 1847002 - RNA, 19 nt, Artificial Sequence
  Description of Artificial Sequence: Synthetic oligonucleotide
  Antisense strand to SEQ ID NO: 1847001
uauuccaauuguuuacucg

SEQ ID NO: 1847003 - RNA, 19 nt, Artificial Sequence
  Description of Artificial Sequence: Synthetic oligonucleotide
  Sense strand starting at position 3529 of SEQ ID NO: 1563990
aggaucaacguguacaaau

SEQ ID NO: 1847004 - RNA, 19 nt, Artificial Sequence
  Description of Artificial Sequence: Synthetic oligonucleotide
  Antisense strand to SEQ ID NO: 1847003
auuuguacacguugauccu

SEQ ID NO: 1847005 - RNA, 19 nt, Artificial Sequence
  Description of Artificial Sequence: Synthetic oligonucleotide
  Sense strand starting at position 3575 of SEQ ID NO: 1563990
cuagaaguugaauauuguu

SEQ ID NO: 1847006 - RNA, 19 nt, Artificial Sequence
  Description of Artificial Sequence: Synthetic oligonucleotide
  Antisense strand to SEQ ID NO: 1847005
aacaauauucaacuucuag

SEQ ID NO: 1847007 - RNA, 19 nt, Artificial Sequence
  Description of Artificial Sequence: Synthetic oligonucleotide
  Sense strand starting at position 3580 of SEQ ID NO: 1563990
aguugaauauuguuggaac

SEQ ID NO: 1847008 - RNA, 19 nt, Artificial Sequence
  Description of Artificial Sequence: Synthetic oligonucleotide
  Antisense strand to SEQ ID NO: 1847007
guuccaacaauauucaacu

SEQ ID NO: 1847009 - RNA, 19 nt, Artificial Sequence
  Description of Artificial Sequence: Synthetic oligonucleotide
  Sense strand starting at position 3582 of SEQ ID NO: 1563990
uugaauauuguuggaacaa

SEQ ID NO: 1847010 - RNA, 19 nt, Artificial Sequence
  Description of Artificial Sequence: Synthetic oligonucleotide
  Antisense strand to SEQ ID NO: 1847009
uuguuccaacaauauucaa

SEQ ID NO: 1847011 - RNA, 19 nt, Artificial Sequence
  Description of Artificial Sequence: Synthetic oligonucleotide
  Sense strand starting at position 3583 of SEQ ID NO: 1563990
ugaauauuguuggaacaag

SEQ ID NO: 1847012 - RNA, 19 nt, Artificial Sequence
  Description of Artificial Sequence: Synthetic oligonucleotide
  Antisense strand to SEQ ID NO: 1847011
cuuguuccaacaauauuca

SEQ ID NO: 1847013 - RNA, 19 nt, Artificial Sequence
  Description of Artificial Sequence: Synthetic oligonucleotide
  Sense strand starting at position 3677 of SEQ ID NO: 1563990
uuuagauuguaugcaguua

SEQ ID NO: 1847014 - RNA, 19 nt, Artificial Sequence
  Description of Artificial Sequence: Synthetic oligonucleotide
  Antisense strand to SEQ ID NO: 1847013
uaacugcauacaaucuaaa

SEQ ID NO: 1847015 - RNA, 19 nt, Artificial Sequence
  Description of Artificial Sequence: Synthetic oligonucleotide
  Sense strand starting at position 3757 of SEQ ID NO: 1563990
agaggaugguuuaggguuu

SEQ ID NO: 1847016 - RNA, 19 nt, Artificial Sequence
  Description of Artificial Sequence: Synthetic oligonucleotide
  Antisense strand to SEQ ID NO: 1847015
aaacccuaaaccauccucu

SEQ ID NO: 1847017 - RNA, 19 nt, Artificial Sequence
  Description of Artificial Sequence: Synthetic oligonucleotide
  Sense strand starting at position 3891 of SEQ ID NO: 1563990
gagccucaugaguaacuga

SEQ ID NO: 1847018 - RNA, 19 nt, Artificial Sequence
  Description of Artificial Sequence: Synthetic oligonucleotide
  Antisense strand to SEQ ID NO: 1847017
ucaguuacucaugaggcuc

SEQ ID NO: 1847019 - RNA, 19 nt, Artificial Sequence
  Description of Artificial Sequence: Synthetic oligonucleotide
  Sense strand starting at position 3898 of SEQ ID NO: 1563990
augaguaacugagacuaua

SEQ ID NO: 1847020 - RNA, 19 nt, Artificial Sequence
  Description of Artificial Sequence: Synthetic oligonucleotide
  Antisense strand to SEQ ID NO: 1847019
uauagucucaguuacucau

SEQ ID NO: 1847021 - RNA, 19 nt, Artificial Sequence
  Description of Artificial Sequence: Synthetic oligonucleotide
  Sense strand starting at position 347 of SEQ ID NO: 1563991
guugucuuuccauagcuga

SEQ ID NO: 1847022 - RNA, 19 nt, Artificial Sequence
  Description of Artificial Sequence: Synthetic oligonucleotide
  Antisense strand to SEQ ID NO: 1847021
ucagcuauggaaagacaac

SEQ ID NO: 1847023 - RNA, 19 nt, Artificial Sequence
  Description of Artificial Sequence: Synthetic oligonucleotide
  Sense strand starting at position 350 of SEQ ID NO: 1563991
gucuuuccauagcugagau

SEQ ID NO: 1847024 - RNA, 19 nt, Artificial Sequence
  Description of Artificial Sequence: Synthetic oligonucleotide
  Antisense strand to SEQ ID NO: 1847023
aucucagcuauggaaagac

SEQ ID NO: 1847025 - RNA, 19 nt, Artificial Sequence
  Description of Artificial Sequence: Synthetic oligonucleotide
  Sense strand starting at position 354 of SEQ ID NO: 1563991
uuccauagcugagauuuaa

SEQ ID NO: 1847026 - RNA, 19 nt, Artificial Sequence
  Description of Artificial Sequence: Synthetic oligonucleotide
  Antisense strand to SEQ ID NO: 1847025
uuaaaucucagcuauggaa

SEQ ID NO: 1847027 - RNA, 19 nt, Artificial Sequence
  Description of Artificial Sequence: Synthetic oligonucleotide
  Sense strand starting at position 405 of SEQ ID NO: 1563991
acacuaaccucuccggaau

SEQ ID NO: 1847028 - RNA, 19 nt, Artificial Sequence
  Description of Artificial Sequence: Synthetic oligonucleotide
  Antisense strand to SEQ ID NO: 1847027
auuccggagagguuagugu

SEQ ID NO: 1847029 - RNA, 19 nt, Artificial Sequence
  Description of Artificial Sequence: Synthetic oligonucleotide
  Sense strand starting at position 416 of SEQ ID NO: 1563991
uccggaauucugggugaca

SEQ ID NO: 1847030 - RNA, 19 nt, Artificial Sequence
  Description of Artificial Sequence: Synthetic oligonucleotide
  Antisense strand to SEQ ID NO: 1847029
ugucacccagaauuccgga

SEQ ID NO: 1847031 - RNA, 19 nt, Artificial Sequence
  Description of Artificial Sequence: Synthetic oligonucleotide
  Sense strand starting at position 417 of SEQ ID NO: 1563991
ccggaauucugggugacag

SEQ ID NO: 1847032 - RNA, 19 nt, Artificial Sequence
  Description of Artificial Sequence: Synthetic oligonucleotide
  Antisense strand to SEQ ID NO: 1847031
cugucacccagaauuccgg

SEQ ID NO: 1847033 - RNA, 19 nt, Artificial Sequence
  Description of Artificial Sequence: Synthetic oligonucleotide
  Sense strand starting at position 453 of SEQ ID NO: 1563991
cgguuaacugaaggaaauu

SEQ ID NO: 1847034 - RNA, 19 nt, Artificial Sequence
  Description of Artificial Sequence: Synthetic oligonucleotide
  Antisense strand to SEQ ID NO: 1847033
aauuuccuucaguuaaccg

SEQ ID NO: 1847035 - RNA, 19 nt, Artificial Sequence
  Description of Artificial Sequence: Synthetic oligonucleotide
  Sense strand starting at position 531 of SEQ ID NO: 1563991
gauggugcugcagauaaau

SEQ ID NO: 1847036 - RNA, 19 nt, Artificial Sequence
  Description of Artificial Sequence: Synthetic oligonucleotide
  Antisense strand to SEQ ID NO: 1847035
auuuaucugcagcaccauc

SEQ ID NO: 1847037 - RNA, 19 nt, Artificial Sequence
  Description of Artificial Sequence: Synthetic oligonucleotide
  Sense strand starting at position 624 of SEQ ID NO: 1563991
aaggauguauuugauaaca

SEQ ID NO: 1847038 - RNA, 19 nt, Artificial Sequence
  Description of Artificial Sequence: Synthetic oligonucleotide
  Antisense strand to SEQ ID NO: 1847037
uguuaucaaauacauccuu

SEQ ID NO: 1847039 - RNA, 19 nt, Artificial Sequence
  Description of Artificial Sequence: Synthetic oligonucleotide
  Sense strand starting at position 686 of SEQ ID NO: 1563991
ugugcauggucacucugaa

SEQ ID NO: 1847040 - RNA, 19 nt, Artificial Sequence
  Description of Artificial Sequence: Synthetic oligonucleotide
  Antisense strand to SEQ ID NO: 1847039
uucagagugaccaugcaca

SEQ ID NO: 1847041 - RNA, 19 nt, Artificial Sequence
  Description of Artificial Sequence: Synthetic oligonucleotide
  Sense strand starting at position 725 of SEQ ID NO: 1563991
uuaaaucccuguuuaugga

SEQ ID NO: 1847042 - RNA, 19 nt, Artificial Sequence
  Description of Artificial Sequence: Synthetic oligonucleotide
  Antisense strand to SEQ ID NO: 1847041
uccauaaacagggauuuaa

SEQ ID NO: 1847043 - RNA, 19 nt, Artificial Sequence
  Description of Artificial Sequence: Synthetic oligonucleotide
  Sense strand starting at position 786 of SEQ ID NO: 1563991
gugugugaggcagaacaua

SEQ ID NO: 1847044 - RNA, 19 nt, Artificial Sequence
  Description of Artificial Sequence: Synthetic oligonucleotide
  Antisense strand to SEQ ID NO: 1847043
uauguucugccucacacac

SEQ ID NO: 1847045 - RNA, 19 nt, Artificial Sequence
  Description of Artificial Sequence: Synthetic oligonucleotide
  Sense strand starting at position 1155 of SEQ ID NO: 1563991
gauucuuuguaacaggaaa

SEQ ID NO: 1847046 - RNA, 19 nt, Artificial Sequence
  Description of Artificial Sequence: Synthetic oligonucleotide
  Antisense strand to SEQ ID NO: 1847045
uuuccuguuacaaagaauc

SEQ ID NO: 1847047 - RNA, 19 nt, Artificial Sequence
  Description of Artificial Sequence: Synthetic oligonucleotide
  Sense strand starting at position 1272 of SEQ ID NO: 1563991
aggcuaaugucagcuaggu

SEQ ID NO: 1847048 - RNA, 19 nt, Artificial Sequence
  Description of Artificial Sequence: Synthetic oligonucleotide
  Antisense strand to SEQ ID NO: 1847047
accuagcugacauuagccu

SEQ ID NO: 1847049 - RNA, 19 nt, Artificial Sequence
  Description of Artificial Sequence: Synthetic oligonucleotide
  Sense strand starting at position 1291 of SEQ ID NO: 1563991
ccuguucugcaaggagaga

SEQ ID NO: 1847050 - RNA, 19 nt, Artificial Sequence
  Description of Artificial Sequence: Synthetic oligonucleotide
  Antisense strand to SEQ ID NO: 1847049
ucucuccuugcagaacagg

SEQ ID NO: 1847051 - RNA, 19 nt, Artificial Sequence
  Description of Artificial Sequence: Synthetic oligonucleotide
  Sense strand starting at position 1292 of SEQ ID NO: 1563991
cuguucugcaaggagagau

SEQ ID NO: 1847052 - RNA, 19 nt, Artificial Sequence
  Description of Artificial Sequence: Synthetic oligonucleotide
  Antisense strand to SEQ ID NO: 1847051
aucucuccuugcagaacag

SEQ ID NO: 1847053 - RNA, 19 nt, Artificial Sequence
  Description of Artificial Sequence: Synthetic oligonucleotide
  Sense strand starting at position 1336 of SEQ ID NO: 1563991
gguccugagccggaaucua

SEQ ID NO: 1847054 - RNA, 19 nt, Artificial Sequence
  Description of Artificial Sequence: Synthetic oligonucleotide
  Antisense strand to SEQ ID NO: 1847053
uagauuccggcucaggacc

SEQ ID NO: 1847055 - RNA, 19 nt, Artificial Sequence
  Description of Artificial Sequence: Synthetic oligonucleotide
  Sense strand starting at position 1607 of SEQ ID NO: 1563991
gcguccucucuggacgaua

SEQ ID NO: 1847056 - RNA, 19 nt, Artificial Sequence
  Description of Artificial Sequence: Synthetic oligonucleotide
  Antisense strand to SEQ ID NO: 1847055
uaucguccagagaggacgc

SEQ ID NO: 1847057 - RNA, 19 nt, Artificial Sequence
  Description of Artificial Sequence: Synthetic oligonucleotide
  Sense strand starting at position 1618 of SEQ ID NO: 1563991
ggacgauagcuaggcacaa

SEQ ID NO: 1847058 - RNA, 19 nt, Artificial Sequence
  Description of Artificial Sequence: Synthetic oligonucleotide
  Antisense strand to SEQ ID NO: 1847057
uugugccuagcuaucgucc

SEQ ID NO: 1847059 - RNA, 19 nt, Artificial Sequence
  Description of Artificial Sequence: Synthetic oligonucleotide
  Sense strand starting at position 1619 of SEQ ID NO: 1563991
gacgauagcuaggcacaaa

SEQ ID NO: 1847060 - RNA, 19 nt, Artificial Sequence
  Description of Artificial Sequence: Synthetic oligonucleotide
  Antisense strand to SEQ ID NO: 1847059
uuugugccuagcuaucguc

SEQ ID NO: 1847061 - RNA, 19 nt, Artificial Sequence
  Description of Artificial Sequence: Synthetic oligonucleotide
  Sense strand starting at position 1620 of SEQ ID NO: 1563991
acgauagcuaggcacaaau

SEQ ID NO: 1847062 - RNA, 19 nt, Artificial Sequence
  Description of Artificial Sequence: Synthetic oligonucleotide
  Antisense strand to SEQ ID NO: 1847061
auuugugccuagcuaucgu

SEQ ID NO: 1847063 - RNA, 19 nt, Artificial Sequence
  Description of Artificial Sequence: Synthetic oligonucleotide
  Sense strand starting at position 1693 of SEQ ID NO: 1563991
ucaguucuccaauagaguu

SEQ ID NO: 1847064 - RNA, 19 nt, Artificial Sequence
  Description of Artificial Sequence: Synthetic oligonucleotide
  Antisense strand to SEQ ID NO: 1847063
aacucuauuggagaacuga

SEQ ID NO: 1847065 - RNA, 19 nt, Artificial Sequence
  Description of Artificial Sequence: Synthetic oligonucleotide
  Sense strand starting at position 1874 of SEQ ID NO: 1563991
cccguugucagugauaacu

SEQ ID NO: 1847066 - RNA, 19 nt, Artificial Sequence
  Description of Artificial Sequence: Synthetic oligonucleotide
  Antisense strand to SEQ ID NO: 1847065
aguuaucacugacaacggg

SEQ ID NO: 1847067 - RNA, 19 nt, Artificial Sequence
  Description of Artificial Sequence: Synthetic oligonucleotide
  Sense strand starting at position 2183 of SEQ ID NO: 1563991
ggucguguucggagaguuu

SEQ ID NO: 1847068 - RNA, 19 nt, Artificial Sequence
  Description of Artificial Sequence: Synthetic oligonucleotide
  Antisense strand to SEQ ID NO: 1847067
aaacucuccgaacacgacc

SEQ ID NO: 1847069 - RNA, 19 nt, Artificial Sequence
  Description of Artificial Sequence: Synthetic oligonucleotide
  Sense strand starting at position 2184 of SEQ ID NO: 1563991
gucguguucggagaguuua

SEQ ID NO: 1847070 - RNA, 19 nt, Artificial Sequence
  Description of Artificial Sequence: Synthetic oligonucleotide
  Antisense strand to SEQ ID NO: 1847069
uaaacucuccgaacacgac

SEQ ID NO: 1847071 - RNA, 19 nt, Artificial Sequence
  Description of Artificial Sequence: Synthetic oligonucleotide
  Sense strand starting at position 2185 of SEQ ID NO: 1563991
ucguguucggagaguuuaa

SEQ ID NO: 1847072 - RNA, 19 nt, Artificial Sequence
  Description of Artificial Sequence: Synthetic oligonucleotide
  Antisense strand to SEQ ID NO: 1847071
uuaaacucuccgaacacga

SEQ ID NO: 1847073 - RNA, 19 nt, Artificial Sequence
  Description of Artificial Sequence: Synthetic oligonucleotide
  Sense strand starting at position 2301 of SEQ ID NO: 1563991
cagcucguucuguacuuua

SEQ ID NO: 1847074 - RNA, 19 nt, Artificial Sequence
  Description of Artificial Sequence: Synthetic oligonucleotide
  Antisense strand to SEQ ID NO: 1847073
uaaaguacagaacgagcug

SEQ ID NO: 1847075 - RNA, 19 nt, Artificial Sequence
  Description of Artificial Sequence: Synthetic oligonucleotide
  Sense strand starting at position 2304 of SEQ ID NO: 1563991
cucguucuguacuuuaaag

SEQ ID NO: 1847076 - RNA, 19 nt, Artificial Sequence
  Description of Artificial Sequence: Synthetic oligonucleotide
  Antisense strand to SEQ ID NO: 1847075
cuuuaaaguacagaacgag

SEQ ID NO: 1847077 - RNA, 19 nt, Artificial Sequence
  Description of Artificial Sequence: Synthetic oligonucleotide
  Sense strand starting at position 2306 of SEQ ID NO: 1563991
cguucuguacuuuaaagau

SEQ ID NO: 1847078 - RNA, 19 nt, Artificial Sequence
  Description of Artificial Sequence: Synthetic oligonucleotide
  Antisense strand to SEQ ID NO: 1847077
aucuuuaaaguacagaacg

SEQ ID NO: 1847079 - RNA, 19 nt, Artificial Sequence
  Description of Artificial Sequence: Synthetic oligonucleotide
  Sense strand starting at position 2795 of SEQ ID NO: 1563991
cgucgaauucugggauagu

SEQ ID NO: 1847080 - RNA, 19 nt, Artificial Sequence
  Description of Artificial Sequence: Synthetic oligonucleotide
  Antisense strand to SEQ ID NO: 1847079
acuaucccagaauucgacg

SEQ ID NO: 1847081 - RNA, 19 nt, Artificial Sequence
  Description of Artificial Sequence: Synthetic oligonucleotide
  Sense strand starting at position 3019 of SEQ ID NO: 1563991
ggagauacucgcgagcaaa

SEQ ID NO: 1847082 - RNA, 19 nt, Artificial Sequence
  Description of Artificial Sequence: Synthetic oligonucleotide
  Antisense strand to SEQ ID NO: 1847081
uuugcucgcgaguaucucc

SEQ ID NO: 1847083 - RNA, 19 nt, Artificial Sequence
  Description of Artificial Sequence: Synthetic oligonucleotide
  Sense strand starting at position 3122 of SEQ ID NO: 1563991
ggcaauucggaguagucaa

SEQ ID NO: 1847084 - RNA, 19 nt, Artificial Sequence
  Description of Artificial Sequence: Synthetic oligonucleotide
  Antisense strand to SEQ ID NO: 1847083
uugacuacuccgaauugcc

SEQ ID NO: 1847085 - RNA, 19 nt, Artificial Sequence
  Description of Artificial Sequence: Synthetic oligonucleotide
  Sense strand starting at position 3129 of SEQ ID NO: 1563991
cggaguagucaauaaaguu

SEQ ID NO: 1847086 - RNA, 19 nt, Artificial Sequence
  Description of Artificial Sequence: Synthetic oligonucleotide
  Antisense strand to SEQ ID NO: 1847085
aacuuuauugacuacuccg

SEQ ID NO: 1847087 - RNA, 19 nt, Artificial Sequence
  Description of Artificial Sequence: Synthetic oligonucleotide
  Sense strand starting at position 3409 of SEQ ID NO: 1563991
gcccaaucgccgcugaaga

SEQ ID NO: 1847088 - RNA, 19 nt, Artificial Sequence
  Description of Artificial Sequence: Synthetic oligonucleotide
  Antisense strand to SEQ ID NO: 1847087
ucuucagcggcgauugggc

SEQ ID NO: 1847089 - RNA, 19 nt, Artificial Sequence
  Description of Artificial Sequence: Synthetic oligonucleotide
  Sense strand starting at position 3443 of SEQ ID NO: 1563991
cggagaagccgccaucuua

SEQ ID NO: 1847090 - RNA, 19 nt, Artificial Sequence
  Description of Artificial Sequence: Synthetic oligonucleotide
  Antisense strand to SEQ ID NO: 1847089
uaagauggcggcuucuccg

SEQ ID NO: 1847091 - RNA, 19 nt, Artificial Sequence
  Description of Artificial Sequence: Synthetic oligonucleotide
  Sense strand starting at position 3760 of SEQ ID NO: 1563991
gaaggaagcucugugauua

SEQ ID NO: 1847092 - RNA, 19 nt, Artificial Sequence
  Description of Artificial Sequence: Synthetic oligonucleotide
  Antisense strand to SEQ ID NO: 1847091
uaaucacagagcuuccuuc

SEQ ID NO: 1847093 - RNA, 19 nt, Artificial Sequence
  Description of Artificial Sequence: Synthetic oligonucleotide
  Sense strand starting at position 3761 of SEQ ID NO: 1563991
aaggaagcucugugauuau

SEQ ID NO: 1847094 - RNA, 19 nt, Artificial Sequence
  Description of Artificial Sequence: Synthetic oligonucleotide
  Antisense strand to SEQ ID NO: 1847093
auaaucacagagcuuccuu

SEQ ID NO: 1847095 - RNA, 19 nt, Artificial Sequence
  Description of Artificial Sequence: Synthetic oligonucleotide
  Sense strand starting at position 3764 of SEQ ID NO: 1563991
gaagcucugugauuaucac

SEQ ID NO: 1847096 - RNA, 19 nt, Artificial Sequence
  Description of Artificial Sequence: Synthetic oligonucleotide
  Antisense strand to SEQ ID NO: 1847095
gugauaaucacagagcuuc

SEQ ID NO: 1847097 - RNA, 19 nt, Artificial Sequence
  Description of Artificial Sequence: Synthetic oligonucleotide
  Sense strand starting at position 3770 of SEQ ID NO: 1563991
cugugauuaucaccaaaug

SEQ ID NO: 1847098 - RNA, 19 nt, Artificial Sequence
  Description of Artificial Sequence: Synthetic oligonucleotide
  Antisense strand to SEQ ID NO: 1847097
cauuuggugauaaucacag

SEQ ID NO: 1847099 - RNA, 19 nt, Artificial Sequence
  Description of Artificial Sequence: Synthetic oligonucleotide
  Sense strand starting at position 3888 of SEQ ID NO: 1563991
guaguuccucuguaaagcu

SEQ ID NO: 1847100 - RNA, 19 nt, Artificial Sequence
  Description of Artificial Sequence: Synthetic oligonucleotide
  Antisense strand to SEQ ID NO: 1847099
agcuuuacagaggaacuac

SEQ ID NO: 1847101 - RNA, 19 nt, Artificial Sequence
  Description of Artificial Sequence: Synthetic oligonucleotide
  Sense strand starting at position 152 of SEQ ID NO: 1563992
uacugugucuaguccagaa

SEQ ID NO: 1847102 - RNA, 19 nt, Artificial Sequence
  Description of Artificial Sequence: Synthetic oligonucleotide
  Antisense strand to SEQ ID NO: 1847101
uucuggacuagacacagua

SEQ ID NO: 1847103 - RNA, 19 nt, Artificial Sequence
  Description of Artificial Sequence: Synthetic oligonucleotide
  Sense strand starting at position 156 of SEQ ID NO: 1563992
gugucuaguccagaagguu

SEQ ID NO: 1847104 - RNA, 19 nt, Artificial Sequence
  Description of Artificial Sequence: Synthetic oligonucleotide
  Antisense strand to SEQ ID NO: 1847103
aaccuucuggacuagacac

SEQ ID NO: 1847105 - RNA, 19 nt, Artificial Sequence
  Description of Artificial Sequence: Synthetic oligonucleotide
  Sense strand starting at position 164 of SEQ ID NO: 1563992
uccagaagguuugcugauu

SEQ ID NO: 1847106 - RNA, 19 nt, Artificial Sequence
  Description of Artificial Sequence: Synthetic oligonucleotide
  Antisense strand to SEQ ID NO: 1847105
aaucagcaaaccuucugga

SEQ ID NO: 1847107 - RNA, 19 nt, Artificial Sequence
  Description of Artificial Sequence: Synthetic oligonucleotide
  Sense strand starting at position 236 of SEQ ID NO: 1563992
guagauaccugcucccaaa

SEQ ID NO: 1847108 - RNA, 19 nt, Artificial Sequence
  Description of Artificial Sequence: Synthetic oligonucleotide
  Antisense strand to SEQ ID NO: 1847107
uuugggagcagguaucuac

SEQ ID NO: 1847109 - RNA, 19 nt, Artificial Sequence
  Description of Artificial Sequence: Synthetic oligonucleotide
  Sense strand starting at position 295 of SEQ ID NO: 1563992
uagauuaacuuagagaguc

SEQ ID NO: 1847110 - RNA, 19 nt, Artificial Sequence
  Description of Artificial Sequence: Synthetic oligonucleotide
  Antisense strand to SEQ ID NO: 1847109
gacucucuaaguuaaucua

SEQ ID NO: 1847111 - RNA, 19 nt, Artificial Sequence
  Description of Artificial Sequence: Synthetic oligonucleotide
  Sense strand starting at position 322 of SEQ ID NO: 1563992
uaggaaagaucccaggaua

SEQ ID NO: 1847112 - RNA, 19 nt, Artificial Sequence
  Description of Artificial Sequence: Synthetic oligonucleotide
  Antisense strand to SEQ ID NO: 1847111
uauccugggaucuuuccua

SEQ ID NO: 1847113 - RNA, 19 nt, Artificial Sequence
  Description of Artificial Sequence: Synthetic oligonucleotide
  Sense strand starting at position 395 of SEQ ID NO: 1563992
ucaaguuuccacugcaaga

SEQ ID NO: 1847114 - RNA, 19 nt, Artificial Sequence
  Description of Artificial Sequence: Synthetic oligonucleotide
  Antisense strand to SEQ ID NO: 1847113
ucuugcaguggaaacuuga

SEQ ID NO: 1847115 - RNA, 19 nt, Artificial Sequence
  Description of Artificial Sequence: Synthetic oligonucleotide
  Sense strand starting at position 439 of SEQ ID NO: 1563992
agcuuucuggaauauaauu

SEQ ID NO: 1847116 - RNA, 19 nt, Artificial Sequence
  Description of Artificial Sequence: Synthetic oligonucleotide
  Antisense strand to SEQ ID NO: 1847115
aauuauauuccagaaagcu

SEQ ID NO: 1847117 - RNA, 19 nt, Artificial Sequence
  Description of Artificial Sequence: Synthetic oligonucleotide
  Sense strand starting at position 458 of SEQ ID NO: 1563992
ucagaaagaugaugaaaga

SEQ ID NO: 1847118 - RNA, 19 nt, Artificial Sequence
  Description of Artificial Sequence: Synthetic oligonucleotide
  Antisense strand to SEQ ID NO: 1847117
ucuuucaucaucuuucuga

SEQ ID NO: 1847119 - RNA, 19 nt, Artificial Sequence
  Description of Artificial Sequence: Synthetic oligonucleotide
  Sense strand starting at position 563 of SEQ ID NO: 1563992
agcuccagaucucuuugua

SEQ ID NO: 1847120 - RNA, 19 nt, Artificial Sequence
  Description of Artificial Sequence: Synthetic oligonucleotide
  Antisense strand to SEQ ID NO: 1847119
uacaaagagaucuggagcu

SEQ ID NO: 1847121 - RNA, 19 nt, Artificial Sequence
  Description of Artificial Sequence: Synthetic oligonucleotide
  Sense strand starting at position 590 of SEQ ID NO: 1563992
uugaguaccugcuccaauu

SEQ ID NO: 1847122 - RNA, 19 nt, Artificial Sequence
  Description of Artificial Sequence: Synthetic oligonucleotide
  Antisense strand to SEQ ID NO: 1847121
aauuggagcagguacucaa

SEQ ID NO: 1847123 - RNA, 19 nt, Artificial Sequence
  Description of Artificial Sequence: Synthetic oligonucleotide
  Sense strand starting at position 710 of SEQ ID NO: 1563992
gcaucuuucugaucauagc

SEQ ID NO: 1847124 - RNA, 19 nt, Artificial Sequence
  Description of Artificial Sequence: Synthetic oligonucleotide
  Antisense strand to SEQ ID NO: 1847123
gcuaugaucagaaagaugc

SEQ ID NO: 1847125 - RNA, 19 nt, Artificial Sequence
  Description of Artificial Sequence: Synthetic oligonucleotide
  Sense strand starting at position 785 of SEQ ID NO: 1563992
agguaaccauagguguuaa

SEQ ID NO: 1847126 - RNA, 19 nt, Artificial Sequence
  Description of Artificial Sequence: Synthetic oligonucleotide
  Antisense strand to SEQ ID NO: 1847125
uuaacaccuaugguuaccu

SEQ ID NO: 1847127 - RNA, 19 nt, Artificial Sequence
  Description of Artificial Sequence: Synthetic oligonucleotide
  Sense strand starting at position 909 of SEQ ID NO: 1563992
ggcaaaugcuaucuuccca

SEQ ID NO: 1847128 - RNA, 19 nt, Artificial Sequence
  Description of Artificial Sequence: Synthetic oligonucleotide
  Antisense strand to SEQ ID NO: 1847127
ugggaagauagcauuugcc

SEQ ID NO: 1847129 - RNA, 19 nt, Artificial Sequence
  Description of Artificial Sequence: Synthetic oligonucleotide
  Sense strand starting at position 985 of SEQ ID NO: 1563992
aguacaacaugaugauuua

SEQ ID NO: 1847130 - RNA, 19 nt, Artificial Sequence
  Description of Artificial Sequence: Synthetic oligonucleotide
  Antisense strand to SEQ ID NO: 1847129
uaaaucaucauguuguacu

SEQ ID NO: 1847131 - RNA, 19 nt, Artificial Sequence
  Description of Artificial Sequence: Synthetic oligonucleotide
  Sense strand starting at position 1254 of SEQ ID NO: 1563992
gccuuucgagucugaaaug

SEQ ID NO: 1847132 - RNA, 19 nt, Artificial Sequence
  Description of Artificial Sequence: Synthetic oligonucleotide
  Antisense strand to SEQ ID NO: 1847131
cauuucagacucgaaaggc

SEQ ID NO: 1847133 - RNA, 19 nt, Artificial Sequence
  Description of Artificial Sequence: Synthetic oligonucleotide
  Sense strand starting at position 1261 of SEQ ID NO: 1563992
gagucugaaauguggguau

SEQ ID NO: 1847134 - RNA, 19 nt, Artificial Sequence
  Description of Artificial Sequence: Synthetic oligonucleotide
  Antisense strand to SEQ ID NO: 1847133
auacccacauuucagacuc

SEQ ID NO: 1847135 - RNA, 19 nt, Artificial Sequence
  Description of Artificial Sequence: Synthetic oligonucleotide
  Sense strand starting at position 1263 of SEQ ID NO: 1563992
gucugaaauguggguauua

SEQ ID NO: 1847136 - RNA, 19 nt, Artificial Sequence
  Description of Artificial Sequence: Synthetic oligonucleotide
  Antisense strand to SEQ ID NO: 1847135
uaauacccacauuucagac

SEQ ID NO: 1847137 - RNA, 19 nt, Artificial Sequence
  Description of Artificial Sequence: Synthetic oligonucleotide
  Sense strand starting at position 1264 of SEQ ID NO: 1563992
ucugaaauguggguauuau

SEQ ID NO: 1847138 - RNA, 19 nt, Artificial Sequence
  Description of Artificial Sequence: Synthetic oligonucleotide
  Antisense strand to SEQ ID NO: 1847137
auaauacccacauuucaga

SEQ ID NO: 1847139 - RNA, 19 nt, Artificial Sequence
  Description of Artificial Sequence: Synthetic oligonucleotide
  Sense strand starting at position 1265 of SEQ ID NO: 1563992
cugaaauguggguauuauu

SEQ ID NO: 1847140 - RNA, 19 nt, Artificial Sequence
  Description of Artificial Sequence: Synthetic oligonucleotide
  Antisense strand to SEQ ID NO: 1847139
aauaauacccacauuucag

SEQ ID NO: 1847141 - RNA, 19 nt, Artificial Sequence
  Description of Artificial Sequence: Synthetic oligonucleotide
  Sense strand starting at position 1298 of SEQ ID NO: 1563992
agguauuauuaagugcauu

SEQ ID NO: 1847142 - RNA, 19 nt, Artificial Sequence
  Description of Artificial Sequence: Synthetic oligonucleotide
  Antisense strand to SEQ ID NO: 1847141
aaugcacuuaauaauaccu

SEQ ID NO: 1847143 - RNA, 19 nt, Artificial Sequence
  Description of Artificial Sequence: Synthetic oligonucleotide
  Sense strand starting at position 1355 of SEQ ID NO: 1563992
guuagaaugaacuagcgaa

SEQ ID NO: 1847144 - RNA, 19 nt, Artificial Sequence
  Description of Artificial Sequence: Synthetic oligonucleotide
  Antisense strand to SEQ ID NO: 1847143
uucgcuaguucauucuaac

SEQ ID NO: 1847145 - RNA, 19 nt, Artificial Sequence
  Description of Artificial Sequence: Synthetic oligonucleotide
  Sense strand starting at position 1475 of SEQ ID NO: 1563992
augcaaggucuccgucaca

SEQ ID NO: 1847146 - RNA, 19 nt, Artificial Sequence
  Description of Artificial Sequence: Synthetic oligonucleotide
  Antisense strand to SEQ ID NO: 1847145
ugugacggagaccuugcau

SEQ ID NO: 1847147 - RNA, 19 nt, Artificial Sequence
  Description of Artificial Sequence: Synthetic oligonucleotide
  Sense strand starting at position 1994 of SEQ ID NO: 1563992
ccgcgugugacuccugcau

SEQ ID NO: 1847148 - RNA, 19 nt, Artificial Sequence
  Description of Artificial Sequence: Synthetic oligonucleotide
  Antisense strand to SEQ ID NO: 1847147
augcaggagucacacgcgg

SEQ ID NO: 1847149 - RNA, 19 nt, Artificial Sequence
  Description of Artificial Sequence: Synthetic oligonucleotide
  Sense strand starting at position 2357 of SEQ ID NO: 1563992
gaaagacacgcuuguguuc

SEQ ID NO: 1847150 - RNA, 19 nt, Artificial Sequence
  Description of Artificial Sequence: Synthetic oligonucleotide
  Antisense strand to SEQ ID NO: 1847149
gaacacaagcgugucuuuc

SEQ ID NO: 1847151 - RNA, 19 nt, Artificial Sequence
  Description of Artificial Sequence: Synthetic oligonucleotide
  Sense strand starting at position 2489 of SEQ ID NO: 1563992
guacuuuacuccuuaguaa

SEQ ID NO: 1847152 - RNA, 19 nt, Artificial Sequence
  Description of Artificial Sequence: Synthetic oligonucleotide
  Antisense strand to SEQ ID NO: 1847151
uuacuaaggaguaaaguac

SEQ ID NO: 1847153 - RNA, 19 nt, Artificial Sequence
  Description of Artificial Sequence: Synthetic oligonucleotide
  Sense strand starting at position 2541 of SEQ ID NO: 1563992
aguggugcacucugaggaa

SEQ ID NO: 1847154 - RNA, 19 nt, Artificial Sequence
  Description of Artificial Sequence: Synthetic oligonucleotide
  Antisense strand to SEQ ID NO: 1847153
uuccucagagugcaccacu

SEQ ID NO: 1847155 - RNA, 19 nt, Artificial Sequence
  Description of Artificial Sequence: Synthetic oligonucleotide
  Sense strand starting at position 2631 of SEQ ID NO: 1563992
uccuauaacugcuuuggau

SEQ ID NO: 1847156 - RNA, 19 nt, Artificial Sequence
  Description of Artificial Sequence: Synthetic oligonucleotide
  Antisense strand to SEQ ID NO: 1847155
auccaaagcaguuauagga

SEQ ID NO: 1847157 - RNA, 19 nt, Artificial Sequence
  Description of Artificial Sequence: Synthetic oligonucleotide
  Sense strand starting at position 2716 of SEQ ID NO: 1563992
gaaggaaggcugcguaaga

SEQ ID NO: 1847158 - RNA, 19 nt, Artificial Sequence
  Description of Artificial Sequence: Synthetic oligonucleotide
  Antisense strand to SEQ ID NO: 1847157
ucuuacgcagccuuccuuc

SEQ ID NO: 1847159 - RNA, 19 nt, Artificial Sequence
  Description of Artificial Sequence: Synthetic oligonucleotide
  Sense strand starting at position 3576 of SEQ ID NO: 1563992
cccugaaucgcgggauaag

SEQ ID NO: 1847160 - RNA, 19 nt, Artificial Sequence
  Description of Artificial Sequence: Synthetic oligonucleotide
  Antisense strand to SEQ ID NO: 1847159
cuuaucccgcgauucaggg

SEQ ID NO: 1847161 - RNA, 19 nt, Artificial Sequence
  Description of Artificial Sequence: Synthetic oligonucleotide
  Sense strand starting at position 3577 of SEQ ID NO: 1563992
ccugaaucgcgggauaaga

SEQ ID NO: 1847162 - RNA, 19 nt, Artificial Sequence
  Description of Artificial Sequence: Synthetic oligonucleotide
  Antisense strand to SEQ ID NO: 1847161
ucuuaucccgcgauucagg

SEQ ID NO: 1847163 - RNA, 19 nt, Artificial Sequence
  Description of Artificial Sequence: Synthetic oligonucleotide
  Sense strand starting at position 3756 of SEQ ID NO: 1563992
ggagaugacuaguaauuug

SEQ ID NO: 1847164 - RNA, 19 nt, Artificial Sequence
  Description of Artificial Sequence: Synthetic oligonucleotide
  Antisense strand to SEQ ID NO: 1847163
caaauuacuagucaucucc

SEQ ID NO: 1847165 - RNA, 19 nt, Artificial Sequence
  Description of Artificial Sequence: Synthetic oligonucleotide
  Sense strand starting at position 3764 of SEQ ID NO: 1563992
cuaguaauuugguaaugau

SEQ ID NO: 1847166 - RNA, 19 nt, Artificial Sequence
  Description of Artificial Sequence: Synthetic oligonucleotide
  Antisense strand to SEQ ID NO: 1847165
aucauuaccaaauuacuag

SEQ ID NO: 1847167 - RNA, 19 nt, Artificial Sequence
  Description of Artificial Sequence: Synthetic oligonucleotide
  Sense strand starting at position 3767 of SEQ ID NO: 1563992
guaauuugguaaugaugau

SEQ ID NO: 1847168 - RNA, 19 nt, Artificial Sequence
  Description of Artificial Sequence: Synthetic oligonucleotide
  Antisense strand to SEQ ID NO: 1847167
aucaucauuaccaaauuac

SEQ ID NO: 1847169 - RNA, 19 nt, Artificial Sequence
  Description of Artificial Sequence: Synthetic oligonucleotide
  Sense strand starting at position 3795 of SEQ ID NO: 1563992
gggaauguuuaagaacuca

SEQ ID NO: 1847170 - RNA, 19 nt, Artificial Sequence
  Description of Artificial Sequence: Synthetic oligonucleotide
  Antisense strand to SEQ ID NO: 1847169
ugaguucuuaaacauuccc

SEQ ID NO: 1847171 - RNA, 19 nt, Artificial Sequence
  Description of Artificial Sequence: Synthetic oligonucleotide
  Sense strand starting at position 3844 of SEQ ID NO: 1563992
gauauaguuagauaucgug

SEQ ID NO: 1847172 - RNA, 19 nt, Artificial Sequence
  Description of Artificial Sequence: Synthetic oligonucleotide
  Antisense strand to SEQ ID NO: 1847171
cacgauaucuaacuauauc

SEQ ID NO: 1847173 - RNA, 19 nt, Artificial Sequence
  Description of Artificial Sequence: Synthetic oligonucleotide
  Sense strand starting at position 3850 of SEQ ID NO: 1563992
guuagauaucgugacacac

SEQ ID NO: 1847174 - RNA, 19 nt, Artificial Sequence
  Description of Artificial Sequence: Synthetic oligonucleotide
  Antisense strand to SEQ ID NO: 1847173
gugugucacgauaucuaac

SEQ ID NO: 1847175 - RNA, 19 nt, Artificial Sequence
  Description of Artificial Sequence: Synthetic oligonucleotide
  Sense strand starting at position 3858 of SEQ ID NO: 1563992
ucgugacacacuuagaguu

SEQ ID NO: 1847176 - RNA, 19 nt, Artificial Sequence
  Description of Artificial Sequence: Synthetic oligonucleotide
  Antisense strand to SEQ ID NO: 1847175
aacucuaagugugucacga

SEQ ID NO: 1847177 - RNA, 19 nt, Artificial Sequence
  Description of Artificial Sequence: Synthetic oligonucleotide
  Sense strand starting at position 3866 of SEQ ID NO: 1563992
cacuuagaguucucaagga

SEQ ID NO: 1847178 - RNA, 19 nt, Artificial Sequence
  Description of Artificial Sequence: Synthetic oligonucleotide
  Antisense strand to SEQ ID NO: 1847177
uccuugagaacucuaagug

SEQ ID NO: 1847179 - RNA, 19 nt, Artificial Sequence
  Description of Artificial Sequence: Synthetic oligonucleotide
  Sense strand starting at position 3973 of SEQ ID NO: 1563992
aaagucucuccauggaaag

SEQ ID NO: 1847180 - RNA, 19 nt, Artificial Sequence
  Description of Artificial Sequence: Synthetic oligonucleotide
  Antisense strand to SEQ ID NO: 1847179
cuuuccauggagagacuuu

SEQ ID NO: 1847181 - RNA, 19 nt, Artificial Sequence
  Description of Artificial Sequence: Synthetic oligonucleotide
  Sense strand starting at position 34 of SEQ ID NO: 1563993
guaauaaccuguuugauga

SEQ ID NO: 1847182 - RNA, 19 nt, Artificial Sequence
  Description of Artificial Sequence: Synthetic oligonucleotide
  Antisense strand to SEQ ID NO: 1847181
ucaucaaacagguuauuac

SEQ ID NO: 1847183 - RNA, 19 nt, Artificial Sequence
  Description of Artificial Sequence: Synthetic oligonucleotide
  Sense strand starting at position 65 of SEQ ID NO: 1563993
cagaucuggcugcaguuau

SEQ ID NO: 1847184 - RNA, 19 nt, Artificial Sequence
  Description of Artificial Sequence: Synthetic oligonucleotide
  Antisense strand to SEQ ID NO: 1847183
auaacugcagccagaucug

SEQ ID NO: 1847185 - RNA, 19 nt, Artificial Sequence
  Description of Artificial Sequence: Synthetic oligonucleotide
  Sense strand starting at position 516 of SEQ ID NO: 1563993
ggaccuauaccuuaugcau

SEQ ID NO: 1847186 - RNA, 19 nt, Artificial Sequence
  Description of Artificial Sequence: Synthetic oligonucleotide
  Antisense strand to SEQ ID NO: 1847185
augcauaagguauaggucc

SEQ ID NO: 1847187 - RNA, 19 nt, Artificial Sequence
  Description of Artificial Sequence: Synthetic oligonucleotide
  Sense strand starting at position 585 of SEQ ID NO: 1563993
gagugcuuugcauauaaca

SEQ ID NO: 1847188 - RNA, 19 nt, Artificial Sequence
  Description of Artificial Sequence: Synthetic oligonucleotide
  Antisense strand to SEQ ID NO: 1847187
uguuauaugcaaagcacuc

SEQ ID NO: 1847189 - RNA, 19 nt, Artificial Sequence
  Description of Artificial Sequence: Synthetic oligonucleotide
  Sense strand starting at position 645 of SEQ ID NO: 1563993
gaaauuaguuaagaaggga

SEQ ID NO: 1847190 - RNA, 19 nt, Artificial Sequence
  Description of Artificial Sequence: Synthetic oligonucleotide
  Antisense strand to SEQ ID NO: 1847189
ucccuucuuaacuaauuuc

SEQ ID NO: 1847191 - RNA, 19 nt, Artificial Sequence
  Description of Artificial Sequence: Synthetic oligonucleotide
  Sense strand starting at position 673 of SEQ ID NO: 1563993
gugccuuggaaaugaccau

SEQ ID NO: 1847192 - RNA, 19 nt, Artificial Sequence
  Description of Artificial Sequence: Synthetic oligonucleotide
  Antisense strand to SEQ ID NO: 1847191
auggucauuuccaaggcac

SEQ ID NO: 1847193 - RNA, 19 nt, Artificial Sequence
  Description of Artificial Sequence: Synthetic oligonucleotide
  Sense strand starting at position 747 of SEQ ID NO: 1563993
cuuugaaggcccuauaaau

SEQ ID NO: 1847194 - RNA, 19 nt, Artificial Sequence
  Description of Artificial Sequence: Synthetic oligonucleotide
  Antisense strand to SEQ ID NO: 1847193
auuuauagggccuucaaag

SEQ ID NO: 1847195 - RNA, 19 nt, Artificial Sequence
  Description of Artificial Sequence: Synthetic oligonucleotide
  Sense strand starting at position 829 of SEQ ID NO: 1563993
guggucuuacacugaugga

SEQ ID NO: 1847196 - RNA, 19 nt, Artificial Sequence
  Description of Artificial Sequence: Synthetic oligonucleotide
  Antisense strand to SEQ ID NO: 1847195
uccaucaguguaagaccac

SEQ ID NO: 1847197 - RNA, 19 nt, Artificial Sequence
  Description of Artificial Sequence: Synthetic oligonucleotide
  Sense strand starting at position 1244 of SEQ ID NO: 1563993
ggcucauucucauccugaa

SEQ ID NO: 1847198 - RNA, 19 nt, Artificial Sequence
  Description of Artificial Sequence: Synthetic oligonucleotide
  Antisense strand to SEQ ID NO: 1847197
uucaggaugagaaugagcc

SEQ ID NO: 1847199 - RNA, 19 nt, Artificial Sequence
  Description of Artificial Sequence: Synthetic oligonucleotide
  Sense strand starting at position 1344 of SEQ ID NO: 1563993
ggugguaaucacuggcuag

SEQ ID NO: 1847200 - RNA, 19 nt, Artificial Sequence
  Description of Artificial Sequence: Synthetic oligonucleotide
  Antisense strand to SEQ ID NO: 1847199
cuagccagugauuaccacc

SEQ ID NO: 1847201 - RNA, 19 nt, Artificial Sequence
  Description of Artificial Sequence: Synthetic oligonucleotide
  Sense strand starting at position 1347 of SEQ ID NO: 1563993
gguaaucacuggcuagcaa

SEQ ID NO: 1847202 - RNA, 19 nt, Artificial Sequence
  Description of Artificial Sequence: Synthetic oligonucleotide
  Antisense strand to SEQ ID NO: 1847201
uugcuagccagugauuacc

SEQ ID NO: 1847203 - RNA, 19 nt, Artificial Sequence
  Description of Artificial Sequence: Synthetic oligonucleotide
  Sense strand starting at position 1388 of SEQ ID NO: 1563993
ucuuaauugcaaggucuca

SEQ ID NO: 1847204 - RNA, 19 nt, Artificial Sequence
  Description of Artificial Sequence: Synthetic oligonucleotide
  Antisense strand to SEQ ID NO: 1847203
ugagaccuugcaauuaaga

SEQ ID NO: 1847205 - RNA, 19 nt, Artificial Sequence
  Description of Artificial Sequence: Synthetic oligonucleotide
  Sense strand starting at position 1442 of SEQ ID NO: 1563993
guuacaugagaggguaguu

SEQ ID NO: 1847206 - RNA, 19 nt, Artificial Sequence
  Description of Artificial Sequence: Synthetic oligonucleotide
  Antisense strand to SEQ ID NO: 1847205
aacuacccucucauguaac

SEQ ID NO: 1847207 - RNA, 19 nt, Artificial Sequence
  Description of Artificial Sequence: Synthetic oligonucleotide
  Sense strand starting at position 1451 of SEQ ID NO: 1563993
gaggguaguuccacgcguu

SEQ ID NO: 1847208 - RNA, 19 nt, Artificial Sequence
  Description of Artificial Sequence: Synthetic oligonucleotide
  Antisense strand to SEQ ID NO: 1847207
aacgcguggaacuacccuc

SEQ ID NO: 1847209 - RNA, 19 nt, Artificial Sequence
  Description of Artificial Sequence: Synthetic oligonucleotide
  Sense strand starting at position 2764 of SEQ ID NO: 1563993
gggucuacagcuugaaacu

SEQ ID NO: 1847210 - RNA, 19 nt, Artificial Sequence
  Description of Artificial Sequence: Synthetic oligonucleotide
  Antisense strand to SEQ ID NO: 1847209
aguuucaagcuguagaccc

SEQ ID NO: 1847211 - RNA, 19 nt, Artificial Sequence
  Description of Artificial Sequence: Synthetic oligonucleotide
  Sense strand starting at position 2765 of SEQ ID NO: 1563993
ggucuacagcuugaaacuu

SEQ ID NO: 1847212 - RNA, 19 nt, Artificial Sequence
  Description of Artificial Sequence: Synthetic oligonucleotide
  Antisense strand to SEQ ID NO: 1847211
aaguuucaagcuguagacc

SEQ ID NO: 1847213 - RNA, 19 nt, Artificial Sequence
  Description of Artificial Sequence: Synthetic oligonucleotide
  Sense strand starting at position 2798 of SEQ ID NO: 1563993
uguuucguggcugcugaua

SEQ ID NO: 1847214 - RNA, 19 nt, Artificial Sequence
  Description of Artificial Sequence: Synthetic oligonucleotide
  Antisense strand to SEQ ID NO: 1847213
uaucagcagccacgaaaca

SEQ ID NO: 1847215 - RNA, 19 nt, Artificial Sequence
  Description of Artificial Sequence: Synthetic oligonucleotide
  Sense strand starting at position 2938 of SEQ ID NO: 1563993
gcauuuacucuaugcuuga

SEQ ID NO: 1847216 - RNA, 19 nt, Artificial Sequence
  Description of Artificial Sequence: Synthetic oligonucleotide
  Antisense strand to SEQ ID NO: 1847215
ucaagcauagaguaaaugc

SEQ ID NO: 1847217 - RNA, 19 nt, Artificial Sequence
  Description of Artificial Sequence: Synthetic oligonucleotide
  Sense strand starting at position 3047 of SEQ ID NO: 1563993
uucugaauuucuguagcca

SEQ ID NO: 1847218 - RNA, 19 nt, Artificial Sequence
  Description of Artificial Sequence: Synthetic oligonucleotide
  Antisense strand to SEQ ID NO: 1847217
uggcuacagaaauucagaa

SEQ ID NO: 1847219 - RNA, 19 nt, Artificial Sequence
  Description of Artificial Sequence: Synthetic oligonucleotide
  Sense strand starting at position 3062 of SEQ ID NO: 1563993
gccauugguuuaguaagag

SEQ ID NO: 1847220 - RNA, 19 nt, Artificial Sequence
  Description of Artificial Sequence: Synthetic oligonucleotide
  Antisense strand to SEQ ID NO: 1847219
cucuuacuaaaccaauggc

SEQ ID NO: 1847221 - RNA, 19 nt, Artificial Sequence
  Description of Artificial Sequence: Synthetic oligonucleotide
  Sense strand starting at position 3071 of SEQ ID NO: 1563993
uuaguaagagcuuaggacu

SEQ ID NO: 1847222 - RNA, 19 nt, Artificial Sequence
  Description of Artificial Sequence: Synthetic oligonucleotide
  Antisense strand to SEQ ID NO: 1847221
aguccuaagcucuuacuaa

SEQ ID NO: 1847223 - RNA, 19 nt, Artificial Sequence
  Description of Artificial Sequence: Synthetic oligonucleotide
  Sense strand starting at position 3302 of SEQ ID NO: 1563993
auagcuaauuucguuguca

SEQ ID NO: 1847224 - RNA, 19 nt, Artificial Sequence
  Description of Artificial Sequence: Synthetic oligonucleotide
  Antisense strand to SEQ ID NO: 1847223
ugacaacgaaauuagcuau

SEQ ID NO: 1847225 - RNA, 19 nt, Artificial Sequence
  Description of Artificial Sequence: Synthetic oligonucleotide
  Sense strand starting at position 3303 of SEQ ID NO: 1563993
uagcuaauuucguugucac

SEQ ID NO: 1847226 - RNA, 19 nt, Artificial Sequence
  Description of Artificial Sequence: Synthetic oligonucleotide
  Antisense strand to SEQ ID NO: 1847225
gugacaacgaaauuagcua

SEQ ID NO: 1847227 - RNA, 19 nt, Artificial Sequence
  Description of Artificial Sequence: Synthetic oligonucleotide
  Sense strand starting at position 3304 of SEQ ID NO: 1563993
agcuaauuucguugucacu

SEQ ID NO: 1847228 - RNA, 19 nt, Artificial Sequence
  Description of Artificial Sequence: Synthetic oligonucleotide
  Antisense strand to SEQ ID NO: 1847227
agugacaacgaaauuagcu

SEQ ID NO: 1847229 - RNA, 19 nt, Artificial Sequence
  Description of Artificial Sequence: Synthetic oligonucleotide
  Sense strand starting at position 3317 of SEQ ID NO: 1563993
gucacuuggccacaaugua

SEQ ID NO: 1847230 - RNA, 19 nt, Artificial Sequence
  Description of Artificial Sequence: Synthetic oligonucleotide
  Antisense strand to SEQ ID NO: 1847229
uacauuguggccaagugac

SEQ ID NO: 1847231 - RNA, 19 nt, Artificial Sequence
  Description of Artificial Sequence: Synthetic oligonucleotide
  Sense strand starting at position 3337 of SEQ ID NO: 1563993
ugccuccuguuguuauuua

SEQ ID NO: 1847232 - RNA, 19 nt, Artificial Sequence
  Description of Artificial Sequence: Synthetic oligonucleotide
  Antisense strand to SEQ ID NO: 1847231
uaaauaacaacaggaggca

SEQ ID NO: 1847233 - RNA, 19 nt, Artificial Sequence
  Description of Artificial Sequence: Synthetic oligonucleotide
  Sense strand starting at position 3386 of SEQ ID NO: 1563993
cuaauuggaauguacguua

SEQ ID NO: 1847234 - RNA, 19 nt, Artificial Sequence
  Description of Artificial Sequence: Synthetic oligonucleotide
  Antisense strand to SEQ ID NO: 1847233
uaacguacauuccaauuag

SEQ ID NO: 1847235 - RNA, 19 nt, Artificial Sequence
  Description of Artificial Sequence: Synthetic oligonucleotide
  Sense strand starting at position 3442 of SEQ ID NO: 1563993
ugguacaguguugagcaua

SEQ ID NO: 1847236 - RNA, 19 nt, Artificial Sequence
  Description of Artificial Sequence: Synthetic oligonucleotide
  Antisense strand to SEQ ID NO: 1847235
uaugcucaacacuguacca

SEQ ID NO: 1847237 - RNA, 19 nt, Artificial Sequence
  Description of Artificial Sequence: Synthetic oligonucleotide
  Sense strand starting at position 3447 of SEQ ID NO: 1563993
caguguugagcauauaguu

SEQ ID NO: 1847238 - RNA, 19 nt, Artificial Sequence
  Description of Artificial Sequence: Synthetic oligonucleotide
  Antisense strand to SEQ ID NO: 1847237
aacuauaugcucaacacug

SEQ ID NO: 1847239 - RNA, 19 nt, Artificial Sequence
  Description of Artificial Sequence: Synthetic oligonucleotide
  Sense strand starting at position 3460 of SEQ ID NO: 1563993
auaguuggagcucaauuaa

SEQ ID NO: 1847240 - RNA, 19 nt, Artificial Sequence
  Description of Artificial Sequence: Synthetic oligonucleotide
  Antisense strand to SEQ ID NO: 1847239
uuaauugagcuccaacuau

SEQ ID NO: 1847241 - RNA, 19 nt, Artificial Sequence
  Description of Artificial Sequence: Synthetic oligonucleotide
  Sense strand starting at position 3515 of SEQ ID NO: 1563993
agcugcguucccuuauguu

SEQ ID NO: 1847242 - RNA, 19 nt, Artificial Sequence
  Description of Artificial Sequence: Synthetic oligonucleotide
  Antisense strand to SEQ ID NO: 1847241
aacauaagggaacgcagcu

SEQ ID NO: 1847243 - RNA, 19 nt, Artificial Sequence
  Description of Artificial Sequence: Synthetic oligonucleotide
  Sense strand starting at position 3529 of SEQ ID NO: 1563993
auguuugguccuuaaccaa

SEQ ID NO: 1847244 - RNA, 19 nt, Artificial Sequence
  Description of Artificial Sequence: Synthetic oligonucleotide
  Antisense strand to SEQ ID NO: 1847243
uugguuaaggaccaaacau

SEQ ID NO: 1847245 - RNA, 19 nt, Artificial Sequence
  Description of Artificial Sequence: Synthetic oligonucleotide
  Sense strand starting at position 3672 of SEQ ID NO: 1563993
ugaauuaugcagugaucca

SEQ ID NO: 1847246 - RNA, 19 nt, Artificial Sequence
  Description of Artificial Sequence: Synthetic oligonucleotide
  Antisense strand to SEQ ID NO: 1847245
uggaucacugcauaauuca

SEQ ID NO: 1847247 - RNA, 19 nt, Artificial Sequence
  Description of Artificial Sequence: Synthetic oligonucleotide
  Sense strand starting at position 3681 of SEQ ID NO: 1563993
cagugauccaugugaugug

SEQ ID NO: 1847248 - RNA, 19 nt, Artificial Sequence
  Description of Artificial Sequence: Synthetic oligonucleotide
  Antisense strand to SEQ ID NO: 1847247
cacaucacauggaucacug

SEQ ID NO: 1847249 - RNA, 19 nt, Artificial Sequence
  Description of Artificial Sequence: Synthetic oligonucleotide
  Sense strand starting at position 3695 of SEQ ID NO: 1563993
augugccuccaugaagaau

SEQ ID NO: 1847250 - RNA, 19 nt, Artificial Sequence
  Description of Artificial Sequence: Synthetic oligonucleotide
  Antisense strand to SEQ ID NO: 1847249
auucuucauggaggcacau

SEQ ID NO: 1847251 - RNA, 19 nt, Artificial Sequence
  Description of Artificial Sequence: Synthetic oligonucleotide
  Sense strand starting at position 3748 of SEQ ID NO: 1563993
uguuaucaccacuaaaugu

SEQ ID NO: 1847252 - RNA, 19 nt, Artificial Sequence
  Description of Artificial Sequence: Synthetic oligonucleotide
  Antisense strand to SEQ ID NO: 1847251
acauuuaguggugauaaca

SEQ ID NO: 1847253 - RNA, 19 nt, Artificial Sequence
  Description of Artificial Sequence: Synthetic oligonucleotide
  Sense strand starting at position 3826 of SEQ ID NO: 1563993
cugggaucauugcuucuuu

SEQ ID NO: 1847254 - RNA, 19 nt, Artificial Sequence
  Description of Artificial Sequence: Synthetic oligonucleotide
  Antisense strand to SEQ ID NO: 1847253
aaagaagcaaugaucccag

SEQ ID NO: 1847255 - RNA, 19 nt, Artificial Sequence
  Description of Artificial Sequence: Synthetic oligonucleotide
  Sense strand starting at position 3890 of SEQ ID NO: 1563993
uuugcagccauaugggaaa

SEQ ID NO: 1847256 - RNA, 19 nt, Artificial Sequence
  Description of Artificial Sequence: Synthetic oligonucleotide
  Antisense strand to SEQ ID NO: 1847255
uuucccauauggcugcaaa

SEQ ID NO: 1847257 - RNA, 19 nt, Artificial Sequence
  Description of Artificial Sequence: Synthetic oligonucleotide
  Sense strand starting at position 3892 of SEQ ID NO: 1563993
ugcagccauaugggaaaua

SEQ ID NO: 1847258 - RNA, 19 nt, Artificial Sequence
  Description of Artificial Sequence: Synthetic oligonucleotide
  Antisense strand to SEQ ID NO: 1847257
uauuucccauauggcugca

SEQ ID NO: 1847259 - RNA, 19 nt, Artificial Sequence
  Description of Artificial Sequence: Synthetic oligonucleotide
  Sense strand starting at position 3913 of SEQ ID NO: 1563993
ugaugaucuuugcuccuua

SEQ ID NO: 1847260 - RNA, 19 nt, Artificial Sequence
  Description of Artificial Sequence: Synthetic oligonucleotide
  Antisense strand to SEQ ID NO: 1847259
uaaggagcaaagaucauca

SEQ ID NO: 1847261 - RNA, 19 nt, Artificial Sequence
  Description of Artificial Sequence: Synthetic oligonucleotide
  Sense strand starting at position 172 of SEQ ID NO: 1563994
caaagagggugauuaugua

SEQ ID NO: 1847262 - RNA, 19 nt, Artificial Sequence
  Description of Artificial Sequence: Synthetic oligonucleotide
  Antisense strand to SEQ ID NO: 1847261
uacauaaucacccucuuug

SEQ ID NO: 1847263 - RNA, 19 nt, Artificial Sequence
  Description of Artificial Sequence: Synthetic oligonucleotide
  Sense strand starting at position 375 of SEQ ID NO: 1563994
augugaaaugcccacucaa

SEQ ID NO: 1847264 - RNA, 19 nt, Artificial Sequence
  Description of Artificial Sequence: Synthetic oligonucleotide
  Antisense strand to SEQ ID NO: 1847263
uugagugggcauuucacau

SEQ ID NO: 1847265 - RNA, 19 nt, Artificial Sequence
  Description of Artificial Sequence: Synthetic oligonucleotide
  Sense strand starting at position 982 of SEQ ID NO: 1563994
guugacugaguuuacuaau

SEQ ID NO: 1847266 - RNA, 19 nt, Artificial Sequence
  Description of Artificial Sequence: Synthetic oligonucleotide
  Antisense strand to SEQ ID NO: 1847265
auuaguaaacucagucaac

SEQ ID NO: 1847267 - RNA, 19 nt, Artificial Sequence
  Description of Artificial Sequence: Synthetic oligonucleotide
  Sense strand starting at position 1283 of SEQ ID NO: 1563994
gcucuuaaagccgaaauga

SEQ ID NO: 1847268 - RNA, 19 nt, Artificial Sequence
  Description of Artificial Sequence: Synthetic oligonucleotide
  Antisense strand to SEQ ID NO: 1847267
ucauuucggcuuuaagagc

SEQ ID NO: 1847269 - RNA, 19 nt, Artificial Sequence
  Description of Artificial Sequence: Synthetic oligonucleotide
  Sense strand starting at position 1448 of SEQ ID NO: 1563994
aaucauuagcaguagaggu

SEQ ID NO: 1847270 - RNA, 19 nt, Artificial Sequence
  Description of Artificial Sequence: Synthetic oligonucleotide
  Antisense strand to SEQ ID NO: 1847269
accucuacugcuaaugauu

SEQ ID NO: 1847271 - RNA, 19 nt, Artificial Sequence
  Description of Artificial Sequence: Synthetic oligonucleotide
  Sense strand starting at position 1495 of SEQ ID NO: 1563994
ggaguugugggucaagaga

SEQ ID NO: 1847272 - RNA, 19 nt, Artificial Sequence
  Description of Artificial Sequence: Synthetic oligonucleotide
  Antisense strand to SEQ ID NO: 1847271
ucucuugacccacaacucc

SEQ ID NO: 1847273 - RNA, 19 nt, Artificial Sequence
  Description of Artificial Sequence: Synthetic oligonucleotide
  Sense strand starting at position 1503 of SEQ ID NO: 1563994
gggucaagagaaugguacu

SEQ ID NO: 1847274 - RNA, 19 nt, Artificial Sequence
  Description of Artificial Sequence: Synthetic oligonucleotide
  Antisense strand to SEQ ID NO: 1847273
aguaccauucucuugaccc

SEQ ID NO: 1847275 - RNA, 19 nt, Artificial Sequence
  Description of Artificial Sequence: Synthetic oligonucleotide
  Sense strand starting at position 1504 of SEQ ID NO: 1563994
ggucaagagaaugguacuu

SEQ ID NO: 1847276 - RNA, 19 nt, Artificial Sequence
  Description of Artificial Sequence: Synthetic oligonucleotide
  Antisense strand to SEQ ID NO: 1847275
aaguaccauucucuugacc

SEQ ID NO: 1847277 - RNA, 19 nt, Artificial Sequence
  Description of Artificial Sequence: Synthetic oligonucleotide
  Sense strand starting at position 1559 of SEQ ID NO: 1563994
cccugauucccugagaggu

SEQ ID NO: 1847278 - RNA, 19 nt, Artificial Sequence
  Description of Artificial Sequence: Synthetic oligonucleotide
  Antisense strand to SEQ ID NO: 1847277
accucucagggaaucaggg

SEQ ID NO: 1847279 - RNA, 19 nt, Artificial Sequence
  Description of Artificial Sequence: Synthetic oligonucleotide
  Sense strand starting at position 2252 of SEQ ID NO: 1563994
uugcuucugauuggagaga

SEQ ID NO: 1847280 - RNA, 19 nt, Artificial Sequence
  Description of Artificial Sequence: Synthetic oligonucleotide
  Antisense strand to SEQ ID NO: 1847279
ucucuccaaucagaagcaa

SEQ ID NO: 1847281 - RNA, 19 nt, Artificial Sequence
  Description of Artificial Sequence: Synthetic oligonucleotide
  Sense strand starting at position 2328 of SEQ ID NO: 1563994
ggacguuugccagauaaau

SEQ ID NO: 1847282 - RNA, 19 nt, Artificial Sequence
  Description of Artificial Sequence: Synthetic oligonucleotide
  Antisense strand to SEQ ID NO: 1847281
auuuaucuggcaaacgucc

SEQ ID NO: 1847283 - RNA, 19 nt, Artificial Sequence
  Description of Artificial Sequence: Synthetic oligonucleotide
  Sense strand starting at position 2532 of SEQ ID NO: 1563994
ggaaacauacgaggucuga

SEQ ID NO: 1847284 - RNA, 19 nt, Artificial Sequence
  Description of Artificial Sequence: Synthetic oligonucleotide
  Antisense strand to SEQ ID NO: 1847283
ucagaccucguauguuucc

SEQ ID NO: 1847285 - RNA, 19 nt, Artificial Sequence
  Description of Artificial Sequence: Synthetic oligonucleotide
  Sense strand starting at position 2541 of SEQ ID NO: 1563994
cgaggucugaucugaaaua

SEQ ID NO: 1847286 - RNA, 19 nt, Artificial Sequence
  Description of Artificial Sequence: Synthetic oligonucleotide
  Antisense strand to SEQ ID NO: 1847285
uauuucagaucagaccucg

SEQ ID NO: 1847287 - RNA, 19 nt, Artificial Sequence
  Description of Artificial Sequence: Synthetic oligonucleotide
  Sense strand starting at position 2592 of SEQ ID NO: 1563994
gauggugcuugacuaggaa

SEQ ID NO: 1847288 - RNA, 19 nt, Artificial Sequence
  Description of Artificial Sequence: Synthetic oligonucleotide
  Antisense strand to SEQ ID NO: 1847287
uuccuagucaagcaccauc

SEQ ID NO: 1847289 - RNA, 19 nt, Artificial Sequence
  Description of Artificial Sequence: Synthetic oligonucleotide
  Sense strand starting at position 2611 of SEQ ID NO: 1563994
gcuaaagaaucagugagag

SEQ ID NO: 1847290 - RNA, 19 nt, Artificial Sequence
  Description of Artificial Sequence: Synthetic oligonucleotide
  Antisense strand to SEQ ID NO: 1847289
cucucacugauucuuuagc

SEQ ID NO: 1847291 - RNA, 19 nt, Artificial Sequence
  Description of Artificial Sequence: Synthetic oligonucleotide
  Sense strand starting at position 2619 of SEQ ID NO: 1563994
aucagugagagugguauga

SEQ ID NO: 1847292 - RNA, 19 nt, Artificial Sequence
  Description of Artificial Sequence: Synthetic oligonucleotide
  Antisense strand to SEQ ID NO: 1847291
ucauaccacucucacugau

SEQ ID NO: 1847293 - RNA, 19 nt, Artificial Sequence
  Description of Artificial Sequence: Synthetic oligonucleotide
  Sense strand starting at position 2630 of SEQ ID NO: 1563994
ugguaugacggucauccau

SEQ ID NO: 1847294 - RNA, 19 nt, Artificial Sequence
  Description of Artificial Sequence: Synthetic oligonucleotide
  Antisense strand to SEQ ID NO: 1847293
auggaugaccgucauacca

SEQ ID NO: 1847295 - RNA, 19 nt, Artificial Sequence
  Description of Artificial Sequence: Synthetic oligonucleotide
  Sense strand starting at position 2704 of SEQ ID NO: 1563994
agaaauuccuuucugagua

SEQ ID NO: 1847296 - RNA, 19 nt, Artificial Sequence
  Description of Artificial Sequence: Synthetic oligonucleotide
  Antisense strand to SEQ ID NO: 1847295
uacucagaaaggaauuucu

SEQ ID NO: 1847297 - RNA, 19 nt, Artificial Sequence
  Description of Artificial Sequence: Synthetic oligonucleotide
  Sense strand starting at position 2819 of SEQ ID NO: 1563994
gccuccagagaaugaaaua

SEQ ID NO: 1847298 - RNA, 19 nt, Artificial Sequence
  Description of Artificial Sequence: Synthetic oligonucleotide
  Antisense strand to SEQ ID NO: 1847297
uauuucauucucuggaggc

SEQ ID NO: 1847299 - RNA, 19 nt, Artificial Sequence
  Description of Artificial Sequence: Synthetic oligonucleotide
  Sense strand starting at position 2954 of SEQ ID NO: 1563994
gauuacuugucucuugaga

SEQ ID NO: 1847300 - RNA, 19 nt, Artificial Sequence
  Description of Artificial Sequence: Synthetic oligonucleotide
  Antisense strand to SEQ ID NO: 1847299
ucucaagagacaaguaauc

SEQ ID NO: 1847301 - RNA, 19 nt, Artificial Sequence
  Description of Artificial Sequence: Synthetic oligonucleotide
  Sense strand starting at position 2999 of SEQ ID NO: 1563994
ggaaauuguauuugcuugu

SEQ ID NO: 1847302 - RNA, 19 nt, Artificial Sequence
  Description of Artificial Sequence: Synthetic oligonucleotide
  Antisense strand to SEQ ID NO: 1847301
acaagcaaauacaauuucc

SEQ ID NO: 1847303 - RNA, 19 nt, Artificial Sequence
  Description of Artificial Sequence: Synthetic oligonucleotide
  Sense strand starting at position 3000 of SEQ ID NO: 1563994
gaaauuguauuugcuuguu

SEQ ID NO: 1847304 - RNA, 19 nt, Artificial Sequence
  Description of Artificial Sequence: Synthetic oligonucleotide
  Antisense strand to SEQ ID NO: 1847303
aacaagcaaauacaauuuc

SEQ ID NO: 1847305 - RNA, 19 nt, Artificial Sequence
  Description of Artificial Sequence: Synthetic oligonucleotide
  Sense strand starting at position 3005 of SEQ ID NO: 1563994
uguauuugcuuguuaaaug

SEQ ID NO: 1847306 - RNA, 19 nt, Artificial Sequence
  Description of Artificial Sequence: Synthetic oligonucleotide
  Antisense strand to SEQ ID NO: 1847305
cauuuaacaagcaaauaca

SEQ ID NO: 1847307 - RNA, 19 nt, Artificial Sequence
  Description of Artificial Sequence: Synthetic oligonucleotide
  Sense strand starting at position 3055 of SEQ ID NO: 1563994
caggaucuguucuugguaa

SEQ ID NO: 1847308 - RNA, 19 nt, Artificial Sequence
  Description of Artificial Sequence: Synthetic oligonucleotide
  Antisense strand to SEQ ID NO: 1847307
uuaccaagaacagauccug

SEQ ID NO: 1847309 - RNA, 19 nt, Artificial Sequence
  Description of Artificial Sequence: Synthetic oligonucleotide
  Sense strand starting at position 3171 of SEQ ID NO: 1563994
acaguauuucguggagugu

SEQ ID NO: 1847310 - RNA, 19 nt, Artificial Sequence
  Description of Artificial Sequence: Synthetic oligonucleotide
  Antisense strand to SEQ ID NO: 1847309
acacuccacgaaauacugu

SEQ ID NO: 1847311 - RNA, 19 nt, Artificial Sequence
  Description of Artificial Sequence: Synthetic oligonucleotide
  Sense strand starting at position 3172 of SEQ ID NO: 1563994
caguauuucguggagugua

SEQ ID NO: 1847312 - RNA, 19 nt, Artificial Sequence
  Description of Artificial Sequence: Synthetic oligonucleotide
  Antisense strand to SEQ ID NO: 1847311
uacacuccacgaaauacug

SEQ ID NO: 1847313 - RNA, 19 nt, Artificial Sequence
  Description of Artificial Sequence: Synthetic oligonucleotide
  Sense strand starting at position 3182 of SEQ ID NO: 1563994
uggaguguaccuuauacaa

SEQ ID NO: 1847314 - RNA, 19 nt, Artificial Sequence
  Description of Artificial Sequence: Synthetic oligonucleotide
  Antisense strand to SEQ ID NO: 1847313
uuguauaagguacacucca

SEQ ID NO: 1847315 - RNA, 19 nt, Artificial Sequence
  Description of Artificial Sequence: Synthetic oligonucleotide
  Sense strand starting at position 3207 of SEQ ID NO: 1563994
gugcaauaacaucauugaa

SEQ ID NO: 1847316 - RNA, 19 nt, Artificial Sequence
  Description of Artificial Sequence: Synthetic oligonucleotide
  Antisense strand to SEQ ID NO: 1847315
uucaaugauguuauugcac

SEQ ID NO: 1847317 - RNA, 19 nt, Artificial Sequence
  Description of Artificial Sequence: Synthetic oligonucleotide
  Sense strand starting at position 3252 of SEQ ID NO: 1563994
gcgaauuaaugaguugaug

SEQ ID NO: 1847318 - RNA, 19 nt, Artificial Sequence
  Description of Artificial Sequence: Synthetic oligonucleotide
  Antisense strand to SEQ ID NO: 1847317
caucaacucauuaauucgc

SEQ ID NO: 1847319 - RNA, 19 nt, Artificial Sequence
  Description of Artificial Sequence: Synthetic oligonucleotide
  Sense strand starting at position 3272 of SEQ ID NO: 1563994
guaagacuagaguagcaau

SEQ ID NO: 1847320 - RNA, 19 nt, Artificial Sequence
  Description of Artificial Sequence: Synthetic oligonucleotide
  Antisense strand to SEQ ID NO: 1847319
auugcuacucuagucuuac

SEQ ID NO: 1847321 - RNA, 19 nt, Artificial Sequence
  Description of Artificial Sequence: Synthetic oligonucleotide
  Sense strand starting at position 3280 of SEQ ID NO: 1563994
agaguagcaaucgauacuu

SEQ ID NO: 1847322 - RNA, 19 nt, Artificial Sequence
  Description of Artificial Sequence: Synthetic oligonucleotide
  Antisense strand to SEQ ID NO: 1847321
aaguaucgauugcuacucu

SEQ ID NO: 1847323 - RNA, 19 nt, Artificial Sequence
  Description of Artificial Sequence: Synthetic oligonucleotide
  Sense strand starting at position 3307 of SEQ ID NO: 1563994
guuaauauugaugaagcau

SEQ ID NO: 1847324 - RNA, 19 nt, Artificial Sequence
  Description of Artificial Sequence: Synthetic oligonucleotide
  Antisense strand to SEQ ID NO: 1847323
augcuucaucaauauuaac

SEQ ID NO: 1847325 - RNA, 19 nt, Artificial Sequence
  Description of Artificial Sequence: Synthetic oligonucleotide
  Sense strand starting at position 3315 of SEQ ID NO: 1563994
ugaugaagcaucggagaau

SEQ ID NO: 1847326 - RNA, 19 nt, Artificial Sequence
  Description of Artificial Sequence: Synthetic oligonucleotide
  Antisense strand to SEQ ID NO: 1847325
auucuccgaugcuucauca

SEQ ID NO: 1847327 - RNA, 19 nt, Artificial Sequence
  Description of Artificial Sequence: Synthetic oligonucleotide
  Sense strand starting at position 3401 of SEQ ID NO: 1563994
gcgacauuaccagauaggu

SEQ ID NO: 1847328 - RNA, 19 nt, Artificial Sequence
  Description of Artificial Sequence: Synthetic oligonucleotide
  Antisense strand to SEQ ID NO: 1847327
accuaucugguaaugucgc

SEQ ID NO: 1847329 - RNA, 19 nt, Artificial Sequence
  Description of Artificial Sequence: Synthetic oligonucleotide
  Sense strand starting at position 3409 of SEQ ID NO: 1563994
accagauagguacagcauu

SEQ ID NO: 1847330 - RNA, 19 nt, Artificial Sequence
  Description of Artificial Sequence: Synthetic oligonucleotide
  Antisense strand to SEQ ID NO: 1847329
aaugcuguaccuaucuggu

SEQ ID NO: 1847331 - RNA, 19 nt, Artificial Sequence
  Description of Artificial Sequence: Synthetic oligonucleotide
  Sense strand starting at position 3474 of SEQ ID NO: 1563994
gguagaaauccuggaaggu

SEQ ID NO: 1847332 - RNA, 19 nt, Artificial Sequence
  Description of Artificial Sequence: Synthetic oligonucleotide
  Antisense strand to SEQ ID NO: 1847331
accuuccaggauuucuacc

SEQ ID NO: 1847333 - RNA, 19 nt, Artificial Sequence
  Description of Artificial Sequence: Synthetic oligonucleotide
  Sense strand starting at position 3490 of SEQ ID NO: 1563994
gguauaaaugaggguuaag

SEQ ID NO: 1847334 - RNA, 19 nt, Artificial Sequence
  Description of Artificial Sequence: Synthetic oligonucleotide
  Antisense strand to SEQ ID NO: 1847333
cuuaacccucauuuauacc

SEQ ID NO: 1847335 - RNA, 19 nt, Artificial Sequence
  Description of Artificial Sequence: Synthetic oligonucleotide
  Sense strand starting at position 3500 of SEQ ID NO: 1563994
aggguuaagccucacuuau

SEQ ID NO: 1847336 - RNA, 19 nt, Artificial Sequence
  Description of Artificial Sequence: Synthetic oligonucleotide
  Antisense strand to SEQ ID NO: 1847335
auaagugaggcuuaacccu

SEQ ID NO: 1847337 - RNA, 19 nt, Artificial Sequence
  Description of Artificial Sequence: Synthetic oligonucleotide
  Sense strand starting at position 3730 of SEQ ID NO: 1563994
cuguacauguuaucaauag

SEQ ID NO: 1847338 - RNA, 19 nt, Artificial Sequence
  Description of Artificial Sequence: Synthetic oligonucleotide
  Antisense strand to SEQ ID NO: 1847337
cuauugauaacauguacag

SEQ ID NO: 1847339 - RNA, 19 nt, Artificial Sequence
  Description of Artificial Sequence: Synthetic oligonucleotide
  Sense strand starting at position 3796 of SEQ ID NO: 1563994
agaauaggcugaccuuuau

SEQ ID NO: 1847340 - RNA, 19 nt, Artificial Sequence
  Description of Artificial Sequence: Synthetic oligonucleotide
  Antisense strand to SEQ ID NO: 1847339
auaaaggucagccuauucu

SEQ ID NO: 1847341 - RNA, 19 nt, Artificial Sequence
  Description of Artificial Sequence: Synthetic oligonucleotide
  Sense strand starting at position 477 of SEQ ID NO: 1563995
ucucaaagugcugaguuga

SEQ ID NO: 1847342 - RNA, 19 nt, Artificial Sequence
  Description of Artificial Sequence: Synthetic oligonucleotide
  Antisense strand to SEQ ID NO: 1847341
ucaacucagcacuuugaga

SEQ ID NO: 1847343 - RNA, 19 nt, Artificial Sequence
  Description of Artificial Sequence: Synthetic oligonucleotide
  Sense strand starting at position 519 of SEQ ID NO: 1563995
agaggcaaauccuugguau

SEQ ID NO: 1847344 - RNA, 19 nt, Artificial Sequence
  Description of Artificial Sequence: Synthetic oligonucleotide
  Antisense strand to SEQ ID NO: 1847343
auaccaaggauuugccucu

SEQ ID NO: 1847345 - RNA, 19 nt, Artificial Sequence
  Description of Artificial Sequence: Synthetic oligonucleotide
  Sense strand starting at position 520 of SEQ ID NO: 1563995
gaggcaaauccuugguauc

SEQ ID NO: 1847346 - RNA, 19 nt, Artificial Sequence
  Description of Artificial Sequence: Synthetic oligonucleotide
  Antisense strand to SEQ ID NO: 1847345
gauaccaaggauuugccuc

SEQ ID NO: 1847347 - RNA, 19 nt, Artificial Sequence
  Description of Artificial Sequence: Synthetic oligonucleotide
  Sense strand starting at position 521 of SEQ ID NO: 1563995
aggcaaauccuugguaucu

SEQ ID NO: 1847348 - RNA, 19 nt, Artificial Sequence
  Description of Artificial Sequence: Synthetic oligonucleotide
  Antisense strand to SEQ ID NO: 1847347
agauaccaaggauuugccu

SEQ ID NO: 1847349 - RNA, 19 nt, Artificial Sequence
  Description of Artificial Sequence: Synthetic oligonucleotide
  Sense strand starting at position 526 of SEQ ID NO: 1563995
aauccuugguaucuguaga

SEQ ID NO: 1847350 - RNA, 19 nt, Artificial Sequence
  Description of Artificial Sequence: Synthetic oligonucleotide
  Antisense strand to SEQ ID NO: 1847349
ucuacagauaccaaggauu

SEQ ID NO: 1847351 - RNA, 19 nt, Artificial Sequence
  Description of Artificial Sequence: Synthetic oligonucleotide
  Sense strand starting at position 553 of SEQ ID NO: 1563995
ugaauuaucgaaugcucua

SEQ ID NO: 1847352 - RNA, 19 nt, Artificial Sequence
  Description of Artificial Sequence: Synthetic oligonucleotide
  Antisense strand to SEQ ID NO: 1847351
uagagcauucgauaauuca

SEQ ID NO: 1847353 - RNA, 19 nt, Artificial Sequence
  Description of Artificial Sequence: Synthetic oligonucleotide
  Sense strand starting at position 558 of SEQ ID NO: 1563995
uaucgaaugcucuauagua

SEQ ID NO: 1847354 - RNA, 19 nt, Artificial Sequence
  Description of Artificial Sequence: Synthetic oligonucleotide
  Antisense strand to SEQ ID NO: 1847353
uacuauagagcauucgaua

SEQ ID NO: 1847355 - RNA, 19 nt, Artificial Sequence
  Description of Artificial Sequence: Synthetic oligonucleotide
  Sense strand starting at position 560 of SEQ ID NO: 1563995
ucgaaugcucuauaguaca

SEQ ID NO: 1847356 - RNA, 19 nt, Artificial Sequence
  Description of Artificial Sequence: Synthetic oligonucleotide
  Antisense strand to SEQ ID NO: 1847355
uguacuauagagcauucga

SEQ ID NO: 1847357 - RNA, 19 nt, Artificial Sequence
  Description of Artificial Sequence: Synthetic oligonucleotide
  Sense strand starting at position 677 of SEQ ID NO: 1563995
uuuagauacagguggagua

SEQ ID NO: 1847358 - RNA, 19 nt, Artificial Sequence
  Description of Artificial Sequence: Synthetic oligonucleotide
  Antisense strand to SEQ ID NO: 1847357
uacuccaccuguaucuaaa

SEQ ID NO: 1847359 - RNA, 19 nt, Artificial Sequence
  Description of Artificial Sequence: Synthetic oligonucleotide
  Sense strand starting at position 995 of SEQ ID NO: 1563995
cuugcugugcuuuaaauuu

SEQ ID NO: 1847360 - RNA, 19 nt, Artificial Sequence
  Description of Artificial Sequence: Synthetic oligonucleotide
  Antisense strand to SEQ ID NO: 1847359
aaauuuaaagcacagcaag

SEQ ID NO: 1847361 - RNA, 19 nt, Artificial Sequence
  Description of Artificial Sequence: Synthetic oligonucleotide
  Sense strand starting at position 1043 of SEQ ID NO: 1563995
caggaaauauggucucugu

SEQ ID NO: 1847362 - RNA, 19 nt, Artificial Sequence
  Description of Artificial Sequence: Synthetic oligonucleotide
  Antisense strand to SEQ ID NO: 1847361
acagagaccauauuuccug

SEQ ID NO: 1847363 - RNA, 19 nt, Artificial Sequence
  Description of Artificial Sequence: Synthetic oligonucleotide
  Sense strand starting at position 1046 of SEQ ID NO: 1563995
gaaauauggucucuguucu

SEQ ID NO: 1847364 - RNA, 19 nt, Artificial Sequence
  Description of Artificial Sequence: Synthetic oligonucleotide
  Antisense strand to SEQ ID NO: 1847363
agaacagagaccauauuuc

SEQ ID NO: 1847365 - RNA, 19 nt, Artificial Sequence
  Description of Artificial Sequence: Synthetic oligonucleotide
  Sense strand starting at position 1083 of SEQ ID NO: 1563995
gcucuuaaggaguaaugac

SEQ ID NO: 1847366 - RNA, 19 nt, Artificial Sequence
  Description of Artificial Sequence: Synthetic oligonucleotide
  Antisense strand to SEQ ID NO: 1847365
gucauuacuccuuaagagc

SEQ ID NO: 1847367 - RNA, 19 nt, Artificial Sequence
  Description of Artificial Sequence: Synthetic oligonucleotide
  Sense strand starting at position 1602 of SEQ ID NO: 1563995
ccaauaagugcaugugaga

SEQ ID NO: 1847368 - RNA, 19 nt, Artificial Sequence
  Description of Artificial Sequence: Synthetic oligonucleotide
  Antisense strand to SEQ ID NO: 1847367
ucucacaugcacuuauugg

SEQ ID NO: 1847369 - RNA, 19 nt, Artificial Sequence
  Description of Artificial Sequence: Synthetic oligonucleotide
  Sense strand starting at position 1611 of SEQ ID NO: 1563995
gcaugugagaguugagaga

SEQ ID NO: 1847370 - RNA, 19 nt, Artificial Sequence
  Description of Artificial Sequence: Synthetic oligonucleotide
  Antisense strand to SEQ ID NO: 1847369
ucucucaacucucacaugc

SEQ ID NO: 1847371 - RNA, 19 nt, Artificial Sequence
  Description of Artificial Sequence: Synthetic oligonucleotide
  Sense strand starting at position 1738 of SEQ ID NO: 1563995
guuucuagagucuaggaua

SEQ ID NO: 1847372 - RNA, 19 nt, Artificial Sequence
  Description of Artificial Sequence: Synthetic oligonucleotide
  Antisense strand to SEQ ID NO: 1847371
uauccuagacucuagaaac

SEQ ID NO: 1847373 - RNA, 19 nt, Artificial Sequence
  Description of Artificial Sequence: Synthetic oligonucleotide
  Sense strand starting at position 2608 of SEQ ID NO: 1563995
ggcgauaguguguuuguau

SEQ ID NO: 1847374 - RNA, 19 nt, Artificial Sequence
  Description of Artificial Sequence: Synthetic oligonucleotide
  Antisense strand to SEQ ID NO: 1847373
auacaaacacacuaucgcc

SEQ ID NO: 1847375 - RNA, 19 nt, Artificial Sequence
  Description of Artificial Sequence: Synthetic oligonucleotide
  Sense strand starting at position 2845 of SEQ ID NO: 1563995
uagggaaucugguugucuu

SEQ ID NO: 1847376 - RNA, 19 nt, Artificial Sequence
  Description of Artificial Sequence: Synthetic oligonucleotide
  Antisense strand to SEQ ID NO: 1847375
aagacaaccagauucccua

SEQ ID NO: 1847377 - RNA, 19 nt, Artificial Sequence
  Description of Artificial Sequence: Synthetic oligonucleotide
  Sense strand starting at position 2846 of SEQ ID NO: 1563995
agggaaucugguugucuua

SEQ ID NO: 1847378 - RNA, 19 nt, Artificial Sequence
  Description of Artificial Sequence: Synthetic oligonucleotide
  Antisense strand to SEQ ID NO: 1847377
uaagacaaccagauucccu

SEQ ID NO: 1847379 - RNA, 19 nt, Artificial Sequence
  Description of Artificial Sequence: Synthetic oligonucleotide
  Sense strand starting at position 2848 of SEQ ID NO: 1563995
ggaaucugguugucuuaag

SEQ ID NO: 1847380 - RNA, 19 nt, Artificial Sequence
  Description of Artificial Sequence: Synthetic oligonucleotide
  Antisense strand to SEQ ID NO: 1847379
cuuaagacaaccagauucc

SEQ ID NO: 1847381 - RNA, 19 nt, Artificial Sequence
  Description of Artificial Sequence: Synthetic oligonucleotide
  Sense strand starting at position 2875 of SEQ ID NO: 1563995
gagauagaguuguuacccu

SEQ ID NO: 1847382 - RNA, 19 nt, Artificial Sequence
  Description of Artificial Sequence: Synthetic oligonucleotide
  Antisense strand to SEQ ID NO: 1847381
aggguaacaacucuaucuc

SEQ ID NO: 1847383 - RNA, 19 nt, Artificial Sequence
  Description of Artificial Sequence: Synthetic oligonucleotide
  Sense strand starting at position 2972 of SEQ ID NO: 1563995
aggacugauuagccaugau

SEQ ID NO: 1847384 - RNA, 19 nt, Artificial Sequence
  Description of Artificial Sequence: Synthetic oligonucleotide
  Antisense strand to SEQ ID NO: 1847383
aucauggcuaaucaguccu

SEQ ID NO: 1847385 - RNA, 19 nt, Artificial Sequence
  Description of Artificial Sequence: Synthetic oligonucleotide
  Sense strand starting at position 2975 of SEQ ID NO: 1563995
acugauuagccaugaucaa

SEQ ID NO: 1847386 - RNA, 19 nt, Artificial Sequence
  Description of Artificial Sequence: Synthetic oligonucleotide
  Antisense strand to SEQ ID NO: 1847385
uugaucauggcuaaucagu

SEQ ID NO: 1847387 - RNA, 19 nt, Artificial Sequence
  Description of Artificial Sequence: Synthetic oligonucleotide
  Sense strand starting at position 2976 of SEQ ID NO: 1563995
cugauuagccaugaucaau

SEQ ID NO: 1847388 - RNA, 19 nt, Artificial Sequence
  Description of Artificial Sequence: Synthetic oligonucleotide
  Antisense strand to SEQ ID NO: 1847387
auugaucauggcuaaucag

SEQ ID NO: 1847389 - RNA, 19 nt, Artificial Sequence
  Description of Artificial Sequence: Synthetic oligonucleotide
  Sense strand starting at position 3050 of SEQ ID NO: 1563995
ggaauuugauuaugaauga

SEQ ID NO: 1847390 - RNA, 19 nt, Artificial Sequence
  Description of Artificial Sequence: Synthetic oligonucleotide
  Antisense strand to SEQ ID NO: 1847389
ucauucauaaucaaauucc

SEQ ID NO: 1847391 - RNA, 19 nt, Artificial Sequence
  Description of Artificial Sequence: Synthetic oligonucleotide
  Sense strand starting at position 3135 of SEQ ID NO: 1563995
gauagugaaguuugauuaa

SEQ ID NO: 1847392 - RNA, 19 nt, Artificial Sequence
  Description of Artificial Sequence: Synthetic oligonucleotide
  Antisense strand to SEQ ID NO: 1847391
uuaaucaaacuucacuauc

SEQ ID NO: 1847393 - RNA, 19 nt, Artificial Sequence
  Description of Artificial Sequence: Synthetic oligonucleotide
  Sense strand starting at position 3169 of SEQ ID NO: 1563995
uguucuuaucuacaguaaa

SEQ ID NO: 1847394 - RNA, 19 nt, Artificial Sequence
  Description of Artificial Sequence: Synthetic oligonucleotide
  Antisense strand to SEQ ID NO: 1847393
uuuacuguagauaagaaca

SEQ ID NO: 1847395 - RNA, 19 nt, Artificial Sequence
  Description of Artificial Sequence: Synthetic oligonucleotide
  Sense strand starting at position 3202 of SEQ ID NO: 1563995
agaauaagguuauuggcua

SEQ ID NO: 1847396 - RNA, 19 nt, Artificial Sequence
  Description of Artificial Sequence: Synthetic oligonucleotide
  Antisense strand to SEQ ID NO: 1847395
uagccaauaaccuuauucu

SEQ ID NO: 1847397 - RNA, 19 nt, Artificial Sequence
  Description of Artificial Sequence: Synthetic oligonucleotide
  Sense strand starting at position 3206 of SEQ ID NO: 1563995
uaagguuauuggcuaaagu

SEQ ID NO: 1847398 - RNA, 19 nt, Artificial Sequence
  Description of Artificial Sequence: Synthetic oligonucleotide
  Antisense strand to SEQ ID NO: 1847397
acuuuagccaauaaccuua

SEQ ID NO: 1847399 - RNA, 19 nt, Artificial Sequence
  Description of Artificial Sequence: Synthetic oligonucleotide
  Sense strand starting at position 3207 of SEQ ID NO: 1563995
aagguuauuggcuaaagua

SEQ ID NO: 1847400 - RNA, 19 nt, Artificial Sequence
  Description of Artificial Sequence: Synthetic oligonucleotide
  Antisense strand to SEQ ID NO: 1847399
uacuuuagccaauaaccuu

SEQ ID NO: 1847401 - RNA, 19 nt, Artificial Sequence
  Description of Artificial Sequence: Synthetic oligonucleotide
  Sense strand starting at position 3274 of SEQ ID NO: 1563995
uacugugaaugaucagagu

SEQ ID NO: 1847402 - RNA, 19 nt, Artificial Sequence
  Description of Artificial Sequence: Synthetic oligonucleotide
  Antisense strand to SEQ ID NO: 1847401
acucugaucauucacagua

SEQ ID NO: 1847403 - RNA, 19 nt, Artificial Sequence
  Description of Artificial Sequence: Synthetic oligonucleotide
  Sense strand starting at position 3290 of SEQ ID NO: 1563995
aguuuagcugucuugcauu

SEQ ID NO: 1847404 - RNA, 19 nt, Artificial Sequence
  Description of Artificial Sequence: Synthetic oligonucleotide
  Antisense strand to SEQ ID NO: 1847403
aaugcaagacagcuaaacu

SEQ ID NO: 1847405 - RNA, 19 nt, Artificial Sequence
  Description of Artificial Sequence: Synthetic oligonucleotide
  Sense strand starting at position 3321 of SEQ ID NO: 1563995
uagauacuuguggagcuua

SEQ ID NO: 1847406 - RNA, 19 nt, Artificial Sequence
  Description of Artificial Sequence: Synthetic oligonucleotide
  Antisense strand to SEQ ID NO: 1847405
uaagcuccacaaguaucua

SEQ ID NO: 1847407 - RNA, 19 nt, Artificial Sequence
  Description of Artificial Sequence: Synthetic oligonucleotide
  Sense strand starting at position 3326 of SEQ ID NO: 1563995
acuuguggagcuuaaauua

SEQ ID NO: 1847408 - RNA, 19 nt, Artificial Sequence
  Description of Artificial Sequence: Synthetic oligonucleotide
  Antisense strand to SEQ ID NO: 1847407
uaauuuaagcuccacaagu

SEQ ID NO: 1847409 - RNA, 19 nt, Artificial Sequence
  Description of Artificial Sequence: Synthetic oligonucleotide
  Sense strand starting at position 3393 of SEQ ID NO: 1563995
cucacugugcauuauucua

SEQ ID NO: 1847410 - RNA, 19 nt, Artificial Sequence
  Description of Artificial Sequence: Synthetic oligonucleotide
  Antisense strand to SEQ ID NO: 1847409
uagaauaaugcacagugag

SEQ ID NO: 1847411 - RNA, 19 nt, Artificial Sequence
  Description of Artificial Sequence: Synthetic oligonucleotide
  Sense strand starting at position 3404 of SEQ ID NO: 1563995
uuauucuaagucuguaaug

SEQ ID NO: 1847412 - RNA, 19 nt, Artificial Sequence
  Description of Artificial Sequence: Synthetic oligonucleotide
  Antisense strand to SEQ ID NO: 1847411
cauuacagacuuagaauaa

SEQ ID NO: 1847413 - RNA, 19 nt, Artificial Sequence
  Description of Artificial Sequence: Synthetic oligonucleotide
  Sense strand starting at position 3406 of SEQ ID NO: 1563995
auucuaagucuguaaugcu

SEQ ID NO: 1847414 - RNA, 19 nt, Artificial Sequence
  Description of Artificial Sequence: Synthetic oligonucleotide
  Antisense strand to SEQ ID NO: 1847413
agcauuacagacuuagaau

SEQ ID NO: 1847415 - RNA, 19 nt, Artificial Sequence
  Description of Artificial Sequence: Synthetic oligonucleotide
  Sense strand starting at position 3447 of SEQ ID NO: 1563995
uugacugugaccgacagua

SEQ ID NO: 1847416 - RNA, 19 nt, Artificial Sequence
  Description of Artificial Sequence: Synthetic oligonucleotide
  Antisense strand to SEQ ID NO: 1847415
uacugucggucacagucaa

SEQ ID NO: 1847417 - RNA, 19 nt, Artificial Sequence
  Description of Artificial Sequence: Synthetic oligonucleotide
  Sense strand starting at position 3650 of SEQ ID NO: 1563995
gugugugcacuuuauuuaa

SEQ ID NO: 1847418 - RNA, 19 nt, Artificial Sequence
  Description of Artificial Sequence: Synthetic oligonucleotide
  Antisense strand to SEQ ID NO: 1847417
uuaaauaaagugcacacac

SEQ ID NO: 1847419 - RNA, 19 nt, Artificial Sequence
  Description of Artificial Sequence: Synthetic oligonucleotide
  Sense strand starting at position 3965 of SEQ ID NO: 1563995
ccuggcucccuccagaaau

SEQ ID NO: 1847420 - RNA, 19 nt, Artificial Sequence
  Description of Artificial Sequence: Synthetic oligonucleotide
  Antisense strand to SEQ ID NO: 1847419
auuucuggagggagccagg

SEQ ID NO: 1847421 - RNA, 19 nt, Artificial Sequence
  Description of Artificial Sequence: Synthetic oligonucleotide
  Sense strand starting at position 106 of SEQ ID NO: 1563996
aaccuucugggaugaggua

SEQ ID NO: 1847422 - RNA, 19 nt, Artificial Sequence
  Description of Artificial Sequence: Synthetic oligonucleotide
  Antisense strand to SEQ ID NO: 1847421
uaccucaucccagaagguu

SEQ ID NO: 1847423 - RNA, 19 nt, Artificial Sequence
  Description of Artificial Sequence: Synthetic oligonucleotide
  Sense strand starting at position 305 of SEQ ID NO: 1563996
cccugauguccguuagcgu

SEQ ID NO: 1847424 - RNA, 19 nt, Artificial Sequence
  Description of Artificial Sequence: Synthetic oligonucleotide
  Antisense strand to SEQ ID NO: 1847423
acgcuaacggacaucaggg

SEQ ID NO: 1847425 - RNA, 19 nt, Artificial Sequence
  Description of Artificial Sequence: Synthetic oligonucleotide
  Sense strand starting at position 310 of SEQ ID NO: 1563996
auguccguuagcguuauaa

SEQ ID NO: 1847426 - RNA, 19 nt, Artificial Sequence
  Description of Artificial Sequence: Synthetic oligonucleotide
  Antisense strand to SEQ ID NO: 1847425
uuauaacgcuaacggacau

SEQ ID NO: 1847427 - RNA, 19 nt, Artificial Sequence
  Description of Artificial Sequence: Synthetic oligonucleotide
  Sense strand starting at position 320 of SEQ ID NO: 1563996
gcguuauaacggcaagaga

SEQ ID NO: 1847428 - RNA, 19 nt, Artificial Sequence
  Description of Artificial Sequence: Synthetic oligonucleotide
  Antisense strand to SEQ ID NO: 1847427
ucucuugccguuauaacgc

SEQ ID NO: 1847429 - RNA, 19 nt, Artificial Sequence
  Description of Artificial Sequence: Synthetic oligonucleotide
  Sense strand starting at position 456 of SEQ ID NO: 1563996
gggagaauccagggcucua

SEQ ID NO: 1847430 - RNA, 19 nt, Artificial Sequence
  Description of Artificial Sequence: Synthetic oligonucleotide
  Antisense strand to SEQ ID NO: 1847429
uagagcccuggauucuccc

SEQ ID NO: 1847431 - RNA, 19 nt, Artificial Sequence
  Description of Artificial Sequence: Synthetic oligonucleotide
  Sense strand starting at position 486 of SEQ ID NO: 1563996
gugaaucagaacuguaugu

SEQ ID NO: 1847432 - RNA, 19 nt, Artificial Sequence
  Description of Artificial Sequence: Synthetic oligonucleotide
  Antisense strand to SEQ ID NO: 1847431
acauacaguucugauucac

SEQ ID NO: 1847433 - RNA, 19 nt, Artificial Sequence
  Description of Artificial Sequence: Synthetic oligonucleotide
  Sense strand starting at position 552 of SEQ ID NO: 1563996
ggcccagggagucauacau

SEQ ID NO: 1847434 - RNA, 19 nt, Artificial Sequence
  Description of Artificial Sequence: Synthetic oligonucleotide
  Antisense strand to SEQ ID NO: 1847433
auguaugacucccugggcc

SEQ ID NO: 1847435 - RNA, 19 nt, Artificial Sequence
  Description of Artificial Sequence: Synthetic oligonucleotide
  Sense strand starting at position 698 of SEQ ID NO: 1563996
ggagaagaaggccgugaua

SEQ ID NO: 1847436 - RNA, 19 nt, Artificial Sequence
  Description of Artificial Sequence: Synthetic oligonucleotide
  Antisense strand to SEQ ID NO: 1847435
uaucacggccuucuucucc

SEQ ID NO: 1847437 - RNA, 19 nt, Artificial Sequence
  Description of Artificial Sequence: Synthetic oligonucleotide
  Sense strand starting at position 700 of SEQ ID NO: 1563996
agaagaaggccgugauaag

SEQ ID NO: 1847438 - RNA, 19 nt, Artificial Sequence
  Description of Artificial Sequence: Synthetic oligonucleotide
  Antisense strand to SEQ ID NO: 1847437
cuuaucacggccuucuucu

SEQ ID NO: 1847439 - RNA, 19 nt, Artificial Sequence
  Description of Artificial Sequence: Synthetic oligonucleotide
  Sense strand starting at position 1391 of SEQ ID NO: 1563996
gacggauaccuggagucga

SEQ ID NO: 1847440 - RNA, 19 nt, Artificial Sequence
  Description of Artificial Sequence: Synthetic oligonucleotide
  Antisense strand to SEQ ID NO: 1847439
ucgacuccagguauccguc

SEQ ID NO: 1847441 - RNA, 19 nt, Artificial Sequence
  Description of Artificial Sequence: Synthetic oligonucleotide
  Sense strand starting at position 1416 of SEQ ID NO: 1563996
aggcgguguccugcgaaga

SEQ ID NO: 1847442 - RNA, 19 nt, Artificial Sequence
  Description of Artificial Sequence: Synthetic oligonucleotide
  Antisense strand to SEQ ID NO: 1847441
ucuucgcaggacaccgccu

SEQ ID NO: 1847443 - RNA, 19 nt, Artificial Sequence
  Description of Artificial Sequence: Synthetic oligonucleotide
  Sense strand starting at position 1677 of SEQ ID NO: 1563996
ccuguagaggcuuggucaa

SEQ ID NO: 1847444 - RNA, 19 nt, Artificial Sequence
  Description of Artificial Sequence: Synthetic oligonucleotide
  Antisense strand to SEQ ID NO: 1847443
uugaccaagccucuacagg

SEQ ID NO: 1847445 - RNA, 19 nt, Artificial Sequence
  Description of Artificial Sequence: Synthetic oligonucleotide
  Sense strand starting at position 1679 of SEQ ID NO: 1563996
uguagaggcuuggucaaca

SEQ ID NO: 1847446 - RNA, 19 nt, Artificial Sequence
  Description of Artificial Sequence: Synthetic oligonucleotide
  Antisense strand to SEQ ID NO: 1847445
uguugaccaagccucuaca

SEQ ID NO: 1847447 - RNA, 19 nt, Artificial Sequence
  Description of Artificial Sequence: Synthetic oligonucleotide
  Sense strand starting at position 1713 of SEQ ID NO: 1563996
gcagauugagcccacugaa

SEQ ID NO: 1847448 - RNA, 19 nt, Artificial Sequence
  Description of Artificial Sequence: Synthetic oligonucleotide
  Antisense strand to SEQ ID NO: 1847447
uucagugggcucaaucugc

SEQ ID NO: 1847449 - RNA, 19 nt, Artificial Sequence
  Description of Artificial Sequence: Synthetic oligonucleotide
  Sense strand starting at position 1994 of SEQ ID NO: 1563996
gccaguucuuauuugcaua

SEQ ID NO: 1847450 - RNA, 19 nt, Artificial Sequence
  Description of Artificial Sequence: Synthetic oligonucleotide
  Antisense strand to SEQ ID NO: 1847449
uaugcaaauaagaacuggc

SEQ ID NO: 1847451 - RNA, 19 nt, Artificial Sequence
  Description of Artificial Sequence: Synthetic oligonucleotide
  Sense strand starting at position 2134 of SEQ ID NO: 1563996
ugggaaucccuuugcagca

SEQ ID NO: 1847452 - RNA, 19 nt, Artificial Sequence
  Description of Artificial Sequence: Synthetic oligonucleotide
  Antisense strand to SEQ ID NO: 1847451
ugcugcaaagggauuccca

SEQ ID NO: 1847453 - RNA, 19 nt, Artificial Sequence
  Description of Artificial Sequence: Synthetic oligonucleotide
  Sense strand starting at position 2237 of SEQ ID NO: 1563996
gcaguauccuuuccuggga

SEQ ID NO: 1847454 - RNA, 19 nt, Artificial Sequence
  Description of Artificial Sequence: Synthetic oligonucleotide
  Antisense strand to SEQ ID NO: 1847453
ucccaggaaaggauacugc

SEQ ID NO: 1847455 - RNA, 19 nt, Artificial Sequence
  Description of Artificial Sequence: Synthetic oligonucleotide
  Sense strand starting at position 2238 of SEQ ID NO: 1563996
caguauccuuuccugggaa

SEQ ID NO: 1847456 - RNA, 19 nt, Artificial Sequence
  Description of Artificial Sequence: Synthetic oligonucleotide
  Antisense strand to SEQ ID NO: 1847455
uucccaggaaaggauacug

SEQ ID NO: 1847457 - RNA, 19 nt, Artificial Sequence
  Description of Artificial Sequence: Synthetic oligonucleotide
  Sense strand starting at position 2240 of SEQ ID NO: 1563996
guauccuuuccugggaagu

SEQ ID NO: 1847458 - RNA, 19 nt, Artificial Sequence
  Description of Artificial Sequence: Synthetic oligonucleotide
  Antisense strand to SEQ ID NO: 1847457
acuucccaggaaaggauac

SEQ ID NO: 1847459 - RNA, 19 nt, Artificial Sequence
  Description of Artificial Sequence: Synthetic oligonucleotide
  Sense strand starting at position 2241 of SEQ ID NO: 1563996
uauccuuuccugggaaguu

SEQ ID NO: 1847460 - RNA, 19 nt, Artificial Sequence
  Description of Artificial Sequence: Synthetic oligonucleotide
  Antisense strand to SEQ ID NO: 1847459
aacuucccaggaaaggaua

SEQ ID NO: 1847461 - RNA, 19 nt, Artificial Sequence
  Description of Artificial Sequence: Synthetic oligonucleotide
  Sense strand starting at position 2313 of SEQ ID NO: 1563996
cuaagaauucgcgcuugug

SEQ ID NO: 1847462 - RNA, 19 nt, Artificial Sequence
  Description of Artificial Sequence: Synthetic oligonucleotide
  Antisense strand to SEQ ID NO: 1847461
cacaagcgcgaauucuuag

SEQ ID NO: 1847463 - RNA, 19 nt, Artificial Sequence
  Description of Artificial Sequence: Synthetic oligonucleotide
  Sense strand starting at position 2419 of SEQ ID NO: 1563996
aggccagggcccuggaaau

SEQ ID NO: 1847464 - RNA, 19 nt, Artificial Sequence
  Description of Artificial Sequence: Synthetic oligonucleotide
  Antisense strand to SEQ ID NO: 1847463
auuuccagggcccuggccu

SEQ ID NO: 1847465 - RNA, 19 nt, Artificial Sequence
  Description of Artificial Sequence: Synthetic oligonucleotide
  Sense strand starting at position 2480 of SEQ ID NO: 1563996
gggugugcauuggucaaag

SEQ ID NO: 1847466 - RNA, 19 nt, Artificial Sequence
  Description of Artificial Sequence: Synthetic oligonucleotide
  Antisense strand to SEQ ID NO: 1847465
cuuugaccaaugcacaccc

SEQ ID NO: 1847467 - RNA, 19 nt, Artificial Sequence
  Description of Artificial Sequence: Synthetic oligonucleotide
  Sense strand starting at position 2555 of SEQ ID NO: 1563996
ucagcaagucuagaaucua

SEQ ID NO: 1847468 - RNA, 19 nt, Artificial Sequence
  Description of Artificial Sequence: Synthetic oligonucleotide
  Antisense strand to SEQ ID NO: 1847467
uagauucuagacuugcuga

SEQ ID NO: 1847469 - RNA, 19 nt, Artificial Sequence
  Description of Artificial Sequence: Synthetic oligonucleotide
  Sense strand starting at position 2892 of SEQ ID NO: 1563996
aguuauguccuagaaugac

SEQ ID NO: 1847470 - RNA, 19 nt, Artificial Sequence
  Description of Artificial Sequence: Synthetic oligonucleotide
  Antisense strand to SEQ ID NO: 1847469
gucauucuaggacauaacu

SEQ ID NO: 1847471 - RNA, 19 nt, Artificial Sequence
  Description of Artificial Sequence: Synthetic oligonucleotide
  Sense strand starting at position 3024 of SEQ ID NO: 1563996
ucagauaugcacugucaca

SEQ ID NO: 1847472 - RNA, 19 nt, Artificial Sequence
  Description of Artificial Sequence: Synthetic oligonucleotide
  Antisense strand to SEQ ID NO: 1847471
ugugacagugcauaucuga

SEQ ID NO: 1847473 - RNA, 19 nt, Artificial Sequence
  Description of Artificial Sequence: Synthetic oligonucleotide
  Sense strand starting at position 3051 of SEQ ID NO: 1563996
uguacugucccagaaauga

SEQ ID NO: 1847474 - RNA, 19 nt, Artificial Sequence
  Description of Artificial Sequence: Synthetic oligonucleotide
  Antisense strand to SEQ ID NO: 1847473
ucauuucugggacaguaca

SEQ ID NO: 1847475 - RNA, 19 nt, Artificial Sequence
  Description of Artificial Sequence: Synthetic oligonucleotide
  Sense strand starting at position 3078 of SEQ ID NO: 1563996
gagucugucacaggaagau

SEQ ID NO: 1847476 - RNA, 19 nt, Artificial Sequence
  Description of Artificial Sequence: Synthetic oligonucleotide
  Antisense strand to SEQ ID NO: 1847475
aucuuccugugacagacuc

SEQ ID NO: 1847477 - RNA, 19 nt, Artificial Sequence
  Description of Artificial Sequence: Synthetic oligonucleotide
  Sense strand starting at position 3239 of SEQ ID NO: 1563996
gcaguuuaucaauggaaca

SEQ ID NO: 1847478 - RNA, 19 nt, Artificial Sequence
  Description of Artificial Sequence: Synthetic oligonucleotide
  Antisense strand to SEQ ID NO: 1847477
uguuccauugauaaacugc

SEQ ID NO: 1847479 - RNA, 19 nt, Artificial Sequence
  Description of Artificial Sequence: Synthetic oligonucleotide
  Sense strand starting at position 3582 of SEQ ID NO: 1563996
ggugguuugcuauaagccu

SEQ ID NO: 1847480 - RNA, 19 nt, Artificial Sequence
  Description of Artificial Sequence: Synthetic oligonucleotide
  Antisense strand to SEQ ID NO: 1847479
aggcuuauagcaaaccacc

SEQ ID NO: 1847481 - RNA, 19 nt, Artificial Sequence
  Description of Artificial Sequence: Synthetic oligonucleotide
  Sense strand starting at position 3620 of SEQ ID NO: 1563996
guugguaucagagauguac

SEQ ID NO: 1847482 - RNA, 19 nt, Artificial Sequence
  Description of Artificial Sequence: Synthetic oligonucleotide
  Antisense strand to SEQ ID NO: 1847481
guacaucucugauaccaac

SEQ ID NO: 1847483 - RNA, 19 nt, Artificial Sequence
  Description of Artificial Sequence: Synthetic oligonucleotide
  Sense strand starting at position 3622 of SEQ ID NO: 1563996
ugguaucagagauguacag

SEQ ID NO: 1847484 - RNA, 19 nt, Artificial Sequence
  Description of Artificial Sequence: Synthetic oligonucleotide
  Antisense strand to SEQ ID NO: 1847483
cuguacaucucugauacca

SEQ ID NO: 1847485 - RNA, 19 nt, Artificial Sequence
  Description of Artificial Sequence: Synthetic oligonucleotide
  Sense strand starting at position 3664 of SEQ ID NO: 1563996
ccaugaaguuuaucuguag

SEQ ID NO: 1847486 - RNA, 19 nt, Artificial Sequence
  Description of Artificial Sequence: Synthetic oligonucleotide
  Antisense strand to SEQ ID NO: 1847485
cuacagauaaacuucaugg

SEQ ID NO: 1847487 - RNA, 19 nt, Artificial Sequence
  Description of Artificial Sequence: Synthetic oligonucleotide
  Sense strand starting at position 3665 of SEQ ID NO: 1563996
caugaaguuuaucuguagu

SEQ ID NO: 1847488 - RNA, 19 nt, Artificial Sequence
  Description of Artificial Sequence: Synthetic oligonucleotide
  Antisense strand to SEQ ID NO: 1847487
acuacagauaaacuucaug

SEQ ID NO: 1847489 - RNA, 19 nt, Artificial Sequence
  Description of Artificial Sequence: Synthetic oligonucleotide
  Sense strand starting at position 3667 of SEQ ID NO: 1563996
ugaaguuuaucuguaguac

SEQ ID NO: 1847490 - RNA, 19 nt, Artificial Sequence
  Description of Artificial Sequence: Synthetic oligonucleotide
  Antisense strand to SEQ ID NO: 1847489
guacuacagauaaacuuca

SEQ ID NO: 1847491 - RNA, 19 nt, Artificial Sequence
  Description of Artificial Sequence: Synthetic oligonucleotide
  Sense strand starting at position 3668 of SEQ ID NO: 1563996
gaaguuuaucuguaguaca

SEQ ID NO: 1847492 - RNA, 19 nt, Artificial Sequence
  Description of Artificial Sequence: Synthetic oligonucleotide
  Antisense strand to SEQ ID NO: 1847491
uguacuacagauaaacuuc

SEQ ID NO: 1847493 - RNA, 19 nt, Artificial Sequence
  Description of Artificial Sequence: Synthetic oligonucleotide
  Sense strand starting at position 3741 of SEQ ID NO: 1563996
gugacccucugucuugaaa

SEQ ID NO: 1847494 - RNA, 19 nt, Artificial Sequence
  Description of Artificial Sequence: Synthetic oligonucleotide
  Antisense strand to SEQ ID NO: 1847493
uuucaagacagagggucac

SEQ ID NO: 1847495 - RNA, 19 nt, Artificial Sequence
  Description of Artificial Sequence: Synthetic oligonucleotide
  Sense strand starting at position 3851 of SEQ ID NO: 1563996
ccaaauggugcagaaacuu

SEQ ID NO: 1847496 - RNA, 19 nt, Artificial Sequence
  Description of Artificial Sequence: Synthetic oligonucleotide
  Antisense strand to SEQ ID NO: 1847495
aaguuucugcaccauuugg

SEQ ID NO: 1847497 - RNA, 19 nt, Artificial Sequence
  Description of Artificial Sequence: Synthetic oligonucleotide
  Sense strand starting at position 3934 of SEQ ID NO: 1563996
acguuacuuugaucauaca

SEQ ID NO: 1847498 - RNA, 19 nt, Artificial Sequence
  Description of Artificial Sequence: Synthetic oligonucleotide
  Antisense strand to SEQ ID NO: 1847497
uguaugaucaaaguaacgu

SEQ ID NO: 1847499 - RNA, 19 nt, Artificial Sequence
  Description of Artificial Sequence: Synthetic oligonucleotide
  Sense strand starting at position 3935 of SEQ ID NO: 1563996
cguuacuuugaucauacau

SEQ ID NO: 1847500 - RNA, 19 nt, Artificial Sequence
  Description of Artificial Sequence: Synthetic oligonucleotide
  Antisense strand to SEQ ID NO: 1847499
auguaugaucaaaguaacg

SEQ ID NO: 1847501 - RNA, 19 nt, Artificial Sequence
  Description of Artificial Sequence: Synthetic oligonucleotide
  Sense strand starting at position 38 of SEQ ID NO: 1563997
cagucaguucucuagucac

SEQ ID NO: 1847502 - RNA, 19 nt, Artificial Sequence
  Description of Artificial Sequence: Synthetic oligonucleotide
  Antisense strand to SEQ ID NO: 1847501
gugacuagagaacugacug

SEQ ID NO: 1847503 - RNA, 19 nt, Artificial Sequence
  Description of Artificial Sequence: Synthetic oligonucleotide
  Sense strand starting at position 274 of SEQ ID NO: 1563997
cuccauggauaauugcaua

SEQ ID NO: 1847504 - RNA, 19 nt, Artificial Sequence
  Description of Artificial Sequence: Synthetic oligonucleotide
  Antisense strand to SEQ ID NO: 1847503
uaugcaauuauccauggag

SEQ ID NO: 1847505 - RNA, 19 nt, Artificial Sequence
  Description of Artificial Sequence: Synthetic oligonucleotide
  Sense strand starting at position 403 of SEQ ID NO: 1563997
cuacaucuccacugagaug

SEQ ID NO: 1847506 - RNA, 19 nt, Artificial Sequence
  Description of Artificial Sequence: Synthetic oligonucleotide
  Antisense strand to SEQ ID NO: 1847505
caucucaguggagauguag

SEQ ID NO: 1847507 - RNA, 19 nt, Artificial Sequence
  Description of Artificial Sequence: Synthetic oligonucleotide
  Sense strand starting at position 484 of SEQ ID NO: 1563997
ucauguauccuugauguua

SEQ ID NO: 1847508 - RNA, 19 nt, Artificial Sequence
  Description of Artificial Sequence: Synthetic oligonucleotide
  Antisense strand to SEQ ID NO: 1847507
uaacaucaaggauacauga

SEQ ID NO: 1847509 - RNA, 19 nt, Artificial Sequence
  Description of Artificial Sequence: Synthetic oligonucleotide
  Sense strand starting at position 545 of SEQ ID NO: 1563997
cagaaugaucguugauccu

SEQ ID NO: 1847510 - RNA, 19 nt, Artificial Sequence
  Description of Artificial Sequence: Synthetic oligonucleotide
  Antisense strand to SEQ ID NO: 1847509
aggaucaacgaucauucug

SEQ ID NO: 1847511 - RNA, 19 nt, Artificial Sequence
  Description of Artificial Sequence: Synthetic oligonucleotide
  Sense strand starting at position 716 of SEQ ID NO: 1563997
ccuuacaggucuuucugau

SEQ ID NO: 1847512 - RNA, 19 nt, Artificial Sequence
  Description of Artificial Sequence: Synthetic oligonucleotide
  Antisense strand to SEQ ID NO: 1847511
aucagaaagaccuguaagg

SEQ ID NO: 1847513 - RNA, 19 nt, Artificial Sequence
  Description of Artificial Sequence: Synthetic oligonucleotide
  Sense strand starting at position 722 of SEQ ID NO: 1563997
aggucuuucugauccuuaa

SEQ ID NO: 1847514 - RNA, 19 nt, Artificial Sequence
  Description of Artificial Sequence: Synthetic oligonucleotide
  Antisense strand to SEQ ID NO: 1847513
uuaaggaucagaaagaccu

SEQ ID NO: 1847515 - RNA, 19 nt, Artificial Sequence
  Description of Artificial Sequence: Synthetic oligonucleotide
  Sense strand starting at position 899 of SEQ ID NO: 1563997
ccaaguaaggaaugcuuua

SEQ ID NO: 1847516 - RNA, 19 nt, Artificial Sequence
  Description of Artificial Sequence: Synthetic oligonucleotide
  Antisense strand to SEQ ID NO: 1847515
uaaagcauuccuuacuugg

SEQ ID NO: 1847517 - RNA, 19 nt, Artificial Sequence
  Description of Artificial Sequence: Synthetic oligonucleotide
  Sense strand starting at position 1050 of SEQ ID NO: 1563997
aguacagugcuuuaugauc

SEQ ID NO: 1847518 - RNA, 19 nt, Artificial Sequence
  Description of Artificial Sequence: Synthetic oligonucleotide
  Antisense strand to SEQ ID NO: 1847517
gaucauaaagcacuguacu

SEQ ID NO: 1847519 - RNA, 19 nt, Artificial Sequence
  Description of Artificial Sequence: Synthetic oligonucleotide
  Sense strand starting at position 1055 of SEQ ID NO: 1563997
agugcuuuaugaucacuaa

SEQ ID NO: 1847520 - RNA, 19 nt, Artificial Sequence
  Description of Artificial Sequence: Synthetic oligonucleotide
  Antisense strand to SEQ ID NO: 1847519
uuagugaucauaaagcacu

SEQ ID NO: 1847521 - RNA, 19 nt, Artificial Sequence
  Description of Artificial Sequence: Synthetic oligonucleotide
  Sense strand starting at position 1056 of SEQ ID NO: 1563997
gugcuuuaugaucacuaag

SEQ ID NO: 1847522 - RNA, 19 nt, Artificial Sequence
  Description of Artificial Sequence: Synthetic oligonucleotide
  Antisense strand to SEQ ID NO: 1847521
cuuagugaucauaaagcac

SEQ ID NO: 1847523 - RNA, 19 nt, Artificial Sequence
  Description of Artificial Sequence: Synthetic oligonucleotide
  Sense strand starting at position 1421 of SEQ ID NO: 1563997
ugucuuauuuguguauccu

SEQ ID NO: 1847524 - RNA, 19 nt, Artificial Sequence
  Description of Artificial Sequence: Synthetic oligonucleotide
  Antisense strand to SEQ ID NO: 1847523
aggauacacaaauaagaca

SEQ ID NO: 1847525 - RNA, 19 nt, Artificial Sequence
  Description of Artificial Sequence: Synthetic oligonucleotide
  Sense strand starting at position 1422 of SEQ ID NO: 1563997
gucuuauuuguguauccuc

SEQ ID NO: 1847526 - RNA, 19 nt, Artificial Sequence
  Description of Artificial Sequence: Synthetic oligonucleotide
  Antisense strand to SEQ ID NO: 1847525
gaggauacacaaauaagac

SEQ ID NO: 1847527 - RNA, 19 nt, Artificial Sequence
  Description of Artificial Sequence: Synthetic oligonucleotide
  Sense strand starting at position 1514 of SEQ ID NO: 1563997
uucuguaagcauuaaagug

SEQ ID NO: 1847528 - RNA, 19 nt, Artificial Sequence
  Description of Artificial Sequence: Synthetic oligonucleotide
  Antisense strand to SEQ ID NO: 1847527
cacuuuaaugcuuacagaa

SEQ ID NO: 1847529 - RNA, 19 nt, Artificial Sequence
  Description of Artificial Sequence: Synthetic oligonucleotide
  Sense strand starting at position 1549 of SEQ ID NO: 1563997
accaauguguacuuccuau

SEQ ID NO: 1847530 - RNA, 19 nt, Artificial Sequence
  Description of Artificial Sequence: Synthetic oligonucleotide
  Antisense strand to SEQ ID NO: 1847529
auaggaaguacacauuggu

SEQ ID NO: 1847531 - RNA, 19 nt, Artificial Sequence
  Description of Artificial Sequence: Synthetic oligonucleotide
  Sense strand starting at position 2076 of SEQ ID NO: 1563997
ggcugaagaugucugacca

SEQ ID NO: 1847532 - RNA, 19 nt, Artificial Sequence
  Description of Artificial Sequence: Synthetic oligonucleotide
  Antisense strand to SEQ ID NO: 1847531
uggucagacaucuucagcc

SEQ ID NO: 1847533 - RNA, 19 nt, Artificial Sequence
  Description of Artificial Sequence: Synthetic oligonucleotide
  Sense strand starting at position 2077 of SEQ ID NO: 1563997
gcugaagaugucugaccaa

SEQ ID NO: 1847534 - RNA, 19 nt, Artificial Sequence
  Description of Artificial Sequence: Synthetic oligonucleotide
  Antisense strand to SEQ ID NO: 1847533
uuggucagacaucuucagc

SEQ ID NO: 1847535 - RNA, 19 nt, Artificial Sequence
  Description of Artificial Sequence: Synthetic oligonucleotide
  Sense strand starting at position 2099 of SEQ ID NO: 1563997
gacgcuugggccgaaacaa

SEQ ID NO: 1847536 - RNA, 19 nt, Artificial Sequence
  Description of Artificial Sequence: Synthetic oligonucleotide
  Antisense strand to SEQ ID NO: 1847535
uuguuucggcccaagcguc

SEQ ID NO: 1847537 - RNA, 19 nt, Artificial Sequence
  Description of Artificial Sequence: Synthetic oligonucleotide
  Sense strand starting at position 2516 of SEQ ID NO: 1563997
gcgucuugcagagcucagu

SEQ ID NO: 1847538 - RNA, 19 nt, Artificial Sequence
  Description of Artificial Sequence: Synthetic oligonucleotide
  Antisense strand to SEQ ID NO: 1847537
acugagcucugcaagacgc

SEQ ID NO: 1847539 - RNA, 19 nt, Artificial Sequence
  Description of Artificial Sequence: Synthetic oligonucleotide
  Sense strand starting at position 2526 of SEQ ID NO: 1563997
gagcucagucauggagaaa

SEQ ID NO: 1847540 - RNA, 19 nt, Artificial Sequence
  Description of Artificial Sequence: Synthetic oligonucleotide
  Antisense strand to SEQ ID NO: 1847539
uuucuccaugacugagcuc

SEQ ID NO: 1847541 - RNA, 19 nt, Artificial Sequence
  Description of Artificial Sequence: Synthetic oligonucleotide
  Sense strand starting at position 2573 of SEQ ID NO: 1563997
ucggguacugcuuaaauaa

SEQ ID NO: 1847542 - RNA, 19 nt, Artificial Sequence
  Description of Artificial Sequence: Synthetic oligonucleotide
  Antisense strand to SEQ ID NO: 1847541
uuauuuaagcaguacccga

SEQ ID NO: 1847543 - RNA, 19 nt, Artificial Sequence
  Description of Artificial Sequence: Synthetic oligonucleotide
  Sense strand starting at position 2641 of SEQ ID NO: 1563997
uaaggcuguguguacagau

SEQ ID NO: 1847544 - RNA, 19 nt, Artificial Sequence
  Description of Artificial Sequence: Synthetic oligonucleotide
  Antisense strand to SEQ ID NO: 1847543
aucuguacacacagccuua

SEQ ID NO: 1847545 - RNA, 19 nt, Artificial Sequence
  Description of Artificial Sequence: Synthetic oligonucleotide
  Sense strand starting at position 2688 of SEQ ID NO: 1563997
agaauaugauuccuuguaa

SEQ ID NO: 1847546 - RNA, 19 nt, Artificial Sequence
  Description of Artificial Sequence: Synthetic oligonucleotide
  Antisense strand to SEQ ID NO: 1847545
uuacaaggaaucauauucu

SEQ ID NO: 1847547 - RNA, 19 nt, Artificial Sequence
  Description of Artificial Sequence: Synthetic oligonucleotide
  Sense strand starting at position 2796 of SEQ ID NO: 1563997
caggucaucguguuuguuu

SEQ ID NO: 1847548 - RNA, 19 nt, Artificial Sequence
  Description of Artificial Sequence: Synthetic oligonucleotide
  Antisense strand to SEQ ID NO: 1847547
aaacaaacacgaugaccug

SEQ ID NO: 1847549 - RNA, 19 nt, Artificial Sequence
  Description of Artificial Sequence: Synthetic oligonucleotide
  Sense strand starting at position 2834 of SEQ ID NO: 1563997
uccauaauggugcagcaua

SEQ ID NO: 1847550 - RNA, 19 nt, Artificial Sequence
  Description of Artificial Sequence: Synthetic oligonucleotide
  Antisense strand to SEQ ID NO: 1847549
uaugcugcaccauuaugga

SEQ ID NO: 1847551 - RNA, 19 nt, Artificial Sequence
  Description of Artificial Sequence: Synthetic oligonucleotide
  Sense strand starting at position 2844 of SEQ ID NO: 1563997
ugcagcauaguguaguaaa

SEQ ID NO: 1847552 - RNA, 19 nt, Artificial Sequence
  Description of Artificial Sequence: Synthetic oligonucleotide
  Antisense strand to SEQ ID NO: 1847551
uuuacuacacuaugcugca

SEQ ID NO: 1847553 - RNA, 19 nt, Artificial Sequence
  Description of Artificial Sequence: Synthetic oligonucleotide
  Sense strand starting at position 2923 of SEQ ID NO: 1563997
gcuccaugaccuugaggaa

SEQ ID NO: 1847554 - RNA, 19 nt, Artificial Sequence
  Description of Artificial Sequence: Synthetic oligonucleotide
  Antisense strand to SEQ ID NO: 1847553
uuccucaaggucauggagc

SEQ ID NO: 1847555 - RNA, 19 nt, Artificial Sequence
  Description of Artificial Sequence: Synthetic oligonucleotide
  Sense strand starting at position 3084 of SEQ ID NO: 1563997
uuaauaauguuugccuaag

SEQ ID NO: 1847556 - RNA, 19 nt, Artificial Sequence
  Description of Artificial Sequence: Synthetic oligonucleotide
  Antisense strand to SEQ ID NO: 1847555
cuuaggcaaacauuauuaa

SEQ ID NO: 1847557 - RNA, 19 nt, Artificial Sequence
  Description of Artificial Sequence: Synthetic oligonucleotide
  Sense strand starting at position 3195 of SEQ ID NO: 1563997
uccuccaguccaugagaga

SEQ ID NO: 1847558 - RNA, 19 nt, Artificial Sequence
  Description of Artificial Sequence: Synthetic oligonucleotide
  Antisense strand to SEQ ID NO: 1847557
ucucucauggacuggagga

SEQ ID NO: 1847559 - RNA, 19 nt, Artificial Sequence
  Description of Artificial Sequence: Synthetic oligonucleotide
  Sense strand starting at position 3204 of SEQ ID NO: 1563997
ccaugagagagcuguccua

SEQ ID NO: 1847560 - RNA, 19 nt, Artificial Sequence
  Description of Artificial Sequence: Synthetic oligonucleotide
  Antisense strand to SEQ ID NO: 1847559
uaggacagcucucucaugg

SEQ ID NO: 1847561 - RNA, 19 nt, Artificial Sequence
  Description of Artificial Sequence: Synthetic oligonucleotide
  Sense strand starting at position 3250 of SEQ ID NO: 1563997
ggucuuccagcucagaguu

SEQ ID NO: 1847562 - RNA, 19 nt, Artificial Sequence
  Description of Artificial Sequence: Synthetic oligonucleotide
  Antisense strand to SEQ ID NO: 1847561
aacucugagcuggaagacc

SEQ ID NO: 1847563 - RNA, 19 nt, Artificial Sequence
  Description of Artificial Sequence: Synthetic oligonucleotide
  Sense strand starting at position 3310 of SEQ ID NO: 1563997
ugcucauaccagggaauca

SEQ ID NO: 1847564 - RNA, 19 nt, Artificial Sequence
  Description of Artificial Sequence: Synthetic oligonucleotide
  Antisense strand to SEQ ID NO: 1847563
ugauucccugguaugagca

SEQ ID NO: 1847565 - RNA, 19 nt, Artificial Sequence
  Description of Artificial Sequence: Synthetic oligonucleotide
  Sense strand starting at position 3319 of SEQ ID NO: 1563997
cagggaaucagguguuucu

SEQ ID NO: 1847566 - RNA, 19 nt, Artificial Sequence
  Description of Artificial Sequence: Synthetic oligonucleotide
  Antisense strand to SEQ ID NO: 1847565
agaaacaccugauucccug

SEQ ID NO: 1847567 - RNA, 19 nt, Artificial Sequence
  Description of Artificial Sequence: Synthetic oligonucleotide
  Sense strand starting at position 3432 of SEQ ID NO: 1563997
ucggauugggagugaucaa

SEQ ID NO: 1847568 - RNA, 19 nt, Artificial Sequence
  Description of Artificial Sequence: Synthetic oligonucleotide
  Antisense strand to SEQ ID NO: 1847567
uugaucacucccaauccga

SEQ ID NO: 1847569 - RNA, 19 nt, Artificial Sequence
  Description of Artificial Sequence: Synthetic oligonucleotide
  Sense strand starting at position 3516 of SEQ ID NO: 1563997
cuguacuaauucuccaagu

SEQ ID NO: 1847570 - RNA, 19 nt, Artificial Sequence
  Description of Artificial Sequence: Synthetic oligonucleotide
  Antisense strand to SEQ ID NO: 1847569
acuuggagaauuaguacag

SEQ ID NO: 1847571 - RNA, 19 nt, Artificial Sequence
  Description of Artificial Sequence: Synthetic oligonucleotide
  Sense strand starting at position 3517 of SEQ ID NO: 1563997
uguacuaauucuccaaguu

SEQ ID NO: 1847572 - RNA, 19 nt, Artificial Sequence
  Description of Artificial Sequence: Synthetic oligonucleotide
  Antisense strand to SEQ ID NO: 1847571
aacuuggagaauuaguaca

SEQ ID NO: 1847573 - RNA, 19 nt, Artificial Sequence
  Description of Artificial Sequence: Synthetic oligonucleotide
  Sense strand starting at position 3518 of SEQ ID NO: 1563997
guacuaauucuccaaguuc

SEQ ID NO: 1847574 - RNA, 19 nt, Artificial Sequence
  Description of Artificial Sequence: Synthetic oligonucleotide
  Antisense strand to SEQ ID NO: 1847573
gaacuuggagaauuaguac

SEQ ID NO: 1847575 - RNA, 19 nt, Artificial Sequence
  Description of Artificial Sequence: Synthetic oligonucleotide
  Sense strand starting at position 3569 of SEQ ID NO: 1563997
uuggguguugacgaugaca

SEQ ID NO: 1847576 - RNA, 19 nt, Artificial Sequence
  Description of Artificial Sequence: Synthetic oligonucleotide
  Antisense strand to SEQ ID NO: 1847575
ugucaucgucaacacccaa

SEQ ID NO: 1847577 - RNA, 19 nt, Artificial Sequence
  Description of Artificial Sequence: Synthetic oligonucleotide
  Sense strand starting at position 3605 of SEQ ID NO: 1563997
ucagguuaucuauggccaa

SEQ ID NO: 1847578 - RNA, 19 nt, Artificial Sequence
  Description of Artificial Sequence: Synthetic oligonucleotide
  Antisense strand to SEQ ID NO: 1847577
uuggccauagauaaccuga

SEQ ID NO: 1847579 - RNA, 19 nt, Artificial Sequence
  Description of Artificial Sequence: Synthetic oligonucleotide
  Sense strand starting at position 3608 of SEQ ID NO: 1563997
gguuaucuauggccaagag

SEQ ID NO: 1847580 - RNA, 19 nt, Artificial Sequence
  Description of Artificial Sequence: Synthetic oligonucleotide
  Antisense strand to SEQ ID NO: 1847579
cucuuggccauagauaacc

SEQ ID NO: 1847581 - RNA, 19 nt, Artificial Sequence
  Description of Artificial Sequence: Synthetic oligonucleotide
  Sense strand starting at position 42 of SEQ ID NO: 1563998
caauauauggacuguaugu

SEQ ID NO: 1847582 - RNA, 19 nt, Artificial Sequence
  Description of Artificial Sequence: Synthetic oligonucleotide
  Antisense strand to SEQ ID NO: 1847581
acauacaguccauauauug

SEQ ID NO: 1847583 - RNA, 19 nt, Artificial Sequence
  Description of Artificial Sequence: Synthetic oligonucleotide
  Sense strand starting at position 44 of SEQ ID NO: 1563998
auauauggacuguauguau

SEQ ID NO: 1847584 - RNA, 19 nt, Artificial Sequence
  Description of Artificial Sequence: Synthetic oligonucleotide
  Antisense strand to SEQ ID NO: 1847583
auacauacaguccauauau

SEQ ID NO: 1847585 - RNA, 19 nt, Artificial Sequence
  Description of Artificial Sequence: Synthetic oligonucleotide
  Sense strand starting at position 268 of SEQ ID NO: 1563998
cuaaguguacucuaagaug

SEQ ID NO: 1847586 - RNA, 19 nt, Artificial Sequence
  Description of Artificial Sequence: Synthetic oligonucleotide
  Antisense strand to SEQ ID NO: 1847585
caucuuagaguacacuuag

SEQ ID NO: 1847587 - RNA, 19 nt, Artificial Sequence
  Description of Artificial Sequence: Synthetic oligonucleotide
  Sense strand starting at position 342 of SEQ ID NO: 1563998
uuaagugaagcaugacuuu

SEQ ID NO: 1847588 - RNA, 19 nt, Artificial Sequence
  Description of Artificial Sequence: Synthetic oligonucleotide
  Antisense strand to SEQ ID NO: 1847587
aaagucaugcuucacuuaa

SEQ ID NO: 1847589 - RNA, 19 nt, Artificial Sequence
  Description of Artificial Sequence: Synthetic oligonucleotide
  Sense strand starting at position 501 of SEQ ID NO: 1563998
uaccaaugaggcugacaga

SEQ ID NO: 1847590 - RNA, 19 nt, Artificial Sequence
  Description of Artificial Sequence: Synthetic oligonucleotide
  Antisense strand to SEQ ID NO: 1847589
ucugucagccucauuggua

SEQ ID NO: 1847591 - RNA, 19 nt, Artificial Sequence
  Description of Artificial Sequence: Synthetic oligonucleotide
  Sense strand starting at position 529 of SEQ ID NO: 1563998
guuuguguggcgccuuaga

SEQ ID NO: 1847592 - RNA, 19 nt, Artificial Sequence
  Description of Artificial Sequence: Synthetic oligonucleotide
  Antisense strand to SEQ ID NO: 1847591
ucuaaggcgccacacaaac

SEQ ID NO: 1847593 - RNA, 19 nt, Artificial Sequence
  Description of Artificial Sequence: Synthetic oligonucleotide
  Sense strand starting at position 614 of SEQ ID NO: 1563998
agagaucuucgagggucau

SEQ ID NO: 1847594 - RNA, 19 nt, Artificial Sequence
  Description of Artificial Sequence: Synthetic oligonucleotide
  Antisense strand to SEQ ID NO: 1847593
augacccucgaagaucucu

SEQ ID NO: 1847595 - RNA, 19 nt, Artificial Sequence
  Description of Artificial Sequence: Synthetic oligonucleotide
  Sense strand starting at position 615 of SEQ ID NO: 1563998
gagaucuucgagggucauu

SEQ ID NO: 1847596 - RNA, 19 nt, Artificial Sequence
  Description of Artificial Sequence: Synthetic oligonucleotide
  Antisense strand to SEQ ID NO: 1847595
aaugacccucgaagaucuc

SEQ ID NO: 1847597 - RNA, 19 nt, Artificial Sequence
  Description of Artificial Sequence: Synthetic oligonucleotide
  Sense strand starting at position 620 of SEQ ID NO: 1563998
cuucgagggucauugaauu

SEQ ID NO: 1847598 - RNA, 19 nt, Artificial Sequence
  Description of Artificial Sequence: Synthetic oligonucleotide
  Antisense strand to SEQ ID NO: 1847597
aauucaaugacccucgaag

SEQ ID NO: 1847599 - RNA, 19 nt, Artificial Sequence
  Description of Artificial Sequence: Synthetic oligonucleotide
  Sense strand starting at position 705 of SEQ ID NO: 1563998
ugaagucuccuagagcaua

SEQ ID NO: 1847600 - RNA, 19 nt, Artificial Sequence
  Description of Artificial Sequence: Synthetic oligonucleotide
  Antisense strand to SEQ ID NO: 1847599
uaugcucuaggagacuuca

SEQ ID NO: 1847601 - RNA, 19 nt, Artificial Sequence
  Description of Artificial Sequence: Synthetic oligonucleotide
  Sense strand starting at position 786 of SEQ ID NO: 1563998
agaguuuguuauucgaaag

SEQ ID NO: 1847602 - RNA, 19 nt, Artificial Sequence
  Description of Artificial Sequence: Synthetic oligonucleotide
  Antisense strand to SEQ ID NO: 1847601
cuuucgaauaacaaacucu

SEQ ID NO: 1847603 - RNA, 19 nt, Artificial Sequence
  Description of Artificial Sequence: Synthetic oligonucleotide
  Sense strand starting at position 816 of SEQ ID NO: 1563998
uugggaggucuagguucua

SEQ ID NO: 1847604 - RNA, 19 nt, Artificial Sequence
  Description of Artificial Sequence: Synthetic oligonucleotide
  Antisense strand to SEQ ID NO: 1847603
uagaaccuagaccucccaa

SEQ ID NO: 1847605 - RNA, 19 nt, Artificial Sequence
  Description of Artificial Sequence: Synthetic oligonucleotide
  Sense strand starting at position 1159 of SEQ ID NO: 1563998
agggcucuacuccacaaua

SEQ ID NO: 1847606 - RNA, 19 nt, Artificial Sequence
  Description of Artificial Sequence: Synthetic oligonucleotide
  Antisense strand to SEQ ID NO: 1847605
uauuguggaguagagcccu

SEQ ID NO: 1847607 - RNA, 19 nt, Artificial Sequence
  Description of Artificial Sequence: Synthetic oligonucleotide
  Sense strand starting at position 1207 of SEQ ID NO: 1563998
auguauccucccugaauag

SEQ ID NO: 1847608 - RNA, 19 nt, Artificial Sequence
  Description of Artificial Sequence: Synthetic oligonucleotide
  Antisense strand to SEQ ID NO: 1847607
cuauucagggaggauacau

SEQ ID NO: 1847609 - RNA, 19 nt, Artificial Sequence
  Description of Artificial Sequence: Synthetic oligonucleotide
  Sense strand starting at position 1208 of SEQ ID NO: 1563998
uguauccucccugaauagu

SEQ ID NO: 1847610 - RNA, 19 nt, Artificial Sequence
  Description of Artificial Sequence: Synthetic oligonucleotide
  Antisense strand to SEQ ID NO: 1847609
acuauucagggaggauaca

SEQ ID NO: 1847611 - RNA, 19 nt, Artificial Sequence
  Description of Artificial Sequence: Synthetic oligonucleotide
  Sense strand starting at position 1217 of SEQ ID NO: 1563998
ccugaauaguaaucgauaa

SEQ ID NO: 1847612 - RNA, 19 nt, Artificial Sequence
  Description of Artificial Sequence: Synthetic oligonucleotide
  Antisense strand to SEQ ID NO: 1847611
uuaucgauuacuauucagg

SEQ ID NO: 1847613 - RNA, 19 nt, Artificial Sequence
  Description of Artificial Sequence: Synthetic oligonucleotide
  Sense strand starting at position 1300 of SEQ ID NO: 1563998
ggucaucaccuacaucgaa

SEQ ID NO: 1847614 - RNA, 19 nt, Artificial Sequence
  Description of Artificial Sequence: Synthetic oligonucleotide
  Antisense strand to SEQ ID NO: 1847613
uucgauguaggugaugacc

SEQ ID NO: 1847615 - RNA, 19 nt, Artificial Sequence
  Description of Artificial Sequence: Synthetic oligonucleotide
  Sense strand starting at position 1366 of SEQ ID NO: 1563998
uccagacuccuacgauuaa

SEQ ID NO: 1847616 - RNA, 19 nt, Artificial Sequence
  Description of Artificial Sequence: Synthetic oligonucleotide
  Antisense strand to SEQ ID NO: 1847615
uuaaucguaggagucugga

SEQ ID NO: 1847617 - RNA, 19 nt, Artificial Sequence
  Description of Artificial Sequence: Synthetic oligonucleotide
  Sense strand starting at position 1424 of SEQ ID NO: 1563998
cagugcuuugcagaaagaa

SEQ ID NO: 1847618 - RNA, 19 nt, Artificial Sequence
  Description of Artificial Sequence: Synthetic oligonucleotide
  Antisense strand to SEQ ID NO: 1847617
uucuuucugcaaagcacug

SEQ ID NO: 1847619 - RNA, 19 nt, Artificial Sequence
  Description of Artificial Sequence: Synthetic oligonucleotide
  Sense strand starting at position 1896 of SEQ ID NO: 1563998
ggguaauuuaggcggcacu

SEQ ID NO: 1847620 - RNA, 19 nt, Artificial Sequence
  Description of Artificial Sequence: Synthetic oligonucleotide
  Antisense strand to SEQ ID NO: 1847619
agugccgccuaaauuaccc

SEQ ID NO: 1847621 - RNA, 19 nt, Artificial Sequence
  Description of Artificial Sequence: Synthetic oligonucleotide
  Sense strand starting at position 2166 of SEQ ID NO: 1563998
ccuuaucgggcugaaauga

SEQ ID NO: 1847622 - RNA, 19 nt, Artificial Sequence
  Description of Artificial Sequence: Synthetic oligonucleotide
  Antisense strand to SEQ ID NO: 1847621
ucauuucagcccgauaagg

SEQ ID NO: 1847623 - RNA, 19 nt, Artificial Sequence
  Description of Artificial Sequence: Synthetic oligonucleotide
  Sense strand starting at position 2187 of SEQ ID NO: 1563998
auuaaaugagccugucaca

SEQ ID NO: 1847624 - RNA, 19 nt, Artificial Sequence
  Description of Artificial Sequence: Synthetic oligonucleotide
  Antisense strand to SEQ ID NO: 1847623
ugugacaggcucauuuaau

SEQ ID NO: 1847625 - RNA, 19 nt, Artificial Sequence
  Description of Artificial Sequence: Synthetic oligonucleotide
  Sense strand starting at position 2223 of SEQ ID NO: 1563998
ucguuuguuccauagauaa

SEQ ID NO: 1847626 - RNA, 19 nt, Artificial Sequence
  Description of Artificial Sequence: Synthetic oligonucleotide
  Antisense strand to SEQ ID NO: 1847625
uuaucuauggaacaaacga

SEQ ID NO: 1847627 - RNA, 19 nt, Artificial Sequence
  Description of Artificial Sequence: Synthetic oligonucleotide
  Sense strand starting at position 2225 of SEQ ID NO: 1563998
guuuguuccauagauaagu

SEQ ID NO: 1847628 - RNA, 19 nt, Artificial Sequence
  Description of Artificial Sequence: Synthetic oligonucleotide
  Antisense strand to SEQ ID NO: 1847627
acuuaucuauggaacaaac

SEQ ID NO: 1847629 - RNA, 19 nt, Artificial Sequence
  Description of Artificial Sequence: Synthetic oligonucleotide
  Sense strand starting at position 2312 of SEQ ID NO: 1563998
uuuauuccugccugaagag

SEQ ID NO: 1847630 - RNA, 19 nt, Artificial Sequence
  Description of Artificial Sequence: Synthetic oligonucleotide
  Antisense strand to SEQ ID NO: 1847629
cucuucaggcaggaauaaa

SEQ ID NO: 1847631 - RNA, 19 nt, Artificial Sequence
  Description of Artificial Sequence: Synthetic oligonucleotide
  Sense strand starting at position 2313 of SEQ ID NO: 1563998
uuauuccugccugaagaga

SEQ ID NO: 1847632 - RNA, 19 nt, Artificial Sequence
  Description of Artificial Sequence: Synthetic oligonucleotide
  Antisense strand to SEQ ID NO: 1847631
ucucuucaggcaggaauaa

SEQ ID NO: 1847633 - RNA, 19 nt, Artificial Sequence
  Description of Artificial Sequence: Synthetic oligonucleotide
  Sense strand starting at position 2447 of SEQ ID NO: 1563998
ggaucuaguugauuacuag

SEQ ID NO: 1847634 - RNA, 19 nt, Artificial Sequence
  Description of Artificial Sequence: Synthetic oligonucleotide
  Antisense strand to SEQ ID NO: 1847633
cuaguaaucaacuagaucc

SEQ ID NO: 1847635 - RNA, 19 nt, Artificial Sequence
  Description of Artificial Sequence: Synthetic oligonucleotide
  Sense strand starting at position 2450 of SEQ ID NO: 1563998
ucuaguugauuacuaggau

SEQ ID NO: 1847636 - RNA, 19 nt, Artificial Sequence
  Description of Artificial Sequence: Synthetic oligonucleotide
  Antisense strand to SEQ ID NO: 1847635
auccuaguaaucaacuaga

SEQ ID NO: 1847637 - RNA, 19 nt, Artificial Sequence
  Description of Artificial Sequence: Synthetic oligonucleotide
  Sense strand starting at position 2453 of SEQ ID NO: 1563998
aguugauuacuaggauuau

SEQ ID NO: 1847638 - RNA, 19 nt, Artificial Sequence
  Description of Artificial Sequence: Synthetic oligonucleotide
  Antisense strand to SEQ ID NO: 1847637
auaauccuaguaaucaacu

SEQ ID NO: 1847639 - RNA, 19 nt, Artificial Sequence
  Description of Artificial Sequence: Synthetic oligonucleotide
  Sense strand starting at position 2580 of SEQ ID NO: 1563998
aaacuuugucugugaagga

SEQ ID NO: 1847640 - RNA, 19 nt, Artificial Sequence
  Description of Artificial Sequence: Synthetic oligonucleotide
  Antisense strand to SEQ ID NO: 1847639
uccuucacagacaaaguuu

SEQ ID NO: 1847641 - RNA, 19 nt, Artificial Sequence
  Description of Artificial Sequence: Synthetic oligonucleotide
  Sense strand starting at position 3215 of SEQ ID NO: 1563998
aagguuguacaugguuaga

SEQ ID NO: 1847642 - RNA, 19 nt, Artificial Sequence
  Description of Artificial Sequence: Synthetic oligonucleotide
  Antisense strand to SEQ ID NO: 1847641
ucuaaccauguacaaccuu

SEQ ID NO: 1847643 - RNA, 19 nt, Artificial Sequence
  Description of Artificial Sequence: Synthetic oligonucleotide
  Sense strand starting at position 3412 of SEQ ID NO: 1563998
ugagaaaugugacccugua

SEQ ID NO: 1847644 - RNA, 19 nt, Artificial Sequence
  Description of Artificial Sequence: Synthetic oligonucleotide
  Antisense strand to SEQ ID NO: 1847643
uacagggucacauuucuca

SEQ ID NO: 1847645 - RNA, 19 nt, Artificial Sequence
  Description of Artificial Sequence: Synthetic oligonucleotide
  Sense strand starting at position 3470 of SEQ ID NO: 1563998
cagaucaagauguggagua

SEQ ID NO: 1847646 - RNA, 19 nt, Artificial Sequence
  Description of Artificial Sequence: Synthetic oligonucleotide
  Antisense strand to SEQ ID NO: 1847645
uacuccacaucuugaucug

SEQ ID NO: 1847647 - RNA, 19 nt, Artificial Sequence
  Description of Artificial Sequence: Synthetic oligonucleotide
  Sense strand starting at position 3482 of SEQ ID NO: 1563998
uggaguagguggcuaaaua

SEQ ID NO: 1847648 - RNA, 19 nt, Artificial Sequence
  Description of Artificial Sequence: Synthetic oligonucleotide
  Antisense strand to SEQ ID NO: 1847647
uauuuagccaccuacucca

SEQ ID NO: 1847649 - RNA, 19 nt, Artificial Sequence
  Description of Artificial Sequence: Synthetic oligonucleotide
  Sense strand starting at position 3483 of SEQ ID NO: 1563998
ggaguagguggcuaaauau

SEQ ID NO: 1847650 - RNA, 19 nt, Artificial Sequence
  Description of Artificial Sequence: Synthetic oligonucleotide
  Antisense strand to SEQ ID NO: 1847649
auauuuagccaccuacucc

SEQ ID NO: 1847651 - RNA, 19 nt, Artificial Sequence
  Description of Artificial Sequence: Synthetic oligonucleotide
  Sense strand starting at position 3489 of SEQ ID NO: 1563998
gguggcuaaauauaugagu

SEQ ID NO: 1847652 - RNA, 19 nt, Artificial Sequence
  Description of Artificial Sequence: Synthetic oligonucleotide
  Antisense strand to SEQ ID NO: 1847651
acucauauauuuagccacc

SEQ ID NO: 1847653 - RNA, 19 nt, Artificial Sequence
  Description of Artificial Sequence: Synthetic oligonucleotide
  Sense strand starting at position 3494 of SEQ ID NO: 1563998
cuaaauauaugagugugua

SEQ ID NO: 1847654 - RNA, 19 nt, Artificial Sequence
  Description of Artificial Sequence: Synthetic oligonucleotide
  Antisense strand to SEQ ID NO: 1847653
uacacacucauauauuuag

SEQ ID NO: 1847655 - RNA, 19 nt, Artificial Sequence
  Description of Artificial Sequence: Synthetic oligonucleotide
  Sense strand starting at position 3495 of SEQ ID NO: 1563998
uaaauauaugaguguguag

SEQ ID NO: 1847656 - RNA, 19 nt, Artificial Sequence
  Description of Artificial Sequence: Synthetic oligonucleotide
  Antisense strand to SEQ ID NO: 1847655
cuacacacucauauauuua

SEQ ID NO: 1847657 - RNA, 19 nt, Artificial Sequence
  Description of Artificial Sequence: Synthetic oligonucleotide
  Sense strand starting at position 3497 of SEQ ID NO: 1563998
aauauaugaguguguagau

SEQ ID NO: 1847658 - RNA, 19 nt, Artificial Sequence
  Description of Artificial Sequence: Synthetic oligonucleotide
  Antisense strand to SEQ ID NO: 1847657
aucuacacacucauauauu

SEQ ID NO: 1847659 - RNA, 19 nt, Artificial Sequence
  Description of Artificial Sequence: Synthetic oligonucleotide
  Sense strand starting at position 3521 of SEQ ID NO: 1563998
guugaucaccuuuggaauc

SEQ ID NO: 1847660 - RNA, 19 nt, Artificial Sequence
  Description of Artificial Sequence: Synthetic oligonucleotide
  Antisense strand to SEQ ID NO: 1847659
gauuccaaaggugaucaac

SEQ ID NO: 1847661 - RNA, 19 nt, Artificial Sequence
  Description of Artificial Sequence: Synthetic oligonucleotide
  Sense strand starting at position 12 of SEQ ID NO: 1563999
ggagaaucugacggaaggu

SEQ ID NO: 1847662 - RNA, 19 nt, Artificial Sequence
  Description of Artificial Sequence: Synthetic oligonucleotide
  Antisense strand to SEQ ID NO: 1847661
accuuccgucagauucucc

SEQ ID NO: 1847663 - RNA, 19 nt, Artificial Sequence
  Description of Artificial Sequence: Synthetic oligonucleotide
  Sense strand starting at position 59 of SEQ ID NO: 1563999
ggugaaguacuguggaauu

SEQ ID NO: 1847664 - RNA, 19 nt, Artificial Sequence
  Description of Artificial Sequence: Synthetic oligonucleotide
  Antisense strand to SEQ ID NO: 1847663
aauuccacaguacuucacc

SEQ ID NO: 1847665 - RNA, 19 nt, Artificial Sequence
  Description of Artificial Sequence: Synthetic oligonucleotide
  Sense strand starting at position 61 of SEQ ID NO: 1563999
ugaaguacuguggaauugu

SEQ ID NO: 1847666 - RNA, 19 nt, Artificial Sequence
  Description of Artificial Sequence: Synthetic oligonucleotide
  Antisense strand to SEQ ID NO: 1847665
acaauuccacaguacuuca

SEQ ID NO: 1847667 - RNA, 19 nt, Artificial Sequence
  Description of Artificial Sequence: Synthetic oligonucleotide
  Sense strand starting at position 135 of SEQ ID NO: 1563999
uucugagugcugcagacau

SEQ ID NO: 1847668 - RNA, 19 nt, Artificial Sequence
  Description of Artificial Sequence: Synthetic oligonucleotide
  Antisense strand to SEQ ID NO: 1847667
augucugcagcacucagaa

SEQ ID NO: 1847669 - RNA, 19 nt, Artificial Sequence
  Description of Artificial Sequence: Synthetic oligonucleotide
  Sense strand starting at position 259 of SEQ ID NO: 1563999
ccaguaauccugcaacaga

SEQ ID NO: 1847670 - RNA, 19 nt, Artificial Sequence
  Description of Artificial Sequence: Synthetic oligonucleotide
  Antisense strand to SEQ ID NO: 1847669
ucuguugcaggauuacugg

SEQ ID NO: 1847671 - RNA, 19 nt, Artificial Sequence
  Description of Artificial Sequence: Synthetic oligonucleotide
  Sense strand starting at position 387 of SEQ ID NO: 1563999
gugcguguauguaugagga

SEQ ID NO: 1847672 - RNA, 19 nt, Artificial Sequence
  Description of Artificial Sequence: Synthetic oligonucleotide
  Antisense strand to SEQ ID NO: 1847671
uccucauacauacacgcac

SEQ ID NO: 1847673 - RNA, 19 nt, Artificial Sequence
  Description of Artificial Sequence: Synthetic oligonucleotide
  Sense strand starting at position 456 of SEQ ID NO: 1563999
gaaggaugcccauguuuau

SEQ ID NO: 1847674 - RNA, 19 nt, Artificial Sequence
  Description of Artificial Sequence: Synthetic oligonucleotide
  Antisense strand to SEQ ID NO: 1847673
auaaacaugggcauccuuc

SEQ ID NO: 1847675 - RNA, 19 nt, Artificial Sequence
  Description of Artificial Sequence: Synthetic oligonucleotide
  Sense strand starting at position 571 of SEQ ID NO: 1563999
ggagaaaugucagugugag

SEQ ID NO: 1847676 - RNA, 19 nt, Artificial Sequence
  Description of Artificial Sequence: Synthetic oligonucleotide
  Antisense strand to SEQ ID NO: 1847675
cucacacugacauuucucc

SEQ ID NO: 1847677 - RNA, 19 nt, Artificial Sequence
  Description of Artificial Sequence: Synthetic oligonucleotide
  Sense strand starting at position 642 of SEQ ID NO: 1563999
gagggaugugcuugaggug

SEQ ID NO: 1847678 - RNA, 19 nt, Artificial Sequence
  Description of Artificial Sequence: Synthetic oligonucleotide
  Antisense strand to SEQ ID NO: 1847677
caccucaagcacaucccuc

SEQ ID NO: 1847679 - RNA, 19 nt, Artificial Sequence
  Description of Artificial Sequence: Synthetic oligonucleotide
  Sense strand starting at position 745 of SEQ ID NO: 1563999
ggauuuaugugagugcgag

SEQ ID NO: 1847680 - RNA, 19 nt, Artificial Sequence
  Description of Artificial Sequence: Synthetic oligonucleotide
  Antisense strand to SEQ ID NO: 1847679
cucgcacucacauaaaucc

SEQ ID NO: 1847681 - RNA, 19 nt, Artificial Sequence
  Description of Artificial Sequence: Synthetic oligonucleotide
  Sense strand starting at position 746 of SEQ ID NO: 1563999
gauuuaugugagugcgagu

SEQ ID NO: 1847682 - RNA, 19 nt, Artificial Sequence
  Description of Artificial Sequence: Synthetic oligonucleotide
  Antisense strand to SEQ ID NO: 1847681
acucgcacucacauaaauc

SEQ ID NO: 1847683 - RNA, 19 nt, Artificial Sequence
  Description of Artificial Sequence: Synthetic oligonucleotide
  Sense strand starting at position 790 of SEQ ID NO: 1563999
gagagcugugucugacaca

SEQ ID NO: 1847684 - RNA, 19 nt, Artificial Sequence
  Description of Artificial Sequence: Synthetic oligonucleotide
  Antisense strand to SEQ ID NO: 1847683
ugugucagacacagcucuc

SEQ ID NO: 1847685 - RNA, 19 nt, Artificial Sequence
  Description of Artificial Sequence: Synthetic oligonucleotide
  Sense strand starting at position 858 of SEQ ID NO: 1563999
gagcacauguggcuacaua

SEQ ID NO: 1847686 - RNA, 19 nt, Artificial Sequence
  Description of Artificial Sequence: Synthetic oligonucleotide
  Antisense strand to SEQ ID NO: 1847685
uauguagccacaugugcuc

SEQ ID NO: 1847687 - RNA, 19 nt, Artificial Sequence
  Description of Artificial Sequence: Synthetic oligonucleotide
  Sense strand starting at position 859 of SEQ ID NO: 1563999
agcacauguggcuacauau

SEQ ID NO: 1847688 - RNA, 19 nt, Artificial Sequence
  Description of Artificial Sequence: Synthetic oligonucleotide
  Antisense strand to SEQ ID NO: 1847687
auauguagccacaugugcu

SEQ ID NO: 1847689 - RNA, 19 nt, Artificial Sequence
  Description of Artificial Sequence: Synthetic oligonucleotide
  Sense strand starting at position 893 of SEQ ID NO: 1563999
gcgauagaaggauguccuu

SEQ ID NO: 1847690 - RNA, 19 nt, Artificial Sequence
  Description of Artificial Sequence: Synthetic oligonucleotide
  Antisense strand to SEQ ID NO: 1847689
aaggacauccuucuaucgc

SEQ ID NO: 1847691 - RNA, 19 nt, Artificial Sequence
  Description of Artificial Sequence: Synthetic oligonucleotide
  Sense strand starting at position 899 of SEQ ID NO: 1563999
gaaggauguccuuaugugu

SEQ ID NO: 1847692 - RNA, 19 nt, Artificial Sequence
  Description of Artificial Sequence: Synthetic oligonucleotide
  Antisense strand to SEQ ID NO: 1847691
acacauaaggacauccuuc

SEQ ID NO: 1847693 - RNA, 19 nt, Artificial Sequence
  Description of Artificial Sequence: Synthetic oligonucleotide
  Sense strand starting at position 907 of SEQ ID NO: 1563999
uccuuauguguguauauga

SEQ ID NO: 1847694 - RNA, 19 nt, Artificial Sequence
  Description of Artificial Sequence: Synthetic oligonucleotide
  Antisense strand to SEQ ID NO: 1847693
ucauauacacacauaagga

SEQ ID NO: 1847695 - RNA, 19 nt, Artificial Sequence
  Description of Artificial Sequence: Synthetic oligonucleotide
  Sense strand starting at position 916 of SEQ ID NO: 1563999
guguauaugacaggaagga

SEQ ID NO: 1847696 - RNA, 19 nt, Artificial Sequence
  Description of Artificial Sequence: Synthetic oligonucleotide
  Antisense strand to SEQ ID NO: 1847695
uccuuccugucauauacac

SEQ ID NO: 1847697 - RNA, 19 nt, Artificial Sequence
  Description of Artificial Sequence: Synthetic oligonucleotide
  Sense strand starting at position 1985 of SEQ ID NO: 1563999
ggcggaagugauugugaag

SEQ ID NO: 1847698 - RNA, 19 nt, Artificial Sequence
  Description of Artificial Sequence: Synthetic oligonucleotide
  Antisense strand to SEQ ID NO: 1847697
cuucacaaucacuuccgcc

SEQ ID NO: 1847699 - RNA, 19 nt, Artificial Sequence
  Description of Artificial Sequence: Synthetic oligonucleotide
  Sense strand starting at position 2096 of SEQ ID NO: 1563999
ugaaaucgucaaggauaca

SEQ ID NO: 1847700 - RNA, 19 nt, Artificial Sequence
  Description of Artificial Sequence: Synthetic oligonucleotide
  Antisense strand to SEQ ID NO: 1847699
uguauccuugacgauuuca

SEQ ID NO: 1847701 - RNA, 19 nt, Artificial Sequence
  Description of Artificial Sequence: Synthetic oligonucleotide
  Sense strand starting at position 2227 of SEQ ID NO: 1563999
gauuaaguccaaugugaga

SEQ ID NO: 1847702 - RNA, 19 nt, Artificial Sequence
  Description of Artificial Sequence: Synthetic oligonucleotide
  Antisense strand to SEQ ID NO: 1847701
ucucacauuggacuuaauc

SEQ ID NO: 1847703 - RNA, 19 nt, Artificial Sequence
  Description of Artificial Sequence: Synthetic oligonucleotide
  Sense strand starting at position 2229 of SEQ ID NO: 1563999
uuaaguccaaugugagagu

SEQ ID NO: 1847704 - RNA, 19 nt, Artificial Sequence
  Description of Artificial Sequence: Synthetic oligonucleotide
  Antisense strand to SEQ ID NO: 1847703
acucucacauuggacuuaa

SEQ ID NO: 1847705 - RNA, 19 nt, Artificial Sequence
  Description of Artificial Sequence: Synthetic oligonucleotide
  Sense strand starting at position 2242 of SEQ ID NO: 1563999
gagaguaauuacguuacua

SEQ ID NO: 1847706 - RNA, 19 nt, Artificial Sequence
  Description of Artificial Sequence: Synthetic oligonucleotide
  Antisense strand to SEQ ID NO: 1847705
uaguaacguaauuacucuc

SEQ ID NO: 1847707 - RNA, 19 nt, Artificial Sequence
  Description of Artificial Sequence: Synthetic oligonucleotide
  Sense strand starting at position 2244 of SEQ ID NO: 1563999
gaguaauuacguuacuaca

SEQ ID NO: 1847708 - RNA, 19 nt, Artificial Sequence
  Description of Artificial Sequence: Synthetic oligonucleotide
  Antisense strand to SEQ ID NO: 1847707
uguaguaacguaauuacuc

SEQ ID NO: 1847709 - RNA, 19 nt, Artificial Sequence
  Description of Artificial Sequence: Synthetic oligonucleotide
  Sense strand starting at position 2278 of SEQ ID NO: 1563999
cguguuaugguuguaccga

SEQ ID NO: 1847710 - RNA, 19 nt, Artificial Sequence
  Description of Artificial Sequence: Synthetic oligonucleotide
  Antisense strand to SEQ ID NO: 1847709
ucgguacaaccauaacacg

SEQ ID NO: 1847711 - RNA, 19 nt, Artificial Sequence
  Description of Artificial Sequence: Synthetic oligonucleotide
  Sense strand starting at position 2283 of SEQ ID NO: 1563999
uaugguuguaccgaaagua

SEQ ID NO: 1847712 - RNA, 19 nt, Artificial Sequence
  Description of Artificial Sequence: Synthetic oligonucleotide
  Antisense strand to SEQ ID NO: 1847711
uacuuucgguacaaccaua

SEQ ID NO: 1847713 - RNA, 19 nt, Artificial Sequence
  Description of Artificial Sequence: Synthetic oligonucleotide
  Sense strand starting at position 2351 of SEQ ID NO: 1563999
uaaccugaugguuaaagca

SEQ ID NO: 1847714 - RNA, 19 nt, Artificial Sequence
  Description of Artificial Sequence: Synthetic oligonucleotide
  Antisense strand to SEQ ID NO: 1847713
ugcuuuaaccaucagguua

SEQ ID NO: 1847715 - RNA, 19 nt, Artificial Sequence
  Description of Artificial Sequence: Synthetic oligonucleotide
  Sense strand starting at position 2387 of SEQ ID NO: 1563999
uugaauuuguugcugcuaa

SEQ ID NO: 1847716 - RNA, 19 nt, Artificial Sequence
  Description of Artificial Sequence: Synthetic oligonucleotide
  Antisense strand to SEQ ID NO: 1847715
uuagcagcaacaaauucaa

SEQ ID NO: 1847717 - RNA, 19 nt, Artificial Sequence
  Description of Artificial Sequence: Synthetic oligonucleotide
  Sense strand starting at position 2417 of SEQ ID NO: 1563999
agcuucucuguccaagaga

SEQ ID NO: 1847718 - RNA, 19 nt, Artificial Sequence
  Description of Artificial Sequence: Synthetic oligonucleotide
  Antisense strand to SEQ ID NO: 1847717
ucucuuggacagagaagcu

SEQ ID NO: 1847719 - RNA, 19 nt, Artificial Sequence
  Description of Artificial Sequence: Synthetic oligonucleotide
  Sense strand starting at position 2420 of SEQ ID NO: 1563999
uucucuguccaagagauca

SEQ ID NO: 1847720 - RNA, 19 nt, Artificial Sequence
  Description of Artificial Sequence: Synthetic oligonucleotide
  Antisense strand to SEQ ID NO: 1847719
ugaucucuuggacagagaa

SEQ ID NO: 1847721 - RNA, 19 nt, Artificial Sequence
  Description of Artificial Sequence: Synthetic oligonucleotide
  Sense strand starting at position 2462 of SEQ ID NO: 1563999
ucuguuauugcauugcagu

SEQ ID NO: 1847722 - RNA, 19 nt, Artificial Sequence
  Description of Artificial Sequence: Synthetic oligonucleotide
  Antisense strand to SEQ ID NO: 1847721
acugcaaugcaauaacaga

SEQ ID NO: 1847723 - RNA, 19 nt, Artificial Sequence
  Description of Artificial Sequence: Synthetic oligonucleotide
  Sense strand starting at position 2528 of SEQ ID NO: 1563999
uucugaagucuuuaaauug

SEQ ID NO: 1847724 - RNA, 19 nt, Artificial Sequence
  Description of Artificial Sequence: Synthetic oligonucleotide
  Antisense strand to SEQ ID NO: 1847723
caauuuaaagacuucagaa

SEQ ID NO: 1847725 - RNA, 19 nt, Artificial Sequence
  Description of Artificial Sequence: Synthetic oligonucleotide
  Sense strand starting at position 2556 of SEQ ID NO: 1563999
auggaacucuaguauuuac

SEQ ID NO: 1847726 - RNA, 19 nt, Artificial Sequence
  Description of Artificial Sequence: Synthetic oligonucleotide
  Antisense strand to SEQ ID NO: 1847725
guaaauacuagaguuccau

SEQ ID NO: 1847727 - RNA, 19 nt, Artificial Sequence
  Description of Artificial Sequence: Synthetic oligonucleotide
  Sense strand starting at position 2833 of SEQ ID NO: 1563999
caugcauuauggguuaaca

SEQ ID NO: 1847728 - RNA, 19 nt, Artificial Sequence
  Description of Artificial Sequence: Synthetic oligonucleotide
  Antisense strand to SEQ ID NO: 1847727
uguuaacccauaaugcaug

SEQ ID NO: 1847729 - RNA, 19 nt, Artificial Sequence
  Description of Artificial Sequence: Synthetic oligonucleotide
  Sense strand starting at position 2835 of SEQ ID NO: 1563999
ugcauuauggguuaacauc

SEQ ID NO: 1847730 - RNA, 19 nt, Artificial Sequence
  Description of Artificial Sequence: Synthetic oligonucleotide
  Antisense strand to SEQ ID NO: 1847729
gauguuaacccauaaugca

SEQ ID NO: 1847731 - RNA, 19 nt, Artificial Sequence
  Description of Artificial Sequence: Synthetic oligonucleotide
  Sense strand starting at position 2843 of SEQ ID NO: 1563999
ggguuaacaucuccuaaua

SEQ ID NO: 1847732 - RNA, 19 nt, Artificial Sequence
  Description of Artificial Sequence: Synthetic oligonucleotide
  Antisense strand to SEQ ID NO: 1847731
uauuaggagauguuaaccc

SEQ ID NO: 1847733 - RNA, 19 nt, Artificial Sequence
  Description of Artificial Sequence: Synthetic oligonucleotide
  Sense strand starting at position 3231 of SEQ ID NO: 1563999
ggcugaagugagugaagau

SEQ ID NO: 1847734 - RNA, 19 nt, Artificial Sequence
  Description of Artificial Sequence: Synthetic oligonucleotide
  Antisense strand to SEQ ID NO: 1847733
aucuucacucacuucagcc

SEQ ID NO: 1847735 - RNA, 19 nt, Artificial Sequence
  Description of Artificial Sequence: Synthetic oligonucleotide
  Sense strand starting at position 3232 of SEQ ID NO: 1563999
gcugaagugagugaagauc

SEQ ID NO: 1847736 - RNA, 19 nt, Artificial Sequence
  Description of Artificial Sequence: Synthetic oligonucleotide
  Antisense strand to SEQ ID NO: 1847735
gaucuucacucacuucagc

SEQ ID NO: 1847737 - RNA, 19 nt, Artificial Sequence
  Description of Artificial Sequence: Synthetic oligonucleotide
  Sense strand starting at position 3402 of SEQ ID NO: 1563999
agucaauugcucuauugug

SEQ ID NO: 1847738 - RNA, 19 nt, Artificial Sequence
  Description of Artificial Sequence: Synthetic oligonucleotide
  Antisense strand to SEQ ID NO: 1847737
cacaauagagcaauugacu

SEQ ID NO: 1847739 - RNA, 19 nt, Artificial Sequence
  Description of Artificial Sequence: Synthetic oligonucleotide
  Sense strand starting at position 3418 of SEQ ID NO: 1563999
guguguucuauugagacac

SEQ ID NO: 1847740 - RNA, 19 nt, Artificial Sequence
  Description of Artificial Sequence: Synthetic oligonucleotide
  Antisense strand to SEQ ID NO: 1847739
gugucucaauagaacacac

SEQ ID NO: 1847741 - RNA, 19 nt, Artificial Sequence
  Description of Artificial Sequence: Synthetic oligonucleotide
  Sense strand starting at position 32 of SEQ ID NO: 1564000
acuuguggucuauagggaa

SEQ ID NO: 1847742 - RNA, 19 nt, Artificial Sequence
  Description of Artificial Sequence: Synthetic oligonucleotide
  Antisense strand to SEQ ID NO: 1847741
uucccuauagaccacaagu

SEQ ID NO: 1847743 - RNA, 19 nt, Artificial Sequence
  Description of Artificial Sequence: Synthetic oligonucleotide
  Sense strand starting at position 47 of SEQ ID NO: 1564000
ggaagaauuuagcagauac

SEQ ID NO: 1847744 - RNA, 19 nt, Artificial Sequence
  Description of Artificial Sequence: Synthetic oligonucleotide
  Antisense strand to SEQ ID NO: 1847743
guaucugcuaaauucuucc

SEQ ID NO: 1847745 - RNA, 19 nt, Artificial Sequence
  Description of Artificial Sequence: Synthetic oligonucleotide
  Sense strand starting at position 493 of SEQ ID NO: 1564000
acccauuguuucuccuaga

SEQ ID NO: 1847746 - RNA, 19 nt, Artificial Sequence
  Description of Artificial Sequence: Synthetic oligonucleotide
  Antisense strand to SEQ ID NO: 1847745
ucuaggagaaacaaugggu

SEQ ID NO: 1847747 - RNA, 19 nt, Artificial Sequence
  Description of Artificial Sequence: Synthetic oligonucleotide
  Sense strand starting at position 621 of SEQ ID NO: 1564000
cucuaacuccagugagaca

SEQ ID NO: 1847748 - RNA, 19 nt, Artificial Sequence
  Description of Artificial Sequence: Synthetic oligonucleotide
  Antisense strand to SEQ ID NO: 1847747
ugucucacuggaguuagag

SEQ ID NO: 1847749 - RNA, 19 nt, Artificial Sequence
  Description of Artificial Sequence: Synthetic oligonucleotide
  Sense strand starting at position 992 of SEQ ID NO: 1564000
acccaaguuuguuuaaaua

SEQ ID NO: 1847750 - RNA, 19 nt, Artificial Sequence
  Description of Artificial Sequence: Synthetic oligonucleotide
  Antisense strand to SEQ ID NO: 1847749
uauuuaaacaaacuugggu

SEQ ID NO: 1847751 - RNA, 19 nt, Artificial Sequence
  Description of Artificial Sequence: Synthetic oligonucleotide
  Sense strand starting at position 1040 of SEQ ID NO: 1564000
uguaguaacagugaucagu

SEQ ID NO: 1847752 - RNA, 19 nt, Artificial Sequence
  Description of Artificial Sequence: Synthetic oligonucleotide
  Antisense strand to SEQ ID NO: 1847751
acugaucacuguuacuaca

SEQ ID NO: 1847753 - RNA, 19 nt, Artificial Sequence
  Description of Artificial Sequence: Synthetic oligonucleotide
  Sense strand starting at position 1042 of SEQ ID NO: 1564000
uaguaacagugaucaguau

SEQ ID NO: 1847754 - RNA, 19 nt, Artificial Sequence
  Description of Artificial Sequence: Synthetic oligonucleotide
  Antisense strand to SEQ ID NO: 1847753
auacugaucacuguuacua

SEQ ID NO: 1847755 - RNA, 19 nt, Artificial Sequence
  Description of Artificial Sequence: Synthetic oligonucleotide
  Sense strand starting at position 1043 of SEQ ID NO: 1564000
aguaacagugaucaguaua

SEQ ID NO: 1847756 - RNA, 19 nt, Artificial Sequence
  Description of Artificial Sequence: Synthetic oligonucleotide
  Antisense strand to SEQ ID NO: 1847755
uauacugaucacuguuacu

SEQ ID NO: 1847757 - RNA, 19 nt, Artificial Sequence
  Description of Artificial Sequence: Synthetic oligonucleotide
  Sense strand starting at position 1048 of SEQ ID NO: 1564000
cagugaucaguauauugau

SEQ ID NO: 1847758 - RNA, 19 nt, Artificial Sequence
  Description of Artificial Sequence: Synthetic oligonucleotide
  Antisense strand to SEQ ID NO: 1847757
aucaauauacugaucacug

SEQ ID NO: 1847759 - RNA, 19 nt, Artificial Sequence
  Description of Artificial Sequence: Synthetic oligonucleotide
  Sense strand starting at position 1094 of SEQ ID NO: 1564000
cugggauuagaaugcaauu

SEQ ID NO: 1847760 - RNA, 19 nt, Artificial Sequence
  Description of Artificial Sequence: Synthetic oligonucleotide
  Antisense strand to SEQ ID NO: 1847759
aauugcauucuaaucccag

SEQ ID NO: 1847761 - RNA, 19 nt, Artificial Sequence
  Description of Artificial Sequence: Synthetic oligonucleotide
  Sense strand starting at position 1139 of SEQ ID NO: 1564000
gaauguccacccugagagu

SEQ ID NO: 1847762 - RNA, 19 nt, Artificial Sequence
  Description of Artificial Sequence: Synthetic oligonucleotide
  Antisense strand to SEQ ID NO: 1847761
acucucaggguggacauuc

SEQ ID NO: 1847763 - RNA, 19 nt, Artificial Sequence
  Description of Artificial Sequence: Synthetic oligonucleotide
  Sense strand starting at position 1297 of SEQ ID NO: 1564000
ucucaaagagucugaaacu

SEQ ID NO: 1847764 - RNA, 19 nt, Artificial Sequence
  Description of Artificial Sequence: Synthetic oligonucleotide
  Antisense strand to SEQ ID NO: 1847763
aguuucagacucuuugaga

SEQ ID NO: 1847765 - RNA, 19 nt, Artificial Sequence
  Description of Artificial Sequence: Synthetic oligonucleotide
  Sense strand starting at position 1313 of SEQ ID NO: 1564000
acugaucaucuggguuaau

SEQ ID NO: 1847766 - RNA, 19 nt, Artificial Sequence
  Description of Artificial Sequence: Synthetic oligonucleotide
  Antisense strand to SEQ ID NO: 1847765
auuaacccagaugaucagu

SEQ ID NO: 1847767 - RNA, 19 nt, Artificial Sequence
  Description of Artificial Sequence: Synthetic oligonucleotide
  Sense strand starting at position 1314 of SEQ ID NO: 1564000
cugaucaucuggguuaaua

SEQ ID NO: 1847768 - RNA, 19 nt, Artificial Sequence
  Description of Artificial Sequence: Synthetic oligonucleotide
  Antisense strand to SEQ ID NO: 1847767
uauuaacccagaugaucag

SEQ ID NO: 1847769 - RNA, 19 nt, Artificial Sequence
  Description of Artificial Sequence: Synthetic oligonucleotide
  Sense strand starting at position 1387 of SEQ ID NO: 1564000
gaaugaugagauggcaagu

SEQ ID NO: 1847770 - RNA, 19 nt, Artificial Sequence
  Description of Artificial Sequence: Synthetic oligonucleotide
  Antisense strand to SEQ ID NO: 1847769
acuugccaucucaucauuc

SEQ ID NO: 1847771 - RNA, 19 nt, Artificial Sequence
  Description of Artificial Sequence: Synthetic oligonucleotide
  Sense strand starting at position 1423 of SEQ ID NO: 1564000
ggcaguuagacugggaaau

SEQ ID NO: 1847772 - RNA, 19 nt, Artificial Sequence
  Description of Artificial Sequence: Synthetic oligonucleotide
  Antisense strand to SEQ ID NO: 1847771
auuucccagucuaacugcc

SEQ ID NO: 1847773 - RNA, 19 nt, Artificial Sequence
  Description of Artificial Sequence: Synthetic oligonucleotide
  Sense strand starting at position 1424 of SEQ ID NO: 1564000
gcaguuagacugggaaaua

SEQ ID NO: 1847774 - RNA, 19 nt, Artificial Sequence
  Description of Artificial Sequence: Synthetic oligonucleotide
  Antisense strand to SEQ ID NO: 1847773
uauuucccagucuaacugc

SEQ ID NO: 1847775 - RNA, 19 nt, Artificial Sequence
  Description of Artificial Sequence: Synthetic oligonucleotide
  Sense strand starting at position 1954 of SEQ ID NO: 1564000
auaggagagucacucuuua

SEQ ID NO: 1847776 - RNA, 19 nt, Artificial Sequence
  Description of Artificial Sequence: Synthetic oligonucleotide
  Antisense strand to SEQ ID NO: 1847775
uaaagagugacucuccuau

SEQ ID NO: 1847777 - RNA, 19 nt, Artificial Sequence
  Description of Artificial Sequence: Synthetic oligonucleotide
  Sense strand starting at position 1979 of SEQ ID NO: 1564000
uccuucugauggucugaua

SEQ ID NO: 1847778 - RNA, 19 nt, Artificial Sequence
  Description of Artificial Sequence: Synthetic oligonucleotide
  Antisense strand to SEQ ID NO: 1847777
uaucagaccaucagaagga

SEQ ID NO: 1847779 - RNA, 19 nt, Artificial Sequence
  Description of Artificial Sequence: Synthetic oligonucleotide
  Sense strand starting at position 2027 of SEQ ID NO: 1564000
auauacugacuuugccaga

SEQ ID NO: 1847780 - RNA, 19 nt, Artificial Sequence
  Description of Artificial Sequence: Synthetic oligonucleotide
  Antisense strand to SEQ ID NO: 1847779
ucuggcaaagucaguauau

SEQ ID NO: 1847781 - RNA, 19 nt, Artificial Sequence
  Description of Artificial Sequence: Synthetic oligonucleotide
  Sense strand starting at position 2181 of SEQ ID NO: 1564000
uugagaucaucagugauug

SEQ ID NO: 1847782 - RNA, 19 nt, Artificial Sequence
  Description of Artificial Sequence: Synthetic oligonucleotide
  Antisense strand to SEQ ID NO: 1847781
caaucacugaugaucucaa

SEQ ID NO: 1847783 - RNA, 19 nt, Artificial Sequence
  Description of Artificial Sequence: Synthetic oligonucleotide
  Sense strand starting at position 2182 of SEQ ID NO: 1564000
ugagaucaucagugauuga

SEQ ID NO: 1847784 - RNA, 19 nt, Artificial Sequence
  Description of Artificial Sequence: Synthetic oligonucleotide
  Antisense strand to SEQ ID NO: 1847783
ucaaucacugaugaucuca

SEQ ID NO: 1847785 - RNA, 19 nt, Artificial Sequence
  Description of Artificial Sequence: Synthetic oligonucleotide
  Sense strand starting at position 2185 of SEQ ID NO: 1564000
gaucaucagugauugaaug

SEQ ID NO: 1847786 - RNA, 19 nt, Artificial Sequence
  Description of Artificial Sequence: Synthetic oligonucleotide
  Antisense strand to SEQ ID NO: 1847785
cauucaaucacugaugauc

SEQ ID NO: 1847787 - RNA, 19 nt, Artificial Sequence
  Description of Artificial Sequence: Synthetic oligonucleotide
  Sense strand starting at position 2186 of SEQ ID NO: 1564000
aucaucagugauugaauga

SEQ ID NO: 1847788 - RNA, 19 nt, Artificial Sequence
  Description of Artificial Sequence: Synthetic oligonucleotide
  Antisense strand to SEQ ID NO: 1847787
ucauucaaucacugaugau

SEQ ID NO: 1847789 - RNA, 19 nt, Artificial Sequence
  Description of Artificial Sequence: Synthetic oligonucleotide
  Sense strand starting at position 2334 of SEQ ID NO: 1564000
uagugcuugcuguugccaa

SEQ ID NO: 1847790 - RNA, 19 nt, Artificial Sequence
  Description of Artificial Sequence: Synthetic oligonucleotide
  Antisense strand to SEQ ID NO: 1847789
uuggcaacagcaagcacua

SEQ ID NO: 1847791 - RNA, 19 nt, Artificial Sequence
  Description of Artificial Sequence: Synthetic oligonucleotide
  Sense strand starting at position 2354 of SEQ ID NO: 1564000
gcagucuuucgugucuuua

SEQ ID NO: 1847792 - RNA, 19 nt, Artificial Sequence
  Description of Artificial Sequence: Synthetic oligonucleotide
  Antisense strand to SEQ ID NO: 1847791
uaaagacacgaaagacugc

SEQ ID NO: 1847793 - RNA, 19 nt, Artificial Sequence
  Description of Artificial Sequence: Synthetic oligonucleotide
  Sense strand starting at position 2365 of SEQ ID NO: 1564000
ugucuuuacucaguaaaca

SEQ ID NO: 1847794 - RNA, 19 nt, Artificial Sequence
  Description of Artificial Sequence: Synthetic oligonucleotide
  Antisense strand to SEQ ID NO: 1847793
uguuuacugaguaaagaca

SEQ ID NO: 1847795 - RNA, 19 nt, Artificial Sequence
  Description of Artificial Sequence: Synthetic oligonucleotide
  Sense strand starting at position 2366 of SEQ ID NO: 1564000
gucuuuacucaguaaacac

SEQ ID NO: 1847796 - RNA, 19 nt, Artificial Sequence
  Description of Artificial Sequence: Synthetic oligonucleotide
  Antisense strand to SEQ ID NO: 1847795
guguuuacugaguaaagac

SEQ ID NO: 1847797 - RNA, 19 nt, Artificial Sequence
  Description of Artificial Sequence: Synthetic oligonucleotide
  Sense strand starting at position 2753 of SEQ ID NO: 1564000
agggauuacuggucaguau

SEQ ID NO: 1847798 - RNA, 19 nt, Artificial Sequence
  Description of Artificial Sequence: Synthetic oligonucleotide
  Antisense strand to SEQ ID NO: 1847797
auacugaccaguaaucccu

SEQ ID NO: 1847799 - RNA, 19 nt, Artificial Sequence
  Description of Artificial Sequence: Synthetic oligonucleotide
  Sense strand starting at position 2754 of SEQ ID NO: 1564000
gggauuacuggucaguaug

SEQ ID NO: 1847800 - RNA, 19 nt, Artificial Sequence
  Description of Artificial Sequence: Synthetic oligonucleotide
  Antisense strand to SEQ ID NO: 1847799
cauacugaccaguaauccc

SEQ ID NO: 1847801 - RNA, 19 nt, Artificial Sequence
  Description of Artificial Sequence: Synthetic oligonucleotide
  Sense strand starting at position 2757 of SEQ ID NO: 1564000
auuacuggucaguaugguu

SEQ ID NO: 1847802 - RNA, 19 nt, Artificial Sequence
  Description of Artificial Sequence: Synthetic oligonucleotide
  Antisense strand to SEQ ID NO: 1847801
aaccauacugaccaguaau

SEQ ID NO: 1847803 - RNA, 19 nt, Artificial Sequence
  Description of Artificial Sequence: Synthetic oligonucleotide
  Sense strand starting at position 2836 of SEQ ID NO: 1564000
aaauauguuguagagagca

SEQ ID NO: 1847804 - RNA, 19 nt, Artificial Sequence
  Description of Artificial Sequence: Synthetic oligonucleotide
  Antisense strand to SEQ ID NO: 1847803
ugcucucuacaacauauuu

SEQ ID NO: 1847805 - RNA, 19 nt, Artificial Sequence
  Description of Artificial Sequence: Synthetic oligonucleotide
  Sense strand starting at position 2838 of SEQ ID NO: 1564000
auauguuguagagagcaaa

SEQ ID NO: 1847806 - RNA, 19 nt, Artificial Sequence
  Description of Artificial Sequence: Synthetic oligonucleotide
  Antisense strand to SEQ ID NO: 1847805
uuugcucucuacaacauau

SEQ ID NO: 1847807 - RNA, 19 nt, Artificial Sequence
  Description of Artificial Sequence: Synthetic oligonucleotide
  Sense strand starting at position 2872 of SEQ ID NO: 1564000
auucuagugccagaaauga

SEQ ID NO: 1847808 - RNA, 19 nt, Artificial Sequence
  Description of Artificial Sequence: Synthetic oligonucleotide
  Antisense strand to SEQ ID NO: 1847807
ucauuucuggcacuagaau

SEQ ID NO: 1847809 - RNA, 19 nt, Artificial Sequence
  Description of Artificial Sequence: Synthetic oligonucleotide
  Sense strand starting at position 2936 of SEQ ID NO: 1564000
aaccaaagguggucacaua

SEQ ID NO: 1847810 - RNA, 19 nt, Artificial Sequence
  Description of Artificial Sequence: Synthetic oligonucleotide
  Antisense strand to SEQ ID NO: 1847809
uaugugaccaccuuugguu

SEQ ID NO: 1847811 - RNA, 19 nt, Artificial Sequence
  Description of Artificial Sequence: Synthetic oligonucleotide
  Sense strand starting at position 2993 of SEQ ID NO: 1564000
aguggaaucugagcuccua

SEQ ID NO: 1847812 - RNA, 19 nt, Artificial Sequence
  Description of Artificial Sequence: Synthetic oligonucleotide
  Antisense strand to SEQ ID NO: 1847811
uaggagcucagauuccacu

SEQ ID NO: 1847813 - RNA, 19 nt, Artificial Sequence
  Description of Artificial Sequence: Synthetic oligonucleotide
  Sense strand starting at position 3086 of SEQ ID NO: 1564000
ccacuuugagcugagagua

SEQ ID NO: 1847814 - RNA, 19 nt, Artificial Sequence
  Description of Artificial Sequence: Synthetic oligonucleotide
  Antisense strand to SEQ ID NO: 1847813
uacucucagcucaaagugg

SEQ ID NO: 1847815 - RNA, 19 nt, Artificial Sequence
  Description of Artificial Sequence: Synthetic oligonucleotide
  Sense strand starting at position 3099 of SEQ ID NO: 1564000
agaguaggcagucacauaa

SEQ ID NO: 1847816 - RNA, 19 nt, Artificial Sequence
  Description of Artificial Sequence: Synthetic oligonucleotide
  Antisense strand to SEQ ID NO: 1847815
uuaugugacugccuacucu

SEQ ID NO: 1847817 - RNA, 19 nt, Artificial Sequence
  Description of Artificial Sequence: Synthetic oligonucleotide
  Sense strand starting at position 3429 of SEQ ID NO: 1564000
ugguauauagcacaugaau

SEQ ID NO: 1847818 - RNA, 19 nt, Artificial Sequence
  Description of Artificial Sequence: Synthetic oligonucleotide
  Antisense strand to SEQ ID NO: 1847817
auucaugugcuauauacca

SEQ ID NO: 1847819 - RNA, 19 nt, Artificial Sequence
  Description of Artificial Sequence: Synthetic oligonucleotide
  Sense strand starting at position 3492 of SEQ ID NO: 1564000
uacuaaguccgugaggaaa

SEQ ID NO: 1847820 - RNA, 19 nt, Artificial Sequence
  Description of Artificial Sequence: Synthetic oligonucleotide
  Antisense strand to SEQ ID NO: 1847819
uuuccucacggacuuagua

SEQ ID NO: 1847821 - RNA, 19 nt, Artificial Sequence
  Description of Artificial Sequence: Synthetic oligonucleotide
  Sense strand starting at position 361 of SEQ ID NO: 1564002
uagauaggauuccugaugu

SEQ ID NO: 1847822 - RNA, 19 nt, Artificial Sequence
  Description of Artificial Sequence: Synthetic oligonucleotide
  Antisense strand to SEQ ID NO: 1847821
acaucaggaauccuaucua

SEQ ID NO: 1847823 - RNA, 19 nt, Artificial Sequence
  Description of Artificial Sequence: Synthetic oligonucleotide
  Sense strand starting at position 391 of SEQ ID NO: 1564002
ggaauugaguuccuccaac

SEQ ID NO: 1847824 - RNA, 19 nt, Artificial Sequence
  Description of Artificial Sequence: Synthetic oligonucleotide
  Antisense strand to SEQ ID NO: 1847823
guuggaggaacucaauucc

SEQ ID NO: 1847825 - RNA, 19 nt, Artificial Sequence
  Description of Artificial Sequence: Synthetic oligonucleotide
  Sense strand starting at position 416 of SEQ ID NO: 1564002
cucucaucuggucacacau

SEQ ID NO: 1847826 - RNA, 19 nt, Artificial Sequence
  Description of Artificial Sequence: Synthetic oligonucleotide
  Antisense strand to SEQ ID NO: 1847825
augugugaccagaugagag

SEQ ID NO: 1847827 - RNA, 19 nt, Artificial Sequence
  Description of Artificial Sequence: Synthetic oligonucleotide
  Sense strand starting at position 579 of SEQ ID NO: 1564002
ggacuuugacauuauuguu

SEQ ID NO: 1847828 - RNA, 19 nt, Artificial Sequence
  Description of Artificial Sequence: Synthetic oligonucleotide
  Antisense strand to SEQ ID NO: 1847827
aacaauaaugucaaagucc

SEQ ID NO: 1847829 - RNA, 19 nt, Artificial Sequence
  Description of Artificial Sequence: Synthetic oligonucleotide
  Sense strand starting at position 655 of SEQ ID NO: 1564002
agaugaggaaguggugauu

SEQ ID NO: 1847830 - RNA, 19 nt, Artificial Sequence
  Description of Artificial Sequence: Synthetic oligonucleotide
  Antisense strand to SEQ ID NO: 1847829
aaucaccacuuccucaucu

SEQ ID NO: 1847831 - RNA, 19 nt, Artificial Sequence
  Description of Artificial Sequence: Synthetic oligonucleotide
  Sense strand starting at position 851 of SEQ ID NO: 1564002
caaauugaucucuguggau

SEQ ID NO: 1847832 - RNA, 19 nt, Artificial Sequence
  Description of Artificial Sequence: Synthetic oligonucleotide
  Antisense strand to SEQ ID NO: 1847831
auccacagagaucaauuug

SEQ ID NO: 1847833 - RNA, 19 nt, Artificial Sequence
  Description of Artificial Sequence: Synthetic oligonucleotide
  Sense strand starting at position 937 of SEQ ID NO: 1564002
guguuuaagcugcuaucuu

SEQ ID NO: 1847834 - RNA, 19 nt, Artificial Sequence
  Description of Artificial Sequence: Synthetic oligonucleotide
  Antisense strand to SEQ ID NO: 1847833
aagauagcagcuuaaacac

SEQ ID NO: 1847835 - RNA, 19 nt, Artificial Sequence
  Description of Artificial Sequence: Synthetic oligonucleotide
  Sense strand starting at position 969 of SEQ ID NO: 1564002
guuagcaaugucuacagga

SEQ ID NO: 1847836 - RNA, 19 nt, Artificial Sequence
  Description of Artificial Sequence: Synthetic oligonucleotide
  Antisense strand to SEQ ID NO: 1847835
uccuguagacauugcuaac

SEQ ID NO: 1847837 - RNA, 19 nt, Artificial Sequence
  Description of Artificial Sequence: Synthetic oligonucleotide
  Sense strand starting at position 971 of SEQ ID NO: 1564002
uagcaaugucuacaggacu

SEQ ID NO: 1847838 - RNA, 19 nt, Artificial Sequence
  Description of Artificial Sequence: Synthetic oligonucleotide
  Antisense strand to SEQ ID NO: 1847837
aguccuguagacauugcua

SEQ ID NO: 1847839 - RNA, 19 nt, Artificial Sequence
  Description of Artificial Sequence: Synthetic oligonucleotide
  Sense strand starting at position 1184 of SEQ ID NO: 1564002
gucugugauauuugcuaga

SEQ ID NO: 1847840 - RNA, 19 nt, Artificial Sequence
  Description of Artificial Sequence: Synthetic oligonucleotide
  Antisense strand to SEQ ID NO: 1847839
ucuagcaaauaucacagac

SEQ ID NO: 1847841 - RNA, 19 nt, Artificial Sequence
  Description of Artificial Sequence: Synthetic oligonucleotide
  Sense strand starting at position 1583 of SEQ ID NO: 1564002
gggcacucucuccagagau

SEQ ID NO: 1847842 - RNA, 19 nt, Artificial Sequence
  Description of Artificial Sequence: Synthetic oligonucleotide
  Antisense strand to SEQ ID NO: 1847841
aucucuggagagagugccc

SEQ ID NO: 1847843 - RNA, 19 nt, Artificial Sequence
  Description of Artificial Sequence: Synthetic oligonucleotide
  Sense strand starting at position 1591 of SEQ ID NO: 1564002
ucuccagagaucuguggga

SEQ ID NO: 1847844 - RNA, 19 nt, Artificial Sequence
  Description of Artificial Sequence: Synthetic oligonucleotide
  Antisense strand to SEQ ID NO: 1847843
ucccacagaucucuggaga

SEQ ID NO: 1847845 - RNA, 19 nt, Artificial Sequence
  Description of Artificial Sequence: Synthetic oligonucleotide
  Sense strand starting at position 1593 of SEQ ID NO: 1564002
uccagagaucugugggacu

SEQ ID NO: 1847846 - RNA, 19 nt, Artificial Sequence
  Description of Artificial Sequence: Synthetic oligonucleotide
  Antisense strand to SEQ ID NO: 1847845
agucccacagaucucugga

SEQ ID NO: 1847847 - RNA, 19 nt, Artificial Sequence
  Description of Artificial Sequence: Synthetic oligonucleotide
  Sense strand starting at position 1595 of SEQ ID NO: 1564002
cagagaucugugggacucu

SEQ ID NO: 1847848 - RNA, 19 nt, Artificial Sequence
  Description of Artificial Sequence: Synthetic oligonucleotide
  Antisense strand to SEQ ID NO: 1847847
agagucccacagaucucug

SEQ ID NO: 1847849 - RNA, 19 nt, Artificial Sequence
  Description of Artificial Sequence: Synthetic oligonucleotide
  Sense strand starting at position 1625 of SEQ ID NO: 1564002
uggaauucuuugguaauaa

SEQ ID NO: 1847850 - RNA, 19 nt, Artificial Sequence
  Description of Artificial Sequence: Synthetic oligonucleotide
  Antisense strand to SEQ ID NO: 1847849
uuauuaccaaagaauucca

SEQ ID NO: 1847851 - RNA, 19 nt, Artificial Sequence
  Description of Artificial Sequence: Synthetic oligonucleotide
  Sense strand starting at position 1986 of SEQ ID NO: 1564002
agggcuuucugauugacag

SEQ ID NO: 1847852 - RNA, 19 nt, Artificial Sequence
  Description of Artificial Sequence: Synthetic oligonucleotide
  Antisense strand to SEQ ID NO: 1847851
cugucaaucagaaagcccu

SEQ ID NO: 1847853 - RNA, 19 nt, Artificial Sequence
  Description of Artificial Sequence: Synthetic oligonucleotide
  Sense strand starting at position 2072 of SEQ ID NO: 1564002
ccaccuacucagggauacu

SEQ ID NO: 1847854 - RNA, 19 nt, Artificial Sequence
  Description of Artificial Sequence: Synthetic oligonucleotide
  Antisense strand to SEQ ID NO: 1847853
aguaucccugaguaggugg

SEQ ID NO: 1847855 - RNA, 19 nt, Artificial Sequence
  Description of Artificial Sequence: Synthetic oligonucleotide
  Sense strand starting at position 2305 of SEQ ID NO: 1564002
gugagaagccaugaaguga

SEQ ID NO: 1847856 - RNA, 19 nt, Artificial Sequence
  Description of Artificial Sequence: Synthetic oligonucleotide
  Antisense strand to SEQ ID NO: 1847855
ucacuucauggcuucucac

SEQ ID NO: 1847857 - RNA, 19 nt, Artificial Sequence
  Description of Artificial Sequence: Synthetic oligonucleotide
  Sense strand starting at position 2582 of SEQ ID NO: 1564002
cugucaauucgaugaacag

SEQ ID NO: 1847858 - RNA, 19 nt, Artificial Sequence
  Description of Artificial Sequence: Synthetic oligonucleotide
  Antisense strand to SEQ ID NO: 1847857
cuguucaucgaauugacag

SEQ ID NO: 1847859 - RNA, 19 nt, Artificial Sequence
  Description of Artificial Sequence: Synthetic oligonucleotide
  Sense strand starting at position 2591 of SEQ ID NO: 1564002
cgaugaacagauugugauu

SEQ ID NO: 1847860 - RNA, 19 nt, Artificial Sequence
  Description of Artificial Sequence: Synthetic oligonucleotide
  Antisense strand to SEQ ID NO: 1847859
aaucacaaucuguucaucg

SEQ ID NO: 1847861 - RNA, 19 nt, Artificial Sequence
  Description of Artificial Sequence: Synthetic oligonucleotide
  Sense strand starting at position 2596 of SEQ ID NO: 1564002
aacagauugugauuaggcu

SEQ ID NO: 1847862 - RNA, 19 nt, Artificial Sequence
  Description of Artificial Sequence: Synthetic oligonucleotide
  Antisense strand to SEQ ID NO: 1847861
agccuaaucacaaucuguu

SEQ ID NO: 1847863 - RNA, 19 nt, Artificial Sequence
  Description of Artificial Sequence: Synthetic oligonucleotide
  Sense strand starting at position 2618 of SEQ ID NO: 1564002
ggaggcuagaauuguaaua

SEQ ID NO: 1847864 - RNA, 19 nt, Artificial Sequence
  Description of Artificial Sequence: Synthetic oligonucleotide
  Antisense strand to SEQ ID NO: 1847863
uauuacaauucuagccucc

SEQ ID NO: 1847865 - RNA, 19 nt, Artificial Sequence
  Description of Artificial Sequence: Synthetic oligonucleotide
  Sense strand starting at position 2668 of SEQ ID NO: 1564002
gugggcaagaccuaugcaa

SEQ ID NO: 1847866 - RNA, 19 nt, Artificial Sequence
  Description of Artificial Sequence: Synthetic oligonucleotide
  Antisense strand to SEQ ID NO: 1847865
uugcauaggucuugcccac

SEQ ID NO: 1847867 - RNA, 19 nt, Artificial Sequence
  Description of Artificial Sequence: Synthetic oligonucleotide
  Sense strand starting at position 2746 of SEQ ID NO: 1564002
gauaaucgacuucgagaca

SEQ ID NO: 1847868 - RNA, 19 nt, Artificial Sequence
  Description of Artificial Sequence: Synthetic oligonucleotide
  Antisense strand to SEQ ID NO: 1847867
ugucucgaagucgauuauc

SEQ ID NO: 1847869 - RNA, 19 nt, Artificial Sequence
  Description of Artificial Sequence: Synthetic oligonucleotide
  Sense strand starting at position 2749 of SEQ ID NO: 1564002
aaucgacuucgagacaagu

SEQ ID NO: 1847870 - RNA, 19 nt, Artificial Sequence
  Description of Artificial Sequence: Synthetic oligonucleotide
  Antisense strand to SEQ ID NO: 1847869
acuugucucgaagucgauu

SEQ ID NO: 1847871 - RNA, 19 nt, Artificial Sequence
  Description of Artificial Sequence: Synthetic oligonucleotide
  Sense strand starting at position 2751 of SEQ ID NO: 1564002
ucgacuucgagacaaguca

SEQ ID NO: 1847872 - RNA, 19 nt, Artificial Sequence
  Description of Artificial Sequence: Synthetic oligonucleotide
  Antisense strand to SEQ ID NO: 1847871
ugacuugucucgaagucga

SEQ ID NO: 1847873 - RNA, 19 nt, Artificial Sequence
  Description of Artificial Sequence: Synthetic oligonucleotide
  Sense strand starting at position 2795 of SEQ ID NO: 1564002
ucaguauucuauccugaga

SEQ ID NO: 1847874 - RNA, 19 nt, Artificial Sequence
  Description of Artificial Sequence: Synthetic oligonucleotide
  Antisense strand to SEQ ID NO: 1847873
ucucaggauagaauacuga

SEQ ID NO: 1847875 - RNA, 19 nt, Artificial Sequence
  Description of Artificial Sequence: Synthetic oligonucleotide
  Sense strand starting at position 2798 of SEQ ID NO: 1564002
guauucuauccugagagug

SEQ ID NO: 1847876 - RNA, 19 nt, Artificial Sequence
  Description of Artificial Sequence: Synthetic oligonucleotide
  Antisense strand to SEQ ID NO: 1847875
cacucucaggauagaauac

SEQ ID NO: 1847877 - RNA, 19 nt, Artificial Sequence
  Description of Artificial Sequence: Synthetic oligonucleotide
  Sense strand starting at position 2803 of SEQ ID NO: 1564002
cuauccugagaguguaaua

SEQ ID NO: 1847878 - RNA, 19 nt, Artificial Sequence
  Description of Artificial Sequence: Synthetic oligonucleotide
  Antisense strand to SEQ ID NO: 1847877
uauuacacucucaggauag

SEQ ID NO: 1847879 - RNA, 19 nt, Artificial Sequence
  Description of Artificial Sequence: Synthetic oligonucleotide
  Sense strand starting at position 2919 of SEQ ID NO: 1564002
uaguccuugccacagagaa

SEQ ID NO: 1847880 - RNA, 19 nt, Artificial Sequence
  Description of Artificial Sequence: Synthetic oligonucleotide
  Antisense strand to SEQ ID NO: 1847879
uucucuguggcaaggacua

SEQ ID NO: 1847881 - RNA, 19 nt, Artificial Sequence
  Description of Artificial Sequence: Synthetic oligonucleotide
  Sense strand starting at position 3015 of SEQ ID NO: 1564002
uucuaaagacugugaaggu

SEQ ID NO: 1847882 - RNA, 19 nt, Artificial Sequence
  Description of Artificial Sequence: Synthetic oligonucleotide
  Antisense strand to SEQ ID NO: 1847881
accuucacagucuuuagaa

SEQ ID NO: 1847883 - RNA, 19 nt, Artificial Sequence
  Description of Artificial Sequence: Synthetic oligonucleotide
  Sense strand starting at position 3222 of SEQ ID NO: 1564002
guuggaagacuccggagaa

SEQ ID NO: 1847884 - RNA, 19 nt, Artificial Sequence
  Description of Artificial Sequence: Synthetic oligonucleotide
  Antisense strand to SEQ ID NO: 1847883
uucuccggagucuuccaac

SEQ ID NO: 1847885 - RNA, 19 nt, Artificial Sequence
  Description of Artificial Sequence: Synthetic oligonucleotide
  Sense strand starting at position 3243 of SEQ ID NO: 1564002
aagguauggucuccuggaa

SEQ ID NO: 1847886 - RNA, 19 nt, Artificial Sequence
  Description of Artificial Sequence: Synthetic oligonucleotide
  Antisense strand to SEQ ID NO: 1847885
uuccaggagaccauaccuu

SEQ ID NO: 1847887 - RNA, 19 nt, Artificial Sequence
  Description of Artificial Sequence: Synthetic oligonucleotide
  Sense strand starting at position 3247 of SEQ ID NO: 1564002
uauggucuccuggaacuuu

SEQ ID NO: 1847888 - RNA, 19 nt, Artificial Sequence
  Description of Artificial Sequence: Synthetic oligonucleotide
  Antisense strand to SEQ ID NO: 1847887
aaaguuccaggagaccaua

SEQ ID NO: 1847889 - RNA, 19 nt, Artificial Sequence
  Description of Artificial Sequence: Synthetic oligonucleotide
  Sense strand starting at position 3607 of SEQ ID NO: 1564002
agacuaaggccaugugacu

SEQ ID NO: 1847890 - RNA, 19 nt, Artificial Sequence
  Description of Artificial Sequence: Synthetic oligonucleotide
  Antisense strand to SEQ ID NO: 1847889
agucacauggccuuagucu

SEQ ID NO: 1847891 - RNA, 19 nt, Artificial Sequence
  Description of Artificial Sequence: Synthetic oligonucleotide
  Sense strand starting at position 3613 of SEQ ID NO: 1564002
aggccaugugacugaugga

SEQ ID NO: 1847892 - RNA, 19 nt, Artificial Sequence
  Description of Artificial Sequence: Synthetic oligonucleotide
  Antisense strand to SEQ ID NO: 1847891
uccaucagucacauggccu

SEQ ID NO: 1847893 - RNA, 19 nt, Artificial Sequence
  Description of Artificial Sequence: Synthetic oligonucleotide
  Sense strand starting at position 3614 of SEQ ID NO: 1564002
ggccaugugacugauggaa

SEQ ID NO: 1847894 - RNA, 19 nt, Artificial Sequence
  Description of Artificial Sequence: Synthetic oligonucleotide
  Antisense strand to SEQ ID NO: 1847893
uuccaucagucacauggcc

SEQ ID NO: 1847895 - RNA, 19 nt, Artificial Sequence
  Description of Artificial Sequence: Synthetic oligonucleotide
  Sense strand starting at position 3697 of SEQ ID NO: 1564002
gaagcucaacuguaggauu

SEQ ID NO: 1847896 - RNA, 19 nt, Artificial Sequence
  Description of Artificial Sequence: Synthetic oligonucleotide
  Antisense strand to SEQ ID NO: 1847895
aauccuacaguugagcuuc

SEQ ID NO: 1847897 - RNA, 19 nt, Artificial Sequence
  Description of Artificial Sequence: Synthetic oligonucleotide
  Sense strand starting at position 3708 of SEQ ID NO: 1564002
guaggauugagccagcaau

SEQ ID NO: 1847898 - RNA, 19 nt, Artificial Sequence
  Description of Artificial Sequence: Synthetic oligonucleotide
  Antisense strand to SEQ ID NO: 1847897
auugcuggcucaauccuac

SEQ ID NO: 1847899 - RNA, 19 nt, Artificial Sequence
  Description of Artificial Sequence: Synthetic oligonucleotide
  Sense strand starting at position 3747 of SEQ ID NO: 1564002
ucggaauggcccuggagaa

SEQ ID NO: 1847900 - RNA, 19 nt, Artificial Sequence
  Description of Artificial Sequence: Synthetic oligonucleotide
  Antisense strand to SEQ ID NO: 1847899
uucuccagggccauuccga

SEQ ID NO: 1847901 - RNA, 19 nt, Artificial Sequence
  Description of Artificial Sequence: Synthetic oligonucleotide
  Sense strand starting at position 46 of SEQ ID NO: 1564003
uagauaggauuccugaugu

SEQ ID NO: 1847902 - RNA, 19 nt, Artificial Sequence
  Description of Artificial Sequence: Synthetic oligonucleotide
  Antisense strand to SEQ ID NO: 1847901
acaucaggaauccuaucua

SEQ ID NO: 1847903 - RNA, 19 nt, Artificial Sequence
  Description of Artificial Sequence: Synthetic oligonucleotide
  Sense strand starting at position 76 of SEQ ID NO: 1564003
ggaauugaguuccuccaac

SEQ ID NO: 1847904 - RNA, 19 nt, Artificial Sequence
  Description of Artificial Sequence: Synthetic oligonucleotide
  Antisense strand to SEQ ID NO: 1847903
guuggaggaacucaauucc

SEQ ID NO: 1847905 - RNA, 19 nt, Artificial Sequence
  Description of Artificial Sequence: Synthetic oligonucleotide
  Sense strand starting at position 101 of SEQ ID NO: 1564003
cucucaucuggucacacau

SEQ ID NO: 1847906 - RNA, 19 nt, Artificial Sequence
  Description of Artificial Sequence: Synthetic oligonucleotide
  Antisense strand to SEQ ID NO: 1847905
augugugaccagaugagag

SEQ ID NO: 1847907 - RNA, 19 nt, Artificial Sequence
  Description of Artificial Sequence: Synthetic oligonucleotide
  Sense strand starting at position 264 of SEQ ID NO: 1564003
ggacuuugacauuauuguu

SEQ ID NO: 1847908 - RNA, 19 nt, Artificial Sequence
  Description of Artificial Sequence: Synthetic oligonucleotide
  Antisense strand to SEQ ID NO: 1847907
aacaauaaugucaaagucc

SEQ ID NO: 1847909 - RNA, 19 nt, Artificial Sequence
  Description of Artificial Sequence: Synthetic oligonucleotide
  Sense strand starting at position 340 of SEQ ID NO: 1564003
agaugaggaaguggugauu

SEQ ID NO: 1847910 - RNA, 19 nt, Artificial Sequence
  Description of Artificial Sequence: Synthetic oligonucleotide
  Antisense strand to SEQ ID NO: 1847909
aaucaccacuuccucaucu

SEQ ID NO: 1847911 - RNA, 19 nt, Artificial Sequence
  Description of Artificial Sequence: Synthetic oligonucleotide
  Sense strand starting at position 536 of SEQ ID NO: 1564003
caaauugaucucuguggau

SEQ ID NO: 1847912 - RNA, 19 nt, Artificial Sequence
  Description of Artificial Sequence: Synthetic oligonucleotide
  Antisense strand to SEQ ID NO: 1847911
auccacagagaucaauuug

SEQ ID NO: 1847913 - RNA, 19 nt, Artificial Sequence
  Description of Artificial Sequence: Synthetic oligonucleotide
  Sense strand starting at position 622 of SEQ ID NO: 1564003
guguuuaagcugcuaucuu

SEQ ID NO: 1847914 - RNA, 19 nt, Artificial Sequence
  Description of Artificial Sequence: Synthetic oligonucleotide
  Antisense strand to SEQ ID NO: 1847913
aagauagcagcuuaaacac

SEQ ID NO: 1847915 - RNA, 19 nt, Artificial Sequence
  Description of Artificial Sequence: Synthetic oligonucleotide
  Sense strand starting at position 654 of SEQ ID NO: 1564003
guuagcaaugucuacagga

SEQ ID NO: 1847916 - RNA, 19 nt, Artificial Sequence
  Description of Artificial Sequence: Synthetic oligonucleotide
  Antisense strand to SEQ ID NO: 1847915
uccuguagacauugcuaac

SEQ ID NO: 1847917 - RNA, 19 nt, Artificial Sequence
  Description of Artificial Sequence: Synthetic oligonucleotide
  Sense strand starting at position 656 of SEQ ID NO: 1564003
uagcaaugucuacaggacu

SEQ ID NO: 1847918 - RNA, 19 nt, Artificial Sequence
  Description of Artificial Sequence: Synthetic oligonucleotide
  Antisense strand to SEQ ID NO: 1847917
aguccuguagacauugcua

SEQ ID NO: 1847919 - RNA, 19 nt, Artificial Sequence
  Description of Artificial Sequence: Synthetic oligonucleotide
  Sense strand starting at position 869 of SEQ ID NO: 1564003
gucugugauauuugcuaga

SEQ ID NO: 1847920 - RNA, 19 nt, Artificial Sequence
  Description of Artificial Sequence: Synthetic oligonucleotide
  Antisense strand to SEQ ID NO: 1847919
ucuagcaaauaucacagac

SEQ ID NO: 1847921 - RNA, 19 nt, Artificial Sequence
  Description of Artificial Sequence: Synthetic oligonucleotide
  Sense strand starting at position 1268 of SEQ ID NO: 1564003
gggcacucucuccagagau

SEQ ID NO: 1847922 - RNA, 19 nt, Artificial Sequence
  Description of Artificial Sequence: Synthetic oligonucleotide
  Antisense strand to SEQ ID NO: 1847921
aucucuggagagagugccc

SEQ ID NO: 1847923 - RNA, 19 nt, Artificial Sequence
  Description of Artificial Sequence: Synthetic oligonucleotide
  Sense strand starting at position 1276 of SEQ ID NO: 1564003
ucuccagagaucuguggga

SEQ ID NO: 1847924 - RNA, 19 nt, Artificial Sequence
  Description of Artificial Sequence: Synthetic oligonucleotide
  Antisense strand to SEQ ID NO: 1847923
ucccacagaucucuggaga

SEQ ID NO: 1847925 - RNA, 19 nt, Artificial Sequence
  Description of Artificial Sequence: Synthetic oligonucleotide
  Sense strand starting at position 1278 of SEQ ID NO: 1564003
uccagagaucugugggacu

SEQ ID NO: 1847926 - RNA, 19 nt, Artificial Sequence
  Description of Artificial Sequence: Synthetic oligonucleotide
  Antisense strand to SEQ ID NO: 1847925
agucccacagaucucugga

SEQ ID NO: 1847927 - RNA, 19 nt, Artificial Sequence
  Description of Artificial Sequence: Synthetic oligonucleotide
  Sense strand starting at position 1280 of SEQ ID NO: 1564003
cagagaucugugggacucu

SEQ ID NO: 1847928 - RNA, 19 nt, Artificial Sequence
  Description of Artificial Sequence: Synthetic oligonucleotide
  Antisense strand to SEQ ID NO: 1847927
agagucccacagaucucug

SEQ ID NO: 1847929 - RNA, 19 nt, Artificial Sequence
  Description of Artificial Sequence: Synthetic oligonucleotide
  Sense strand starting at position 1310 of SEQ ID NO: 1564003
uggaauucuuugguaauaa

SEQ ID NO: 1847930 - RNA, 19 nt, Artificial Sequence
  Description of Artificial Sequence: Synthetic oligonucleotide
  Antisense strand to SEQ ID NO: 1847929
uuauuaccaaagaauucca

SEQ ID NO: 1847931 - RNA, 19 nt, Artificial Sequence
  Description of Artificial Sequence: Synthetic oligonucleotide
  Sense strand starting at position 1671 of SEQ ID NO: 1564003
agggcuuucugauugacag

SEQ ID NO: 1847932 - RNA, 19 nt, Artificial Sequence
  Description of Artificial Sequence: Synthetic oligonucleotide
  Antisense strand to SEQ ID NO: 1847931
cugucaaucagaaagcccu

SEQ ID NO: 1847933 - RNA, 19 nt, Artificial Sequence
  Description of Artificial Sequence: Synthetic oligonucleotide
  Sense strand starting at position 1757 of SEQ ID NO: 1564003
ccaccuacucagggauacu

SEQ ID NO: 1847934 - RNA, 19 nt, Artificial Sequence
  Description of Artificial Sequence: Synthetic oligonucleotide
  Antisense strand to SEQ ID NO: 1847933
aguaucccugaguaggugg

SEQ ID NO: 1847935 - RNA, 19 nt, Artificial Sequence
  Description of Artificial Sequence: Synthetic oligonucleotide
  Sense strand starting at position 1990 of SEQ ID NO: 1564003
gugagaagccaugaaguga

SEQ ID NO: 1847936 - RNA, 19 nt, Artificial Sequence
  Description of Artificial Sequence: Synthetic oligonucleotide
  Antisense strand to SEQ ID NO: 1847935
ucacuucauggcuucucac

SEQ ID NO: 1847937 - RNA, 19 nt, Artificial Sequence
  Description of Artificial Sequence: Synthetic oligonucleotide
  Sense strand starting at position 2267 of SEQ ID NO: 1564003
cugucaauucgaugaacag

SEQ ID NO: 1847938 - RNA, 19 nt, Artificial Sequence
  Description of Artificial Sequence: Synthetic oligonucleotide
  Antisense strand to SEQ ID NO: 1847937
cuguucaucgaauugacag

SEQ ID NO: 1847939 - RNA, 19 nt, Artificial Sequence
  Description of Artificial Sequence: Synthetic oligonucleotide
  Sense strand starting at position 2276 of SEQ ID NO: 1564003
cgaugaacagauugugauu

SEQ ID NO: 1847940 - RNA, 19 nt, Artificial Sequence
  Description of Artificial Sequence: Synthetic oligonucleotide
  Antisense strand to SEQ ID NO: 1847939
aaucacaaucuguucaucg

SEQ ID NO: 1847941 - RNA, 19 nt, Artificial Sequence
  Description of Artificial Sequence: Synthetic oligonucleotide
  Sense strand starting at position 2281 of SEQ ID NO: 1564003
aacagauugugauuaggcu

SEQ ID NO: 1847942 - RNA, 19 nt, Artificial Sequence
  Description of Artificial Sequence: Synthetic oligonucleotide
  Antisense strand to SEQ ID NO: 1847941
agccuaaucacaaucuguu

SEQ ID NO: 1847943 - RNA, 19 nt, Artificial Sequence
  Description of Artificial Sequence: Synthetic oligonucleotide
  Sense strand starting at position 2303 of SEQ ID NO: 1564003
ggaggcuagaauuguaaua

SEQ ID NO: 1847944 - RNA, 19 nt, Artificial Sequence
  Description of Artificial Sequence: Synthetic oligonucleotide
  Antisense strand to SEQ ID NO: 1847943
uauuacaauucuagccucc

SEQ ID NO: 1847945 - RNA, 19 nt, Artificial Sequence
  Description of Artificial Sequence: Synthetic oligonucleotide
  Sense strand starting at position 2353 of SEQ ID NO: 1564003
gugggcaagaccuaugcaa

SEQ ID NO: 1847946 - RNA, 19 nt, Artificial Sequence
  Description of Artificial Sequence: Synthetic oligonucleotide
  Antisense strand to SEQ ID NO: 1847945
uugcauaggucuugcccac

SEQ ID NO: 1847947 - RNA, 19 nt, Artificial Sequence
  Description of Artificial Sequence: Synthetic oligonucleotide
  Sense strand starting at position 2431 of SEQ ID NO: 1564003
gauaaucgacuucgagaca

SEQ ID NO: 1847948 - RNA, 19 nt, Artificial Sequence
  Description of Artificial Sequence: Synthetic oligonucleotide
  Antisense strand to SEQ ID NO: 1847947
ugucucgaagucgauuauc

SEQ ID NO: 1847949 - RNA, 19 nt, Artificial Sequence
  Description of Artificial Sequence: Synthetic oligonucleotide
  Sense strand starting at position 2434 of SEQ ID NO: 1564003
aaucgacuucgagacaagu

SEQ ID NO: 1847950 - RNA, 19 nt, Artificial Sequence
  Description of Artificial Sequence: Synthetic oligonucleotide
  Antisense strand to SEQ ID NO: 1847949
acuugucucgaagucgauu

SEQ ID NO: 1847951 - RNA, 19 nt, Artificial Sequence
  Description of Artificial Sequence: Synthetic oligonucleotide
  Sense strand starting at position 2436 of SEQ ID NO: 1564003
ucgacuucgagacaaguca

SEQ ID NO: 1847952 - RNA, 19 nt, Artificial Sequence
  Description of Artificial Sequence: Synthetic oligonucleotide
  Antisense strand to SEQ ID NO: 1847951
ugacuugucucgaagucga

SEQ ID NO: 1847953 - RNA, 19 nt, Artificial Sequence
  Description of Artificial Sequence: Synthetic oligonucleotide
  Sense strand starting at position 2480 of SEQ ID NO: 1564003
ucaguauucuauccugaga

SEQ ID NO: 1847954 - RNA, 19 nt, Artificial Sequence
  Description of Artificial Sequence: Synthetic oligonucleotide
  Antisense strand to SEQ ID NO: 1847953
ucucaggauagaauacuga

SEQ ID NO: 1847955 - RNA, 19 nt, Artificial Sequence
  Description of Artificial Sequence: Synthetic oligonucleotide
  Sense strand starting at position 2483 of SEQ ID NO: 1564003
guauucuauccugagagug

SEQ ID NO: 1847956 - RNA, 19 nt, Artificial Sequence
  Description of Artificial Sequence: Synthetic oligonucleotide
  Antisense strand to SEQ ID NO: 1847955
cacucucaggauagaauac

SEQ ID NO: 1847957 - RNA, 19 nt, Artificial Sequence
  Description of Artificial Sequence: Synthetic oligonucleotide
  Sense strand starting at position 2488 of SEQ ID NO: 1564003
cuauccugagaguguaaua

SEQ ID NO: 1847958 - RNA, 19 nt, Artificial Sequence
  Description of Artificial Sequence: Synthetic oligonucleotide
  Antisense strand to SEQ ID NO: 1847957
uauuacacucucaggauag

SEQ ID NO: 1847959 - RNA, 19 nt, Artificial Sequence
  Description of Artificial Sequence: Synthetic oligonucleotide
  Sense strand starting at position 2604 of SEQ ID NO: 1564003
uaguccuugccacagagaa

SEQ ID NO: 1847960 - RNA, 19 nt, Artificial Sequence
  Description of Artificial Sequence: Synthetic oligonucleotide
  Antisense strand to SEQ ID NO: 1847959
uucucuguggcaaggacua

SEQ ID NO: 1847961 - RNA, 19 nt, Artificial Sequence
  Description of Artificial Sequence: Synthetic oligonucleotide
  Sense strand starting at position 2700 of SEQ ID NO: 1564003
uucuaaagacugugaaggu

SEQ ID NO: 1847962 - RNA, 19 nt, Artificial Sequence
  Description of Artificial Sequence: Synthetic oligonucleotide
  Antisense strand to SEQ ID NO: 1847961
accuucacagucuuuagaa

SEQ ID NO: 1847963 - RNA, 19 nt, Artificial Sequence
  Description of Artificial Sequence: Synthetic oligonucleotide
  Sense strand starting at position 2907 of SEQ ID NO: 1564003
guuggaagacuccggagaa

SEQ ID NO: 1847964 - RNA, 19 nt, Artificial Sequence
  Description of Artificial Sequence: Synthetic oligonucleotide
  Antisense strand to SEQ ID NO: 1847963
uucuccggagucuuccaac

SEQ ID NO: 1847965 - RNA, 19 nt, Artificial Sequence
  Description of Artificial Sequence: Synthetic oligonucleotide
  Sense strand starting at position 2928 of SEQ ID NO: 1564003
aagguauggucuccuggaa

SEQ ID NO: 1847966 - RNA, 19 nt, Artificial Sequence
  Description of Artificial Sequence: Synthetic oligonucleotide
  Antisense strand to SEQ ID NO: 1847965
uuccaggagaccauaccuu

SEQ ID NO: 1847967 - RNA, 19 nt, Artificial Sequence
  Description of Artificial Sequence: Synthetic oligonucleotide
  Sense strand starting at position 2932 of SEQ ID NO: 1564003
uauggucuccuggaacuuu

SEQ ID NO: 1847968 - RNA, 19 nt, Artificial Sequence
  Description of Artificial Sequence: Synthetic oligonucleotide
  Antisense strand to SEQ ID NO: 1847967
aaaguuccaggagaccaua

SEQ ID NO: 1847969 - RNA, 19 nt, Artificial Sequence
  Description of Artificial Sequence: Synthetic oligonucleotide
  Sense strand starting at position 3292 of SEQ ID NO: 1564003
agacuaaggccaugugacu

SEQ ID NO: 1847970 - RNA, 19 nt, Artificial Sequence
  Description of Artificial Sequence: Synthetic oligonucleotide
  Antisense strand to SEQ ID NO: 1847969
agucacauggccuuagucu

SEQ ID NO: 1847971 - RNA, 19 nt, Artificial Sequence
  Description of Artificial Sequence: Synthetic oligonucleotide
  Sense strand starting at position 3298 of SEQ ID NO: 1564003
aggccaugugacugaugga

SEQ ID NO: 1847972 - RNA, 19 nt, Artificial Sequence
  Description of Artificial Sequence: Synthetic oligonucleotide
  Antisense strand to SEQ ID NO: 1847971
uccaucagucacauggccu

SEQ ID NO: 1847973 - RNA, 19 nt, Artificial Sequence
  Description of Artificial Sequence: Synthetic oligonucleotide
  Sense strand starting at position 3299 of SEQ ID NO: 1564003
ggccaugugacugauggaa

SEQ ID NO: 1847974 - RNA, 19 nt, Artificial Sequence
  Description of Artificial Sequence: Synthetic oligonucleotide
  Antisense strand to SEQ ID NO: 1847973
uuccaucagucacauggcc

SEQ ID NO: 1847975 - RNA, 19 nt, Artificial Sequence
  Description of Artificial Sequence: Synthetic oligonucleotide
  Sense strand starting at position 3382 of SEQ ID NO: 1564003
gaagcucaacuguaggauu

SEQ ID NO: 1847976 - RNA, 19 nt, Artificial Sequence
  Description of Artificial Sequence: Synthetic oligonucleotide
  Antisense strand to SEQ ID NO: 1847975
aauccuacaguugagcuuc

SEQ ID NO: 1847977 - RNA, 19 nt, Artificial Sequence
  Description of Artificial Sequence: Synthetic oligonucleotide
  Sense strand starting at position 3393 of SEQ ID NO: 1564003
guaggauugagccagcaau

SEQ ID NO: 1847978 - RNA, 19 nt, Artificial Sequence
  Description of Artificial Sequence: Synthetic oligonucleotide
  Antisense strand to SEQ ID NO: 1847977
auugcuggcucaauccuac

SEQ ID NO: 1847979 - RNA, 19 nt, Artificial Sequence
  Description of Artificial Sequence: Synthetic oligonucleotide
  Sense strand starting at position 3432 of SEQ ID NO: 1564003
ucggaauggcccuggagaa

SEQ ID NO: 1847980 - RNA, 19 nt, Artificial Sequence
  Description of Artificial Sequence: Synthetic oligonucleotide
  Antisense strand to SEQ ID NO: 1847979
uucuccagggccauuccga

SEQ ID NO: 1847981 - RNA, 19 nt, Artificial Sequence
  Description of Artificial Sequence: Synthetic oligonucleotide
  Sense strand starting at position 64 of SEQ ID NO: 1564004
cuacuacauuugggacaaa

SEQ ID NO: 1847982 - RNA, 19 nt, Artificial Sequence
  Description of Artificial Sequence: Synthetic oligonucleotide
  Antisense strand to SEQ ID NO: 1847981
uuugucccaaauguaguag

SEQ ID NO: 1847983 - RNA, 19 nt, Artificial Sequence
  Description of Artificial Sequence: Synthetic oligonucleotide
  Sense strand starting at position 75 of SEQ ID NO: 1564004
gggacaaaguucuugcaga

SEQ ID NO: 1847984 - RNA, 19 nt, Artificial Sequence
  Description of Artificial Sequence: Synthetic oligonucleotide
  Antisense strand to SEQ ID NO: 1847983
ucugcaagaacuuuguccc

SEQ ID NO: 1847985 - RNA, 19 nt, Artificial Sequence
  Description of Artificial Sequence: Synthetic oligonucleotide
  Sense strand starting at position 80 of SEQ ID NO: 1564004
aaaguucuugcagauggua

SEQ ID NO: 1847986 - RNA, 19 nt, Artificial Sequence
  Description of Artificial Sequence: Synthetic oligonucleotide
  Antisense strand to SEQ ID NO: 1847985
uaccaucugcaagaacuuu

SEQ ID NO: 1847987 - RNA, 19 nt, Artificial Sequence
  Description of Artificial Sequence: Synthetic oligonucleotide
  Sense strand starting at position 82 of SEQ ID NO: 1564004
aguucuugcagaugguagu

SEQ ID NO: 1847988 - RNA, 19 nt, Artificial Sequence
  Description of Artificial Sequence: Synthetic oligonucleotide
  Antisense strand to SEQ ID NO: 1847987
acuaccaucugcaagaacu

SEQ ID NO: 1847989 - RNA, 19 nt, Artificial Sequence
  Description of Artificial Sequence: Synthetic oligonucleotide
  Sense strand starting at position 98 of SEQ ID NO: 1564004
agucuagugcauugacaaa

SEQ ID NO: 1847990 - RNA, 19 nt, Artificial Sequence
  Description of Artificial Sequence: Synthetic oligonucleotide
  Antisense strand to SEQ ID NO: 1847989
uuugucaaugcacuagacu

SEQ ID NO: 1847991 - RNA, 19 nt, Artificial Sequence
  Description of Artificial Sequence: Synthetic oligonucleotide
  Sense strand starting at position 144 of SEQ ID NO: 1564004
agguccuugugucugacaa

SEQ ID NO: 1847992 - RNA, 19 nt, Artificial Sequence
  Description of Artificial Sequence: Synthetic oligonucleotide
  Antisense strand to SEQ ID NO: 1847991
uugucagacacaaggaccu

SEQ ID NO: 1847993 - RNA, 19 nt, Artificial Sequence
  Description of Artificial Sequence: Synthetic oligonucleotide
  Sense strand starting at position 145 of SEQ ID NO: 1564004
gguccuugugucugacaag

SEQ ID NO: 1847994 - RNA, 19 nt, Artificial Sequence
  Description of Artificial Sequence: Synthetic oligonucleotide
  Antisense strand to SEQ ID NO: 1847993
cuugucagacacaaggacc

SEQ ID NO: 1847995 - RNA, 19 nt, Artificial Sequence
  Description of Artificial Sequence: Synthetic oligonucleotide
  Sense strand starting at position 214 of SEQ ID NO: 1564004
gggccagacuuuccuccau

SEQ ID NO: 1847996 - RNA, 19 nt, Artificial Sequence
  Description of Artificial Sequence: Synthetic oligonucleotide
  Antisense strand to SEQ ID NO: 1847995
auggaggaaagucuggccc

SEQ ID NO: 1847997 - RNA, 19 nt, Artificial Sequence
  Description of Artificial Sequence: Synthetic oligonucleotide
  Sense strand starting at position 216 of SEQ ID NO: 1564004
gccagacuuuccuccaugu
